United States Patent Application Publication US 2026/0226133 A1 - sequence listing, part 12

SEQ ID NO: 25914 - DNA, 729 bp, synthetic construct
  source 1..729: mol_type = other DNA
gacagcaacagcgtgacctgctccgtgcagcacgacaacaagaccgtgcacagcaccgactttgaagtgaaaaccgactccaccgaccacgtgaagcccaaagagacagagaacaccaagcagcccagcaagagctgccacaagcccaaggccatcgtgcacaccgagaaagtgaacatgatgagcctgaccgtgctgggcctgcggatgctgttcgccaaaaccgtggccgtgaacttcctgctgaccgccaagctgttcttcctcaggagtaagaggagcaggctcctgcacagtgactacatgaacatgactccacgccgccccggacccacccgcaagcattaccagccctatgccccaccacgcgacttcgcagcctatcgctccagagtgaagttcagcagaagcgccgacgcccctgcctaccagcagggacagaaccaactgtacaacgagctgaacctgggcagacgggaagagtacgacgtgctggacaagcggagaggcagggaccctgagatgggcggaaagccccagcggagaaagaacccccaggaaggactgtataacgaactccagaaagacaagatggccgaagcctacagcgagatcggcatgaagggcgagcggagaagaggcaagggccacgatggcctgtaccagggcctgagcaccgccaccaaggacacctatgacgccctgcacatgcaggccctgcctccaaga

SEQ ID NO: 25915 - DNA, 726 bp, synthetic construct
  source 1..726: mol_type = other DNA
agcaacagcgtgacctgctccgtgcagcacgacaacaagaccgtgcacagcaccgactttgaagtgaaaaccgactccaccgaccacgtgaagcccaaagagacagagaacaccaagcagcccagcaagagctgccacaagcccaaggccatcgtgcacaccgagaaagtgaacatgatgagcctgaccgtgctgggcctgcggatgctgttcgccaaaaccgtggccgtgaacttcctgctgaccgccaagctgttcttcctcaggagtaagaggagcaggctcctgcacagtgactacatgaacatgactccacgccgccccggacccacccgcaagcattaccagccctatgccccaccacgcgacttcgcagcctatcgctccagagtgaagttcagcagaagcgccgacgcccctgcctaccagcagggacagaaccaactgtacaacgagctgaacctgggcagacgggaagagtacgacgtgctggacaagcggagaggcagggaccctgagatgggcggaaagccccagcggagaaagaacccccaggaaggactgtataacgaactccagaaagacaagatggccgaagcctacagcgagatcggcatgaagggcgagcggagaagaggcaagggccacgatggcctgtaccagggcctgagcaccgccaccaaggacacctatgacgccctgcacatgcaggccctgcctccaaga

SEQ ID NO: 25916 - DNA, 723 bp, synthetic construct
  source 1..723: mol_type = other DNA
aacagcgtgacctgctccgtgcagcacgacaacaagaccgtgcacagcaccgactttgaagtgaaaaccgactccaccgaccacgtgaagcccaaagagacagagaacaccaagcagcccagcaagagctgccacaagcccaaggccatcgtgcacaccgagaaagtgaacatgatgagcctgaccgtgctgggcctgcggatgctgttcgccaaaaccgtggccgtgaacttcctgctgaccgccaagctgttcttcctcaggagtaagaggagcaggctcctgcacagtgactacatgaacatgactccacgccgccccggacccacccgcaagcattaccagccctatgccccaccacgcgacttcgcagcctatcgctccagagtgaagttcagcagaagcgccgacgcccctgcctaccagcagggacagaaccaactgtacaacgagctgaacctgggcagacgggaagagtacgacgtgctggacaagcggagaggcagggaccctgagatgggcggaaagccccagcggagaaagaacccccaggaaggactgtataacgaactccagaaagacaagatggccgaagcctacagcgagatcggcatgaagggcgagcggagaagaggcaagggccacgatggcctgtaccagggcctgagcaccgccaccaaggacacctatgacgccctgcacatgcaggccctgcctccaaga

SEQ ID NO: 25917 - DNA, 720 bp, synthetic construct
  source 1..720: mol_type = other DNA
agcgtgacctgctccgtgcagcacgacaacaagaccgtgcacagcaccgactttgaagtgaaaaccgactccaccgaccacgtgaagcccaaagagacagagaacaccaagcagcccagcaagagctgccacaagcccaaggccatcgtgcacaccgagaaagtgaacatgatgagcctgaccgtgctgggcctgcggatgctgttcgccaaaaccgtggccgtgaacttcctgctgaccgccaagctgttcttcctcaggagtaagaggagcaggctcctgcacagtgactacatgaacatgactccacgccgccccggacccacccgcaagcattaccagccctatgccccaccacgcgacttcgcagcctatcgctccagagtgaagttcagcagaagcgccgacgcccctgcctaccagcagggacagaaccaactgtacaacgagctgaacctgggcagacgggaagagtacgacgtgctggacaagcggagaggcagggaccctgagatgggcggaaagccccagcggagaaagaacccccaggaaggactgtataacgaactccagaaagacaagatggccgaagcctacagcgagatcggcatgaagggcgagcggagaagaggcaagggccacgatggcctgtaccagggcctgagcaccgccaccaaggacacctatgacgccctgcacatgcaggccctgcctccaaga

SEQ ID NO: 25918 - DNA, 717 bp, synthetic construct
  source 1..717: mol_type = other DNA
gtgacctgctccgtgcagcacgacaacaagaccgtgcacagcaccgactttgaagtgaaaaccgactccaccgaccacgtgaagcccaaagagacagagaacaccaagcagcccagcaagagctgccacaagcccaaggccatcgtgcacaccgagaaagtgaacatgatgagcctgaccgtgctgggcctgcggatgctgttcgccaaaaccgtggccgtgaacttcctgctgaccgccaagctgttcttcctcaggagtaagaggagcaggctcctgcacagtgactacatgaacatgactccacgccgccccggacccacccgcaagcattaccagccctatgccccaccacgcgacttcgcagcctatcgctccagagtgaagttcagcagaagcgccgacgcccctgcctaccagcagggacagaaccaactgtacaacgagctgaacctgggcagacgggaagagtacgacgtgctggacaagcggagaggcagggaccctgagatgggcggaaagccccagcggagaaagaacccccaggaaggactgtataacgaactccagaaagacaagatggccgaagcctacagcgagatcggcatgaagggcgagcggagaagaggcaagggccacgatggcctgtaccagggcctgagcaccgccaccaaggacacctatgacgccctgcacatgcaggccctgcctccaaga

SEQ ID NO: 25919 - DNA, 714 bp, synthetic construct
  source 1..714: mol_type = other DNA
acctgctccgtgcagcacgacaacaagaccgtgcacagcaccgactttgaagtgaaaaccgactccaccgaccacgtgaagcccaaagagacagagaacaccaagcagcccagcaagagctgccacaagcccaaggccatcgtgcacaccgagaaagtgaacatgatgagcctgaccgtgctgggcctgcggatgctgttcgccaaaaccgtggccgtgaacttcctgctgaccgccaagctgttcttcctcaggagtaagaggagcaggctcctgcacagtgactacatgaacatgactccacgccgccccggacccacccgcaagcattaccagccctatgccccaccacgcgacttcgcagcctatcgctccagagtgaagttcagcagaagcgccgacgcccctgcctaccagcagggacagaaccaactgtacaacgagctgaacctgggcagacgggaagagtacgacgtgctggacaagcggagaggcagggaccctgagatgggcggaaagccccagcggagaaagaacccccaggaaggactgtataacgaactccagaaagacaagatggccgaagcctacagcgagatcggcatgaagggcgagcggagaagaggcaagggccacgatggcctgtaccagggcctgagcaccgccaccaaggacacctatgacgccctgcacatgcaggccctgcctccaaga

SEQ ID NO: 25920 - DNA, 711 bp, synthetic construct
  source 1..711: mol_type = other DNA
tgctccgtgcagcacgacaacaagaccgtgcacagcaccgactttgaagtgaaaaccgactccaccgaccacgtgaagcccaaagagacagagaacaccaagcagcccagcaagagctgccacaagcccaaggccatcgtgcacaccgagaaagtgaacatgatgagcctgaccgtgctgggcctgcggatgctgttcgccaaaaccgtggccgtgaacttcctgctgaccgccaagctgttcttcctcaggagtaagaggagcaggctcctgcacagtgactacatgaacatgactccacgccgccccggacccacccgcaagcattaccagccctatgccccaccacgcgacttcgcagcctatcgctccagagtgaagttcagcagaagcgccgacgcccctgcctaccagcagggacagaaccaactgtacaacgagctgaacctgggcagacgggaagagtacgacgtgctggacaagcggagaggcagggaccctgagatgggcggaaagccccagcggagaaagaacccccaggaaggactgtataacgaactccagaaagacaagatggccgaagcctacagcgagatcggcatgaagggcgagcggagaagaggcaagggccacgatggcctgtaccagggcctgagcaccgccaccaaggacacctatgacgccctgcacatgcaggccctgcctccaaga

SEQ ID NO: 25921 - DNA, 708 bp, synthetic construct
  source 1..708: mol_type = other DNA
tccgtgcagcacgacaacaagaccgtgcacagcaccgactttgaagtgaaaaccgactccaccgaccacgtgaagcccaaagagacagagaacaccaagcagcccagcaagagctgccacaagcccaaggccatcgtgcacaccgagaaagtgaacatgatgagcctgaccgtgctgggcctgcggatgctgttcgccaaaaccgtggccgtgaacttcctgctgaccgccaagctgttcttcctcaggagtaagaggagcaggctcctgcacagtgactacatgaacatgactccacgccgccccggacccacccgcaagcattaccagccctatgccccaccacgcgacttcgcagcctatcgctccagagtgaagttcagcagaagcgccgacgcccctgcctaccagcagggacagaaccaactgtacaacgagctgaacctgggcagacgggaagagtacgacgtgctggacaagcggagaggcagggaccctgagatgggcggaaagccccagcggagaaagaacccccaggaaggactgtataacgaactccagaaagacaagatggccgaagcctacagcgagatcggcatgaagggcgagcggagaagaggcaagggccacgatggcctgtaccagggcctgagcaccgccaccaaggacacctatgacgccctgcacatgcaggccctgcctccaaga

SEQ ID NO: 25922 - DNA, 705 bp, synthetic construct
  source 1..705: mol_type = other DNA
gtgcagcacgacaacaagaccgtgcacagcaccgactttgaagtgaaaaccgactccaccgaccacgtgaagcccaaagagacagagaacaccaagcagcccagcaagagctgccacaagcccaaggccatcgtgcacaccgagaaagtgaacatgatgagcctgaccgtgctgggcctgcggatgctgttcgccaaaaccgtggccgtgaacttcctgctgaccgccaagctgttcttcctcaggagtaagaggagcaggctcctgcacagtgactacatgaacatgactccacgccgccccggacccacccgcaagcattaccagccctatgccccaccacgcgacttcgcagcctatcgctccagagtgaagttcagcagaagcgccgacgcccctgcctaccagcagggacagaaccaactgtacaacgagctgaacctgggcagacgggaagagtacgacgtgctggacaagcggagaggcagggaccctgagatgggcggaaagccccagcggagaaagaacccccaggaaggactgtataacgaactccagaaagacaagatggccgaagcctacagcgagatcggcatgaagggcgagcggagaagaggcaagggccacgatggcctgtaccagggcctgagcaccgccaccaaggacacctatgacgccctgcacatgcaggccctgcctccaaga

SEQ ID NO: 25923 - DNA, 702 bp, synthetic construct
  source 1..702: mol_type = other DNA
cagcacgacaacaagaccgtgcacagcaccgactttgaagtgaaaaccgactccaccgaccacgtgaagcccaaagagacagagaacaccaagcagcccagcaagagctgccacaagcccaaggccatcgtgcacaccgagaaagtgaacatgatgagcctgaccgtgctgggcctgcggatgctgttcgccaaaaccgtggccgtgaacttcctgctgaccgccaagctgttcttcctcaggagtaagaggagcaggctcctgcacagtgactacatgaacatgactccacgccgccccggacccacccgcaagcattaccagccctatgccccaccacgcgacttcgcagcctatcgctccagagtgaagttcagcagaagcgccgacgcccctgcctaccagcagggacagaaccaactgtacaacgagctgaacctgggcagacgggaagagtacgacgtgctggacaagcggagaggcagggaccctgagatgggcggaaagccccagcggagaaagaacccccaggaaggactgtataacgaactccagaaagacaagatggccgaagcctacagcgagatcggcatgaagggcgagcggagaagaggcaagggccacgatggcctgtaccagggcctgagcaccgccaccaaggacacctatgacgccctgcacatgcaggccctgcctccaaga

SEQ ID NO: 25924 - DNA, 699 bp, synthetic construct
  source 1..699: mol_type = other DNA
cacgacaacaagaccgtgcacagcaccgactttgaagtgaaaaccgactccaccgaccacgtgaagcccaaagagacagagaacaccaagcagcccagcaagagctgccacaagcccaaggccatcgtgcacaccgagaaagtgaacatgatgagcctgaccgtgctgggcctgcggatgctgttcgccaaaaccgtggccgtgaacttcctgctgaccgccaagctgttcttcctcaggagtaagaggagcaggctcctgcacagtgactacatgaacatgactccacgccgccccggacccacccgcaagcattaccagccctatgccccaccacgcgacttcgcagcctatcgctccagagtgaagttcagcagaagcgccgacgcccctgcctaccagcagggacagaaccaactgtacaacgagctgaacctgggcagacgggaagagtacgacgtgctggacaagcggagaggcagggaccctgagatgggcggaaagccccagcggagaaagaacccccaggaaggactgtataacgaactccagaaagacaagatggccgaagcctacagcgagatcggcatgaagggcgagcggagaagaggcaagggccacgatggcctgtaccagggcctgagcaccgccaccaaggacacctatgacgccctgcacatgcaggccctgcctccaaga

SEQ ID NO: 25925 - DNA, 696 bp, synthetic construct
  source 1..696: mol_type = other DNA
gacaacaagaccgtgcacagcaccgactttgaagtgaaaaccgactccaccgaccacgtgaagcccaaagagacagagaacaccaagcagcccagcaagagctgccacaagcccaaggccatcgtgcacaccgagaaagtgaacatgatgagcctgaccgtgctgggcctgcggatgctgttcgccaaaaccgtggccgtgaacttcctgctgaccgccaagctgttcttcctcaggagtaagaggagcaggctcctgcacagtgactacatgaacatgactccacgccgccccggacccacccgcaagcattaccagccctatgccccaccacgcgacttcgcagcctatcgctccagagtgaagttcagcagaagcgccgacgcccctgcctaccagcagggacagaaccaactgtacaacgagctgaacctgggcagacgggaagagtacgacgtgctggacaagcggagaggcagggaccctgagatgggcggaaagccccagcggagaaagaacccccaggaaggactgtataacgaactccagaaagacaagatggccgaagcctacagcgagatcggcatgaagggcgagcggagaagaggcaagggccacgatggcctgtaccagggcctgagcaccgccaccaaggacacctatgacgccctgcacatgcaggccctgcctccaaga

SEQ ID NO: 25926 - DNA, 693 bp, synthetic construct
  source 1..693: mol_type = other DNA
aacaagaccgtgcacagcaccgactttgaagtgaaaaccgactccaccgaccacgtgaagcccaaagagacagagaacaccaagcagcccagcaagagctgccacaagcccaaggccatcgtgcacaccgagaaagtgaacatgatgagcctgaccgtgctgggcctgcggatgctgttcgccaaaaccgtggccgtgaacttcctgctgaccgccaagctgttcttcctcaggagtaagaggagcaggctcctgcacagtgactacatgaacatgactccacgccgccccggacccacccgcaagcattaccagccctatgccccaccacgcgacttcgcagcctatcgctccagagtgaagttcagcagaagcgccgacgcccctgcctaccagcagggacagaaccaactgtacaacgagctgaacctgggcagacgggaagagtacgacgtgctggacaagcggagaggcagggaccctgagatgggcggaaagccccagcggagaaagaacccccaggaaggactgtataacgaactccagaaagacaagatggccgaagcctacagcgagatcggcatgaagggcgagcggagaagaggcaagggccacgatggcctgtaccagggcctgagcaccgccaccaaggacacctatgacgccctgcacatgcaggccctgcctccaaga

SEQ ID NO: 25927 - DNA, 690 bp, synthetic construct
  source 1..690: mol_type = other DNA
aagaccgtgcacagcaccgactttgaagtgaaaaccgactccaccgaccacgtgaagcccaaagagacagagaacaccaagcagcccagcaagagctgccacaagcccaaggccatcgtgcacaccgagaaagtgaacatgatgagcctgaccgtgctgggcctgcggatgctgttcgccaaaaccgtggccgtgaacttcctgctgaccgccaagctgttcttcctcaggagtaagaggagcaggctcctgcacagtgactacatgaacatgactccacgccgccccggacccacccgcaagcattaccagccctatgccccaccacgcgacttcgcagcctatcgctccagagtgaagttcagcagaagcgccgacgcccctgcctaccagcagggacagaaccaactgtacaacgagctgaacctgggcagacgggaagagtacgacgtgctggacaagcggagaggcagggaccctgagatgggcggaaagccccagcggagaaagaacccccaggaaggactgtataacgaactccagaaagacaagatggccgaagcctacagcgagatcggcatgaagggcgagcggagaagaggcaagggccacgatggcctgtaccagggcctgagcaccgccaccaaggacacctatgacgccctgcacatgcaggccctgcctccaaga

SEQ ID NO: 25928 - DNA, 687 bp, synthetic construct
  source 1..687: mol_type = other DNA
accgtgcacagcaccgactttgaagtgaaaaccgactccaccgaccacgtgaagcccaaagagacagagaacaccaagcagcccagcaagagctgccacaagcccaaggccatcgtgcacaccgagaaagtgaacatgatgagcctgaccgtgctgggcctgcggatgctgttcgccaaaaccgtggccgtgaacttcctgctgaccgccaagctgttcttcctcaggagtaagaggagcaggctcctgcacagtgactacatgaacatgactccacgccgccccggacccacccgcaagcattaccagccctatgccccaccacgcgacttcgcagcctatcgctccagagtgaagttcagcagaagcgccgacgcccctgcctaccagcagggacagaaccaactgtacaacgagctgaacctgggcagacgggaagagtacgacgtgctggacaagcggagaggcagggaccctgagatgggcggaaagccccagcggagaaagaacccccaggaaggactgtataacgaactccagaaagacaagatggccgaagcctacagcgagatcggcatgaagggcgagcggagaagaggcaagggccacgatggcctgtaccagggcctgagcaccgccaccaaggacacctatgacgccctgcacatgcaggccctgcctccaaga

SEQ ID NO: 25929 - DNA, 684 bp, synthetic construct
  source 1..684: mol_type = other DNA
gtgcacagcaccgactttgaagtgaaaaccgactccaccgaccacgtgaagcccaaagagacagagaacaccaagcagcccagcaagagctgccacaagcccaaggccatcgtgcacaccgagaaagtgaacatgatgagcctgaccgtgctgggcctgcggatgctgttcgccaaaaccgtggccgtgaacttcctgctgaccgccaagctgttcttcctcaggagtaagaggagcaggctcctgcacagtgactacatgaacatgactccacgccgccccggacccacccgcaagcattaccagccctatgccccaccacgcgacttcgcagcctatcgctccagagtgaagttcagcagaagcgccgacgcccctgcctaccagcagggacagaaccaactgtacaacgagctgaacctgggcagacgggaagagtacgacgtgctggacaagcggagaggcagggaccctgagatgggcggaaagccccagcggagaaagaacccccaggaaggactgtataacgaactccagaaagacaagatggccgaagcctacagcgagatcggcatgaagggcgagcggagaagaggcaagggccacgatggcctgtaccagggcctgagcaccgccaccaaggacacctatgacgccctgcacatgcaggccctgcctccaaga

SEQ ID NO: 25930 - DNA, 681 bp, synthetic construct
  source 1..681: mol_type = other DNA
cacagcaccgactttgaagtgaaaaccgactccaccgaccacgtgaagcccaaagagacagagaacaccaagcagcccagcaagagctgccacaagcccaaggccatcgtgcacaccgagaaagtgaacatgatgagcctgaccgtgctgggcctgcggatgctgttcgccaaaaccgtggccgtgaacttcctgctgaccgccaagctgttcttcctcaggagtaagaggagcaggctcctgcacagtgactacatgaacatgactccacgccgccccggacccacccgcaagcattaccagccctatgccccaccacgcgacttcgcagcctatcgctccagagtgaagttcagcagaagcgccgacgcccctgcctaccagcagggacagaaccaactgtacaacgagctgaacctgggcagacgggaagagtacgacgtgctggacaagcggagaggcagggaccctgagatgggcggaaagccccagcggagaaagaacccccaggaaggactgtataacgaactccagaaagacaagatggccgaagcctacagcgagatcggcatgaagggcgagcggagaagaggcaagggccacgatggcctgtaccagggcctgagcaccgccaccaaggacacctatgacgccctgcacatgcaggccctgcctccaaga

SEQ ID NO: 25931 - DNA, 678 bp, synthetic construct
  source 1..678: mol_type = other DNA
agcaccgactttgaagtgaaaaccgactccaccgaccacgtgaagcccaaagagacagagaacaccaagcagcccagcaagagctgccacaagcccaaggccatcgtgcacaccgagaaagtgaacatgatgagcctgaccgtgctgggcctgcggatgctgttcgccaaaaccgtggccgtgaacttcctgctgaccgccaagctgttcttcctcaggagtaagaggagcaggctcctgcacagtgactacatgaacatgactccacgccgccccggacccacccgcaagcattaccagccctatgccccaccacgcgacttcgcagcctatcgctccagagtgaagttcagcagaagcgccgacgcccctgcctaccagcagggacagaaccaactgtacaacgagctgaacctgggcagacgggaagagtacgacgtgctggacaagcggagaggcagggaccctgagatgggcggaaagccccagcggagaaagaacccccaggaaggactgtataacgaactccagaaagacaagatggccgaagcctacagcgagatcggcatgaagggcgagcggagaagaggcaagggccacgatggcctgtaccagggcctgagcaccgccaccaaggacacctatgacgccctgcacatgcaggccctgcctccaaga

SEQ ID NO: 25932 - DNA, 675 bp, synthetic construct
  source 1..675: mol_type = other DNA
accgactttgaagtgaaaaccgactccaccgaccacgtgaagcccaaagagacagagaacaccaagcagcccagcaagagctgccacaagcccaaggccatcgtgcacaccgagaaagtgaacatgatgagcctgaccgtgctgggcctgcggatgctgttcgccaaaaccgtggccgtgaacttcctgctgaccgccaagctgttcttcctcaggagtaagaggagcaggctcctgcacagtgactacatgaacatgactccacgccgccccggacccacccgcaagcattaccagccctatgccccaccacgcgacttcgcagcctatcgctccagagtgaagttcagcagaagcgccgacgcccctgcctaccagcagggacagaaccaactgtacaacgagctgaacctgggcagacgggaagagtacgacgtgctggacaagcggagaggcagggaccctgagatgggcggaaagccccagcggagaaagaacccccaggaaggactgtataacgaactccagaaagacaagatggccgaagcctacagcgagatcggcatgaagggcgagcggagaagaggcaagggccacgatggcctgtaccagggcctgagcaccgccaccaaggacacctatgacgccctgcacatgcaggccctgcctccaaga

SEQ ID NO: 25933 - DNA, 672 bp, synthetic construct
  source 1..672: mol_type = other DNA
gactttgaagtgaaaaccgactccaccgaccacgtgaagcccaaagagacagagaacaccaagcagcccagcaagagctgccacaagcccaaggccatcgtgcacaccgagaaagtgaacatgatgagcctgaccgtgctgggcctgcggatgctgttcgccaaaaccgtggccgtgaacttcctgctgaccgccaagctgttcttcctcaggagtaagaggagcaggctcctgcacagtgactacatgaacatgactccacgccgccccggacccacccgcaagcattaccagccctatgccccaccacgcgacttcgcagcctatcgctccagagtgaagttcagcagaagcgccgacgcccctgcctaccagcagggacagaaccaactgtacaacgagctgaacctgggcagacgggaagagtacgacgtgctggacaagcggagaggcagggaccctgagatgggcggaaagccccagcggagaaagaacccccaggaaggactgtataacgaactccagaaagacaagatggccgaagcctacagcgagatcggcatgaagggcgagcggagaagaggcaagggccacgatggcctgtaccagggcctgagcaccgccaccaaggacacctatgacgccctgcacatgcaggccctgcctccaaga

SEQ ID NO: 25934 - DNA, 669 bp, synthetic construct
  source 1..669: mol_type = other DNA
tttgaagtgaaaaccgactccaccgaccacgtgaagcccaaagagacagagaacaccaagcagcccagcaagagctgccacaagcccaaggccatcgtgcacaccgagaaagtgaacatgatgagcctgaccgtgctgggcctgcggatgctgttcgccaaaaccgtggccgtgaacttcctgctgaccgccaagctgttcttcctcaggagtaagaggagcaggctcctgcacagtgactacatgaacatgactccacgccgccccggacccacccgcaagcattaccagccctatgccccaccacgcgacttcgcagcctatcgctccagagtgaagttcagcagaagcgccgacgcccctgcctaccagcagggacagaaccaactgtacaacgagctgaacctgggcagacgggaagagtacgacgtgctggacaagcggagaggcagggaccctgagatgggcggaaagccccagcggagaaagaacccccaggaaggactgtataacgaactccagaaagacaagatggccgaagcctacagcgagatcggcatgaagggcgagcggagaagaggcaagggccacgatggcctgtaccagggcctgagcaccgccaccaaggacacctatgacgccctgcacatgcaggccctgcctccaaga

SEQ ID NO: 25935 - DNA, 666 bp, synthetic construct; identical to SEQ ID NO: 25300
  source 1..666: mol_type = other DNA

SEQ ID NO: 25936 - DNA, 663 bp, synthetic construct
  source 1..663: mol_type = other DNA
gtgaaaaccgactccaccgaccacgtgaagcccaaagagacagagaacaccaagcagcccagcaagagctgccacaagcccaaggccatcgtgcacaccgagaaagtgaacatgatgagcctgaccgtgctgggcctgcggatgctgttcgccaaaaccgtggccgtgaacttcctgctgaccgccaagctgttcttcctcaggagtaagaggagcaggctcctgcacagtgactacatgaacatgactccacgccgccccggacccacccgcaagcattaccagccctatgccccaccacgcgacttcgcagcctatcgctccagagtgaagttcagcagaagcgccgacgcccctgcctaccagcagggacagaaccaactgtacaacgagctgaacctgggcagacgggaagagtacgacgtgctggacaagcggagaggcagggaccctgagatgggcggaaagccccagcggagaaagaacccccaggaaggactgtataacgaactccagaaagacaagatggccgaagcctacagcgagatcggcatgaagggcgagcggagaagaggcaagggccacgatggcctgtaccagggcctgagcaccgccaccaaggacacctatgacgccctgcacatgcaggccctgcctccaaga

SEQ ID NO: 25937 - DNA, 660 bp, synthetic construct
  source 1..660: mol_type = other DNA
aaaaccgactccaccgaccacgtgaagcccaaagagacagagaacaccaagcagcccagcaagagctgccacaagcccaaggccatcgtgcacaccgagaaagtgaacatgatgagcctgaccgtgctgggcctgcggatgctgttcgccaaaaccgtggccgtgaacttcctgctgaccgccaagctgttcttcctcaggagtaagaggagcaggctcctgcacagtgactacatgaacatgactccacgccgccccggacccacccgcaagcattaccagccctatgccccaccacgcgacttcgcagcctatcgctccagagtgaagttcagcagaagcgccgacgcccctgcctaccagcagggacagaaccaactgtacaacgagctgaacctgggcagacgggaagagtacgacgtgctggacaagcggagaggcagggaccctgagatgggcggaaagccccagcggagaaagaacccccaggaaggactgtataacgaactccagaaagacaagatggccgaagcctacagcgagatcggcatgaagggcgagcggagaagaggcaagggccacgatggcctgtaccagggcctgagcaccgccaccaaggacacctatgacgccctgcacatgcaggccctgcctccaaga

SEQ ID NO: 25938 - DNA, 657 bp, synthetic construct
  source 1..657: mol_type = other DNA
accgactccaccgaccacgtgaagcccaaagagacagagaacaccaagcagcccagcaagagctgccacaagcccaaggccatcgtgcacaccgagaaagtgaacatgatgagcctgaccgtgctgggcctgcggatgctgttcgccaaaaccgtggccgtgaacttcctgctgaccgccaagctgttcttcctcaggagtaagaggagcaggctcctgcacagtgactacatgaacatgactccacgccgccccggacccacccgcaagcattaccagccctatgccccaccacgcgacttcgcagcctatcgctccagagtgaagttcagcagaagcgccgacgcccctgcctaccagcagggacagaaccaactgtacaacgagctgaacctgggcagacgggaagagtacgacgtgctggacaagcggagaggcagggaccctgagatgggcggaaagccccagcggagaaagaacccccaggaaggactgtataacgaactccagaaagacaagatggccgaagcctacagcgagatcggcatgaagggcgagcggagaagaggcaagggccacgatggcctgtaccagggcctgagcaccgccaccaaggacacctatgacgccctgcacatgcaggccctgcctccaaga

SEQ ID NO: 25939 - DNA, 654 bp, synthetic construct
  source 1..654: mol_type = other DNA
gactccaccgaccacgtgaagcccaaagagacagagaacaccaagcagcccagcaagagctgccacaagcccaaggccatcgtgcacaccgagaaagtgaacatgatgagcctgaccgtgctgggcctgcggatgctgttcgccaaaaccgtggccgtgaacttcctgctgaccgccaagctgttcttcctcaggagtaagaggagcaggctcctgcacagtgactacatgaacatgactccacgccgccccggacccacccgcaagcattaccagccctatgccccaccacgcgacttcgcagcctatcgctccagagtgaagttcagcagaagcgccgacgcccctgcctaccagcagggacagaaccaactgtacaacgagctgaacctgggcagacgggaagagtacgacgtgctggacaagcggagaggcagggaccctgagatgggcggaaagccccagcggagaaagaacccccaggaaggactgtataacgaactccagaaagacaagatggccgaagcctacagcgagatcggcatgaagggcgagcggagaagaggcaagggccacgatggcctgtaccagggcctgagcaccgccaccaaggacacctatgacgccctgcacatgcaggccctgcctccaaga

SEQ ID NO: 25940 - DNA, 651 bp, synthetic construct
  source 1..651: mol_type = other DNA
tccaccgaccacgtgaagcccaaagagacagagaacaccaagcagcccagcaagagctgccacaagcccaaggccatcgtgcacaccgagaaagtgaacatgatgagcctgaccgtgctgggcctgcggatgctgttcgccaaaaccgtggccgtgaacttcctgctgaccgccaagctgttcttcctcaggagtaagaggagcaggctcctgcacagtgactacatgaacatgactccacgccgccccggacccacccgcaagcattaccagccctatgccccaccacgcgacttcgcagcctatcgctccagagtgaagttcagcagaagcgccgacgcccctgcctaccagcagggacagaaccaactgtacaacgagctgaacctgggcagacgggaagagtacgacgtgctggacaagcggagaggcagggaccctgagatgggcggaaagccccagcggagaaagaacccccaggaaggactgtataacgaactccagaaagacaagatggccgaagcctacagcgagatcggcatgaagggcgagcggagaagaggcaagggccacgatggcctgtaccagggcctgagcaccgccaccaaggacacctatgacgccctgcacatgcaggccctgcctccaaga

SEQ ID NO: 25941 - DNA, 648 bp, synthetic construct
  source 1..648: mol_type = other DNA
accgaccacgtgaagcccaaagagacagagaacaccaagcagcccagcaagagctgccacaagcccaaggccatcgtgcacaccgagaaagtgaacatgatgagcctgaccgtgctgggcctgcggatgctgttcgccaaaaccgtggccgtgaacttcctgctgaccgccaagctgttcttcctcaggagtaagaggagcaggctcctgcacagtgactacatgaacatgactccacgccgccccggacccacccgcaagcattaccagccctatgccccaccacgcgacttcgcagcctatcgctccagagtgaagttcagcagaagcgccgacgcccctgcctaccagcagggacagaaccaactgtacaacgagctgaacctgggcagacgggaagagtacgacgtgctggacaagcggagaggcagggaccctgagatgggcggaaagccccagcggagaaagaacccccaggaaggactgtataacgaactccagaaagacaagatggccgaagcctacagcgagatcggcatgaagggcgagcggagaagaggcaagggccacgatggcctgtaccagggcctgagcaccgccaccaaggacacctatgacgccctgcacatgcaggccctgcctccaaga

SEQ ID NO: 25942 - DNA, 645 bp, synthetic construct; identical to SEQ ID NO: 25301
  source 1..645: mol_type = other DNA

SEQ ID NO: 25943 - DNA, 642 bp, synthetic construct
  source 1..642: mol_type = other DNA
cacgtgaagcccaaagagacagagaacaccaagcagcccagcaagagctgccacaagcccaaggccatcgtgcacaccgagaaagtgaacatgatgagcctgaccgtgctgggcctgcggatgctgttcgccaaaaccgtggccgtgaacttcctgctgaccgccaagctgttcttcctcaggagtaagaggagcaggctcctgcacagtgactacatgaacatgactccacgccgccccggacccacccgcaagcattaccagccctatgccccaccacgcgacttcgcagcctatcgctccagagtgaagttcagcagaagcgccgacgcccctgcctaccagcagggacagaaccaactgtacaacgagctgaacctgggcagacgggaagagtacgacgtgctggacaagcggagaggcagggaccctgagatgggcggaaagccccagcggagaaagaacccccaggaaggactgtataacgaactccagaaagacaagatggccgaagcctacagcgagatcggcatgaagggcgagcggagaagaggcaagggccacgatggcctgtaccagggcctgagcaccgccaccaaggacacctatgacgccctgcacatgcaggccctgcctccaaga

SEQ ID NO: 25944 - DNA, 639 bp, synthetic construct
  source 1..639: mol_type = other DNA
gtgaagcccaaagagacagagaacaccaagcagcccagcaagagctgccacaagcccaaggccatcgtgcacaccgagaaagtgaacatgatgagcctgaccgtgctgggcctgcggatgctgttcgccaaaaccgtggccgtgaacttcctgctgaccgccaagctgttcttcctcaggagtaagaggagcaggctcctgcacagtgactacatgaacatgactccacgccgccccggacccacccgcaagcattaccagccctatgccccaccacgcgacttcgcagcctatcgctccagagtgaagttcagcagaagcgccgacgcccctgcctaccagcagggacagaaccaactgtacaacgagctgaacctgggcagacgggaagagtacgacgtgctggacaagcggagaggcagggaccctgagatgggcggaaagccccagcggagaaagaacccccaggaaggactgtataacgaactccagaaagacaagatggccgaagcctacagcgagatcggcatgaagggcgagcggagaagaggcaagggccacgatggcctgtaccagggcctgagcaccgccaccaaggacacctatgacgccctgcacatgcaggccctgcctccaaga

SEQ ID NO: 25945 - DNA, 636 bp, synthetic construct
  source 1..636: mol_type = other DNA
aagcccaaagagacagagaacaccaagcagcccagcaagagctgccacaagcccaaggccatcgtgcacaccgagaaagtgaacatgatgagcctgaccgtgctgggcctgcggatgctgttcgccaaaaccgtggccgtgaacttcctgctgaccgccaagctgttcttcctcaggagtaagaggagcaggctcctgcacagtgactacatgaacatgactccacgccgccccggacccacccgcaagcattaccagccctatgccccaccacgcgacttcgcagcctatcgctccagagtgaagttcagcagaagcgccgacgcccctgcctaccagcagggacagaaccaactgtacaacgagctgaacctgggcagacgggaagagtacgacgtgctggacaagcggagaggcagggaccctgagatgggcggaaagccccagcggagaaagaacccccaggaaggactgtataacgaactccagaaagacaagatggccgaagcctacagcgagatcggcatgaagggcgagcggagaagaggcaagggccacgatggcctgtaccagggcctgagcaccgccaccaaggacacctatgacgccctgcacatgcaggccctgcctccaaga

SEQ ID NO: 25946 - DNA, 633 bp, synthetic construct
  source 1..633: mol_type = other DNA
cccaaagagacagagaacaccaagcagcccagcaagagctgccacaagcccaaggccatcgtgcacaccgagaaagtgaacatgatgagcctgaccgtgctgggcctgcggatgctgttcgccaaaaccgtggccgtgaacttcctgctgaccgccaagctgttcttcctcaggagtaagaggagcaggctcctgcacagtgactacatgaacatgactccacgccgccccggacccacccgcaagcattaccagccctatgccccaccacgcgacttcgcagcctatcgctccagagtgaagttcagcagaagcgccgacgcccctgcctaccagcagggacagaaccaactgtacaacgagctgaacctgggcagacgggaagagtacgacgtgctggacaagcggagaggcagggaccctgagatgggcggaaagccccagcggagaaagaacccccaggaaggactgtataacgaactccagaaagacaagatggccgaagcctacagcgagatcggcatgaagggcgagcggagaagaggcaagggccacgatggcctgtaccagggcctgagcaccgccaccaaggacacctatgacgccctgcacatgcaggccctgcctccaaga

SEQ ID NO: 25947 - DNA, 630 bp, synthetic construct
  source 1..630: mol_type = other DNA
aaagagacagagaacaccaagcagcccagcaagagctgccacaagcccaaggccatcgtgcacaccgagaaagtgaacatgatgagcctgaccgtgctgggcctgcggatgctgttcgccaaaaccgtggccgtgaacttcctgctgaccgccaagctgttcttcctcaggagtaagaggagcaggctcctgcacagtgactacatgaacatgactccacgccgccccggacccacccgcaagcattaccagccctatgccccaccacgcgacttcgcagcctatcgctccagagtgaagttcagcagaagcgccgacgcccctgcctaccagcagggacagaaccaactgtacaacgagctgaacctgggcagacgggaagagtacgacgtgctggacaagcggagaggcagggaccctgagatgggcggaaagccccagcggagaaagaacccccaggaaggactgtataacgaactccagaaagacaagatggccgaagcctacagcgagatcggcatgaagggcgagcggagaagaggcaagggccacgatggcctgtaccagggcctgagcaccgccaccaaggacacctatgacgccctgcacatgcaggccctgcctccaaga

SEQ ID NO: 25948 - DNA, 627 bp, synthetic construct
  source 1..627: mol_type = other DNA
gagacagagaacaccaagcagcccagcaagagctgccacaagcccaaggccatcgtgcacaccgagaaagtgaacatgatgagcctgaccgtgctgggcctgcggatgctgttcgccaaaaccgtggccgtgaacttcctgctgaccgccaagctgttcttcctcaggagtaagaggagcaggctcctgcacagtgactacatgaacatgactccacgccgccccggacccacccgcaagcattaccagccctatgccccaccacgcgacttcgcagcctatcgctccagagtgaagttcagcagaagcgccgacgcccctgcctaccagcagggacagaaccaactgtacaacgagctgaacctgggcagacgggaagagtacgacgtgctggacaagcggagaggcagggaccctgagatgggcggaaagccccagcggagaaagaacccccaggaaggactgtataacgaactccagaaagacaagatggccgaagcctacagcgagatcggcatgaagggcgagcggagaagaggcaagggccacgatggcctgtaccagggcctgagcaccgccaccaaggacacctatgacgccctgcacatgcaggccctgcctccaaga

SEQ ID NO: 25949 - DNA, 624 bp, synthetic construct
  source 1..624: mol_type = other DNA
acagagaacaccaagcagcccagcaagagctgccacaagcccaaggccatcgtgcacaccgagaaagtgaacatgatgagcctgaccgtgctgggcctgcggatgctgttcgccaaaaccgtggccgtgaacttcctgctgaccgccaagctgttcttcctcaggagtaagaggagcaggctcctgcacagtgactacatgaacatgactccacgccgccccggacccacccgcaagcattaccagccctatgccccaccacgcgacttcgcagcctatcgctccagagtgaagttcagcagaagcgccgacgcccctgcctaccagcagggacagaaccaactgtacaacgagctgaacctgggcagacgggaagagtacgacgtgctggacaagcggagaggcagggaccctgagatgggcggaaagccccagcggagaaagaacccccaggaaggactgtataacgaactccagaaagacaagatggccgaagcctacagcgagatcggcatgaagggcgagcggagaagaggcaagggccacgatggcctgtaccagggcctgagcaccgccaccaaggacacctatgacgccctgcacatgcaggccctgcctccaaga

SEQ ID NO: 25950 - DNA, 621 bp, synthetic construct
  source 1..621: mol_type = other DNA
gagaacaccaagcagcccagcaagagctgccacaagcccaaggccatcgtgcacaccgagaaagtgaacatgatgagcctgaccgtgctgggcctgcggatgctgttcgccaaaaccgtggccgtgaacttcctgctgaccgccaagctgttcttcctcaggagtaagaggagcaggctcctgcacagtgactacatgaacatgactccacgccgccccggacccacccgcaagcattaccagccctatgccccaccacgcgacttcgcagcctatcgctccagagtgaagttcagcagaagcgccgacgcccctgcctaccagcagggacagaaccaactgtacaacgagctgaacctgggcagacgggaagagtacgacgtgctggacaagcggagaggcagggaccctgagatgggcggaaagccccagcggagaaagaacccccaggaaggactgtataacgaactccagaaagacaagatggccgaagcctacagcgagatcggcatgaagggcgagcggagaagaggcaagggccacgatggcctgtaccagggcctgagcaccgccaccaaggacacctatgacgccctgcacatgcaggccctgcctccaaga

SEQ ID NO: 25951 - DNA, 618 bp, synthetic construct
  source 1..618: mol_type = other DNA
aacaccaagcagcccagcaagagctgccacaagcccaaggccatcgtgcacaccgagaaagtgaacatgatgagcctgaccgtgctgggcctgcggatgctgttcgccaaaaccgtggccgtgaacttcctgctgaccgccaagctgttcttcctcaggagtaagaggagcaggctcctgcacagtgactacatgaacatgactccacgccgccccggacccacccgcaagcattaccagccctatgccccaccacgcgacttcgcagcctatcgctccagagtgaagttcagcagaagcgccgacgcccctgcctaccagcagggacagaaccaactgtacaacgagctgaacctgggcagacgggaagagtacgacgtgctggacaagcggagaggcagggaccctgagatgggcggaaagccccagcggagaaagaacccccaggaaggactgtataacgaactccagaaagacaagatggccgaagcctacagcgagatcggcatgaagggcgagcggagaagaggcaagggccacgatggcctgtaccagggcctgagcaccgccaccaaggacacctatgacgccctgcacatgcaggccctgcctccaaga

SEQ ID NO: 25952 - DNA, 870 bp, synthetic construct
  source 1..870: mol_type = other DNA
atccagaaccctgaacctgccgtgtaccagctgaaggaccccagaagccaggacagcaccctgtgcctgttcaccgacttcgacagccagatcaacgtgcccaagacaatggaaagcggcaccttcatcaccgacaagtgcgtgctggacatgaaggctatggacagcaagagcaacggcgccattgcctggtccaaccagaccagcttcacatgccaggacatcttcaaagagacaaacgccacctacccctccagcgacgtgccctgtgacgccaccctgaccgagaagtccttcgagacagacatgaacctcaacttccagaacctgagcgtgatgggcctgcgaatcctgctgctgaaagtggccggcttcaacctgctgatgaccctgcggctgtggtccagcaggagtaagaggagcaggctcctgcacagtgactacatgaacatgactccacgccgccccggacccacccgcaagcattaccagccctatgccccaccacgcgacttcgcagcctatcgctccagagtgaagttcagcagaagcgccgacgcccctgcctaccagcagggacagaaccaactgtacaacgagctgaacctgggcagacgggaagagtacgacgtgctggacaagcggagaggcagggaccctgagatgggcggaaagccccagcggagaaagaacccccaggaaggactgtataacgaactccagaaagacaagatggccgaagcctacagcgagatcggcatgaagggcgagcggagaagaggcaagggccacgatggcctgtaccagggcctgagcaccgccaccaaggacacctatgacgccctgcacatgcaggccctgcctccaaga

SEQ ID NO: 25953 - DNA, 867 bp, synthetic construct
  source 1..867: mol_type = other DNA
cagaaccctgaacctgccgtgtaccagctgaaggaccccagaagccaggacagcaccctgtgcctgttcaccgacttcgacagccagatcaacgtgcccaagacaatggaaagcggcaccttcatcaccgacaagtgcgtgctggacatgaaggctatggacagcaagagcaacggcgccattgcctggtccaaccagaccagcttcacatgccaggacatcttcaaagagacaaacgccacctacccctccagcgacgtgccctgtgacgccaccctgaccgagaagtccttcgagacagacatgaacctcaacttccagaacctgagcgtgatgggcctgcgaatcctgctgctgaaagtggccggcttcaacctgctgatgaccctgcggctgtggtccagcaggagtaagaggagcaggctcctgcacagtgactacatgaacatgactccacgccgccccggacccacccgcaagcattaccagccctatgccccaccacgcgacttcgcagcctatcgctccagagtgaagttcagcagaagcgccgacgcccctgcctaccagcagggacagaaccaactgtacaacgagctgaacctgggcagacgggaagagtacgacgtgctggacaagcggagaggcagggaccctgagatgggcggaaagccccagcggagaaagaacccccaggaaggactgtataacgaactccagaaagacaagatggccgaagcctacagcgagatcggcatgaagggcgagcggagaagaggcaagggccacgatggcctgtaccagggcctgagcaccgccaccaaggacacctatgacgccctgcacatgcaggccctgcctccaaga

SEQ ID NO: 25954 - DNA, 864 bp, synthetic construct
  source 1..864: mol_type = other DNA
aaccctgaacctgccgtgtaccagctgaaggaccccagaagccaggacagcaccctgtgcctgttcaccgacttcgacagccagatcaacgtgcccaagacaatggaaagcggcaccttcatcaccgacaagtgcgtgctggacatgaaggctatggacagcaagagcaacggcgccattgcctggtccaaccagaccagcttcacatgccaggacatcttcaaagagacaaacgccacctacccctccagcgacgtgccctgtgacgccaccctgaccgagaagtccttcgagacagacatgaacctcaacttccagaacctgagcgtgatgggcctgcgaatcctgctgctgaaagtggccggcttcaacctgctgatgaccctgcggctgtggtccagcaggagtaagaggagcaggctcctgcacagtgactacatgaacatgactccacgccgccccggacccacccgcaagcattaccagccctatgccccaccacgcgacttcgcagcctatcgctccagagtgaagttcagcagaagcgccgacgcccctgcctaccagcagggacagaaccaactgtacaacgagctgaacctgggcagacgggaagagtacgacgtgctggacaagcggagaggcagggaccctgagatgggcggaaagccccagcggagaaagaacccccaggaaggactgtataacgaactccagaaagacaagatggccgaagcctacagcgagatcggcatgaagggcgagcggagaagaggcaagggccacgatggcctgtaccagggcctgagcaccgccaccaaggacacctatgacgccctgcacatgcaggccctgcctccaaga

SEQ ID NO: 25955 - DNA, 861 bp, synthetic construct
  source 1..861: mol_type = other DNA
cctgaacctgccgtgtaccagctgaaggaccccagaagccaggacagcaccctgtgcctgttcaccgacttcgacagccagatcaacgtgcccaagacaatggaaagcggcaccttcatcaccgacaagtgcgtgctggacatgaaggctatggacagcaagagcaacggcgccattgcctggtccaaccagaccagcttcacatgccaggacatcttcaaagagacaaacgccacctacccctccagcgacgtgccctgtgacgccaccctgaccgagaagtccttcgagacagacatgaacctcaacttccagaacctgagcgtgatgggcctgcgaatcctgctgctgaaagtggccggcttcaacctgctgatgaccctgcggctgtggtccagcaggagtaagaggagcaggctcctgcacagtgactacatgaacatgactccacgccgccccggacccacccgcaagcattaccagccctatgccccaccacgcgacttcgcagcctatcgctccagagtgaagttcagcagaagcgccgacgcccctgcctaccagcagggacagaaccaactgtacaacgagctgaacctgggcagacgggaagagtacgacgtgctggacaagcggagaggcagggaccctgagatgggcggaaagccccagcggagaaagaacccccaggaaggactgtataacgaactccagaaagacaagatggccgaagcctacagcgagatcggcatgaagggcgagcggagaagaggcaagggccacgatggcctgtaccagggcctgagcaccgccaccaaggacacctatgacgccctgcacatgcaggccctgcctccaaga

SEQ ID NO: 25956 - DNA, 858 bp, synthetic construct
  source 1..858: mol_type = other DNA
gaacctgccgtgtaccagctgaaggaccccagaagccaggacagcaccctgtgcctgttcaccgacttcgacagccagatcaacgtgcccaagacaatggaaagcggcaccttcatcaccgacaagtgcgtgctggacatgaaggctatggacagcaagagcaacggcgccattgcctggtccaaccagaccagcttcacatgccaggacatcttcaaagagacaaacgccacctacccctccagcgacgtgccctgtgacgccaccctgaccgagaagtccttcgagacagacatgaacctcaacttccagaacctgagcgtgatgggcctgcgaatcctgctgctgaaagtggccggcttcaacctgctgatgaccctgcggctgtggtccagcaggagtaagaggagcaggctcctgcacagtgactacatgaacatgactccacgccgccccggacccacccgcaagcattaccagccctatgccccaccacgcgacttcgcagcctatcgctccagagtgaagttcagcagaagcgccgacgcccctgcctaccagcagggacagaaccaactgtacaacgagctgaacctgggcagacgggaagagtacgacgtgctggacaagcggagaggcagggaccctgagatgggcggaaagccccagcggagaaagaacccccaggaaggactgtataacgaactccagaaagacaagatggccgaagcctacagcgagatcggcatgaagggcgagcggagaagaggcaagggccacgatggcctgtaccagggcctgagcaccgccaccaaggacacctatgacgccctgcacatgcaggccctgcctccaaga

SEQ ID NO: 25957 - DNA, 855 bp, synthetic construct
  source 1..855: mol_type = other DNA
cctgccgtgtaccagctgaaggaccccagaagccaggacagcaccctgtgcctgttcaccgacttcgacagccagatcaacgtgcccaagacaatggaaagcggcaccttcatcaccgacaagtgcgtgctggacatgaaggctatggacagcaagagcaacggcgccattgcctggtccaaccagaccagcttcacatgccaggacatcttcaaagagacaaacgccacctacccctccagcgacgtgccctgtgacgccaccctgaccgagaagtccttcgagacagacatgaacctcaacttccagaacctgagcgtgatgggcctgcgaatcctgctgctgaaagtggccggcttcaacctgctgatgaccctgcggctgtggtccagcaggagtaagaggagcaggctcctgcacagtgactacatgaacatgactccacgccgccccggacccacccgcaagcattaccagccctatgccccaccacgcgacttcgcagcctatcgctccagagtgaagttcagcagaagcgccgacgcccctgcctaccagcagggacagaaccaactgtacaacgagctgaacctgggcagacgggaagagtacgacgtgctggacaagcggagaggcagggaccctgagatgggcggaaagccccagcggagaaagaacccccaggaaggactgtataacgaactccagaaagacaagatggccgaagcctacagcgagatcggcatgaagggcgagcggagaagaggcaagggccacgatggcctgtaccagggcctgagcaccgccaccaaggacacctatgacgccctgcacatgcaggccctgcctccaaga

SEQ ID NO: 25958 - DNA, 852 bp, synthetic construct
  source 1..852: mol_type = other DNA
gccgtgtaccagctgaaggaccccagaagccaggacagcaccctgtgcctgttcaccgacttcgacagccagatcaacgtgcccaagacaatggaaagcggcaccttcatcaccgacaagtgcgtgctggacatgaaggctatggacagcaagagcaacggcgccattgcctggtccaaccagaccagcttcacatgccaggacatcttcaaagagacaaacgccacctacccctccagcgacgtgccctgtgacgccaccctgaccgagaagtccttcgagacagacatgaacctcaacttccagaacctgagcgtgatgggcctgcgaatcctgctgctgaaagtggccggcttcaacctgctgatgaccctgcggctgtggtccagcaggagtaagaggagcaggctcctgcacagtgactacatgaacatgactccacgccgccccggacccacccgcaagcattaccagccctatgccccaccacgcgacttcgcagcctatcgctccagagtgaagttcagcagaagcgccgacgcccctgcctaccagcagggacagaaccaactgtacaacgagctgaacctgggcagacgggaagagtacgacgtgctggacaagcggagaggcagggaccctgagatgggcggaaagccccagcggagaaagaacccccaggaaggactgtataacgaactccagaaagacaagatggccgaagcctacagcgagatcggcatgaagggcgagcggagaagaggcaagggccacgatggcctgtaccagggcctgagcaccgccaccaaggacacctatgacgccctgcacatgcaggccctgcctccaaga

SEQ ID NO: 25959 - DNA, 849 bp, synthetic construct
  source 1..849: mol_type = other DNA
gtgtaccagctgaaggaccccagaagccaggacagcaccctgtgcctgttcaccgacttcgacagccagatcaacgtgcccaagacaatggaaagcggcaccttcatcaccgacaagtgcgtgctggacatgaaggctatggacagcaagagcaacggcgccattgcctggtccaaccagaccagcttcacatgccaggacatcttcaaagagacaaacgccacctacccctccagcgacgtgccctgtgacgccaccctgaccgagaagtccttcgagacagacatgaacctcaacttccagaacctgagcgtgatgggcctgcgaatcctgctgctgaaagtggccggcttcaacctgctgatgaccctgcggctgtggtccagcaggagtaagaggagcaggctcctgcacagtgactacatgaacatgactccacgccgccccggacccacccgcaagcattaccagccctatgccccaccacgcgacttcgcagcctatcgctccagagtgaagttcagcagaagcgccgacgcccctgcctaccagcagggacagaaccaactgtacaacgagctgaacctgggcagacgggaagagtacgacgtgctggacaagcggagaggcagggaccctgagatgggcggaaagccccagcggagaaagaacccccaggaaggactgtataacgaactccagaaagacaagatggccgaagcctacagcgagatcggcatgaagggcgagcggagaagaggcaagggccacgatggcctgtaccagggcctgagcaccgccaccaaggacacctatgacgccctgcacatgcaggccctgcctccaaga

SEQ ID NO: 25960 - DNA, 846 bp, synthetic construct
  source 1..846: mol_type = other DNA
taccagctgaaggaccccagaagccaggacagcaccctgtgcctgttcaccgacttcgacagccagatcaacgtgcccaagacaatggaaagcggcaccttcatcaccgacaagtgcgtgctggacatgaaggctatggacagcaagagcaacggcgccattgcctggtccaaccagaccagcttcacatgccaggacatcttcaaagagacaaacgccacctacccctccagcgacgtgccctgtgacgccaccctgaccgagaagtccttcgagacagacatgaacctcaacttccagaacctgagcgtgatgggcctgcgaatcctgctgctgaaagtggccggcttcaacctgctgatgaccctgcggctgtggtccagcaggagtaagaggagcaggctcctgcacagtgactacatgaacatgactccacgccgccccggacccacccgcaagcattaccagccctatgccccaccacgcgacttcgcagcctatcgctccagagtgaagttcagcagaagcgccgacgcccctgcctaccagcagggacagaaccaactgtacaacgagctgaacctgggcagacgggaagagtacgacgtgctggacaagcggagaggcagggaccctgagatgggcggaaagccccagcggagaaagaacccccaggaaggactgtataacgaactccagaaagacaagatggccgaagcctacagcgagatcggcatgaagggcgagcggagaagaggcaagggccacgatggcctgtaccagggcctgagcaccgccaccaaggacacctatgacgccctgcacatgcaggccctgcctccaaga

SEQ ID NO: 25961 - DNA, 843 bp, synthetic construct
  source 1..843: mol_type = other DNA
cagctgaaggaccccagaagccaggacagcaccctgtgcctgttcaccgacttcgacagccagatcaacgtgcccaagacaatggaaagcggcaccttcatcaccgacaagtgcgtgctggacatgaaggctatggacagcaagagcaacggcgccattgcctggtccaaccagaccagcttcacatgccaggacatcttcaaagagacaaacgccacctacccctccagcgacgtgccctgtgacgccaccctgaccgagaagtccttcgagacagacatgaacctcaacttccagaacctgagcgtgatgggcctgcgaatcctgctgctgaaagtggccggcttcaacctgctgatgaccctgcggctgtggtccagcaggagtaagaggagcaggctcctgcacagtgactacatgaacatgactccacgccgccccggacccacccgcaagcattaccagccctatgccccaccacgcgacttcgcagcctatcgctccagagtgaagttcagcagaagcgccgacgcccctgcctaccagcagggacagaaccaactgtacaacgagctgaacctgggcagacgggaagagtacgacgtgctggacaagcggagaggcagggaccctgagatgggcggaaagccccagcggagaaagaacccccaggaaggactgtataacgaactccagaaagacaagatggccgaagcctacagcgagatcggcatgaagggcgagcggagaagaggcaagggccacgatggcctgtaccagggcctgagcaccgccaccaaggacacctatgacgccctgcacatgcaggccctgcctccaaga

SEQ ID NO: 25962 - DNA, 840 bp, synthetic construct
  source 1..840: mol_type = other DNA
ctgaaggaccccagaagccaggacagcaccctgtgcctgttcaccgacttcgacagccagatcaacgtgcccaagacaatggaaagcggcaccttcatcaccgacaagtgcgtgctggacatgaaggctatggacagcaagagcaacggcgccattgcctggtccaaccagaccagcttcacatgccaggacatcttcaaagagacaaacgccacctacccctccagcgacgtgccctgtgacgccaccctgaccgagaagtccttcgagacagacatgaacctcaacttccagaacctgagcgtgatgggcctgcgaatcctgctgctgaaagtggccggcttcaacctgctgatgaccctgcggctgtggtccagcaggagtaagaggagcaggctcctgcacagtgactacatgaacatgactccacgccgccccggacccacccgcaagcattaccagccctatgccccaccacgcgacttcgcagcctatcgctccagagtgaagttcagcagaagcgccgacgcccctgcctaccagcagggacagaaccaactgtacaacgagctgaacctgggcagacgggaagagtacgacgtgctggacaagcggagaggcagggaccctgagatgggcggaaagccccagcggagaaagaacccccaggaaggactgtataacgaactccagaaagacaagatggccgaagcctacagcgagatcggcatgaagggcgagcggagaagaggcaagggccacgatggcctgtaccagggcctgagcaccgccaccaaggacacctatgacgccctgcacatgcaggccctgcctccaaga

SEQ ID NO: 25963 - DNA, 825 bp, synthetic construct
  source 1..825: mol_type = other DNA
agccaggacagcaccctgtgcctgttcaccgacttcgacagccagatcaacgtgcccaagacaatggaaagcggcaccttcatcaccgacaagtgcgtgctggacatgaaggctatggacagcaagagcaacggcgccattgcctggtccaaccagaccagcttcacatgccaggacatcttcaaagagacaaacgccacctacccctccagcgacgtgccctgtgacgccaccctgaccgagaagtccttcgagacagacatgaacctcaacttccagaacctgagcgtgatgggcctgcgaatcctgctgctgaaagtggccggcttcaacctgctgatgaccctgcggctgtggtccagcaggagtaagaggagcaggctcctgcacagtgactacatgaacatgactccacgccgccccggacccacccgcaagcattaccagccctatgccccaccacgcgacttcgcagcctatcgctccagagtgaagttcagcagaagcgccgacgcccctgcctaccagcagggacagaaccaactgtacaacgagctgaacctgggcagacgggaagagtacgacgtgctggacaagcggagaggcagggaccctgagatgggcggaaagccccagcggagaaagaacccccaggaaggactgtataacgaactccagaaagacaagatggccgaagcctacagcgagatcggcatgaagggcgagcggagaagaggcaagggccacgatggcctgtaccagggcctgagcaccgccaccaaggacacctatgacgccctgcacatgcaggccctgcctccaaga

SEQ ID NO: 25964 - DNA, 810 bp, synthetic construct
  source 1..810: mol_type = other DNA
ctgtgcctgttcaccgacttcgacagccagatcaacgtgcccaagacaatggaaagcggcaccttcatcaccgacaagtgcgtgctggacatgaaggctatggacagcaagagcaacggcgccattgcctggtccaaccagaccagcttcacatgccaggacatcttcaaagagacaaacgccacctacccctccagcgacgtgccctgtgacgccaccctgaccgagaagtccttcgagacagacatgaacctcaacttccagaacctgagcgtgatgggcctgcgaatcctgctgctgaaagtggccggcttcaacctgctgatgaccctgcggctgtggtccagcaggagtaagaggagcaggctcctgcacagtgactacatgaacatgactccacgccgccccggacccacccgcaagcattaccagccctatgccccaccacgcgacttcgcagcctatcgctccagagtgaagttcagcagaagcgccgacgcccctgcctaccagcagggacagaaccaactgtacaacgagctgaacctgggcagacgggaagagtacgacgtgctggacaagcggagaggcagggaccctgagatgggcggaaagccccagcggagaaagaacccccaggaaggactgtataacgaactccagaaagacaagatggccgaagcctacagcgagatcggcatgaagggcgagcggagaagaggcaagggccacgatggcctgtaccagggcctgagcaccgccaccaaggacacctatgacgccctgcacatgcaggccctgcctccaaga

SEQ ID NO: 25965 - DNA, 870 bp, synthetic construct
  source 1..870: mol_type = other DNA
atccagaaccctgaacctgccgtgtaccagctgaaggaccccagaagccaggacagcaccctgtgcctgttcaccgacttcgacagccagatcaacgtgcccaagacaatggaaagcggcaccttcatcaccgacaagtgcgtgctggacatgaaggctatggacagcaagagcaacggcgccattgcctggtccaaccagaccagcttcacatgccaggacatcttcaaagagacaaacgccacctacccctccagcgacgtgccctgtgacgccaccctgaccgagaagtccttcgagacagacatgaacctcaacttccagaacctgctggtggtgggcctgcgaatcctgctgctgaaagtggccggcttcaacctgctgatgaccctgcggctgtggtccagcaggagtaagaggagcaggctcctgcacagtgactacatgaacatgactccacgccgccccggacccacccgcaagcattaccagccctatgccccaccacgcgacttcgcagcctatcgctccagagtgaagttcagcagaagcgccgacgcccctgcctaccagcagggacagaaccaactgtacaacgagctgaacctgggcagacgggaagagtacgacgtgctggacaagcggagaggcagggaccctgagatgggcggaaagccccagcggagaaagaacccccaggaaggactgtataacgaactccagaaagacaagatggccgaagcctacagcgagatcggcatgaagggcgagcggagaagaggcaagggccacgatggcctgtaccagggcctgagcaccgccaccaaggacacctatgacgccctgcacatgcaggccctgcctccaaga

SEQ ID NO: 25966 - DNA, 867 bp, synthetic construct
  source 1..867: mol_type = other DNA
cagaaccctgaacctgccgtgtaccagctgaaggaccccagaagccaggacagcaccctgtgcctgttcaccgacttcgacagccagatcaacgtgcccaagacaatggaaagcggcaccttcatcaccgacaagtgcgtgctggacatgaaggctatggacagcaagagcaacggcgccattgcctggtccaaccagaccagcttcacatgccaggacatcttcaaagagacaaacgccacctacccctccagcgacgtgccctgtgacgccaccctgaccgagaagtccttcgagacagacatgaacctcaacttccagaacctgctggtggtgggcctgcgaatcctgctgctgaaagtggccggcttcaacctgctgatgaccctgcggctgtggtccagcaggagtaagaggagcaggctcctgcacagtgactacatgaacatgactccacgccgccccggacccacccgcaagcattaccagccctatgccccaccacgcgacttcgcagcctatcgctccagagtgaagttcagcagaagcgccgacgcccctgcctaccagcagggacagaaccaactgtacaacgagctgaacctgggcagacgggaagagtacgacgtgctggacaagcggagaggcagggaccctgagatgggcggaaagccccagcggagaaagaacccccaggaaggactgtataacgaactccagaaagacaagatggccgaagcctacagcgagatcggcatgaagggcgagcggagaagaggcaagggccacgatggcctgtaccagggcctgagcaccgccaccaaggacacctatgacgccctgcacatgcaggccctgcctccaaga

SEQ ID NO: 25967 - DNA, 864 bp, synthetic construct
  source 1..864: mol_type = other DNA
aaccctgaacctgccgtgtaccagctgaaggaccccagaagccaggacagcaccctgtgcctgttcaccgacttcgacagccagatcaacgtgcccaagacaatggaaagcggcaccttcatcaccgacaagtgcgtgctggacatgaaggctatggacagcaagagcaacggcgccattgcctggtccaaccagaccagcttcacatgccaggacatcttcaaagagacaaacgccacctacccctccagcgacgtgccctgtgacgccaccctgaccgagaagtccttcgagacagacatgaacctcaacttccagaacctgctggtggtgggcctgcgaatcctgctgctgaaagtggccggcttcaacctgctgatgaccctgcggctgtggtccagcaggagtaagaggagcaggctcctgcacagtgactacatgaacatgactccacgccgccccggacccacccgcaagcattaccagccctatgccccaccacgcgacttcgcagcctatcgctccagagtgaagttcagcagaagcgccgacgcccctgcctaccagcagggacagaaccaactgtacaacgagctgaacctgggcagacgggaagagtacgacgtgctggacaagcggagaggcagggaccctgagatgggcggaaagccccagcggagaaagaacccccaggaaggactgtataacgaactccagaaagacaagatggccgaagcctacagcgagatcggcatgaagggcgagcggagaagaggcaagggccacgatggcctgtaccagggcctgagcaccgccaccaaggacacctatgacgccctgcacatgcaggccctgcctccaaga

SEQ ID NO: 25968 - DNA, 861 bp, synthetic construct
  source 1..861: mol_type = other DNA
cctgaacctgccgtgtaccagctgaaggaccccagaagccaggacagcaccctgtgcctgttcaccgacttcgacagccagatcaacgtgcccaagacaatggaaagcggcaccttcatcaccgacaagtgcgtgctggacatgaaggctatggacagcaagagcaacggcgccattgcctggtccaaccagaccagcttcacatgccaggacatcttcaaagagacaaacgccacctacccctccagcgacgtgccctgtgacgccaccctgaccgagaagtccttcgagacagacatgaacctcaacttccagaacctgctggtggtgggcctgcgaatcctgctgctgaaagtggccggcttcaacctgctgatgaccctgcggctgtggtccagcaggagtaagaggagcaggctcctgcacagtgactacatgaacatgactccacgccgccccggacccacccgcaagcattaccagccctatgccccaccacgcgacttcgcagcctatcgctccagagtgaagttcagcagaagcgccgacgcccctgcctaccagcagggacagaaccaactgtacaacgagctgaacctgggcagacgggaagagtacgacgtgctggacaagcggagaggcagggaccctgagatgggcggaaagccccagcggagaaagaacccccaggaaggactgtataacgaactccagaaagacaagatggccgaagcctacagcgagatcggcatgaagggcgagcggagaagaggcaagggccacgatggcctgtaccagggcctgagcaccgccaccaaggacacctatgacgccctgcacatgcaggccctgcctccaaga

SEQ ID NO: 25969 - DNA, 858 bp, synthetic construct
  source 1..858: mol_type = other DNA
gaacctgccgtgtaccagctgaaggaccccagaagccaggacagcaccctgtgcctgttcaccgacttcgacagccagatcaacgtgcccaagacaatggaaagcggcaccttcatcaccgacaagtgcgtgctggacatgaaggctatggacagcaagagcaacggcgccattgcctggtccaaccagaccagcttcacatgccaggacatcttcaaagagacaaacgccacctacccctccagcgacgtgccctgtgacgccaccctgaccgagaagtccttcgagacagacatgaacctcaacttccagaacctgctggtggtgggcctgcgaatcctgctgctgaaagtggccggcttcaacctgctgatgaccctgcggctgtggtccagcaggagtaagaggagcaggctcctgcacagtgactacatgaacatgactccacgccgccccggacccacccgcaagcattaccagccctatgccccaccacgcgacttcgcagcctatcgctccagagtgaagttcagcagaagcgccgacgcccctgcctaccagcagggacagaaccaactgtacaacgagctgaacctgggcagacgggaagagtacgacgtgctggacaagcggagaggcagggaccctgagatgggcggaaagccccagcggagaaagaacccccaggaaggactgtataacgaactccagaaagacaagatggccgaagcctacagcgagatcggcatgaagggcgagcggagaagaggcaagggccacgatggcctgtaccagggcctgagcaccgccaccaaggacacctatgacgccctgcacatgcaggccctgcctccaaga

SEQ ID NO: 25970 - DNA, 855 bp, synthetic construct
  source 1..855: mol_type = other DNA
cctgccgtgtaccagctgaaggaccccagaagccaggacagcaccctgtgcctgttcaccgacttcgacagccagatcaacgtgcccaagacaatggaaagcggcaccttcatcaccgacaagtgcgtgctggacatgaaggctatggacagcaagagcaacggcgccattgcctggtccaaccagaccagcttcacatgccaggacatcttcaaagagacaaacgccacctacccctccagcgacgtgccctgtgacgccaccctgaccgagaagtccttcgagacagacatgaacctcaacttccagaacctgctggtggtgggcctgcgaatcctgctgctgaaagtggccggcttcaacctgctgatgaccctgcggctgtggtccagcaggagtaagaggagcaggctcctgcacagtgactacatgaacatgactccacgccgccccggacccacccgcaagcattaccagccctatgccccaccacgcgacttcgcagcctatcgctccagagtgaagttcagcagaagcgccgacgcccctgcctaccagcagggacagaaccaactgtacaacgagctgaacctgggcagacgggaagagtacgacgtgctggacaagcggagaggcagggaccctgagatgggcggaaagccccagcggagaaagaacccccaggaaggactgtataacgaactccagaaagacaagatggccgaagcctacagcgagatcggcatgaagggcgagcggagaagaggcaagggccacgatggcctgtaccagggcctgagcaccgccaccaaggacacctatgacgccctgcacatgcaggccctgcctccaaga

SEQ ID NO: 25971 - DNA, 852 bp, synthetic construct
  source 1..852: mol_type = other DNA
gccgtgtaccagctgaaggaccccagaagccaggacagcaccctgtgcctgttcaccgacttcgacagccagatcaacgtgcccaagacaatggaaagcggcaccttcatcaccgacaagtgcgtgctggacatgaaggctatggacagcaagagcaacggcgccattgcctggtccaaccagaccagcttcacatgccaggacatcttcaaagagacaaacgccacctacccctccagcgacgtgccctgtgacgccaccctgaccgagaagtccttcgagacagacatgaacctcaacttccagaacctgctggtggtgggcctgcgaatcctgctgctgaaagtggccggcttcaacctgctgatgaccctgcggctgtggtccagcaggagtaagaggagcaggctcctgcacagtgactacatgaacatgactccacgccgccccggacccacccgcaagcattaccagccctatgccccaccacgcgacttcgcagcctatcgctccagagtgaagttcagcagaagcgccgacgcccctgcctaccagcagggacagaaccaactgtacaacgagctgaacctgggcagacgggaagagtacgacgtgctggacaagcggagaggcagggaccctgagatgggcggaaagccccagcggagaaagaacccccaggaaggactgtataacgaactccagaaagacaagatggccgaagcctacagcgagatcggcatgaagggcgagcggagaagaggcaagggccacgatggcctgtaccagggcctgagcaccgccaccaaggacacctatgacgccctgcacatgcaggccctgcctccaaga

SEQ ID NO: 25972 - DNA, 849 bp, synthetic construct
  source 1..849: mol_type = other DNA
gtgtaccagctgaaggaccccagaagccaggacagcaccctgtgcctgttcaccgacttcgacagccagatcaacgtgcccaagacaatggaaagcggcaccttcatcaccgacaagtgcgtgctggacatgaaggctatggacagcaagagcaacggcgccattgcctggtccaaccagaccagcttcacatgccaggacatcttcaaagagacaaacgccacctacccctccagcgacgtgccctgtgacgccaccctgaccgagaagtccttcgagacagacatgaacctcaacttccagaacctgctggtggtgggcctgcgaatcctgctgctgaaagtggccggcttcaacctgctgatgaccctgcggctgtggtccagcaggagtaagaggagcaggctcctgcacagtgactacatgaacatgactccacgccgccccggacccacccgcaagcattaccagccctatgccccaccacgcgacttcgcagcctatcgctccagagtgaagttcagcagaagcgccgacgcccctgcctaccagcagggacagaaccaactgtacaacgagctgaacctgggcagacgggaagagtacgacgtgctggacaagcggagaggcagggaccctgagatgggcggaaagccccagcggagaaagaacccccaggaaggactgtataacgaactccagaaagacaagatggccgaagcctacagcgagatcggcatgaagggcgagcggagaagaggcaagggccacgatggcctgtaccagggcctgagcaccgccaccaaggacacctatgacgccctgcacatgcaggccctgcctccaaga

SEQ ID NO: 25973 - DNA, 846 bp, synthetic construct
  source 1..846: mol_type = other DNA
taccagctgaaggaccccagaagccaggacagcaccctgtgcctgttcaccgacttcgacagccagatcaacgtgcccaagacaatggaaagcggcaccttcatcaccgacaagtgcgtgctggacatgaaggctatggacagcaagagcaacggcgccattgcctggtccaaccagaccagcttcacatgccaggacatcttcaaagagacaaacgccacctacccctccagcgacgtgccctgtgacgccaccctgaccgagaagtccttcgagacagacatgaacctcaacttccagaacctgctggtggtgggcctgcgaatcctgctgctgaaagtggccggcttcaacctgctgatgaccctgcggctgtggtccagcaggagtaagaggagcaggctcctgcacagtgactacatgaacatgactccacgccgccccggacccacccgcaagcattaccagccctatgccccaccacgcgacttcgcagcctatcgctccagagtgaagttcagcagaagcgccgacgcccctgcctaccagcagggacagaaccaactgtacaacgagctgaacctgggcagacgggaagagtacgacgtgctggacaagcggagaggcagggaccctgagatgggcggaaagccccagcggagaaagaacccccaggaaggactgtataacgaactccagaaagacaagatggccgaagcctacagcgagatcggcatgaagggcgagcggagaagaggcaagggccacgatggcctgtaccagggcctgagcaccgccaccaaggacacctatgacgccctgcacatgcaggccctgcctccaaga

SEQ ID NO: 25974 - DNA, 843 bp, synthetic construct
  source 1..843: mol_type = other DNA
cagctgaaggaccccagaagccaggacagcaccctgtgcctgttcaccgacttcgacagccagatcaacgtgcccaagacaatggaaagcggcaccttcatcaccgacaagtgcgtgctggacatgaaggctatggacagcaagagcaacggcgccattgcctggtccaaccagaccagcttcacatgccaggacatcttcaaagagacaaacgccacctacccctccagcgacgtgccctgtgacgccaccctgaccgagaagtccttcgagacagacatgaacctcaacttccagaacctgctggtggtgggcctgcgaatcctgctgctgaaagtggccggcttcaacctgctgatgaccctgcggctgtggtccagcaggagtaagaggagcaggctcctgcacagtgactacatgaacatgactccacgccgccccggacccacccgcaagcattaccagccctatgccccaccacgcgacttcgcagcctatcgctccagagtgaagttcagcagaagcgccgacgcccctgcctaccagcagggacagaaccaactgtacaacgagctgaacctgggcagacgggaagagtacgacgtgctggacaagcggagaggcagggaccctgagatgggcggaaagccccagcggagaaagaacccccaggaaggactgtataacgaactccagaaagacaagatggccgaagcctacagcgagatcggcatgaagggcgagcggagaagaggcaagggccacgatggcctgtaccagggcctgagcaccgccaccaaggacacctatgacgccctgcacatgcaggccctgcctccaaga

SEQ ID NO: 25975 - DNA, 840 bp, synthetic construct
  source 1..840: mol_type = other DNA
ctgaaggaccccagaagccaggacagcaccctgtgcctgttcaccgacttcgacagccagatcaacgtgcccaagacaatggaaagcggcaccttcatcaccgacaagtgcgtgctggacatgaaggctatggacagcaagagcaacggcgccattgcctggtccaaccagaccagcttcacatgccaggacatcttcaaagagacaaacgccacctacccctccagcgacgtgccctgtgacgccaccctgaccgagaagtccttcgagacagacatgaacctcaacttccagaacctgctggtggtgggcctgcgaatcctgctgctgaaagtggccggcttcaacctgctgatgaccctgcggctgtggtccagcaggagtaagaggagcaggctcctgcacagtgactacatgaacatgactccacgccgccccggacccacccgcaagcattaccagccctatgccccaccacgcgacttcgcagcctatcgctccagagtgaagttcagcagaagcgccgacgcccctgcctaccagcagggacagaaccaactgtacaacgagctgaacctgggcagacgggaagagtacgacgtgctggacaagcggagaggcagggaccctgagatgggcggaaagccccagcggagaaagaacccccaggaaggactgtataacgaactccagaaagacaagatggccgaagcctacagcgagatcggcatgaagggcgagcggagaagaggcaagggccacgatggcctgtaccagggcctgagcaccgccaccaaggacacctatgacgccctgcacatgcaggccctgcctccaaga

SEQ ID NO: 25976 - DNA, 825 bp, synthetic construct
  source 1..825: mol_type = other DNA
agccaggacagcaccctgtgcctgttcaccgacttcgacagccagatcaacgtgcccaagacaatggaaagcggcaccttcatcaccgacaagtgcgtgctggacatgaaggctatggacagcaagagcaacggcgccattgcctggtccaaccagaccagcttcacatgccaggacatcttcaaagagacaaacgccacctacccctccagcgacgtgccctgtgacgccaccctgaccgagaagtccttcgagacagacatgaacctcaacttccagaacctgctggtggtgggcctgcgaatcctgctgctgaaagtggccggcttcaacctgctgatgaccctgcggctgtggtccagcaggagtaagaggagcaggctcctgcacagtgactacatgaacatgactccacgccgccccggacccacccgcaagcattaccagccctatgccccaccacgcgacttcgcagcctatcgctccagagtgaagttcagcagaagcgccgacgcccctgcctaccagcagggacagaaccaactgtacaacgagctgaacctgggcagacgggaagagtacgacgtgctggacaagcggagaggcagggaccctgagatgggcggaaagccccagcggagaaagaacccccaggaaggactgtataacgaactccagaaagacaagatggccgaagcctacagcgagatcggcatgaagggcgagcggagaagaggcaagggccacgatggcctgtaccagggcctgagcaccgccaccaaggacacctatgacgccctgcacatgcaggccctgcctccaaga

SEQ ID NO: 25977 - DNA, 810 bp, synthetic construct
  source 1..810: mol_type = other DNA
ctgtgcctgttcaccgacttcgacagccagatcaacgtgcccaagacaatggaaagcggcaccttcatcaccgacaagtgcgtgctggacatgaaggctatggacagcaagagcaacggcgccattgcctggtccaaccagaccagcttcacatgccaggacatcttcaaagagacaaacgccacctacccctccagcgacgtgccctgtgacgccaccctgaccgagaagtccttcgagacagacatgaacctcaacttccagaacctgctggtggtgggcctgcgaatcctgctgctgaaagtggccggcttcaacctgctgatgaccctgcggctgtggtccagcaggagtaagaggagcaggctcctgcacagtgactacatgaacatgactccacgccgccccggacccacccgcaagcattaccagccctatgccccaccacgcgacttcgcagcctatcgctccagagtgaagttcagcagaagcgccgacgcccctgcctaccagcagggacagaaccaactgtacaacgagctgaacctgggcagacgggaagagtacgacgtgctggacaagcggagaggcagggaccctgagatgggcggaaagccccagcggagaaagaacccccaggaaggactgtataacgaactccagaaagacaagatggccgaagcctacagcgagatcggcatgaagggcgagcggagaagaggcaagggccacgatggcctgtaccagggcctgagcaccgccaccaaggacacctatgacgccctgcacatgcaggccctgcctccaaga

SEQ ID NO: 25978 - DNA, 975 bp, synthetic construct
  source 1..975: mol_type = other DNA
gaggatctgcggaacgtgaccccacccaaggtgtccctgttcgagcccagcaaggccgagatcgccaataaacagaaggccaccctcgtgtgcctggccagaggcttcttccccgaccacgtggaactgtcttggtgggtcaacggcaaagaggtgcacagcggcgtctgcaccgaccctcaggcctacaaagagagcaactacagctactgcctgagcagtcggctgcgggtgtccgccaccttctggcacaacccccggaaccacttcagatgccaggtgcagttccacggcctgagcgaagaggacaagtggcccgaaggcagccctaagcctgtcacccagaacatcagcgccgaggcctggggcagagcctgtggcatcaccagcagctaccagcagggcgtgctgagcgccaccatcctgtacgagatcctgctgggcaaggccaccctgtacgccgtgctggtgtccaccctggtggtcatggctatggtcaagcggaagaacagcaggagtaagaggagcaggctcctgcacagtgactacatgaacatgactccacgccgccccggacccacccgcaagcattaccagccctatgccccaccacgcgacttcgcagcctatcgctccagagtgaagttcagcagaagcgccgacgcccctgcctaccagcagggacagaaccaactgtacaacgagctgaacctgggcagacgggaagagtacgacgtgctggacaagcggagaggcagggaccctgagatgggcggaaagccccagcggagaaagaacccccaggaaggactgtataacgaactccagaaagacaagatggccgaagcctacagcgagatcggcatgaagggcgagcggagaagaggcaagggccacgatggcctgtaccagggcctgagcaccgccaccaaggacacctatgacgccctgcacatgcaggccctgcctccaaga

SEQ ID NO: 25979 - DNA, 972 bp, synthetic construct
  source 1..972: mol_type = other DNA
gatctgcggaacgtgaccccacccaaggtgtccctgttcgagcccagcaaggccgagatcgccaataaacagaaggccaccctcgtgtgcctggccagaggcttcttccccgaccacgtggaactgtcttggtgggtcaacggcaaagaggtgcacagcggcgtctgcaccgaccctcaggcctacaaagagagcaactacagctactgcctgagcagtcggctgcgggtgtccgccaccttctggcacaacccccggaaccacttcagatgccaggtgcagttccacggcctgagcgaagaggacaagtggcccgaaggcagccctaagcctgtcacccagaacatcagcgccgaggcctggggcagagcctgtggcatcaccagcagctaccagcagggcgtgctgagcgccaccatcctgtacgagatcctgctgggcaaggccaccctgtacgccgtgctggtgtccaccctggtggtcatggctatggtcaagcggaagaacagcaggagtaagaggagcaggctcctgcacagtgactacatgaacatgactccacgccgccccggacccacccgcaagcattaccagccctatgccccaccacgcgacttcgcagcctatcgctccagagtgaagttcagcagaagcgccgacgcccctgcctaccagcagggacagaaccaactgtacaacgagctgaacctgggcagacgggaagagtacgacgtgctggacaagcggagaggcagggaccctgagatgggcggaaagccccagcggagaaagaacccccaggaaggactgtataacgaactccagaaagacaagatggccgaagcctacagcgagatcggcatgaagggcgagcggagaagaggcaagggccacgatggcctgtaccagggcctgagcaccgccaccaaggacacctatgacgccctgcacatgcaggccctgcctccaaga

SEQ ID NO: 25980 - DNA, 966 bp, synthetic construct
  source 1..966: mol_type = other DNA
cggaacgtgaccccacccaaggtgtccctgttcgagcccagcaaggccgagatcgccaataaacagaaggccaccctcgtgtgcctggccagaggcttcttccccgaccacgtggaactgtcttggtgggtcaacggcaaagaggtgcacagcggcgtctgcaccgaccctcaggcctacaaagagagcaactacagctactgcctgagcagtcggctgcgggtgtccgccaccttctggcacaacccccggaaccacttcagatgccaggtgcagttccacggcctgagcgaagaggacaagtggcccgaaggcagccctaagcctgtcacccagaacatcagcgccgaggcctggggcagagcctgtggcatcaccagcagctaccagcagggcgtgctgagcgccaccatcctgtacgagatcctgctgggcaaggccaccctgtacgccgtgctggtgtccaccctggtggtcatggctatggtcaagcggaagaacagcaggagtaagaggagcaggctcctgcacagtgactacatgaacatgactccacgccgccccggacccacccgcaagcattaccagccctatgccccaccacgcgacttcgcagcctatcgctccagagtgaagttcagcagaagcgccgacgcccctgcctaccagcagggacagaaccaactgtacaacgagctgaacctgggcagacgggaagagtacgacgtgctggacaagcggagaggcagggaccctgagatgggcggaaagccccagcggagaaagaacccccaggaaggactgtataacgaactccagaaagacaagatggccgaagcctacagcgagatcggcatgaagggcgagcggagaagaggcaagggccacgatggcctgtaccagggcctgagcaccgccaccaaggacacctatgacgccctgcacatgcaggccctgcctccaaga

SEQ ID NO: 25981 - DNA, 963 bp, synthetic construct
  source 1..963: mol_type = other DNA
aacgtgaccccacccaaggtgtccctgttcgagcccagcaaggccgagatcgccaataaacagaaggccaccctcgtgtgcctggccagaggcttcttccccgaccacgtggaactgtcttggtgggtcaacggcaaagaggtgcacagcggcgtctgcaccgaccctcaggcctacaaagagagcaactacagctactgcctgagcagtcggctgcgggtgtccgccaccttctggcacaacccccggaaccacttcagatgccaggtgcagttccacggcctgagcgaagaggacaagtggcccgaaggcagccctaagcctgtcacccagaacatcagcgccgaggcctggggcagagcctgtggcatcaccagcagctaccagcagggcgtgctgagcgccaccatcctgtacgagatcctgctgggcaaggccaccctgtacgccgtgctggtgtccaccctggtggtcatggctatggtcaagcggaagaacagcaggagtaagaggagcaggctcctgcacagtgactacatgaacatgactccacgccgccccggacccacccgcaagcattaccagccctatgccccaccacgcgacttcgcagcctatcgctccagagtgaagttcagcagaagcgccgacgcccctgcctaccagcagggacagaaccaactgtacaacgagctgaacctgggcagacgggaagagtacgacgtgctggacaagcggagaggcagggaccctgagatgggcggaaagccccagcggagaaagaacccccaggaaggactgtataacgaactccagaaagacaagatggccgaagcctacagcgagatcggcatgaagggcgagcggagaagaggcaagggccacgatggcctgtaccagggcctgagcaccgccaccaaggacacctatgacgccctgcacatgcaggccctgcctccaaga

SEQ ID NO: 25982 - DNA, 960 bp, synthetic construct
  source 1..960: mol_type = other DNA
gtgaccccacccaaggtgtccctgttcgagcccagcaaggccgagatcgccaataaacagaaggccaccctcgtgtgcctggccagaggcttcttccccgaccacgtggaactgtcttggtgggtcaacggcaaagaggtgcacagcggcgtctgcaccgaccctcaggcctacaaagagagcaactacagctactgcctgagcagtcggctgcgggtgtccgccaccttctggcacaacccccggaaccacttcagatgccaggtgcagttccacggcctgagcgaagaggacaagtggcccgaaggcagccctaagcctgtcacccagaacatcagcgccgaggcctggggcagagcctgtggcatcaccagcagctaccagcagggcgtgctgagcgccaccatcctgtacgagatcctgctgggcaaggccaccctgtacgccgtgctggtgtccaccctggtggtcatggctatggtcaagcggaagaacagcaggagtaagaggagcaggctcctgcacagtgactacatgaacatgactccacgccgccccggacccacccgcaagcattaccagccctatgccccaccacgcgacttcgcagcctatcgctccagagtgaagttcagcagaagcgccgacgcccctgcctaccagcagggacagaaccaactgtacaacgagctgaacctgggcagacgggaagagtacgacgtgctggacaagcggagaggcagggaccctgagatgggcggaaagccccagcggagaaagaacccccaggaaggactgtataacgaactccagaaagacaagatggccgaagcctacagcgagatcggcatgaagggcgagcggagaagaggcaagggccacgatggcctgtaccagggcctgagcaccgccaccaaggacacctatgacgccctgcacatgcaggccctgcctccaaga

SEQ ID NO: 25983 - DNA, 957 bp, synthetic construct
  source 1..957: mol_type = other DNA
accccacccaaggtgtccctgttcgagcccagcaaggccgagatcgccaataaacagaaggccaccctcgtgtgcctggccagaggcttcttccccgaccacgtggaactgtcttggtgggtcaacggcaaagaggtgcacagcggcgtctgcaccgaccctcaggcctacaaagagagcaactacagctactgcctgagcagtcggctgcgggtgtccgccaccttctggcacaacccccggaaccacttcagatgccaggtgcagttccacggcctgagcgaagaggacaagtggcccgaaggcagccctaagcctgtcacccagaacatcagcgccgaggcctggggcagagcctgtggcatcaccagcagctaccagcagggcgtgctgagcgccaccatcctgtacgagatcctgctgggcaaggccaccctgtacgccgtgctggtgtccaccctggtggtcatggctatggtcaagcggaagaacagcaggagtaagaggagcaggctcctgcacagtgactacatgaacatgactccacgccgccccggacccacccgcaagcattaccagccctatgccccaccacgcgacttcgcagcctatcgctccagagtgaagttcagcagaagcgccgacgcccctgcctaccagcagggacagaaccaactgtacaacgagctgaacctgggcagacgggaagagtacgacgtgctggacaagcggagaggcagggaccctgagatgggcggaaagccccagcggagaaagaacccccaggaaggactgtataacgaactccagaaagacaagatggccgaagcctacagcgagatcggcatgaagggcgagcggagaagaggcaagggccacgatggcctgtaccagggcctgagcaccgccaccaaggacacctatgacgccctgcacatgcaggccctgcctccaaga

SEQ ID NO: 25984 - DNA, 954 bp, synthetic construct
  source 1..954: mol_type = other DNA
ccacccaaggtgtccctgttcgagcccagcaaggccgagatcgccaataaacagaaggccaccctcgtgtgcctggccagaggcttcttccccgaccacgtggaactgtcttggtgggtcaacggcaaagaggtgcacagcggcgtctgcaccgaccctcaggcctacaaagagagcaactacagctactgcctgagcagtcggctgcgggtgtccgccaccttctggcacaacccccggaaccacttcagatgccaggtgcagttccacggcctgagcgaagaggacaagtggcccgaaggcagccctaagcctgtcacccagaacatcagcgccgaggcctggggcagagcctgtggcatcaccagcagctaccagcagggcgtgctgagcgccaccatcctgtacgagatcctgctgggcaaggccaccctgtacgccgtgctggtgtccaccctggtggtcatggctatggtcaagcggaagaacagcaggagtaagaggagcaggctcctgcacagtgactacatgaacatgactccacgccgccccggacccacccgcaagcattaccagccctatgccccaccacgcgacttcgcagcctatcgctccagagtgaagttcagcagaagcgccgacgcccctgcctaccagcagggacagaaccaactgtacaacgagctgaacctgggcagacgggaagagtacgacgtgctggacaagcggagaggcagggaccctgagatgggcggaaagccccagcggagaaagaacccccaggaaggactgtataacgaactccagaaagacaagatggccgaagcctacagcgagatcggcatgaagggcgagcggagaagaggcaagggccacgatggcctgtaccagggcctgagcaccgccaccaaggacacctatgacgccctgcacatgcaggccctgcctccaaga

SEQ ID NO: 25985 - DNA, 951 bp, synthetic construct
  source 1..951: mol_type = other DNA
cccaaggtgtccctgttcgagcccagcaaggccgagatcgccaataaacagaaggccaccctcgtgtgcctggccagaggcttcttccccgaccacgtggaactgtcttggtgggtcaacggcaaagaggtgcacagcggcgtctgcaccgaccctcaggcctacaaagagagcaactacagctactgcctgagcagtcggctgcgggtgtccgccaccttctggcacaacccccggaaccacttcagatgccaggtgcagttccacggcctgagcgaagaggacaagtggcccgaaggcagccctaagcctgtcacccagaacatcagcgccgaggcctggggcagagcctgtggcatcaccagcagctaccagcagggcgtgctgagcgccaccatcctgtacgagatcctgctgggcaaggccaccctgtacgccgtgctggtgtccaccctggtggtcatggctatggtcaagcggaagaacagcaggagtaagaggagcaggctcctgcacagtgactacatgaacatgactccacgccgccccggacccacccgcaagcattaccagccctatgccccaccacgcgacttcgcagcctatcgctccagagtgaagttcagcagaagcgccgacgcccctgcctaccagcagggacagaaccaactgtacaacgagctgaacctgggcagacgggaagagtacgacgtgctggacaagcggagaggcagggaccctgagatgggcggaaagccccagcggagaaagaacccccaggaaggactgtataacgaactccagaaagacaagatggccgaagcctacagcgagatcggcatgaagggcgagcggagaagaggcaagggccacgatggcctgtaccagggcctgagcaccgccaccaaggacacctatgacgccctgcacatgcaggccctgcctccaaga

SEQ ID NO: 25986 - DNA, 948 bp, synthetic construct
  source 1..948: mol_type = other DNA
aaggtgtccctgttcgagcccagcaaggccgagatcgccaataaacagaaggccaccctcgtgtgcctggccagaggcttcttccccgaccacgtggaactgtcttggtgggtcaacggcaaagaggtgcacagcggcgtctgcaccgaccctcaggcctacaaagagagcaactacagctactgcctgagcagtcggctgcgggtgtccgccaccttctggcacaacccccggaaccacttcagatgccaggtgcagttccacggcctgagcgaagaggacaagtggcccgaaggcagccctaagcctgtcacccagaacatcagcgccgaggcctggggcagagcctgtggcatcaccagcagctaccagcagggcgtgctgagcgccaccatcctgtacgagatcctgctgggcaaggccaccctgtacgccgtgctggtgtccaccctggtggtcatggctatggtcaagcggaagaacagcaggagtaagaggagcaggctcctgcacagtgactacatgaacatgactccacgccgccccggacccacccgcaagcattaccagccctatgccccaccacgcgacttcgcagcctatcgctccagagtgaagttcagcagaagcgccgacgcccctgcctaccagcagggacagaaccaactgtacaacgagctgaacctgggcagacgggaagagtacgacgtgctggacaagcggagaggcagggaccctgagatgggcggaaagccccagcggagaaagaacccccaggaaggactgtataacgaactccagaaagacaagatggccgaagcctacagcgagatcggcatgaagggcgagcggagaagaggcaagggccacgatggcctgtaccagggcctgagcaccgccaccaaggacacctatgacgccctgcacatgcaggccctgcctccaaga

SEQ ID NO: 25987 - DNA, 945 bp, synthetic construct
  source 1..945: mol_type = other DNA
gtgtccctgttcgagcccagcaaggccgagatcgccaataaacagaaggccaccctcgtgtgcctggccagaggcttcttccccgaccacgtggaactgtcttggtgggtcaacggcaaagaggtgcacagcggcgtctgcaccgaccctcaggcctacaaagagagcaactacagctactgcctgagcagtcggctgcgggtgtccgccaccttctggcacaacccccggaaccacttcagatgccaggtgcagttccacggcctgagcgaagaggacaagtggcccgaaggcagccctaagcctgtcacccagaacatcagcgccgaggcctggggcagagcctgtggcatcaccagcagctaccagcagggcgtgctgagcgccaccatcctgtacgagatcctgctgggcaaggccaccctgtacgccgtgctggtgtccaccctggtggtcatggctatggtcaagcggaagaacagcaggagtaagaggagcaggctcctgcacagtgactacatgaacatgactccacgccgccccggacccacccgcaagcattaccagccctatgccccaccacgcgacttcgcagcctatcgctccagagtgaagttcagcagaagcgccgacgcccctgcctaccagcagggacagaaccaactgtacaacgagctgaacctgggcagacgggaagagtacgacgtgctggacaagcggagaggcagggaccctgagatgggcggaaagccccagcggagaaagaacccccaggaaggactgtataacgaactccagaaagacaagatggccgaagcctacagcgagatcggcatgaagggcgagcggagaagaggcaagggccacgatggcctgtaccagggcctgagcaccgccaccaaggacacctatgacgccctgcacatgcaggccctgcctccaaga

SEQ ID NO: 25988 - DNA, 975 bp, synthetic construct; identical to SEQ ID NO: 25978
  source 1..975: mol_type = other DNA

SEQ ID NO: 25989 - DNA, 960 bp, synthetic construct; identical to SEQ ID NO: 25982
  source 1..960: mol_type = other DNA

SEQ ID NO: 25990 - DNA, 945 bp, synthetic construct; identical to SEQ ID NO: 25987
  source 1..945: mol_type = other DNA

SEQ ID NO: 25991 - DNA, 882 bp, synthetic construct
  source 1..882: mol_type = other DNA
atccagaaccctgatcctgccgtgtaccagctgcgggatagcaagagcagcgacaagagcgtgtgtctgttcaccgacttcgacagccagaccaacgtgtcccagagcaaggactccgacgtgtacatcaccgataagtgcgtgctggacatgcggagcatggacttcaagagcaactccgccgtggcctggtccaacaagtccgatttcgcctgcgccaacgccttcaacaacagcattatccccgaggacacattcttcccaagccccgagagcagctgcgacgtgaagctggtggaaaagagcttcgagacagacaccaacctgaacttccagaacctgctggtgatcgtgctgagaatcctgctgctgaaagtggccggctttaacctgctgatgaccctgcggctgtggtccagcaggagtaagaggagcaggctcctgcacagtgactacatgaacatgactccacgccgccccggacccacccgcaagcattaccagccctatgccccaccacgcgacttcgcagcctatcgctccagagtgaagttcagcagaagcgccgacgcccctgcctaccagcagggacagaaccaactgtacaacgagctgaacctgggcagacgggaagagtacgacgtgctggacaagcggagaggcagggaccctgagatgggcggaaagccccagcggagaaagaacccccaggaaggactgtataacgaactccagaaagacaagatggccgaagcctacagcgagatcggcatgaagggcgagcggagaagaggcaagggccacgatggcctgtaccagggcctgagcaccgccaccaaggacacctatgacgccctgcacatgcaggccctgcctccaaga

SEQ ID NO: 25992 - DNA, 879 bp, synthetic construct
  source 1..879: mol_type = other DNA
cagaaccctgatcctgccgtgtaccagctgcgggatagcaagagcagcgacaagagcgtgtgtctgttcaccgacttcgacagccagaccaacgtgtcccagagcaaggactccgacgtgtacatcaccgataagtgcgtgctggacatgcggagcatggacttcaagagcaactccgccgtggcctggtccaacaagtccgatttcgcctgcgccaacgccttcaacaacagcattatccccgaggacacattcttcccaagccccgagagcagctgcgacgtgaagctggtggaaaagagcttcgagacagacaccaacctgaacttccagaacctgctggtgatcgtgctgagaatcctgctgctgaaagtggccggctttaacctgctgatgaccctgcggctgtggtccagcaggagtaagaggagcaggctcctgcacagtgactacatgaacatgactccacgccgccccggacccacccgcaagcattaccagccctatgccccaccacgcgacttcgcagcctatcgctccagagtgaagttcagcagaagcgccgacgcccctgcctaccagcagggacagaaccaactgtacaacgagctgaacctgggcagacgggaagagtacgacgtgctggacaagcggagaggcagggaccctgagatgggcggaaagccccagcggagaaagaacccccaggaaggactgtataacgaactccagaaagacaagatggccgaagcctacagcgagatcggcatgaagggcgagcggagaagaggcaagggccacgatggcctgtaccagggcctgagcaccgccaccaaggacacctatgacgccctgcacatgcaggccctgcctccaaga

SEQ ID NO: 25993 - DNA, 876 bp, synthetic construct
  source 1..876: mol_type = other DNA
aaccctgatcctgccgtgtaccagctgcgggatagcaagagcagcgacaagagcgtgtgtctgttcaccgacttcgacagccagaccaacgtgtcccagagcaaggactccgacgtgtacatcaccgataagtgcgtgctggacatgcggagcatggacttcaagagcaactccgccgtggcctggtccaacaagtccgatttcgcctgcgccaacgccttcaacaacagcattatccccgaggacacattcttcccaagccccgagagcagctgcgacgtgaagctggtggaaaagagcttcgagacagacaccaacctgaacttccagaacctgctggtgatcgtgctgagaatcctgctgctgaaagtggccggctttaacctgctgatgaccctgcggctgtggtccagcaggagtaagaggagcaggctcctgcacagtgactacatgaacatgactccacgccgccccggacccacccgcaagcattaccagccctatgccccaccacgcgacttcgcagcctatcgctccagagtgaagttcagcagaagcgccgacgcccctgcctaccagcagggacagaaccaactgtacaacgagctgaacctgggcagacgggaagagtacgacgtgctggacaagcggagaggcagggaccctgagatgggcggaaagccccagcggagaaagaacccccaggaaggactgtataacgaactccagaaagacaagatggccgaagcctacagcgagatcggcatgaagggcgagcggagaagaggcaagggccacgatggcctgtaccagggcctgagcaccgccaccaaggacacctatgacgccctgcacatgcaggccctgcctccaaga

SEQ ID NO: 25994 - DNA, 873 bp, synthetic construct
  source 1..873: mol_type = other DNA
cctgatcctgccgtgtaccagctgcgggatagcaagagcagcgacaagagcgtgtgtctgttcaccgacttcgacagccagaccaacgtgtcccagagcaaggactccgacgtgtacatcaccgataagtgcgtgctggacatgcggagcatggacttcaagagcaactccgccgtggcctggtccaacaagtccgatttcgcctgcgccaacgccttcaacaacagcattatccccgaggacacattcttcccaagccccgagagcagctgcgacgtgaagctggtggaaaagagcttcgagacagacaccaacctgaacttccagaacctgctggtgatcgtgctgagaatcctgctgctgaaagtggccggctttaacctgctgatgaccctgcggctgtggtccagcaggagtaagaggagcaggctcctgcacagtgactacatgaacatgactccacgccgccccggacccacccgcaagcattaccagccctatgccccaccacgcgacttcgcagcctatcgctccagagtgaagttcagcagaagcgccgacgcccctgcctaccagcagggacagaaccaactgtacaacgagctgaacctgggcagacgggaagagtacgacgtgctggacaagcggagaggcagggaccctgagatgggcggaaagccccagcggagaaagaacccccaggaaggactgtataacgaactccagaaagacaagatggccgaagcctacagcgagatcggcatgaagggcgagcggagaagaggcaagggccacgatggcctgtaccagggcctgagcaccgccaccaaggacacctatgacgccctgcacatgcaggccctgcctccaaga

SEQ ID NO: 25995 - DNA, 870 bp, synthetic construct
  source 1..870: mol_type = other DNA
gatcctgccgtgtaccagctgcgggatagcaagagcagcgacaagagcgtgtgtctgttcaccgacttcgacagccagaccaacgtgtcccagagcaaggactccgacgtgtacatcaccgataagtgcgtgctggacatgcggagcatggacttcaagagcaactccgccgtggcctggtccaacaagtccgatttcgcctgcgccaacgccttcaacaacagcattatccccgaggacacattcttcccaagccccgagagcagctgcgacgtgaagctggtggaaaagagcttcgagacagacaccaacctgaacttccagaacctgctggtgatcgtgctgagaatcctgctgctgaaagtggccggctttaacctgctgatgaccctgcggctgtggtccagcaggagtaagaggagcaggctcctgcacagtgactacatgaacatgactccacgccgccccggacccacccgcaagcattaccagccctatgccccaccacgcgacttcgcagcctatcgctccagagtgaagttcagcagaagcgccgacgcccctgcctaccagcagggacagaaccaactgtacaacgagctgaacctgggcagacgggaagagtacgacgtgctggacaagcggagaggcagggaccctgagatgggcggaaagccccagcggagaaagaacccccaggaaggactgtataacgaactccagaaagacaagatggccgaagcctacagcgagatcggcatgaagggcgagcggagaagaggcaagggccacgatggcctgtaccagggcctgagcaccgccaccaaggacacctatgacgccctgcacatgcaggccctgcctccaaga

SEQ ID NO: 25996 - DNA, 867 bp, synthetic construct
  source 1..867: mol_type = other DNA
cctgccgtgtaccagctgcgggatagcaagagcagcgacaagagcgtgtgtctgttcaccgacttcgacagccagaccaacgtgtcccagagcaaggactccgacgtgtacatcaccgataagtgcgtgctggacatgcggagcatggacttcaagagcaactccgccgtggcctggtccaacaagtccgatttcgcctgcgccaacgccttcaacaacagcattatccccgaggacacattcttcccaagccccgagagcagctgcgacgtgaagctggtggaaaagagcttcgagacagacaccaacctgaacttccagaacctgctggtgatcgtgctgagaatcctgctgctgaaagtggccggctttaacctgctgatgaccctgcggctgtggtccagcaggagtaagaggagcaggctcctgcacagtgactacatgaacatgactccacgccgccccggacccacccgcaagcattaccagccctatgccccaccacgcgacttcgcagcctatcgctccagagtgaagttcagcagaagcgccgacgcccctgcctaccagcagggacagaaccaactgtacaacgagctgaacctgggcagacgggaagagtacgacgtgctggacaagcggagaggcagggaccctgagatgggcggaaagccccagcggagaaagaacccccaggaaggactgtataacgaactccagaaagacaagatggccgaagcctacagcgagatcggcatgaagggcgagcggagaagaggcaagggccacgatggcctgtaccagggcctgagcaccgccaccaaggacacctatgacgccctgcacatgcaggccctgcctccaaga

SEQ ID NO: 25997 - DNA, 864 bp, synthetic construct
  source 1..864: mol_type = other DNA
gccgtgtaccagctgcgggatagcaagagcagcgacaagagcgtgtgtctgttcaccgacttcgacagccagaccaacgtgtcccagagcaaggactccgacgtgtacatcaccgataagtgcgtgctggacatgcggagcatggacttcaagagcaactccgccgtggcctggtccaacaagtccgatttcgcctgcgccaacgccttcaacaacagcattatccccgaggacacattcttcccaagccccgagagcagctgcgacgtgaagctggtggaaaagagcttcgagacagacaccaacctgaacttccagaacctgctggtgatcgtgctgagaatcctgctgctgaaagtggccggctttaacctgctgatgaccctgcggctgtggtccagcaggagtaagaggagcaggctcctgcacagtgactacatgaacatgactccacgccgccccggacccacccgcaagcattaccagccctatgccccaccacgcgacttcgcagcctatcgctccagagtgaagttcagcagaagcgccgacgcccctgcctaccagcagggacagaaccaactgtacaacgagctgaacctgggcagacgggaagagtacgacgtgctggacaagcggagaggcagggaccctgagatgggcggaaagccccagcggagaaagaacccccaggaaggactgtataacgaactccagaaagacaagatggccgaagcctacagcgagatcggcatgaagggcgagcggagaagaggcaagggccacgatggcctgtaccagggcctgagcaccgccaccaaggacacctatgacgccctgcacatgcaggccctgcctccaaga

SEQ ID NO: 25998 - DNA, 861 bp, synthetic construct
  source 1..861: mol_type = other DNA
gtgtaccagctgcgggatagcaagagcagcgacaagagcgtgtgtctgttcaccgacttcgacagccagaccaacgtgtcccagagcaaggactccgacgtgtacatcaccgataagtgcgtgctggacatgcggagcatggacttcaagagcaactccgccgtggcctggtccaacaagtccgatttcgcctgcgccaacgccttcaacaacagcattatccccgaggacacattcttcccaagccccgagagcagctgcgacgtgaagctggtggaaaagagcttcgagacagacaccaacctgaacttccagaacctgctggtgatcgtgctgagaatcctgctgctgaaagtggccggctttaacctgctgatgaccctgcggctgtggtccagcaggagtaagaggagcaggctcctgcacagtgactacatgaacatgactccacgccgccccggacccacccgcaagcattaccagccctatgccccaccacgcgacttcgcagcctatcgctccagagtgaagttcagcagaagcgccgacgcccctgcctaccagcagggacagaaccaactgtacaacgagctgaacctgggcagacgggaagagtacgacgtgctggacaagcggagaggcagggaccctgagatgggcggaaagccccagcggagaaagaacccccaggaaggactgtataacgaactccagaaagacaagatggccgaagcctacagcgagatcggcatgaagggcgagcggagaagaggcaagggccacgatggcctgtaccagggcctgagcaccgccaccaaggacacctatgacgccctgcacatgcaggccctgcctccaaga

SEQ ID NO: 25999 - DNA, 858 bp, synthetic construct
  source 1..858: mol_type = other DNA
taccagctgcgggatagcaagagcagcgacaagagcgtgtgtctgttcaccgacttcgacagccagaccaacgtgtcccagagcaaggactccgacgtgtacatcaccgataagtgcgtgctggacatgcggagcatggacttcaagagcaactccgccgtggcctggtccaacaagtccgatttcgcctgcgccaacgccttcaacaacagcattatccccgaggacacattcttcccaagccccgagagcagctgcgacgtgaagctggtggaaaagagcttcgagacagacaccaacctgaacttccagaacctgctggtgatcgtgctgagaatcctgctgctgaaagtggccggctttaacctgctgatgaccctgcggctgtggtccagcaggagtaagaggagcaggctcctgcacagtgactacatgaacatgactccacgccgccccggacccacccgcaagcattaccagccctatgccccaccacgcgacttcgcagcctatcgctccagagtgaagttcagcagaagcgccgacgcccctgcctaccagcagggacagaaccaactgtacaacgagctgaacctgggcagacgggaagagtacgacgtgctggacaagcggagaggcagggaccctgagatgggcggaaagccccagcggagaaagaacccccaggaaggactgtataacgaactccagaaagacaagatggccgaagcctacagcgagatcggcatgaagggcgagcggagaagaggcaagggccacgatggcctgtaccagggcctgagcaccgccaccaaggacacctatgacgccctgcacatgcaggccctgcctccaaga

SEQ ID NO: 26000 - DNA, 855 bp, synthetic construct
  source 1..855: mol_type = other DNA
cagctgcgggatagcaagagcagcgacaagagcgtgtgtctgttcaccgacttcgacagccagaccaacgtgtcccagagcaaggactccgacgtgtacatcaccgataagtgcgtgctggacatgcggagcatggacttcaagagcaactccgccgtggcctggtccaacaagtccgatttcgcctgcgccaacgccttcaacaacagcattatccccgaggacacattcttcccaagccccgagagcagctgcgacgtgaagctggtggaaaagagcttcgagacagacaccaacctgaacttccagaacctgctggtgatcgtgctgagaatcctgctgctgaaagtggccggctttaacctgctgatgaccctgcggctgtggtccagcaggagtaagaggagcaggctcctgcacagtgactacatgaacatgactccacgccgccccggacccacccgcaagcattaccagccctatgccccaccacgcgacttcgcagcctatcgctccagagtgaagttcagcagaagcgccgacgcccctgcctaccagcagggacagaaccaactgtacaacgagctgaacctgggcagacgggaagagtacgacgtgctggacaagcggagaggcagggaccctgagatgggcggaaagccccagcggagaaagaacccccaggaaggactgtataacgaactccagaaagacaagatggccgaagcctacagcgagatcggcatgaagggcgagcggagaagaggcaagggccacgatggcctgtaccagggcctgagcaccgccaccaaggacacctatgacgccctgcacatgcaggccctgcctccaaga

SEQ ID NO: 26001 - DNA, 852 bp, synthetic construct
  source 1..852: mol_type = other DNA
ctgcgggatagcaagagcagcgacaagagcgtgtgtctgttcaccgacttcgacagccagaccaacgtgtcccagagcaaggactccgacgtgtacatcaccgataagtgcgtgctggacatgcggagcatggacttcaagagcaactccgccgtggcctggtccaacaagtccgatttcgcctgcgccaacgccttcaacaacagcattatccccgaggacacattcttcccaagccccgagagcagctgcgacgtgaagctggtggaaaagagcttcgagacagacaccaacctgaacttccagaacctgctggtgatcgtgctgagaatcctgctgctgaaagtggccggctttaacctgctgatgaccctgcggctgtggtccagcaggagtaagaggagcaggctcctgcacagtgactacatgaacatgactccacgccgccccggacccacccgcaagcattaccagccctatgccccaccacgcgacttcgcagcctatcgctccagagtgaagttcagcagaagcgccgacgcccctgcctaccagcagggacagaaccaactgtacaacgagctgaacctgggcagacgggaagagtacgacgtgctggacaagcggagaggcagggaccctgagatgggcggaaagccccagcggagaaagaacccccaggaaggactgtataacgaactccagaaagacaagatggccgaagcctacagcgagatcggcatgaagggcgagcggagaagaggcaagggccacgatggcctgtaccagggcctgagcaccgccaccaaggacacctatgacgccctgcacatgcaggccctgcctccaaga

SEQ ID NO: 26002 - DNA, 849 bp, synthetic construct
  source 1..849: mol_type = other DNA
cgggatagcaagagcagcgacaagagcgtgtgtctgttcaccgacttcgacagccagaccaacgtgtcccagagcaaggactccgacgtgtacatcaccgataagtgcgtgctggacatgcggagcatggacttcaagagcaactccgccgtggcctggtccaacaagtccgatttcgcctgcgccaacgccttcaacaacagcattatccccgaggacacattcttcccaagccccgagagcagctgcgacgtgaagctggtggaaaagagcttcgagacagacaccaacctgaacttccagaacctgctggtgatcgtgctgagaatcctgctgctgaaagtggccggctttaacctgctgatgaccctgcggctgtggtccagcaggagtaagaggagcaggctcctgcacagtgactacatgaacatgactccacgccgccccggacccacccgcaagcattaccagccctatgccccaccacgcgacttcgcagcctatcgctccagagtgaagttcagcagaagcgccgacgcccctgcctaccagcagggacagaaccaactgtacaacgagctgaacctgggcagacgggaagagtacgacgtgctggacaagcggagaggcagggaccctgagatgggcggaaagccccagcggagaaagaacccccaggaaggactgtataacgaactccagaaagacaagatggccgaagcctacagcgagatcggcatgaagggcgagcggagaagaggcaagggccacgatggcctgtaccagggcctgagcaccgccaccaaggacacctatgacgccctgcacatgcaggccctgcctccaaga

SEQ ID NO: 26003 - DNA, 846 bp, synthetic construct
  source 1..846: mol_type = other DNA
gatagcaagagcagcgacaagagcgtgtgtctgttcaccgacttcgacagccagaccaacgtgtcccagagcaaggactccgacgtgtacatcaccgataagtgcgtgctggacatgcggagcatggacttcaagagcaactccgccgtggcctggtccaacaagtccgatttcgcctgcgccaacgccttcaacaacagcattatccccgaggacacattcttcccaagccccgagagcagctgcgacgtgaagctggtggaaaagagcttcgagacagacaccaacctgaacttccagaacctgctggtgatcgtgctgagaatcctgctgctgaaagtggccggctttaacctgctgatgaccctgcggctgtggtccagcaggagtaagaggagcaggctcctgcacagtgactacatgaacatgactccacgccgccccggacccacccgcaagcattaccagccctatgccccaccacgcgacttcgcagcctatcgctccagagtgaagttcagcagaagcgccgacgcccctgcctaccagcagggacagaaccaactgtacaacgagctgaacctgggcagacgggaagagtacgacgtgctggacaagcggagaggcagggaccctgagatgggcggaaagccccagcggagaaagaacccccaggaaggactgtataacgaactccagaaagacaagatggccgaagcctacagcgagatcggcatgaagggcgagcggagaagaggcaagggccacgatggcctgtaccagggcctgagcaccgccaccaaggacacctatgacgccctgcacatgcaggccctgcctccaaga

SEQ ID NO: 26004 - DNA, 843 bp, synthetic construct
  source 1..843: mol_type = other DNA
agcaagagcagcgacaagagcgtgtgtctgttcaccgacttcgacagccagaccaacgtgtcccagagcaaggactccgacgtgtacatcaccgataagtgcgtgctggacatgcggagcatggacttcaagagcaactccgccgtggcctggtccaacaagtccgatttcgcctgcgccaacgccttcaacaacagcattatccccgaggacacattcttcccaagccccgagagcagctgcgacgtgaagctggtggaaaagagcttcgagacagacaccaacctgaacttccagaacctgctggtgatcgtgctgagaatcctgctgctgaaagtggccggctttaacctgctgatgaccctgcggctgtggtccagcaggagtaagaggagcaggctcctgcacagtgactacatgaacatgactccacgccgccccggacccacccgcaagcattaccagccctatgccccaccacgcgacttcgcagcctatcgctccagagtgaagttcagcagaagcgccgacgcccctgcctaccagcagggacagaaccaactgtacaacgagctgaacctgggcagacgggaagagtacgacgtgctggacaagcggagaggcagggaccctgagatgggcggaaagccccagcggagaaagaacccccaggaaggactgtataacgaactccagaaagacaagatggccgaagcctacagcgagatcggcatgaagggcgagcggagaagaggcaagggccacgatggcctgtaccagggcctgagcaccgccaccaaggacacctatgacgccctgcacatgcaggccctgcctccaaga

SEQ ID NO: 26005 - DNA, 840 bp, synthetic construct
  source 1..840: mol_type = other DNA
aagagcagcgacaagagcgtgtgtctgttcaccgacttcgacagccagaccaacgtgtcccagagcaaggactccgacgtgtacatcaccgataagtgcgtgctggacatgcggagcatggacttcaagagcaactccgccgtggcctggtccaacaagtccgatttcgcctgcgccaacgccttcaacaacagcattatccccgaggacacattcttcccaagccccgagagcagctgcgacgtgaagctggtggaaaagagcttcgagacagacaccaacctgaacttccagaacctgctggtgatcgtgctgagaatcctgctgctgaaagtggccggctttaacctgctgatgaccctgcggctgtggtccagcaggagtaagaggagcaggctcctgcacagtgactacatgaacatgactccacgccgccccggacccacccgcaagcattaccagccctatgccccaccacgcgacttcgcagcctatcgctccagagtgaagttcagcagaagcgccgacgcccctgcctaccagcagggacagaaccaactgtacaacgagctgaacctgggcagacgggaagagtacgacgtgctggacaagcggagaggcagggaccctgagatgggcggaaagccccagcggagaaagaacccccaggaaggactgtataacgaactccagaaagacaagatggccgaagcctacagcgagatcggcatgaagggcgagcggagaagaggcaagggccacgatggcctgtaccagggcctgagcaccgccaccaaggacacctatgacgccctgcacatgcaggccctgcctccaaga

SEQ ID NO: 26006 - DNA, 837 bp, synthetic construct
  source 1..837: mol_type = other DNA
agcagcgacaagagcgtgtgtctgttcaccgacttcgacagccagaccaacgtgtcccagagcaaggactccgacgtgtacatcaccgataagtgcgtgctggacatgcggagcatggacttcaagagcaactccgccgtggcctggtccaacaagtccgatttcgcctgcgccaacgccttcaacaacagcattatccccgaggacacattcttcccaagccccgagagcagctgcgacgtgaagctggtggaaaagagcttcgagacagacaccaacctgaacttccagaacctgctggtgatcgtgctgagaatcctgctgctgaaagtggccggctttaacctgctgatgaccctgcggctgtggtccagcaggagtaagaggagcaggctcctgcacagtgactacatgaacatgactccacgccgccccggacccacccgcaagcattaccagccctatgccccaccacgcgacttcgcagcctatcgctccagagtgaagttcagcagaagcgccgacgcccctgcctaccagcagggacagaaccaactgtacaacgagctgaacctgggcagacgggaagagtacgacgtgctggacaagcggagaggcagggaccctgagatgggcggaaagccccagcggagaaagaacccccaggaaggactgtataacgaactccagaaagacaagatggccgaagcctacagcgagatcggcatgaagggcgagcggagaagaggcaagggccacgatggcctgtaccagggcctgagcaccgccaccaaggacacctatgacgccctgcacatgcaggccctgcctccaaga

SEQ ID NO: 26007 - DNA, 834 bp, synthetic construct
  source 1..834: mol_type = other DNA
agcgacaagagcgtgtgtctgttcaccgacttcgacagccagaccaacgtgtcccagagcaaggactccgacgtgtacatcaccgataagtgcgtgctggacatgcggagcatggacttcaagagcaactccgccgtggcctggtccaacaagtccgatttcgcctgcgccaacgccttcaacaacagcattatccccgaggacacattcttcccaagccccgagagcagctgcgacgtgaagctggtggaaaagagcttcgagacagacaccaacctgaacttccagaacctgctggtgatcgtgctgagaatcctgctgctgaaagtggccggctttaacctgctgatgaccctgcggctgtggtccagcaggagtaagaggagcaggctcctgcacagtgactacatgaacatgactccacgccgccccggacccacccgcaagcattaccagccctatgccccaccacgcgacttcgcagcctatcgctccagagtgaagttcagcagaagcgccgacgcccctgcctaccagcagggacagaaccaactgtacaacgagctgaacctgggcagacgggaagagtacgacgtgctggacaagcggagaggcagggaccctgagatgggcggaaagccccagcggagaaagaacccccaggaaggactgtataacgaactccagaaagacaagatggccgaagcctacagcgagatcggcatgaagggcgagcggagaagaggcaagggccacgatggcctgtaccagggcctgagcaccgccaccaaggacacctatgacgccctgcacatgcaggccctgcctccaaga

SEQ ID NO: 26008 - DNA, 831 bp, synthetic construct
  source 1..831: mol_type = other DNA
gacaagagcgtgtgtctgttcaccgacttcgacagccagaccaacgtgtcccagagcaaggactccgacgtgtacatcaccgataagtgcgtgctggacatgcggagcatggacttcaagagcaactccgccgtggcctggtccaacaagtccgatttcgcctgcgccaacgccttcaacaacagcattatccccgaggacacattcttcccaagccccgagagcagctgcgacgtgaagctggtggaaaagagcttcgagacagacaccaacctgaacttccagaacctgctggtgatcgtgctgagaatcctgctgctgaaagtggccggctttaacctgctgatgaccctgcggctgtggtccagcaggagtaagaggagcaggctcctgcacagtgactacatgaacatgactccacgccgccccggacccacccgcaagcattaccagccctatgccccaccacgcgacttcgcagcctatcgctccagagtgaagttcagcagaagcgccgacgcccctgcctaccagcagggacagaaccaactgtacaacgagctgaacctgggcagacgggaagagtacgacgtgctggacaagcggagaggcagggaccctgagatgggcggaaagccccagcggagaaagaacccccaggaaggactgtataacgaactccagaaagacaagatggccgaagcctacagcgagatcggcatgaagggcgagcggagaagaggcaagggccacgatggcctgtaccagggcctgagcaccgccaccaaggacacctatgacgccctgcacatgcaggccctgcctccaaga

SEQ ID NO: 26009 - DNA, 828 bp, synthetic construct
  source 1..828: mol_type = other DNA
aagagcgtgtgtctgttcaccgacttcgacagccagaccaacgtgtcccagagcaaggactccgacgtgtacatcaccgataagtgcgtgctggacatgcggagcatggacttcaagagcaactccgccgtggcctggtccaacaagtccgatttcgcctgcgccaacgccttcaacaacagcattatccccgaggacacattcttcccaagccccgagagcagctgcgacgtgaagctggtggaaaagagcttcgagacagacaccaacctgaacttccagaacctgctggtgatcgtgctgagaatcctgctgctgaaagtggccggctttaacctgctgatgaccctgcggctgtggtccagcaggagtaagaggagcaggctcctgcacagtgactacatgaacatgactccacgccgccccggacccacccgcaagcattaccagccctatgccccaccacgcgacttcgcagcctatcgctccagagtgaagttcagcagaagcgccgacgcccctgcctaccagcagggacagaaccaactgtacaacgagctgaacctgggcagacgggaagagtacgacgtgctggacaagcggagaggcagggaccctgagatgggcggaaagccccagcggagaaagaacccccaggaaggactgtataacgaactccagaaagacaagatggccgaagcctacagcgagatcggcatgaagggcgagcggagaagaggcaagggccacgatggcctgtaccagggcctgagcaccgccaccaaggacacctatgacgccctgcacatgcaggccctgcctccaaga

SEQ ID NO: 26010 - DNA, 825 bp, synthetic construct
  source 1..825: mol_type = other DNA
agcgtgtgtctgttcaccgacttcgacagccagaccaacgtgtcccagagcaaggactccgacgtgtacatcaccgataagtgcgtgctggacatgcggagcatggacttcaagagcaactccgccgtggcctggtccaacaagtccgatttcgcctgcgccaacgccttcaacaacagcattatccccgaggacacattcttcccaagccccgagagcagctgcgacgtgaagctggtggaaaagagcttcgagacagacaccaacctgaacttccagaacctgctggtgatcgtgctgagaatcctgctgctgaaagtggccggctttaacctgctgatgaccctgcggctgtggtccagcaggagtaagaggagcaggctcctgcacagtgactacatgaacatgactccacgccgccccggacccacccgcaagcattaccagccctatgccccaccacgcgacttcgcagcctatcgctccagagtgaagttcagcagaagcgccgacgcccctgcctaccagcagggacagaaccaactgtacaacgagctgaacctgggcagacgggaagagtacgacgtgctggacaagcggagaggcagggaccctgagatgggcggaaagccccagcggagaaagaacccccaggaaggactgtataacgaactccagaaagacaagatggccgaagcctacagcgagatcggcatgaagggcgagcggagaagaggcaagggccacgatggcctgtaccagggcctgagcaccgccaccaaggacacctatgacgccctgcacatgcaggccctgcctccaaga

SEQ ID NO: 26011 - DNA, 822 bp, synthetic construct
  source 1..822: mol_type = other DNA
gtgtgtctgttcaccgacttcgacagccagaccaacgtgtcccagagcaaggactccgacgtgtacatcaccgataagtgcgtgctggacatgcggagcatggacttcaagagcaactccgccgtggcctggtccaacaagtccgatttcgcctgcgccaacgccttcaacaacagcattatccccgaggacacattcttcccaagccccgagagcagctgcgacgtgaagctggtggaaaagagcttcgagacagacaccaacctgaacttccagaacctgctggtgatcgtgctgagaatcctgctgctgaaagtggccggctttaacctgctgatgaccctgcggctgtggtccagcaggagtaagaggagcaggctcctgcacagtgactacatgaacatgactccacgccgccccggacccacccgcaagcattaccagccctatgccccaccacgcgacttcgcagcctatcgctccagagtgaagttcagcagaagcgccgacgcccctgcctaccagcagggacagaaccaactgtacaacgagctgaacctgggcagacgggaagagtacgacgtgctggacaagcggagaggcagggaccctgagatgggcggaaagccccagcggagaaagaacccccaggaaggactgtataacgaactccagaaagacaagatggccgaagcctacagcgagatcggcatgaagggcgagcggagaagaggcaagggccacgatggcctgtaccagggcctgagcaccgccaccaaggacacctatgacgccctgcacatgcaggccctgcctccaaga

SEQ ID NO: 26012 - DNA, 819 bp, synthetic construct
  source 1..819: mol_type = other DNA
tgtctgttcaccgacttcgacagccagaccaacgtgtcccagagcaaggactccgacgtgtacatcaccgataagtgcgtgctggacatgcggagcatggacttcaagagcaactccgccgtggcctggtccaacaagtccgatttcgcctgcgccaacgccttcaacaacagcattatccccgaggacacattcttcccaagccccgagagcagctgcgacgtgaagctggtggaaaagagcttcgagacagacaccaacctgaacttccagaacctgctggtgatcgtgctgagaatcctgctgctgaaagtggccggctttaacctgctgatgaccctgcggctgtggtccagcaggagtaagaggagcaggctcctgcacagtgactacatgaacatgactccacgccgccccggacccacccgcaagcattaccagccctatgccccaccacgcgacttcgcagcctatcgctccagagtgaagttcagcagaagcgccgacgcccctgcctaccagcagggacagaaccaactgtacaacgagctgaacctgggcagacgggaagagtacgacgtgctggacaagcggagaggcagggaccctgagatgggcggaaagccccagcggagaaagaacccccaggaaggactgtataacgaactccagaaagacaagatggccgaagcctacagcgagatcggcatgaagggcgagcggagaagaggcaagggccacgatggcctgtaccagggcctgagcaccgccaccaaggacacctatgacgccctgcacatgcaggccctgcctccaaga

SEQ ID NO: 26013 - DNA, 816 bp, synthetic construct
  source 1..816: mol_type = other DNA
ctgttcaccgacttcgacagccagaccaacgtgtcccagagcaaggactccgacgtgtacatcaccgataagtgcgtgctggacatgcggagcatggacttcaagagcaactccgccgtggcctggtccaacaagtccgatttcgcctgcgccaacgccttcaacaacagcattatccccgaggacacattcttcccaagccccgagagcagctgcgacgtgaagctggtggaaaagagcttcgagacagacaccaacctgaacttccagaacctgctggtgatcgtgctgagaatcctgctgctgaaagtggccggctttaacctgctgatgaccctgcggctgtggtccagcaggagtaagaggagcaggctcctgcacagtgactacatgaacatgactccacgccgccccggacccacccgcaagcattaccagccctatgccccaccacgcgacttcgcagcctatcgctccagagtgaagttcagcagaagcgccgacgcccctgcctaccagcagggacagaaccaactgtacaacgagctgaacctgggcagacgggaagagtacgacgtgctggacaagcggagaggcagggaccctgagatgggcggaaagccccagcggagaaagaacccccaggaaggactgtataacgaactccagaaagacaagatggccgaagcctacagcgagatcggcatgaagggcgagcggagaagaggcaagggccacgatggcctgtaccagggcctgagcaccgccaccaaggacacctatgacgccctgcacatgcaggccctgcctccaaga

SEQ ID NO: 26014 - DNA, 813 bp, synthetic construct
  source 1..813: mol_type = other DNA
ttcaccgacttcgacagccagaccaacgtgtcccagagcaaggactccgacgtgtacatcaccgataagtgcgtgctggacatgcggagcatggacttcaagagcaactccgccgtggcctggtccaacaagtccgatttcgcctgcgccaacgccttcaacaacagcattatccccgaggacacattcttcccaagccccgagagcagctgcgacgtgaagctggtggaaaagagcttcgagacagacaccaacctgaacttccagaacctgctggtgatcgtgctgagaatcctgctgctgaaagtggccggctttaacctgctgatgaccctgcggctgtggtccagcaggagtaagaggagcaggctcctgcacagtgactacatgaacatgactccacgccgccccggacccacccgcaagcattaccagccctatgccccaccacgcgacttcgcagcctatcgctccagagtgaagttcagcagaagcgccgacgcccctgcctaccagcagggacagaaccaactgtacaacgagctgaacctgggcagacgggaagagtacgacgtgctggacaagcggagaggcagggaccctgagatgggcggaaagccccagcggagaaagaacccccaggaaggactgtataacgaactccagaaagacaagatggccgaagcctacagcgagatcggcatgaagggcgagcggagaagaggcaagggccacgatggcctgtaccagggcctgagcaccgccaccaaggacacctatgacgccctgcacatgcaggccctgcctccaaga

SEQ ID NO: 26015 - DNA, 810 bp, synthetic construct
  source 1..810: mol_type = other DNA
accgacttcgacagccagaccaacgtgtcccagagcaaggactccgacgtgtacatcaccgataagtgcgtgctggacatgcggagcatggacttcaagagcaactccgccgtggcctggtccaacaagtccgatttcgcctgcgccaacgccttcaacaacagcattatccccgaggacacattcttcccaagccccgagagcagctgcgacgtgaagctggtggaaaagagcttcgagacagacaccaacctgaacttccagaacctgctggtgatcgtgctgagaatcctgctgctgaaagtggccggctttaacctgctgatgaccctgcggctgtggtccagcaggagtaagaggagcaggctcctgcacagtgactacatgaacatgactccacgccgccccggacccacccgcaagcattaccagccctatgccccaccacgcgacttcgcagcctatcgctccagagtgaagttcagcagaagcgccgacgcccctgcctaccagcagggacagaaccaactgtacaacgagctgaacctgggcagacgggaagagtacgacgtgctggacaagcggagaggcagggaccctgagatgggcggaaagccccagcggagaaagaacccccaggaaggactgtataacgaactccagaaagacaagatggccgaagcctacagcgagatcggcatgaagggcgagcggagaagaggcaagggccacgatggcctgtaccagggcctgagcaccgccaccaaggacacctatgacgccctgcacatgcaggccctgcctccaaga

SEQ ID NO: 26016 - DNA, 807 bp, synthetic construct
  source 1..807: mol_type = other DNA
gacttcgacagccagaccaacgtgtcccagagcaaggactccgacgtgtacatcaccgataagtgcgtgctggacatgcggagcatggacttcaagagcaactccgccgtggcctggtccaacaagtccgatttcgcctgcgccaacgccttcaacaacagcattatccccgaggacacattcttcccaagccccgagagcagctgcgacgtgaagctggtggaaaagagcttcgagacagacaccaacctgaacttccagaacctgctggtgatcgtgctgagaatcctgctgctgaaagtggccggctttaacctgctgatgaccctgcggctgtggtccagcaggagtaagaggagcaggctcctgcacagtgactacatgaacatgactccacgccgccccggacccacccgcaagcattaccagccctatgccccaccacgcgacttcgcagcctatcgctccagagtgaagttcagcagaagcgccgacgcccctgcctaccagcagggacagaaccaactgtacaacgagctgaacctgggcagacgggaagagtacgacgtgctggacaagcggagaggcagggaccctgagatgggcggaaagccccagcggagaaagaacccccaggaaggactgtataacgaactccagaaagacaagatggccgaagcctacagcgagatcggcatgaagggcgagcggagaagaggcaagggccacgatggcctgtaccagggcctgagcaccgccaccaaggacacctatgacgccctgcacatgcaggccctgcctccaaga

SEQ ID NO: 26017 - DNA, 804 bp, synthetic construct
  source 1..804: mol_type = other DNA
ttcgacagccagaccaacgtgtcccagagcaaggactccgacgtgtacatcaccgataagtgcgtgctggacatgcggagcatggacttcaagagcaactccgccgtggcctggtccaacaagtccgatttcgcctgcgccaacgccttcaacaacagcattatccccgaggacacattcttcccaagccccgagagcagctgcgacgtgaagctggtggaaaagagcttcgagacagacaccaacctgaacttccagaacctgctggtgatcgtgctgagaatcctgctgctgaaagtggccggctttaacctgctgatgaccctgcggctgtggtccagcaggagtaagaggagcaggctcctgcacagtgactacatgaacatgactccacgccgccccggacccacccgcaagcattaccagccctatgccccaccacgcgacttcgcagcctatcgctccagagtgaagttcagcagaagcgccgacgcccctgcctaccagcagggacagaaccaactgtacaacgagctgaacctgggcagacgggaagagtacgacgtgctggacaagcggagaggcagggaccctgagatgggcggaaagccccagcggagaaagaacccccaggaaggactgtataacgaactccagaaagacaagatggccgaagcctacagcgagatcggcatgaagggcgagcggagaagaggcaagggccacgatggcctgtaccagggcctgagcaccgccaccaaggacacctatgacgccctgcacatgcaggccctgcctccaaga

SEQ ID NO: 26018 - DNA, 801 bp, synthetic construct
  source 1..801: mol_type = other DNA
gacagccagaccaacgtgtcccagagcaaggactccgacgtgtacatcaccgataagtgcgtgctggacatgcggagcatggacttcaagagcaactccgccgtggcctggtccaacaagtccgatttcgcctgcgccaacgccttcaacaacagcattatccccgaggacacattcttcccaagccccgagagcagctgcgacgtgaagctggtggaaaagagcttcgagacagacaccaacctgaacttccagaacctgctggtgatcgtgctgagaatcctgctgctgaaagtggccggctttaacctgctgatgaccctgcggctgtggtccagcaggagtaagaggagcaggctcctgcacagtgactacatgaacatgactccacgccgccccggacccacccgcaagcattaccagccctatgccccaccacgcgacttcgcagcctatcgctccagagtgaagttcagcagaagcgccgacgcccctgcctaccagcagggacagaaccaactgtacaacgagctgaacctgggcagacgggaagagtacgacgtgctggacaagcggagaggcagggaccctgagatgggcggaaagccccagcggagaaagaacccccaggaaggactgtataacgaactccagaaagacaagatggccgaagcctacagcgagatcggcatgaagggcgagcggagaagaggcaagggccacgatggcctgtaccagggcctgagcaccgccaccaaggacacctatgacgccctgcacatgcaggccctgcctccaaga

SEQ ID NO: 26019 - DNA, 798 bp, synthetic construct
  source 1..798: mol_type = other DNA
agccagaccaacgtgtcccagagcaaggactccgacgtgtacatcaccgataagtgcgtgctggacatgcggagcatggacttcaagagcaactccgccgtggcctggtccaacaagtccgatttcgcctgcgccaacgccttcaacaacagcattatccccgaggacacattcttcccaagccccgagagcagctgcgacgtgaagctggtggaaaagagcttcgagacagacaccaacctgaacttccagaacctgctggtgatcgtgctgagaatcctgctgctgaaagtggccggctttaacctgctgatgaccctgcggctgtggtccagcaggagtaagaggagcaggctcctgcacagtgactacatgaacatgactccacgccgccccggacccacccgcaagcattaccagccctatgccccaccacgcgacttcgcagcctatcgctccagagtgaagttcagcagaagcgccgacgcccctgcctaccagcagggacagaaccaactgtacaacgagctgaacctgggcagacgggaagagtacgacgtgctggacaagcggagaggcagggaccctgagatgggcggaaagccccagcggagaaagaacccccaggaaggactgtataacgaactccagaaagacaagatggccgaagcctacagcgagatcggcatgaagggcgagcggagaagaggcaagggccacgatggcctgtaccagggcctgagcaccgccaccaaggacacctatgacgccctgcacatgcaggccctgcctccaaga

SEQ ID NO: 26020 - DNA, 795 bp, synthetic construct
  source 1..795: mol_type = other DNA
cagaccaacgtgtcccagagcaaggactccgacgtgtacatcaccgataagtgcgtgctggacatgcggagcatggacttcaagagcaactccgccgtggcctggtccaacaagtccgatttcgcctgcgccaacgccttcaacaacagcattatccccgaggacacattcttcccaagccccgagagcagctgcgacgtgaagctggtggaaaagagcttcgagacagacaccaacctgaacttccagaacctgctggtgatcgtgctgagaatcctgctgctgaaagtggccggctttaacctgctgatgaccctgcggctgtggtccagcaggagtaagaggagcaggctcctgcacagtgactacatgaacatgactccacgccgccccggacccacccgcaagcattaccagccctatgccccaccacgcgacttcgcagcctatcgctccagagtgaagttcagcagaagcgccgacgcccctgcctaccagcagggacagaaccaactgtacaacgagctgaacctgggcagacgggaagagtacgacgtgctggacaagcggagaggcagggaccctgagatgggcggaaagccccagcggagaaagaacccccaggaaggactgtataacgaactccagaaagacaagatggccgaagcctacagcgagatcggcatgaagggcgagcggagaagaggcaagggccacgatggcctgtaccagggcctgagcaccgccaccaaggacacctatgacgccctgcacatgcaggccctgcctccaaga

SEQ ID NO: 26021 - DNA, 792 bp, synthetic construct
  source 1..792: mol_type = other DNA
accaacgtgtcccagagcaaggactccgacgtgtacatcaccgataagtgcgtgctggacatgcggagcatggacttcaagagcaactccgccgtggcctggtccaacaagtccgatttcgcctgcgccaacgccttcaacaacagcattatccccgaggacacattcttcccaagccccgagagcagctgcgacgtgaagctggtggaaaagagcttcgagacagacaccaacctgaacttccagaacctgctggtgatcgtgctgagaatcctgctgctgaaagtggccggctttaacctgctgatgaccctgcggctgtggtccagcaggagtaagaggagcaggctcctgcacagtgactacatgaacatgactccacgccgccccggacccacccgcaagcattaccagccctatgccccaccacgcgacttcgcagcctatcgctccagagtgaagttcagcagaagcgccgacgcccctgcctaccagcagggacagaaccaactgtacaacgagctgaacctgggcagacgggaagagtacgacgtgctggacaagcggagaggcagggaccctgagatgggcggaaagccccagcggagaaagaacccccaggaaggactgtataacgaactccagaaagacaagatggccgaagcctacagcgagatcggcatgaagggcgagcggagaagaggcaagggccacgatggcctgtaccagggcctgagcaccgccaccaaggacacctatgacgccctgcacatgcaggccctgcctccaaga

SEQ ID NO: 26022 - DNA, 789 bp, synthetic construct
  source 1..789: mol_type = other DNA
aacgtgtcccagagcaaggactccgacgtgtacatcaccgataagtgcgtgctggacatgcggagcatggacttcaagagcaactccgccgtggcctggtccaacaagtccgatttcgcctgcgccaacgccttcaacaacagcattatccccgaggacacattcttcccaagccccgagagcagctgcgacgtgaagctggtggaaaagagcttcgagacagacaccaacctgaacttccagaacctgctggtgatcgtgctgagaatcctgctgctgaaagtggccggctttaacctgctgatgaccctgcggctgtggtccagcaggagtaagaggagcaggctcctgcacagtgactacatgaacatgactccacgccgccccggacccacccgcaagcattaccagccctatgccccaccacgcgacttcgcagcctatcgctccagagtgaagttcagcagaagcgccgacgcccctgcctaccagcagggacagaaccaactgtacaacgagctgaacctgggcagacgggaagagtacgacgtgctggacaagcggagaggcagggaccctgagatgggcggaaagccccagcggagaaagaacccccaggaaggactgtataacgaactccagaaagacaagatggccgaagcctacagcgagatcggcatgaagggcgagcggagaagaggcaagggccacgatggcctgtaccagggcctgagcaccgccaccaaggacacctatgacgccctgcacatgcaggccctgcctccaaga

SEQ ID NO: 26023 - DNA, 786 bp, synthetic construct
  source 1..786: mol_type = other DNA
gtgtcccagagcaaggactccgacgtgtacatcaccgataagtgcgtgctggacatgcggagcatggacttcaagagcaactccgccgtggcctggtccaacaagtccgatttcgcctgcgccaacgccttcaacaacagcattatccccgaggacacattcttcccaagccccgagagcagctgcgacgtgaagctggtggaaaagagcttcgagacagacaccaacctgaacttccagaacctgctggtgatcgtgctgagaatcctgctgctgaaagtggccggctttaacctgctgatgaccctgcggctgtggtccagcaggagtaagaggagcaggctcctgcacagtgactacatgaacatgactccacgccgccccggacccacccgcaagcattaccagccctatgccccaccacgcgacttcgcagcctatcgctccagagtgaagttcagcagaagcgccgacgcccctgcctaccagcagggacagaaccaactgtacaacgagctgaacctgggcagacgggaagagtacgacgtgctggacaagcggagaggcagggaccctgagatgggcggaaagccccagcggagaaagaacccccaggaaggactgtataacgaactccagaaagacaagatggccgaagcctacagcgagatcggcatgaagggcgagcggagaagaggcaagggccacgatggcctgtaccagggcctgagcaccgccaccaaggacacctatgacgccctgcacatgcaggccctgcctccaaga

SEQ ID NO: 26024 - DNA, 783 bp, synthetic construct
  source 1..783: mol_type = other DNA
tcccagagcaaggactccgacgtgtacatcaccgataagtgcgtgctggacatgcggagcatggacttcaagagcaactccgccgtggcctggtccaacaagtccgatttcgcctgcgccaacgccttcaacaacagcattatccccgaggacacattcttcccaagccccgagagcagctgcgacgtgaagctggtggaaaagagcttcgagacagacaccaacctgaacttccagaacctgctggtgatcgtgctgagaatcctgctgctgaaagtggccggctttaacctgctgatgaccctgcggctgtggtccagcaggagtaagaggagcaggctcctgcacagtgactacatgaacatgactccacgccgccccggacccacccgcaagcattaccagccctatgccccaccacgcgacttcgcagcctatcgctccagagtgaagttcagcagaagcgccgacgcccctgcctaccagcagggacagaaccaactgtacaacgagctgaacctgggcagacgggaagagtacgacgtgctggacaagcggagaggcagggaccctgagatgggcggaaagccccagcggagaaagaacccccaggaaggactgtataacgaactccagaaagacaagatggccgaagcctacagcgagatcggcatgaagggcgagcggagaagaggcaagggccacgatggcctgtaccagggcctgagcaccgccaccaaggacacctatgacgccctgcacatgcaggccctgcctccaaga

SEQ ID NO: 26025 - DNA, 780 bp, synthetic construct
  source 1..780: mol_type = other DNA
cagagcaaggactccgacgtgtacatcaccgataagtgcgtgctggacatgcggagcatggacttcaagagcaactccgccgtggcctggtccaacaagtccgatttcgcctgcgccaacgccttcaacaacagcattatccccgaggacacattcttcccaagccccgagagcagctgcgacgtgaagctggtggaaaagagcttcgagacagacaccaacctgaacttccagaacctgctggtgatcgtgctgagaatcctgctgctgaaagtggccggctttaacctgctgatgaccctgcggctgtggtccagcaggagtaagaggagcaggctcctgcacagtgactacatgaacatgactccacgccgccccggacccacccgcaagcattaccagccctatgccccaccacgcgacttcgcagcctatcgctccagagtgaagttcagcagaagcgccgacgcccctgcctaccagcagggacagaaccaactgtacaacgagctgaacctgggcagacgggaagagtacgacgtgctggacaagcggagaggcagggaccctgagatgggcggaaagccccagcggagaaagaacccccaggaaggactgtataacgaactccagaaagacaagatggccgaagcctacagcgagatcggcatgaagggcgagcggagaagaggcaagggccacgatggcctgtaccagggcctgagcaccgccaccaaggacacctatgacgccctgcacatgcaggccctgcctccaaga

SEQ ID NO: 26026 - DNA, 777 bp, synthetic construct
  source 1..777: mol_type = other DNA
agcaaggactccgacgtgtacatcaccgataagtgcgtgctggacatgcggagcatggacttcaagagcaactccgccgtggcctggtccaacaagtccgatttcgcctgcgccaacgccttcaacaacagcattatccccgaggacacattcttcccaagccccgagagcagctgcgacgtgaagctggtggaaaagagcttcgagacagacaccaacctgaacttccagaacctgctggtgatcgtgctgagaatcctgctgctgaaagtggccggctttaacctgctgatgaccctgcggctgtggtccagcaggagtaagaggagcaggctcctgcacagtgactacatgaacatgactccacgccgccccggacccacccgcaagcattaccagccctatgccccaccacgcgacttcgcagcctatcgctccagagtgaagttcagcagaagcgccgacgcccctgcctaccagcagggacagaaccaactgtacaacgagctgaacctgggcagacgggaagagtacgacgtgctggacaagcggagaggcagggaccctgagatgggcggaaagccccagcggagaaagaacccccaggaaggactgtataacgaactccagaaagacaagatggccgaagcctacagcgagatcggcatgaagggcgagcggagaagaggcaagggccacgatggcctgtaccagggcctgagcaccgccaccaaggacacctatgacgccctgcacatgcaggccctgcctccaaga

SEQ ID NO: 26027 - DNA, 774 bp, synthetic construct
  source 1..774: mol_type = other DNA
aaggactccgacgtgtacatcaccgataagtgcgtgctggacatgcggagcatggacttcaagagcaactccgccgtggcctggtccaacaagtccgatttcgcctgcgccaacgccttcaacaacagcattatccccgaggacacattcttcccaagccccgagagcagctgcgacgtgaagctggtggaaaagagcttcgagacagacaccaacctgaacttccagaacctgctggtgatcgtgctgagaatcctgctgctgaaagtggccggctttaacctgctgatgaccctgcggctgtggtccagcaggagtaagaggagcaggctcctgcacagtgactacatgaacatgactccacgccgccccggacccacccgcaagcattaccagccctatgccccaccacgcgacttcgcagcctatcgctccagagtgaagttcagcagaagcgccgacgcccctgcctaccagcagggacagaaccaactgtacaacgagctgaacctgggcagacgggaagagtacgacgtgctggacaagcggagaggcagggaccctgagatgggcggaaagccccagcggagaaagaacccccaggaaggactgtataacgaactccagaaagacaagatggccgaagcctacagcgagatcggcatgaagggcgagcggagaagaggcaagggccacgatggcctgtaccagggcctgagcaccgccaccaaggacacctatgacgccctgcacatgcaggccctgcctccaaga

SEQ ID NO: 26028 - DNA, 771 bp, synthetic construct
  source 1..771: mol_type = other DNA
gactccgacgtgtacatcaccgataagtgcgtgctggacatgcggagcatggacttcaagagcaactccgccgtggcctggtccaacaagtccgatttcgcctgcgccaacgccttcaacaacagcattatccccgaggacacattcttcccaagccccgagagcagctgcgacgtgaagctggtggaaaagagcttcgagacagacaccaacctgaacttccagaacctgctggtgatcgtgctgagaatcctgctgctgaaagtggccggctttaacctgctgatgaccctgcggctgtggtccagcaggagtaagaggagcaggctcctgcacagtgactacatgaacatgactccacgccgccccggacccacccgcaagcattaccagccctatgccccaccacgcgacttcgcagcctatcgctccagagtgaagttcagcagaagcgccgacgcccctgcctaccagcagggacagaaccaactgtacaacgagctgaacctgggcagacgggaagagtacgacgtgctggacaagcggagaggcagggaccctgagatgggcggaaagccccagcggagaaagaacccccaggaaggactgtataacgaactccagaaagacaagatggccgaagcctacagcgagatcggcatgaagggcgagcggagaagaggcaagggccacgatggcctgtaccagggcctgagcaccgccaccaaggacacctatgacgccctgcacatgcaggccctgcctccaaga

SEQ ID NO: 26029 - DNA, 768 bp, synthetic construct
  source 1..768: mol_type = other DNA
tccgacgtgtacatcaccgataagtgcgtgctggacatgcggagcatggacttcaagagcaactccgccgtggcctggtccaacaagtccgatttcgcctgcgccaacgccttcaacaacagcattatccccgaggacacattcttcccaagccccgagagcagctgcgacgtgaagctggtggaaaagagcttcgagacagacaccaacctgaacttccagaacctgctggtgatcgtgctgagaatcctgctgctgaaagtggccggctttaacctgctgatgaccctgcggctgtggtccagcaggagtaagaggagcaggctcctgcacagtgactacatgaacatgactccacgccgccccggacccacccgcaagcattaccagccctatgccccaccacgcgacttcgcagcctatcgctccagagtgaagttcagcagaagcgccgacgcccctgcctaccagcagggacagaaccaactgtacaacgagctgaacctgggcagacgggaagagtacgacgtgctggacaagcggagaggcagggaccctgagatgggcggaaagccccagcggagaaagaacccccaggaaggactgtataacgaactccagaaagacaagatggccgaagcctacagcgagatcggcatgaagggcgagcggagaagaggcaagggccacgatggcctgtaccagggcctgagcaccgccaccaaggacacctatgacgccctgcacatgcaggccctgcctccaaga

SEQ ID NO: 26030 - DNA, 765 bp, synthetic construct
  source 1..765: mol_type = other DNA
gacgtgtacatcaccgataagtgcgtgctggacatgcggagcatggacttcaagagcaactccgccgtggcctggtccaacaagtccgatttcgcctgcgccaacgccttcaacaacagcattatccccgaggacacattcttcccaagccccgagagcagctgcgacgtgaagctggtggaaaagagcttcgagacagacaccaacctgaacttccagaacctgctggtgatcgtgctgagaatcctgctgctgaaagtggccggctttaacctgctgatgaccctgcggctgtggtccagcaggagtaagaggagcaggctcctgcacagtgactacatgaacatgactccacgccgccccggacccacccgcaagcattaccagccctatgccccaccacgcgacttcgcagcctatcgctccagagtgaagttcagcagaagcgccgacgcccctgcctaccagcagggacagaaccaactgtacaacgagctgaacctgggcagacgggaagagtacgacgtgctggacaagcggagaggcagggaccctgagatgggcggaaagccccagcggagaaagaacccccaggaaggactgtataacgaactccagaaagacaagatggccgaagcctacagcgagatcggcatgaagggcgagcggagaagaggcaagggccacgatggcctgtaccagggcctgagcaccgccaccaaggacacctatgacgccctgcacatgcaggccctgcctccaaga

SEQ ID NO: 26031 - DNA, 762 bp, synthetic construct
  source 1..762: mol_type = other DNA
gtgtacatcaccgataagtgcgtgctggacatgcggagcatggacttcaagagcaactccgccgtggcctggtccaacaagtccgatttcgcctgcgccaacgccttcaacaacagcattatccccgaggacacattcttcccaagccccgagagcagctgcgacgtgaagctggtggaaaagagcttcgagacagacaccaacctgaacttccagaacctgctggtgatcgtgctgagaatcctgctgctgaaagtggccggctttaacctgctgatgaccctgcggctgtggtccagcaggagtaagaggagcaggctcctgcacagtgactacatgaacatgactccacgccgccccggacccacccgcaagcattaccagccctatgccccaccacgcgacttcgcagcctatcgctccagagtgaagttcagcagaagcgccgacgcccctgcctaccagcagggacagaaccaactgtacaacgagctgaacctgggcagacgggaagagtacgacgtgctggacaagcggagaggcagggaccctgagatgggcggaaagccccagcggagaaagaacccccaggaaggactgtataacgaactccagaaagacaagatggccgaagcctacagcgagatcggcatgaagggcgagcggagaagaggcaagggccacgatggcctgtaccagggcctgagcaccgccaccaaggacacctatgacgccctgcacatgcaggccctgcctccaaga

SEQ ID NO: 26032 - DNA, 759 bp, synthetic construct
  source 1..759: mol_type = other DNA
tacatcaccgataagtgcgtgctggacatgcggagcatggacttcaagagcaactccgccgtggcctggtccaacaagtccgatttcgcctgcgccaacgccttcaacaacagcattatccccgaggacacattcttcccaagccccgagagcagctgcgacgtgaagctggtggaaaagagcttcgagacagacaccaacctgaacttccagaacctgctggtgatcgtgctgagaatcctgctgctgaaagtggccggctttaacctgctgatgaccctgcggctgtggtccagcaggagtaagaggagcaggctcctgcacagtgactacatgaacatgactccacgccgccccggacccacccgcaagcattaccagccctatgccccaccacgcgacttcgcagcctatcgctccagagtgaagttcagcagaagcgccgacgcccctgcctaccagcagggacagaaccaactgtacaacgagctgaacctgggcagacgggaagagtacgacgtgctggacaagcggagaggcagggaccctgagatgggcggaaagccccagcggagaaagaacccccaggaaggactgtataacgaactccagaaagacaagatggccgaagcctacagcgagatcggcatgaagggcgagcggagaagaggcaagggccacgatggcctgtaccagggcctgagcaccgccaccaaggacacctatgacgccctgcacatgcaggccctgcctccaaga

SEQ ID NO: 26033 - DNA, 756 bp, synthetic construct
  source 1..756: mol_type = other DNA
atcaccgataagtgcgtgctggacatgcggagcatggacttcaagagcaactccgccgtggcctggtccaacaagtccgatttcgcctgcgccaacgccttcaacaacagcattatccccgaggacacattcttcccaagccccgagagcagctgcgacgtgaagctggtggaaaagagcttcgagacagacaccaacctgaacttccagaacctgctggtgatcgtgctgagaatcctgctgctgaaagtggccggctttaacctgctgatgaccctgcggctgtggtccagcaggagtaagaggagcaggctcctgcacagtgactacatgaacatgactccacgccgccccggacccacccgcaagcattaccagccctatgccccaccacgcgacttcgcagcctatcgctccagagtgaagttcagcagaagcgccgacgcccctgcctaccagcagggacagaaccaactgtacaacgagctgaacctgggcagacgggaagagtacgacgtgctggacaagcggagaggcagggaccctgagatgggcggaaagccccagcggagaaagaacccccaggaaggactgtataacgaactccagaaagacaagatggccgaagcctacagcgagatcggcatgaagggcgagcggagaagaggcaagggccacgatggcctgtaccagggcctgagcaccgccaccaaggacacctatgacgccctgcacatgcaggccctgcctccaaga

SEQ ID NO: 26034 - DNA, 753 bp, synthetic construct
  source 1..753: mol_type = other DNA
accgataagtgcgtgctggacatgcggagcatggacttcaagagcaactccgccgtggcctggtccaacaagtccgatttcgcctgcgccaacgccttcaacaacagcattatccccgaggacacattcttcccaagccccgagagcagctgcgacgtgaagctggtggaaaagagcttcgagacagacaccaacctgaacttccagaacctgctggtgatcgtgctgagaatcctgctgctgaaagtggccggctttaacctgctgatgaccctgcggctgtggtccagcaggagtaagaggagcaggctcctgcacagtgactacatgaacatgactccacgccgccccggacccacccgcaagcattaccagccctatgccccaccacgcgacttcgcagcctatcgctccagagtgaagttcagcagaagcgccgacgcccctgcctaccagcagggacagaaccaactgtacaacgagctgaacctgggcagacgggaagagtacgacgtgctggacaagcggagaggcagggaccctgagatgggcggaaagccccagcggagaaagaacccccaggaaggactgtataacgaactccagaaagacaagatggccgaagcctacagcgagatcggcatgaagggcgagcggagaagaggcaagggccacgatggcctgtaccagggcctgagcaccgccaccaaggacacctatgacgccctgcacatgcaggccctgcctccaaga

SEQ ID NO: 26035 - DNA, 750 bp, synthetic construct
  source 1..750: mol_type = other DNA
gataagtgcgtgctggacatgcggagcatggacttcaagagcaactccgccgtggcctggtccaacaagtccgatttcgcctgcgccaacgccttcaacaacagcattatccccgaggacacattcttcccaagccccgagagcagctgcgacgtgaagctggtggaaaagagcttcgagacagacaccaacctgaacttccagaacctgctggtgatcgtgctgagaatcctgctgctgaaagtggccggctttaacctgctgatgaccctgcggctgtggtccagcaggagtaagaggagcaggctcctgcacagtgactacatgaacatgactccacgccgccccggacccacccgcaagcattaccagccctatgccccaccacgcgacttcgcagcctatcgctccagagtgaagttcagcagaagcgccgacgcccctgcctaccagcagggacagaaccaactgtacaacgagctgaacctgggcagacgggaagagtacgacgtgctggacaagcggagaggcagggaccctgagatgggcggaaagccccagcggagaaagaacccccaggaaggactgtataacgaactccagaaagacaagatggccgaagcctacagcgagatcggcatgaagggcgagcggagaagaggcaagggccacgatggcctgtaccagggcctgagcaccgccaccaaggacacctatgacgccctgcacatgcaggccctgcctccaaga

SEQ ID NO: 26036 - DNA, 744 bp, synthetic construct
  source 1..744: mol_type = other DNA
tgcgtgctggacatgcggagcatggacttcaagagcaactccgccgtggcctggtccaacaagtccgatttcgcctgcgccaacgccttcaacaacagcattatccccgaggacacattcttcccaagccccgagagcagctgcgacgtgaagctggtggaaaagagcttcgagacagacaccaacctgaacttccagaacctgctggtgatcgtgctgagaatcctgctgctgaaagtggccggctttaacctgctgatgaccctgcggctgtggtccagcaggagtaagaggagcaggctcctgcacagtgactacatgaacatgactccacgccgccccggacccacccgcaagcattaccagccctatgccccaccacgcgacttcgcagcctatcgctccagagtgaagttcagcagaagcgccgacgcccctgcctaccagcagggacagaaccaactgtacaacgagctgaacctgggcagacgggaagagtacgacgtgctggacaagcggagaggcagggaccctgagatgggcggaaagccccagcggagaaagaacccccaggaaggactgtataacgaactccagaaagacaagatggccgaagcctacagcgagatcggcatgaagggcgagcggagaagaggcaagggccacgatggcctgtaccagggcctgagcaccgccaccaaggacacctatgacgccctgcacatgcaggccctgcctccaaga

SEQ ID NO: 26037 - DNA, 741 bp, synthetic construct
  source 1..741: mol_type = other DNA
gtgctggacatgcggagcatggacttcaagagcaactccgccgtggcctggtccaacaagtccgatttcgcctgcgccaacgccttcaacaacagcattatccccgaggacacattcttcccaagccccgagagcagctgcgacgtgaagctggtggaaaagagcttcgagacagacaccaacctgaacttccagaacctgctggtgatcgtgctgagaatcctgctgctgaaagtggccggctttaacctgctgatgaccctgcggctgtggtccagcaggagtaagaggagcaggctcctgcacagtgactacatgaacatgactccacgccgccccggacccacccgcaagcattaccagccctatgccccaccacgcgacttcgcagcctatcgctccagagtgaagttcagcagaagcgccgacgcccctgcctaccagcagggacagaaccaactgtacaacgagctgaacctgggcagacgggaagagtacgacgtgctggacaagcggagaggcagggaccctgagatgggcggaaagccccagcggagaaagaacccccaggaaggactgtataacgaactccagaaagacaagatggccgaagcctacagcgagatcggcatgaagggcgagcggagaagaggcaagggccacgatggcctgtaccagggcctgagcaccgccaccaaggacacctatgacgccctgcacatgcaggccctgcctccaaga

SEQ ID NO: 26038 - DNA, 738 bp, synthetic construct
  source 1..738: mol_type = other DNA
ctggacatgcggagcatggacttcaagagcaactccgccgtggcctggtccaacaagtccgatttcgcctgcgccaacgccttcaacaacagcattatccccgaggacacattcttcccaagccccgagagcagctgcgacgtgaagctggtggaaaagagcttcgagacagacaccaacctgaacttccagaacctgctggtgatcgtgctgagaatcctgctgctgaaagtggccggctttaacctgctgatgaccctgcggctgtggtccagcaggagtaagaggagcaggctcctgcacagtgactacatgaacatgactccacgccgccccggacccacccgcaagcattaccagccctatgccccaccacgcgacttcgcagcctatcgctccagagtgaagttcagcagaagcgccgacgcccctgcctaccagcagggacagaaccaactgtacaacgagctgaacctgggcagacgggaagagtacgacgtgctggacaagcggagaggcagggaccctgagatgggcggaaagccccagcggagaaagaacccccaggaaggactgtataacgaactccagaaagacaagatggccgaagcctacagcgagatcggcatgaagggcgagcggagaagaggcaagggccacgatggcctgtaccagggcctgagcaccgccaccaaggacacctatgacgccctgcacatgcaggccctgcctccaaga

SEQ ID NO: 26039 - DNA, 735 bp, synthetic construct
  source 1..735: mol_type = other DNA
gacatgcggagcatggacttcaagagcaactccgccgtggcctggtccaacaagtccgatttcgcctgcgccaacgccttcaacaacagcattatccccgaggacacattcttcccaagccccgagagcagctgcgacgtgaagctggtggaaaagagcttcgagacagacaccaacctgaacttccagaacctgctggtgatcgtgctgagaatcctgctgctgaaagtggccggctttaacctgctgatgaccctgcggctgtggtccagcaggagtaagaggagcaggctcctgcacagtgactacatgaacatgactccacgccgccccggacccacccgcaagcattaccagccctatgccccaccacgcgacttcgcagcctatcgctccagagtgaagttcagcagaagcgccgacgcccctgcctaccagcagggacagaaccaactgtacaacgagctgaacctgggcagacgggaagagtacgacgtgctggacaagcggagaggcagggaccctgagatgggcggaaagccccagcggagaaagaacccccaggaaggactgtataacgaactccagaaagacaagatggccgaagcctacagcgagatcggcatgaagggcgagcggagaagaggcaagggccacgatggcctgtaccagggcctgagcaccgccaccaaggacacctatgacgccctgcacatgcaggccctgcctccaaga

SEQ ID NO: 26040 - DNA, 732 bp, synthetic construct
  source 1..732: mol_type = other DNA
atgcggagcatggacttcaagagcaactccgccgtggcctggtccaacaagtccgatttcgcctgcgccaacgccttcaacaacagcattatccccgaggacacattcttcccaagccccgagagcagctgcgacgtgaagctggtggaaaagagcttcgagacagacaccaacctgaacttccagaacctgctggtgatcgtgctgagaatcctgctgctgaaagtggccggctttaacctgctgatgaccctgcggctgtggtccagcaggagtaagaggagcaggctcctgcacagtgactacatgaacatgactccacgccgccccggacccacccgcaagcattaccagccctatgccccaccacgcgacttcgcagcctatcgctccagagtgaagttcagcagaagcgccgacgcccctgcctaccagcagggacagaaccaactgtacaacgagctgaacctgggcagacgggaagagtacgacgtgctggacaagcggagaggcagggaccctgagatgggcggaaagccccagcggagaaagaacccccaggaaggactgtataacgaactccagaaagacaagatggccgaagcctacagcgagatcggcatgaagggcgagcggagaagaggcaagggccacgatggcctgtaccagggcctgagcaccgccaccaaggacacctatgacgccctgcacatgcaggccctgcctccaaga

SEQ ID NO: 26041 - DNA, 729 bp, synthetic construct
  source 1..729: mol_type = other DNA
cggagcatggacttcaagagcaactccgccgtggcctggtccaacaagtccgatttcgcctgcgccaacgccttcaacaacagcattatccccgaggacacattcttcccaagccccgagagcagctgcgacgtgaagctggtggaaaagagcttcgagacagacaccaacctgaacttccagaacctgctggtgatcgtgctgagaatcctgctgctgaaagtggccggctttaacctgctgatgaccctgcggctgtggtccagcaggagtaagaggagcaggctcctgcacagtgactacatgaacatgactccacgccgccccggacccacccgcaagcattaccagccctatgccccaccacgcgacttcgcagcctatcgctccagagtgaagttcagcagaagcgccgacgcccctgcctaccagcagggacagaaccaactgtacaacgagctgaacctgggcagacgggaagagtacgacgtgctggacaagcggagaggcagggaccctgagatgggcggaaagccccagcggagaaagaacccccaggaaggactgtataacgaactccagaaagacaagatggccgaagcctacagcgagatcggcatgaagggcgagcggagaagaggcaagggccacgatggcctgtaccagggcctgagcaccgccaccaaggacacctatgacgccctgcacatgcaggccctgcctccaaga

SEQ ID NO: 26042 - DNA, 726 bp, synthetic construct
  source 1..726: mol_type = other DNA
agcatggacttcaagagcaactccgccgtggcctggtccaacaagtccgatttcgcctgcgccaacgccttcaacaacagcattatccccgaggacacattcttcccaagccccgagagcagctgcgacgtgaagctggtggaaaagagcttcgagacagacaccaacctgaacttccagaacctgctggtgatcgtgctgagaatcctgctgctgaaagtggccggctttaacctgctgatgaccctgcggctgtggtccagcaggagtaagaggagcaggctcctgcacagtgactacatgaacatgactccacgccgccccggacccacccgcaagcattaccagccctatgccccaccacgcgacttcgcagcctatcgctccagagtgaagttcagcagaagcgccgacgcccctgcctaccagcagggacagaaccaactgtacaacgagctgaacctgggcagacgggaagagtacgacgtgctggacaagcggagaggcagggaccctgagatgggcggaaagccccagcggagaaagaacccccaggaaggactgtataacgaactccagaaagacaagatggccgaagcctacagcgagatcggcatgaagggcgagcggagaagaggcaagggccacgatggcctgtaccagggcctgagcaccgccaccaaggacacctatgacgccctgcacatgcaggccctgcctccaaga

SEQ ID NO: 26043 - DNA, 723 bp, synthetic construct
  source 1..723: mol_type = other DNA
atggacttcaagagcaactccgccgtggcctggtccaacaagtccgatttcgcctgcgccaacgccttcaacaacagcattatccccgaggacacattcttcccaagccccgagagcagctgcgacgtgaagctggtggaaaagagcttcgagacagacaccaacctgaacttccagaacctgctggtgatcgtgctgagaatcctgctgctgaaagtggccggctttaacctgctgatgaccctgcggctgtggtccagcaggagtaagaggagcaggctcctgcacagtgactacatgaacatgactccacgccgccccggacccacccgcaagcattaccagccctatgccccaccacgcgacttcgcagcctatcgctccagagtgaagttcagcagaagcgccgacgcccctgcctaccagcagggacagaaccaactgtacaacgagctgaacctgggcagacgggaagagtacgacgtgctggacaagcggagaggcagggaccctgagatgggcggaaagccccagcggagaaagaacccccaggaaggactgtataacgaactccagaaagacaagatggccgaagcctacagcgagatcggcatgaagggcgagcggagaagaggcaagggccacgatggcctgtaccagggcctgagcaccgccaccaaggacacctatgacgccctgcacatgcaggccctgcctccaaga

SEQ ID NO: 26044 - DNA, 720 bp, synthetic construct
  source 1..720: mol_type = other DNA
gacttcaagagcaactccgccgtggcctggtccaacaagtccgatttcgcctgcgccaacgccttcaacaacagcattatccccgaggacacattcttcccaagccccgagagcagctgcgacgtgaagctggtggaaaagagcttcgagacagacaccaacctgaacttccagaacctgctggtgatcgtgctgagaatcctgctgctgaaagtggccggctttaacctgctgatgaccctgcggctgtggtccagcaggagtaagaggagcaggctcctgcacagtgactacatgaacatgactccacgccgccccggacccacccgcaagcattaccagccctatgccccaccacgcgacttcgcagcctatcgctccagagtgaagttcagcagaagcgccgacgcccctgcctaccagcagggacagaaccaactgtacaacgagctgaacctgggcagacgggaagagtacgacgtgctggacaagcggagaggcagggaccctgagatgggcggaaagccccagcggagaaagaacccccaggaaggactgtataacgaactccagaaagacaagatggccgaagcctacagcgagatcggcatgaagggcgagcggagaagaggcaagggccacgatggcctgtaccagggcctgagcaccgccaccaaggacacctatgacgccctgcacatgcaggccctgcctccaaga

SEQ ID NO: 26045 - DNA, 717 bp, synthetic construct
  source 1..717: mol_type = other DNA
ttcaagagcaactccgccgtggcctggtccaacaagtccgatttcgcctgcgccaacgccttcaacaacagcattatccccgaggacacattcttcccaagccccgagagcagctgcgacgtgaagctggtggaaaagagcttcgagacagacaccaacctgaacttccagaacctgctggtgatcgtgctgagaatcctgctgctgaaagtggccggctttaacctgctgatgaccctgcggctgtggtccagcaggagtaagaggagcaggctcctgcacagtgactacatgaacatgactccacgccgccccggacccacccgcaagcattaccagccctatgccccaccacgcgacttcgcagcctatcgctccagagtgaagttcagcagaagcgccgacgcccctgcctaccagcagggacagaaccaactgtacaacgagctgaacctgggcagacgggaagagtacgacgtgctggacaagcggagaggcagggaccctgagatgggcggaaagccccagcggagaaagaacccccaggaaggactgtataacgaactccagaaagacaagatggccgaagcctacagcgagatcggcatgaagggcgagcggagaagaggcaagggccacgatggcctgtaccagggcctgagcaccgccaccaaggacacctatgacgccctgcacatgcaggccctgcctccaaga

SEQ ID NO: 26046 - DNA, 714 bp, synthetic construct
  source 1..714: mol_type = other DNA
aagagcaactccgccgtggcctggtccaacaagtccgatttcgcctgcgccaacgccttcaacaacagcattatccccgaggacacattcttcccaagccccgagagcagctgcgacgtgaagctggtggaaaagagcttcgagacagacaccaacctgaacttccagaacctgctggtgatcgtgctgagaatcctgctgctgaaagtggccggctttaacctgctgatgaccctgcggctgtggtccagcaggagtaagaggagcaggctcctgcacagtgactacatgaacatgactccacgccgccccggacccacccgcaagcattaccagccctatgccccaccacgcgacttcgcagcctatcgctccagagtgaagttcagcagaagcgccgacgcccctgcctaccagcagggacagaaccaactgtacaacgagctgaacctgggcagacgggaagagtacgacgtgctggacaagcggagaggcagggaccctgagatgggcggaaagccccagcggagaaagaacccccaggaaggactgtataacgaactccagaaagacaagatggccgaagcctacagcgagatcggcatgaagggcgagcggagaagaggcaagggccacgatggcctgtaccagggcctgagcaccgccaccaaggacacctatgacgccctgcacatgcaggccctgcctccaaga

SEQ ID NO: 26047 - DNA, 711 bp, synthetic construct
  source 1..711: mol_type = other DNA
agcaactccgccgtggcctggtccaacaagtccgatttcgcctgcgccaacgccttcaacaacagcattatccccgaggacacattcttcccaagccccgagagcagctgcgacgtgaagctggtggaaaagagcttcgagacagacaccaacctgaacttccagaacctgctggtgatcgtgctgagaatcctgctgctgaaagtggccggctttaacctgctgatgaccctgcggctgtggtccagcaggagtaagaggagcaggctcctgcacagtgactacatgaacatgactccacgccgccccggacccacccgcaagcattaccagccctatgccccaccacgcgacttcgcagcctatcgctccagagtgaagttcagcagaagcgccgacgcccctgcctaccagcagggacagaaccaactgtacaacgagctgaacctgggcagacgggaagagtacgacgtgctggacaagcggagaggcagggaccctgagatgggcggaaagccccagcggagaaagaacccccaggaaggactgtataacgaactccagaaagacaagatggccgaagcctacagcgagatcggcatgaagggcgagcggagaagaggcaagggccacgatggcctgtaccagggcctgagcaccgccaccaaggacacctatgacgccctgcacatgcaggccctgcctccaaga

SEQ ID NO: 26048 - DNA, 708 bp, synthetic construct
  source 1..708: mol_type = other DNA
aactccgccgtggcctggtccaacaagtccgatttcgcctgcgccaacgccttcaacaacagcattatccccgaggacacattcttcccaagccccgagagcagctgcgacgtgaagctggtggaaaagagcttcgagacagacaccaacctgaacttccagaacctgctggtgatcgtgctgagaatcctgctgctgaaagtggccggctttaacctgctgatgaccctgcggctgtggtccagcaggagtaagaggagcaggctcctgcacagtgactacatgaacatgactccacgccgccccggacccacccgcaagcattaccagccctatgccccaccacgcgacttcgcagcctatcgctccagagtgaagttcagcagaagcgccgacgcccctgcctaccagcagggacagaaccaactgtacaacgagctgaacctgggcagacgggaagagtacgacgtgctggacaagcggagaggcagggaccctgagatgggcggaaagccccagcggagaaagaacccccaggaaggactgtataacgaactccagaaagacaagatggccgaagcctacagcgagatcggcatgaagggcgagcggagaagaggcaagggccacgatggcctgtaccagggcctgagcaccgccaccaaggacacctatgacgccctgcacatgcaggccctgcctccaaga

SEQ ID NO: 26049 - DNA, 705 bp, synthetic construct
  source 1..705: mol_type = other DNA
tccgccgtggcctggtccaacaagtccgatttcgcctgcgccaacgccttcaacaacagcattatccccgaggacacattcttcccaagccccgagagcagctgcgacgtgaagctggtggaaaagagcttcgagacagacaccaacctgaacttccagaacctgctggtgatcgtgctgagaatcctgctgctgaaagtggccggctttaacctgctgatgaccctgcggctgtggtccagcaggagtaagaggagcaggctcctgcacagtgactacatgaacatgactccacgccgccccggacccacccgcaagcattaccagccctatgccccaccacgcgacttcgcagcctatcgctccagagtgaagttcagcagaagcgccgacgcccctgcctaccagcagggacagaaccaactgtacaacgagctgaacctgggcagacgggaagagtacgacgtgctggacaagcggagaggcagggaccctgagatgggcggaaagccccagcggagaaagaacccccaggaaggactgtataacgaactccagaaagacaagatggccgaagcctacagcgagatcggcatgaagggcgagcggagaagaggcaagggccacgatggcctgtaccagggcctgagcaccgccaccaaggacacctatgacgccctgcacatgcaggccctgcctccaaga

SEQ ID NO: 26050 - DNA, 702 bp, synthetic construct
  source 1..702: mol_type = other DNA
gccgtggcctggtccaacaagtccgatttcgcctgcgccaacgccttcaacaacagcattatccccgaggacacattcttcccaagccccgagagcagctgcgacgtgaagctggtggaaaagagcttcgagacagacaccaacctgaacttccagaacctgctggtgatcgtgctgagaatcctgctgctgaaagtggccggctttaacctgctgatgaccctgcggctgtggtccagcaggagtaagaggagcaggctcctgcacagtgactacatgaacatgactccacgccgccccggacccacccgcaagcattaccagccctatgccccaccacgcgacttcgcagcctatcgctccagagtgaagttcagcagaagcgccgacgcccctgcctaccagcagggacagaaccaactgtacaacgagctgaacctgggcagacgggaagagtacgacgtgctggacaagcggagaggcagggaccctgagatgggcggaaagccccagcggagaaagaacccccaggaaggactgtataacgaactccagaaagacaagatggccgaagcctacagcgagatcggcatgaagggcgagcggagaagaggcaagggccacgatggcctgtaccagggcctgagcaccgccaccaaggacacctatgacgccctgcacatgcaggccctgcctccaaga

SEQ ID NO: 26051 - DNA, 699 bp, synthetic construct
  source 1..699: mol_type = other DNA
gtggcctggtccaacaagtccgatttcgcctgcgccaacgccttcaacaacagcattatccccgaggacacattcttcccaagccccgagagcagctgcgacgtgaagctggtggaaaagagcttcgagacagacaccaacctgaacttccagaacctgctggtgatcgtgctgagaatcctgctgctgaaagtggccggctttaacctgctgatgaccctgcggctgtggtccagcaggagtaagaggagcaggctcctgcacagtgactacatgaacatgactccacgccgccccggacccacccgcaagcattaccagccctatgccccaccacgcgacttcgcagcctatcgctccagagtgaagttcagcagaagcgccgacgcccctgcctaccagcagggacagaaccaactgtacaacgagctgaacctgggcagacgggaagagtacgacgtgctggacaagcggagaggcagggaccctgagatgggcggaaagccccagcggagaaagaacccccaggaaggactgtataacgaactccagaaagacaagatggccgaagcctacagcgagatcggcatgaagggcgagcggagaagaggcaagggccacgatggcctgtaccagggcctgagcaccgccaccaaggacacctatgacgccctgcacatgcaggccctgcctccaaga

SEQ ID NO: 26052 - DNA, 696 bp, synthetic construct
  source 1..696: mol_type = other DNA
gcctggtccaacaagtccgatttcgcctgcgccaacgccttcaacaacagcattatccccgaggacacattcttcccaagccccgagagcagctgcgacgtgaagctggtggaaaagagcttcgagacagacaccaacctgaacttccagaacctgctggtgatcgtgctgagaatcctgctgctgaaagtggccggctttaacctgctgatgaccctgcggctgtggtccagcaggagtaagaggagcaggctcctgcacagtgactacatgaacatgactccacgccgccccggacccacccgcaagcattaccagccctatgccccaccacgcgacttcgcagcctatcgctccagagtgaagttcagcagaagcgccgacgcccctgcctaccagcagggacagaaccaactgtacaacgagctgaacctgggcagacgggaagagtacgacgtgctggacaagcggagaggcagggaccctgagatgggcggaaagccccagcggagaaagaacccccaggaaggactgtataacgaactccagaaagacaagatggccgaagcctacagcgagatcggcatgaagggcgagcggagaagaggcaagggccacgatggcctgtaccagggcctgagcaccgccaccaaggacacctatgacgccctgcacatgcaggccctgcctccaaga

SEQ ID NO: 26053 - DNA, 693 bp, synthetic construct
  source 1..693: mol_type = other DNA
tggtccaacaagtccgatttcgcctgcgccaacgccttcaacaacagcattatccccgaggacacattcttcccaagccccgagagcagctgcgacgtgaagctggtggaaaagagcttcgagacagacaccaacctgaacttccagaacctgctggtgatcgtgctgagaatcctgctgctgaaagtggccggctttaacctgctgatgaccctgcggctgtggtccagcaggagtaagaggagcaggctcctgcacagtgactacatgaacatgactccacgccgccccggacccacccgcaagcattaccagccctatgccccaccacgcgacttcgcagcctatcgctccagagtgaagttcagcagaagcgccgacgcccctgcctaccagcagggacagaaccaactgtacaacgagctgaacctgggcagacgggaagagtacgacgtgctggacaagcggagaggcagggaccctgagatgggcggaaagccccagcggagaaagaacccccaggaaggactgtataacgaactccagaaagacaagatggccgaagcctacagcgagatcggcatgaagggcgagcggagaagaggcaagggccacgatggcctgtaccagggcctgagcaccgccaccaaggacacctatgacgccctgcacatgcaggccctgcctccaaga

SEQ ID NO: 26054 - DNA, 690 bp, synthetic construct
  source 1..690: mol_type = other DNA
tccaacaagtccgatttcgcctgcgccaacgccttcaacaacagcattatccccgaggacacattcttcccaagccccgagagcagctgcgacgtgaagctggtggaaaagagcttcgagacagacaccaacctgaacttccagaacctgctggtgatcgtgctgagaatcctgctgctgaaagtggccggctttaacctgctgatgaccctgcggctgtggtccagcaggagtaagaggagcaggctcctgcacagtgactacatgaacatgactccacgccgccccggacccacccgcaagcattaccagccctatgccccaccacgcgacttcgcagcctatcgctccagagtgaagttcagcagaagcgccgacgcccctgcctaccagcagggacagaaccaactgtacaacgagctgaacctgggcagacgggaagagtacgacgtgctggacaagcggagaggcagggaccctgagatgggcggaaagccccagcggagaaagaacccccaggaaggactgtataacgaactccagaaagacaagatggccgaagcctacagcgagatcggcatgaagggcgagcggagaagaggcaagggccacgatggcctgtaccagggcctgagcaccgccaccaaggacacctatgacgccctgcacatgcaggccctgcctccaaga

SEQ ID NO: 26055 - DNA, 687 bp, synthetic construct
  source 1..687: mol_type = other DNA
aacaagtccgatttcgcctgcgccaacgccttcaacaacagcattatccccgaggacacattcttcccaagccccgagagcagctgcgacgtgaagctggtggaaaagagcttcgagacagacaccaacctgaacttccagaacctgctggtgatcgtgctgagaatcctgctgctgaaagtggccggctttaacctgctgatgaccctgcggctgtggtccagcaggagtaagaggagcaggctcctgcacagtgactacatgaacatgactccacgccgccccggacccacccgcaagcattaccagccctatgccccaccacgcgacttcgcagcctatcgctccagagtgaagttcagcagaagcgccgacgcccctgcctaccagcagggacagaaccaactgtacaacgagctgaacctgggcagacgggaagagtacgacgtgctggacaagcggagaggcagggaccctgagatgggcggaaagccccagcggagaaagaacccccaggaaggactgtataacgaactccagaaagacaagatggccgaagcctacagcgagatcggcatgaagggcgagcggagaagaggcaagggccacgatggcctgtaccagggcctgagcaccgccaccaaggacacctatgacgccctgcacatgcaggccctgcctccaaga

SEQ ID NO: 26056 - DNA, 684 bp, synthetic construct
  source 1..684: mol_type = other DNA
aagtccgatttcgcctgcgccaacgccttcaacaacagcattatccccgaggacacattcttcccaagccccgagagcagctgcgacgtgaagctggtggaaaagagcttcgagacagacaccaacctgaacttccagaacctgctggtgatcgtgctgagaatcctgctgctgaaagtggccggctttaacctgctgatgaccctgcggctgtggtccagcaggagtaagaggagcaggctcctgcacagtgactacatgaacatgactccacgccgccccggacccacccgcaagcattaccagccctatgccccaccacgcgacttcgcagcctatcgctccagagtgaagttcagcagaagcgccgacgcccctgcctaccagcagggacagaaccaactgtacaacgagctgaacctgggcagacgggaagagtacgacgtgctggacaagcggagaggcagggaccctgagatgggcggaaagccccagcggagaaagaacccccaggaaggactgtataacgaactccagaaagacaagatggccgaagcctacagcgagatcggcatgaagggcgagcggagaagaggcaagggccacgatggcctgtaccagggcctgagcaccgccaccaaggacacctatgacgccctgcacatgcaggccctgcctccaaga

SEQ ID NO: 26057 - DNA, 681 bp, synthetic construct
  source 1..681: mol_type = other DNA
tccgatttcgcctgcgccaacgccttcaacaacagcattatccccgaggacacattcttcccaagccccgagagcagctgcgacgtgaagctggtggaaaagagcttcgagacagacaccaacctgaacttccagaacctgctggtgatcgtgctgagaatcctgctgctgaaagtggccggctttaacctgctgatgaccctgcggctgtggtccagcaggagtaagaggagcaggctcctgcacagtgactacatgaacatgactccacgccgccccggacccacccgcaagcattaccagccctatgccccaccacgcgacttcgcagcctatcgctccagagtgaagttcagcagaagcgccgacgcccctgcctaccagcagggacagaaccaactgtacaacgagctgaacctgggcagacgggaagagtacgacgtgctggacaagcggagaggcagggaccctgagatgggcggaaagccccagcggagaaagaacccccaggaaggactgtataacgaactccagaaagacaagatggccgaagcctacagcgagatcggcatgaagggcgagcggagaagaggcaagggccacgatggcctgtaccagggcctgagcaccgccaccaaggacacctatgacgccctgcacatgcaggccctgcctccaaga

SEQ ID NO: 26058 - DNA, 678 bp, synthetic construct
  source 1..678: mol_type = other DNA
gatttcgcctgcgccaacgccttcaacaacagcattatccccgaggacacattcttcccaagccccgagagcagctgcgacgtgaagctggtggaaaagagcttcgagacagacaccaacctgaacttccagaacctgctggtgatcgtgctgagaatcctgctgctgaaagtggccggctttaacctgctgatgaccctgcggctgtggtccagcaggagtaagaggagcaggctcctgcacagtgactacatgaacatgactccacgccgccccggacccacccgcaagcattaccagccctatgccccaccacgcgacttcgcagcctatcgctccagagtgaagttcagcagaagcgccgacgcccctgcctaccagcagggacagaaccaactgtacaacgagctgaacctgggcagacgggaagagtacgacgtgctggacaagcggagaggcagggaccctgagatgggcggaaagccccagcggagaaagaacccccaggaaggactgtataacgaactccagaaagacaagatggccgaagcctacagcgagatcggcatgaagggcgagcggagaagaggcaagggccacgatggcctgtaccagggcctgagcaccgccaccaaggacacctatgacgccctgcacatgcaggccctgcctccaaga

SEQ ID NO: 26059 - DNA, 675 bp, synthetic construct
  source 1..675: mol_type = other DNA
ttcgcctgcgccaacgccttcaacaacagcattatccccgaggacacattcttcccaagccccgagagcagctgcgacgtgaagctggtggaaaagagcttcgagacagacaccaacctgaacttccagaacctgctggtgatcgtgctgagaatcctgctgctgaaagtggccggctttaacctgctgatgaccctgcggctgtggtccagcaggagtaagaggagcaggctcctgcacagtgactacatgaacatgactccacgccgccccggacccacccgcaagcattaccagccctatgccccaccacgcgacttcgcagcctatcgctccagagtgaagttcagcagaagcgccgacgcccctgcctaccagcagggacagaaccaactgtacaacgagctgaacctgggcagacgggaagagtacgacgtgctggacaagcggagaggcagggaccctgagatgggcggaaagccccagcggagaaagaacccccaggaaggactgtataacgaactccagaaagacaagatggccgaagcctacagcgagatcggcatgaagggcgagcggagaagaggcaagggccacgatggcctgtaccagggcctgagcaccgccaccaaggacacctatgacgccctgcacatgcaggccctgcctccaaga

SEQ ID NO: 26060 - DNA, 672 bp, synthetic construct
  source 1..672: mol_type = other DNA
gcctgcgccaacgccttcaacaacagcattatccccgaggacacattcttcccaagccccgagagcagctgcgacgtgaagctggtggaaaagagcttcgagacagacaccaacctgaacttccagaacctgctggtgatcgtgctgagaatcctgctgctgaaagtggccggctttaacctgctgatgaccctgcggctgtggtccagcaggagtaagaggagcaggctcctgcacagtgactacatgaacatgactccacgccgccccggacccacccgcaagcattaccagccctatgccccaccacgcgacttcgcagcctatcgctccagagtgaagttcagcagaagcgccgacgcccctgcctaccagcagggacagaaccaactgtacaacgagctgaacctgggcagacgggaagagtacgacgtgctggacaagcggagaggcagggaccctgagatgggcggaaagccccagcggagaaagaacccccaggaaggactgtataacgaactccagaaagacaagatggccgaagcctacagcgagatcggcatgaagggcgagcggagaagaggcaagggccacgatggcctgtaccagggcctgagcaccgccaccaaggacacctatgacgccctgcacatgcaggccctgcctccaaga

SEQ ID NO: 26061 - DNA, 669 bp, synthetic construct
  source 1..669: mol_type = other DNA
tgcgccaacgccttcaacaacagcattatccccgaggacacattcttcccaagccccgagagcagctgcgacgtgaagctggtggaaaagagcttcgagacagacaccaacctgaacttccagaacctgctggtgatcgtgctgagaatcctgctgctgaaagtggccggctttaacctgctgatgaccctgcggctgtggtccagcaggagtaagaggagcaggctcctgcacagtgactacatgaacatgactccacgccgccccggacccacccgcaagcattaccagccctatgccccaccacgcgacttcgcagcctatcgctccagagtgaagttcagcagaagcgccgacgcccctgcctaccagcagggacagaaccaactgtacaacgagctgaacctgggcagacgggaagagtacgacgtgctggacaagcggagaggcagggaccctgagatgggcggaaagccccagcggagaaagaacccccaggaaggactgtataacgaactccagaaagacaagatggccgaagcctacagcgagatcggcatgaagggcgagcggagaagaggcaagggccacgatggcctgtaccagggcctgagcaccgccaccaaggacacctatgacgccctgcacatgcaggccctgcctccaaga

SEQ ID NO: 26062 - DNA, 666 bp, synthetic construct
  source 1..666: mol_type = other DNA
gccaacgccttcaacaacagcattatccccgaggacacattcttcccaagccccgagagcagctgcgacgtgaagctggtggaaaagagcttcgagacagacaccaacctgaacttccagaacctgctggtgatcgtgctgagaatcctgctgctgaaagtggccggctttaacctgctgatgaccctgcggctgtggtccagcaggagtaagaggagcaggctcctgcacagtgactacatgaacatgactccacgccgccccggacccacccgcaagcattaccagccctatgccccaccacgcgacttcgcagcctatcgctccagagtgaagttcagcagaagcgccgacgcccctgcctaccagcagggacagaaccaactgtacaacgagctgaacctgggcagacgggaagagtacgacgtgctggacaagcggagaggcagggaccctgagatgggcggaaagccccagcggagaaagaacccccaggaaggactgtataacgaactccagaaagacaagatggccgaagcctacagcgagatcggcatgaagggcgagcggagaagaggcaagggccacgatggcctgtaccagggcctgagcaccgccaccaaggacacctatgacgccctgcacatgcaggccctgcctccaaga

SEQ ID NO: 26063 - DNA, 663 bp, synthetic construct
  source 1..663: mol_type = other DNA
aacgccttcaacaacagcattatccccgaggacacattcttcccaagccccgagagcagctgcgacgtgaagctggtggaaaagagcttcgagacagacaccaacctgaacttccagaacctgctggtgatcgtgctgagaatcctgctgctgaaagtggccggctttaacctgctgatgaccctgcggctgtggtccagcaggagtaagaggagcaggctcctgcacagtgactacatgaacatgactccacgccgccccggacccacccgcaagcattaccagccctatgccccaccacgcgacttcgcagcctatcgctccagagtgaagttcagcagaagcgccgacgcccctgcctaccagcagggacagaaccaactgtacaacgagctgaacctgggcagacgggaagagtacgacgtgctggacaagcggagaggcagggaccctgagatgggcggaaagccccagcggagaaagaacccccaggaaggactgtataacgaactccagaaagacaagatggccgaagcctacagcgagatcggcatgaagggcgagcggagaagaggcaagggccacgatggcctgtaccagggcctgagcaccgccaccaaggacacctatgacgccctgcacatgcaggccctgcctccaaga

SEQ ID NO: 26064 - DNA, 660 bp, synthetic construct
  source 1..660: mol_type = other DNA
gccttcaacaacagcattatccccgaggacacattcttcccaagccccgagagcagctgcgacgtgaagctggtggaaaagagcttcgagacagacaccaacctgaacttccagaacctgctggtgatcgtgctgagaatcctgctgctgaaagtggccggctttaacctgctgatgaccctgcggctgtggtccagcaggagtaagaggagcaggctcctgcacagtgactacatgaacatgactccacgccgccccggacccacccgcaagcattaccagccctatgccccaccacgcgacttcgcagcctatcgctccagagtgaagttcagcagaagcgccgacgcccctgcctaccagcagggacagaaccaactgtacaacgagctgaacctgggcagacgggaagagtacgacgtgctggacaagcggagaggcagggaccctgagatgggcggaaagccccagcggagaaagaacccccaggaaggactgtataacgaactccagaaagacaagatggccgaagcctacagcgagatcggcatgaagggcgagcggagaagaggcaagggccacgatggcctgtaccagggcctgagcaccgccaccaaggacacctatgacgccctgcacatgcaggccctgcctccaaga

SEQ ID NO: 26065 - DNA, 657 bp, synthetic construct
  source 1..657: mol_type = other DNA
ttcaacaacagcattatccccgaggacacattcttcccaagccccgagagcagctgcgacgtgaagctggtggaaaagagcttcgagacagacaccaacctgaacttccagaacctgctggtgatcgtgctgagaatcctgctgctgaaagtggccggctttaacctgctgatgaccctgcggctgtggtccagcaggagtaagaggagcaggctcctgcacagtgactacatgaacatgactccacgccgccccggacccacccgcaagcattaccagccctatgccccaccacgcgacttcgcagcctatcgctccagagtgaagttcagcagaagcgccgacgcccctgcctaccagcagggacagaaccaactgtacaacgagctgaacctgggcagacgggaagagtacgacgtgctggacaagcggagaggcagggaccctgagatgggcggaaagccccagcggagaaagaacccccaggaaggactgtataacgaactccagaaagacaagatggccgaagcctacagcgagatcggcatgaagggcgagcggagaagaggcaagggccacgatggcctgtaccagggcctgagcaccgccaccaaggacacctatgacgccctgcacatgcaggccctgcctccaaga

SEQ ID NO: 26066 - DNA, 654 bp, synthetic construct
  source 1..654: mol_type = other DNA
aacaacagcattatccccgaggacacattcttcccaagccccgagagcagctgcgacgtgaagctggtggaaaagagcttcgagacagacaccaacctgaacttccagaacctgctggtgatcgtgctgagaatcctgctgctgaaagtggccggctttaacctgctgatgaccctgcggctgtggtccagcaggagtaagaggagcaggctcctgcacagtgactacatgaacatgactccacgccgccccggacccacccgcaagcattaccagccctatgccccaccacgcgacttcgcagcctatcgctccagagtgaagttcagcagaagcgccgacgcccctgcctaccagcagggacagaaccaactgtacaacgagctgaacctgggcagacgggaagagtacgacgtgctggacaagcggagaggcagggaccctgagatgggcggaaagccccagcggagaaagaacccccaggaaggactgtataacgaactccagaaagacaagatggccgaagcctacagcgagatcggcatgaagggcgagcggagaagaggcaagggccacgatggcctgtaccagggcctgagcaccgccaccaaggacacctatgacgccctgcacatgcaggccctgcctccaaga

SEQ ID NO: 26067 - DNA, 651 bp, synthetic construct
  source 1..651: mol_type = other DNA
aacagcattatccccgaggacacattcttcccaagccccgagagcagctgcgacgtgaagctggtggaaaagagcttcgagacagacaccaacctgaacttccagaacctgctggtgatcgtgctgagaatcctgctgctgaaagtggccggctttaacctgctgatgaccctgcggctgtggtccagcaggagtaagaggagcaggctcctgcacagtgactacatgaacatgactccacgccgccccggacccacccgcaagcattaccagccctatgccccaccacgcgacttcgcagcctatcgctccagagtgaagttcagcagaagcgccgacgcccctgcctaccagcagggacagaaccaactgtacaacgagctgaacctgggcagacgggaagagtacgacgtgctggacaagcggagaggcagggaccctgagatgggcggaaagccccagcggagaaagaacccccaggaaggactgtataacgaactccagaaagacaagatggccgaagcctacagcgagatcggcatgaagggcgagcggagaagaggcaagggccacgatggcctgtaccagggcctgagcaccgccaccaaggacacctatgacgccctgcacatgcaggccctgcctccaaga

SEQ ID NO: 26068 - DNA, 648 bp, synthetic construct
  source 1..648: mol_type = other DNA
agcattatccccgaggacacattcttcccaagccccgagagcagctgcgacgtgaagctggtggaaaagagcttcgagacagacaccaacctgaacttccagaacctgctggtgatcgtgctgagaatcctgctgctgaaagtggccggctttaacctgctgatgaccctgcggctgtggtccagcaggagtaagaggagcaggctcctgcacagtgactacatgaacatgactccacgccgccccggacccacccgcaagcattaccagccctatgccccaccacgcgacttcgcagcctatcgctccagagtgaagttcagcagaagcgccgacgcccctgcctaccagcagggacagaaccaactgtacaacgagctgaacctgggcagacgggaagagtacgacgtgctggacaagcggagaggcagggaccctgagatgggcggaaagccccagcggagaaagaacccccaggaaggactgtataacgaactccagaaagacaagatggccgaagcctacagcgagatcggcatgaagggcgagcggagaagaggcaagggccacgatggcctgtaccagggcctgagcaccgccaccaaggacacctatgacgccctgcacatgcaggccctgcctccaaga

SEQ ID NO: 26069 - DNA, 645 bp, synthetic construct
  source 1..645: mol_type = other DNA
attatccccgaggacacattcttcccaagccccgagagcagctgcgacgtgaagctggtggaaaagagcttcgagacagacaccaacctgaacttccagaacctgctggtgatcgtgctgagaatcctgctgctgaaagtggccggctttaacctgctgatgaccctgcggctgtggtccagcaggagtaagaggagcaggctcctgcacagtgactacatgaacatgactccacgccgccccggacccacccgcaagcattaccagccctatgccccaccacgcgacttcgcagcctatcgctccagagtgaagttcagcagaagcgccgacgcccctgcctaccagcagggacagaaccaactgtacaacgagctgaacctgggcagacgggaagagtacgacgtgctggacaagcggagaggcagggaccctgagatgggcggaaagccccagcggagaaagaacccccaggaaggactgtataacgaactccagaaagacaagatggccgaagcctacagcgagatcggcatgaagggcgagcggagaagaggcaagggccacgatggcctgtaccagggcctgagcaccgccaccaaggacacctatgacgccctgcacatgcaggccctgcctccaaga

SEQ ID NO: 26070 - DNA, 642 bp, synthetic construct
  source 1..642: mol_type = other DNA
atccccgaggacacattcttcccaagccccgagagcagctgcgacgtgaagctggtggaaaagagcttcgagacagacaccaacctgaacttccagaacctgctggtgatcgtgctgagaatcctgctgctgaaagtggccggctttaacctgctgatgaccctgcggctgtggtccagcaggagtaagaggagcaggctcctgcacagtgactacatgaacatgactccacgccgccccggacccacccgcaagcattaccagccctatgccccaccacgcgacttcgcagcctatcgctccagagtgaagttcagcagaagcgccgacgcccctgcctaccagcagggacagaaccaactgtacaacgagctgaacctgggcagacgggaagagtacgacgtgctggacaagcggagaggcagggaccctgagatgggcggaaagccccagcggagaaagaacccccaggaaggactgtataacgaactccagaaagacaagatggccgaagcctacagcgagatcggcatgaagggcgagcggagaagaggcaagggccacgatggcctgtaccagggcctgagcaccgccaccaaggacacctatgacgccctgcacatgcaggccctgcctccaaga

SEQ ID NO: 26071 - DNA, 639 bp, synthetic construct
  source 1..639: mol_type = other DNA
cccgaggacacattcttcccaagccccgagagcagctgcgacgtgaagctggtggaaaagagcttcgagacagacaccaacctgaacttccagaacctgctggtgatcgtgctgagaatcctgctgctgaaagtggccggctttaacctgctgatgaccctgcggctgtggtccagcaggagtaagaggagcaggctcctgcacagtgactacatgaacatgactccacgccgccccggacccacccgcaagcattaccagccctatgccccaccacgcgacttcgcagcctatcgctccagagtgaagttcagcagaagcgccgacgcccctgcctaccagcagggacagaaccaactgtacaacgagctgaacctgggcagacgggaagagtacgacgtgctggacaagcggagaggcagggaccctgagatgggcggaaagccccagcggagaaagaacccccaggaaggactgtataacgaactccagaaagacaagatggccgaagcctacagcgagatcggcatgaagggcgagcggagaagaggcaagggccacgatggcctgtaccagggcctgagcaccgccaccaaggacacctatgacgccctgcacatgcaggccctgcctccaaga

SEQ ID NO: 26072 - DNA, 636 bp, synthetic construct
  source 1..636: mol_type = other DNA
gaggacacattcttcccaagccccgagagcagctgcgacgtgaagctggtggaaaagagcttcgagacagacaccaacctgaacttccagaacctgctggtgatcgtgctgagaatcctgctgctgaaagtggccggctttaacctgctgatgaccctgcggctgtggtccagcaggagtaagaggagcaggctcctgcacagtgactacatgaacatgactccacgccgccccggacccacccgcaagcattaccagccctatgccccaccacgcgacttcgcagcctatcgctccagagtgaagttcagcagaagcgccgacgcccctgcctaccagcagggacagaaccaactgtacaacgagctgaacctgggcagacgggaagagtacgacgtgctggacaagcggagaggcagggaccctgagatgggcggaaagccccagcggagaaagaacccccaggaaggactgtataacgaactccagaaagacaagatggccgaagcctacagcgagatcggcatgaagggcgagcggagaagaggcaagggccacgatggcctgtaccagggcctgagcaccgccaccaaggacacctatgacgccctgcacatgcaggccctgcctccaaga

SEQ ID NO: 26073 - DNA, 633 bp, synthetic construct
  source 1..633: mol_type = other DNA
gacacattcttcccaagccccgagagcagctgcgacgtgaagctggtggaaaagagcttcgagacagacaccaacctgaacttccagaacctgctggtgatcgtgctgagaatcctgctgctgaaagtggccggctttaacctgctgatgaccctgcggctgtggtccagcaggagtaagaggagcaggctcctgcacagtgactacatgaacatgactccacgccgccccggacccacccgcaagcattaccagccctatgccccaccacgcgacttcgcagcctatcgctccagagtgaagttcagcagaagcgccgacgcccctgcctaccagcagggacagaaccaactgtacaacgagctgaacctgggcagacgggaagagtacgacgtgctggacaagcggagaggcagggaccctgagatgggcggaaagccccagcggagaaagaacccccaggaaggactgtataacgaactccagaaagacaagatggccgaagcctacagcgagatcggcatgaagggcgagcggagaagaggcaagggccacgatggcctgtaccagggcctgagcaccgccaccaaggacacctatgacgccctgcacatgcaggccctgcctccaaga

SEQ ID NO: 26074 - DNA, 630 bp, synthetic construct
  source 1..630: mol_type = other DNA
acattcttcccaagccccgagagcagctgcgacgtgaagctggtggaaaagagcttcgagacagacaccaacctgaacttccagaacctgctggtgatcgtgctgagaatcctgctgctgaaagtggccggctttaacctgctgatgaccctgcggctgtggtccagcaggagtaagaggagcaggctcctgcacagtgactacatgaacatgactccacgccgccccggacccacccgcaagcattaccagccctatgccccaccacgcgacttcgcagcctatcgctccagagtgaagttcagcagaagcgccgacgcccctgcctaccagcagggacagaaccaactgtacaacgagctgaacctgggcagacgggaagagtacgacgtgctggacaagcggagaggcagggaccctgagatgggcggaaagccccagcggagaaagaacccccaggaaggactgtataacgaactccagaaagacaagatggccgaagcctacagcgagatcggcatgaagggcgagcggagaagaggcaagggccacgatggcctgtaccagggcctgagcaccgccaccaaggacacctatgacgccctgcacatgcaggccctgcctccaaga

SEQ ID NO: 26075 - DNA, 627 bp, synthetic construct
  source 1..627: mol_type = other DNA
ttcttcccaagccccgagagcagctgcgacgtgaagctggtggaaaagagcttcgagacagacaccaacctgaacttccagaacctgctggtgatcgtgctgagaatcctgctgctgaaagtggccggctttaacctgctgatgaccctgcggctgtggtccagcaggagtaagaggagcaggctcctgcacagtgactacatgaacatgactccacgccgccccggacccacccgcaagcattaccagccctatgccccaccacgcgacttcgcagcctatcgctccagagtgaagttcagcagaagcgccgacgcccctgcctaccagcagggacagaaccaactgtacaacgagctgaacctgggcagacgggaagagtacgacgtgctggacaagcggagaggcagggaccctgagatgggcggaaagccccagcggagaaagaacccccaggaaggactgtataacgaactccagaaagacaagatggccgaagcctacagcgagatcggcatgaagggcgagcggagaagaggcaagggccacgatggcctgtaccagggcctgagcaccgccaccaaggacacctatgacgccctgcacatgcaggccctgcctccaaga

SEQ ID NO: 26076 - DNA, 624 bp, synthetic construct
  source 1..624: mol_type = other DNA
ttcccaagccccgagagcagctgcgacgtgaagctggtggaaaagagcttcgagacagacaccaacctgaacttccagaacctgctggtgatcgtgctgagaatcctgctgctgaaagtggccggctttaacctgctgatgaccctgcggctgtggtccagcaggagtaagaggagcaggctcctgcacagtgactacatgaacatgactccacgccgccccggacccacccgcaagcattaccagccctatgccccaccacgcgacttcgcagcctatcgctccagagtgaagttcagcagaagcgccgacgcccctgcctaccagcagggacagaaccaactgtacaacgagctgaacctgggcagacgggaagagtacgacgtgctggacaagcggagaggcagggaccctgagatgggcggaaagccccagcggagaaagaacccccaggaaggactgtataacgaactccagaaagacaagatggccgaagcctacagcgagatcggcatgaagggcgagcggagaagaggcaagggccacgatggcctgtaccagggcctgagcaccgccaccaaggacacctatgacgccctgcacatgcaggccctgcctccaaga

SEQ ID NO: 26077 - DNA, 621 bp, synthetic construct
  source 1..621: mol_type = other DNA
ccaagccccgagagcagctgcgacgtgaagctggtggaaaagagcttcgagacagacaccaacctgaacttccagaacctgctggtgatcgtgctgagaatcctgctgctgaaagtggccggctttaacctgctgatgaccctgcggctgtggtccagcaggagtaagaggagcaggctcctgcacagtgactacatgaacatgactccacgccgccccggacccacccgcaagcattaccagccctatgccccaccacgcgacttcgcagcctatcgctccagagtgaagttcagcagaagcgccgacgcccctgcctaccagcagggacagaaccaactgtacaacgagctgaacctgggcagacgggaagagtacgacgtgctggacaagcggagaggcagggaccctgagatgggcggaaagccccagcggagaaagaacccccaggaaggactgtataacgaactccagaaagacaagatggccgaagcctacagcgagatcggcatgaagggcgagcggagaagaggcaagggccacgatggcctgtaccagggcctgagcaccgccaccaaggacacctatgacgccctgcacatgcaggccctgcctccaaga

SEQ ID NO: 26078 - DNA, 618 bp, synthetic construct
  source 1..618: mol_type = other DNA
agccccgagagcagctgcgacgtgaagctggtggaaaagagcttcgagacagacaccaacctgaacttccagaacctgctggtgatcgtgctgagaatcctgctgctgaaagtggccggctttaacctgctgatgaccctgcggctgtggtccagcaggagtaagaggagcaggctcctgcacagtgactacatgaacatgactccacgccgccccggacccacccgcaagcattaccagccctatgccccaccacgcgacttcgcagcctatcgctccagagtgaagttcagcagaagcgccgacgcccctgcctaccagcagggacagaaccaactgtacaacgagctgaacctgggcagacgggaagagtacgacgtgctggacaagcggagaggcagggaccctgagatgggcggaaagccccagcggagaaagaacccccaggaaggactgtataacgaactccagaaagacaagatggccgaagcctacagcgagatcggcatgaagggcgagcggagaagaggcaagggccacgatggcctgtaccagggcctgagcaccgccaccaaggacacctatgacgccctgcacatgcaggccctgcctccaaga

SEQ ID NO: 26079 - DNA, 615 bp, synthetic construct
  source 1..615: mol_type = other DNA
cccgagagcagctgcgacgtgaagctggtggaaaagagcttcgagacagacaccaacctgaacttccagaacctgctggtgatcgtgctgagaatcctgctgctgaaagtggccggctttaacctgctgatgaccctgcggctgtggtccagcaggagtaagaggagcaggctcctgcacagtgactacatgaacatgactccacgccgccccggacccacccgcaagcattaccagccctatgccccaccacgcgacttcgcagcctatcgctccagagtgaagttcagcagaagcgccgacgcccctgcctaccagcagggacagaaccaactgtacaacgagctgaacctgggcagacgggaagagtacgacgtgctggacaagcggagaggcagggaccctgagatgggcggaaagccccagcggagaaagaacccccaggaaggactgtataacgaactccagaaagacaagatggccgaagcctacagcgagatcggcatgaagggcgagcggagaagaggcaagggccacgatggcctgtaccagggcctgagcaccgccaccaaggacacctatgacgccctgcacatgcaggccctgcctccaaga

SEQ ID NO: 26080 - DNA, 612 bp, synthetic construct
  source 1..612: mol_type = other DNA
gagagcagctgcgacgtgaagctggtggaaaagagcttcgagacagacaccaacctgaacttccagaacctgctggtgatcgtgctgagaatcctgctgctgaaagtggccggctttaacctgctgatgaccctgcggctgtggtccagcaggagtaagaggagcaggctcctgcacagtgactacatgaacatgactccacgccgccccggacccacccgcaagcattaccagccctatgccccaccacgcgacttcgcagcctatcgctccagagtgaagttcagcagaagcgccgacgcccctgcctaccagcagggacagaaccaactgtacaacgagctgaacctgggcagacgggaagagtacgacgtgctggacaagcggagaggcagggaccctgagatgggcggaaagccccagcggagaaagaacccccaggaaggactgtataacgaactccagaaagacaagatggccgaagcctacagcgagatcggcatgaagggcgagcggagaagaggcaagggccacgatggcctgtaccagggcctgagcaccgccaccaaggacacctatgacgccctgcacatgcaggccctgcctccaaga

SEQ ID NO: 26081 - DNA, 609 bp, synthetic construct
  source 1..609: mol_type = other DNA
agcagctgcgacgtgaagctggtggaaaagagcttcgagacagacaccaacctgaacttccagaacctgctggtgatcgtgctgagaatcctgctgctgaaagtggccggctttaacctgctgatgaccctgcggctgtggtccagcaggagtaagaggagcaggctcctgcacagtgactacatgaacatgactccacgccgccccggacccacccgcaagcattaccagccctatgccccaccacgcgacttcgcagcctatcgctccagagtgaagttcagcagaagcgccgacgcccctgcctaccagcagggacagaaccaactgtacaacgagctgaacctgggcagacgggaagagtacgacgtgctggacaagcggagaggcagggaccctgagatgggcggaaagccccagcggagaaagaacccccaggaaggactgtataacgaactccagaaagacaagatggccgaagcctacagcgagatcggcatgaagggcgagcggagaagaggcaagggccacgatggcctgtaccagggcctgagcaccgccaccaaggacacctatgacgccctgcacatgcaggccctgcctccaaga

SEQ ID NO: 26082 - DNA, 606 bp, synthetic construct
  source 1..606: mol_type = other DNA
agctgcgacgtgaagctggtggaaaagagcttcgagacagacaccaacctgaacttccagaacctgctggtgatcgtgctgagaatcctgctgctgaaagtggccggctttaacctgctgatgaccctgcggctgtggtccagcaggagtaagaggagcaggctcctgcacagtgactacatgaacatgactccacgccgccccggacccacccgcaagcattaccagccctatgccccaccacgcgacttcgcagcctatcgctccagagtgaagttcagcagaagcgccgacgcccctgcctaccagcagggacagaaccaactgtacaacgagctgaacctgggcagacgggaagagtacgacgtgctggacaagcggagaggcagggaccctgagatgggcggaaagccccagcggagaaagaacccccaggaaggactgtataacgaactccagaaagacaagatggccgaagcctacagcgagatcggcatgaagggcgagcggagaagaggcaagggccacgatggcctgtaccagggcctgagcaccgccaccaaggacacctatgacgccctgcacatgcaggccctgcctccaaga

SEQ ID NO: 26083 - DNA, 603 bp, synthetic construct
  source 1..603: mol_type = other DNA
tgcgacgtgaagctggtggaaaagagcttcgagacagacaccaacctgaacttccagaacctgctggtgatcgtgctgagaatcctgctgctgaaagtggccggctttaacctgctgatgaccctgcggctgtggtccagcaggagtaagaggagcaggctcctgcacagtgactacatgaacatgactccacgccgccccggacccacccgcaagcattaccagccctatgccccaccacgcgacttcgcagcctatcgctccagagtgaagttcagcagaagcgccgacgcccctgcctaccagcagggacagaaccaactgtacaacgagctgaacctgggcagacgggaagagtacgacgtgctggacaagcggagaggcagggaccctgagatgggcggaaagccccagcggagaaagaacccccaggaaggactgtataacgaactccagaaagacaagatggccgaagcctacagcgagatcggcatgaagggcgagcggagaagaggcaagggccacgatggcctgtaccagggcctgagcaccgccaccaaggacacctatgacgccctgcacatgcaggccctgcctccaaga

SEQ ID NO: 26084 - DNA, 600 bp, synthetic construct
  source 1..600: mol_type = other DNA
gacgtgaagctggtggaaaagagcttcgagacagacaccaacctgaacttccagaacctgctggtgatcgtgctgagaatcctgctgctgaaagtggccggctttaacctgctgatgaccctgcggctgtggtccagcaggagtaagaggagcaggctcctgcacagtgactacatgaacatgactccacgccgccccggacccacccgcaagcattaccagccctatgccccaccacgcgacttcgcagcctatcgctccagagtgaagttcagcagaagcgccgacgcccctgcctaccagcagggacagaaccaactgtacaacgagctgaacctgggcagacgggaagagtacgacgtgctggacaagcggagaggcagggaccctgagatgggcggaaagccccagcggagaaagaacccccaggaaggactgtataacgaactccagaaagacaagatggccgaagcctacagcgagatcggcatgaagggcgagcggagaagaggcaagggccacgatggcctgtaccagggcctgagcaccgccaccaaggacacctatgacgccctgcacatgcaggccctgcctccaaga

SEQ ID NO: 26085 - DNA, 597 bp, synthetic construct
  source 1..597: mol_type = other DNA
gtgaagctggtggaaaagagcttcgagacagacaccaacctgaacttccagaacctgctggtgatcgtgctgagaatcctgctgctgaaagtggccggctttaacctgctgatgaccctgcggctgtggtccagcaggagtaagaggagcaggctcctgcacagtgactacatgaacatgactccacgccgccccggacccacccgcaagcattaccagccctatgccccaccacgcgacttcgcagcctatcgctccagagtgaagttcagcagaagcgccgacgcccctgcctaccagcagggacagaaccaactgtacaacgagctgaacctgggcagacgggaagagtacgacgtgctggacaagcggagaggcagggaccctgagatgggcggaaagccccagcggagaaagaacccccaggaaggactgtataacgaactccagaaagacaagatggccgaagcctacagcgagatcggcatgaagggcgagcggagaagaggcaagggccacgatggcctgtaccagggcctgagcaccgccaccaaggacacctatgacgccctgcacatgcaggccctgcctccaaga

SEQ ID NO: 26086 - DNA, 594 bp, synthetic construct
  source 1..594: mol_type = other DNA
aagctggtggaaaagagcttcgagacagacaccaacctgaacttccagaacctgctggtgatcgtgctgagaatcctgctgctgaaagtggccggctttaacctgctgatgaccctgcggctgtggtccagcaggagtaagaggagcaggctcctgcacagtgactacatgaacatgactccacgccgccccggacccacccgcaagcattaccagccctatgccccaccacgcgacttcgcagcctatcgctccagagtgaagttcagcagaagcgccgacgcccctgcctaccagcagggacagaaccaactgtacaacgagctgaacctgggcagacgggaagagtacgacgtgctggacaagcggagaggcagggaccctgagatgggcggaaagccccagcggagaaagaacccccaggaaggactgtataacgaactccagaaagacaagatggccgaagcctacagcgagatcggcatgaagggcgagcggagaagaggcaagggccacgatggcctgtaccagggcctgagcaccgccaccaaggacacctatgacgccctgcacatgcaggccctgcctccaaga

SEQ ID NO: 26087 - DNA, 591 bp, synthetic construct
  source 1..591: mol_type = other DNA
ctggtggaaaagagcttcgagacagacaccaacctgaacttccagaacctgctggtgatcgtgctgagaatcctgctgctgaaagtggccggctttaacctgctgatgaccctgcggctgtggtccagcaggagtaagaggagcaggctcctgcacagtgactacatgaacatgactccacgccgccccggacccacccgcaagcattaccagccctatgccccaccacgcgacttcgcagcctatcgctccagagtgaagttcagcagaagcgccgacgcccctgcctaccagcagggacagaaccaactgtacaacgagctgaacctgggcagacgggaagagtacgacgtgctggacaagcggagaggcagggaccctgagatgggcggaaagccccagcggagaaagaacccccaggaaggactgtataacgaactccagaaagacaagatggccgaagcctacagcgagatcggcatgaagggcgagcggagaagaggcaagggccacgatggcctgtaccagggcctgagcaccgccaccaaggacacctatgacgccctgcacatgcaggccctgcctccaaga

SEQ ID NO: 26088 - DNA, 588 bp, synthetic construct
  source 1..588: mol_type = other DNA
gtggaaaagagcttcgagacagacaccaacctgaacttccagaacctgctggtgatcgtgctgagaatcctgctgctgaaagtggccggctttaacctgctgatgaccctgcggctgtggtccagcaggagtaagaggagcaggctcctgcacagtgactacatgaacatgactccacgccgccccggacccacccgcaagcattaccagccctatgccccaccacgcgacttcgcagcctatcgctccagagtgaagttcagcagaagcgccgacgcccctgcctaccagcagggacagaaccaactgtacaacgagctgaacctgggcagacgggaagagtacgacgtgctggacaagcggagaggcagggaccctgagatgggcggaaagccccagcggagaaagaacccccaggaaggactgtataacgaactccagaaagacaagatggccgaagcctacagcgagatcggcatgaagggcgagcggagaagaggcaagggccacgatggcctgtaccagggcctgagcaccgccaccaaggacacctatgacgccctgcacatgcaggccctgcctccaaga

SEQ ID NO: 26089 - DNA, 585 bp, synthetic construct
  source 1..585: mol_type = other DNA
gaaaagagcttcgagacagacaccaacctgaacttccagaacctgctggtgatcgtgctgagaatcctgctgctgaaagtggccggctttaacctgctgatgaccctgcggctgtggtccagcaggagtaagaggagcaggctcctgcacagtgactacatgaacatgactccacgccgccccggacccacccgcaagcattaccagccctatgccccaccacgcgacttcgcagcctatcgctccagagtgaagttcagcagaagcgccgacgcccctgcctaccagcagggacagaaccaactgtacaacgagctgaacctgggcagacgggaagagtacgacgtgctggacaagcggagaggcagggaccctgagatgggcggaaagccccagcggagaaagaacccccaggaaggactgtataacgaactccagaaagacaagatggccgaagcctacagcgagatcggcatgaagggcgagcggagaagaggcaagggccacgatggcctgtaccagggcctgagcaccgccaccaaggacacctatgacgccctgcacatgcaggccctgcctccaaga

SEQ ID NO: 26090 - DNA, 582 bp, synthetic construct
  source 1..582: mol_type = other DNA
aagagcttcgagacagacaccaacctgaacttccagaacctgctggtgatcgtgctgagaatcctgctgctgaaagtggccggctttaacctgctgatgaccctgcggctgtggtccagcaggagtaagaggagcaggctcctgcacagtgactacatgaacatgactccacgccgccccggacccacccgcaagcattaccagccctatgccccaccacgcgacttcgcagcctatcgctccagagtgaagttcagcagaagcgccgacgcccctgcctaccagcagggacagaaccaactgtacaacgagctgaacctgggcagacgggaagagtacgacgtgctggacaagcggagaggcagggaccctgagatgggcggaaagccccagcggagaaagaacccccaggaaggactgtataacgaactccagaaagacaagatggccgaagcctacagcgagatcggcatgaagggcgagcggagaagaggcaagggccacgatggcctgtaccagggcctgagcaccgccaccaaggacacctatgacgccctgcacatgcaggccctgcctccaaga

SEQ ID NO: 26091 - DNA, 579 bp, synthetic construct
  source 1..579: mol_type = other DNA
agcttcgagacagacaccaacctgaacttccagaacctgctggtgatcgtgctgagaatcctgctgctgaaagtggccggctttaacctgctgatgaccctgcggctgtggtccagcaggagtaagaggagcaggctcctgcacagtgactacatgaacatgactccacgccgccccggacccacccgcaagcattaccagccctatgccccaccacgcgacttcgcagcctatcgctccagagtgaagttcagcagaagcgccgacgcccctgcctaccagcagggacagaaccaactgtacaacgagctgaacctgggcagacgggaagagtacgacgtgctggacaagcggagaggcagggaccctgagatgggcggaaagccccagcggagaaagaacccccaggaaggactgtataacgaactccagaaagacaagatggccgaagcctacagcgagatcggcatgaagggcgagcggagaagaggcaagggccacgatggcctgtaccagggcctgagcaccgccaccaaggacacctatgacgccctgcacatgcaggccctgcctccaaga

SEQ ID NO: 26092 - DNA, 960 bp, synthetic construct
  source 1..960: mol_type = other DNA
ggacagcctaaggccaatcctaccgtgacactgttccctccaagcagcgaagaactccaggccaacaaggccacacttgtgtgcctgatctccgacttctaccctggggctgtgacagtggcttggaaggccgatggatctcctgtgaaagccggcgtggaaaccaccaagccatccaagcagagcaacaacaaatacgccgccagctcctacctgagcctgacacctgagcagtggaagtcccacagatcctacagctgccaagtgacccacgaaggcagcaccgtggaaaagacagtggcccctacagagtgcagcatccccgaggacacattcttcccaagccccgagagcagctgcgacgtgaagctggtggaaaagagcttcgagacagacaccaacctgaacttccagaacctgctggtgatcgtgctgagaatcctgctgctgaaagtggccggctttaacctgctgatgaccctgcggctgtggtccagcaggagtaagaggagcaggctcctgcacagtgactacatgaacatgactccacgccgccccggacccacccgcaagcattaccagccctatgccccaccacgcgacttcgcagcctatcgctccagagtgaagttcagcagaagcgccgacgcccctgcctaccagcagggacagaaccaactgtacaacgagctgaacctgggcagacgggaagagtacgacgtgctggacaagcggagaggcagggaccctgagatgggcggaaagccccagcggagaaagaacccccaggaaggactgtataacgaactccagaaagacaagatggccgaagcctacagcgagatcggcatgaagggcgagcggagaagaggcaagggccacgatggcctgtaccagggcctgagcaccgccaccaaggacacctatgacgccctgcacatgcaggccctgcctccaaga

SEQ ID NO: 26093 - DNA, 957 bp, synthetic construct
  source 1..957: mol_type = other DNA
cagcctaaggccaatcctaccgtgacactgttccctccaagcagcgaagaactccaggccaacaaggccacacttgtgtgcctgatctccgacttctaccctggggctgtgacagtggcttggaaggccgatggatctcctgtgaaagccggcgtggaaaccaccaagccatccaagcagagcaacaacaaatacgccgccagctcctacctgagcctgacacctgagcagtggaagtcccacagatcctacagctgccaagtgacccacgaaggcagcaccgtggaaaagacagtggcccctacagagtgcagcatccccgaggacacattcttcccaagccccgagagcagctgcgacgtgaagctggtggaaaagagcttcgagacagacaccaacctgaacttccagaacctgctggtgatcgtgctgagaatcctgctgctgaaagtggccggctttaacctgctgatgaccctgcggctgtggtccagcaggagtaagaggagcaggctcctgcacagtgactacatgaacatgactccacgccgccccggacccacccgcaagcattaccagccctatgccccaccacgcgacttcgcagcctatcgctccagagtgaagttcagcagaagcgccgacgcccctgcctaccagcagggacagaaccaactgtacaacgagctgaacctgggcagacgggaagagtacgacgtgctggacaagcggagaggcagggaccctgagatgggcggaaagccccagcggagaaagaacccccaggaaggactgtataacgaactccagaaagacaagatggccgaagcctacagcgagatcggcatgaagggcgagcggagaagaggcaagggccacgatggcctgtaccagggcctgagcaccgccaccaaggacacctatgacgccctgcacatgcaggccctgcctccaaga

SEQ ID NO: 26094 - DNA, 954 bp, synthetic construct
  source 1..954: mol_type = other DNA
cctaaggccaatcctaccgtgacactgttccctccaagcagcgaagaactccaggccaacaaggccacacttgtgtgcctgatctccgacttctaccctggggctgtgacagtggcttggaaggccgatggatctcctgtgaaagccggcgtggaaaccaccaagccatccaagcagagcaacaacaaatacgccgccagctcctacctgagcctgacacctgagcagtggaagtcccacagatcctacagctgccaagtgacccacgaaggcagcaccgtggaaaagacagtggcccctacagagtgcagcatccccgaggacacattcttcccaagccccgagagcagctgcgacgtgaagctggtggaaaagagcttcgagacagacaccaacctgaacttccagaacctgctggtgatcgtgctgagaatcctgctgctgaaagtggccggctttaacctgctgatgaccctgcggctgtggtccagcaggagtaagaggagcaggctcctgcacagtgactacatgaacatgactccacgccgccccggacccacccgcaagcattaccagccctatgccccaccacgcgacttcgcagcctatcgctccagagtgaagttcagcagaagcgccgacgcccctgcctaccagcagggacagaaccaactgtacaacgagctgaacctgggcagacgggaagagtacgacgtgctggacaagcggagaggcagggaccctgagatgggcggaaagccccagcggagaaagaacccccaggaaggactgtataacgaactccagaaagacaagatggccgaagcctacagcgagatcggcatgaagggcgagcggagaagaggcaagggccacgatggcctgtaccagggcctgagcaccgccaccaaggacacctatgacgccctgcacatgcaggccctgcctccaaga

SEQ ID NO: 26095 - DNA, 951 bp, synthetic construct
  source 1..951: mol_type = other DNA
aaggccaatcctaccgtgacactgttccctccaagcagcgaagaactccaggccaacaaggccacacttgtgtgcctgatctccgacttctaccctggggctgtgacagtggcttggaaggccgatggatctcctgtgaaagccggcgtggaaaccaccaagccatccaagcagagcaacaacaaatacgccgccagctcctacctgagcctgacacctgagcagtggaagtcccacagatcctacagctgccaagtgacccacgaaggcagcaccgtggaaaagacagtggcccctacagagtgcagcatccccgaggacacattcttcccaagccccgagagcagctgcgacgtgaagctggtggaaaagagcttcgagacagacaccaacctgaacttccagaacctgctggtgatcgtgctgagaatcctgctgctgaaagtggccggctttaacctgctgatgaccctgcggctgtggtccagcaggagtaagaggagcaggctcctgcacagtgactacatgaacatgactccacgccgccccggacccacccgcaagcattaccagccctatgccccaccacgcgacttcgcagcctatcgctccagagtgaagttcagcagaagcgccgacgcccctgcctaccagcagggacagaaccaactgtacaacgagctgaacctgggcagacgggaagagtacgacgtgctggacaagcggagaggcagggaccctgagatgggcggaaagccccagcggagaaagaacccccaggaaggactgtataacgaactccagaaagacaagatggccgaagcctacagcgagatcggcatgaagggcgagcggagaagaggcaagggccacgatggcctgtaccagggcctgagcaccgccaccaaggacacctatgacgccctgcacatgcaggccctgcctccaaga

SEQ ID NO: 26096 - DNA, 948 bp, synthetic construct
  source 1..948: mol_type = other DNA
gccaatcctaccgtgacactgttccctccaagcagcgaagaactccaggccaacaaggccacacttgtgtgcctgatctccgacttctaccctggggctgtgacagtggcttggaaggccgatggatctcctgtgaaagccggcgtggaaaccaccaagccatccaagcagagcaacaacaaatacgccgccagctcctacctgagcctgacacctgagcagtggaagtcccacagatcctacagctgccaagtgacccacgaaggcagcaccgtggaaaagacagtggcccctacagagtgcagcatccccgaggacacattcttcccaagccccgagagcagctgcgacgtgaagctggtggaaaagagcttcgagacagacaccaacctgaacttccagaacctgctggtgatcgtgctgagaatcctgctgctgaaagtggccggctttaacctgctgatgaccctgcggctgtggtccagcaggagtaagaggagcaggctcctgcacagtgactacatgaacatgactccacgccgccccggacccacccgcaagcattaccagccctatgccccaccacgcgacttcgcagcctatcgctccagagtgaagttcagcagaagcgccgacgcccctgcctaccagcagggacagaaccaactgtacaacgagctgaacctgggcagacgggaagagtacgacgtgctggacaagcggagaggcagggaccctgagatgggcggaaagccccagcggagaaagaacccccaggaaggactgtataacgaactccagaaagacaagatggccgaagcctacagcgagatcggcatgaagggcgagcggagaagaggcaagggccacgatggcctgtaccagggcctgagcaccgccaccaaggacacctatgacgccctgcacatgcaggccctgcctccaaga

SEQ ID NO: 26097 - DNA, 945 bp, synthetic construct
  source 1..945: mol_type = other DNA
aatcctaccgtgacactgttccctccaagcagcgaagaactccaggccaacaaggccacacttgtgtgcctgatctccgacttctaccctggggctgtgacagtggcttggaaggccgatggatctcctgtgaaagccggcgtggaaaccaccaagccatccaagcagagcaacaacaaatacgccgccagctcctacctgagcctgacacctgagcagtggaagtcccacagatcctacagctgccaagtgacccacgaaggcagcaccgtggaaaagacagtggcccctacagagtgcagcatccccgaggacacattcttcccaagccccgagagcagctgcgacgtgaagctggtggaaaagagcttcgagacagacaccaacctgaacttccagaacctgctggtgatcgtgctgagaatcctgctgctgaaagtggccggctttaacctgctgatgaccctgcggctgtggtccagcaggagtaagaggagcaggctcctgcacagtgactacatgaacatgactccacgccgccccggacccacccgcaagcattaccagccctatgccccaccacgcgacttcgcagcctatcgctccagagtgaagttcagcagaagcgccgacgcccctgcctaccagcagggacagaaccaactgtacaacgagctgaacctgggcagacgggaagagtacgacgtgctggacaagcggagaggcagggaccctgagatgggcggaaagccccagcggagaaagaacccccaggaaggactgtataacgaactccagaaagacaagatggccgaagcctacagcgagatcggcatgaagggcgagcggagaagaggcaagggccacgatggcctgtaccagggcctgagcaccgccaccaaggacacctatgacgccctgcacatgcaggccctgcctccaaga

SEQ ID NO: 26098 - DNA, 942 bp, synthetic construct
  source 1..942: mol_type = other DNA
cctaccgtgacactgttccctccaagcagcgaagaactccaggccaacaaggccacacttgtgtgcctgatctccgacttctaccctggggctgtgacagtggcttggaaggccgatggatctcctgtgaaagccggcgtggaaaccaccaagccatccaagcagagcaacaacaaatacgccgccagctcctacctgagcctgacacctgagcagtggaagtcccacagatcctacagctgccaagtgacccacgaaggcagcaccgtggaaaagacagtggcccctacagagtgcagcatccccgaggacacattcttcccaagccccgagagcagctgcgacgtgaagctggtggaaaagagcttcgagacagacaccaacctgaacttccagaacctgctggtgatcgtgctgagaatcctgctgctgaaagtggccggctttaacctgctgatgaccctgcggctgtggtccagcaggagtaagaggagcaggctcctgcacagtgactacatgaacatgactccacgccgccccggacccacccgcaagcattaccagccctatgccccaccacgcgacttcgcagcctatcgctccagagtgaagttcagcagaagcgccgacgcccctgcctaccagcagggacagaaccaactgtacaacgagctgaacctgggcagacgggaagagtacgacgtgctggacaagcggagaggcagggaccctgagatgggcggaaagccccagcggagaaagaacccccaggaaggactgtataacgaactccagaaagacaagatggccgaagcctacagcgagatcggcatgaagggcgagcggagaagaggcaagggccacgatggcctgtaccagggcctgagcaccgccaccaaggacacctatgacgccctgcacatgcaggccctgcctccaaga

SEQ ID NO: 26099 - DNA, 939 bp, synthetic construct
  source 1..939: mol_type = other DNA
accgtgacactgttccctccaagcagcgaagaactccaggccaacaaggccacacttgtgtgcctgatctccgacttctaccctggggctgtgacagtggcttggaaggccgatggatctcctgtgaaagccggcgtggaaaccaccaagccatccaagcagagcaacaacaaatacgccgccagctcctacctgagcctgacacctgagcagtggaagtcccacagatcctacagctgccaagtgacccacgaaggcagcaccgtggaaaagacagtggcccctacagagtgcagcatccccgaggacacattcttcccaagccccgagagcagctgcgacgtgaagctggtggaaaagagcttcgagacagacaccaacctgaacttccagaacctgctggtgatcgtgctgagaatcctgctgctgaaagtggccggctttaacctgctgatgaccctgcggctgtggtccagcaggagtaagaggagcaggctcctgcacagtgactacatgaacatgactccacgccgccccggacccacccgcaagcattaccagccctatgccccaccacgcgacttcgcagcctatcgctccagagtgaagttcagcagaagcgccgacgcccctgcctaccagcagggacagaaccaactgtacaacgagctgaacctgggcagacgggaagagtacgacgtgctggacaagcggagaggcagggaccctgagatgggcggaaagccccagcggagaaagaacccccaggaaggactgtataacgaactccagaaagacaagatggccgaagcctacagcgagatcggcatgaagggcgagcggagaagaggcaagggccacgatggcctgtaccagggcctgagcaccgccaccaaggacacctatgacgccctgcacatgcaggccctgcctccaaga

SEQ ID NO: 26100 - DNA, 936 bp, synthetic construct
  source 1..936: mol_type = other DNA
gtgacactgttccctccaagcagcgaagaactccaggccaacaaggccacacttgtgtgcctgatctccgacttctaccctggggctgtgacagtggcttggaaggccgatggatctcctgtgaaagccggcgtggaaaccaccaagccatccaagcagagcaacaacaaatacgccgccagctcctacctgagcctgacacctgagcagtggaagtcccacagatcctacagctgccaagtgacccacgaaggcagcaccgtggaaaagacagtggcccctacagagtgcagcatccccgaggacacattcttcccaagccccgagagcagctgcgacgtgaagctggtggaaaagagcttcgagacagacaccaacctgaacttccagaacctgctggtgatcgtgctgagaatcctgctgctgaaagtggccggctttaacctgctgatgaccctgcggctgtggtccagcaggagtaagaggagcaggctcctgcacagtgactacatgaacatgactccacgccgccccggacccacccgcaagcattaccagccctatgccccaccacgcgacttcgcagcctatcgctccagagtgaagttcagcagaagcgccgacgcccctgcctaccagcagggacagaaccaactgtacaacgagctgaacctgggcagacgggaagagtacgacgtgctggacaagcggagaggcagggaccctgagatgggcggaaagccccagcggagaaagaacccccaggaaggactgtataacgaactccagaaagacaagatggccgaagcctacagcgagatcggcatgaagggcgagcggagaagaggcaagggccacgatggcctgtaccagggcctgagcaccgccaccaaggacacctatgacgccctgcacatgcaggccctgcctccaaga

SEQ ID NO: 26101 - DNA, 933 bp, synthetic construct
  source 1..933: mol_type = other DNA
acactgttccctccaagcagcgaagaactccaggccaacaaggccacacttgtgtgcctgatctccgacttctaccctggggctgtgacagtggcttggaaggccgatggatctcctgtgaaagccggcgtggaaaccaccaagccatccaagcagagcaacaacaaatacgccgccagctcctacctgagcctgacacctgagcagtggaagtcccacagatcctacagctgccaagtgacccacgaaggcagcaccgtggaaaagacagtggcccctacagagtgcagcatccccgaggacacattcttcccaagccccgagagcagctgcgacgtgaagctggtggaaaagagcttcgagacagacaccaacctgaacttccagaacctgctggtgatcgtgctgagaatcctgctgctgaaagtggccggctttaacctgctgatgaccctgcggctgtggtccagcaggagtaagaggagcaggctcctgcacagtgactacatgaacatgactccacgccgccccggacccacccgcaagcattaccagccctatgccccaccacgcgacttcgcagcctatcgctccagagtgaagttcagcagaagcgccgacgcccctgcctaccagcagggacagaaccaactgtacaacgagctgaacctgggcagacgggaagagtacgacgtgctggacaagcggagaggcagggaccctgagatgggcggaaagccccagcggagaaagaacccccaggaaggactgtataacgaactccagaaagacaagatggccgaagcctacagcgagatcggcatgaagggcgagcggagaagaggcaagggccacgatggcctgtaccagggcctgagcaccgccaccaaggacacctatgacgccctgcacatgcaggccctgcctccaaga

SEQ ID NO: 26102 - DNA, 930 bp, synthetic construct
  source 1..930: mol_type = other DNA
ctgttccctccaagcagcgaagaactccaggccaacaaggccacacttgtgtgcctgatctccgacttctaccctggggctgtgacagtggcttggaaggccgatggatctcctgtgaaagccggcgtggaaaccaccaagccatccaagcagagcaacaacaaatacgccgccagctcctacctgagcctgacacctgagcagtggaagtcccacagatcctacagctgccaagtgacccacgaaggcagcaccgtggaaaagacagtggcccctacagagtgcagcatccccgaggacacattcttcccaagccccgagagcagctgcgacgtgaagctggtggaaaagagcttcgagacagacaccaacctgaacttccagaacctgctggtgatcgtgctgagaatcctgctgctgaaagtggccggctttaacctgctgatgaccctgcggctgtggtccagcaggagtaagaggagcaggctcctgcacagtgactacatgaacatgactccacgccgccccggacccacccgcaagcattaccagccctatgccccaccacgcgacttcgcagcctatcgctccagagtgaagttcagcagaagcgccgacgcccctgcctaccagcagggacagaaccaactgtacaacgagctgaacctgggcagacgggaagagtacgacgtgctggacaagcggagaggcagggaccctgagatgggcggaaagccccagcggagaaagaacccccaggaaggactgtataacgaactccagaaagacaagatggccgaagcctacagcgagatcggcatgaagggcgagcggagaagaggcaagggccacgatggcctgtaccagggcctgagcaccgccaccaaggacacctatgacgccctgcacatgcaggccctgcctccaaga

SEQ ID NO: 26103 - DNA, 990 bp, synthetic construct
  source 1..990: mol_type = other DNA
gacctgaagaacgtgttcccacctgaggtggccgtgttcgagcctagcgaggccgagatcagccacacccagaaagccaccctcgtgtgcctggctaccggcttctaccccgaccatgtggaactgtcttggtgggtcaacggcaaagaggtgcacagcggcgtgtgtaccgacccccagccactgaaagaacagcccgccctgaacgacagccggtactgcctgagcagcagactgagagtgtccgccaccttctggcagaacccccggaaccacttcagatgccaggtgcagttctacggcctgagcgagaacgacgagtggacccaggacagagccaagcccgtgacccagatcgtgtctgccgaagcctggggcagagccgattgcgacgtgaagctggtggaaaagagcttcgagacagacaccaacctgaacttccagaacctgctggtgatcgtgctgagaatcctgctgctgaaagtggccggctttaacctgctgatgaccctgcggctgtggtccagcaggagtaagaggagcaggctcctgcacagtgactacatgaacatgactccacgccgccccggacccacccgcaagcattaccagccctatgccccaccacgcgacttcgcagcctatcgctccagagtgaagttcagcagaagcgccgacgcccctgcctaccagcagggacagaaccaactgtacaacgagctgaacctgggcagacgggaagagtacgacgtgctggacaagcggagaggcagggaccctgagatgggcggaaagccccagcggagaaagaacccccaggaaggactgtataacgaactccagaaagacaagatggccgaagcctacagcgagatcggcatgaagggcgagcggagaagaggcaagggccacgatggcctgtaccagggcctgagcaccgccaccaaggacacctatgacgccctgcacatgcaggccctgcctccaaga

SEQ ID NO: 26104 - DNA, 987 bp, synthetic construct
  source 1..987: mol_type = other DNA
ctgaagaacgtgttcccacctgaggtggccgtgttcgagcctagcgaggccgagatcagccacacccagaaagccaccctcgtgtgcctggctaccggcttctaccccgaccatgtggaactgtcttggtgggtcaacggcaaagaggtgcacagcggcgtgtgtaccgacccccagccactgaaagaacagcccgccctgaacgacagccggtactgcctgagcagcagactgagagtgtccgccaccttctggcagaacccccggaaccacttcagatgccaggtgcagttctacggcctgagcgagaacgacgagtggacccaggacagagccaagcccgtgacccagatcgtgtctgccgaagcctggggcagagccgattgcgacgtgaagctggtggaaaagagcttcgagacagacaccaacctgaacttccagaacctgctggtgatcgtgctgagaatcctgctgctgaaagtggccggctttaacctgctgatgaccctgcggctgtggtccagcaggagtaagaggagcaggctcctgcacagtgactacatgaacatgactccacgccgccccggacccacccgcaagcattaccagccctatgccccaccacgcgacttcgcagcctatcgctccagagtgaagttcagcagaagcgccgacgcccctgcctaccagcagggacagaaccaactgtacaacgagctgaacctgggcagacgggaagagtacgacgtgctggacaagcggagaggcagggaccctgagatgggcggaaagccccagcggagaaagaacccccaggaaggactgtataacgaactccagaaagacaagatggccgaagcctacagcgagatcggcatgaagggcgagcggagaagaggcaagggccacgatggcctgtaccagggcctgagcaccgccaccaaggacacctatgacgccctgcacatgcaggccctgcctccaaga

SEQ ID NO: 26105 - DNA, 984 bp, synthetic construct
  source 1..984: mol_type = other DNA
aagaacgtgttcccacctgaggtggccgtgttcgagcctagcgaggccgagatcagccacacccagaaagccaccctcgtgtgcctggctaccggcttctaccccgaccatgtggaactgtcttggtgggtcaacggcaaagaggtgcacagcggcgtgtgtaccgacccccagccactgaaagaacagcccgccctgaacgacagccggtactgcctgagcagcagactgagagtgtccgccaccttctggcagaacccccggaaccacttcagatgccaggtgcagttctacggcctgagcgagaacgacgagtggacccaggacagagccaagcccgtgacccagatcgtgtctgccgaagcctggggcagagccgattgcgacgtgaagctggtggaaaagagcttcgagacagacaccaacctgaacttccagaacctgctggtgatcgtgctgagaatcctgctgctgaaagtggccggctttaacctgctgatgaccctgcggctgtggtccagcaggagtaagaggagcaggctcctgcacagtgactacatgaacatgactccacgccgccccggacccacccgcaagcattaccagccctatgccccaccacgcgacttcgcagcctatcgctccagagtgaagttcagcagaagcgccgacgcccctgcctaccagcagggacagaaccaactgtacaacgagctgaacctgggcagacgggaagagtacgacgtgctggacaagcggagaggcagggaccctgagatgggcggaaagccccagcggagaaagaacccccaggaaggactgtataacgaactccagaaagacaagatggccgaagcctacagcgagatcggcatgaagggcgagcggagaagaggcaagggccacgatggcctgtaccagggcctgagcaccgccaccaaggacacctatgacgccctgcacatgcaggccctgcctccaaga

SEQ ID NO: 26106 - DNA, 981 bp, synthetic construct
  source 1..981: mol_type = other DNA
aacgtgttcccacctgaggtggccgtgttcgagcctagcgaggccgagatcagccacacccagaaagccaccctcgtgtgcctggctaccggcttctaccccgaccatgtggaactgtcttggtgggtcaacggcaaagaggtgcacagcggcgtgtgtaccgacccccagccactgaaagaacagcccgccctgaacgacagccggtactgcctgagcagcagactgagagtgtccgccaccttctggcagaacccccggaaccacttcagatgccaggtgcagttctacggcctgagcgagaacgacgagtggacccaggacagagccaagcccgtgacccagatcgtgtctgccgaagcctggggcagagccgattgcgacgtgaagctggtggaaaagagcttcgagacagacaccaacctgaacttccagaacctgctggtgatcgtgctgagaatcctgctgctgaaagtggccggctttaacctgctgatgaccctgcggctgtggtccagcaggagtaagaggagcaggctcctgcacagtgactacatgaacatgactccacgccgccccggacccacccgcaagcattaccagccctatgccccaccacgcgacttcgcagcctatcgctccagagtgaagttcagcagaagcgccgacgcccctgcctaccagcagggacagaaccaactgtacaacgagctgaacctgggcagacgggaagagtacgacgtgctggacaagcggagaggcagggaccctgagatgggcggaaagccccagcggagaaagaacccccaggaaggactgtataacgaactccagaaagacaagatggccgaagcctacagcgagatcggcatgaagggcgagcggagaagaggcaagggccacgatggcctgtaccagggcctgagcaccgccaccaaggacacctatgacgccctgcacatgcaggccctgcctccaaga

SEQ ID NO: 26107 - DNA, 978 bp, synthetic construct
  source 1..978: mol_type = other DNA
gtgttcccacctgaggtggccgtgttcgagcctagcgaggccgagatcagccacacccagaaagccaccctcgtgtgcctggctaccggcttctaccccgaccatgtggaactgtcttggtgggtcaacggcaaagaggtgcacagcggcgtgtgtaccgacccccagccactgaaagaacagcccgccctgaacgacagccggtactgcctgagcagcagactgagagtgtccgccaccttctggcagaacccccggaaccacttcagatgccaggtgcagttctacggcctgagcgagaacgacgagtggacccaggacagagccaagcccgtgacccagatcgtgtctgccgaagcctggggcagagccgattgcgacgtgaagctggtggaaaagagcttcgagacagacaccaacctgaacttccagaacctgctggtgatcgtgctgagaatcctgctgctgaaagtggccggctttaacctgctgatgaccctgcggctgtggtccagcaggagtaagaggagcaggctcctgcacagtgactacatgaacatgactccacgccgccccggacccacccgcaagcattaccagccctatgccccaccacgcgacttcgcagcctatcgctccagagtgaagttcagcagaagcgccgacgcccctgcctaccagcagggacagaaccaactgtacaacgagctgaacctgggcagacgggaagagtacgacgtgctggacaagcggagaggcagggaccctgagatgggcggaaagccccagcggagaaagaacccccaggaaggactgtataacgaactccagaaagacaagatggccgaagcctacagcgagatcggcatgaagggcgagcggagaagaggcaagggccacgatggcctgtaccagggcctgagcaccgccaccaaggacacctatgacgccctgcacatgcaggccctgcctccaaga

SEQ ID NO: 26108 - DNA, 975 bp, synthetic construct
  source 1..975: mol_type = other DNA
ttcccacctgaggtggccgtgttcgagcctagcgaggccgagatcagccacacccagaaagccaccctcgtgtgcctggctaccggcttctaccccgaccatgtggaactgtcttggtgggtcaacggcaaagaggtgcacagcggcgtgtgtaccgacccccagccactgaaagaacagcccgccctgaacgacagccggtactgcctgagcagcagactgagagtgtccgccaccttctggcagaacccccggaaccacttcagatgccaggtgcagttctacggcctgagcgagaacgacgagtggacccaggacagagccaagcccgtgacccagatcgtgtctgccgaagcctggggcagagccgattgcgacgtgaagctggtggaaaagagcttcgagacagacaccaacctgaacttccagaacctgctggtgatcgtgctgagaatcctgctgctgaaagtggccggctttaacctgctgatgaccctgcggctgtggtccagcaggagtaagaggagcaggctcctgcacagtgactacatgaacatgactccacgccgccccggacccacccgcaagcattaccagccctatgccccaccacgcgacttcgcagcctatcgctccagagtgaagttcagcagaagcgccgacgcccctgcctaccagcagggacagaaccaactgtacaacgagctgaacctgggcagacgggaagagtacgacgtgctggacaagcggagaggcagggaccctgagatgggcggaaagccccagcggagaaagaacccccaggaaggactgtataacgaactccagaaagacaagatggccgaagcctacagcgagatcggcatgaagggcgagcggagaagaggcaagggccacgatggcctgtaccagggcctgagcaccgccaccaaggacacctatgacgccctgcacatgcaggccctgcctccaaga

SEQ ID NO: 26109 - DNA, 972 bp, synthetic construct
  source 1..972: mol_type = other DNA
ccacctgaggtggccgtgttcgagcctagcgaggccgagatcagccacacccagaaagccaccctcgtgtgcctggctaccggcttctaccccgaccatgtggaactgtcttggtgggtcaacggcaaagaggtgcacagcggcgtgtgtaccgacccccagccactgaaagaacagcccgccctgaacgacagccggtactgcctgagcagcagactgagagtgtccgccaccttctggcagaacccccggaaccacttcagatgccaggtgcagttctacggcctgagcgagaacgacgagtggacccaggacagagccaagcccgtgacccagatcgtgtctgccgaagcctggggcagagccgattgcgacgtgaagctggtggaaaagagcttcgagacagacaccaacctgaacttccagaacctgctggtgatcgtgctgagaatcctgctgctgaaagtggccggctttaacctgctgatgaccctgcggctgtggtccagcaggagtaagaggagcaggctcctgcacagtgactacatgaacatgactccacgccgccccggacccacccgcaagcattaccagccctatgccccaccacgcgacttcgcagcctatcgctccagagtgaagttcagcagaagcgccgacgcccctgcctaccagcagggacagaaccaactgtacaacgagctgaacctgggcagacgggaagagtacgacgtgctggacaagcggagaggcagggaccctgagatgggcggaaagccccagcggagaaagaacccccaggaaggactgtataacgaactccagaaagacaagatggccgaagcctacagcgagatcggcatgaagggcgagcggagaagaggcaagggccacgatggcctgtaccagggcctgagcaccgccaccaaggacacctatgacgccctgcacatgcaggccctgcctccaaga

SEQ ID NO: 26110 - DNA, 969 bp, synthetic construct
  source 1..969: mol_type = other DNA
cctgaggtggccgtgttcgagcctagcgaggccgagatcagccacacccagaaagccaccctcgtgtgcctggctaccggcttctaccccgaccatgtggaactgtcttggtgggtcaacggcaaagaggtgcacagcggcgtgtgtaccgacccccagccactgaaagaacagcccgccctgaacgacagccggtactgcctgagcagcagactgagagtgtccgccaccttctggcagaacccccggaaccacttcagatgccaggtgcagttctacggcctgagcgagaacgacgagtggacccaggacagagccaagcccgtgacccagatcgtgtctgccgaagcctggggcagagccgattgcgacgtgaagctggtggaaaagagcttcgagacagacaccaacctgaacttccagaacctgctggtgatcgtgctgagaatcctgctgctgaaagtggccggctttaacctgctgatgaccctgcggctgtggtccagcaggagtaagaggagcaggctcctgcacagtgactacatgaacatgactccacgccgccccggacccacccgcaagcattaccagccctatgccccaccacgcgacttcgcagcctatcgctccagagtgaagttcagcagaagcgccgacgcccctgcctaccagcagggacagaaccaactgtacaacgagctgaacctgggcagacgggaagagtacgacgtgctggacaagcggagaggcagggaccctgagatgggcggaaagccccagcggagaaagaacccccaggaaggactgtataacgaactccagaaagacaagatggccgaagcctacagcgagatcggcatgaagggcgagcggagaagaggcaagggccacgatggcctgtaccagggcctgagcaccgccaccaaggacacctatgacgccctgcacatgcaggccctgcctccaaga

SEQ ID NO: 26111 - DNA, 966 bp, synthetic construct
  source 1..966: mol_type = other DNA
gaggtggccgtgttcgagcctagcgaggccgagatcagccacacccagaaagccaccctcgtgtgcctggctaccggcttctaccccgaccatgtggaactgtcttggtgggtcaacggcaaagaggtgcacagcggcgtgtgtaccgacccccagccactgaaagaacagcccgccctgaacgacagccggtactgcctgagcagcagactgagagtgtccgccaccttctggcagaacccccggaaccacttcagatgccaggtgcagttctacggcctgagcgagaacgacgagtggacccaggacagagccaagcccgtgacccagatcgtgtctgccgaagcctggggcagagccgattgcgacgtgaagctggtggaaaagagcttcgagacagacaccaacctgaacttccagaacctgctggtgatcgtgctgagaatcctgctgctgaaagtggccggctttaacctgctgatgaccctgcggctgtggtccagcaggagtaagaggagcaggctcctgcacagtgactacatgaacatgactccacgccgccccggacccacccgcaagcattaccagccctatgccccaccacgcgacttcgcagcctatcgctccagagtgaagttcagcagaagcgccgacgcccctgcctaccagcagggacagaaccaactgtacaacgagctgaacctgggcagacgggaagagtacgacgtgctggacaagcggagaggcagggaccctgagatgggcggaaagccccagcggagaaagaacccccaggaaggactgtataacgaactccagaaagacaagatggccgaagcctacagcgagatcggcatgaagggcgagcggagaagaggcaagggccacgatggcctgtaccagggcctgagcaccgccaccaaggacacctatgacgccctgcacatgcaggccctgcctccaaga

SEQ ID NO: 26112 - DNA, 963 bp, synthetic construct
  source 1..963: mol_type = other DNA
gtggccgtgttcgagcctagcgaggccgagatcagccacacccagaaagccaccctcgtgtgcctggctaccggcttctaccccgaccatgtggaactgtcttggtgggtcaacggcaaagaggtgcacagcggcgtgtgtaccgacccccagccactgaaagaacagcccgccctgaacgacagccggtactgcctgagcagcagactgagagtgtccgccaccttctggcagaacccccggaaccacttcagatgccaggtgcagttctacggcctgagcgagaacgacgagtggacccaggacagagccaagcccgtgacccagatcgtgtctgccgaagcctggggcagagccgattgcgacgtgaagctggtggaaaagagcttcgagacagacaccaacctgaacttccagaacctgctggtgatcgtgctgagaatcctgctgctgaaagtggccggctttaacctgctgatgaccctgcggctgtggtccagcaggagtaagaggagcaggctcctgcacagtgactacatgaacatgactccacgccgccccggacccacccgcaagcattaccagccctatgccccaccacgcgacttcgcagcctatcgctccagagtgaagttcagcagaagcgccgacgcccctgcctaccagcagggacagaaccaactgtacaacgagctgaacctgggcagacgggaagagtacgacgtgctggacaagcggagaggcagggaccctgagatgggcggaaagccccagcggagaaagaacccccaggaaggactgtataacgaactccagaaagacaagatggccgaagcctacagcgagatcggcatgaagggcgagcggagaagaggcaagggccacgatggcctgtaccagggcctgagcaccgccaccaaggacacctatgacgccctgcacatgcaggccctgcctccaaga

SEQ ID NO: 26113 - DNA, 960 bp, synthetic construct
  source 1..960: mol_type = other DNA
gccgtgttcgagcctagcgaggccgagatcagccacacccagaaagccaccctcgtgtgcctggctaccggcttctaccccgaccatgtggaactgtcttggtgggtcaacggcaaagaggtgcacagcggcgtgtgtaccgacccccagccactgaaagaacagcccgccctgaacgacagccggtactgcctgagcagcagactgagagtgtccgccaccttctggcagaacccccggaaccacttcagatgccaggtgcagttctacggcctgagcgagaacgacgagtggacccaggacagagccaagcccgtgacccagatcgtgtctgccgaagcctggggcagagccgattgcgacgtgaagctggtggaaaagagcttcgagacagacaccaacctgaacttccagaacctgctggtgatcgtgctgagaatcctgctgctgaaagtggccggctttaacctgctgatgaccctgcggctgtggtccagcaggagtaagaggagcaggctcctgcacagtgactacatgaacatgactccacgccgccccggacccacccgcaagcattaccagccctatgccccaccacgcgacttcgcagcctatcgctccagagtgaagttcagcagaagcgccgacgcccctgcctaccagcagggacagaaccaactgtacaacgagctgaacctgggcagacgggaagagtacgacgtgctggacaagcggagaggcagggaccctgagatgggcggaaagccccagcggagaaagaacccccaggaaggactgtataacgaactccagaaagacaagatggccgaagcctacagcgagatcggcatgaagggcgagcggagaagaggcaagggccacgatggcctgtaccagggcctgagcaccgccaccaaggacacctatgacgccctgcacatgcaggccctgcctccaaga

SEQ ID NO: 26114 - DNA, 957 bp, synthetic construct
  source 1..957: mol_type = other DNA
gtgttcgagcctagcgaggccgagatcagccacacccagaaagccaccctcgtgtgcctggctaccggcttctaccccgaccatgtggaactgtcttggtgggtcaacggcaaagaggtgcacagcggcgtgtgtaccgacccccagccactgaaagaacagcccgccctgaacgacagccggtactgcctgagcagcagactgagagtgtccgccaccttctggcagaacccccggaaccacttcagatgccaggtgcagttctacggcctgagcgagaacgacgagtggacccaggacagagccaagcccgtgacccagatcgtgtctgccgaagcctggggcagagccgattgcgacgtgaagctggtggaaaagagcttcgagacagacaccaacctgaacttccagaacctgctggtgatcgtgctgagaatcctgctgctgaaagtggccggctttaacctgctgatgaccctgcggctgtggtccagcaggagtaagaggagcaggctcctgcacagtgactacatgaacatgactccacgccgccccggacccacccgcaagcattaccagccctatgccccaccacgcgacttcgcagcctatcgctccagagtgaagttcagcagaagcgccgacgcccctgcctaccagcagggacagaaccaactgtacaacgagctgaacctgggcagacgggaagagtacgacgtgctggacaagcggagaggcagggaccctgagatgggcggaaagccccagcggagaaagaacccccaggaaggactgtataacgaactccagaaagacaagatggccgaagcctacagcgagatcggcatgaagggcgagcggagaagaggcaagggccacgatggcctgtaccagggcctgagcaccgccaccaaggacacctatgacgccctgcacatgcaggccctgcctccaaga

SEQ ID NO: 26115 - DNA, 954 bp, synthetic construct
  source 1..954: mol_type = other DNA
ttcgagcctagcgaggccgagatcagccacacccagaaagccaccctcgtgtgcctggctaccggcttctaccccgaccatgtggaactgtcttggtgggtcaacggcaaagaggtgcacagcggcgtgtgtaccgacccccagccactgaaagaacagcccgccctgaacgacagccggtactgcctgagcagcagactgagagtgtccgccaccttctggcagaacccccggaaccacttcagatgccaggtgcagttctacggcctgagcgagaacgacgagtggacccaggacagagccaagcccgtgacccagatcgtgtctgccgaagcctggggcagagccgattgcgacgtgaagctggtggaaaagagcttcgagacagacaccaacctgaacttccagaacctgctggtgatcgtgctgagaatcctgctgctgaaagtggccggctttaacctgctgatgaccctgcggctgtggtccagcaggagtaagaggagcaggctcctgcacagtgactacatgaacatgactccacgccgccccggacccacccgcaagcattaccagccctatgccccaccacgcgacttcgcagcctatcgctccagagtgaagttcagcagaagcgccgacgcccctgcctaccagcagggacagaaccaactgtacaacgagctgaacctgggcagacgggaagagtacgacgtgctggacaagcggagaggcagggaccctgagatgggcggaaagccccagcggagaaagaacccccaggaaggactgtataacgaactccagaaagacaagatggccgaagcctacagcgagatcggcatgaagggcgagcggagaagaggcaagggccacgatggcctgtaccagggcctgagcaccgccaccaaggacacctatgacgccctgcacatgcaggccctgcctccaaga

SEQ ID NO: 26116 - DNA, 951 bp, synthetic construct
  source 1..951: mol_type = other DNA
gagcctagcgaggccgagatcagccacacccagaaagccaccctcgtgtgcctggctaccggcttctaccccgaccatgtggaactgtcttggtgggtcaacggcaaagaggtgcacagcggcgtgtgtaccgacccccagccactgaaagaacagcccgccctgaacgacagccggtactgcctgagcagcagactgagagtgtccgccaccttctggcagaacccccggaaccacttcagatgccaggtgcagttctacggcctgagcgagaacgacgagtggacccaggacagagccaagcccgtgacccagatcgtgtctgccgaagcctggggcagagccgattgcgacgtgaagctggtggaaaagagcttcgagacagacaccaacctgaacttccagaacctgctggtgatcgtgctgagaatcctgctgctgaaagtggccggctttaacctgctgatgaccctgcggctgtggtccagcaggagtaagaggagcaggctcctgcacagtgactacatgaacatgactccacgccgccccggacccacccgcaagcattaccagccctatgccccaccacgcgacttcgcagcctatcgctccagagtgaagttcagcagaagcgccgacgcccctgcctaccagcagggacagaaccaactgtacaacgagctgaacctgggcagacgggaagagtacgacgtgctggacaagcggagaggcagggaccctgagatgggcggaaagccccagcggagaaagaacccccaggaaggactgtataacgaactccagaaagacaagatggccgaagcctacagcgagatcggcatgaagggcgagcggagaagaggcaagggccacgatggcctgtaccagggcctgagcaccgccaccaaggacacctatgacgccctgcacatgcaggccctgcctccaaga

SEQ ID NO: 26117 - DNA, 948 bp, synthetic construct
  source 1..948: mol_type = other DNA
cctagcgaggccgagatcagccacacccagaaagccaccctcgtgtgcctggctaccggcttctaccccgaccatgtggaactgtcttggtgggtcaacggcaaagaggtgcacagcggcgtgtgtaccgacccccagccactgaaagaacagcccgccctgaacgacagccggtactgcctgagcagcagactgagagtgtccgccaccttctggcagaacccccggaaccacttcagatgccaggtgcagttctacggcctgagcgagaacgacgagtggacccaggacagagccaagcccgtgacccagatcgtgtctgccgaagcctggggcagagccgattgcgacgtgaagctggtggaaaagagcttcgagacagacaccaacctgaacttccagaacctgctggtgatcgtgctgagaatcctgctgctgaaagtggccggctttaacctgctgatgaccctgcggctgtggtccagcaggagtaagaggagcaggctcctgcacagtgactacatgaacatgactccacgccgccccggacccacccgcaagcattaccagccctatgccccaccacgcgacttcgcagcctatcgctccagagtgaagttcagcagaagcgccgacgcccctgcctaccagcagggacagaaccaactgtacaacgagctgaacctgggcagacgggaagagtacgacgtgctggacaagcggagaggcagggaccctgagatgggcggaaagccccagcggagaaagaacccccaggaaggactgtataacgaactccagaaagacaagatggccgaagcctacagcgagatcggcatgaagggcgagcggagaagaggcaagggccacgatggcctgtaccagggcctgagcaccgccaccaaggacacctatgacgccctgcacatgcaggccctgcctccaaga

SEQ ID NO: 26118 - DNA, 945 bp, synthetic construct
  source 1..945: mol_type = other DNA
agcgaggccgagatcagccacacccagaaagccaccctcgtgtgcctggctaccggcttctaccccgaccatgtggaactgtcttggtgggtcaacggcaaagaggtgcacagcggcgtgtgtaccgacccccagccactgaaagaacagcccgccctgaacgacagccggtactgcctgagcagcagactgagagtgtccgccaccttctggcagaacccccggaaccacttcagatgccaggtgcagttctacggcctgagcgagaacgacgagtggacccaggacagagccaagcccgtgacccagatcgtgtctgccgaagcctggggcagagccgattgcgacgtgaagctggtggaaaagagcttcgagacagacaccaacctgaacttccagaacctgctggtgatcgtgctgagaatcctgctgctgaaagtggccggctttaacctgctgatgaccctgcggctgtggtccagcaggagtaagaggagcaggctcctgcacagtgactacatgaacatgactccacgccgccccggacccacccgcaagcattaccagccctatgccccaccacgcgacttcgcagcctatcgctccagagtgaagttcagcagaagcgccgacgcccctgcctaccagcagggacagaaccaactgtacaacgagctgaacctgggcagacgggaagagtacgacgtgctggacaagcggagaggcagggaccctgagatgggcggaaagccccagcggagaaagaacccccaggaaggactgtataacgaactccagaaagacaagatggccgaagcctacagcgagatcggcatgaagggcgagcggagaagaggcaagggccacgatggcctgtaccagggcctgagcaccgccaccaaggacacctatgacgccctgcacatgcaggccctgcctccaaga

SEQ ID NO: 26119 - DNA, 942 bp, synthetic construct
  source 1..942: mol_type = other DNA
gaggccgagatcagccacacccagaaagccaccctcgtgtgcctggctaccggcttctaccccgaccatgtggaactgtcttggtgggtcaacggcaaagaggtgcacagcggcgtgtgtaccgacccccagccactgaaagaacagcccgccctgaacgacagccggtactgcctgagcagcagactgagagtgtccgccaccttctggcagaacccccggaaccacttcagatgccaggtgcagttctacggcctgagcgagaacgacgagtggacccaggacagagccaagcccgtgacccagatcgtgtctgccgaagcctggggcagagccgattgcgacgtgaagctggtggaaaagagcttcgagacagacaccaacctgaacttccagaacctgctggtgatcgtgctgagaatcctgctgctgaaagtggccggctttaacctgctgatgaccctgcggctgtggtccagcaggagtaagaggagcaggctcctgcacagtgactacatgaacatgactccacgccgccccggacccacccgcaagcattaccagccctatgccccaccacgcgacttcgcagcctatcgctccagagtgaagttcagcagaagcgccgacgcccctgcctaccagcagggacagaaccaactgtacaacgagctgaacctgggcagacgggaagagtacgacgtgctggacaagcggagaggcagggaccctgagatgggcggaaagccccagcggagaaagaacccccaggaaggactgtataacgaactccagaaagacaagatggccgaagcctacagcgagatcggcatgaagggcgagcggagaagaggcaagggccacgatggcctgtaccagggcctgagcaccgccaccaaggacacctatgacgccctgcacatgcaggccctgcctccaaga

SEQ ID NO: 26120 - DNA, 939 bp, synthetic construct
  source 1..939: mol_type = other DNA
gccgagatcagccacacccagaaagccaccctcgtgtgcctggctaccggcttctaccccgaccatgtggaactgtcttggtgggtcaacggcaaagaggtgcacagcggcgtgtgtaccgacccccagccactgaaagaacagcccgccctgaacgacagccggtactgcctgagcagcagactgagagtgtccgccaccttctggcagaacccccggaaccacttcagatgccaggtgcagttctacggcctgagcgagaacgacgagtggacccaggacagagccaagcccgtgacccagatcgtgtctgccgaagcctggggcagagccgattgcgacgtgaagctggtggaaaagagcttcgagacagacaccaacctgaacttccagaacctgctggtgatcgtgctgagaatcctgctgctgaaagtggccggctttaacctgctgatgaccctgcggctgtggtccagcaggagtaagaggagcaggctcctgcacagtgactacatgaacatgactccacgccgccccggacccacccgcaagcattaccagccctatgccccaccacgcgacttcgcagcctatcgctccagagtgaagttcagcagaagcgccgacgcccctgcctaccagcagggacagaaccaactgtacaacgagctgaacctgggcagacgggaagagtacgacgtgctggacaagcggagaggcagggaccctgagatgggcggaaagccccagcggagaaagaacccccaggaaggactgtataacgaactccagaaagacaagatggccgaagcctacagcgagatcggcatgaagggcgagcggagaagaggcaagggccacgatggcctgtaccagggcctgagcaccgccaccaaggacacctatgacgccctgcacatgcaggccctgcctccaaga

SEQ ID NO: 26121 - DNA, 936 bp, synthetic construct
  source 1..936: mol_type = other DNA
gagatcagccacacccagaaagccaccctcgtgtgcctggctaccggcttctaccccgaccatgtggaactgtcttggtgggtcaacggcaaagaggtgcacagcggcgtgtgtaccgacccccagccactgaaagaacagcccgccctgaacgacagccggtactgcctgagcagcagactgagagtgtccgccaccttctggcagaacccccggaaccacttcagatgccaggtgcagttctacggcctgagcgagaacgacgagtggacccaggacagagccaagcccgtgacccagatcgtgtctgccgaagcctggggcagagccgattgcgacgtgaagctggtggaaaagagcttcgagacagacaccaacctgaacttccagaacctgctggtgatcgtgctgagaatcctgctgctgaaagtggccggctttaacctgctgatgaccctgcggctgtggtccagcaggagtaagaggagcaggctcctgcacagtgactacatgaacatgactccacgccgccccggacccacccgcaagcattaccagccctatgccccaccacgcgacttcgcagcctatcgctccagagtgaagttcagcagaagcgccgacgcccctgcctaccagcagggacagaaccaactgtacaacgagctgaacctgggcagacgggaagagtacgacgtgctggacaagcggagaggcagggaccctgagatgggcggaaagccccagcggagaaagaacccccaggaaggactgtataacgaactccagaaagacaagatggccgaagcctacagcgagatcggcatgaagggcgagcggagaagaggcaagggccacgatggcctgtaccagggcctgagcaccgccaccaaggacacctatgacgccctgcacatgcaggccctgcctccaaga

SEQ ID NO: 26122 - DNA, 933 bp, synthetic construct
  source 1..933: mol_type = other DNA
atcagccacacccagaaagccaccctcgtgtgcctggctaccggcttctaccccgaccatgtggaactgtcttggtgggtcaacggcaaagaggtgcacagcggcgtgtgtaccgacccccagccactgaaagaacagcccgccctgaacgacagccggtactgcctgagcagcagactgagagtgtccgccaccttctggcagaacccccggaaccacttcagatgccaggtgcagttctacggcctgagcgagaacgacgagtggacccaggacagagccaagcccgtgacccagatcgtgtctgccgaagcctggggcagagccgattgcgacgtgaagctggtggaaaagagcttcgagacagacaccaacctgaacttccagaacctgctggtgatcgtgctgagaatcctgctgctgaaagtggccggctttaacctgctgatgaccctgcggctgtggtccagcaggagtaagaggagcaggctcctgcacagtgactacatgaacatgactccacgccgccccggacccacccgcaagcattaccagccctatgccccaccacgcgacttcgcagcctatcgctccagagtgaagttcagcagaagcgccgacgcccctgcctaccagcagggacagaaccaactgtacaacgagctgaacctgggcagacgggaagagtacgacgtgctggacaagcggagaggcagggaccctgagatgggcggaaagccccagcggagaaagaacccccaggaaggactgtataacgaactccagaaagacaagatggccgaagcctacagcgagatcggcatgaagggcgagcggagaagaggcaagggccacgatggcctgtaccagggcctgagcaccgccaccaaggacacctatgacgccctgcacatgcaggccctgcctccaaga

SEQ ID NO: 26123 - DNA, 930 bp, synthetic construct
  source 1..930: mol_type = other DNA
agccacacccagaaagccaccctcgtgtgcctggctaccggcttctaccccgaccatgtggaactgtcttggtgggtcaacggcaaagaggtgcacagcggcgtgtgtaccgacccccagccactgaaagaacagcccgccctgaacgacagccggtactgcctgagcagcagactgagagtgtccgccaccttctggcagaacccccggaaccacttcagatgccaggtgcagttctacggcctgagcgagaacgacgagtggacccaggacagagccaagcccgtgacccagatcgtgtctgccgaagcctggggcagagccgattgcgacgtgaagctggtggaaaagagcttcgagacagacaccaacctgaacttccagaacctgctggtgatcgtgctgagaatcctgctgctgaaagtggccggctttaacctgctgatgaccctgcggctgtggtccagcaggagtaagaggagcaggctcctgcacagtgactacatgaacatgactccacgccgccccggacccacccgcaagcattaccagccctatgccccaccacgcgacttcgcagcctatcgctccagagtgaagttcagcagaagcgccgacgcccctgcctaccagcagggacagaaccaactgtacaacgagctgaacctgggcagacgggaagagtacgacgtgctggacaagcggagaggcagggaccctgagatgggcggaaagccccagcggagaaagaacccccaggaaggactgtataacgaactccagaaagacaagatggccgaagcctacagcgagatcggcatgaagggcgagcggagaagaggcaagggccacgatggcctgtaccagggcctgagcaccgccaccaaggacacctatgacgccctgcacatgcaggccctgcctccaaga

SEQ ID NO: 26124 - DNA, 915 bp, synthetic construct
  source 1..915: mol_type = other DNA
gccaccctcgtgtgcctggctaccggcttctaccccgaccatgtggaactgtcttggtgggtcaacggcaaagaggtgcacagcggcgtgtgtaccgacccccagccactgaaagaacagcccgccctgaacgacagccggtactgcctgagcagcagactgagagtgtccgccaccttctggcagaacccccggaaccacttcagatgccaggtgcagttctacggcctgagcgagaacgacgagtggacccaggacagagccaagcccgtgacccagatcgtgtctgccgaagcctggggcagagccgattgcgacgtgaagctggtggaaaagagcttcgagacagacaccaacctgaacttccagaacctgctggtgatcgtgctgagaatcctgctgctgaaagtggccggctttaacctgctgatgaccctgcggctgtggtccagcaggagtaagaggagcaggctcctgcacagtgactacatgaacatgactccacgccgccccggacccacccgcaagcattaccagccctatgccccaccacgcgacttcgcagcctatcgctccagagtgaagttcagcagaagcgccgacgcccctgcctaccagcagggacagaaccaactgtacaacgagctgaacctgggcagacgggaagagtacgacgtgctggacaagcggagaggcagggaccctgagatgggcggaaagccccagcggagaaagaacccccaggaaggactgtataacgaactccagaaagacaagatggccgaagcctacagcgagatcggcatgaagggcgagcggagaagaggcaagggccacgatggcctgtaccagggcctgagcaccgccaccaaggacacctatgacgccctgcacatgcaggccctgcctccaaga

SEQ ID NO: 26125 - DNA, 900 bp, synthetic construct
  source 1..900: mol_type = other DNA
ctggctaccggcttctaccccgaccatgtggaactgtcttggtgggtcaacggcaaagaggtgcacagcggcgtgtgtaccgacccccagccactgaaagaacagcccgccctgaacgacagccggtactgcctgagcagcagactgagagtgtccgccaccttctggcagaacccccggaaccacttcagatgccaggtgcagttctacggcctgagcgagaacgacgagtggacccaggacagagccaagcccgtgacccagatcgtgtctgccgaagcctggggcagagccgattgcgacgtgaagctggtggaaaagagcttcgagacagacaccaacctgaacttccagaacctgctggtgatcgtgctgagaatcctgctgctgaaagtggccggctttaacctgctgatgaccctgcggctgtggtccagcaggagtaagaggagcaggctcctgcacagtgactacatgaacatgactccacgccgccccggacccacccgcaagcattaccagccctatgccccaccacgcgacttcgcagcctatcgctccagagtgaagttcagcagaagcgccgacgcccctgcctaccagcagggacagaaccaactgtacaacgagctgaacctgggcagacgggaagagtacgacgtgctggacaagcggagaggcagggaccctgagatgggcggaaagccccagcggagaaagaacccccaggaaggactgtataacgaactccagaaagacaagatggccgaagcctacagcgagatcggcatgaagggcgagcggagaagaggcaagggccacgatggcctgtaccagggcctgagcaccgccaccaaggacacctatgacgccctgcacatgcaggccctgcctccaaga

SEQ ID NO: 26126 - DNA, 981 bp, synthetic construct
  source 1..981: mol_type = other DNA
gacctgaagaacgtgttcccacctgaggtggccgtgttcgagcctagcgaggccgagatcagccacacccagaaagccaccctcgtgtgcctggctaccggcttctaccccgaccatgtggaactgtcttggtgggtcaacggcaaagaggtgcacagcggcgtgtgtaccgacccccagccactgaaagaacagcccgccctgaacgacagccggtactgcctgagcagcagactgagagtgtccgccaccttctggcagaacccccggaaccacttcagatgccaggtgcagttctacggcctgagcgagaacgacgagtggacccaggacagagccaagcccgtgacccagatcgtgtctgccgaagcctggggcagagccgattgcggctttaccagcgagagctaccagcagggcgtgctgagcgccaccaacctgctggtgatcgtgctgagaatcctgctgctgaaagtggccggctttaacctgctgatgaccctgcggctgtggtccagcaggagtaagaggagcaggctcctgcacagtgactacatgaacatgactccacgccgccccggacccacccgcaagcattaccagccctatgccccaccacgcgacttcgcagcctatcgctccagagtgaagttcagcagaagcgccgacgcccctgcctaccagcagggacagaaccaactgtacaacgagctgaacctgggcagacgggaagagtacgacgtgctggacaagcggagaggcagggaccctgagatgggcggaaagccccagcggagaaagaacccccaggaaggactgtataacgaactccagaaagacaagatggccgaagcctacagcgagatcggcatgaagggcgagcggagaagaggcaagggccacgatggcctgtaccagggcctgagcaccgccaccaaggacacctatgacgccctgcacatgcaggccctgcctccaaga

SEQ ID NO: 26127 - DNA, 978 bp, synthetic construct
  source 1..978: mol_type = other DNA
ctgaagaacgtgttcccacctgaggtggccgtgttcgagcctagcgaggccgagatcagccacacccagaaagccaccctcgtgtgcctggctaccggcttctaccccgaccatgtggaactgtcttggtgggtcaacggcaaagaggtgcacagcggcgtgtgtaccgacccccagccactgaaagaacagcccgccctgaacgacagccggtactgcctgagcagcagactgagagtgtccgccaccttctggcagaacccccggaaccacttcagatgccaggtgcagttctacggcctgagcgagaacgacgagtggacccaggacagagccaagcccgtgacccagatcgtgtctgccgaagcctggggcagagccgattgcggctttaccagcgagagctaccagcagggcgtgctgagcgccaccaacctgctggtgatcgtgctgagaatcctgctgctgaaagtggccggctttaacctgctgatgaccctgcggctgtggtccagcaggagtaagaggagcaggctcctgcacagtgactacatgaacatgactccacgccgccccggacccacccgcaagcattaccagccctatgccccaccacgcgacttcgcagcctatcgctccagagtgaagttcagcagaagcgccgacgcccctgcctaccagcagggacagaaccaactgtacaacgagctgaacctgggcagacgggaagagtacgacgtgctggacaagcggagaggcagggaccctgagatgggcggaaagccccagcggagaaagaacccccaggaaggactgtataacgaactccagaaagacaagatggccgaagcctacagcgagatcggcatgaagggcgagcggagaagaggcaagggccacgatggcctgtaccagggcctgagcaccgccaccaaggacacctatgacgccctgcacatgcaggccctgcctccaaga

SEQ ID NO: 26128 - DNA, 975 bp, synthetic construct
  source 1..975: mol_type = other DNA
aagaacgtgttcccacctgaggtggccgtgttcgagcctagcgaggccgagatcagccacacccagaaagccaccctcgtgtgcctggctaccggcttctaccccgaccatgtggaactgtcttggtgggtcaacggcaaagaggtgcacagcggcgtgtgtaccgacccccagccactgaaagaacagcccgccctgaacgacagccggtactgcctgagcagcagactgagagtgtccgccaccttctggcagaacccccggaaccacttcagatgccaggtgcagttctacggcctgagcgagaacgacgagtggacccaggacagagccaagcccgtgacccagatcgtgtctgccgaagcctggggcagagccgattgcggctttaccagcgagagctaccagcagggcgtgctgagcgccaccaacctgctggtgatcgtgctgagaatcctgctgctgaaagtggccggctttaacctgctgatgaccctgcggctgtggtccagcaggagtaagaggagcaggctcctgcacagtgactacatgaacatgactccacgccgccccggacccacccgcaagcattaccagccctatgccccaccacgcgacttcgcagcctatcgctccagagtgaagttcagcagaagcgccgacgcccctgcctaccagcagggacagaaccaactgtacaacgagctgaacctgggcagacgggaagagtacgacgtgctggacaagcggagaggcagggaccctgagatgggcggaaagccccagcggagaaagaacccccaggaaggactgtataacgaactccagaaagacaagatggccgaagcctacagcgagatcggcatgaagggcgagcggagaagaggcaagggccacgatggcctgtaccagggcctgagcaccgccaccaaggacacctatgacgccctgcacatgcaggccctgcctccaaga

SEQ ID NO: 26129 - DNA, 972 bp, synthetic construct
  source 1..972: mol_type = other DNA
aacgtgttcccacctgaggtggccgtgttcgagcctagcgaggccgagatcagccacacccagaaagccaccctcgtgtgcctggctaccggcttctaccccgaccatgtggaactgtcttggtgggtcaacggcaaagaggtgcacagcggcgtgtgtaccgacccccagccactgaaagaacagcccgccctgaacgacagccggtactgcctgagcagcagactgagagtgtccgccaccttctggcagaacccccggaaccacttcagatgccaggtgcagttctacggcctgagcgagaacgacgagtggacccaggacagagccaagcccgtgacccagatcgtgtctgccgaagcctggggcagagccgattgcggctttaccagcgagagctaccagcagggcgtgctgagcgccaccaacctgctggtgatcgtgctgagaatcctgctgctgaaagtggccggctttaacctgctgatgaccctgcggctgtggtccagcaggagtaagaggagcaggctcctgcacagtgactacatgaacatgactccacgccgccccggacccacccgcaagcattaccagccctatgccccaccacgcgacttcgcagcctatcgctccagagtgaagttcagcagaagcgccgacgcccctgcctaccagcagggacagaaccaactgtacaacgagctgaacctgggcagacgggaagagtacgacgtgctggacaagcggagaggcagggaccctgagatgggcggaaagccccagcggagaaagaacccccaggaaggactgtataacgaactccagaaagacaagatggccgaagcctacagcgagatcggcatgaagggcgagcggagaagaggcaagggccacgatggcctgtaccagggcctgagcaccgccaccaaggacacctatgacgccctgcacatgcaggccctgcctccaaga

SEQ ID NO: 26130 - DNA, 969 bp, synthetic construct
  source 1..969: mol_type = other DNA
gtgttcccacctgaggtggccgtgttcgagcctagcgaggccgagatcagccacacccagaaagccaccctcgtgtgcctggctaccggcttctaccccgaccatgtggaactgtcttggtgggtcaacggcaaagaggtgcacagcggcgtgtgtaccgacccccagccactgaaagaacagcccgccctgaacgacagccggtactgcctgagcagcagactgagagtgtccgccaccttctggcagaacccccggaaccacttcagatgccaggtgcagttctacggcctgagcgagaacgacgagtggacccaggacagagccaagcccgtgacccagatcgtgtctgccgaagcctggggcagagccgattgcggctttaccagcgagagctaccagcagggcgtgctgagcgccaccaacctgctggtgatcgtgctgagaatcctgctgctgaaagtggccggctttaacctgctgatgaccctgcggctgtggtccagcaggagtaagaggagcaggctcctgcacagtgactacatgaacatgactccacgccgccccggacccacccgcaagcattaccagccctatgccccaccacgcgacttcgcagcctatcgctccagagtgaagttcagcagaagcgccgacgcccctgcctaccagcagggacagaaccaactgtacaacgagctgaacctgggcagacgggaagagtacgacgtgctggacaagcggagaggcagggaccctgagatgggcggaaagccccagcggagaaagaacccccaggaaggactgtataacgaactccagaaagacaagatggccgaagcctacagcgagatcggcatgaagggcgagcggagaagaggcaagggccacgatggcctgtaccagggcctgagcaccgccaccaaggacacctatgacgccctgcacatgcaggccctgcctccaaga

SEQ ID NO: 26131 - DNA, 966 bp, synthetic construct
  source 1..966: mol_type = other DNA
ttcccacctgaggtggccgtgttcgagcctagcgaggccgagatcagccacacccagaaagccaccctcgtgtgcctggctaccggcttctaccccgaccatgtggaactgtcttggtgggtcaacggcaaagaggtgcacagcggcgtgtgtaccgacccccagccactgaaagaacagcccgccctgaacgacagccggtactgcctgagcagcagactgagagtgtccgccaccttctggcagaacccccggaaccacttcagatgccaggtgcagttctacggcctgagcgagaacgacgagtggacccaggacagagccaagcccgtgacccagatcgtgtctgccgaagcctggggcagagccgattgcggctttaccagcgagagctaccagcagggcgtgctgagcgccaccaacctgctggtgatcgtgctgagaatcctgctgctgaaagtggccggctttaacctgctgatgaccctgcggctgtggtccagcaggagtaagaggagcaggctcctgcacagtgactacatgaacatgactccacgccgccccggacccacccgcaagcattaccagccctatgccccaccacgcgacttcgcagcctatcgctccagagtgaagttcagcagaagcgccgacgcccctgcctaccagcagggacagaaccaactgtacaacgagctgaacctgggcagacgggaagagtacgacgtgctggacaagcggagaggcagggaccctgagatgggcggaaagccccagcggagaaagaacccccaggaaggactgtataacgaactccagaaagacaagatggccgaagcctacagcgagatcggcatgaagggcgagcggagaagaggcaagggccacgatggcctgtaccagggcctgagcaccgccaccaaggacacctatgacgccctgcacatgcaggccctgcctccaaga

SEQ ID NO: 26132 - DNA, 963 bp, synthetic construct
  source 1..963: mol_type = other DNA
ccacctgaggtggccgtgttcgagcctagcgaggccgagatcagccacacccagaaagccaccctcgtgtgcctggctaccggcttctaccccgaccatgtggaactgtcttggtgggtcaacggcaaagaggtgcacagcggcgtgtgtaccgacccccagccactgaaagaacagcccgccctgaacgacagccggtactgcctgagcagcagactgagagtgtccgccaccttctggcagaacccccggaaccacttcagatgccaggtgcagttctacggcctgagcgagaacgacgagtggacccaggacagagccaagcccgtgacccagatcgtgtctgccgaagcctggggcagagccgattgcggctttaccagcgagagctaccagcagggcgtgctgagcgccaccaacctgctggtgatcgtgctgagaatcctgctgctgaaagtggccggctttaacctgctgatgaccctgcggctgtggtccagcaggagtaagaggagcaggctcctgcacagtgactacatgaacatgactccacgccgccccggacccacccgcaagcattaccagccctatgccccaccacgcgacttcgcagcctatcgctccagagtgaagttcagcagaagcgccgacgcccctgcctaccagcagggacagaaccaactgtacaacgagctgaacctgggcagacgggaagagtacgacgtgctggacaagcggagaggcagggaccctgagatgggcggaaagccccagcggagaaagaacccccaggaaggactgtataacgaactccagaaagacaagatggccgaagcctacagcgagatcggcatgaagggcgagcggagaagaggcaagggccacgatggcctgtaccagggcctgagcaccgccaccaaggacacctatgacgccctgcacatgcaggccctgcctccaaga

SEQ ID NO: 26133 - DNA, 960 bp, synthetic construct
  source 1..960: mol_type = other DNA
cctgaggtggccgtgttcgagcctagcgaggccgagatcagccacacccagaaagccaccctcgtgtgcctggctaccggcttctaccccgaccatgtggaactgtcttggtgggtcaacggcaaagaggtgcacagcggcgtgtgtaccgacccccagccactgaaagaacagcccgccctgaacgacagccggtactgcctgagcagcagactgagagtgtccgccaccttctggcagaacccccggaaccacttcagatgccaggtgcagttctacggcctgagcgagaacgacgagtggacccaggacagagccaagcccgtgacccagatcgtgtctgccgaagcctggggcagagccgattgcggctttaccagcgagagctaccagcagggcgtgctgagcgccaccaacctgctggtgatcgtgctgagaatcctgctgctgaaagtggccggctttaacctgctgatgaccctgcggctgtggtccagcaggagtaagaggagcaggctcctgcacagtgactacatgaacatgactccacgccgccccggacccacccgcaagcattaccagccctatgccccaccacgcgacttcgcagcctatcgctccagagtgaagttcagcagaagcgccgacgcccctgcctaccagcagggacagaaccaactgtacaacgagctgaacctgggcagacgggaagagtacgacgtgctggacaagcggagaggcagggaccctgagatgggcggaaagccccagcggagaaagaacccccaggaaggactgtataacgaactccagaaagacaagatggccgaagcctacagcgagatcggcatgaagggcgagcggagaagaggcaagggccacgatggcctgtaccagggcctgagcaccgccaccaaggacacctatgacgccctgcacatgcaggccctgcctccaaga

SEQ ID NO: 26134 - DNA, 957 bp, synthetic construct
  source 1..957: mol_type = other DNA
gaggtggccgtgttcgagcctagcgaggccgagatcagccacacccagaaagccaccctcgtgtgcctggctaccggcttctaccccgaccatgtggaactgtcttggtgggtcaacggcaaagaggtgcacagcggcgtgtgtaccgacccccagccactgaaagaacagcccgccctgaacgacagccggtactgcctgagcagcagactgagagtgtccgccaccttctggcagaacccccggaaccacttcagatgccaggtgcagttctacggcctgagcgagaacgacgagtggacccaggacagagccaagcccgtgacccagatcgtgtctgccgaagcctggggcagagccgattgcggctttaccagcgagagctaccagcagggcgtgctgagcgccaccaacctgctggtgatcgtgctgagaatcctgctgctgaaagtggccggctttaacctgctgatgaccctgcggctgtggtccagcaggagtaagaggagcaggctcctgcacagtgactacatgaacatgactccacgccgccccggacccacccgcaagcattaccagccctatgccccaccacgcgacttcgcagcctatcgctccagagtgaagttcagcagaagcgccgacgcccctgcctaccagcagggacagaaccaactgtacaacgagctgaacctgggcagacgggaagagtacgacgtgctggacaagcggagaggcagggaccctgagatgggcggaaagccccagcggagaaagaacccccaggaaggactgtataacgaactccagaaagacaagatggccgaagcctacagcgagatcggcatgaagggcgagcggagaagaggcaagggccacgatggcctgtaccagggcctgagcaccgccaccaaggacacctatgacgccctgcacatgcaggccctgcctccaaga

SEQ ID NO: 26135 - DNA, 954 bp, synthetic construct
  source 1..954: mol_type = other DNA
gtggccgtgttcgagcctagcgaggccgagatcagccacacccagaaagccaccctcgtgtgcctggctaccggcttctaccccgaccatgtggaactgtcttggtgggtcaacggcaaagaggtgcacagcggcgtgtgtaccgacccccagccactgaaagaacagcccgccctgaacgacagccggtactgcctgagcagcagactgagagtgtccgccaccttctggcagaacccccggaaccacttcagatgccaggtgcagttctacggcctgagcgagaacgacgagtggacccaggacagagccaagcccgtgacccagatcgtgtctgccgaagcctggggcagagccgattgcggctttaccagcgagagctaccagcagggcgtgctgagcgccaccaacctgctggtgatcgtgctgagaatcctgctgctgaaagtggccggctttaacctgctgatgaccctgcggctgtggtccagcaggagtaagaggagcaggctcctgcacagtgactacatgaacatgactccacgccgccccggacccacccgcaagcattaccagccctatgccccaccacgcgacttcgcagcctatcgctccagagtgaagttcagcagaagcgccgacgcccctgcctaccagcagggacagaaccaactgtacaacgagctgaacctgggcagacgggaagagtacgacgtgctggacaagcggagaggcagggaccctgagatgggcggaaagccccagcggagaaagaacccccaggaaggactgtataacgaactccagaaagacaagatggccgaagcctacagcgagatcggcatgaagggcgagcggagaagaggcaagggccacgatggcctgtaccagggcctgagcaccgccaccaaggacacctatgacgccctgcacatgcaggccctgcctccaaga

SEQ ID NO: 26136 - DNA, 951 bp, synthetic construct
  source 1..951: mol_type = other DNA
gccgtgttcgagcctagcgaggccgagatcagccacacccagaaagccaccctcgtgtgcctggctaccggcttctaccccgaccatgtggaactgtcttggtgggtcaacggcaaagaggtgcacagcggcgtgtgtaccgacccccagccactgaaagaacagcccgccctgaacgacagccggtactgcctgagcagcagactgagagtgtccgccaccttctggcagaacccccggaaccacttcagatgccaggtgcagttctacggcctgagcgagaacgacgagtggacccaggacagagccaagcccgtgacccagatcgtgtctgccgaagcctggggcagagccgattgcggctttaccagcgagagctaccagcagggcgtgctgagcgccaccaacctgctggtgatcgtgctgagaatcctgctgctgaaagtggccggctttaacctgctgatgaccctgcggctgtggtccagcaggagtaagaggagcaggctcctgcacagtgactacatgaacatgactccacgccgccccggacccacccgcaagcattaccagccctatgccccaccacgcgacttcgcagcctatcgctccagagtgaagttcagcagaagcgccgacgcccctgcctaccagcagggacagaaccaactgtacaacgagctgaacctgggcagacgggaagagtacgacgtgctggacaagcggagaggcagggaccctgagatgggcggaaagccccagcggagaaagaacccccaggaaggactgtataacgaactccagaaagacaagatggccgaagcctacagcgagatcggcatgaagggcgagcggagaagaggcaagggccacgatggcctgtaccagggcctgagcaccgccaccaaggacacctatgacgccctgcacatgcaggccctgcctccaaga

SEQ ID NO: 26137 - DNA, 948 bp, synthetic construct
  source 1..948: mol_type = other DNA
gtgttcgagcctagcgaggccgagatcagccacacccagaaagccaccctcgtgtgcctggctaccggcttctaccccgaccatgtggaactgtcttggtgggtcaacggcaaagaggtgcacagcggcgtgtgtaccgacccccagccactgaaagaacagcccgccctgaacgacagccggtactgcctgagcagcagactgagagtgtccgccaccttctggcagaacccccggaaccacttcagatgccaggtgcagttctacggcctgagcgagaacgacgagtggacccaggacagagccaagcccgtgacccagatcgtgtctgccgaagcctggggcagagccgattgcggctttaccagcgagagctaccagcagggcgtgctgagcgccaccaacctgctggtgatcgtgctgagaatcctgctgctgaaagtggccggctttaacctgctgatgaccctgcggctgtggtccagcaggagtaagaggagcaggctcctgcacagtgactacatgaacatgactccacgccgccccggacccacccgcaagcattaccagccctatgccccaccacgcgacttcgcagcctatcgctccagagtgaagttcagcagaagcgccgacgcccctgcctaccagcagggacagaaccaactgtacaacgagctgaacctgggcagacgggaagagtacgacgtgctggacaagcggagaggcagggaccctgagatgggcggaaagccccagcggagaaagaacccccaggaaggactgtataacgaactccagaaagacaagatggccgaagcctacagcgagatcggcatgaagggcgagcggagaagaggcaagggccacgatggcctgtaccagggcctgagcaccgccaccaaggacacctatgacgccctgcacatgcaggccctgcctccaaga

SEQ ID NO: 26138 - DNA, 945 bp, synthetic construct
  source 1..945: mol_type = other DNA
ttcgagcctagcgaggccgagatcagccacacccagaaagccaccctcgtgtgcctggctaccggcttctaccccgaccatgtggaactgtcttggtgggtcaacggcaaagaggtgcacagcggcgtgtgtaccgacccccagccactgaaagaacagcccgccctgaacgacagccggtactgcctgagcagcagactgagagtgtccgccaccttctggcagaacccccggaaccacttcagatgccaggtgcagttctacggcctgagcgagaacgacgagtggacccaggacagagccaagcccgtgacccagatcgtgtctgccgaagcctggggcagagccgattgcggctttaccagcgagagctaccagcagggcgtgctgagcgccaccaacctgctggtgatcgtgctgagaatcctgctgctgaaagtggccggctttaacctgctgatgaccctgcggctgtggtccagcaggagtaagaggagcaggctcctgcacagtgactacatgaacatgactccacgccgccccggacccacccgcaagcattaccagccctatgccccaccacgcgacttcgcagcctatcgctccagagtgaagttcagcagaagcgccgacgcccctgcctaccagcagggacagaaccaactgtacaacgagctgaacctgggcagacgggaagagtacgacgtgctggacaagcggagaggcagggaccctgagatgggcggaaagccccagcggagaaagaacccccaggaaggactgtataacgaactccagaaagacaagatggccgaagcctacagcgagatcggcatgaagggcgagcggagaagaggcaagggccacgatggcctgtaccagggcctgagcaccgccaccaaggacacctatgacgccctgcacatgcaggccctgcctccaaga

SEQ ID NO: 26139 - DNA, 942 bp, synthetic construct
  source 1..942: mol_type = other DNA
gagcctagcgaggccgagatcagccacacccagaaagccaccctcgtgtgcctggctaccggcttctaccccgaccatgtggaactgtcttggtgggtcaacggcaaagaggtgcacagcggcgtgtgtaccgacccccagccactgaaagaacagcccgccctgaacgacagccggtactgcctgagcagcagactgagagtgtccgccaccttctggcagaacccccggaaccacttcagatgccaggtgcagttctacggcctgagcgagaacgacgagtggacccaggacagagccaagcccgtgacccagatcgtgtctgccgaagcctggggcagagccgattgcggctttaccagcgagagctaccagcagggcgtgctgagcgccaccaacctgctggtgatcgtgctgagaatcctgctgctgaaagtggccggctttaacctgctgatgaccctgcggctgtggtccagcaggagtaagaggagcaggctcctgcacagtgactacatgaacatgactccacgccgccccggacccacccgcaagcattaccagccctatgccccaccacgcgacttcgcagcctatcgctccagagtgaagttcagcagaagcgccgacgcccctgcctaccagcagggacagaaccaactgtacaacgagctgaacctgggcagacgggaagagtacgacgtgctggacaagcggagaggcagggaccctgagatgggcggaaagccccagcggagaaagaacccccaggaaggactgtataacgaactccagaaagacaagatggccgaagcctacagcgagatcggcatgaagggcgagcggagaagaggcaagggccacgatggcctgtaccagggcctgagcaccgccaccaaggacacctatgacgccctgcacatgcaggccctgcctccaaga

SEQ ID NO: 26140 - DNA, 939 bp, synthetic construct
  source 1..939: mol_type = other DNA
cctagcgaggccgagatcagccacacccagaaagccaccctcgtgtgcctggctaccggcttctaccccgaccatgtggaactgtcttggtgggtcaacggcaaagaggtgcacagcggcgtgtgtaccgacccccagccactgaaagaacagcccgccctgaacgacagccggtactgcctgagcagcagactgagagtgtccgccaccttctggcagaacccccggaaccacttcagatgccaggtgcagttctacggcctgagcgagaacgacgagtggacccaggacagagccaagcccgtgacccagatcgtgtctgccgaagcctggggcagagccgattgcggctttaccagcgagagctaccagcagggcgtgctgagcgccaccaacctgctggtgatcgtgctgagaatcctgctgctgaaagtggccggctttaacctgctgatgaccctgcggctgtggtccagcaggagtaagaggagcaggctcctgcacagtgactacatgaacatgactccacgccgccccggacccacccgcaagcattaccagccctatgccccaccacgcgacttcgcagcctatcgctccagagtgaagttcagcagaagcgccgacgcccctgcctaccagcagggacagaaccaactgtacaacgagctgaacctgggcagacgggaagagtacgacgtgctggacaagcggagaggcagggaccctgagatgggcggaaagccccagcggagaaagaacccccaggaaggactgtataacgaactccagaaagacaagatggccgaagcctacagcgagatcggcatgaagggcgagcggagaagaggcaagggccacgatggcctgtaccagggcctgagcaccgccaccaaggacacctatgacgccctgcacatgcaggccctgcctccaaga

SEQ ID NO: 26141 - DNA, 936 bp, synthetic construct
  source 1..936: mol_type = other DNA
agcgaggccgagatcagccacacccagaaagccaccctcgtgtgcctggctaccggcttctaccccgaccatgtggaactgtcttggtgggtcaacggcaaagaggtgcacagcggcgtgtgtaccgacccccagccactgaaagaacagcccgccctgaacgacagccggtactgcctgagcagcagactgagagtgtccgccaccttctggcagaacccccggaaccacttcagatgccaggtgcagttctacggcctgagcgagaacgacgagtggacccaggacagagccaagcccgtgacccagatcgtgtctgccgaagcctggggcagagccgattgcggctttaccagcgagagctaccagcagggcgtgctgagcgccaccaacctgctggtgatcgtgctgagaatcctgctgctgaaagtggccggctttaacctgctgatgaccctgcggctgtggtccagcaggagtaagaggagcaggctcctgcacagtgactacatgaacatgactccacgccgccccggacccacccgcaagcattaccagccctatgccccaccacgcgacttcgcagcctatcgctccagagtgaagttcagcagaagcgccgacgcccctgcctaccagcagggacagaaccaactgtacaacgagctgaacctgggcagacgggaagagtacgacgtgctggacaagcggagaggcagggaccctgagatgggcggaaagccccagcggagaaagaacccccaggaaggactgtataacgaactccagaaagacaagatggccgaagcctacagcgagatcggcatgaagggcgagcggagaagaggcaagggccacgatggcctgtaccagggcctgagcaccgccaccaaggacacctatgacgccctgcacatgcaggccctgcctccaaga

SEQ ID NO: 26142 - DNA, 933 bp, synthetic construct
  source 1..933: mol_type = other DNA
gaggccgagatcagccacacccagaaagccaccctcgtgtgcctggctaccggcttctaccccgaccatgtggaactgtcttggtgggtcaacggcaaagaggtgcacagcggcgtgtgtaccgacccccagccactgaaagaacagcccgccctgaacgacagccggtactgcctgagcagcagactgagagtgtccgccaccttctggcagaacccccggaaccacttcagatgccaggtgcagttctacggcctgagcgagaacgacgagtggacccaggacagagccaagcccgtgacccagatcgtgtctgccgaagcctggggcagagccgattgcggctttaccagcgagagctaccagcagggcgtgctgagcgccaccaacctgctggtgatcgtgctgagaatcctgctgctgaaagtggccggctttaacctgctgatgaccctgcggctgtggtccagcaggagtaagaggagcaggctcctgcacagtgactacatgaacatgactccacgccgccccggacccacccgcaagcattaccagccctatgccccaccacgcgacttcgcagcctatcgctccagagtgaagttcagcagaagcgccgacgcccctgcctaccagcagggacagaaccaactgtacaacgagctgaacctgggcagacgggaagagtacgacgtgctggacaagcggagaggcagggaccctgagatgggcggaaagccccagcggagaaagaacccccaggaaggactgtataacgaactccagaaagacaagatggccgaagcctacagcgagatcggcatgaagggcgagcggagaagaggcaagggccacgatggcctgtaccagggcctgagcaccgccaccaaggacacctatgacgccctgcacatgcaggccctgcctccaaga

SEQ ID NO: 26143 - DNA, 930 bp, synthetic construct
  source 1..930: mol_type = other DNA
gccgagatcagccacacccagaaagccaccctcgtgtgcctggctaccggcttctaccccgaccatgtggaactgtcttggtgggtcaacggcaaagaggtgcacagcggcgtgtgtaccgacccccagccactgaaagaacagcccgccctgaacgacagccggtactgcctgagcagcagactgagagtgtccgccaccttctggcagaacccccggaaccacttcagatgccaggtgcagttctacggcctgagcgagaacgacgagtggacccaggacagagccaagcccgtgacccagatcgtgtctgccgaagcctggggcagagccgattgcggctttaccagcgagagctaccagcagggcgtgctgagcgccaccaacctgctggtgatcgtgctgagaatcctgctgctgaaagtggccggctttaacctgctgatgaccctgcggctgtggtccagcaggagtaagaggagcaggctcctgcacagtgactacatgaacatgactccacgccgccccggacccacccgcaagcattaccagccctatgccccaccacgcgacttcgcagcctatcgctccagagtgaagttcagcagaagcgccgacgcccctgcctaccagcagggacagaaccaactgtacaacgagctgaacctgggcagacgggaagagtacgacgtgctggacaagcggagaggcagggaccctgagatgggcggaaagccccagcggagaaagaacccccaggaaggactgtataacgaactccagaaagacaagatggccgaagcctacagcgagatcggcatgaagggcgagcggagaagaggcaagggccacgatggcctgtaccagggcctgagcaccgccaccaaggacacctatgacgccctgcacatgcaggccctgcctccaaga

SEQ ID NO: 26144 - DNA, 927 bp, synthetic construct
  source 1..927: mol_type = other DNA
gagatcagccacacccagaaagccaccctcgtgtgcctggctaccggcttctaccccgaccatgtggaactgtcttggtgggtcaacggcaaagaggtgcacagcggcgtgtgtaccgacccccagccactgaaagaacagcccgccctgaacgacagccggtactgcctgagcagcagactgagagtgtccgccaccttctggcagaacccccggaaccacttcagatgccaggtgcagttctacggcctgagcgagaacgacgagtggacccaggacagagccaagcccgtgacccagatcgtgtctgccgaagcctggggcagagccgattgcggctttaccagcgagagctaccagcagggcgtgctgagcgccaccaacctgctggtgatcgtgctgagaatcctgctgctgaaagtggccggctttaacctgctgatgaccctgcggctgtggtccagcaggagtaagaggagcaggctcctgcacagtgactacatgaacatgactccacgccgccccggacccacccgcaagcattaccagccctatgccccaccacgcgacttcgcagcctatcgctccagagtgaagttcagcagaagcgccgacgcccctgcctaccagcagggacagaaccaactgtacaacgagctgaacctgggcagacgggaagagtacgacgtgctggacaagcggagaggcagggaccctgagatgggcggaaagccccagcggagaaagaacccccaggaaggactgtataacgaactccagaaagacaagatggccgaagcctacagcgagatcggcatgaagggcgagcggagaagaggcaagggccacgatggcctgtaccagggcctgagcaccgccaccaaggacacctatgacgccctgcacatgcaggccctgcctccaaga

SEQ ID NO: 26145 - DNA, 924 bp, synthetic construct
  source 1..924: mol_type = other DNA
atcagccacacccagaaagccaccctcgtgtgcctggctaccggcttctaccccgaccatgtggaactgtcttggtgggtcaacggcaaagaggtgcacagcggcgtgtgtaccgacccccagccactgaaagaacagcccgccctgaacgacagccggtactgcctgagcagcagactgagagtgtccgccaccttctggcagaacccccggaaccacttcagatgccaggtgcagttctacggcctgagcgagaacgacgagtggacccaggacagagccaagcccgtgacccagatcgtgtctgccgaagcctggggcagagccgattgcggctttaccagcgagagctaccagcagggcgtgctgagcgccaccaacctgctggtgatcgtgctgagaatcctgctgctgaaagtggccggctttaacctgctgatgaccctgcggctgtggtccagcaggagtaagaggagcaggctcctgcacagtgactacatgaacatgactccacgccgccccggacccacccgcaagcattaccagccctatgccccaccacgcgacttcgcagcctatcgctccagagtgaagttcagcagaagcgccgacgcccctgcctaccagcagggacagaaccaactgtacaacgagctgaacctgggcagacgggaagagtacgacgtgctggacaagcggagaggcagggaccctgagatgggcggaaagccccagcggagaaagaacccccaggaaggactgtataacgaactccagaaagacaagatggccgaagcctacagcgagatcggcatgaagggcgagcggagaagaggcaagggccacgatggcctgtaccagggcctgagcaccgccaccaaggacacctatgacgccctgcacatgcaggccctgcctccaaga

SEQ ID NO: 26146 - DNA, 921 bp, synthetic construct
  source 1..921: mol_type = other DNA
agccacacccagaaagccaccctcgtgtgcctggctaccggcttctaccccgaccatgtggaactgtcttggtgggtcaacggcaaagaggtgcacagcggcgtgtgtaccgacccccagccactgaaagaacagcccgccctgaacgacagccggtactgcctgagcagcagactgagagtgtccgccaccttctggcagaacccccggaaccacttcagatgccaggtgcagttctacggcctgagcgagaacgacgagtggacccaggacagagccaagcccgtgacccagatcgtgtctgccgaagcctggggcagagccgattgcggctttaccagcgagagctaccagcagggcgtgctgagcgccaccaacctgctggtgatcgtgctgagaatcctgctgctgaaagtggccggctttaacctgctgatgaccctgcggctgtggtccagcaggagtaagaggagcaggctcctgcacagtgactacatgaacatgactccacgccgccccggacccacccgcaagcattaccagccctatgccccaccacgcgacttcgcagcctatcgctccagagtgaagttcagcagaagcgccgacgcccctgcctaccagcagggacagaaccaactgtacaacgagctgaacctgggcagacgggaagagtacgacgtgctggacaagcggagaggcagggaccctgagatgggcggaaagccccagcggagaaagaacccccaggaaggactgtataacgaactccagaaagacaagatggccgaagcctacagcgagatcggcatgaagggcgagcggagaagaggcaagggccacgatggcctgtaccagggcctgagcaccgccaccaaggacacctatgacgccctgcacatgcaggccctgcctccaaga

SEQ ID NO: 26147 - DNA, 906 bp, synthetic construct
  source 1..906: mol_type = other DNA
gccaccctcgtgtgcctggctaccggcttctaccccgaccatgtggaactgtcttggtgggtcaacggcaaagaggtgcacagcggcgtgtgtaccgacccccagccactgaaagaacagcccgccctgaacgacagccggtactgcctgagcagcagactgagagtgtccgccaccttctggcagaacccccggaaccacttcagatgccaggtgcagttctacggcctgagcgagaacgacgagtggacccaggacagagccaagcccgtgacccagatcgtgtctgccgaagcctggggcagagccgattgcggctttaccagcgagagctaccagcagggcgtgctgagcgccaccaacctgctggtgatcgtgctgagaatcctgctgctgaaagtggccggctttaacctgctgatgaccctgcggctgtggtccagcaggagtaagaggagcaggctcctgcacagtgactacatgaacatgactccacgccgccccggacccacccgcaagcattaccagccctatgccccaccacgcgacttcgcagcctatcgctccagagtgaagttcagcagaagcgccgacgcccctgcctaccagcagggacagaaccaactgtacaacgagctgaacctgggcagacgggaagagtacgacgtgctggacaagcggagaggcagggaccctgagatgggcggaaagccccagcggagaaagaacccccaggaaggactgtataacgaactccagaaagacaagatggccgaagcctacagcgagatcggcatgaagggcgagcggagaagaggcaagggccacgatggcctgtaccagggcctgagcaccgccaccaaggacacctatgacgccctgcacatgcaggccctgcctccaaga

SEQ ID NO: 26148 - DNA, 891 bp, synthetic construct
  source 1..891: mol_type = other DNA
ctggctaccggcttctaccccgaccatgtggaactgtcttggtgggtcaacggcaaagaggtgcacagcggcgtgtgtaccgacccccagccactgaaagaacagcccgccctgaacgacagccggtactgcctgagcagcagactgagagtgtccgccaccttctggcagaacccccggaaccacttcagatgccaggtgcagttctacggcctgagcgagaacgacgagtggacccaggacagagccaagcccgtgacccagatcgtgtctgccgaagcctggggcagagccgattgcggctttaccagcgagagctaccagcagggcgtgctgagcgccaccaacctgctggtgatcgtgctgagaatcctgctgctgaaagtggccggctttaacctgctgatgaccctgcggctgtggtccagcaggagtaagaggagcaggctcctgcacagtgactacatgaacatgactccacgccgccccggacccacccgcaagcattaccagccctatgccccaccacgcgacttcgcagcctatcgctccagagtgaagttcagcagaagcgccgacgcccctgcctaccagcagggacagaaccaactgtacaacgagctgaacctgggcagacgggaagagtacgacgtgctggacaagcggagaggcagggaccctgagatgggcggaaagccccagcggagaaagaacccccaggaaggactgtataacgaactccagaaagacaagatggccgaagcctacagcgagatcggcatgaagggcgagcggagaagaggcaagggccacgatggcctgtaccagggcctgagcaccgccaccaaggacacctatgacgccctgcacatgcaggccctgcctccaaga

SEQ ID NO: 26149 - DNA, 861 bp, synthetic construct
  source 1..861: mol_type = other DNA
atccagaaccctgatcctgccgtgtaccagctgcgggatagcaagagcagcgacaagagcgtgtgtctgttcaccgacttcgacagccagaccaacgtgtcccagagcaaggactccgacgtgtacatcaccgataagaccgtgctggacatgcggagcatggacttcaagagcaactccgccgtggcctggtccaacaagtccgatttcgcctgcgccaacgccttcaacaacagcattggcagagccgattgcggctttaccagcgagagctaccagcagggcgtgctgagcgccaccatcctgtacgagatcctgctgggcaaggccaccctgtacgccgtgctggtgtctgccctggtgctgatggctatggtcaagcggaaggacagccggggaaggagtaagaggagcaggctcctgcacagtgactacatgaacatgactccacgccgccccggacccacccgcaagcattaccagccctatgccccaccacgcgacttcgcagcctatcgctccagagtgaagttcagcagaagcgccgacgcccctgcctaccagcagggacagaaccaactgtacaacgagctgaacctgggcagacgggaagagtacgacgtgctggacaagcggagaggcagggaccctgagatgggcggaaagccccagcggagaaagaacccccaggaaggactgtataacgaactccagaaagacaagatggccgaagcctacagcgagatcggcatgaagggcgagcggagaagaggcaagggccacgatggcctgtaccagggcctgagcaccgccaccaaggacacctatgacgccctgcacatgcaggccctgcctccaaga

SEQ ID NO: 26150 - DNA, 855 bp, synthetic construct
  source 1..855: mol_type = other DNA
atccagaaccctgatcctgccgtgtaccagctgcgggatagcaagagcagcgacaagagcgtgtgtctgttcaccgacttcgacagccagaccaacgtgtcccagagcaaggactccgacgtgtacatcaccgataagaccgtgctggacatgcggagcatggacttcaagagcaactccgccgtggcctggtccaacaagtccgatttcgcctgcgccaacgccttcaacaacagcattgccgattgcggctttaccagcgagagctaccagcagggcgtgctgagcgccaccatcctgtacgagatcctgctgggcaaggccaccctgtacgccgtgctggtgtctgccctggtgctgatggctatggtcaagcggaaggacagccggggaaggagtaagaggagcaggctcctgcacagtgactacatgaacatgactccacgccgccccggacccacccgcaagcattaccagccctatgccccaccacgcgacttcgcagcctatcgctccagagtgaagttcagcagaagcgccgacgcccctgcctaccagcagggacagaaccaactgtacaacgagctgaacctgggcagacgggaagagtacgacgtgctggacaagcggagaggcagggaccctgagatgggcggaaagccccagcggagaaagaacccccaggaaggactgtataacgaactccagaaagacaagatggccgaagcctacagcgagatcggcatgaagggcgagcggagaagaggcaagggccacgatggcctgtaccagggcctgagcaccgccaccaaggacacctatgacgccctgcacatgcaggccctgcctccaaga

SEQ ID NO: 26151 - DNA, 885 bp, synthetic construct
  source 1..885: mol_type = other DNA
atccagaaccctgatcctgccgtgtaccagctgcgggatagcaagagcagcgacaagagcgtgtgtctgttcaccgacttcgacagccagaccaacgtgtcccagagcaaggactccgacgtgtacatcaccgataagaccgtgctggacatgcggagcatggacttcaagagcaactccgccgtggcctggtccaacaagtccgatttcgcctgcgccaacgccttcaacaacagcattcagatcgtgtctgccgaagcctggggcagagccgattgcggctttaccagcgagagctaccagcagggcgtgctgagcgccaccatcctgtacgagatcctgctgggcaaggccaccctgtacgccgtgctggtgtctgccctggtgctgatggctatggtcaagcggaaggacagccggggaaggagtaagaggagcaggctcctgcacagtgactacatgaacatgactccacgccgccccggacccacccgcaagcattaccagccctatgccccaccacgcgacttcgcagcctatcgctccagagtgaagttcagcagaagcgccgacgcccctgcctaccagcagggacagaaccaactgtacaacgagctgaacctgggcagacgggaagagtacgacgtgctggacaagcggagaggcagggaccctgagatgggcggaaagccccagcggagaaagaacccccaggaaggactgtataacgaactccagaaagacaagatggccgaagcctacagcgagatcggcatgaagggcgagcggagaagaggcaagggccacgatggcctgtaccagggcctgagcaccgccaccaaggacacctatgacgccctgcacatgcaggccctgcctccaaga

SEQ ID NO: 26152 - DNA, 909 bp, synthetic construct
  source 1..909: mol_type = other DNA
atccagaaccctgatcctgccgtgtaccagctgcgggatagcaagagcagcgacaagagcgtgtgtctgttcaccgacttcgacagccagaccaacgtgtcccagagcaaggactccgacgtgtacatcaccgataagaccgtgctggacatgcggagcatggacttcaagagcaactccgccgtggcctggtccaacaagtccgatttcgcctgcgccaacgccttcaacaacagcattttcccacccatcaagaccgatgtgattacaatggaccccaaggacaactgctccaaggacgccaacgataccctgctgctccagctgaccaacaccagcgcctactacatgtacttgttgctgctgctgaagtccgtggtgtacttcgccatcatcacatgctgcctgctgcggagaaccgccttctgctgcaacggcgagaagtctaggagtaagaggagcaggctcctgcacagtgactacatgaacatgactccacgccgccccggacccacccgcaagcattaccagccctatgccccaccacgcgacttcgcagcctatcgctccagagtgaagttcagcagaagcgccgacgcccctgcctaccagcagggacagaaccaactgtacaacgagctgaacctgggcagacgggaagagtacgacgtgctggacaagcggagaggcagggaccctgagatgggcggaaagccccagcggagaaagaacccccaggaaggactgtataacgaactccagaaagacaagatggccgaagcctacagcgagatcggcatgaagggcgagcggagaagaggcaagggccacgatggcctgtaccagggcctgagcaccgccaccaaggacacctatgacgccctgcacatgcaggccctgcctccaaga

SEQ ID NO: 26153 - DNA, 903 bp, synthetic construct
  source 1..903: mol_type = other DNA
atccagaaccctgatcctgccgtgtaccagctgcgggatagcaagagcagcgacaagagcgtgtgtctgttcaccgacttcgacagccagaccaacgtgtcccagagcaaggactccgacgtgtacatcaccgataagaccgtgctggacatgcggagcatggacttcaagagcaactccgccgtggcctggtccaacaagtccgatttcgcctgcgccaacgccttcaacaacagcattcccatcaagaccgatgtgattacaatggaccccaaggacaactgctccaaggacgccaacgataccctgctgctccagctgaccaacaccagcgcctactacatgtacttgttgctgctgctgaagtccgtggtgtacttcgccatcatcacatgctgcctgctgcggagaaccgccttctgctgcaacggcgagaagtctaggagtaagaggagcaggctcctgcacagtgactacatgaacatgactccacgccgccccggacccacccgcaagcattaccagccctatgccccaccacgcgacttcgcagcctatcgctccagagtgaagttcagcagaagcgccgacgcccctgcctaccagcagggacagaaccaactgtacaacgagctgaacctgggcagacgggaagagtacgacgtgctggacaagcggagaggcagggaccctgagatgggcggaaagccccagcggagaaagaacccccaggaaggactgtataacgaactccagaaagacaagatggccgaagcctacagcgagatcggcatgaagggcgagcggagaagaggcaagggccacgatggcctgtaccagggcctgagcaccgccaccaaggacacctatgacgccctgcacatgcaggccctgcctccaaga

SEQ ID NO: 26154 - DNA, 879 bp, synthetic construct
  source 1..879: mol_type = other DNA
atccagaaccctgatcctgccgtgtaccagctgcgggatagcaagagcagcgacaagagcgtgtgtctgttcaccgacttcgacagccagaccaacgtgtcccagagcaaggactccgacgtgtacatcaccgataagaccgtgctggacatgcggagcatggacttcaagagcaactccgccgtggcctggtccaacaagtccgatttcgcctgcgccaacgccttcaacaacagcattatggaccccaaggacaactgctccaaggacgccaacgataccctgctgctccagctgaccaacaccagcgcctactacatgtacttgttgctgctgctgaagtccgtggtgtacttcgccatcatcacatgctgcctgctgcggagaaccgccttctgctgcaacggcgagaagtctaggagtaagaggagcaggctcctgcacagtgactacatgaacatgactccacgccgccccggacccacccgcaagcattaccagccctatgccccaccacgcgacttcgcagcctatcgctccagagtgaagttcagcagaagcgccgacgcccctgcctaccagcagggacagaaccaactgtacaacgagctgaacctgggcagacgggaagagtacgacgtgctggacaagcggagaggcagggaccctgagatgggcggaaagccccagcggagaaagaacccccaggaaggactgtataacgaactccagaaagacaagatggccgaagcctacagcgagatcggcatgaagggcgagcggagaagaggcaagggccacgatggcctgtaccagggcctgagcaccgccaccaaggacacctatgacgccctgcacatgcaggccctgcctccaaga

SEQ ID NO: 26155 - DNA, 903 bp, synthetic construct; identical to SEQ ID NO: 26153
  source 1..903: mol_type = other DNA

SEQ ID NO: 26156 - DNA, 861 bp, synthetic construct
  source 1..861: mol_type = other DNA
atccagaaccctgatcctgccgtgtaccagctgcgggatagcaagagcagcgacaagagcgtgtgtctgttcaccgacttcgacagccagaccaacgtgtcccagagcaaggactccgacgtgtacatcaccgataagaccgtgctggacatgcggagcatggacttcaagagcaactccgccgtggcctggtccaacaagtccgatttcgcctgcgccaacgccttcaacaacagcatttgctccaaggacgccaacgataccctgctgctccagctgaccaacaccagcgcctactacatgtacttgttgctgctgctgaagtccgtggtgtacttcgccatcatcacatgctgcctgctgcggagaaccgccttctgctgcaacggcgagaagtctaggagtaagaggagcaggctcctgcacagtgactacatgaacatgactccacgccgccccggacccacccgcaagcattaccagccctatgccccaccacgcgacttcgcagcctatcgctccagagtgaagttcagcagaagcgccgacgcccctgcctaccagcagggacagaaccaactgtacaacgagctgaacctgggcagacgggaagagtacgacgtgctggacaagcggagaggcagggaccctgagatgggcggaaagccccagcggagaaagaacccccaggaaggactgtataacgaactccagaaagacaagatggccgaagcctacagcgagatcggcatgaagggcgagcggagaagaggcaagggccacgatggcctgtaccagggcctgagcaccgccaccaaggacacctatgacgccctgcacatgcaggccctgcctccaaga

SEQ ID NO: 26157 - DNA, 906 bp, synthetic construct
  source 1..906: mol_type = other DNA
atccagaaccctgatcctgccgtgtaccagctgcgggatagcaagagcagcgacaagagcgtgtgtctgttcaccgacttcgacagccagaccaacgtgtcccagagcaaggactccgacgtgtacatcaccgataagaccgtgctggacatgcggagcatggacttcaagagcaactccgccgtggcctggtccaacaagtccgatttcgcctgcgccaacgccttcaacaacagcattgaagtgaaaaccgactccaccgaccacgtgaagcccaaagagacagagaacaccaagcagcccagcaagagctgccacaagcccaaggccatcgtgcacaccgagaaagtgaacatgatgagcctgaccgtgctgggcctgcggatgctgttcgccaaaaccgtggccgtgaacttcctgctgaccgccaagctgttcttcctcaggagtaagaggagcaggctcctgcacagtgactacatgaacatgactccacgccgccccggacccacccgcaagcattaccagccctatgccccaccacgcgacttcgcagcctatcgctccagagtgaagttcagcagaagcgccgacgcccctgcctaccagcagggacagaaccaactgtacaacgagctgaacctgggcagacgggaagagtacgacgtgctggacaagcggagaggcagggaccctgagatgggcggaaagccccagcggagaaagaacccccaggaaggactgtataacgaactccagaaagacaagatggccgaagcctacagcgagatcggcatgaagggcgagcggagaagaggcaagggccacgatggcctgtaccagggcctgagcaccgccaccaaggacacctatgacgccctgcacatgcaggccctgcctccaaga

SEQ ID NO: 26158 - DNA, 885 bp, synthetic construct
  source 1..885: mol_type = other DNA
atccagaaccctgatcctgccgtgtaccagctgcgggatagcaagagcagcgacaagagcgtgtgtctgttcaccgacttcgacagccagaccaacgtgtcccagagcaaggactccgacgtgtacatcaccgataagaccgtgctggacatgcggagcatggacttcaagagcaactccgccgtggcctggtccaacaagtccgatttcgcctgcgccaacgccttcaacaacagcattgaccacgtgaagcccaaagagacagagaacaccaagcagcccagcaagagctgccacaagcccaaggccatcgtgcacaccgagaaagtgaacatgatgagcctgaccgtgctgggcctgcggatgctgttcgccaaaaccgtggccgtgaacttcctgctgaccgccaagctgttcttcctcaggagtaagaggagcaggctcctgcacagtgactacatgaacatgactccacgccgccccggacccacccgcaagcattaccagccctatgccccaccacgcgacttcgcagcctatcgctccagagtgaagttcagcagaagcgccgacgcccctgcctaccagcagggacagaaccaactgtacaacgagctgaacctgggcagacgggaagagtacgacgtgctggacaagcggagaggcagggaccctgagatgggcggaaagccccagcggagaaagaacccccaggaaggactgtataacgaactccagaaagacaagatggccgaagcctacagcgagatcggcatgaagggcgagcggagaagaggcaagggccacgatggcctgtaccagggcctgagcaccgccaccaaggacacctatgacgccctgcacatgcaggccctgcctccaaga

SEQ ID NO: 26159 - DNA, 891 bp, synthetic construct
  source 1..891: mol_type = other DNA
atccagaaccctgatcctgccgtgtaccagctgcgggatagcaagagcagcgacaagagcgtgtgtctgttcaccgacttcgacagccagaccaacgtgtcccagagcaaggactccgacgtgtacatcaccgataagaccgtgctggacatgcggagcatggacttcaagagcaactccgccgtggcctggtccaacaagtccgatttcgcctgcgccaacgccttcaacaacagcattatccccgaggacacattcttcccaagccccggcagagccgattgcggctttaccagcgagagctaccagcagggcgtgctgagcgccaccatcctgtacgagatcctgctgggcaaggccaccctgtacgccgtgctggtgtctgccctggtgctgatggctatggtcaagcggaaggacagccggggaaggagtaagaggagcaggctcctgcacagtgactacatgaacatgactccacgccgccccggacccacccgcaagcattaccagccctatgccccaccacgcgacttcgcagcctatcgctccagagtgaagttcagcagaagcgccgacgcccctgcctaccagcagggacagaaccaactgtacaacgagctgaacctgggcagacgggaagagtacgacgtgctggacaagcggagaggcagggaccctgagatgggcggaaagccccagcggagaaagaacccccaggaaggactgtataacgaactccagaaagacaagatggccgaagcctacagcgagatcggcatgaagggcgagcggagaagaggcaagggccacgatggcctgtaccagggcctgagcaccgccaccaaggacacctatgacgccctgcacatgcaggccctgcctccaaga

SEQ ID NO: 26160 - DNA, 885 bp, synthetic construct
  source 1..885: mol_type = other DNA
atccagaaccctgatcctgccgtgtaccagctgcgggatagcaagagcagcgacaagagcgtgtgtctgttcaccgacttcgacagccagaccaacgtgtcccagagcaaggactccgacgtgtacatcaccgataagaccgtgctggacatgcggagcatggacttcaagagcaactccgccgtggcctggtccaacaagtccgatttcgcctgcgccaacgccttcaacaacagcattatccccgaggacacattcttcccaagccccgccgattgcggctttaccagcgagagctaccagcagggcgtgctgagcgccaccatcctgtacgagatcctgctgggcaaggccaccctgtacgccgtgctggtgtctgccctggtgctgatggctatggtcaagcggaaggacagccggggaaggagtaagaggagcaggctcctgcacagtgactacatgaacatgactccacgccgccccggacccacccgcaagcattaccagccctatgccccaccacgcgacttcgcagcctatcgctccagagtgaagttcagcagaagcgccgacgcccctgcctaccagcagggacagaaccaactgtacaacgagctgaacctgggcagacgggaagagtacgacgtgctggacaagcggagaggcagggaccctgagatgggcggaaagccccagcggagaaagaacccccaggaaggactgtataacgaactccagaaagacaagatggccgaagcctacagcgagatcggcatgaagggcgagcggagaagaggcaagggccacgatggcctgtaccagggcctgagcaccgccaccaaggacacctatgacgccctgcacatgcaggccctgcctccaaga

SEQ ID NO: 26161 - DNA, 915 bp, synthetic construct
  source 1..915: mol_type = other DNA
atccagaaccctgatcctgccgtgtaccagctgcgggatagcaagagcagcgacaagagcgtgtgtctgttcaccgacttcgacagccagaccaacgtgtcccagagcaaggactccgacgtgtacatcaccgataagaccgtgctggacatgcggagcatggacttcaagagcaactccgccgtggcctggtccaacaagtccgatttcgcctgcgccaacgccttcaacaacagcattatccccgaggacacattcttcccaagcccccagatcgtgtctgccgaagcctggggcagagccgattgcggctttaccagcgagagctaccagcagggcgtgctgagcgccaccatcctgtacgagatcctgctgggcaaggccaccctgtacgccgtgctggtgtctgccctggtgctgatggctatggtcaagcggaaggacagccggggaaggagtaagaggagcaggctcctgcacagtgactacatgaacatgactccacgccgccccggacccacccgcaagcattaccagccctatgccccaccacgcgacttcgcagcctatcgctccagagtgaagttcagcagaagcgccgacgcccctgcctaccagcagggacagaaccaactgtacaacgagctgaacctgggcagacgggaagagtacgacgtgctggacaagcggagaggcagggaccctgagatgggcggaaagccccagcggagaaagaacccccaggaaggactgtataacgaactccagaaagacaagatggccgaagcctacagcgagatcggcatgaagggcgagcggagaagaggcaagggccacgatggcctgtaccagggcctgagcaccgccaccaaggacacctatgacgccctgcacatgcaggccctgcctccaaga

SEQ ID NO: 26162 - DNA, 939 bp, synthetic construct
  source 1..939: mol_type = other DNA
atccagaaccctgatcctgccgtgtaccagctgcgggatagcaagagcagcgacaagagcgtgtgtctgttcaccgacttcgacagccagaccaacgtgtcccagagcaaggactccgacgtgtacatcaccgataagaccgtgctggacatgcggagcatggacttcaagagcaactccgccgtggcctggtccaacaagtccgatttcgcctgcgccaacgccttcaacaacagcattatccccgaggacacattcttcccaagccccttcccacccatcaagaccgatgtgattacaatggaccccaaggacaactgctccaaggacgccaacgataccctgctgctccagctgaccaacaccagcgcctactacatgtacttgttgctgctgctgaagtccgtggtgtacttcgccatcatcacatgctgcctgctgcggagaaccgccttctgctgcaacggcgagaagtctaggagtaagaggagcaggctcctgcacagtgactacatgaacatgactccacgccgccccggacccacccgcaagcattaccagccctatgccccaccacgcgacttcgcagcctatcgctccagagtgaagttcagcagaagcgccgacgcccctgcctaccagcagggacagaaccaactgtacaacgagctgaacctgggcagacgggaagagtacgacgtgctggacaagcggagaggcagggaccctgagatgggcggaaagccccagcggagaaagaacccccaggaaggactgtataacgaactccagaaagacaagatggccgaagcctacagcgagatcggcatgaagggcgagcggagaagaggcaagggccacgatggcctgtaccagggcctgagcaccgccaccaaggacacctatgacgccctgcacatgcaggccctgcctccaaga

SEQ ID NO: 26163 - DNA, 933 bp, synthetic construct
  source 1..933: mol_type = other DNA
atccagaaccctgatcctgccgtgtaccagctgcgggatagcaagagcagcgacaagagcgtgtgtctgttcaccgacttcgacagccagaccaacgtgtcccagagcaaggactccgacgtgtacatcaccgataagaccgtgctggacatgcggagcatggacttcaagagcaactccgccgtggcctggtccaacaagtccgatttcgcctgcgccaacgccttcaacaacagcattatccccgaggacacattcttcccaagcccccccatcaagaccgatgtgattacaatggaccccaaggacaactgctccaaggacgccaacgataccctgctgctccagctgaccaacaccagcgcctactacatgtacttgttgctgctgctgaagtccgtggtgtacttcgccatcatcacatgctgcctgctgcggagaaccgccttctgctgcaacggcgagaagtctaggagtaagaggagcaggctcctgcacagtgactacatgaacatgactccacgccgccccggacccacccgcaagcattaccagccctatgccccaccacgcgacttcgcagcctatcgctccagagtgaagttcagcagaagcgccgacgcccctgcctaccagcagggacagaaccaactgtacaacgagctgaacctgggcagacgggaagagtacgacgtgctggacaagcggagaggcagggaccctgagatgggcggaaagccccagcggagaaagaacccccaggaaggactgtataacgaactccagaaagacaagatggccgaagcctacagcgagatcggcatgaagggcgagcggagaagaggcaagggccacgatggcctgtaccagggcctgagcaccgccaccaaggacacctatgacgccctgcacatgcaggccctgcctccaaga

SEQ ID NO: 26164 - DNA, 909 bp, synthetic construct
  source 1..909: mol_type = other DNA
atccagaaccctgatcctgccgtgtaccagctgcgggatagcaagagcagcgacaagagcgtgtgtctgttcaccgacttcgacagccagaccaacgtgtcccagagcaaggactccgacgtgtacatcaccgataagaccgtgctggacatgcggagcatggacttcaagagcaactccgccgtggcctggtccaacaagtccgatttcgcctgcgccaacgccttcaacaacagcattatccccgaggacacattcttcccaagccccatggaccccaaggacaactgctccaaggacgccaacgataccctgctgctccagctgaccaacaccagcgcctactacatgtacttgttgctgctgctgaagtccgtggtgtacttcgccatcatcacatgctgcctgctgcggagaaccgccttctgctgcaacggcgagaagtctaggagtaagaggagcaggctcctgcacagtgactacatgaacatgactccacgccgccccggacccacccgcaagcattaccagccctatgccccaccacgcgacttcgcagcctatcgctccagagtgaagttcagcagaagcgccgacgcccctgcctaccagcagggacagaaccaactgtacaacgagctgaacctgggcagacgggaagagtacgacgtgctggacaagcggagaggcagggaccctgagatgggcggaaagccccagcggagaaagaacccccaggaaggactgtataacgaactccagaaagacaagatggccgaagcctacagcgagatcggcatgaagggcgagcggagaagaggcaagggccacgatggcctgtaccagggcctgagcaccgccaccaaggacacctatgacgccctgcacatgcaggccctgcctccaaga

SEQ ID NO: 26165 - DNA, 933 bp, synthetic construct; identical to SEQ ID NO: 26163
  source 1..933: mol_type = other DNA

SEQ ID NO: 26166 - DNA, 891 bp, synthetic construct
  source 1..891: mol_type = other DNA
atccagaaccctgatcctgccgtgtaccagctgcgggatagcaagagcagcgacaagagcgtgtgtctgttcaccgacttcgacagccagaccaacgtgtcccagagcaaggactccgacgtgtacatcaccgataagaccgtgctggacatgcggagcatggacttcaagagcaactccgccgtggcctggtccaacaagtccgatttcgcctgcgccaacgccttcaacaacagcattatccccgaggacacattcttcccaagcccctgctccaaggacgccaacgataccctgctgctccagctgaccaacaccagcgcctactacatgtacttgttgctgctgctgaagtccgtggtgtacttcgccatcatcacatgctgcctgctgcggagaaccgccttctgctgcaacggcgagaagtctaggagtaagaggagcaggctcctgcacagtgactacatgaacatgactccacgccgccccggacccacccgcaagcattaccagccctatgccccaccacgcgacttcgcagcctatcgctccagagtgaagttcagcagaagcgccgacgcccctgcctaccagcagggacagaaccaactgtacaacgagctgaacctgggcagacgggaagagtacgacgtgctggacaagcggagaggcagggaccctgagatgggcggaaagccccagcggagaaagaacccccaggaaggactgtataacgaactccagaaagacaagatggccgaagcctacagcgagatcggcatgaagggcgagcggagaagaggcaagggccacgatggcctgtaccagggcctgagcaccgccaccaaggacacctatgacgccctgcacatgcaggccctgcctccaaga

SEQ ID NO: 26167 - DNA, 936 bp, synthetic construct
  source 1..936: mol_type = other DNA
atccagaaccctgatcctgccgtgtaccagctgcgggatagcaagagcagcgacaagagcgtgtgtctgttcaccgacttcgacagccagaccaacgtgtcccagagcaaggactccgacgtgtacatcaccgataagaccgtgctggacatgcggagcatggacttcaagagcaactccgccgtggcctggtccaacaagtccgatttcgcctgcgccaacgccttcaacaacagcattatccccgaggacacattcttcccaagccccgaagtgaaaaccgactccaccgaccacgtgaagcccaaagagacagagaacaccaagcagcccagcaagagctgccacaagcccaaggccatcgtgcacaccgagaaagtgaacatgatgagcctgaccgtgctgggcctgcggatgctgttcgccaaaaccgtggccgtgaacttcctgctgaccgccaagctgttcttcctcaggagtaagaggagcaggctcctgcacagtgactacatgaacatgactccacgccgccccggacccacccgcaagcattaccagccctatgccccaccacgcgacttcgcagcctatcgctccagagtgaagttcagcagaagcgccgacgcccctgcctaccagcagggacagaaccaactgtacaacgagctgaacctgggcagacgggaagagtacgacgtgctggacaagcggagaggcagggaccctgagatgggcggaaagccccagcggagaaagaacccccaggaaggactgtataacgaactccagaaagacaagatggccgaagcctacagcgagatcggcatgaagggcgagcggagaagaggcaagggccacgatggcctgtaccagggcctgagcaccgccaccaaggacacctatgacgccctgcacatgcaggccctgcctccaaga

SEQ ID NO: 26168 - DNA, 915 bp, synthetic construct
  source 1..915: mol_type = other DNA
atccagaaccctgatcctgccgtgtaccagctgcgggatagcaagagcagcgacaagagcgtgtgtctgttcaccgacttcgacagccagaccaacgtgtcccagagcaaggactccgacgtgtacatcaccgataagaccgtgctggacatgcggagcatggacttcaagagcaactccgccgtggcctggtccaacaagtccgatttcgcctgcgccaacgccttcaacaacagcattatccccgaggacacattcttcccaagccccgaccacgtgaagcccaaagagacagagaacaccaagcagcccagcaagagctgccacaagcccaaggccatcgtgcacaccgagaaagtgaacatgatgagcctgaccgtgctgggcctgcggatgctgttcgccaaaaccgtggccgtgaacttcctgctgaccgccaagctgttcttcctcaggagtaagaggagcaggctcctgcacagtgactacatgaacatgactccacgccgccccggacccacccgcaagcattaccagccctatgccccaccacgcgacttcgcagcctatcgctccagagtgaagttcagcagaagcgccgacgcccctgcctaccagcagggacagaaccaactgtacaacgagctgaacctgggcagacgggaagagtacgacgtgctggacaagcggagaggcagggaccctgagatgggcggaaagccccagcggagaaagaacccccaggaaggactgtataacgaactccagaaagacaagatggccgaagcctacagcgagatcggcatgaagggcgagcggagaagaggcaagggccacgatggcctgtaccagggcctgagcaccgccaccaaggacacctatgacgccctgcacatgcaggccctgcctccaaga

SEQ ID NO: 26169 - DNA, 903 bp, synthetic construct
  source 1..903: mol_type = other DNA
atccagaaccctgatcctgccgtgtaccagctgcgggatagcaagagcagcgacaagagcgtgtgtctgttcaccgacttcgacagccagaccaacgtgtcccagagcaaggactccgacgtgtacatcaccgataagaccgtgctggacatgcggagcatggacttcaagagcaactccgccgtggcctggtccaacaagtccgatttcgcctgcgccaacgccttcaacaacagcattatccccgaggacacattcttcccaagccccgagagcagctgcggcagagccgattgcggctttaccagcgagagctaccagcagggcgtgctgagcgccaccatcctgtacgagatcctgctgggcaaggccaccctgtacgccgtgctggtgtctgccctggtgctgatggctatggtcaagcggaaggacagccggggaaggagtaagaggagcaggctcctgcacagtgactacatgaacatgactccacgccgccccggacccacccgcaagcattaccagccctatgccccaccacgcgacttcgcagcctatcgctccagagtgaagttcagcagaagcgccgacgcccctgcctaccagcagggacagaaccaactgtacaacgagctgaacctgggcagacgggaagagtacgacgtgctggacaagcggagaggcagggaccctgagatgggcggaaagccccagcggagaaagaacccccaggaaggactgtataacgaactccagaaagacaagatggccgaagcctacagcgagatcggcatgaagggcgagcggagaagaggcaagggccacgatggcctgtaccagggcctgagcaccgccaccaaggacacctatgacgccctgcacatgcaggccctgcctccaaga

SEQ ID NO: 26170 - DNA, 897 bp, synthetic construct
  source 1..897: mol_type = other DNA
atccagaaccctgatcctgccgtgtaccagctgcgggatagcaagagcagcgacaagagcgtgtgtctgttcaccgacttcgacagccagaccaacgtgtcccagagcaaggactccgacgtgtacatcaccgataagaccgtgctggacatgcggagcatggacttcaagagcaactccgccgtggcctggtccaacaagtccgatttcgcctgcgccaacgccttcaacaacagcattatccccgaggacacattcttcccaagccccgagagcagctgcgccgattgcggctttaccagcgagagctaccagcagggcgtgctgagcgccaccatcctgtacgagatcctgctgggcaaggccaccctgtacgccgtgctggtgtctgccctggtgctgatggctatggtcaagcggaaggacagccggggaaggagtaagaggagcaggctcctgcacagtgactacatgaacatgactccacgccgccccggacccacccgcaagcattaccagccctatgccccaccacgcgacttcgcagcctatcgctccagagtgaagttcagcagaagcgccgacgcccctgcctaccagcagggacagaaccaactgtacaacgagctgaacctgggcagacgggaagagtacgacgtgctggacaagcggagaggcagggaccctgagatgggcggaaagccccagcggagaaagaacccccaggaaggactgtataacgaactccagaaagacaagatggccgaagcctacagcgagatcggcatgaagggcgagcggagaagaggcaagggccacgatggcctgtaccagggcctgagcaccgccaccaaggacacctatgacgccctgcacatgcaggccctgcctccaaga

SEQ ID NO: 26171 - DNA, 927 bp, synthetic construct
  source 1..927: mol_type = other DNA
atccagaaccctgatcctgccgtgtaccagctgcgggatagcaagagcagcgacaagagcgtgtgtctgttcaccgacttcgacagccagaccaacgtgtcccagagcaaggactccgacgtgtacatcaccgataagaccgtgctggacatgcggagcatggacttcaagagcaactccgccgtggcctggtccaacaagtccgatttcgcctgcgccaacgccttcaacaacagcattatccccgaggacacattcttcccaagccccgagagcagctgccagatcgtgtctgccgaagcctggggcagagccgattgcggctttaccagcgagagctaccagcagggcgtgctgagcgccaccatcctgtacgagatcctgctgggcaaggccaccctgtacgccgtgctggtgtctgccctggtgctgatggctatggtcaagcggaaggacagccggggaaggagtaagaggagcaggctcctgcacagtgactacatgaacatgactccacgccgccccggacccacccgcaagcattaccagccctatgccccaccacgcgacttcgcagcctatcgctccagagtgaagttcagcagaagcgccgacgcccctgcctaccagcagggacagaaccaactgtacaacgagctgaacctgggcagacgggaagagtacgacgtgctggacaagcggagaggcagggaccctgagatgggcggaaagccccagcggagaaagaacccccaggaaggactgtataacgaactccagaaagacaagatggccgaagcctacagcgagatcggcatgaagggcgagcggagaagaggcaagggccacgatggcctgtaccagggcctgagcaccgccaccaaggacacctatgacgccctgcacatgcaggccctgcctccaaga

SEQ ID NO: 26172 - DNA, 951 bp, synthetic construct
  source 1..951: mol_type = other DNA
atccagaaccctgatcctgccgtgtaccagctgcgggatagcaagagcagcgacaagagcgtgtgtctgttcaccgacttcgacagccagaccaacgtgtcccagagcaaggactccgacgtgtacatcaccgataagaccgtgctggacatgcggagcatggacttcaagagcaactccgccgtggcctggtccaacaagtccgatttcgcctgcgccaacgccttcaacaacagcattatccccgaggacacattcttcccaagccccgagagcagctgcttcccacccatcaagaccgatgtgattacaatggaccccaaggacaactgctccaaggacgccaacgataccctgctgctccagctgaccaacaccagcgcctactacatgtacttgttgctgctgctgaagtccgtggtgtacttcgccatcatcacatgctgcctgctgcggagaaccgccttctgctgcaacggcgagaagtctaggagtaagaggagcaggctcctgcacagtgactacatgaacatgactccacgccgccccggacccacccgcaagcattaccagccctatgccccaccacgcgacttcgcagcctatcgctccagagtgaagttcagcagaagcgccgacgcccctgcctaccagcagggacagaaccaactgtacaacgagctgaacctgggcagacgggaagagtacgacgtgctggacaagcggagaggcagggaccctgagatgggcggaaagccccagcggagaaagaacccccaggaaggactgtataacgaactccagaaagacaagatggccgaagcctacagcgagatcggcatgaagggcgagcggagaagaggcaagggccacgatggcctgtaccagggcctgagcaccgccaccaaggacacctatgacgccctgcacatgcaggccctgcctccaaga

SEQ ID NO: 26173 - DNA, 945 bp, synthetic construct
  source 1..945: mol_type = other DNA
atccagaaccctgatcctgccgtgtaccagctgcgggatagcaagagcagcgacaagagcgtgtgtctgttcaccgacttcgacagccagaccaacgtgtcccagagcaaggactccgacgtgtacatcaccgataagaccgtgctggacatgcggagcatggacttcaagagcaactccgccgtggcctggtccaacaagtccgatttcgcctgcgccaacgccttcaacaacagcattatccccgaggacacattcttcccaagccccgagagcagctgccccatcaagaccgatgtgattacaatggaccccaaggacaactgctccaaggacgccaacgataccctgctgctccagctgaccaacaccagcgcctactacatgtacttgttgctgctgctgaagtccgtggtgtacttcgccatcatcacatgctgcctgctgcggagaaccgccttctgctgcaacggcgagaagtctaggagtaagaggagcaggctcctgcacagtgactacatgaacatgactccacgccgccccggacccacccgcaagcattaccagccctatgccccaccacgcgacttcgcagcctatcgctccagagtgaagttcagcagaagcgccgacgcccctgcctaccagcagggacagaaccaactgtacaacgagctgaacctgggcagacgggaagagtacgacgtgctggacaagcggagaggcagggaccctgagatgggcggaaagccccagcggagaaagaacccccaggaaggactgtataacgaactccagaaagacaagatggccgaagcctacagcgagatcggcatgaagggcgagcggagaagaggcaagggccacgatggcctgtaccagggcctgagcaccgccaccaaggacacctatgacgccctgcacatgcaggccctgcctccaaga

SEQ ID NO: 26174 - DNA, 921 bp, synthetic construct
  source 1..921: mol_type = other DNA
atccagaaccctgatcctgccgtgtaccagctgcgggatagcaagagcagcgacaagagcgtgtgtctgttcaccgacttcgacagccagaccaacgtgtcccagagcaaggactccgacgtgtacatcaccgataagaccgtgctggacatgcggagcatggacttcaagagcaactccgccgtggcctggtccaacaagtccgatttcgcctgcgccaacgccttcaacaacagcattatccccgaggacacattcttcccaagccccgagagcagctgcatggaccccaaggacaactgctccaaggacgccaacgataccctgctgctccagctgaccaacaccagcgcctactacatgtacttgttgctgctgctgaagtccgtggtgtacttcgccatcatcacatgctgcctgctgcggagaaccgccttctgctgcaacggcgagaagtctaggagtaagaggagcaggctcctgcacagtgactacatgaacatgactccacgccgccccggacccacccgcaagcattaccagccctatgccccaccacgcgacttcgcagcctatcgctccagagtgaagttcagcagaagcgccgacgcccctgcctaccagcagggacagaaccaactgtacaacgagctgaacctgggcagacgggaagagtacgacgtgctggacaagcggagaggcagggaccctgagatgggcggaaagccccagcggagaaagaacccccaggaaggactgtataacgaactccagaaagacaagatggccgaagcctacagcgagatcggcatgaagggcgagcggagaagaggcaagggccacgatggcctgtaccagggcctgagcaccgccaccaaggacacctatgacgccctgcacatgcaggccctgcctccaaga

SEQ ID NO: 26175 - DNA, 945 bp, synthetic construct; identical to SEQ ID NO: 26173
  source 1..945: mol_type = other DNA

SEQ ID NO: 26176 - DNA, 903 bp, synthetic construct
  source 1..903: mol_type = other DNA
atccagaaccctgatcctgccgtgtaccagctgcgggatagcaagagcagcgacaagagcgtgtgtctgttcaccgacttcgacagccagaccaacgtgtcccagagcaaggactccgacgtgtacatcaccgataagaccgtgctggacatgcggagcatggacttcaagagcaactccgccgtggcctggtccaacaagtccgatttcgcctgcgccaacgccttcaacaacagcattatccccgaggacacattcttcccaagccccgagagcagctgctgctccaaggacgccaacgataccctgctgctccagctgaccaacaccagcgcctactacatgtacttgttgctgctgctgaagtccgtggtgtacttcgccatcatcacatgctgcctgctgcggagaaccgccttctgctgcaacggcgagaagtctaggagtaagaggagcaggctcctgcacagtgactacatgaacatgactccacgccgccccggacccacccgcaagcattaccagccctatgccccaccacgcgacttcgcagcctatcgctccagagtgaagttcagcagaagcgccgacgcccctgcctaccagcagggacagaaccaactgtacaacgagctgaacctgggcagacgggaagagtacgacgtgctggacaagcggagaggcagggaccctgagatgggcggaaagccccagcggagaaagaacccccaggaaggactgtataacgaactccagaaagacaagatggccgaagcctacagcgagatcggcatgaagggcgagcggagaagaggcaagggccacgatggcctgtaccagggcctgagcaccgccaccaaggacacctatgacgccctgcacatgcaggccctgcctccaaga

SEQ ID NO: 26177 - DNA, 948 bp, synthetic construct
  source 1..948: mol_type = other DNA
atccagaaccctgatcctgccgtgtaccagctgcgggatagcaagagcagcgacaagagcgtgtgtctgttcaccgacttcgacagccagaccaacgtgtcccagagcaaggactccgacgtgtacatcaccgataagaccgtgctggacatgcggagcatggacttcaagagcaactccgccgtggcctggtccaacaagtccgatttcgcctgcgccaacgccttcaacaacagcattatccccgaggacacattcttcccaagccccgagagcagctgcgaagtgaaaaccgactccaccgaccacgtgaagcccaaagagacagagaacaccaagcagcccagcaagagctgccacaagcccaaggccatcgtgcacaccgagaaagtgaacatgatgagcctgaccgtgctgggcctgcggatgctgttcgccaaaaccgtggccgtgaacttcctgctgaccgccaagctgttcttcctcaggagtaagaggagcaggctcctgcacagtgactacatgaacatgactccacgccgccccggacccacccgcaagcattaccagccctatgccccaccacgcgacttcgcagcctatcgctccagagtgaagttcagcagaagcgccgacgcccctgcctaccagcagggacagaaccaactgtacaacgagctgaacctgggcagacgggaagagtacgacgtgctggacaagcggagaggcagggaccctgagatgggcggaaagccccagcggagaaagaacccccaggaaggactgtataacgaactccagaaagacaagatggccgaagcctacagcgagatcggcatgaagggcgagcggagaagaggcaagggccacgatggcctgtaccagggcctgagcaccgccaccaaggacacctatgacgccctgcacatgcaggccctgcctccaaga

SEQ ID NO: 26178 - DNA, 927 bp, synthetic construct
  source 1..927: mol_type = other DNA
atccagaaccctgatcctgccgtgtaccagctgcgggatagcaagagcagcgacaagagcgtgtgtctgttcaccgacttcgacagccagaccaacgtgtcccagagcaaggactccgacgtgtacatcaccgataagaccgtgctggacatgcggagcatggacttcaagagcaactccgccgtggcctggtccaacaagtccgatttcgcctgcgccaacgccttcaacaacagcattatccccgaggacacattcttcccaagccccgagagcagctgcgaccacgtgaagcccaaagagacagagaacaccaagcagcccagcaagagctgccacaagcccaaggccatcgtgcacaccgagaaagtgaacatgatgagcctgaccgtgctgggcctgcggatgctgttcgccaaaaccgtggccgtgaacttcctgctgaccgccaagctgttcttcctcaggagtaagaggagcaggctcctgcacagtgactacatgaacatgactccacgccgccccggacccacccgcaagcattaccagccctatgccccaccacgcgacttcgcagcctatcgctccagagtgaagttcagcagaagcgccgacgcccctgcctaccagcagggacagaaccaactgtacaacgagctgaacctgggcagacgggaagagtacgacgtgctggacaagcggagaggcagggaccctgagatgggcggaaagccccagcggagaaagaacccccaggaaggactgtataacgaactccagaaagacaagatggccgaagcctacagcgagatcggcatgaagggcgagcggagaagaggcaagggccacgatggcctgtaccagggcctgagcaccgccaccaaggacacctatgacgccctgcacatgcaggccctgcctccaaga

SEQ ID NO: 26179 - DNA, 864 bp, synthetic construct
  source 1..864: mol_type = other DNA
atccagaaccctgatcctgccgtgtaccagctgcgggatagcaagagcagcgacaagagcgtgtgtctgttcaccgacttcgacagccagaccaacgtgtcccagagcaaggactccgacgtgtacatcaccgataagaccgtgctggacatgcggagcatggacttcaagagcaactccgccgtggcctggtccaacaagtccgatttcgcctgcgccaacgccttcaacaacagcattatcggcagagccgattgcggctttaccagcgagagctaccagcagggcgtgctgagcgccaccatcctgtacgagatcctgctgggcaaggccaccctgtacgccgtgctggtgtctgccctggtgctgatggctatggtcaagcggaaggacagccggggaaggagtaagaggagcaggctcctgcacagtgactacatgaacatgactccacgccgccccggacccacccgcaagcattaccagccctatgccccaccacgcgacttcgcagcctatcgctccagagtgaagttcagcagaagcgccgacgcccctgcctaccagcagggacagaaccaactgtacaacgagctgaacctgggcagacgggaagagtacgacgtgctggacaagcggagaggcagggaccctgagatgggcggaaagccccagcggagaaagaacccccaggaaggactgtataacgaactccagaaagacaagatggccgaagcctacagcgagatcggcatgaagggcgagcggagaagaggcaagggccacgatggcctgtaccagggcctgagcaccgccaccaaggacacctatgacgccctgcacatgcaggccctgcctccaaga

SEQ ID NO: 26180 - DNA, 858 bp, synthetic construct
  source 1..858: mol_type = other DNA
atccagaaccctgatcctgccgtgtaccagctgcgggatagcaagagcagcgacaagagcgtgtgtctgttcaccgacttcgacagccagaccaacgtgtcccagagcaaggactccgacgtgtacatcaccgataagaccgtgctggacatgcggagcatggacttcaagagcaactccgccgtggcctggtccaacaagtccgatttcgcctgcgccaacgccttcaacaacagcattatcgccgattgcggctttaccagcgagagctaccagcagggcgtgctgagcgccaccatcctgtacgagatcctgctgggcaaggccaccctgtacgccgtgctggtgtctgccctggtgctgatggctatggtcaagcggaaggacagccggggaaggagtaagaggagcaggctcctgcacagtgactacatgaacatgactccacgccgccccggacccacccgcaagcattaccagccctatgccccaccacgcgacttcgcagcctatcgctccagagtgaagttcagcagaagcgccgacgcccctgcctaccagcagggacagaaccaactgtacaacgagctgaacctgggcagacgggaagagtacgacgtgctggacaagcggagaggcagggaccctgagatgggcggaaagccccagcggagaaagaacccccaggaaggactgtataacgaactccagaaagacaagatggccgaagcctacagcgagatcggcatgaagggcgagcggagaagaggcaagggccacgatggcctgtaccagggcctgagcaccgccaccaaggacacctatgacgccctgcacatgcaggccctgcctccaaga

SEQ ID NO: 26181 - DNA, 888 bp, synthetic construct
  source 1..888: mol_type = other DNA
atccagaaccctgatcctgccgtgtaccagctgcgggatagcaagagcagcgacaagagcgtgtgtctgttcaccgacttcgacagccagaccaacgtgtcccagagcaaggactccgacgtgtacatcaccgataagaccgtgctggacatgcggagcatggacttcaagagcaactccgccgtggcctggtccaacaagtccgatttcgcctgcgccaacgccttcaacaacagcattatccagatcgtgtctgccgaagcctggggcagagccgattgcggctttaccagcgagagctaccagcagggcgtgctgagcgccaccatcctgtacgagatcctgctgggcaaggccaccctgtacgccgtgctggtgtctgccctggtgctgatggctatggtcaagcggaaggacagccggggaaggagtaagaggagcaggctcctgcacagtgactacatgaacatgactccacgccgccccggacccacccgcaagcattaccagccctatgccccaccacgcgacttcgcagcctatcgctccagagtgaagttcagcagaagcgccgacgcccctgcctaccagcagggacagaaccaactgtacaacgagctgaacctgggcagacgggaagagtacgacgtgctggacaagcggagaggcagggaccctgagatgggcggaaagccccagcggagaaagaacccccaggaaggactgtataacgaactccagaaagacaagatggccgaagcctacagcgagatcggcatgaagggcgagcggagaagaggcaagggccacgatggcctgtaccagggcctgagcaccgccaccaaggacacctatgacgccctgcacatgcaggccctgcctccaaga

SEQ ID NO: 26182 - DNA, 912 bp, synthetic construct
  source 1..912: mol_type = other DNA
atccagaaccctgatcctgccgtgtaccagctgcgggatagcaagagcagcgacaagagcgtgtgtctgttcaccgacttcgacagccagaccaacgtgtcccagagcaaggactccgacgtgtacatcaccgataagaccgtgctggacatgcggagcatggacttcaagagcaactccgccgtggcctggtccaacaagtccgatttcgcctgcgccaacgccttcaacaacagcattatcttcccacccatcaagaccgatgtgattacaatggaccccaaggacaactgctccaaggacgccaacgataccctgctgctccagctgaccaacaccagcgcctactacatgtacttgttgctgctgctgaagtccgtggtgtacttcgccatcatcacatgctgcctgctgcggagaaccgccttctgctgcaacggcgagaagtctaggagtaagaggagcaggctcctgcacagtgactacatgaacatgactccacgccgccccggacccacccgcaagcattaccagccctatgccccaccacgcgacttcgcagcctatcgctccagagtgaagttcagcagaagcgccgacgcccctgcctaccagcagggacagaaccaactgtacaacgagctgaacctgggcagacgggaagagtacgacgtgctggacaagcggagaggcagggaccctgagatgggcggaaagccccagcggagaaagaacccccaggaaggactgtataacgaactccagaaagacaagatggccgaagcctacagcgagatcggcatgaagggcgagcggagaagaggcaagggccacgatggcctgtaccagggcctgagcaccgccaccaaggacacctatgacgccctgcacatgcaggccctgcctccaaga

SEQ ID NO: 26183 - DNA, 906 bp, synthetic construct
  source 1..906: mol_type = other DNA
atccagaaccctgatcctgccgtgtaccagctgcgggatagcaagagcagcgacaagagcgtgtgtctgttcaccgacttcgacagccagaccaacgtgtcccagagcaaggactccgacgtgtacatcaccgataagaccgtgctggacatgcggagcatggacttcaagagcaactccgccgtggcctggtccaacaagtccgatttcgcctgcgccaacgccttcaacaacagcattatccccatcaagaccgatgtgattacaatggaccccaaggacaactgctccaaggacgccaacgataccctgctgctccagctgaccaacaccagcgcctactacatgtacttgttgctgctgctgaagtccgtggtgtacttcgccatcatcacatgctgcctgctgcggagaaccgccttctgctgcaacggcgagaagtctaggagtaagaggagcaggctcctgcacagtgactacatgaacatgactccacgccgccccggacccacccgcaagcattaccagccctatgccccaccacgcgacttcgcagcctatcgctccagagtgaagttcagcagaagcgccgacgcccctgcctaccagcagggacagaaccaactgtacaacgagctgaacctgggcagacgggaagagtacgacgtgctggacaagcggagaggcagggaccctgagatgggcggaaagccccagcggagaaagaacccccaggaaggactgtataacgaactccagaaagacaagatggccgaagcctacagcgagatcggcatgaagggcgagcggagaagaggcaagggccacgatggcctgtaccagggcctgagcaccgccaccaaggacacctatgacgccctgcacatgcaggccctgcctccaaga

SEQ ID NO: 26184 - DNA, 882 bp, synthetic construct
  source 1..882: mol_type = other DNA
atccagaaccctgatcctgccgtgtaccagctgcgggatagcaagagcagcgacaagagcgtgtgtctgttcaccgacttcgacagccagaccaacgtgtcccagagcaaggactccgacgtgtacatcaccgataagaccgtgctggacatgcggagcatggacttcaagagcaactccgccgtggcctggtccaacaagtccgatttcgcctgcgccaacgccttcaacaacagcattatcatggaccccaaggacaactgctccaaggacgccaacgataccctgctgctccagctgaccaacaccagcgcctactacatgtacttgttgctgctgctgaagtccgtggtgtacttcgccatcatcacatgctgcctgctgcggagaaccgccttctgctgcaacggcgagaagtctaggagtaagaggagcaggctcctgcacagtgactacatgaacatgactccacgccgccccggacccacccgcaagcattaccagccctatgccccaccacgcgacttcgcagcctatcgctccagagtgaagttcagcagaagcgccgacgcccctgcctaccagcagggacagaaccaactgtacaacgagctgaacctgggcagacgggaagagtacgacgtgctggacaagcggagaggcagggaccctgagatgggcggaaagccccagcggagaaagaacccccaggaaggactgtataacgaactccagaaagacaagatggccgaagcctacagcgagatcggcatgaagggcgagcggagaagaggcaagggccacgatggcctgtaccagggcctgagcaccgccaccaaggacacctatgacgccctgcacatgcaggccctgcctccaaga

SEQ ID NO: 26185 - DNA, 906 bp, synthetic construct; identical to SEQ ID NO: 26183
  source 1..906: mol_type = other DNA

SEQ ID NO: 26186 - DNA, 864 bp, synthetic construct
  source 1..864: mol_type = other DNA
atccagaaccctgatcctgccgtgtaccagctgcgggatagcaagagcagcgacaagagcgtgtgtctgttcaccgacttcgacagccagaccaacgtgtcccagagcaaggactccgacgtgtacatcaccgataagaccgtgctggacatgcggagcatggacttcaagagcaactccgccgtggcctggtccaacaagtccgatttcgcctgcgccaacgccttcaacaacagcattatctgctccaaggacgccaacgataccctgctgctccagctgaccaacaccagcgcctactacatgtacttgttgctgctgctgaagtccgtggtgtacttcgccatcatcacatgctgcctgctgcggagaaccgccttctgctgcaacggcgagaagtctaggagtaagaggagcaggctcctgcacagtgactacatgaacatgactccacgccgccccggacccacccgcaagcattaccagccctatgccccaccacgcgacttcgcagcctatcgctccagagtgaagttcagcagaagcgccgacgcccctgcctaccagcagggacagaaccaactgtacaacgagctgaacctgggcagacgggaagagtacgacgtgctggacaagcggagaggcagggaccctgagatgggcggaaagccccagcggagaaagaacccccaggaaggactgtataacgaactccagaaagacaagatggccgaagcctacagcgagatcggcatgaagggcgagcggagaagaggcaagggccacgatggcctgtaccagggcctgagcaccgccaccaaggacacctatgacgccctgcacatgcaggccctgcctccaaga

SEQ ID NO: 26187 - DNA, 909 bp, synthetic construct
  source 1..909: mol_type = other DNA
atccagaaccctgatcctgccgtgtaccagctgcgggatagcaagagcagcgacaagagcgtgtgtctgttcaccgacttcgacagccagaccaacgtgtcccagagcaaggactccgacgtgtacatcaccgataagaccgtgctggacatgcggagcatggacttcaagagcaactccgccgtggcctggtccaacaagtccgatttcgcctgcgccaacgccttcaacaacagcattatcgaagtgaaaaccgactccaccgaccacgtgaagcccaaagagacagagaacaccaagcagcccagcaagagctgccacaagcccaaggccatcgtgcacaccgagaaagtgaacatgatgagcctgaccgtgctgggcctgcggatgctgttcgccaaaaccgtggccgtgaacttcctgctgaccgccaagctgttcttcctcaggagtaagaggagcaggctcctgcacagtgactacatgaacatgactccacgccgccccggacccacccgcaagcattaccagccctatgccccaccacgcgacttcgcagcctatcgctccagagtgaagttcagcagaagcgccgacgcccctgcctaccagcagggacagaaccaactgtacaacgagctgaacctgggcagacgggaagagtacgacgtgctggacaagcggagaggcagggaccctgagatgggcggaaagccccagcggagaaagaacccccaggaaggactgtataacgaactccagaaagacaagatggccgaagcctacagcgagatcggcatgaagggcgagcggagaagaggcaagggccacgatggcctgtaccagggcctgagcaccgccaccaaggacacctatgacgccctgcacatgcaggccctgcctccaaga

SEQ ID NO: 26188 - DNA, 888 bp, synthetic construct
  source 1..888: mol_type = other DNA
atccagaaccctgatcctgccgtgtaccagctgcgggatagcaagagcagcgacaagagcgtgtgtctgttcaccgacttcgacagccagaccaacgtgtcccagagcaaggactccgacgtgtacatcaccgataagaccgtgctggacatgcggagcatggacttcaagagcaactccgccgtggcctggtccaacaagtccgatttcgcctgcgccaacgccttcaacaacagcattatcgaccacgtgaagcccaaagagacagagaacaccaagcagcccagcaagagctgccacaagcccaaggccatcgtgcacaccgagaaagtgaacatgatgagcctgaccgtgctgggcctgcggatgctgttcgccaaaaccgtggccgtgaacttcctgctgaccgccaagctgttcttcctcaggagtaagaggagcaggctcctgcacagtgactacatgaacatgactccacgccgccccggacccacccgcaagcattaccagccctatgccccaccacgcgacttcgcagcctatcgctccagagtgaagttcagcagaagcgccgacgcccctgcctaccagcagggacagaaccaactgtacaacgagctgaacctgggcagacgggaagagtacgacgtgctggacaagcggagaggcagggaccctgagatgggcggaaagccccagcggagaaagaacccccaggaaggactgtataacgaactccagaaagacaagatggccgaagcctacagcgagatcggcatgaagggcgagcggagaagaggcaagggccacgatggcctgtaccagggcctgagcaccgccaccaaggacacctatgacgccctgcacatgcaggccctgcctccaaga

SEQ ID NO: 26189 - DNA, 903 bp, synthetic construct; identical to SEQ ID NO: 26169
  source 1..903: mol_type = other DNA

SEQ ID NO: 26190 - DNA, 897 bp, synthetic construct; identical to SEQ ID NO: 26170
  source 1..897: mol_type = other DNA

SEQ ID NO: 26191 - DNA, 927 bp, synthetic construct; identical to SEQ ID NO: 26171
  source 1..927: mol_type = other DNA

SEQ ID NO: 26192 - DNA, 951 bp, synthetic construct; identical to SEQ ID NO: 26172
  source 1..951: mol_type = other DNA

SEQ ID NO: 26193 - DNA, 945 bp, synthetic construct; identical to SEQ ID NO: 26173
  source 1..945: mol_type = other DNA

SEQ ID NO: 26194 - DNA, 921 bp, synthetic construct; identical to SEQ ID NO: 26174
  source 1..921: mol_type = other DNA

SEQ ID NO: 26195 - DNA, 945 bp, synthetic construct; identical to SEQ ID NO: 26173
  source 1..945: mol_type = other DNA

SEQ ID NO: 26196 - DNA, 903 bp, synthetic construct; identical to SEQ ID NO: 26176
  source 1..903: mol_type = other DNA

SEQ ID NO: 26197 - DNA, 948 bp, synthetic construct; identical to SEQ ID NO: 26177
  source 1..948: mol_type = other DNA

SEQ ID NO: 26198 - DNA, 927 bp, synthetic construct; identical to SEQ ID NO: 26178
  source 1..927: mol_type = other DNA

SEQ ID NO: 26199 - DNA, 858 bp, synthetic construct
  source 1..858: mol_type = other DNA
aagagcagcgacaagagcgtgtgtctgttcaccgacttcgacagccagaccaacgtgtcccagagcaaggactccgacgtgtacatcaccgataagaccgtgctggacatgcggagcatggacttcaagagcaactccgccgtggcctggtccaacaagtccgatttcgcctgcgccaacgccttcaacaacagcattatccccgaggacacattcttcccaagccccgagagcagcggcagagccgattgcggctttaccagcgagagctaccagcagggcgtgctgagcgccaccatcctgtacgagatcctgctgggcaaggccaccctgtacgccgtgctggtgtctgccctggtgctgatggctatggtcaagcggaaggacagccggggaaggagtaagaggagcaggctcctgcacagtgactacatgaacatgactccacgccgccccggacccacccgcaagcattaccagccctatgccccaccacgcgacttcgcagcctatcgctccagagtgaagttcagcagaagcgccgacgcccctgcctaccagcagggacagaaccaactgtacaacgagctgaacctgggcagacgggaagagtacgacgtgctggacaagcggagaggcagggaccctgagatgggcggaaagccccagcggagaaagaacccccaggaaggactgtataacgaactccagaaagacaagatggccgaagcctacagcgagatcggcatgaagggcgagcggagaagaggcaagggccacgatggcctgtaccagggcctgagcaccgccaccaaggacacctatgacgccctgcacatgcaggccctgcctccaaga

SEQ ID NO: 26200 - DNA, 852 bp, synthetic construct
  source 1..852: mol_type = other DNA
aagagcagcgacaagagcgtgtgtctgttcaccgacttcgacagccagaccaacgtgtcccagagcaaggactccgacgtgtacatcaccgataagaccgtgctggacatgcggagcatggacttcaagagcaactccgccgtggcctggtccaacaagtccgatttcgcctgcgccaacgccttcaacaacagcattatccccgaggacacattcttcccaagccccgagagcagcgccgattgcggctttaccagcgagagctaccagcagggcgtgctgagcgccaccatcctgtacgagatcctgctgggcaaggccaccctgtacgccgtgctggtgtctgccctggtgctgatggctatggtcaagcggaaggacagccggggaaggagtaagaggagcaggctcctgcacagtgactacatgaacatgactccacgccgccccggacccacccgcaagcattaccagccctatgccccaccacgcgacttcgcagcctatcgctccagagtgaagttcagcagaagcgccgacgcccctgcctaccagcagggacagaaccaactgtacaacgagctgaacctgggcagacgggaagagtacgacgtgctggacaagcggagaggcagggaccctgagatgggcggaaagccccagcggagaaagaacccccaggaaggactgtataacgaactccagaaagacaagatggccgaagcctacagcgagatcggcatgaagggcgagcggagaagaggcaagggccacgatggcctgtaccagggcctgagcaccgccaccaaggacacctatgacgccctgcacatgcaggccctgcctccaaga

SEQ ID NO: 26201 - DNA, 882 bp, synthetic construct
  source 1..882: mol_type = other DNA
aagagcagcgacaagagcgtgtgtctgttcaccgacttcgacagccagaccaacgtgtcccagagcaaggactccgacgtgtacatcaccgataagaccgtgctggacatgcggagcatggacttcaagagcaactccgccgtggcctggtccaacaagtccgatttcgcctgcgccaacgccttcaacaacagcattatccccgaggacacattcttcccaagccccgagagcagccagatcgtgtctgccgaagcctggggcagagccgattgcggctttaccagcgagagctaccagcagggcgtgctgagcgccaccatcctgtacgagatcctgctgggcaaggccaccctgtacgccgtgctggtgtctgccctggtgctgatggctatggtcaagcggaaggacagccggggaaggagtaagaggagcaggctcctgcacagtgactacatgaacatgactccacgccgccccggacccacccgcaagcattaccagccctatgccccaccacgcgacttcgcagcctatcgctccagagtgaagttcagcagaagcgccgacgcccctgcctaccagcagggacagaaccaactgtacaacgagctgaacctgggcagacgggaagagtacgacgtgctggacaagcggagaggcagggaccctgagatgggcggaaagccccagcggagaaagaacccccaggaaggactgtataacgaactccagaaagacaagatggccgaagcctacagcgagatcggcatgaagggcgagcggagaagaggcaagggccacgatggcctgtaccagggcctgagcaccgccaccaaggacacctatgacgccctgcacatgcaggccctgcctccaaga

SEQ ID NO: 26202 - DNA, 906 bp, synthetic construct
  source 1..906: mol_type = other DNA
aagagcagcgacaagagcgtgtgtctgttcaccgacttcgacagccagaccaacgtgtcccagagcaaggactccgacgtgtacatcaccgataagaccgtgctggacatgcggagcatggacttcaagagcaactccgccgtggcctggtccaacaagtccgatttcgcctgcgccaacgccttcaacaacagcattatccccgaggacacattcttcccaagccccgagagcagcttcccacccatcaagaccgatgtgattacaatggaccccaaggacaactgctccaaggacgccaacgataccctgctgctccagctgaccaacaccagcgcctactacatgtacttgttgctgctgctgaagtccgtggtgtacttcgccatcatcacatgctgcctgctgcggagaaccgccttctgctgcaacggcgagaagtctaggagtaagaggagcaggctcctgcacagtgactacatgaacatgactccacgccgccccggacccacccgcaagcattaccagccctatgccccaccacgcgacttcgcagcctatcgctccagagtgaagttcagcagaagcgccgacgcccctgcctaccagcagggacagaaccaactgtacaacgagctgaacctgggcagacgggaagagtacgacgtgctggacaagcggagaggcagggaccctgagatgggcggaaagccccagcggagaaagaacccccaggaaggactgtataacgaactccagaaagacaagatggccgaagcctacagcgagatcggcatgaagggcgagcggagaagaggcaagggccacgatggcctgtaccagggcctgagcaccgccaccaaggacacctatgacgccctgcacatgcaggccctgcctccaaga

SEQ ID NO: 26203 - DNA, 900 bp, synthetic construct
  source 1..900: mol_type = other DNA
aagagcagcgacaagagcgtgtgtctgttcaccgacttcgacagccagaccaacgtgtcccagagcaaggactccgacgtgtacatcaccgataagaccgtgctggacatgcggagcatggacttcaagagcaactccgccgtggcctggtccaacaagtccgatttcgcctgcgccaacgccttcaacaacagcattatccccgaggacacattcttcccaagccccgagagcagccccatcaagaccgatgtgattacaatggaccccaaggacaactgctccaaggacgccaacgataccctgctgctccagctgaccaacaccagcgcctactacatgtacttgttgctgctgctgaagtccgtggtgtacttcgccatcatcacatgctgcctgctgcggagaaccgccttctgctgcaacggcgagaagtctaggagtaagaggagcaggctcctgcacagtgactacatgaacatgactccacgccgccccggacccacccgcaagcattaccagccctatgccccaccacgcgacttcgcagcctatcgctccagagtgaagttcagcagaagcgccgacgcccctgcctaccagcagggacagaaccaactgtacaacgagctgaacctgggcagacgggaagagtacgacgtgctggacaagcggagaggcagggaccctgagatgggcggaaagccccagcggagaaagaacccccaggaaggactgtataacgaactccagaaagacaagatggccgaagcctacagcgagatcggcatgaagggcgagcggagaagaggcaagggccacgatggcctgtaccagggcctgagcaccgccaccaaggacacctatgacgccctgcacatgcaggccctgcctccaaga

SEQ ID NO: 26204 - DNA, 876 bp, synthetic construct
  source 1..876: mol_type = other DNA
aagagcagcgacaagagcgtgtgtctgttcaccgacttcgacagccagaccaacgtgtcccagagcaaggactccgacgtgtacatcaccgataagaccgtgctggacatgcggagcatggacttcaagagcaactccgccgtggcctggtccaacaagtccgatttcgcctgcgccaacgccttcaacaacagcattatccccgaggacacattcttcccaagccccgagagcagcatggaccccaaggacaactgctccaaggacgccaacgataccctgctgctccagctgaccaacaccagcgcctactacatgtacttgttgctgctgctgaagtccgtggtgtacttcgccatcatcacatgctgcctgctgcggagaaccgccttctgctgcaacggcgagaagtctaggagtaagaggagcaggctcctgcacagtgactacatgaacatgactccacgccgccccggacccacccgcaagcattaccagccctatgccccaccacgcgacttcgcagcctatcgctccagagtgaagttcagcagaagcgccgacgcccctgcctaccagcagggacagaaccaactgtacaacgagctgaacctgggcagacgggaagagtacgacgtgctggacaagcggagaggcagggaccctgagatgggcggaaagccccagcggagaaagaacccccaggaaggactgtataacgaactccagaaagacaagatggccgaagcctacagcgagatcggcatgaagggcgagcggagaagaggcaagggccacgatggcctgtaccagggcctgagcaccgccaccaaggacacctatgacgccctgcacatgcaggccctgcctccaaga

SEQ ID NO: 26205 - DNA, 900 bp, synthetic construct; identical to SEQ ID NO: 26203
  source 1..900: mol_type = other DNA

SEQ ID NO: 26206 - DNA, 858 bp, synthetic construct
  source 1..858: mol_type = other DNA
aagagcagcgacaagagcgtgtgtctgttcaccgacttcgacagccagaccaacgtgtcccagagcaaggactccgacgtgtacatcaccgataagaccgtgctggacatgcggagcatggacttcaagagcaactccgccgtggcctggtccaacaagtccgatttcgcctgcgccaacgccttcaacaacagcattatccccgaggacacattcttcccaagccccgagagcagctgctccaaggacgccaacgataccctgctgctccagctgaccaacaccagcgcctactacatgtacttgttgctgctgctgaagtccgtggtgtacttcgccatcatcacatgctgcctgctgcggagaaccgccttctgctgcaacggcgagaagtctaggagtaagaggagcaggctcctgcacagtgactacatgaacatgactccacgccgccccggacccacccgcaagcattaccagccctatgccccaccacgcgacttcgcagcctatcgctccagagtgaagttcagcagaagcgccgacgcccctgcctaccagcagggacagaaccaactgtacaacgagctgaacctgggcagacgggaagagtacgacgtgctggacaagcggagaggcagggaccctgagatgggcggaaagccccagcggagaaagaacccccaggaaggactgtataacgaactccagaaagacaagatggccgaagcctacagcgagatcggcatgaagggcgagcggagaagaggcaagggccacgatggcctgtaccagggcctgagcaccgccaccaaggacacctatgacgccctgcacatgcaggccctgcctccaaga

SEQ ID NO: 26207 - DNA, 903 bp, synthetic construct
  source 1..903: mol_type = other DNA
aagagcagcgacaagagcgtgtgtctgttcaccgacttcgacagccagaccaacgtgtcccagagcaaggactccgacgtgtacatcaccgataagaccgtgctggacatgcggagcatggacttcaagagcaactccgccgtggcctggtccaacaagtccgatttcgcctgcgccaacgccttcaacaacagcattatccccgaggacacattcttcccaagccccgagagcagcgaagtgaaaaccgactccaccgaccacgtgaagcccaaagagacagagaacaccaagcagcccagcaagagctgccacaagcccaaggccatcgtgcacaccgagaaagtgaacatgatgagcctgaccgtgctgggcctgcggatgctgttcgccaaaaccgtggccgtgaacttcctgctgaccgccaagctgttcttcctcaggagtaagaggagcaggctcctgcacagtgactacatgaacatgactccacgccgccccggacccacccgcaagcattaccagccctatgccccaccacgcgacttcgcagcctatcgctccagagtgaagttcagcagaagcgccgacgcccctgcctaccagcagggacagaaccaactgtacaacgagctgaacctgggcagacgggaagagtacgacgtgctggacaagcggagaggcagggaccctgagatgggcggaaagccccagcggagaaagaacccccaggaaggactgtataacgaactccagaaagacaagatggccgaagcctacagcgagatcggcatgaagggcgagcggagaagaggcaagggccacgatggcctgtaccagggcctgagcaccgccaccaaggacacctatgacgccctgcacatgcaggccctgcctccaaga

SEQ ID NO: 26208 - DNA, 882 bp, synthetic construct
  source 1..882: mol_type = other DNA
aagagcagcgacaagagcgtgtgtctgttcaccgacttcgacagccagaccaacgtgtcccagagcaaggactccgacgtgtacatcaccgataagaccgtgctggacatgcggagcatggacttcaagagcaactccgccgtggcctggtccaacaagtccgatttcgcctgcgccaacgccttcaacaacagcattatccccgaggacacattcttcccaagccccgagagcagcgaccacgtgaagcccaaagagacagagaacaccaagcagcccagcaagagctgccacaagcccaaggccatcgtgcacaccgagaaagtgaacatgatgagcctgaccgtgctgggcctgcggatgctgttcgccaaaaccgtggccgtgaacttcctgctgaccgccaagctgttcttcctcaggagtaagaggagcaggctcctgcacagtgactacatgaacatgactccacgccgccccggacccacccgcaagcattaccagccctatgccccaccacgcgacttcgcagcctatcgctccagagtgaagttcagcagaagcgccgacgcccctgcctaccagcagggacagaaccaactgtacaacgagctgaacctgggcagacgggaagagtacgacgtgctggacaagcggagaggcagggaccctgagatgggcggaaagccccagcggagaaagaacccccaggaaggactgtataacgaactccagaaagacaagatggccgaagcctacagcgagatcggcatgaagggcgagcggagaagaggcaagggccacgatggcctgtaccagggcctgagcaccgccaccaaggacacctatgacgccctgcacatgcaggccctgcctccaaga

SEQ ID NO: 26209 - DNA, 1020 bp, synthetic construct
  source 1..1020: mol_type = other DNA
gaggacctgaagaacgtgttcccacctgaggtggccgtgttcgagcctagcgaggccgagatcagccacacccagaaagccaccctcgtgtgcctggctaccggcttctaccccgaccatgtggaactgtcttggtgggtcaacggcaaagaggtgcacagcggcgtgtctaccgacccccagccactgaaagaacagcccgccctgaacgacagccggtactgcctgagcagcagactgagagtgtccgccaccttctggcagaacccccggaaccacttcagatgccaggtgcagttctacggcctgagcgagaacgacgagtggacccaggacagagccaagcccgtgacccagatcgtgtctgccgaagcctggatccccgaggacacattcttcccaagccccgagagcagctgcgacgtgaagctggtggaaaagagcttcgagacagacaccaacctgaacttccagaacctgagcgtgatcggcttcagaatcctgctgctgaaagtggccggctttaacctgctgatgaccctgcggctgtggtccagcaggagtaagaggagcaggctcctgcacagtgactacatgaacatgactccacgccgccccggacccacccgcaagcattaccagccctatgccccaccacgcgacttcgcagcctatcgctccagagtgaagttcagcagaagcgccgacgcccctgcctaccagcagggacagaaccaactgtacaacgagctgaacctgggcagacgggaagagtacgacgtgctggacaagcggagaggcagggaccctgagatgggcggaaagccccagcggagaaagaacccccaggaaggactgtataacgaactccagaaagacaagatggccgaagcctacagcgagatcggcatgaagggcgagcggagaagaggcaagggccacgatggcctgtaccagggcctgagcaccgccaccaaggacacctatgacgccctgcacatgcaggccctgcctccaaga

SEQ ID NO: 26210 - DNA, 990 bp, synthetic construct
  source 1..990: mol_type = other DNA
gaggacctgaagaacgtgttcccacctgaggtggccgtgttcgagcctagcgaggccgagatcagccacacccagaaagccaccctcgtgtgcctggctaccggcttctaccccgaccatgtggaactgtcttggtgggtcaacggcaaagaggtgcacagcggcgtgtctaccgacccccagccactgaaagaacagcccgccctgaacgacagccggtactgcctgagcagcagactgagagtgtccgccaccttctggcagaacccccggaaccacttcagatgccaggtgcagttctacggcctgagcgagaacgacgagtggacccaggacagagccaagcccgtgacccagatcgtgtctgccgaagcctgggagagcagctgcgacgtgaagctggtggaaaagagcttcgagacagacaccaacctgaacttccagaacctgagcgtgatcggcttcagaatcctgctgctgaaagtggccggctttaacctgctgatgaccctgcggctgtggtccagcaggagtaagaggagcaggctcctgcacagtgactacatgaacatgactccacgccgccccggacccacccgcaagcattaccagccctatgccccaccacgcgacttcgcagcctatcgctccagagtgaagttcagcagaagcgccgacgcccctgcctaccagcagggacagaaccaactgtacaacgagctgaacctgggcagacgggaagagtacgacgtgctggacaagcggagaggcagggaccctgagatgggcggaaagccccagcggagaaagaacccccaggaaggactgtataacgaactccagaaagacaagatggccgaagcctacagcgagatcggcatgaagggcgagcggagaagaggcaagggccacgatggcctgtaccagggcctgagcaccgccaccaaggacacctatgacgccctgcacatgcaggccctgcctccaaga

SEQ ID NO: 26211 - DNA, 1017 bp, synthetic construct
  source 1..1017: mol_type = other DNA
gaggacctgaagaacgtgttcccacctgaggtggccgtgttcgagcctagcgaggccgagatcagccacacccagaaagccaccctcgtgtgcctggctaccggcttctaccccgaccatgtggaactgtcttggtgggtcaacggcaaagaggtgcacagcggcgtgtctaccgacccccagccactgaaagaacagcccgccctgaacgacagccggtactgcctgagcagcagactgagagtgtccgccaccttctggcagaacccccggaaccacttcagatgccaggtgcagttctacggcctgagcgagaacgacgagtggacccaggacagagccaagcccgtgacccagatcgtgtctgccgaagcctggcccgaggacacattcttcccaagccccgagagcagctgcgacgtgaagctggtggaaaagagcttcgagacagacaccaacctgaacttccagaacctgagcgtgatcggcttcagaatcctgctgctgaaagtggccggctttaacctgctgatgaccctgcggctgtggtccagcaggagtaagaggagcaggctcctgcacagtgactacatgaacatgactccacgccgccccggacccacccgcaagcattaccagccctatgccccaccacgcgacttcgcagcctatcgctccagagtgaagttcagcagaagcgccgacgcccctgcctaccagcagggacagaaccaactgtacaacgagctgaacctgggcagacgggaagagtacgacgtgctggacaagcggagaggcagggaccctgagatgggcggaaagccccagcggagaaagaacccccaggaaggactgtataacgaactccagaaagacaagatggccgaagcctacagcgagatcggcatgaagggcgagcggagaagaggcaagggccacgatggcctgtaccagggcctgagcaccgccaccaaggacacctatgacgccctgcacatgcaggccctgcctccaaga

SEQ ID NO: 26212 - DNA, 1047 bp, synthetic construct
  source 1..1047: mol_type = other DNA
gaggacctgaagaacgtgttcccacctgaggtggccgtgttcgagcctagcgaggccgagatcagccacacccagaaagccaccctcgtgtgcctggctaccggcttctaccccgaccatgtggaactgtcttggtgggtcaacggcaaagaggtgcacagcggcgtgtctaccgacccccagccactgaaagaacagcccgccctgaacgacagccggtactgcctgagcagcagactgagagtgtccgccaccttctggcagaacccccggaaccacttcagatgccaggtgcagttctacggcctgagcgagaacgacgagtggacccaggacagagccaagcccgtgacccagatcgtgtctgccgaagcctggttcccacccatcaagaccgatgtgattacaatggaccccaaggacaactgctccaaggacgccaacgataccctgctgctccagctgaccaacaccagcgcctactacatgtacttgttgctgctgctgaagtccgtggtgtacttcgccatcatcacatgctgcctgctgcggagaaccgccttctgctgcaacggcgagaagtctaggagtaagaggagcaggctcctgcacagtgactacatgaacatgactccacgccgccccggacccacccgcaagcattaccagccctatgccccaccacgcgacttcgcagcctatcgctccagagtgaagttcagcagaagcgccgacgcccctgcctaccagcagggacagaaccaactgtacaacgagctgaacctgggcagacgggaagagtacgacgtgctggacaagcggagaggcagggaccctgagatgggcggaaagccccagcggagaaagaacccccaggaaggactgtataacgaactccagaaagacaagatggccgaagcctacagcgagatcggcatgaagggcgagcggagaagaggcaagggccacgatggcctgtaccagggcctgagcaccgccaccaaggacacctatgacgccctgcacatgcaggccctgcctccaaga

SEQ ID NO: 26213 - DNA, 1041 bp, synthetic construct
  source 1..1041: mol_type = other DNA
gaggacctgaagaacgtgttcccacctgaggtggccgtgttcgagcctagcgaggccgagatcagccacacccagaaagccaccctcgtgtgcctggctaccggcttctaccccgaccatgtggaactgtcttggtgggtcaacggcaaagaggtgcacagcggcgtgtctaccgacccccagccactgaaagaacagcccgccctgaacgacagccggtactgcctgagcagcagactgagagtgtccgccaccttctggcagaacccccggaaccacttcagatgccaggtgcagttctacggcctgagcgagaacgacgagtggacccaggacagagccaagcccgtgacccagatcgtgtctgccgaagcctggcccatcaagaccgatgtgattacaatggaccccaaggacaactgctccaaggacgccaacgataccctgctgctccagctgaccaacaccagcgcctactacatgtacttgttgctgctgctgaagtccgtggtgtacttcgccatcatcacatgctgcctgctgcggagaaccgccttctgctgcaacggcgagaagtctaggagtaagaggagcaggctcctgcacagtgactacatgaacatgactccacgccgccccggacccacccgcaagcattaccagccctatgccccaccacgcgacttcgcagcctatcgctccagagtgaagttcagcagaagcgccgacgcccctgcctaccagcagggacagaaccaactgtacaacgagctgaacctgggcagacgggaagagtacgacgtgctggacaagcggagaggcagggaccctgagatgggcggaaagccccagcggagaaagaacccccaggaaggactgtataacgaactccagaaagacaagatggccgaagcctacagcgagatcggcatgaagggcgagcggagaagaggcaagggccacgatggcctgtaccagggcctgagcaccgccaccaaggacacctatgacgccctgcacatgcaggccctgcctccaaga

SEQ ID NO: 26214 - DNA, 1017 bp, synthetic construct
  source 1..1017: mol_type = other DNA
gaggacctgaagaacgtgttcccacctgaggtggccgtgttcgagcctagcgaggccgagatcagccacacccagaaagccaccctcgtgtgcctggctaccggcttctaccccgaccatgtggaactgtcttggtgggtcaacggcaaagaggtgcacagcggcgtgtctaccgacccccagccactgaaagaacagcccgccctgaacgacagccggtactgcctgagcagcagactgagagtgtccgccaccttctggcagaacccccggaaccacttcagatgccaggtgcagttctacggcctgagcgagaacgacgagtggacccaggacagagccaagcccgtgacccagatcgtgtctgccgaagcctggatggaccccaaggacaactgctccaaggacgccaacgataccctgctgctccagctgaccaacaccagcgcctactacatgtacttgttgctgctgctgaagtccgtggtgtacttcgccatcatcacatgctgcctgctgcggagaaccgccttctgctgcaacggcgagaagtctaggagtaagaggagcaggctcctgcacagtgactacatgaacatgactccacgccgccccggacccacccgcaagcattaccagccctatgccccaccacgcgacttcgcagcctatcgctccagagtgaagttcagcagaagcgccgacgcccctgcctaccagcagggacagaaccaactgtacaacgagctgaacctgggcagacgggaagagtacgacgtgctggacaagcggagaggcagggaccctgagatgggcggaaagccccagcggagaaagaacccccaggaaggactgtataacgaactccagaaagacaagatggccgaagcctacagcgagatcggcatgaagggcgagcggagaagaggcaagggccacgatggcctgtaccagggcctgagcaccgccaccaaggacacctatgacgccctgcacatgcaggccctgcctccaaga

SEQ ID NO: 26215 - DNA, 1041 bp, synthetic construct; identical to SEQ ID NO: 26213
  source 1..1041: mol_type = other DNA

SEQ ID NO: 26216 - DNA, 999 bp, synthetic construct
  source 1..999: mol_type = other DNA
gaggacctgaagaacgtgttcccacctgaggtggccgtgttcgagcctagcgaggccgagatcagccacacccagaaagccaccctcgtgtgcctggctaccggcttctaccccgaccatgtggaactgtcttggtgggtcaacggcaaagaggtgcacagcggcgtgtctaccgacccccagccactgaaagaacagcccgccctgaacgacagccggtactgcctgagcagcagactgagagtgtccgccaccttctggcagaacccccggaaccacttcagatgccaggtgcagttctacggcctgagcgagaacgacgagtggacccaggacagagccaagcccgtgacccagatcgtgtctgccgaagcctggtgctccaaggacgccaacgataccctgctgctccagctgaccaacaccagcgcctactacatgtacttgttgctgctgctgaagtccgtggtgtacttcgccatcatcacatgctgcctgctgcggagaaccgccttctgctgcaacggcgagaagtctaggagtaagaggagcaggctcctgcacagtgactacatgaacatgactccacgccgccccggacccacccgcaagcattaccagccctatgccccaccacgcgacttcgcagcctatcgctccagagtgaagttcagcagaagcgccgacgcccctgcctaccagcagggacagaaccaactgtacaacgagctgaacctgggcagacgggaagagtacgacgtgctggacaagcggagaggcagggaccctgagatgggcggaaagccccagcggagaaagaacccccaggaaggactgtataacgaactccagaaagacaagatggccgaagcctacagcgagatcggcatgaagggcgagcggagaagaggcaagggccacgatggcctgtaccagggcctgagcaccgccaccaaggacacctatgacgccctgcacatgcaggccctgcctccaaga

SEQ ID NO: 26217 - DNA, 1044 bp, synthetic construct
  source 1..1044: mol_type = other DNA
gaggacctgaagaacgtgttcccacctgaggtggccgtgttcgagcctagcgaggccgagatcagccacacccagaaagccaccctcgtgtgcctggctaccggcttctaccccgaccatgtggaactgtcttggtgggtcaacggcaaagaggtgcacagcggcgtgtctaccgacccccagccactgaaagaacagcccgccctgaacgacagccggtactgcctgagcagcagactgagagtgtccgccaccttctggcagaacccccggaaccacttcagatgccaggtgcagttctacggcctgagcgagaacgacgagtggacccaggacagagccaagcccgtgacccagatcgtgtctgccgaagcctgggaagtgaaaaccgactccaccgaccacgtgaagcccaaagagacagagaacaccaagcagcccagcaagagctgccacaagcccaaggccatcgtgcacaccgagaaagtgaacatgatgagcctgaccgtgctgggcctgcggatgctgttcgccaaaaccgtggccgtgaacttcctgctgaccgccaagctgttcttcctcaggagtaagaggagcaggctcctgcacagtgactacatgaacatgactccacgccgccccggacccacccgcaagcattaccagccctatgccccaccacgcgacttcgcagcctatcgctccagagtgaagttcagcagaagcgccgacgcccctgcctaccagcagggacagaaccaactgtacaacgagctgaacctgggcagacgggaagagtacgacgtgctggacaagcggagaggcagggaccctgagatgggcggaaagccccagcggagaaagaacccccaggaaggactgtataacgaactccagaaagacaagatggccgaagcctacagcgagatcggcatgaagggcgagcggagaagaggcaagggccacgatggcctgtaccagggcctgagcaccgccaccaaggacacctatgacgccctgcacatgcaggccctgcctccaaga

SEQ ID NO: 26218 - DNA, 1023 bp, synthetic construct
  source 1..1023: mol_type = other DNA
gaggacctgaagaacgtgttcccacctgaggtggccgtgttcgagcctagcgaggccgagatcagccacacccagaaagccaccctcgtgtgcctggctaccggcttctaccccgaccatgtggaactgtcttggtgggtcaacggcaaagaggtgcacagcggcgtgtctaccgacccccagccactgaaagaacagcccgccctgaacgacagccggtactgcctgagcagcagactgagagtgtccgccaccttctggcagaacccccggaaccacttcagatgccaggtgcagttctacggcctgagcgagaacgacgagtggacccaggacagagccaagcccgtgacccagatcgtgtctgccgaagcctgggaccacgtgaagcccaaagagacagagaacaccaagcagcccagcaagagctgccacaagcccaaggccatcgtgcacaccgagaaagtgaacatgatgagcctgaccgtgctgggcctgcggatgctgttcgccaaaaccgtggccgtgaacttcctgctgaccgccaagctgttcttcctcaggagtaagaggagcaggctcctgcacagtgactacatgaacatgactccacgccgccccggacccacccgcaagcattaccagccctatgccccaccacgcgacttcgcagcctatcgctccagagtgaagttcagcagaagcgccgacgcccctgcctaccagcagggacagaaccaactgtacaacgagctgaacctgggcagacgggaagagtacgacgtgctggacaagcggagaggcagggaccctgagatgggcggaaagccccagcggagaaagaacccccaggaaggactgtataacgaactccagaaagacaagatggccgaagcctacagcgagatcggcatgaagggcgagcggagaagaggcaagggccacgatggcctgtaccagggcctgagcaccgccaccaaggacacctatgacgccctgcacatgcaggccctgcctccaaga

SEQ ID NO: 26219 - DNA, 1026 bp, synthetic construct
  source 1..1026: mol_type = other DNA
gaggacctgaagaacgtgttcccacctgaggtggccgtgttcgagcctagcgaggccgagatcagccacacccagaaagccaccctcgtgtgcctggctaccggcttctaccccgaccatgtggaactgtcttggtgggtcaacggcaaagaggtgcacagcggcgtgtctaccgacccccagccactgaaagaacagcccgccctgaacgacagccggtactgcctgagcagcagactgagagtgtccgccaccttctggcagaacccccggaaccacttcagatgccaggtgcagttctacggcctgagcgagaacgacgagtggacccaggacagagccaagcccgtgacccagatcgtgtctgccgaagcctggggcagaatccccgaggacacattcttcccaagccccgagagcagctgcgacgtgaagctggtggaaaagagcttcgagacagacaccaacctgaacttccagaacctgagcgtgatcggcttcagaatcctgctgctgaaagtggccggctttaacctgctgatgaccctgcggctgtggtccagcaggagtaagaggagcaggctcctgcacagtgactacatgaacatgactccacgccgccccggacccacccgcaagcattaccagccctatgccccaccacgcgacttcgcagcctatcgctccagagtgaagttcagcagaagcgccgacgcccctgcctaccagcagggacagaaccaactgtacaacgagctgaacctgggcagacgggaagagtacgacgtgctggacaagcggagaggcagggaccctgagatgggcggaaagccccagcggagaaagaacccccaggaaggactgtataacgaactccagaaagacaagatggccgaagcctacagcgagatcggcatgaagggcgagcggagaagaggcaagggccacgatggcctgtaccagggcctgagcaccgccaccaaggacacctatgacgccctgcacatgcaggccctgcctccaaga

SEQ ID NO: 26220 - DNA, 996 bp, synthetic construct
  source 1..996: mol_type = other DNA
gaggacctgaagaacgtgttcccacctgaggtggccgtgttcgagcctagcgaggccgagatcagccacacccagaaagccaccctcgtgtgcctggctaccggcttctaccccgaccatgtggaactgtcttggtgggtcaacggcaaagaggtgcacagcggcgtgtctaccgacccccagccactgaaagaacagcccgccctgaacgacagccggtactgcctgagcagcagactgagagtgtccgccaccttctggcagaacccccggaaccacttcagatgccaggtgcagttctacggcctgagcgagaacgacgagtggacccaggacagagccaagcccgtgacccagatcgtgtctgccgaagcctggggcagagagagcagctgcgacgtgaagctggtggaaaagagcttcgagacagacaccaacctgaacttccagaacctgagcgtgatcggcttcagaatcctgctgctgaaagtggccggctttaacctgctgatgaccctgcggctgtggtccagcaggagtaagaggagcaggctcctgcacagtgactacatgaacatgactccacgccgccccggacccacccgcaagcattaccagccctatgccccaccacgcgacttcgcagcctatcgctccagagtgaagttcagcagaagcgccgacgcccctgcctaccagcagggacagaaccaactgtacaacgagctgaacctgggcagacgggaagagtacgacgtgctggacaagcggagaggcagggaccctgagatgggcggaaagccccagcggagaaagaacccccaggaaggactgtataacgaactccagaaagacaagatggccgaagcctacagcgagatcggcatgaagggcgagcggagaagaggcaagggccacgatggcctgtaccagggcctgagcaccgccaccaaggacacctatgacgccctgcacatgcaggccctgcctccaaga

SEQ ID NO: 26221 - DNA, 1023 bp, synthetic construct
  source 1..1023: mol_type = other DNA
gaggacctgaagaacgtgttcccacctgaggtggccgtgttcgagcctagcgaggccgagatcagccacacccagaaagccaccctcgtgtgcctggctaccggcttctaccccgaccatgtggaactgtcttggtgggtcaacggcaaagaggtgcacagcggcgtgtctaccgacccccagccactgaaagaacagcccgccctgaacgacagccggtactgcctgagcagcagactgagagtgtccgccaccttctggcagaacccccggaaccacttcagatgccaggtgcagttctacggcctgagcgagaacgacgagtggacccaggacagagccaagcccgtgacccagatcgtgtctgccgaagcctggggcagacccgaggacacattcttcccaagccccgagagcagctgcgacgtgaagctggtggaaaagagcttcgagacagacaccaacctgaacttccagaacctgagcgtgatcggcttcagaatcctgctgctgaaagtggccggctttaacctgctgatgaccctgcggctgtggtccagcaggagtaagaggagcaggctcctgcacagtgactacatgaacatgactccacgccgccccggacccacccgcaagcattaccagccctatgccccaccacgcgacttcgcagcctatcgctccagagtgaagttcagcagaagcgccgacgcccctgcctaccagcagggacagaaccaactgtacaacgagctgaacctgggcagacgggaagagtacgacgtgctggacaagcggagaggcagggaccctgagatgggcggaaagccccagcggagaaagaacccccaggaaggactgtataacgaactccagaaagacaagatggccgaagcctacagcgagatcggcatgaagggcgagcggagaagaggcaagggccacgatggcctgtaccagggcctgagcaccgccaccaaggacacctatgacgccctgcacatgcaggccctgcctccaaga

SEQ ID NO: 26222 - DNA, 1053 bp, synthetic construct
  source 1..1053: mol_type = other DNA
gaggacctgaagaacgtgttcccacctgaggtggccgtgttcgagcctagcgaggccgagatcagccacacccagaaagccaccctcgtgtgcctggctaccggcttctaccccgaccatgtggaactgtcttggtgggtcaacggcaaagaggtgcacagcggcgtgtctaccgacccccagccactgaaagaacagcccgccctgaacgacagccggtactgcctgagcagcagactgagagtgtccgccaccttctggcagaacccccggaaccacttcagatgccaggtgcagttctacggcctgagcgagaacgacgagtggacccaggacagagccaagcccgtgacccagatcgtgtctgccgaagcctggggcagattcccacccatcaagaccgatgtgattacaatggaccccaaggacaactgctccaaggacgccaacgataccctgctgctccagctgaccaacaccagcgcctactacatgtacttgttgctgctgctgaagtccgtggtgtacttcgccatcatcacatgctgcctgctgcggagaaccgccttctgctgcaacggcgagaagtctaggagtaagaggagcaggctcctgcacagtgactacatgaacatgactccacgccgccccggacccacccgcaagcattaccagccctatgccccaccacgcgacttcgcagcctatcgctccagagtgaagttcagcagaagcgccgacgcccctgcctaccagcagggacagaaccaactgtacaacgagctgaacctgggcagacgggaagagtacgacgtgctggacaagcggagaggcagggaccctgagatgggcggaaagccccagcggagaaagaacccccaggaaggactgtataacgaactccagaaagacaagatggccgaagcctacagcgagatcggcatgaagggcgagcggagaagaggcaagggccacgatggcctgtaccagggcctgagcaccgccaccaaggacacctatgacgccctgcacatgcaggccctgcctccaaga

SEQ ID NO: 26223 - DNA, 1047 bp, synthetic construct
  source 1..1047: mol_type = other DNA
gaggacctgaagaacgtgttcccacctgaggtggccgtgttcgagcctagcgaggccgagatcagccacacccagaaagccaccctcgtgtgcctggctaccggcttctaccccgaccatgtggaactgtcttggtgggtcaacggcaaagaggtgcacagcggcgtgtctaccgacccccagccactgaaagaacagcccgccctgaacgacagccggtactgcctgagcagcagactgagagtgtccgccaccttctggcagaacccccggaaccacttcagatgccaggtgcagttctacggcctgagcgagaacgacgagtggacccaggacagagccaagcccgtgacccagatcgtgtctgccgaagcctggggcagacccatcaagaccgatgtgattacaatggaccccaaggacaactgctccaaggacgccaacgataccctgctgctccagctgaccaacaccagcgcctactacatgtacttgttgctgctgctgaagtccgtggtgtacttcgccatcatcacatgctgcctgctgcggagaaccgccttctgctgcaacggcgagaagtctaggagtaagaggagcaggctcctgcacagtgactacatgaacatgactccacgccgccccggacccacccgcaagcattaccagccctatgccccaccacgcgacttcgcagcctatcgctccagagtgaagttcagcagaagcgccgacgcccctgcctaccagcagggacagaaccaactgtacaacgagctgaacctgggcagacgggaagagtacgacgtgctggacaagcggagaggcagggaccctgagatgggcggaaagccccagcggagaaagaacccccaggaaggactgtataacgaactccagaaagacaagatggccgaagcctacagcgagatcggcatgaagggcgagcggagaagaggcaagggccacgatggcctgtaccagggcctgagcaccgccaccaaggacacctatgacgccctgcacatgcaggccctgcctccaaga

SEQ ID NO: 26224 - DNA, 1023 bp, synthetic construct
  source 1..1023: mol_type = other DNA
gaggacctgaagaacgtgttcccacctgaggtggccgtgttcgagcctagcgaggccgagatcagccacacccagaaagccaccctcgtgtgcctggctaccggcttctaccccgaccatgtggaactgtcttggtgggtcaacggcaaagaggtgcacagcggcgtgtctaccgacccccagccactgaaagaacagcccgccctgaacgacagccggtactgcctgagcagcagactgagagtgtccgccaccttctggcagaacccccggaaccacttcagatgccaggtgcagttctacggcctgagcgagaacgacgagtggacccaggacagagccaagcccgtgacccagatcgtgtctgccgaagcctggggcagaatggaccccaaggacaactgctccaaggacgccaacgataccctgctgctccagctgaccaacaccagcgcctactacatgtacttgttgctgctgctgaagtccgtggtgtacttcgccatcatcacatgctgcctgctgcggagaaccgccttctgctgcaacggcgagaagtctaggagtaagaggagcaggctcctgcacagtgactacatgaacatgactccacgccgccccggacccacccgcaagcattaccagccctatgccccaccacgcgacttcgcagcctatcgctccagagtgaagttcagcagaagcgccgacgcccctgcctaccagcagggacagaaccaactgtacaacgagctgaacctgggcagacgggaagagtacgacgtgctggacaagcggagaggcagggaccctgagatgggcggaaagccccagcggagaaagaacccccaggaaggactgtataacgaactccagaaagacaagatggccgaagcctacagcgagatcggcatgaagggcgagcggagaagaggcaagggccacgatggcctgtaccagggcctgagcaccgccaccaaggacacctatgacgccctgcacatgcaggccctgcctccaaga

SEQ ID NO: 26225 - DNA, 1047 bp, synthetic construct; identical to SEQ ID NO: 26223
  source 1..1047: mol_type = other DNA

SEQ ID NO: 26226 - DNA, 1005 bp, synthetic construct
  source 1..1005: mol_type = other DNA
gaggacctgaagaacgtgttcccacctgaggtggccgtgttcgagcctagcgaggccgagatcagccacacccagaaagccaccctcgtgtgcctggctaccggcttctaccccgaccatgtggaactgtcttggtgggtcaacggcaaagaggtgcacagcggcgtgtctaccgacccccagccactgaaagaacagcccgccctgaacgacagccggtactgcctgagcagcagactgagagtgtccgccaccttctggcagaacccccggaaccacttcagatgccaggtgcagttctacggcctgagcgagaacgacgagtggacccaggacagagccaagcccgtgacccagatcgtgtctgccgaagcctggggcagatgctccaaggacgccaacgataccctgctgctccagctgaccaacaccagcgcctactacatgtacttgttgctgctgctgaagtccgtggtgtacttcgccatcatcacatgctgcctgctgcggagaaccgccttctgctgcaacggcgagaagtctaggagtaagaggagcaggctcctgcacagtgactacatgaacatgactccacgccgccccggacccacccgcaagcattaccagccctatgccccaccacgcgacttcgcagcctatcgctccagagtgaagttcagcagaagcgccgacgcccctgcctaccagcagggacagaaccaactgtacaacgagctgaacctgggcagacgggaagagtacgacgtgctggacaagcggagaggcagggaccctgagatgggcggaaagccccagcggagaaagaacccccaggaaggactgtataacgaactccagaaagacaagatggccgaagcctacagcgagatcggcatgaagggcgagcggagaagaggcaagggccacgatggcctgtaccagggcctgagcaccgccaccaaggacacctatgacgccctgcacatgcaggccctgcctccaaga

SEQ ID NO: 26227 - DNA, 1050 bp, synthetic construct
  source 1..1050: mol_type = other DNA
gaggacctgaagaacgtgttcccacctgaggtggccgtgttcgagcctagcgaggccgagatcagccacacccagaaagccaccctcgtgtgcctggctaccggcttctaccccgaccatgtggaactgtcttggtgggtcaacggcaaagaggtgcacagcggcgtgtctaccgacccccagccactgaaagaacagcccgccctgaacgacagccggtactgcctgagcagcagactgagagtgtccgccaccttctggcagaacccccggaaccacttcagatgccaggtgcagttctacggcctgagcgagaacgacgagtggacccaggacagagccaagcccgtgacccagatcgtgtctgccgaagcctggggcagagaagtgaaaaccgactccaccgaccacgtgaagcccaaagagacagagaacaccaagcagcccagcaagagctgccacaagcccaaggccatcgtgcacaccgagaaagtgaacatgatgagcctgaccgtgctgggcctgcggatgctgttcgccaaaaccgtggccgtgaacttcctgctgaccgccaagctgttcttcctcaggagtaagaggagcaggctcctgcacagtgactacatgaacatgactccacgccgccccggacccacccgcaagcattaccagccctatgccccaccacgcgacttcgcagcctatcgctccagagtgaagttcagcagaagcgccgacgcccctgcctaccagcagggacagaaccaactgtacaacgagctgaacctgggcagacgggaagagtacgacgtgctggacaagcggagaggcagggaccctgagatgggcggaaagccccagcggagaaagaacccccaggaaggactgtataacgaactccagaaagacaagatggccgaagcctacagcgagatcggcatgaagggcgagcggagaagaggcaagggccacgatggcctgtaccagggcctgagcaccgccaccaaggacacctatgacgccctgcacatgcaggccctgcctccaaga

SEQ ID NO: 26228 - DNA, 1029 bp, synthetic construct
  source 1..1029: mol_type = other DNA
gaggacctgaagaacgtgttcccacctgaggtggccgtgttcgagcctagcgaggccgagatcagccacacccagaaagccaccctcgtgtgcctggctaccggcttctaccccgaccatgtggaactgtcttggtgggtcaacggcaaagaggtgcacagcggcgtgtctaccgacccccagccactgaaagaacagcccgccctgaacgacagccggtactgcctgagcagcagactgagagtgtccgccaccttctggcagaacccccggaaccacttcagatgccaggtgcagttctacggcctgagcgagaacgacgagtggacccaggacagagccaagcccgtgacccagatcgtgtctgccgaagcctggggcagagaccacgtgaagcccaaagagacagagaacaccaagcagcccagcaagagctgccacaagcccaaggccatcgtgcacaccgagaaagtgaacatgatgagcctgaccgtgctgggcctgcggatgctgttcgccaaaaccgtggccgtgaacttcctgctgaccgccaagctgttcttcctcaggagtaagaggagcaggctcctgcacagtgactacatgaacatgactccacgccgccccggacccacccgcaagcattaccagccctatgccccaccacgcgacttcgcagcctatcgctccagagtgaagttcagcagaagcgccgacgcccctgcctaccagcagggacagaaccaactgtacaacgagctgaacctgggcagacgggaagagtacgacgtgctggacaagcggagaggcagggaccctgagatgggcggaaagccccagcggagaaagaacccccaggaaggactgtataacgaactccagaaagacaagatggccgaagcctacagcgagatcggcatgaagggcgagcggagaagaggcaagggccacgatggcctgtaccagggcctgagcaccgccaccaaggacacctatgacgccctgcacatgcaggccctgcctccaaga

SEQ ID NO: 26229 - DNA, 1035 bp, synthetic construct
  source 1..1035: mol_type = other DNA
gaggacctgaagaacgtgttcccacctgaggtggccgtgttcgagcctagcgaggccgagatcagccacacccagaaagccaccctcgtgtgcctggctaccggcttctaccccgaccatgtggaactgtcttggtgggtcaacggcaaagaggtgcacagcggcgtgtctaccgacccccagccactgaaagaacagcccgccctgaacgacagccggtactgcctgagcagcagactgagagtgtccgccaccttctggcagaacccccggaaccacttcagatgccaggtgcagttctacggcctgagcgagaacgacgagtggacccaggacagagccaagcccgtgacccagatcgtgtctgccgaagcctggggcagagccgattgcatccccgaggacacattcttcccaagccccgagagcagctgcgacgtgaagctggtggaaaagagcttcgagacagacaccaacctgaacttccagaacctgagcgtgatcggcttcagaatcctgctgctgaaagtggccggctttaacctgctgatgaccctgcggctgtggtccagcaggagtaagaggagcaggctcctgcacagtgactacatgaacatgactccacgccgccccggacccacccgcaagcattaccagccctatgccccaccacgcgacttcgcagcctatcgctccagagtgaagttcagcagaagcgccgacgcccctgcctaccagcagggacagaaccaactgtacaacgagctgaacctgggcagacgggaagagtacgacgtgctggacaagcggagaggcagggaccctgagatgggcggaaagccccagcggagaaagaacccccaggaaggactgtataacgaactccagaaagacaagatggccgaagcctacagcgagatcggcatgaagggcgagcggagaagaggcaagggccacgatggcctgtaccagggcctgagcaccgccaccaaggacacctatgacgccctgcacatgcaggccctgcctccaaga

SEQ ID NO: 26230 - DNA, 1005 bp, synthetic construct
  source 1..1005: mol_type = other DNA
gaggacctgaagaacgtgttcccacctgaggtggccgtgttcgagcctagcgaggccgagatcagccacacccagaaagccaccctcgtgtgcctggctaccggcttctaccccgaccatgtggaactgtcttggtgggtcaacggcaaagaggtgcacagcggcgtgtctaccgacccccagccactgaaagaacagcccgccctgaacgacagccggtactgcctgagcagcagactgagagtgtccgccaccttctggcagaacccccggaaccacttcagatgccaggtgcagttctacggcctgagcgagaacgacgagtggacccaggacagagccaagcccgtgacccagatcgtgtctgccgaagcctggggcagagccgattgcgagagcagctgcgacgtgaagctggtggaaaagagcttcgagacagacaccaacctgaacttccagaacctgagcgtgatcggcttcagaatcctgctgctgaaagtggccggctttaacctgctgatgaccctgcggctgtggtccagcaggagtaagaggagcaggctcctgcacagtgactacatgaacatgactccacgccgccccggacccacccgcaagcattaccagccctatgccccaccacgcgacttcgcagcctatcgctccagagtgaagttcagcagaagcgccgacgcccctgcctaccagcagggacagaaccaactgtacaacgagctgaacctgggcagacgggaagagtacgacgtgctggacaagcggagaggcagggaccctgagatgggcggaaagccccagcggagaaagaacccccaggaaggactgtataacgaactccagaaagacaagatggccgaagcctacagcgagatcggcatgaagggcgagcggagaagaggcaagggccacgatggcctgtaccagggcctgagcaccgccaccaaggacacctatgacgccctgcacatgcaggccctgcctccaaga

SEQ ID NO: 26231 - DNA, 1032 bp, synthetic construct
  source 1..1032: mol_type = other DNA
gaggacctgaagaacgtgttcccacctgaggtggccgtgttcgagcctagcgaggccgagatcagccacacccagaaagccaccctcgtgtgcctggctaccggcttctaccccgaccatgtggaactgtcttggtgggtcaacggcaaagaggtgcacagcggcgtgtctaccgacccccagccactgaaagaacagcccgccctgaacgacagccggtactgcctgagcagcagactgagagtgtccgccaccttctggcagaacccccggaaccacttcagatgccaggtgcagttctacggcctgagcgagaacgacgagtggacccaggacagagccaagcccgtgacccagatcgtgtctgccgaagcctggggcagagccgattgccccgaggacacattcttcccaagccccgagagcagctgcgacgtgaagctggtggaaaagagcttcgagacagacaccaacctgaacttccagaacctgagcgtgatcggcttcagaatcctgctgctgaaagtggccggctttaacctgctgatgaccctgcggctgtggtccagcaggagtaagaggagcaggctcctgcacagtgactacatgaacatgactccacgccgccccggacccacccgcaagcattaccagccctatgccccaccacgcgacttcgcagcctatcgctccagagtgaagttcagcagaagcgccgacgcccctgcctaccagcagggacagaaccaactgtacaacgagctgaacctgggcagacgggaagagtacgacgtgctggacaagcggagaggcagggaccctgagatgggcggaaagccccagcggagaaagaacccccaggaaggactgtataacgaactccagaaagacaagatggccgaagcctacagcgagatcggcatgaagggcgagcggagaagaggcaagggccacgatggcctgtaccagggcctgagcaccgccaccaaggacacctatgacgccctgcacatgcaggccctgcctccaaga

SEQ ID NO: 26232 - DNA, 1062 bp, synthetic construct
  source 1..1062: mol_type = other DNA
gaggacctgaagaacgtgttcccacctgaggtggccgtgttcgagcctagcgaggccgagatcagccacacccagaaagccaccctcgtgtgcctggctaccggcttctaccccgaccatgtggaactgtcttggtgggtcaacggcaaagaggtgcacagcggcgtgtctaccgacccccagccactgaaagaacagcccgccctgaacgacagccggtactgcctgagcagcagactgagagtgtccgccaccttctggcagaacccccggaaccacttcagatgccaggtgcagttctacggcctgagcgagaacgacgagtggacccaggacagagccaagcccgtgacccagatcgtgtctgccgaagcctggggcagagccgattgcttcccacccatcaagaccgatgtgattacaatggaccccaaggacaactgctccaaggacgccaacgataccctgctgctccagctgaccaacaccagcgcctactacatgtacttgttgctgctgctgaagtccgtggtgtacttcgccatcatcacatgctgcctgctgcggagaaccgccttctgctgcaacggcgagaagtctaggagtaagaggagcaggctcctgcacagtgactacatgaacatgactccacgccgccccggacccacccgcaagcattaccagccctatgccccaccacgcgacttcgcagcctatcgctccagagtgaagttcagcagaagcgccgacgcccctgcctaccagcagggacagaaccaactgtacaacgagctgaacctgggcagacgggaagagtacgacgtgctggacaagcggagaggcagggaccctgagatgggcggaaagccccagcggagaaagaacccccaggaaggactgtataacgaactccagaaagacaagatggccgaagcctacagcgagatcggcatgaagggcgagcggagaagaggcaagggccacgatggcctgtaccagggcctgagcaccgccaccaaggacacctatgacgccctgcacatgcaggccctgcctccaaga

SEQ ID NO: 26233 - DNA, 1056 bp, synthetic construct
  source 1..1056: mol_type = other DNA
gaggacctgaagaacgtgttcccacctgaggtggccgtgttcgagcctagcgaggccgagatcagccacacccagaaagccaccctcgtgtgcctggctaccggcttctaccccgaccatgtggaactgtcttggtgggtcaacggcaaagaggtgcacagcggcgtgtctaccgacccccagccactgaaagaacagcccgccctgaacgacagccggtactgcctgagcagcagactgagagtgtccgccaccttctggcagaacccccggaaccacttcagatgccaggtgcagttctacggcctgagcgagaacgacgagtggacccaggacagagccaagcccgtgacccagatcgtgtctgccgaagcctggggcagagccgattgccccatcaagaccgatgtgattacaatggaccccaaggacaactgctccaaggacgccaacgataccctgctgctccagctgaccaacaccagcgcctactacatgtacttgttgctgctgctgaagtccgtggtgtacttcgccatcatcacatgctgcctgctgcggagaaccgccttctgctgcaacggcgagaagtctaggagtaagaggagcaggctcctgcacagtgactacatgaacatgactccacgccgccccggacccacccgcaagcattaccagccctatgccccaccacgcgacttcgcagcctatcgctccagagtgaagttcagcagaagcgccgacgcccctgcctaccagcagggacagaaccaactgtacaacgagctgaacctgggcagacgggaagagtacgacgtgctggacaagcggagaggcagggaccctgagatgggcggaaagccccagcggagaaagaacccccaggaaggactgtataacgaactccagaaagacaagatggccgaagcctacagcgagatcggcatgaagggcgagcggagaagaggcaagggccacgatggcctgtaccagggcctgagcaccgccaccaaggacacctatgacgccctgcacatgcaggccctgcctccaaga

SEQ ID NO: 26234 - DNA, 1032 bp, synthetic construct
  source 1..1032: mol_type = other DNA
gaggacctgaagaacgtgttcccacctgaggtggccgtgttcgagcctagcgaggccgagatcagccacacccagaaagccaccctcgtgtgcctggctaccggcttctaccccgaccatgtggaactgtcttggtgggtcaacggcaaagaggtgcacagcggcgtgtctaccgacccccagccactgaaagaacagcccgccctgaacgacagccggtactgcctgagcagcagactgagagtgtccgccaccttctggcagaacccccggaaccacttcagatgccaggtgcagttctacggcctgagcgagaacgacgagtggacccaggacagagccaagcccgtgacccagatcgtgtctgccgaagcctggggcagagccgattgcatggaccccaaggacaactgctccaaggacgccaacgataccctgctgctccagctgaccaacaccagcgcctactacatgtacttgttgctgctgctgaagtccgtggtgtacttcgccatcatcacatgctgcctgctgcggagaaccgccttctgctgcaacggcgagaagtctaggagtaagaggagcaggctcctgcacagtgactacatgaacatgactccacgccgccccggacccacccgcaagcattaccagccctatgccccaccacgcgacttcgcagcctatcgctccagagtgaagttcagcagaagcgccgacgcccctgcctaccagcagggacagaaccaactgtacaacgagctgaacctgggcagacgggaagagtacgacgtgctggacaagcggagaggcagggaccctgagatgggcggaaagccccagcggagaaagaacccccaggaaggactgtataacgaactccagaaagacaagatggccgaagcctacagcgagatcggcatgaagggcgagcggagaagaggcaagggccacgatggcctgtaccagggcctgagcaccgccaccaaggacacctatgacgccctgcacatgcaggccctgcctccaaga

SEQ ID NO: 26235 - DNA, 1056 bp, synthetic construct; identical to SEQ ID NO: 26233
  source 1..1056: mol_type = other DNA

SEQ ID NO: 26236 - DNA, 1014 bp, synthetic construct
  source 1..1014: mol_type = other DNA
gaggacctgaagaacgtgttcccacctgaggtggccgtgttcgagcctagcgaggccgagatcagccacacccagaaagccaccctcgtgtgcctggctaccggcttctaccccgaccatgtggaactgtcttggtgggtcaacggcaaagaggtgcacagcggcgtgtctaccgacccccagccactgaaagaacagcccgccctgaacgacagccggtactgcctgagcagcagactgagagtgtccgccaccttctggcagaacccccggaaccacttcagatgccaggtgcagttctacggcctgagcgagaacgacgagtggacccaggacagagccaagcccgtgacccagatcgtgtctgccgaagcctggggcagagccgattgctgctccaaggacgccaacgataccctgctgctccagctgaccaacaccagcgcctactacatgtacttgttgctgctgctgaagtccgtggtgtacttcgccatcatcacatgctgcctgctgcggagaaccgccttctgctgcaacggcgagaagtctaggagtaagaggagcaggctcctgcacagtgactacatgaacatgactccacgccgccccggacccacccgcaagcattaccagccctatgccccaccacgcgacttcgcagcctatcgctccagagtgaagttcagcagaagcgccgacgcccctgcctaccagcagggacagaaccaactgtacaacgagctgaacctgggcagacgggaagagtacgacgtgctggacaagcggagaggcagggaccctgagatgggcggaaagccccagcggagaaagaacccccaggaaggactgtataacgaactccagaaagacaagatggccgaagcctacagcgagatcggcatgaagggcgagcggagaagaggcaagggccacgatggcctgtaccagggcctgagcaccgccaccaaggacacctatgacgccctgcacatgcaggccctgcctccaaga

SEQ ID NO: 26237 - DNA, 1059 bp, synthetic construct
  source 1..1059: mol_type = other DNA
gaggacctgaagaacgtgttcccacctgaggtggccgtgttcgagcctagcgaggccgagatcagccacacccagaaagccaccctcgtgtgcctggctaccggcttctaccccgaccatgtggaactgtcttggtgggtcaacggcaaagaggtgcacagcggcgtgtctaccgacccccagccactgaaagaacagcccgccctgaacgacagccggtactgcctgagcagcagactgagagtgtccgccaccttctggcagaacccccggaaccacttcagatgccaggtgcagttctacggcctgagcgagaacgacgagtggacccaggacagagccaagcccgtgacccagatcgtgtctgccgaagcctggggcagagccgattgcgaagtgaaaaccgactccaccgaccacgtgaagcccaaagagacagagaacaccaagcagcccagcaagagctgccacaagcccaaggccatcgtgcacaccgagaaagtgaacatgatgagcctgaccgtgctgggcctgcggatgctgttcgccaaaaccgtggccgtgaacttcctgctgaccgccaagctgttcttcctcaggagtaagaggagcaggctcctgcacagtgactacatgaacatgactccacgccgccccggacccacccgcaagcattaccagccctatgccccaccacgcgacttcgcagcctatcgctccagagtgaagttcagcagaagcgccgacgcccctgcctaccagcagggacagaaccaactgtacaacgagctgaacctgggcagacgggaagagtacgacgtgctggacaagcggagaggcagggaccctgagatgggcggaaagccccagcggagaaagaacccccaggaaggactgtataacgaactccagaaagacaagatggccgaagcctacagcgagatcggcatgaagggcgagcggagaagaggcaagggccacgatggcctgtaccagggcctgagcaccgccaccaaggacacctatgacgccctgcacatgcaggccctgcctccaaga

SEQ ID NO: 26238 - DNA, 1038 bp, synthetic construct
  source 1..1038: mol_type = other DNA
gaggacctgaagaacgtgttcccacctgaggtggccgtgttcgagcctagcgaggccgagatcagccacacccagaaagccaccctcgtgtgcctggctaccggcttctaccccgaccatgtggaactgtcttggtgggtcaacggcaaagaggtgcacagcggcgtgtctaccgacccccagccactgaaagaacagcccgccctgaacgacagccggtactgcctgagcagcagactgagagtgtccgccaccttctggcagaacccccggaaccacttcagatgccaggtgcagttctacggcctgagcgagaacgacgagtggacccaggacagagccaagcccgtgacccagatcgtgtctgccgaagcctggggcagagccgattgcgaccacgtgaagcccaaagagacagagaacaccaagcagcccagcaagagctgccacaagcccaaggccatcgtgcacaccgagaaagtgaacatgatgagcctgaccgtgctgggcctgcggatgctgttcgccaaaaccgtggccgtgaacttcctgctgaccgccaagctgttcttcctcaggagtaagaggagcaggctcctgcacagtgactacatgaacatgactccacgccgccccggacccacccgcaagcattaccagccctatgccccaccacgcgacttcgcagcctatcgctccagagtgaagttcagcagaagcgccgacgcccctgcctaccagcagggacagaaccaactgtacaacgagctgaacctgggcagacgggaagagtacgacgtgctggacaagcggagaggcagggaccctgagatgggcggaaagccccagcggagaaagaacccccaggaaggactgtataacgaactccagaaagacaagatggccgaagcctacagcgagatcggcatgaagggcgagcggagaagaggcaagggccacgatggcctgtaccagggcctgagcaccgccaccaaggacacctatgacgccctgcacatgcaggccctgcctccaaga

SEQ ID NO: 26239 - DNA, 996 bp, synthetic construct
  source 1..996: mol_type = other DNA
gaggacctgaagaacgtgttcccacctgaggtggccgtgttcgagcctagcgaggccgagatcagccacacccagaaagccaccctcgtgtgcctggctaccggcttctaccccgaccatgtggaactgtcttggtgggtcaacggcaaagaggtgcacagcggcgtgtctaccgacccccagccactgaaagaacagcccgccctgaacgacagccggtactgcctgagcagcagactgagagtgtccgccaccttctggcagaacccccggaaccacttcagatgccaggtgcagttctacggcctgagcgagaacgacgagtggacccaggacagagccaagcccgtgaccatccccgaggacacattcttcccaagccccgagagcagctgcgacgtgaagctggtggaaaagagcttcgagacagacaccaacctgaacttccagaacctgagcgtgatcggcttcagaatcctgctgctgaaagtggccggctttaacctgctgatgaccctgcggctgtggtccagcaggagtaagaggagcaggctcctgcacagtgactacatgaacatgactccacgccgccccggacccacccgcaagcattaccagccctatgccccaccacgcgacttcgcagcctatcgctccagagtgaagttcagcagaagcgccgacgcccctgcctaccagcagggacagaaccaactgtacaacgagctgaacctgggcagacgggaagagtacgacgtgctggacaagcggagaggcagggaccctgagatgggcggaaagccccagcggagaaagaacccccaggaaggactgtataacgaactccagaaagacaagatggccgaagcctacagcgagatcggcatgaagggcgagcggagaagaggcaagggccacgatggcctgtaccagggcctgagcaccgccaccaaggacacctatgacgccctgcacatgcaggccctgcctccaaga

SEQ ID NO: 26240 - DNA, 966 bp, synthetic construct
  source 1..966: mol_type = other DNA
gaggacctgaagaacgtgttcccacctgaggtggccgtgttcgagcctagcgaggccgagatcagccacacccagaaagccaccctcgtgtgcctggctaccggcttctaccccgaccatgtggaactgtcttggtgggtcaacggcaaagaggtgcacagcggcgtgtctaccgacccccagccactgaaagaacagcccgccctgaacgacagccggtactgcctgagcagcagactgagagtgtccgccaccttctggcagaacccccggaaccacttcagatgccaggtgcagttctacggcctgagcgagaacgacgagtggacccaggacagagccaagcccgtgaccgagagcagctgcgacgtgaagctggtggaaaagagcttcgagacagacaccaacctgaacttccagaacctgagcgtgatcggcttcagaatcctgctgctgaaagtggccggctttaacctgctgatgaccctgcggctgtggtccagcaggagtaagaggagcaggctcctgcacagtgactacatgaacatgactccacgccgccccggacccacccgcaagcattaccagccctatgccccaccacgcgacttcgcagcctatcgctccagagtgaagttcagcagaagcgccgacgcccctgcctaccagcagggacagaaccaactgtacaacgagctgaacctgggcagacgggaagagtacgacgtgctggacaagcggagaggcagggaccctgagatgggcggaaagccccagcggagaaagaacccccaggaaggactgtataacgaactccagaaagacaagatggccgaagcctacagcgagatcggcatgaagggcgagcggagaagaggcaagggccacgatggcctgtaccagggcctgagcaccgccaccaaggacacctatgacgccctgcacatgcaggccctgcctccaaga

SEQ ID NO: 26241 - DNA, 993 bp, synthetic construct
  source 1..993: mol_type = other DNA
gaggacctgaagaacgtgttcccacctgaggtggccgtgttcgagcctagcgaggccgagatcagccacacccagaaagccaccctcgtgtgcctggctaccggcttctaccccgaccatgtggaactgtcttggtgggtcaacggcaaagaggtgcacagcggcgtgtctaccgacccccagccactgaaagaacagcccgccctgaacgacagccggtactgcctgagcagcagactgagagtgtccgccaccttctggcagaacccccggaaccacttcagatgccaggtgcagttctacggcctgagcgagaacgacgagtggacccaggacagagccaagcccgtgacccccgaggacacattcttcccaagccccgagagcagctgcgacgtgaagctggtggaaaagagcttcgagacagacaccaacctgaacttccagaacctgagcgtgatcggcttcagaatcctgctgctgaaagtggccggctttaacctgctgatgaccctgcggctgtggtccagcaggagtaagaggagcaggctcctgcacagtgactacatgaacatgactccacgccgccccggacccacccgcaagcattaccagccctatgccccaccacgcgacttcgcagcctatcgctccagagtgaagttcagcagaagcgccgacgcccctgcctaccagcagggacagaaccaactgtacaacgagctgaacctgggcagacgggaagagtacgacgtgctggacaagcggagaggcagggaccctgagatgggcggaaagccccagcggagaaagaacccccaggaaggactgtataacgaactccagaaagacaagatggccgaagcctacagcgagatcggcatgaagggcgagcggagaagaggcaagggccacgatggcctgtaccagggcctgagcaccgccaccaaggacacctatgacgccctgcacatgcaggccctgcctccaaga

SEQ ID NO: 26242 - DNA, 1023 bp, synthetic construct
  source 1..1023: mol_type = other DNA
gaggacctgaagaacgtgttcccacctgaggtggccgtgttcgagcctagcgaggccgagatcagccacacccagaaagccaccctcgtgtgcctggctaccggcttctaccccgaccatgtggaactgtcttggtgggtcaacggcaaagaggtgcacagcggcgtgtctaccgacccccagccactgaaagaacagcccgccctgaacgacagccggtactgcctgagcagcagactgagagtgtccgccaccttctggcagaacccccggaaccacttcagatgccaggtgcagttctacggcctgagcgagaacgacgagtggacccaggacagagccaagcccgtgaccttcccacccatcaagaccgatgtgattacaatggaccccaaggacaactgctccaaggacgccaacgataccctgctgctccagctgaccaacaccagcgcctactacatgtacttgttgctgctgctgaagtccgtggtgtacttcgccatcatcacatgctgcctgctgcggagaaccgccttctgctgcaacggcgagaagtctaggagtaagaggagcaggctcctgcacagtgactacatgaacatgactccacgccgccccggacccacccgcaagcattaccagccctatgccccaccacgcgacttcgcagcctatcgctccagagtgaagttcagcagaagcgccgacgcccctgcctaccagcagggacagaaccaactgtacaacgagctgaacctgggcagacgggaagagtacgacgtgctggacaagcggagaggcagggaccctgagatgggcggaaagccccagcggagaaagaacccccaggaaggactgtataacgaactccagaaagacaagatggccgaagcctacagcgagatcggcatgaagggcgagcggagaagaggcaagggccacgatggcctgtaccagggcctgagcaccgccaccaaggacacctatgacgccctgcacatgcaggccctgcctccaaga

SEQ ID NO: 26243 - DNA, 1017 bp, synthetic construct
  source 1..1017: mol_type = other DNA
gaggacctgaagaacgtgttcccacctgaggtggccgtgttcgagcctagcgaggccgagatcagccacacccagaaagccaccctcgtgtgcctggctaccggcttctaccccgaccatgtggaactgtcttggtgggtcaacggcaaagaggtgcacagcggcgtgtctaccgacccccagccactgaaagaacagcccgccctgaacgacagccggtactgcctgagcagcagactgagagtgtccgccaccttctggcagaacccccggaaccacttcagatgccaggtgcagttctacggcctgagcgagaacgacgagtggacccaggacagagccaagcccgtgacccccatcaagaccgatgtgattacaatggaccccaaggacaactgctccaaggacgccaacgataccctgctgctccagctgaccaacaccagcgcctactacatgtacttgttgctgctgctgaagtccgtggtgtacttcgccatcatcacatgctgcctgctgcggagaaccgccttctgctgcaacggcgagaagtctaggagtaagaggagcaggctcctgcacagtgactacatgaacatgactccacgccgccccggacccacccgcaagcattaccagccctatgccccaccacgcgacttcgcagcctatcgctccagagtgaagttcagcagaagcgccgacgcccctgcctaccagcagggacagaaccaactgtacaacgagctgaacctgggcagacgggaagagtacgacgtgctggacaagcggagaggcagggaccctgagatgggcggaaagccccagcggagaaagaacccccaggaaggactgtataacgaactccagaaagacaagatggccgaagcctacagcgagatcggcatgaagggcgagcggagaagaggcaagggccacgatggcctgtaccagggcctgagcaccgccaccaaggacacctatgacgccctgcacatgcaggccctgcctccaaga

SEQ ID NO: 26244 - DNA, 993 bp, synthetic construct
  source 1..993: mol_type = other DNA
gaggacctgaagaacgtgttcccacctgaggtggccgtgttcgagcctagcgaggccgagatcagccacacccagaaagccaccctcgtgtgcctggctaccggcttctaccccgaccatgtggaactgtcttggtgggtcaacggcaaagaggtgcacagcggcgtgtctaccgacccccagccactgaaagaacagcccgccctgaacgacagccggtactgcctgagcagcagactgagagtgtccgccaccttctggcagaacccccggaaccacttcagatgccaggtgcagttctacggcctgagcgagaacgacgagtggacccaggacagagccaagcccgtgaccatggaccccaaggacaactgctccaaggacgccaacgataccctgctgctccagctgaccaacaccagcgcctactacatgtacttgttgctgctgctgaagtccgtggtgtacttcgccatcatcacatgctgcctgctgcggagaaccgccttctgctgcaacggcgagaagtctaggagtaagaggagcaggctcctgcacagtgactacatgaacatgactccacgccgccccggacccacccgcaagcattaccagccctatgccccaccacgcgacttcgcagcctatcgctccagagtgaagttcagcagaagcgccgacgcccctgcctaccagcagggacagaaccaactgtacaacgagctgaacctgggcagacgggaagagtacgacgtgctggacaagcggagaggcagggaccctgagatgggcggaaagccccagcggagaaagaacccccaggaaggactgtataacgaactccagaaagacaagatggccgaagcctacagcgagatcggcatgaagggcgagcggagaagaggcaagggccacgatggcctgtaccagggcctgagcaccgccaccaaggacacctatgacgccctgcacatgcaggccctgcctccaaga

SEQ ID NO: 26245 - DNA, 1017 bp, synthetic construct; identical to SEQ ID NO: 26243
  source 1..1017: mol_type = other DNA

SEQ ID NO: 26246 - DNA, 975 bp, synthetic construct
  source 1..975: mol_type = other DNA
gaggacctgaagaacgtgttcccacctgaggtggccgtgttcgagcctagcgaggccgagatcagccacacccagaaagccaccctcgtgtgcctggctaccggcttctaccccgaccatgtggaactgtcttggtgggtcaacggcaaagaggtgcacagcggcgtgtctaccgacccccagccactgaaagaacagcccgccctgaacgacagccggtactgcctgagcagcagactgagagtgtccgccaccttctggcagaacccccggaaccacttcagatgccaggtgcagttctacggcctgagcgagaacgacgagtggacccaggacagagccaagcccgtgacctgctccaaggacgccaacgataccctgctgctccagctgaccaacaccagcgcctactacatgtacttgttgctgctgctgaagtccgtggtgtacttcgccatcatcacatgctgcctgctgcggagaaccgccttctgctgcaacggcgagaagtctaggagtaagaggagcaggctcctgcacagtgactacatgaacatgactccacgccgccccggacccacccgcaagcattaccagccctatgccccaccacgcgacttcgcagcctatcgctccagagtgaagttcagcagaagcgccgacgcccctgcctaccagcagggacagaaccaactgtacaacgagctgaacctgggcagacgggaagagtacgacgtgctggacaagcggagaggcagggaccctgagatgggcggaaagccccagcggagaaagaacccccaggaaggactgtataacgaactccagaaagacaagatggccgaagcctacagcgagatcggcatgaagggcgagcggagaagaggcaagggccacgatggcctgtaccagggcctgagcaccgccaccaaggacacctatgacgccctgcacatgcaggccctgcctccaaga

SEQ ID NO: 26247 - DNA, 1020 bp, synthetic construct
  source 1..1020: mol_type = other DNA
gaggacctgaagaacgtgttcccacctgaggtggccgtgttcgagcctagcgaggccgagatcagccacacccagaaagccaccctcgtgtgcctggctaccggcttctaccccgaccatgtggaactgtcttggtgggtcaacggcaaagaggtgcacagcggcgtgtctaccgacccccagccactgaaagaacagcccgccctgaacgacagccggtactgcctgagcagcagactgagagtgtccgccaccttctggcagaacccccggaaccacttcagatgccaggtgcagttctacggcctgagcgagaacgacgagtggacccaggacagagccaagcccgtgaccgaagtgaaaaccgactccaccgaccacgtgaagcccaaagagacagagaacaccaagcagcccagcaagagctgccacaagcccaaggccatcgtgcacaccgagaaagtgaacatgatgagcctgaccgtgctgggcctgcggatgctgttcgccaaaaccgtggccgtgaacttcctgctgaccgccaagctgttcttcctcaggagtaagaggagcaggctcctgcacagtgactacatgaacatgactccacgccgccccggacccacccgcaagcattaccagccctatgccccaccacgcgacttcgcagcctatcgctccagagtgaagttcagcagaagcgccgacgcccctgcctaccagcagggacagaaccaactgtacaacgagctgaacctgggcagacgggaagagtacgacgtgctggacaagcggagaggcagggaccctgagatgggcggaaagccccagcggagaaagaacccccaggaaggactgtataacgaactccagaaagacaagatggccgaagcctacagcgagatcggcatgaagggcgagcggagaagaggcaagggccacgatggcctgtaccagggcctgagcaccgccaccaaggacacctatgacgccctgcacatgcaggccctgcctccaaga

SEQ ID NO: 26248 - DNA, 999 bp, synthetic construct
  source 1..999: mol_type = other DNA
gaggacctgaagaacgtgttcccacctgaggtggccgtgttcgagcctagcgaggccgagatcagccacacccagaaagccaccctcgtgtgcctggctaccggcttctaccccgaccatgtggaactgtcttggtgggtcaacggcaaagaggtgcacagcggcgtgtctaccgacccccagccactgaaagaacagcccgccctgaacgacagccggtactgcctgagcagcagactgagagtgtccgccaccttctggcagaacccccggaaccacttcagatgccaggtgcagttctacggcctgagcgagaacgacgagtggacccaggacagagccaagcccgtgaccgaccacgtgaagcccaaagagacagagaacaccaagcagcccagcaagagctgccacaagcccaaggccatcgtgcacaccgagaaagtgaacatgatgagcctgaccgtgctgggcctgcggatgctgttcgccaaaaccgtggccgtgaacttcctgctgaccgccaagctgttcttcctcaggagtaagaggagcaggctcctgcacagtgactacatgaacatgactccacgccgccccggacccacccgcaagcattaccagccctatgccccaccacgcgacttcgcagcctatcgctccagagtgaagttcagcagaagcgccgacgcccctgcctaccagcagggacagaaccaactgtacaacgagctgaacctgggcagacgggaagagtacgacgtgctggacaagcggagaggcagggaccctgagatgggcggaaagccccagcggagaaagaacccccaggaaggactgtataacgaactccagaaagacaagatggccgaagcctacagcgagatcggcatgaagggcgagcggagaagaggcaagggccacgatggcctgtaccagggcctgagcaccgccaccaaggacacctatgacgccctgcacatgcaggccctgcctccaaga

SEQ ID NO: 26249 - DNA, 1020 bp, synthetic construct; identical to SEQ ID NO: 26209
  source 1..1020: mol_type = other DNA

SEQ ID NO: 26250 - DNA, 990 bp, synthetic construct; identical to SEQ ID NO: 26210
  source 1..990: mol_type = other DNA

SEQ ID NO: 26251 - DNA, 1017 bp, synthetic construct; identical to SEQ ID NO: 26211
  source 1..1017: mol_type = other DNA

SEQ ID NO: 26252 - DNA, 1047 bp, synthetic construct; identical to SEQ ID NO: 26212
  source 1..1047: mol_type = other DNA

SEQ ID NO: 26253 - DNA, 1041 bp, synthetic construct; identical to SEQ ID NO: 26213
  source 1..1041: mol_type = other DNA

SEQ ID NO: 26254 - DNA, 1017 bp, synthetic construct; identical to SEQ ID NO: 26214
  source 1..1017: mol_type = other DNA

SEQ ID NO: 26255 - DNA, 1041 bp, synthetic construct; identical to SEQ ID NO: 26213
  source 1..1041: mol_type = other DNA

SEQ ID NO: 26256 - DNA, 999 bp, synthetic construct; identical to SEQ ID NO: 26216
  source 1..999: mol_type = other DNA

SEQ ID NO: 26257 - DNA, 1044 bp, synthetic construct; identical to SEQ ID NO: 26217
  source 1..1044: mol_type = other DNA

SEQ ID NO: 26258 - DNA, 1023 bp, synthetic construct; identical to SEQ ID NO: 26218
  source 1..1023: mol_type = other DNA

SEQ ID NO: 26259 - DNA, 972 bp, synthetic construct
  source 1..972: mol_type = other DNA
cctgaggtggccgtgttcgagcctagcgaggccgagatcagccacacccagaaagccaccctcgtgtgcctggctaccggcttctaccccgaccatgtggaactgtcttggtgggtcaacggcaaagaggtgcacagcggcgtgtctaccgacccccagccactgaaagaacagcccgccctgaacgacagccggtactgcctgagcagcagactgagagtgtccgccaccttctggcagaacccccggaaccacttcagatgccaggtgcagttctacggcctgagcgagaacgacgagtggacccaggacagagccaagcccgtgaccatccccgaggacacattcttcccaagccccgagagcagctgcgacgtgaagctggtggaaaagagcttcgagacagacaccaacctgaacttccagaacctgagcgtgatcggcttcagaatcctgctgctgaaagtggccggctttaacctgctgatgaccctgcggctgtggtccagcaggagtaagaggagcaggctcctgcacagtgactacatgaacatgactccacgccgccccggacccacccgcaagcattaccagccctatgccccaccacgcgacttcgcagcctatcgctccagagtgaagttcagcagaagcgccgacgcccctgcctaccagcagggacagaaccaactgtacaacgagctgaacctgggcagacgggaagagtacgacgtgctggacaagcggagaggcagggaccctgagatgggcggaaagccccagcggagaaagaacccccaggaaggactgtataacgaactccagaaagacaagatggccgaagcctacagcgagatcggcatgaagggcgagcggagaagaggcaagggccacgatggcctgtaccagggcctgagcaccgccaccaaggacacctatgacgccctgcacatgcaggccctgcctccaaga

SEQ ID NO: 26260 - DNA, 942 bp, synthetic construct
  source 1..942: mol_type = other DNA
cctgaggtggccgtgttcgagcctagcgaggccgagatcagccacacccagaaagccaccctcgtgtgcctggctaccggcttctaccccgaccatgtggaactgtcttggtgggtcaacggcaaagaggtgcacagcggcgtgtctaccgacccccagccactgaaagaacagcccgccctgaacgacagccggtactgcctgagcagcagactgagagtgtccgccaccttctggcagaacccccggaaccacttcagatgccaggtgcagttctacggcctgagcgagaacgacgagtggacccaggacagagccaagcccgtgaccgagagcagctgcgacgtgaagctggtggaaaagagcttcgagacagacaccaacctgaacttccagaacctgagcgtgatcggcttcagaatcctgctgctgaaagtggccggctttaacctgctgatgaccctgcggctgtggtccagcaggagtaagaggagcaggctcctgcacagtgactacatgaacatgactccacgccgccccggacccacccgcaagcattaccagccctatgccccaccacgcgacttcgcagcctatcgctccagagtgaagttcagcagaagcgccgacgcccctgcctaccagcagggacagaaccaactgtacaacgagctgaacctgggcagacgggaagagtacgacgtgctggacaagcggagaggcagggaccctgagatgggcggaaagccccagcggagaaagaacccccaggaaggactgtataacgaactccagaaagacaagatggccgaagcctacagcgagatcggcatgaagggcgagcggagaagaggcaagggccacgatggcctgtaccagggcctgagcaccgccaccaaggacacctatgacgccctgcacatgcaggccctgcctccaaga

SEQ ID NO: 26261 - DNA, 969 bp, synthetic construct
  source 1..969: mol_type = other DNA
cctgaggtggccgtgttcgagcctagcgaggccgagatcagccacacccagaaagccaccctcgtgtgcctggctaccggcttctaccccgaccatgtggaactgtcttggtgggtcaacggcaaagaggtgcacagcggcgtgtctaccgacccccagccactgaaagaacagcccgccctgaacgacagccggtactgcctgagcagcagactgagagtgtccgccaccttctggcagaacccccggaaccacttcagatgccaggtgcagttctacggcctgagcgagaacgacgagtggacccaggacagagccaagcccgtgacccccgaggacacattcttcccaagccccgagagcagctgcgacgtgaagctggtggaaaagagcttcgagacagacaccaacctgaacttccagaacctgagcgtgatcggcttcagaatcctgctgctgaaagtggccggctttaacctgctgatgaccctgcggctgtggtccagcaggagtaagaggagcaggctcctgcacagtgactacatgaacatgactccacgccgccccggacccacccgcaagcattaccagccctatgccccaccacgcgacttcgcagcctatcgctccagagtgaagttcagcagaagcgccgacgcccctgcctaccagcagggacagaaccaactgtacaacgagctgaacctgggcagacgggaagagtacgacgtgctggacaagcggagaggcagggaccctgagatgggcggaaagccccagcggagaaagaacccccaggaaggactgtataacgaactccagaaagacaagatggccgaagcctacagcgagatcggcatgaagggcgagcggagaagaggcaagggccacgatggcctgtaccagggcctgagcaccgccaccaaggacacctatgacgccctgcacatgcaggccctgcctccaaga

SEQ ID NO: 26262 - DNA, 999 bp, synthetic construct
  source 1..999: mol_type = other DNA
cctgaggtggccgtgttcgagcctagcgaggccgagatcagccacacccagaaagccaccctcgtgtgcctggctaccggcttctaccccgaccatgtggaactgtcttggtgggtcaacggcaaagaggtgcacagcggcgtgtctaccgacccccagccactgaaagaacagcccgccctgaacgacagccggtactgcctgagcagcagactgagagtgtccgccaccttctggcagaacccccggaaccacttcagatgccaggtgcagttctacggcctgagcgagaacgacgagtggacccaggacagagccaagcccgtgaccttcccacccatcaagaccgatgtgattacaatggaccccaaggacaactgctccaaggacgccaacgataccctgctgctccagctgaccaacaccagcgcctactacatgtacttgttgctgctgctgaagtccgtggtgtacttcgccatcatcacatgctgcctgctgcggagaaccgccttctgctgcaacggcgagaagtctaggagtaagaggagcaggctcctgcacagtgactacatgaacatgactccacgccgccccggacccacccgcaagcattaccagccctatgccccaccacgcgacttcgcagcctatcgctccagagtgaagttcagcagaagcgccgacgcccctgcctaccagcagggacagaaccaactgtacaacgagctgaacctgggcagacgggaagagtacgacgtgctggacaagcggagaggcagggaccctgagatgggcggaaagccccagcggagaaagaacccccaggaaggactgtataacgaactccagaaagacaagatggccgaagcctacagcgagatcggcatgaagggcgagcggagaagaggcaagggccacgatggcctgtaccagggcctgagcaccgccaccaaggacacctatgacgccctgcacatgcaggccctgcctccaaga

SEQ ID NO: 26263 - DNA, 993 bp, synthetic construct
  source 1..993: mol_type = other DNA
cctgaggtggccgtgttcgagcctagcgaggccgagatcagccacacccagaaagccaccctcgtgtgcctggctaccggcttctaccccgaccatgtggaactgtcttggtgggtcaacggcaaagaggtgcacagcggcgtgtctaccgacccccagccactgaaagaacagcccgccctgaacgacagccggtactgcctgagcagcagactgagagtgtccgccaccttctggcagaacccccggaaccacttcagatgccaggtgcagttctacggcctgagcgagaacgacgagtggacccaggacagagccaagcccgtgacccccatcaagaccgatgtgattacaatggaccccaaggacaactgctccaaggacgccaacgataccctgctgctccagctgaccaacaccagcgcctactacatgtacttgttgctgctgctgaagtccgtggtgtacttcgccatcatcacatgctgcctgctgcggagaaccgccttctgctgcaacggcgagaagtctaggagtaagaggagcaggctcctgcacagtgactacatgaacatgactccacgccgccccggacccacccgcaagcattaccagccctatgccccaccacgcgacttcgcagcctatcgctccagagtgaagttcagcagaagcgccgacgcccctgcctaccagcagggacagaaccaactgtacaacgagctgaacctgggcagacgggaagagtacgacgtgctggacaagcggagaggcagggaccctgagatgggcggaaagccccagcggagaaagaacccccaggaaggactgtataacgaactccagaaagacaagatggccgaagcctacagcgagatcggcatgaagggcgagcggagaagaggcaagggccacgatggcctgtaccagggcctgagcaccgccaccaaggacacctatgacgccctgcacatgcaggccctgcctccaaga

SEQ ID NO: 26264 - DNA, 969 bp, synthetic construct
  source 1..969: mol_type = other DNA
cctgaggtggccgtgttcgagcctagcgaggccgagatcagccacacccagaaagccaccctcgtgtgcctggctaccggcttctaccccgaccatgtggaactgtcttggtgggtcaacggcaaagaggtgcacagcggcgtgtctaccgacccccagccactgaaagaacagcccgccctgaacgacagccggtactgcctgagcagcagactgagagtgtccgccaccttctggcagaacccccggaaccacttcagatgccaggtgcagttctacggcctgagcgagaacgacgagtggacccaggacagagccaagcccgtgaccatggaccccaaggacaactgctccaaggacgccaacgataccctgctgctccagctgaccaacaccagcgcctactacatgtacttgttgctgctgctgaagtccgtggtgtacttcgccatcatcacatgctgcctgctgcggagaaccgccttctgctgcaacggcgagaagtctaggagtaagaggagcaggctcctgcacagtgactacatgaacatgactccacgccgccccggacccacccgcaagcattaccagccctatgccccaccacgcgacttcgcagcctatcgctccagagtgaagttcagcagaagcgccgacgcccctgcctaccagcagggacagaaccaactgtacaacgagctgaacctgggcagacgggaagagtacgacgtgctggacaagcggagaggcagggaccctgagatgggcggaaagccccagcggagaaagaacccccaggaaggactgtataacgaactccagaaagacaagatggccgaagcctacagcgagatcggcatgaagggcgagcggagaagaggcaagggccacgatggcctgtaccagggcctgagcaccgccaccaaggacacctatgacgccctgcacatgcaggccctgcctccaaga

SEQ ID NO: 26265 - DNA, 993 bp, synthetic construct; identical to SEQ ID NO: 26263
  source 1..993: mol_type = other DNA

SEQ ID NO: 26266 - DNA, 951 bp, synthetic construct
  source 1..951: mol_type = other DNA
cctgaggtggccgtgttcgagcctagcgaggccgagatcagccacacccagaaagccaccctcgtgtgcctggctaccggcttctaccccgaccatgtggaactgtcttggtgggtcaacggcaaagaggtgcacagcggcgtgtctaccgacccccagccactgaaagaacagcccgccctgaacgacagccggtactgcctgagcagcagactgagagtgtccgccaccttctggcagaacccccggaaccacttcagatgccaggtgcagttctacggcctgagcgagaacgacgagtggacccaggacagagccaagcccgtgacctgctccaaggacgccaacgataccctgctgctccagctgaccaacaccagcgcctactacatgtacttgttgctgctgctgaagtccgtggtgtacttcgccatcatcacatgctgcctgctgcggagaaccgccttctgctgcaacggcgagaagtctaggagtaagaggagcaggctcctgcacagtgactacatgaacatgactccacgccgccccggacccacccgcaagcattaccagccctatgccccaccacgcgacttcgcagcctatcgctccagagtgaagttcagcagaagcgccgacgcccctgcctaccagcagggacagaaccaactgtacaacgagctgaacctgggcagacgggaagagtacgacgtgctggacaagcggagaggcagggaccctgagatgggcggaaagccccagcggagaaagaacccccaggaaggactgtataacgaactccagaaagacaagatggccgaagcctacagcgagatcggcatgaagggcgagcggagaagaggcaagggccacgatggcctgtaccagggcctgagcaccgccaccaaggacacctatgacgccctgcacatgcaggccctgcctccaaga

SEQ ID NO: 26267 - DNA, 996 bp, synthetic construct
  source 1..996: mol_type = other DNA
cctgaggtggccgtgttcgagcctagcgaggccgagatcagccacacccagaaagccaccctcgtgtgcctggctaccggcttctaccccgaccatgtggaactgtcttggtgggtcaacggcaaagaggtgcacagcggcgtgtctaccgacccccagccactgaaagaacagcccgccctgaacgacagccggtactgcctgagcagcagactgagagtgtccgccaccttctggcagaacccccggaaccacttcagatgccaggtgcagttctacggcctgagcgagaacgacgagtggacccaggacagagccaagcccgtgaccgaagtgaaaaccgactccaccgaccacgtgaagcccaaagagacagagaacaccaagcagcccagcaagagctgccacaagcccaaggccatcgtgcacaccgagaaagtgaacatgatgagcctgaccgtgctgggcctgcggatgctgttcgccaaaaccgtggccgtgaacttcctgctgaccgccaagctgttcttcctcaggagtaagaggagcaggctcctgcacagtgactacatgaacatgactccacgccgccccggacccacccgcaagcattaccagccctatgccccaccacgcgacttcgcagcctatcgctccagagtgaagttcagcagaagcgccgacgcccctgcctaccagcagggacagaaccaactgtacaacgagctgaacctgggcagacgggaagagtacgacgtgctggacaagcggagaggcagggaccctgagatgggcggaaagccccagcggagaaagaacccccaggaaggactgtataacgaactccagaaagacaagatggccgaagcctacagcgagatcggcatgaagggcgagcggagaagaggcaagggccacgatggcctgtaccagggcctgagcaccgccaccaaggacacctatgacgccctgcacatgcaggccctgcctccaaga

SEQ ID NO: 26268 - DNA, 975 bp, synthetic construct
  source 1..975: mol_type = other DNA
cctgaggtggccgtgttcgagcctagcgaggccgagatcagccacacccagaaagccaccctcgtgtgcctggctaccggcttctaccccgaccatgtggaactgtcttggtgggtcaacggcaaagaggtgcacagcggcgtgtctaccgacccccagccactgaaagaacagcccgccctgaacgacagccggtactgcctgagcagcagactgagagtgtccgccaccttctggcagaacccccggaaccacttcagatgccaggtgcagttctacggcctgagcgagaacgacgagtggacccaggacagagccaagcccgtgaccgaccacgtgaagcccaaagagacagagaacaccaagcagcccagcaagagctgccacaagcccaaggccatcgtgcacaccgagaaagtgaacatgatgagcctgaccgtgctgggcctgcggatgctgttcgccaaaaccgtggccgtgaacttcctgctgaccgccaagctgttcttcctcaggagtaagaggagcaggctcctgcacagtgactacatgaacatgactccacgccgccccggacccacccgcaagcattaccagccctatgccccaccacgcgacttcgcagcctatcgctccagagtgaagttcagcagaagcgccgacgcccctgcctaccagcagggacagaaccaactgtacaacgagctgaacctgggcagacgggaagagtacgacgtgctggacaagcggagaggcagggaccctgagatgggcggaaagccccagcggagaaagaacccccaggaaggactgtataacgaactccagaaagacaagatggccgaagcctacagcgagatcggcatgaagggcgagcggagaagaggcaagggccacgatggcctgtaccagggcctgagcaccgccaccaaggacacctatgacgccctgcacatgcaggccctgcctccaaga

SEQ ID NO: 26269 - DNA, 954 bp, synthetic construct
  source 1..954: mol_type = other DNA
gacaagcagctggacgccgacgtgtcccccaagcctaccatcttcctgccctctatcgccgagacaaagctccagaaggccggcacctacctgtgcctgctggaaaagttcttcccagatgtgattaagatccactggcaggaaaagaagtccaacaccatcctgggcagccaggaaggcaacaccatgaagaccaacgacacctacatgaagttcagctggctgaccgtgcccgagaagtccctggacaaagaacacagatgcatcgtgcggcacgaaaacaacaagaacggcgtggaccaggaaatcatcatccccgaggacacattcttcccaagccccgagagcagctgcgacgtgaagctggtggaaaagagcttcgagacagacaccaacctgaacttccagaacctgagcgtgatcggcttcagaatcctgctgctgaaagtggccggctttaacctgctgatgaccctgcggctgtggtccagcaggagtaagaggagcaggctcctgcacagtgactacatgaacatgactccacgccgccccggacccacccgcaagcattaccagccctatgccccaccacgcgacttcgcagcctatcgctccagagtgaagttcagcagaagcgccgacgcccctgcctaccagcagggacagaaccaactgtacaacgagctgaacctgggcagacgggaagagtacgacgtgctggacaagcggagaggcagggaccctgagatgggcggaaagccccagcggagaaagaacccccaggaaggactgtataacgaactccagaaagacaagatggccgaagcctacagcgagatcggcatgaagggcgagcggagaagaggcaagggccacgatggcctgtaccagggcctgagcaccgccaccaaggacacctatgacgccctgcacatgcaggccctgcctccaaga

SEQ ID NO: 26270 - DNA, 924 bp, synthetic construct
  source 1..924: mol_type = other DNA
gacaagcagctggacgccgacgtgtcccccaagcctaccatcttcctgccctctatcgccgagacaaagctccagaaggccggcacctacctgtgcctgctggaaaagttcttcccagatgtgattaagatccactggcaggaaaagaagtccaacaccatcctgggcagccaggaaggcaacaccatgaagaccaacgacacctacatgaagttcagctggctgaccgtgcccgagaagtccctggacaaagaacacagatgcatcgtgcggcacgaaaacaacaagaacggcgtggaccaggaaatcatcgagagcagctgcgacgtgaagctggtggaaaagagcttcgagacagacaccaacctgaacttccagaacctgagcgtgatcggcttcagaatcctgctgctgaaagtggccggctttaacctgctgatgaccctgcggctgtggtccagcaggagtaagaggagcaggctcctgcacagtgactacatgaacatgactccacgccgccccggacccacccgcaagcattaccagccctatgccccaccacgcgacttcgcagcctatcgctccagagtgaagttcagcagaagcgccgacgcccctgcctaccagcagggacagaaccaactgtacaacgagctgaacctgggcagacgggaagagtacgacgtgctggacaagcggagaggcagggaccctgagatgggcggaaagccccagcggagaaagaacccccaggaaggactgtataacgaactccagaaagacaagatggccgaagcctacagcgagatcggcatgaagggcgagcggagaagaggcaagggccacgatggcctgtaccagggcctgagcaccgccaccaaggacacctatgacgccctgcacatgcaggccctgcctccaaga

SEQ ID NO: 26271 - DNA, 951 bp, synthetic construct
  source 1..951: mol_type = other DNA
gacaagcagctggacgccgacgtgtcccccaagcctaccatcttcctgccctctatcgccgagacaaagctccagaaggccggcacctacctgtgcctgctggaaaagttcttcccagatgtgattaagatccactggcaggaaaagaagtccaacaccatcctgggcagccaggaaggcaacaccatgaagaccaacgacacctacatgaagttcagctggctgaccgtgcccgagaagtccctggacaaagaacacagatgcatcgtgcggcacgaaaacaacaagaacggcgtggaccaggaaatcatccccgaggacacattcttcccaagccccgagagcagctgcgacgtgaagctggtggaaaagagcttcgagacagacaccaacctgaacttccagaacctgagcgtgatcggcttcagaatcctgctgctgaaagtggccggctttaacctgctgatgaccctgcggctgtggtccagcaggagtaagaggagcaggctcctgcacagtgactacatgaacatgactccacgccgccccggacccacccgcaagcattaccagccctatgccccaccacgcgacttcgcagcctatcgctccagagtgaagttcagcagaagcgccgacgcccctgcctaccagcagggacagaaccaactgtacaacgagctgaacctgggcagacgggaagagtacgacgtgctggacaagcggagaggcagggaccctgagatgggcggaaagccccagcggagaaagaacccccaggaaggactgtataacgaactccagaaagacaagatggccgaagcctacagcgagatcggcatgaagggcgagcggagaagaggcaagggccacgatggcctgtaccagggcctgagcaccgccaccaaggacacctatgacgccctgcacatgcaggccctgcctccaaga

SEQ ID NO: 26272 - DNA, 933 bp, synthetic construct
  source 1..933: mol_type = other DNA
gacaagcagctggacgccgacgtgtcccccaagcctaccatcttcctgccctctatcgccgagacaaagctccagaaggccggcacctacctgtgcctgctggaaaagttcttcccagatgtgattaagatccactggcaggaaaagaagtccaacaccatcctgggcagccaggaaggcaacaccatgaagaccaacgacacctacatgaagttcagctggctgaccgtgcccgagaagtccctggacaaagaacacagatgcatcgtgcggcacgaaaacaacaagaacggcgtggaccaggaaatcatcggcagagccgattgcggctttaccagcgagagctaccagcagggcgtgctgagcgccaccatcctgtacgagatcctgctgggcaaggccaccctgtacgccgtgctggtgtctgccctggtgctgatggctatggtcaagcggaaggacagccggggaaggagtaagaggagcaggctcctgcacagtgactacatgaacatgactccacgccgccccggacccacccgcaagcattaccagccctatgccccaccacgcgacttcgcagcctatcgctccagagtgaagttcagcagaagcgccgacgcccctgcctaccagcagggacagaaccaactgtacaacgagctgaacctgggcagacgggaagagtacgacgtgctggacaagcggagaggcagggaccctgagatgggcggaaagccccagcggagaaagaacccccaggaaggactgtataacgaactccagaaagacaagatggccgaagcctacagcgagatcggcatgaagggcgagcggagaagaggcaagggccacgatggcctgtaccagggcctgagcaccgccaccaaggacacctatgacgccctgcacatgcaggccctgcctccaaga

SEQ ID NO: 26273 - DNA, 927 bp, synthetic construct
  source 1..927: mol_type = other DNA
gacaagcagctggacgccgacgtgtcccccaagcctaccatcttcctgccctctatcgccgagacaaagctccagaaggccggcacctacctgtgcctgctggaaaagttcttcccagatgtgattaagatccactggcaggaaaagaagtccaacaccatcctgggcagccaggaaggcaacaccatgaagaccaacgacacctacatgaagttcagctggctgaccgtgcccgagaagtccctggacaaagaacacagatgcatcgtgcggcacgaaaacaacaagaacggcgtggaccaggaaatcatcgccgattgcggctttaccagcgagagctaccagcagggcgtgctgagcgccaccatcctgtacgagatcctgctgggcaaggccaccctgtacgccgtgctggtgtctgccctggtgctgatggctatggtcaagcggaaggacagccggggaaggagtaagaggagcaggctcctgcacagtgactacatgaacatgactccacgccgccccggacccacccgcaagcattaccagccctatgccccaccacgcgacttcgcagcctatcgctccagagtgaagttcagcagaagcgccgacgcccctgcctaccagcagggacagaaccaactgtacaacgagctgaacctgggcagacgggaagagtacgacgtgctggacaagcggagaggcagggaccctgagatgggcggaaagccccagcggagaaagaacccccaggaaggactgtataacgaactccagaaagacaagatggccgaagcctacagcgagatcggcatgaagggcgagcggagaagaggcaagggccacgatggcctgtaccagggcctgagcaccgccaccaaggacacctatgacgccctgcacatgcaggccctgcctccaaga

SEQ ID NO: 26274 - DNA, 957 bp, synthetic construct
  source 1..957: mol_type = other DNA
gacaagcagctggacgccgacgtgtcccccaagcctaccatcttcctgccctctatcgccgagacaaagctccagaaggccggcacctacctgtgcctgctggaaaagttcttcccagatgtgattaagatccactggcaggaaaagaagtccaacaccatcctgggcagccaggaaggcaacaccatgaagaccaacgacacctacatgaagttcagctggctgaccgtgcccgagaagtccctggacaaagaacacagatgcatcgtgcggcacgaaaacaacaagaacggcgtggaccaggaaatcatccagatcgtgtctgccgaagcctggggcagagccgattgcggctttaccagcgagagctaccagcagggcgtgctgagcgccaccatcctgtacgagatcctgctgggcaaggccaccctgtacgccgtgctggtgtctgccctggtgctgatggctatggtcaagcggaaggacagccggggaaggagtaagaggagcaggctcctgcacagtgactacatgaacatgactccacgccgccccggacccacccgcaagcattaccagccctatgccccaccacgcgacttcgcagcctatcgctccagagtgaagttcagcagaagcgccgacgcccctgcctaccagcagggacagaaccaactgtacaacgagctgaacctgggcagacgggaagagtacgacgtgctggacaagcggagaggcagggaccctgagatgggcggaaagccccagcggagaaagaacccccaggaaggactgtataacgaactccagaaagacaagatggccgaagcctacagcgagatcggcatgaagggcgagcggagaagaggcaagggccacgatggcctgtaccagggcctgagcaccgccaccaaggacacctatgacgccctgcacatgcaggccctgcctccaaga

SEQ ID NO: 26275 - DNA, 978 bp, synthetic construct
  source 1..978: mol_type = other DNA
gacaagcagctggacgccgacgtgtcccccaagcctaccatcttcctgccctctatcgccgagacaaagctccagaaggccggcacctacctgtgcctgctggaaaagttcttcccagatgtgattaagatccactggcaggaaaagaagtccaacaccatcctgggcagccaggaaggcaacaccatgaagaccaacgacacctacatgaagttcagctggctgaccgtgcccgagaagtccctggacaaagaacacagatgcatcgtgcggcacgaaaacaacaagaacggcgtggaccaggaaatcatcgaagtgaaaaccgactccaccgaccacgtgaagcccaaagagacagagaacaccaagcagcccagcaagagctgccacaagcccaaggccatcgtgcacaccgagaaagtgaacatgatgagcctgaccgtgctgggcctgcggatgctgttcgccaaaaccgtggccgtgaacttcctgctgaccgccaagctgttcttcctcaggagtaagaggagcaggctcctgcacagtgactacatgaacatgactccacgccgccccggacccacccgcaagcattaccagccctatgccccaccacgcgacttcgcagcctatcgctccagagtgaagttcagcagaagcgccgacgcccctgcctaccagcagggacagaaccaactgtacaacgagctgaacctgggcagacgggaagagtacgacgtgctggacaagcggagaggcagggaccctgagatgggcggaaagccccagcggagaaagaacccccaggaaggactgtataacgaactccagaaagacaagatggccgaagcctacagcgagatcggcatgaagggcgagcggagaagaggcaagggccacgatggcctgtaccagggcctgagcaccgccaccaaggacacctatgacgccctgcacatgcaggccctgcctccaaga

SEQ ID NO: 26276 - DNA, 957 bp, synthetic construct
  source 1..957: mol_type = other DNA
gacaagcagctggacgccgacgtgtcccccaagcctaccatcttcctgccctctatcgccgagacaaagctccagaaggccggcacctacctgtgcctgctggaaaagttcttcccagatgtgattaagatccactggcaggaaaagaagtccaacaccatcctgggcagccaggaaggcaacaccatgaagaccaacgacacctacatgaagttcagctggctgaccgtgcccgagaagtccctggacaaagaacacagatgcatcgtgcggcacgaaaacaacaagaacggcgtggaccaggaaatcatcgaccacgtgaagcccaaagagacagagaacaccaagcagcccagcaagagctgccacaagcccaaggccatcgtgcacaccgagaaagtgaacatgatgagcctgaccgtgctgggcctgcggatgctgttcgccaaaaccgtggccgtgaacttcctgctgaccgccaagctgttcttcctcaggagtaagaggagcaggctcctgcacagtgactacatgaacatgactccacgccgccccggacccacccgcaagcattaccagccctatgccccaccacgcgacttcgcagcctatcgctccagagtgaagttcagcagaagcgccgacgcccctgcctaccagcagggacagaaccaactgtacaacgagctgaacctgggcagacgggaagagtacgacgtgctggacaagcggagaggcagggaccctgagatgggcggaaagccccagcggagaaagaacccccaggaaggactgtataacgaactccagaaagacaagatggccgaagcctacagcgagatcggcatgaagggcgagcggagaagaggcaagggccacgatggcctgtaccagggcctgagcaccgccaccaaggacacctatgacgccctgcacatgcaggccctgcctccaaga

SEQ ID NO: 26277 - DNA, 960 bp, synthetic construct
  source 1..960: mol_type = other DNA
gacaagcagctggacgccgacgtgtcccccaagcctaccatcttcctgccctctatcgccgagacaaagctccagaaggccggcacctacctgtgcctgctggaaaagttcttcccagatgtgattaagatccactggcaggaaaagaagtccaacaccatcctgggcagccaggaaggcaacaccatgaagaccaacgacacctacatgaagttcagctggctgaccgtgcccgagaagtccctggacaaagaacacagatgcatcgtgcggcacgaaaacaacaagaacggcgtggaccaggaaatcatcttcccaatccccgaggacacattcttcccaagccccgagagcagctgcgacgtgaagctggtggaaaagagcttcgagacagacaccaacctgaacttccagaacctgagcgtgatcggcttcagaatcctgctgctgaaagtggccggctttaacctgctgatgaccctgcggctgtggtccagcaggagtaagaggagcaggctcctgcacagtgactacatgaacatgactccacgccgccccggacccacccgcaagcattaccagccctatgccccaccacgcgacttcgcagcctatcgctccagagtgaagttcagcagaagcgccgacgcccctgcctaccagcagggacagaaccaactgtacaacgagctgaacctgggcagacgggaagagtacgacgtgctggacaagcggagaggcagggaccctgagatgggcggaaagccccagcggagaaagaacccccaggaaggactgtataacgaactccagaaagacaagatggccgaagcctacagcgagatcggcatgaagggcgagcggagaagaggcaagggccacgatggcctgtaccagggcctgagcaccgccaccaaggacacctatgacgccctgcacatgcaggccctgcctccaaga

SEQ ID NO: 26278 - DNA, 930 bp, synthetic construct
  source 1..930: mol_type = other DNA
gacaagcagctggacgccgacgtgtcccccaagcctaccatcttcctgccctctatcgccgagacaaagctccagaaggccggcacctacctgtgcctgctggaaaagttcttcccagatgtgattaagatccactggcaggaaaagaagtccaacaccatcctgggcagccaggaaggcaacaccatgaagaccaacgacacctacatgaagttcagctggctgaccgtgcccgagaagtccctggacaaagaacacagatgcatcgtgcggcacgaaaacaacaagaacggcgtggaccaggaaatcatcttcccagagagcagctgcgacgtgaagctggtggaaaagagcttcgagacagacaccaacctgaacttccagaacctgagcgtgatcggcttcagaatcctgctgctgaaagtggccggctttaacctgctgatgaccctgcggctgtggtccagcaggagtaagaggagcaggctcctgcacagtgactacatgaacatgactccacgccgccccggacccacccgcaagcattaccagccctatgccccaccacgcgacttcgcagcctatcgctccagagtgaagttcagcagaagcgccgacgcccctgcctaccagcagggacagaaccaactgtacaacgagctgaacctgggcagacgggaagagtacgacgtgctggacaagcggagaggcagggaccctgagatgggcggaaagccccagcggagaaagaacccccaggaaggactgtataacgaactccagaaagacaagatggccgaagcctacagcgagatcggcatgaagggcgagcggagaagaggcaagggccacgatggcctgtaccagggcctgagcaccgccaccaaggacacctatgacgccctgcacatgcaggccctgcctccaaga

SEQ ID NO: 26279 - DNA, 957 bp, synthetic construct
  source 1..957: mol_type = other DNA
gacaagcagctggacgccgacgtgtcccccaagcctaccatcttcctgccctctatcgccgagacaaagctccagaaggccggcacctacctgtgcctgctggaaaagttcttcccagatgtgattaagatccactggcaggaaaagaagtccaacaccatcctgggcagccaggaaggcaacaccatgaagaccaacgacacctacatgaagttcagctggctgaccgtgcccgagaagtccctggacaaagaacacagatgcatcgtgcggcacgaaaacaacaagaacggcgtggaccaggaaatcatcttcccacccgaggacacattcttcccaagccccgagagcagctgcgacgtgaagctggtggaaaagagcttcgagacagacaccaacctgaacttccagaacctgagcgtgatcggcttcagaatcctgctgctgaaagtggccggctttaacctgctgatgaccctgcggctgtggtccagcaggagtaagaggagcaggctcctgcacagtgactacatgaacatgactccacgccgccccggacccacccgcaagcattaccagccctatgccccaccacgcgacttcgcagcctatcgctccagagtgaagttcagcagaagcgccgacgcccctgcctaccagcagggacagaaccaactgtacaacgagctgaacctgggcagacgggaagagtacgacgtgctggacaagcggagaggcagggaccctgagatgggcggaaagccccagcggagaaagaacccccaggaaggactgtataacgaactccagaaagacaagatggccgaagcctacagcgagatcggcatgaagggcgagcggagaagaggcaagggccacgatggcctgtaccagggcctgagcaccgccaccaaggacacctatgacgccctgcacatgcaggccctgcctccaaga

SEQ ID NO: 26280 - DNA, 939 bp, synthetic construct
  source 1..939: mol_type = other DNA
gacaagcagctggacgccgacgtgtcccccaagcctaccatcttcctgccctctatcgccgagacaaagctccagaaggccggcacctacctgtgcctgctggaaaagttcttcccagatgtgattaagatccactggcaggaaaagaagtccaacaccatcctgggcagccaggaaggcaacaccatgaagaccaacgacacctacatgaagttcagctggctgaccgtgcccgagaagtccctggacaaagaacacagatgcatcgtgcggcacgaaaacaacaagaacggcgtggaccaggaaatcatcttcccaggcagagccgattgcggctttaccagcgagagctaccagcagggcgtgctgagcgccaccatcctgtacgagatcctgctgggcaaggccaccctgtacgccgtgctggtgtctgccctggtgctgatggctatggtcaagcggaaggacagccggggaaggagtaagaggagcaggctcctgcacagtgactacatgaacatgactccacgccgccccggacccacccgcaagcattaccagccctatgccccaccacgcgacttcgcagcctatcgctccagagtgaagttcagcagaagcgccgacgcccctgcctaccagcagggacagaaccaactgtacaacgagctgaacctgggcagacgggaagagtacgacgtgctggacaagcggagaggcagggaccctgagatgggcggaaagccccagcggagaaagaacccccaggaaggactgtataacgaactccagaaagacaagatggccgaagcctacagcgagatcggcatgaagggcgagcggagaagaggcaagggccacgatggcctgtaccagggcctgagcaccgccaccaaggacacctatgacgccctgcacatgcaggccctgcctccaaga

SEQ ID NO: 26281 - DNA, 933 bp, synthetic construct
  source 1..933: mol_type = other DNA
gacaagcagctggacgccgacgtgtcccccaagcctaccatcttcctgccctctatcgccgagacaaagctccagaaggccggcacctacctgtgcctgctggaaaagttcttcccagatgtgattaagatccactggcaggaaaagaagtccaacaccatcctgggcagccaggaaggcaacaccatgaagaccaacgacacctacatgaagttcagctggctgaccgtgcccgagaagtccctggacaaagaacacagatgcatcgtgcggcacgaaaacaacaagaacggcgtggaccaggaaatcatcttcccagccgattgcggctttaccagcgagagctaccagcagggcgtgctgagcgccaccatcctgtacgagatcctgctgggcaaggccaccctgtacgccgtgctggtgtctgccctggtgctgatggctatggtcaagcggaaggacagccggggaaggagtaagaggagcaggctcctgcacagtgactacatgaacatgactccacgccgccccggacccacccgcaagcattaccagccctatgccccaccacgcgacttcgcagcctatcgctccagagtgaagttcagcagaagcgccgacgcccctgcctaccagcagggacagaaccaactgtacaacgagctgaacctgggcagacgggaagagtacgacgtgctggacaagcggagaggcagggaccctgagatgggcggaaagccccagcggagaaagaacccccaggaaggactgtataacgaactccagaaagacaagatggccgaagcctacagcgagatcggcatgaagggcgagcggagaagaggcaagggccacgatggcctgtaccagggcctgagcaccgccaccaaggacacctatgacgccctgcacatgcaggccctgcctccaaga

SEQ ID NO: 26282 - DNA, 963 bp, synthetic construct
  source 1..963: mol_type = other DNA
gacaagcagctggacgccgacgtgtcccccaagcctaccatcttcctgccctctatcgccgagacaaagctccagaaggccggcacctacctgtgcctgctggaaaagttcttcccagatgtgattaagatccactggcaggaaaagaagtccaacaccatcctgggcagccaggaaggcaacaccatgaagaccaacgacacctacatgaagttcagctggctgaccgtgcccgagaagtccctggacaaagaacacagatgcatcgtgcggcacgaaaacaacaagaacggcgtggaccaggaaatcatcttcccacagatcgtgtctgccgaagcctggggcagagccgattgcggctttaccagcgagagctaccagcagggcgtgctgagcgccaccatcctgtacgagatcctgctgggcaaggccaccctgtacgccgtgctggtgtctgccctggtgctgatggctatggtcaagcggaaggacagccggggaaggagtaagaggagcaggctcctgcacagtgactacatgaacatgactccacgccgccccggacccacccgcaagcattaccagccctatgccccaccacgcgacttcgcagcctatcgctccagagtgaagttcagcagaagcgccgacgcccctgcctaccagcagggacagaaccaactgtacaacgagctgaacctgggcagacgggaagagtacgacgtgctggacaagcggagaggcagggaccctgagatgggcggaaagccccagcggagaaagaacccccaggaaggactgtataacgaactccagaaagacaagatggccgaagcctacagcgagatcggcatgaagggcgagcggagaagaggcaagggccacgatggcctgtaccagggcctgagcaccgccaccaaggacacctatgacgccctgcacatgcaggccctgcctccaaga

SEQ ID NO: 26283 - DNA, 984 bp, synthetic construct
  source 1..984: mol_type = other DNA
gacaagcagctggacgccgacgtgtcccccaagcctaccatcttcctgccctctatcgccgagacaaagctccagaaggccggcacctacctgtgcctgctggaaaagttcttcccagatgtgattaagatccactggcaggaaaagaagtccaacaccatcctgggcagccaggaaggcaacaccatgaagaccaacgacacctacatgaagttcagctggctgaccgtgcccgagaagtccctggacaaagaacacagatgcatcgtgcggcacgaaaacaacaagaacggcgtggaccaggaaatcatcttcccagaagtgaaaaccgactccaccgaccacgtgaagcccaaagagacagagaacaccaagcagcccagcaagagctgccacaagcccaaggccatcgtgcacaccgagaaagtgaacatgatgagcctgaccgtgctgggcctgcggatgctgttcgccaaaaccgtggccgtgaacttcctgctgaccgccaagctgttcttcctcaggagtaagaggagcaggctcctgcacagtgactacatgaacatgactccacgccgccccggacccacccgcaagcattaccagccctatgccccaccacgcgacttcgcagcctatcgctccagagtgaagttcagcagaagcgccgacgcccctgcctaccagcagggacagaaccaactgtacaacgagctgaacctgggcagacgggaagagtacgacgtgctggacaagcggagaggcagggaccctgagatgggcggaaagccccagcggagaaagaacccccaggaaggactgtataacgaactccagaaagacaagatggccgaagcctacagcgagatcggcatgaagggcgagcggagaagaggcaagggccacgatggcctgtaccagggcctgagcaccgccaccaaggacacctatgacgccctgcacatgcaggccctgcctccaaga

SEQ ID NO: 26284 - DNA, 963 bp, synthetic construct
  source 1..963: mol_type = other DNA
gacaagcagctggacgccgacgtgtcccccaagcctaccatcttcctgccctctatcgccgagacaaagctccagaaggccggcacctacctgtgcctgctggaaaagttcttcccagatgtgattaagatccactggcaggaaaagaagtccaacaccatcctgggcagccaggaaggcaacaccatgaagaccaacgacacctacatgaagttcagctggctgaccgtgcccgagaagtccctggacaaagaacacagatgcatcgtgcggcacgaaaacaacaagaacggcgtggaccaggaaatcatcttcccagaccacgtgaagcccaaagagacagagaacaccaagcagcccagcaagagctgccacaagcccaaggccatcgtgcacaccgagaaagtgaacatgatgagcctgaccgtgctgggcctgcggatgctgttcgccaaaaccgtggccgtgaacttcctgctgaccgccaagctgttcttcctcaggagtaagaggagcaggctcctgcacagtgactacatgaacatgactccacgccgccccggacccacccgcaagcattaccagccctatgccccaccacgcgacttcgcagcctatcgctccagagtgaagttcagcagaagcgccgacgcccctgcctaccagcagggacagaaccaactgtacaacgagctgaacctgggcagacgggaagagtacgacgtgctggacaagcggagaggcagggaccctgagatgggcggaaagccccagcggagaaagaacccccaggaaggactgtataacgaactccagaaagacaagatggccgaagcctacagcgagatcggcatgaagggcgagcggagaagaggcaagggccacgatggcctgtaccagggcctgagcaccgccaccaaggacacctatgacgccctgcacatgcaggccctgcctccaaga

SEQ ID NO: 26285 - DNA, 984 bp, synthetic construct
  source 1..984: mol_type = other DNA
gacaagcagctggacgccgacgtgtcccccaagcctaccatcttcctgccctctatcgccgagacaaagctccagaaggccggcacctacctgtgcctgctggaaaagttcttcccagatgtgattaagatccactggcaggaaaagaagtccaacaccatcctgggcagccaggaaggcaacaccatgaagaccaacgacacctacatgaagttcagctggctgaccgtgcccgagaagtccctggacaaagaacacagatgcatcgtgcggcacgaaaacaacaagaacggcgtggaccaggaaatcatcttcccacccatcaagaccgatgtgattacaatccccgaggacacattcttcccaagccccgagagcagctgcgacgtgaagctggtggaaaagagcttcgagacagacaccaacctgaacttccagaacctgagcgtgatcggcttcagaatcctgctgctgaaagtggccggctttaacctgctgatgaccctgcggctgtggtccagcaggagtaagaggagcaggctcctgcacagtgactacatgaacatgactccacgccgccccggacccacccgcaagcattaccagccctatgccccaccacgcgacttcgcagcctatcgctccagagtgaagttcagcagaagcgccgacgcccctgcctaccagcagggacagaaccaactgtacaacgagctgaacctgggcagacgggaagagtacgacgtgctggacaagcggagaggcagggaccctgagatgggcggaaagccccagcggagaaagaacccccaggaaggactgtataacgaactccagaaagacaagatggccgaagcctacagcgagatcggcatgaagggcgagcggagaagaggcaagggccacgatggcctgtaccagggcctgagcaccgccaccaaggacacctatgacgccctgcacatgcaggccctgcctccaaga

SEQ ID NO: 26286 - DNA, 954 bp, synthetic construct
  source 1..954: mol_type = other DNA
gacaagcagctggacgccgacgtgtcccccaagcctaccatcttcctgccctctatcgccgagacaaagctccagaaggccggcacctacctgtgcctgctggaaaagttcttcccagatgtgattaagatccactggcaggaaaagaagtccaacaccatcctgggcagccaggaaggcaacaccatgaagaccaacgacacctacatgaagttcagctggctgaccgtgcccgagaagtccctggacaaagaacacagatgcatcgtgcggcacgaaaacaacaagaacggcgtggaccaggaaatcatcttcccacccatcaagaccgatgtgattacagagagcagctgcgacgtgaagctggtggaaaagagcttcgagacagacaccaacctgaacttccagaacctgagcgtgatcggcttcagaatcctgctgctgaaagtggccggctttaacctgctgatgaccctgcggctgtggtccagcaggagtaagaggagcaggctcctgcacagtgactacatgaacatgactccacgccgccccggacccacccgcaagcattaccagccctatgccccaccacgcgacttcgcagcctatcgctccagagtgaagttcagcagaagcgccgacgcccctgcctaccagcagggacagaaccaactgtacaacgagctgaacctgggcagacgggaagagtacgacgtgctggacaagcggagaggcagggaccctgagatgggcggaaagccccagcggagaaagaacccccaggaaggactgtataacgaactccagaaagacaagatggccgaagcctacagcgagatcggcatgaagggcgagcggagaagaggcaagggccacgatggcctgtaccagggcctgagcaccgccaccaaggacacctatgacgccctgcacatgcaggccctgcctccaaga

SEQ ID NO: 26287 - DNA, 981 bp, synthetic construct
  source 1..981: mol_type = other DNA
gacaagcagctggacgccgacgtgtcccccaagcctaccatcttcctgccctctatcgccgagacaaagctccagaaggccggcacctacctgtgcctgctggaaaagttcttcccagatgtgattaagatccactggcaggaaaagaagtccaacaccatcctgggcagccaggaaggcaacaccatgaagaccaacgacacctacatgaagttcagctggctgaccgtgcccgagaagtccctggacaaagaacacagatgcatcgtgcggcacgaaaacaacaagaacggcgtggaccaggaaatcatcttcccacccatcaagaccgatgtgattacacccgaggacacattcttcccaagccccgagagcagctgcgacgtgaagctggtggaaaagagcttcgagacagacaccaacctgaacttccagaacctgagcgtgatcggcttcagaatcctgctgctgaaagtggccggctttaacctgctgatgaccctgcggctgtggtccagcaggagtaagaggagcaggctcctgcacagtgactacatgaacatgactccacgccgccccggacccacccgcaagcattaccagccctatgccccaccacgcgacttcgcagcctatcgctccagagtgaagttcagcagaagcgccgacgcccctgcctaccagcagggacagaaccaactgtacaacgagctgaacctgggcagacgggaagagtacgacgtgctggacaagcggagaggcagggaccctgagatgggcggaaagccccagcggagaaagaacccccaggaaggactgtataacgaactccagaaagacaagatggccgaagcctacagcgagatcggcatgaagggcgagcggagaagaggcaagggccacgatggcctgtaccagggcctgagcaccgccaccaaggacacctatgacgccctgcacatgcaggccctgcctccaaga

SEQ ID NO: 26288 - DNA, 963 bp, synthetic construct
  source 1..963: mol_type = other DNA
gacaagcagctggacgccgacgtgtcccccaagcctaccatcttcctgccctctatcgccgagacaaagctccagaaggccggcacctacctgtgcctgctggaaaagttcttcccagatgtgattaagatccactggcaggaaaagaagtccaacaccatcctgggcagccaggaaggcaacaccatgaagaccaacgacacctacatgaagttcagctggctgaccgtgcccgagaagtccctggacaaagaacacagatgcatcgtgcggcacgaaaacaacaagaacggcgtggaccaggaaatcatcttcccacccatcaagaccgatgtgattacaggcagagccgattgcggctttaccagcgagagctaccagcagggcgtgctgagcgccaccatcctgtacgagatcctgctgggcaaggccaccctgtacgccgtgctggtgtctgccctggtgctgatggctatggtcaagcggaaggacagccggggaaggagtaagaggagcaggctcctgcacagtgactacatgaacatgactccacgccgccccggacccacccgcaagcattaccagccctatgccccaccacgcgacttcgcagcctatcgctccagagtgaagttcagcagaagcgccgacgcccctgcctaccagcagggacagaaccaactgtacaacgagctgaacctgggcagacgggaagagtacgacgtgctggacaagcggagaggcagggaccctgagatgggcggaaagccccagcggagaaagaacccccaggaaggactgtataacgaactccagaaagacaagatggccgaagcctacagcgagatcggcatgaagggcgagcggagaagaggcaagggccacgatggcctgtaccagggcctgagcaccgccaccaaggacacctatgacgccctgcacatgcaggccctgcctccaaga

SEQ ID NO: 26289 - DNA, 957 bp, synthetic construct
  source 1..957: mol_type = other DNA
gacaagcagctggacgccgacgtgtcccccaagcctaccatcttcctgccctctatcgccgagacaaagctccagaaggccggcacctacctgtgcctgctggaaaagttcttcccagatgtgattaagatccactggcaggaaaagaagtccaacaccatcctgggcagccaggaaggcaacaccatgaagaccaacgacacctacatgaagttcagctggctgaccgtgcccgagaagtccctggacaaagaacacagatgcatcgtgcggcacgaaaacaacaagaacggcgtggaccaggaaatcatcttcccacccatcaagaccgatgtgattacagccgattgcggctttaccagcgagagctaccagcagggcgtgctgagcgccaccatcctgtacgagatcctgctgggcaaggccaccctgtacgccgtgctggtgtctgccctggtgctgatggctatggtcaagcggaaggacagccggggaaggagtaagaggagcaggctcctgcacagtgactacatgaacatgactccacgccgccccggacccacccgcaagcattaccagccctatgccccaccacgcgacttcgcagcctatcgctccagagtgaagttcagcagaagcgccgacgcccctgcctaccagcagggacagaaccaactgtacaacgagctgaacctgggcagacgggaagagtacgacgtgctggacaagcggagaggcagggaccctgagatgggcggaaagccccagcggagaaagaacccccaggaaggactgtataacgaactccagaaagacaagatggccgaagcctacagcgagatcggcatgaagggcgagcggagaagaggcaagggccacgatggcctgtaccagggcctgagcaccgccaccaaggacacctatgacgccctgcacatgcaggccctgcctccaaga

SEQ ID NO: 26290 - DNA, 987 bp, synthetic construct
  source 1..987: mol_type = other DNA
gacaagcagctggacgccgacgtgtcccccaagcctaccatcttcctgccctctatcgccgagacaaagctccagaaggccggcacctacctgtgcctgctggaaaagttcttcccagatgtgattaagatccactggcaggaaaagaagtccaacaccatcctgggcagccaggaaggcaacaccatgaagaccaacgacacctacatgaagttcagctggctgaccgtgcccgagaagtccctggacaaagaacacagatgcatcgtgcggcacgaaaacaacaagaacggcgtggaccaggaaatcatcttcccacccatcaagaccgatgtgattacacagatcgtgtctgccgaagcctggggcagagccgattgcggctttaccagcgagagctaccagcagggcgtgctgagcgccaccatcctgtacgagatcctgctgggcaaggccaccctgtacgccgtgctggtgtctgccctggtgctgatggctatggtcaagcggaaggacagccggggaaggagtaagaggagcaggctcctgcacagtgactacatgaacatgactccacgccgccccggacccacccgcaagcattaccagccctatgccccaccacgcgacttcgcagcctatcgctccagagtgaagttcagcagaagcgccgacgcccctgcctaccagcagggacagaaccaactgtacaacgagctgaacctgggcagacgggaagagtacgacgtgctggacaagcggagaggcagggaccctgagatgggcggaaagccccagcggagaaagaacccccaggaaggactgtataacgaactccagaaagacaagatggccgaagcctacagcgagatcggcatgaagggcgagcggagaagaggcaagggccacgatggcctgtaccagggcctgagcaccgccaccaaggacacctatgacgccctgcacatgcaggccctgcctccaaga

SEQ ID NO: 26291 - DNA, 1008 bp, synthetic construct
  source 1..1008: mol_type = other DNA
gacaagcagctggacgccgacgtgtcccccaagcctaccatcttcctgccctctatcgccgagacaaagctccagaaggccggcacctacctgtgcctgctggaaaagttcttcccagatgtgattaagatccactggcaggaaaagaagtccaacaccatcctgggcagccaggaaggcaacaccatgaagaccaacgacacctacatgaagttcagctggctgaccgtgcccgagaagtccctggacaaagaacacagatgcatcgtgcggcacgaaaacaacaagaacggcgtggaccaggaaatcatcttcccacccatcaagaccgatgtgattacagaagtgaaaaccgactccaccgaccacgtgaagcccaaagagacagagaacaccaagcagcccagcaagagctgccacaagcccaaggccatcgtgcacaccgagaaagtgaacatgatgagcctgaccgtgctgggcctgcggatgctgttcgccaaaaccgtggccgtgaacttcctgctgaccgccaagctgttcttcctcaggagtaagaggagcaggctcctgcacagtgactacatgaacatgactccacgccgccccggacccacccgcaagcattaccagccctatgccccaccacgcgacttcgcagcctatcgctccagagtgaagttcagcagaagcgccgacgcccctgcctaccagcagggacagaaccaactgtacaacgagctgaacctgggcagacgggaagagtacgacgtgctggacaagcggagaggcagggaccctgagatgggcggaaagccccagcggagaaagaacccccaggaaggactgtataacgaactccagaaagacaagatggccgaagcctacagcgagatcggcatgaagggcgagcggagaagaggcaagggccacgatggcctgtaccagggcctgagcaccgccaccaaggacacctatgacgccctgcacatgcaggccctgcctccaaga

SEQ ID NO: 26292 - DNA, 987 bp, synthetic construct
  source 1..987: mol_type = other DNA
gacaagcagctggacgccgacgtgtcccccaagcctaccatcttcctgccctctatcgccgagacaaagctccagaaggccggcacctacctgtgcctgctggaaaagttcttcccagatgtgattaagatccactggcaggaaaagaagtccaacaccatcctgggcagccaggaaggcaacaccatgaagaccaacgacacctacatgaagttcagctggctgaccgtgcccgagaagtccctggacaaagaacacagatgcatcgtgcggcacgaaaacaacaagaacggcgtggaccaggaaatcatcttcccacccatcaagaccgatgtgattacagaccacgtgaagcccaaagagacagagaacaccaagcagcccagcaagagctgccacaagcccaaggccatcgtgcacaccgagaaagtgaacatgatgagcctgaccgtgctgggcctgcggatgctgttcgccaaaaccgtggccgtgaacttcctgctgaccgccaagctgttcttcctcaggagtaagaggagcaggctcctgcacagtgactacatgaacatgactccacgccgccccggacccacccgcaagcattaccagccctatgccccaccacgcgacttcgcagcctatcgctccagagtgaagttcagcagaagcgccgacgcccctgcctaccagcagggacagaaccaactgtacaacgagctgaacctgggcagacgggaagagtacgacgtgctggacaagcggagaggcagggaccctgagatgggcggaaagccccagcggagaaagaacccccaggaaggactgtataacgaactccagaaagacaagatggccgaagcctacagcgagatcggcatgaagggcgagcggagaagaggcaagggccacgatggcctgtaccagggcctgagcaccgccaccaaggacacctatgacgccctgcacatgcaggccctgcctccaaga

SEQ ID NO: 26293 - DNA, 843 bp, synthetic construct
  source 1..843: mol_type = other DNA
cccatcaagaccgatgtgattacaatggaccccaaggacaactgctccaaggacgccaacgataccctgctgctccagctgaccaacaccagcgcctactacatgtacttgttgctgctgctgaagtccgtggtgtacttcgccatcatcacatgctgcctgctgcggagaaccgccttctgctgcaacggcgagaagtctatccccgaggacacattcttcccaagccccgagagcagctgcgacgtgaagctggtggaaaagagcttcgagacagacaccaacctgaacttccagaacctgagcgtgatcggcttcagaatcctgctgctgaaagtggccggctttaacctgctgatgaccctgcggctgtggtccagcaggagtaagaggagcaggctcctgcacagtgactacatgaacatgactccacgccgccccggacccacccgcaagcattaccagccctatgccccaccacgcgacttcgcagcctatcgctccagagtgaagttcagcagaagcgccgacgcccctgcctaccagcagggacagaaccaactgtacaacgagctgaacctgggcagacgggaagagtacgacgtgctggacaagcggagaggcagggaccctgagatgggcggaaagccccagcggagaaagaacccccaggaaggactgtataacgaactccagaaagacaagatggccgaagcctacagcgagatcggcatgaagggcgagcggagaagaggcaagggccacgatggcctgtaccagggcctgagcaccgccaccaaggacacctatgacgccctgcacatgcaggccctgcctccaaga

SEQ ID NO: 26294 - DNA, 813 bp, synthetic construct
  source 1..813: mol_type = other DNA
cccatcaagaccgatgtgattacaatggaccccaaggacaactgctccaaggacgccaacgataccctgctgctccagctgaccaacaccagcgcctactacatgtacttgttgctgctgctgaagtccgtggtgtacttcgccatcatcacatgctgcctgctgcggagaaccgccttctgctgcaacggcgagaagtctgagagcagctgcgacgtgaagctggtggaaaagagcttcgagacagacaccaacctgaacttccagaacctgagcgtgatcggcttcagaatcctgctgctgaaagtggccggctttaacctgctgatgaccctgcggctgtggtccagcaggagtaagaggagcaggctcctgcacagtgactacatgaacatgactccacgccgccccggacccacccgcaagcattaccagccctatgccccaccacgcgacttcgcagcctatcgctccagagtgaagttcagcagaagcgccgacgcccctgcctaccagcagggacagaaccaactgtacaacgagctgaacctgggcagacgggaagagtacgacgtgctggacaagcggagaggcagggaccctgagatgggcggaaagccccagcggagaaagaacccccaggaaggactgtataacgaactccagaaagacaagatggccgaagcctacagcgagatcggcatgaagggcgagcggagaagaggcaagggccacgatggcctgtaccagggcctgagcaccgccaccaaggacacctatgacgccctgcacatgcaggccctgcctccaaga

SEQ ID NO: 26295 - DNA, 840 bp, synthetic construct
  source 1..840: mol_type = other DNA
cccatcaagaccgatgtgattacaatggaccccaaggacaactgctccaaggacgccaacgataccctgctgctccagctgaccaacaccagcgcctactacatgtacttgttgctgctgctgaagtccgtggtgtacttcgccatcatcacatgctgcctgctgcggagaaccgccttctgctgcaacggcgagaagtctcccgaggacacattcttcccaagccccgagagcagctgcgacgtgaagctggtggaaaagagcttcgagacagacaccaacctgaacttccagaacctgagcgtgatcggcttcagaatcctgctgctgaaagtggccggctttaacctgctgatgaccctgcggctgtggtccagcaggagtaagaggagcaggctcctgcacagtgactacatgaacatgactccacgccgccccggacccacccgcaagcattaccagccctatgccccaccacgcgacttcgcagcctatcgctccagagtgaagttcagcagaagcgccgacgcccctgcctaccagcagggacagaaccaactgtacaacgagctgaacctgggcagacgggaagagtacgacgtgctggacaagcggagaggcagggaccctgagatgggcggaaagccccagcggagaaagaacccccaggaaggactgtataacgaactccagaaagacaagatggccgaagcctacagcgagatcggcatgaagggcgagcggagaagaggcaagggccacgatggcctgtaccagggcctgagcaccgccaccaaggacacctatgacgccctgcacatgcaggccctgcctccaaga

SEQ ID NO: 26296 - DNA, 822 bp, synthetic construct
  source 1..822: mol_type = other DNA
cccatcaagaccgatgtgattacaatggaccccaaggacaactgctccaaggacgccaacgataccctgctgctccagctgaccaacaccagcgcctactacatgtacttgttgctgctgctgaagtccgtggtgtacttcgccatcatcacatgctgcctgctgcggagaaccgccttctgctgcaacggcgagaagtctggcagagccgattgcggctttaccagcgagagctaccagcagggcgtgctgagcgccaccatcctgtacgagatcctgctgggcaaggccaccctgtacgccgtgctggtgtctgccctggtgctgatggctatggtcaagcggaaggacagccggggaaggagtaagaggagcaggctcctgcacagtgactacatgaacatgactccacgccgccccggacccacccgcaagcattaccagccctatgccccaccacgcgacttcgcagcctatcgctccagagtgaagttcagcagaagcgccgacgcccctgcctaccagcagggacagaaccaactgtacaacgagctgaacctgggcagacgggaagagtacgacgtgctggacaagcggagaggcagggaccctgagatgggcggaaagccccagcggagaaagaacccccaggaaggactgtataacgaactccagaaagacaagatggccgaagcctacagcgagatcggcatgaagggcgagcggagaagaggcaagggccacgatggcctgtaccagggcctgagcaccgccaccaaggacacctatgacgccctgcacatgcaggccctgcctccaaga

SEQ ID NO: 26297 - DNA, 816 bp, synthetic construct
  source 1..816: mol_type = other DNA
cccatcaagaccgatgtgattacaatggaccccaaggacaactgctccaaggacgccaacgataccctgctgctccagctgaccaacaccagcgcctactacatgtacttgttgctgctgctgaagtccgtggtgtacttcgccatcatcacatgctgcctgctgcggagaaccgccttctgctgcaacggcgagaagtctgccgattgcggctttaccagcgagagctaccagcagggcgtgctgagcgccaccatcctgtacgagatcctgctgggcaaggccaccctgtacgccgtgctggtgtctgccctggtgctgatggctatggtcaagcggaaggacagccggggaaggagtaagaggagcaggctcctgcacagtgactacatgaacatgactccacgccgccccggacccacccgcaagcattaccagccctatgccccaccacgcgacttcgcagcctatcgctccagagtgaagttcagcagaagcgccgacgcccctgcctaccagcagggacagaaccaactgtacaacgagctgaacctgggcagacgggaagagtacgacgtgctggacaagcggagaggcagggaccctgagatgggcggaaagccccagcggagaaagaacccccaggaaggactgtataacgaactccagaaagacaagatggccgaagcctacagcgagatcggcatgaagggcgagcggagaagaggcaagggccacgatggcctgtaccagggcctgagcaccgccaccaaggacacctatgacgccctgcacatgcaggccctgcctccaaga

SEQ ID NO: 26298 - DNA, 846 bp, synthetic construct
  source 1..846: mol_type = other DNA
cccatcaagaccgatgtgattacaatggaccccaaggacaactgctccaaggacgccaacgataccctgctgctccagctgaccaacaccagcgcctactacatgtacttgttgctgctgctgaagtccgtggtgtacttcgccatcatcacatgctgcctgctgcggagaaccgccttctgctgcaacggcgagaagtctcagatcgtgtctgccgaagcctggggcagagccgattgcggctttaccagcgagagctaccagcagggcgtgctgagcgccaccatcctgtacgagatcctgctgggcaaggccaccctgtacgccgtgctggtgtctgccctggtgctgatggctatggtcaagcggaaggacagccggggaaggagtaagaggagcaggctcctgcacagtgactacatgaacatgactccacgccgccccggacccacccgcaagcattaccagccctatgccccaccacgcgacttcgcagcctatcgctccagagtgaagttcagcagaagcgccgacgcccctgcctaccagcagggacagaaccaactgtacaacgagctgaacctgggcagacgggaagagtacgacgtgctggacaagcggagaggcagggaccctgagatgggcggaaagccccagcggagaaagaacccccaggaaggactgtataacgaactccagaaagacaagatggccgaagcctacagcgagatcggcatgaagggcgagcggagaagaggcaagggccacgatggcctgtaccagggcctgagcaccgccaccaaggacacctatgacgccctgcacatgcaggccctgcctccaaga

SEQ ID NO: 26299 - DNA, 867 bp, synthetic construct
  source 1..867: mol_type = other DNA
cccatcaagaccgatgtgattacaatggaccccaaggacaactgctccaaggacgccaacgataccctgctgctccagctgaccaacaccagcgcctactacatgtacttgttgctgctgctgaagtccgtggtgtacttcgccatcatcacatgctgcctgctgcggagaaccgccttctgctgcaacggcgagaagtctgaagtgaaaaccgactccaccgaccacgtgaagcccaaagagacagagaacaccaagcagcccagcaagagctgccacaagcccaaggccatcgtgcacaccgagaaagtgaacatgatgagcctgaccgtgctgggcctgcggatgctgttcgccaaaaccgtggccgtgaacttcctgctgaccgccaagctgttcttcctcaggagtaagaggagcaggctcctgcacagtgactacatgaacatgactccacgccgccccggacccacccgcaagcattaccagccctatgccccaccacgcgacttcgcagcctatcgctccagagtgaagttcagcagaagcgccgacgcccctgcctaccagcagggacagaaccaactgtacaacgagctgaacctgggcagacgggaagagtacgacgtgctggacaagcggagaggcagggaccctgagatgggcggaaagccccagcggagaaagaacccccaggaaggactgtataacgaactccagaaagacaagatggccgaagcctacagcgagatcggcatgaagggcgagcggagaagaggcaagggccacgatggcctgtaccagggcctgagcaccgccaccaaggacacctatgacgccctgcacatgcaggccctgcctccaaga

SEQ ID NO: 26300 - DNA, 846 bp, synthetic construct
  source 1..846: mol_type = other DNA
cccatcaagaccgatgtgattacaatggaccccaaggacaactgctccaaggacgccaacgataccctgctgctccagctgaccaacaccagcgcctactacatgtacttgttgctgctgctgaagtccgtggtgtacttcgccatcatcacatgctgcctgctgcggagaaccgccttctgctgcaacggcgagaagtctgaccacgtgaagcccaaagagacagagaacaccaagcagcccagcaagagctgccacaagcccaaggccatcgtgcacaccgagaaagtgaacatgatgagcctgaccgtgctgggcctgcggatgctgttcgccaaaaccgtggccgtgaacttcctgctgaccgccaagctgttcttcctcaggagtaagaggagcaggctcctgcacagtgactacatgaacatgactccacgccgccccggacccacccgcaagcattaccagccctatgccccaccacgcgacttcgcagcctatcgctccagagtgaagttcagcagaagcgccgacgcccctgcctaccagcagggacagaaccaactgtacaacgagctgaacctgggcagacgggaagagtacgacgtgctggacaagcggagaggcagggaccctgagatgggcggaaagccccagcggagaaagaacccccaggaaggactgtataacgaactccagaaagacaagatggccgaagcctacagcgagatcggcatgaagggcgagcggagaagaggcaagggccacgatggcctgtaccagggcctgagcaccgccaccaaggacacctatgacgccctgcacatgcaggccctgcctccaaga

SEQ ID NO: 26301 - DNA, 999 bp, synthetic construct
  source 1..999: mol_type = other DNA
gacaagcagctggacgccgacgtgtcccccaagcctaccatcttcctgccctctatcgccgagacaaagctccagaaggccggcacctacctgtgcctgctggaaaagttcttcccagatgtgattaagatccactggcaggaaaagaagtccaacaccatcctgggcagccaggaaggcaacaccatgaagaccaacgacacctacatgaagttcagctggctgaccgtgcccgagaagtccctggacaaagaacacagatgcatcgtgcggcacgaaaacaacaagaacggcgtggaccaggaaatcatcttcccacccatcaagaccgatgtgattacaatggaccccaaggacatccccgaggacacattcttcccaagccccgagagcagctgcgacgtgaagctggtggaaaagagcttcgagacagacaccaacctgaacttccagaacctgagcgtgatcggcttcagaatcctgctgctgaaagtggccggctttaacctgctgatgaccctgcggctgtggtccagcaggagtaagaggagcaggctcctgcacagtgactacatgaacatgactccacgccgccccggacccacccgcaagcattaccagccctatgccccaccacgcgacttcgcagcctatcgctccagagtgaagttcagcagaagcgccgacgcccctgcctaccagcagggacagaaccaactgtacaacgagctgaacctgggcagacgggaagagtacgacgtgctggacaagcggagaggcagggaccctgagatgggcggaaagccccagcggagaaagaacccccaggaaggactgtataacgaactccagaaagacaagatggccgaagcctacagcgagatcggcatgaagggcgagcggagaagaggcaagggccacgatggcctgtaccagggcctgagcaccgccaccaaggacacctatgacgccctgcacatgcaggccctgcctccaaga

SEQ ID NO: 26302 - DNA, 969 bp, synthetic construct
  source 1..969: mol_type = other DNA
gacaagcagctggacgccgacgtgtcccccaagcctaccatcttcctgccctctatcgccgagacaaagctccagaaggccggcacctacctgtgcctgctggaaaagttcttcccagatgtgattaagatccactggcaggaaaagaagtccaacaccatcctgggcagccaggaaggcaacaccatgaagaccaacgacacctacatgaagttcagctggctgaccgtgcccgagaagtccctggacaaagaacacagatgcatcgtgcggcacgaaaacaacaagaacggcgtggaccaggaaatcatcttcccacccatcaagaccgatgtgattacaatggaccccaaggacgagagcagctgcgacgtgaagctggtggaaaagagcttcgagacagacaccaacctgaacttccagaacctgagcgtgatcggcttcagaatcctgctgctgaaagtggccggctttaacctgctgatgaccctgcggctgtggtccagcaggagtaagaggagcaggctcctgcacagtgactacatgaacatgactccacgccgccccggacccacccgcaagcattaccagccctatgccccaccacgcgacttcgcagcctatcgctccagagtgaagttcagcagaagcgccgacgcccctgcctaccagcagggacagaaccaactgtacaacgagctgaacctgggcagacgggaagagtacgacgtgctggacaagcggagaggcagggaccctgagatgggcggaaagccccagcggagaaagaacccccaggaaggactgtataacgaactccagaaagacaagatggccgaagcctacagcgagatcggcatgaagggcgagcggagaagaggcaagggccacgatggcctgtaccagggcctgagcaccgccaccaaggacacctatgacgccctgcacatgcaggccctgcctccaaga

SEQ ID NO: 26303 - DNA, 996 bp, synthetic construct
  source 1..996: mol_type = other DNA
gacaagcagctggacgccgacgtgtcccccaagcctaccatcttcctgccctctatcgccgagacaaagctccagaaggccggcacctacctgtgcctgctggaaaagttcttcccagatgtgattaagatccactggcaggaaaagaagtccaacaccatcctgggcagccaggaaggcaacaccatgaagaccaacgacacctacatgaagttcagctggctgaccgtgcccgagaagtccctggacaaagaacacagatgcatcgtgcggcacgaaaacaacaagaacggcgtggaccaggaaatcatcttcccacccatcaagaccgatgtgattacaatggaccccaaggaccccgaggacacattcttcccaagccccgagagcagctgcgacgtgaagctggtggaaaagagcttcgagacagacaccaacctgaacttccagaacctgagcgtgatcggcttcagaatcctgctgctgaaagtggccggctttaacctgctgatgaccctgcggctgtggtccagcaggagtaagaggagcaggctcctgcacagtgactacatgaacatgactccacgccgccccggacccacccgcaagcattaccagccctatgccccaccacgcgacttcgcagcctatcgctccagagtgaagttcagcagaagcgccgacgcccctgcctaccagcagggacagaaccaactgtacaacgagctgaacctgggcagacgggaagagtacgacgtgctggacaagcggagaggcagggaccctgagatgggcggaaagccccagcggagaaagaacccccaggaaggactgtataacgaactccagaaagacaagatggccgaagcctacagcgagatcggcatgaagggcgagcggagaagaggcaagggccacgatggcctgtaccagggcctgagcaccgccaccaaggacacctatgacgccctgcacatgcaggccctgcctccaaga

SEQ ID NO: 26304 - DNA, 978 bp, synthetic construct
  source 1..978: mol_type = other DNA
gacaagcagctggacgccgacgtgtcccccaagcctaccatcttcctgccctctatcgccgagacaaagctccagaaggccggcacctacctgtgcctgctggaaaagttcttcccagatgtgattaagatccactggcaggaaaagaagtccaacaccatcctgggcagccaggaaggcaacaccatgaagaccaacgacacctacatgaagttcagctggctgaccgtgcccgagaagtccctggacaaagaacacagatgcatcgtgcggcacgaaaacaacaagaacggcgtggaccaggaaatcatcttcccacccatcaagaccgatgtgattacaatggaccccaaggacggcagagccgattgcggctttaccagcgagagctaccagcagggcgtgctgagcgccaccatcctgtacgagatcctgctgggcaaggccaccctgtacgccgtgctggtgtctgccctggtgctgatggctatggtcaagcggaaggacagccggggaaggagtaagaggagcaggctcctgcacagtgactacatgaacatgactccacgccgccccggacccacccgcaagcattaccagccctatgccccaccacgcgacttcgcagcctatcgctccagagtgaagttcagcagaagcgccgacgcccctgcctaccagcagggacagaaccaactgtacaacgagctgaacctgggcagacgggaagagtacgacgtgctggacaagcggagaggcagggaccctgagatgggcggaaagccccagcggagaaagaacccccaggaaggactgtataacgaactccagaaagacaagatggccgaagcctacagcgagatcggcatgaagggcgagcggagaagaggcaagggccacgatggcctgtaccagggcctgagcaccgccaccaaggacacctatgacgccctgcacatgcaggccctgcctccaaga

SEQ ID NO: 26305 - DNA, 972 bp, synthetic construct
  source 1..972: mol_type = other DNA
gacaagcagctggacgccgacgtgtcccccaagcctaccatcttcctgccctctatcgccgagacaaagctccagaaggccggcacctacctgtgcctgctggaaaagttcttcccagatgtgattaagatccactggcaggaaaagaagtccaacaccatcctgggcagccaggaaggcaacaccatgaagaccaacgacacctacatgaagttcagctggctgaccgtgcccgagaagtccctggacaaagaacacagatgcatcgtgcggcacgaaaacaacaagaacggcgtggaccaggaaatcatcttcccacccatcaagaccgatgtgattacaatggaccccaaggacgccgattgcggctttaccagcgagagctaccagcagggcgtgctgagcgccaccatcctgtacgagatcctgctgggcaaggccaccctgtacgccgtgctggtgtctgccctggtgctgatggctatggtcaagcggaaggacagccggggaaggagtaagaggagcaggctcctgcacagtgactacatgaacatgactccacgccgccccggacccacccgcaagcattaccagccctatgccccaccacgcgacttcgcagcctatcgctccagagtgaagttcagcagaagcgccgacgcccctgcctaccagcagggacagaaccaactgtacaacgagctgaacctgggcagacgggaagagtacgacgtgctggacaagcggagaggcagggaccctgagatgggcggaaagccccagcggagaaagaacccccaggaaggactgtataacgaactccagaaagacaagatggccgaagcctacagcgagatcggcatgaagggcgagcggagaagaggcaagggccacgatggcctgtaccagggcctgagcaccgccaccaaggacacctatgacgccctgcacatgcaggccctgcctccaaga

SEQ ID NO: 26306 - DNA, 1002 bp, synthetic construct
  source 1..1002: mol_type = other DNA
gacaagcagctggacgccgacgtgtcccccaagcctaccatcttcctgccctctatcgccgagacaaagctccagaaggccggcacctacctgtgcctgctggaaaagttcttcccagatgtgattaagatccactggcaggaaaagaagtccaacaccatcctgggcagccaggaaggcaacaccatgaagaccaacgacacctacatgaagttcagctggctgaccgtgcccgagaagtccctggacaaagaacacagatgcatcgtgcggcacgaaaacaacaagaacggcgtggaccaggaaatcatcttcccacccatcaagaccgatgtgattacaatggaccccaaggaccagatcgtgtctgccgaagcctggggcagagccgattgcggctttaccagcgagagctaccagcagggcgtgctgagcgccaccatcctgtacgagatcctgctgggcaaggccaccctgtacgccgtgctggtgtctgccctggtgctgatggctatggtcaagcggaaggacagccggggaaggagtaagaggagcaggctcctgcacagtgactacatgaacatgactccacgccgccccggacccacccgcaagcattaccagccctatgccccaccacgcgacttcgcagcctatcgctccagagtgaagttcagcagaagcgccgacgcccctgcctaccagcagggacagaaccaactgtacaacgagctgaacctgggcagacgggaagagtacgacgtgctggacaagcggagaggcagggaccctgagatgggcggaaagccccagcggagaaagaacccccaggaaggactgtataacgaactccagaaagacaagatggccgaagcctacagcgagatcggcatgaagggcgagcggagaagaggcaagggccacgatggcctgtaccagggcctgagcaccgccaccaaggacacctatgacgccctgcacatgcaggccctgcctccaaga

SEQ ID NO: 26307 - DNA, 1023 bp, synthetic construct
  source 1..1023: mol_type = other DNA
gacaagcagctggacgccgacgtgtcccccaagcctaccatcttcctgccctctatcgccgagacaaagctccagaaggccggcacctacctgtgcctgctggaaaagttcttcccagatgtgattaagatccactggcaggaaaagaagtccaacaccatcctgggcagccaggaaggcaacaccatgaagaccaacgacacctacatgaagttcagctggctgaccgtgcccgagaagtccctggacaaagaacacagatgcatcgtgcggcacgaaaacaacaagaacggcgtggaccaggaaatcatcttcccacccatcaagaccgatgtgattacaatggaccccaaggacgaagtgaaaaccgactccaccgaccacgtgaagcccaaagagacagagaacaccaagcagcccagcaagagctgccacaagcccaaggccatcgtgcacaccgagaaagtgaacatgatgagcctgaccgtgctgggcctgcggatgctgttcgccaaaaccgtggccgtgaacttcctgctgaccgccaagctgttcttcctcaggagtaagaggagcaggctcctgcacagtgactacatgaacatgactccacgccgccccggacccacccgcaagcattaccagccctatgccccaccacgcgacttcgcagcctatcgctccagagtgaagttcagcagaagcgccgacgcccctgcctaccagcagggacagaaccaactgtacaacgagctgaacctgggcagacgggaagagtacgacgtgctggacaagcggagaggcagggaccctgagatgggcggaaagccccagcggagaaagaacccccaggaaggactgtataacgaactccagaaagacaagatggccgaagcctacagcgagatcggcatgaagggcgagcggagaagaggcaagggccacgatggcctgtaccagggcctgagcaccgccaccaaggacacctatgacgccctgcacatgcaggccctgcctccaaga

SEQ ID NO: 26308 - DNA, 1002 bp, synthetic construct
  source 1..1002: mol_type = other DNA
gacaagcagctggacgccgacgtgtcccccaagcctaccatcttcctgccctctatcgccgagacaaagctccagaaggccggcacctacctgtgcctgctggaaaagttcttcccagatgtgattaagatccactggcaggaaaagaagtccaacaccatcctgggcagccaggaaggcaacaccatgaagaccaacgacacctacatgaagttcagctggctgaccgtgcccgagaagtccctggacaaagaacacagatgcatcgtgcggcacgaaaacaacaagaacggcgtggaccaggaaatcatcttcccacccatcaagaccgatgtgattacaatggaccccaaggacgaccacgtgaagcccaaagagacagagaacaccaagcagcccagcaagagctgccacaagcccaaggccatcgtgcacaccgagaaagtgaacatgatgagcctgaccgtgctgggcctgcggatgctgttcgccaaaaccgtggccgtgaacttcctgctgaccgccaagctgttcttcctcaggagtaagaggagcaggctcctgcacagtgactacatgaacatgactccacgccgccccggacccacccgcaagcattaccagccctatgccccaccacgcgacttcgcagcctatcgctccagagtgaagttcagcagaagcgccgacgcccctgcctaccagcagggacagaaccaactgtacaacgagctgaacctgggcagacgggaagagtacgacgtgctggacaagcggagaggcagggaccctgagatgggcggaaagccccagcggagaaagaacccccaggaaggactgtataacgaactccagaaagacaagatggccgaagcctacagcgagatcggcatgaagggcgagcggagaagaggcaagggccacgatggcctgtaccagggcctgagcaccgccaccaaggacacctatgacgccctgcacatgcaggccctgcctccaaga

SEQ ID NO: 26309 - DNA, 984 bp, synthetic construct; identical to SEQ ID NO: 26285
  source 1..984: mol_type = other DNA

SEQ ID NO: 26310 - DNA, 954 bp, synthetic construct; identical to SEQ ID NO: 26286
  source 1..954: mol_type = other DNA

SEQ ID NO: 26311 - DNA, 981 bp, synthetic construct; identical to SEQ ID NO: 26287
  source 1..981: mol_type = other DNA

SEQ ID NO: 26312 - DNA, 963 bp, synthetic construct; identical to SEQ ID NO: 26288
  source 1..963: mol_type = other DNA

SEQ ID NO: 26313 - DNA, 957 bp, synthetic construct; identical to SEQ ID NO: 26289
  source 1..957: mol_type = other DNA

SEQ ID NO: 26314 - DNA, 987 bp, synthetic construct; identical to SEQ ID NO: 26290
  source 1..987: mol_type = other DNA

SEQ ID NO: 26315 - DNA, 1008 bp, synthetic construct; identical to SEQ ID NO: 26291
  source 1..1008: mol_type = other DNA

SEQ ID NO: 26316 - DNA, 987 bp, synthetic construct; identical to SEQ ID NO: 26292
  source 1..987: mol_type = other DNA

SEQ ID NO: 26317 - DNA, 927 bp, synthetic construct
  source 1..927: mol_type = other DNA
cccaagcctaccatcttcctgccctctatcgccgagacaaagctccagaaggccggcacctacctgtgcctgctggaaaagttcttcccagatgtgattaagatccactggcaggaaaagaagtccaacaccatcctgggcagccaggaaggcaacaccatgaagaccaacgacacctacatgaagttcagctggctgaccgtgcccgagaagtccctggacaaagaacacagatgcatcgtgcggcacgaaaacaacaagaacggcgtggaccaggaaatcatcatccccgaggacacattcttcccaagccccgagagcagctgcgacgtgaagctggtggaaaagagcttcgagacagacaccaacctgaacttccagaacctgagcgtgatcggcttcagaatcctgctgctgaaagtggccggctttaacctgctgatgaccctgcggctgtggtccagcaggagtaagaggagcaggctcctgcacagtgactacatgaacatgactccacgccgccccggacccacccgcaagcattaccagccctatgccccaccacgcgacttcgcagcctatcgctccagagtgaagttcagcagaagcgccgacgcccctgcctaccagcagggacagaaccaactgtacaacgagctgaacctgggcagacgggaagagtacgacgtgctggacaagcggagaggcagggaccctgagatgggcggaaagccccagcggagaaagaacccccaggaaggactgtataacgaactccagaaagacaagatggccgaagcctacagcgagatcggcatgaagggcgagcggagaagaggcaagggccacgatggcctgtaccagggcctgagcaccgccaccaaggacacctatgacgccctgcacatgcaggccctgcctccaaga

SEQ ID NO: 26318 - DNA, 897 bp, synthetic construct
  source 1..897: mol_type = other DNA
cccaagcctaccatcttcctgccctctatcgccgagacaaagctccagaaggccggcacctacctgtgcctgctggaaaagttcttcccagatgtgattaagatccactggcaggaaaagaagtccaacaccatcctgggcagccaggaaggcaacaccatgaagaccaacgacacctacatgaagttcagctggctgaccgtgcccgagaagtccctggacaaagaacacagatgcatcgtgcggcacgaaaacaacaagaacggcgtggaccaggaaatcatcgagagcagctgcgacgtgaagctggtggaaaagagcttcgagacagacaccaacctgaacttccagaacctgagcgtgatcggcttcagaatcctgctgctgaaagtggccggctttaacctgctgatgaccctgcggctgtggtccagcaggagtaagaggagcaggctcctgcacagtgactacatgaacatgactccacgccgccccggacccacccgcaagcattaccagccctatgccccaccacgcgacttcgcagcctatcgctccagagtgaagttcagcagaagcgccgacgcccctgcctaccagcagggacagaaccaactgtacaacgagctgaacctgggcagacgggaagagtacgacgtgctggacaagcggagaggcagggaccctgagatgggcggaaagccccagcggagaaagaacccccaggaaggactgtataacgaactccagaaagacaagatggccgaagcctacagcgagatcggcatgaagggcgagcggagaagaggcaagggccacgatggcctgtaccagggcctgagcaccgccaccaaggacacctatgacgccctgcacatgcaggccctgcctccaaga

SEQ ID NO: 26319 - DNA, 924 bp, synthetic construct
  source 1..924: mol_type = other DNA
cccaagcctaccatcttcctgccctctatcgccgagacaaagctccagaaggccggcacctacctgtgcctgctggaaaagttcttcccagatgtgattaagatccactggcaggaaaagaagtccaacaccatcctgggcagccaggaaggcaacaccatgaagaccaacgacacctacatgaagttcagctggctgaccgtgcccgagaagtccctggacaaagaacacagatgcatcgtgcggcacgaaaacaacaagaacggcgtggaccaggaaatcatccccgaggacacattcttcccaagccccgagagcagctgcgacgtgaagctggtggaaaagagcttcgagacagacaccaacctgaacttccagaacctgagcgtgatcggcttcagaatcctgctgctgaaagtggccggctttaacctgctgatgaccctgcggctgtggtccagcaggagtaagaggagcaggctcctgcacagtgactacatgaacatgactccacgccgccccggacccacccgcaagcattaccagccctatgccccaccacgcgacttcgcagcctatcgctccagagtgaagttcagcagaagcgccgacgcccctgcctaccagcagggacagaaccaactgtacaacgagctgaacctgggcagacgggaagagtacgacgtgctggacaagcggagaggcagggaccctgagatgggcggaaagccccagcggagaaagaacccccaggaaggactgtataacgaactccagaaagacaagatggccgaagcctacagcgagatcggcatgaagggcgagcggagaagaggcaagggccacgatggcctgtaccagggcctgagcaccgccaccaaggacacctatgacgccctgcacatgcaggccctgcctccaaga

SEQ ID NO: 26320 - DNA, 906 bp, synthetic construct
  source 1..906: mol_type = other DNA
cccaagcctaccatcttcctgccctctatcgccgagacaaagctccagaaggccggcacctacctgtgcctgctggaaaagttcttcccagatgtgattaagatccactggcaggaaaagaagtccaacaccatcctgggcagccaggaaggcaacaccatgaagaccaacgacacctacatgaagttcagctggctgaccgtgcccgagaagtccctggacaaagaacacagatgcatcgtgcggcacgaaaacaacaagaacggcgtggaccaggaaatcatcggcagagccgattgcggctttaccagcgagagctaccagcagggcgtgctgagcgccaccatcctgtacgagatcctgctgggcaaggccaccctgtacgccgtgctggtgtctgccctggtgctgatggctatggtcaagcggaaggacagccggggaaggagtaagaggagcaggctcctgcacagtgactacatgaacatgactccacgccgccccggacccacccgcaagcattaccagccctatgccccaccacgcgacttcgcagcctatcgctccagagtgaagttcagcagaagcgccgacgcccctgcctaccagcagggacagaaccaactgtacaacgagctgaacctgggcagacgggaagagtacgacgtgctggacaagcggagaggcagggaccctgagatgggcggaaagccccagcggagaaagaacccccaggaaggactgtataacgaactccagaaagacaagatggccgaagcctacagcgagatcggcatgaagggcgagcggagaagaggcaagggccacgatggcctgtaccagggcctgagcaccgccaccaaggacacctatgacgccctgcacatgcaggccctgcctccaaga

SEQ ID NO: 26321 - DNA, 900 bp, synthetic construct
  source 1..900: mol_type = other DNA
cccaagcctaccatcttcctgccctctatcgccgagacaaagctccagaaggccggcacctacctgtgcctgctggaaaagttcttcccagatgtgattaagatccactggcaggaaaagaagtccaacaccatcctgggcagccaggaaggcaacaccatgaagaccaacgacacctacatgaagttcagctggctgaccgtgcccgagaagtccctggacaaagaacacagatgcatcgtgcggcacgaaaacaacaagaacggcgtggaccaggaaatcatcgccgattgcggctttaccagcgagagctaccagcagggcgtgctgagcgccaccatcctgtacgagatcctgctgggcaaggccaccctgtacgccgtgctggtgtctgccctggtgctgatggctatggtcaagcggaaggacagccggggaaggagtaagaggagcaggctcctgcacagtgactacatgaacatgactccacgccgccccggacccacccgcaagcattaccagccctatgccccaccacgcgacttcgcagcctatcgctccagagtgaagttcagcagaagcgccgacgcccctgcctaccagcagggacagaaccaactgtacaacgagctgaacctgggcagacgggaagagtacgacgtgctggacaagcggagaggcagggaccctgagatgggcggaaagccccagcggagaaagaacccccaggaaggactgtataacgaactccagaaagacaagatggccgaagcctacagcgagatcggcatgaagggcgagcggagaagaggcaagggccacgatggcctgtaccagggcctgagcaccgccaccaaggacacctatgacgccctgcacatgcaggccctgcctccaaga

SEQ ID NO: 26322 - DNA, 930 bp, synthetic construct
  source 1..930: mol_type = other DNA
cccaagcctaccatcttcctgccctctatcgccgagacaaagctccagaaggccggcacctacctgtgcctgctggaaaagttcttcccagatgtgattaagatccactggcaggaaaagaagtccaacaccatcctgggcagccaggaaggcaacaccatgaagaccaacgacacctacatgaagttcagctggctgaccgtgcccgagaagtccctggacaaagaacacagatgcatcgtgcggcacgaaaacaacaagaacggcgtggaccaggaaatcatccagatcgtgtctgccgaagcctggggcagagccgattgcggctttaccagcgagagctaccagcagggcgtgctgagcgccaccatcctgtacgagatcctgctgggcaaggccaccctgtacgccgtgctggtgtctgccctggtgctgatggctatggtcaagcggaaggacagccggggaaggagtaagaggagcaggctcctgcacagtgactacatgaacatgactccacgccgccccggacccacccgcaagcattaccagccctatgccccaccacgcgacttcgcagcctatcgctccagagtgaagttcagcagaagcgccgacgcccctgcctaccagcagggacagaaccaactgtacaacgagctgaacctgggcagacgggaagagtacgacgtgctggacaagcggagaggcagggaccctgagatgggcggaaagccccagcggagaaagaacccccaggaaggactgtataacgaactccagaaagacaagatggccgaagcctacagcgagatcggcatgaagggcgagcggagaagaggcaagggccacgatggcctgtaccagggcctgagcaccgccaccaaggacacctatgacgccctgcacatgcaggccctgcctccaaga

SEQ ID NO: 26323 - DNA, 954 bp, synthetic construct; identical to SEQ ID NO: 25759
  source 1..954: mol_type = other DNA

SEQ ID NO: 26324 - DNA, 948 bp, synthetic construct
  source 1..948: mol_type = other DNA
cccaagcctaccatcttcctgccctctatcgccgagacaaagctccagaaggccggcacctacctgtgcctgctggaaaagttcttcccagatgtgattaagatccactggcaggaaaagaagtccaacaccatcctgggcagccaggaaggcaacaccatgaagaccaacgacacctacatgaagttcagctggctgaccgtgcccgagaagtccctggacaaagaacacagatgcatcgtgcggcacgaaaacaacaagaacggcgtggaccaggaaatcatccccatcaagaccgatgtgattacaatggaccccaaggacaactgctccaaggacgccaacgataccctgctgctccagctgaccaacaccagcgcctactacatgtacttgttgctgctgctgaagtccgtggtgtacttcgccatcatcacatgctgcctgctgcggagaaccgccttctgctgcaacggcgagaagtctaggagtaagaggagcaggctcctgcacagtgactacatgaacatgactccacgccgccccggacccacccgcaagcattaccagccctatgccccaccacgcgacttcgcagcctatcgctccagagtgaagttcagcagaagcgccgacgcccctgcctaccagcagggacagaaccaactgtacaacgagctgaacctgggcagacgggaagagtacgacgtgctggacaagcggagaggcagggaccctgagatgggcggaaagccccagcggagaaagaacccccaggaaggactgtataacgaactccagaaagacaagatggccgaagcctacagcgagatcggcatgaagggcgagcggagaagaggcaagggccacgatggcctgtaccagggcctgagcaccgccaccaaggacacctatgacgccctgcacatgcaggccctgcctccaaga

SEQ ID NO: 26325 - DNA, 924 bp, synthetic construct
  source 1..924: mol_type = other DNA
cccaagcctaccatcttcctgccctctatcgccgagacaaagctccagaaggccggcacctacctgtgcctgctggaaaagttcttcccagatgtgattaagatccactggcaggaaaagaagtccaacaccatcctgggcagccaggaaggcaacaccatgaagaccaacgacacctacatgaagttcagctggctgaccgtgcccgagaagtccctggacaaagaacacagatgcatcgtgcggcacgaaaacaacaagaacggcgtggaccaggaaatcatcatggaccccaaggacaactgctccaaggacgccaacgataccctgctgctccagctgaccaacaccagcgcctactacatgtacttgttgctgctgctgaagtccgtggtgtacttcgccatcatcacatgctgcctgctgcggagaaccgccttctgctgcaacggcgagaagtctaggagtaagaggagcaggctcctgcacagtgactacatgaacatgactccacgccgccccggacccacccgcaagcattaccagccctatgccccaccacgcgacttcgcagcctatcgctccagagtgaagttcagcagaagcgccgacgcccctgcctaccagcagggacagaaccaactgtacaacgagctgaacctgggcagacgggaagagtacgacgtgctggacaagcggagaggcagggaccctgagatgggcggaaagccccagcggagaaagaacccccaggaaggactgtataacgaactccagaaagacaagatggccgaagcctacagcgagatcggcatgaagggcgagcggagaagaggcaagggccacgatggcctgtaccagggcctgagcaccgccaccaaggacacctatgacgccctgcacatgcaggccctgcctccaaga

SEQ ID NO: 26326 - DNA, 948 bp, synthetic construct; identical to SEQ ID NO: 26324
  source 1..948: mol_type = other DNA

SEQ ID NO: 26327 - DNA, 906 bp, synthetic construct
  source 1..906: mol_type = other DNA
cccaagcctaccatcttcctgccctctatcgccgagacaaagctccagaaggccggcacctacctgtgcctgctggaaaagttcttcccagatgtgattaagatccactggcaggaaaagaagtccaacaccatcctgggcagccaggaaggcaacaccatgaagaccaacgacacctacatgaagttcagctggctgaccgtgcccgagaagtccctggacaaagaacacagatgcatcgtgcggcacgaaaacaacaagaacggcgtggaccaggaaatcatctgctccaaggacgccaacgataccctgctgctccagctgaccaacaccagcgcctactacatgtacttgttgctgctgctgaagtccgtggtgtacttcgccatcatcacatgctgcctgctgcggagaaccgccttctgctgcaacggcgagaagtctaggagtaagaggagcaggctcctgcacagtgactacatgaacatgactccacgccgccccggacccacccgcaagcattaccagccctatgccccaccacgcgacttcgcagcctatcgctccagagtgaagttcagcagaagcgccgacgcccctgcctaccagcagggacagaaccaactgtacaacgagctgaacctgggcagacgggaagagtacgacgtgctggacaagcggagaggcagggaccctgagatgggcggaaagccccagcggagaaagaacccccaggaaggactgtataacgaactccagaaagacaagatggccgaagcctacagcgagatcggcatgaagggcgagcggagaagaggcaagggccacgatggcctgtaccagggcctgagcaccgccaccaaggacacctatgacgccctgcacatgcaggccctgcctccaaga

SEQ ID NO: 26328 - DNA, 951 bp, synthetic construct
  source 1..951: mol_type = other DNA
cccaagcctaccatcttcctgccctctatcgccgagacaaagctccagaaggccggcacctacctgtgcctgctggaaaagttcttcccagatgtgattaagatccactggcaggaaaagaagtccaacaccatcctgggcagccaggaaggcaacaccatgaagaccaacgacacctacatgaagttcagctggctgaccgtgcccgagaagtccctggacaaagaacacagatgcatcgtgcggcacgaaaacaacaagaacggcgtggaccaggaaatcatcgaagtgaaaaccgactccaccgaccacgtgaagcccaaagagacagagaacaccaagcagcccagcaagagctgccacaagcccaaggccatcgtgcacaccgagaaagtgaacatgatgagcctgaccgtgctgggcctgcggatgctgttcgccaaaaccgtggccgtgaacttcctgctgaccgccaagctgttcttcctcaggagtaagaggagcaggctcctgcacagtgactacatgaacatgactccacgccgccccggacccacccgcaagcattaccagccctatgccccaccacgcgacttcgcagcctatcgctccagagtgaagttcagcagaagcgccgacgcccctgcctaccagcagggacagaaccaactgtacaacgagctgaacctgggcagacgggaagagtacgacgtgctggacaagcggagaggcagggaccctgagatgggcggaaagccccagcggagaaagaacccccaggaaggactgtataacgaactccagaaagacaagatggccgaagcctacagcgagatcggcatgaagggcgagcggagaagaggcaagggccacgatggcctgtaccagggcctgagcaccgccaccaaggacacctatgacgccctgcacatgcaggccctgcctccaaga

SEQ ID NO: 26329 - DNA, 930 bp, synthetic construct
  source 1..930: mol_type = other DNA
cccaagcctaccatcttcctgccctctatcgccgagacaaagctccagaaggccggcacctacctgtgcctgctggaaaagttcttcccagatgtgattaagatccactggcaggaaaagaagtccaacaccatcctgggcagccaggaaggcaacaccatgaagaccaacgacacctacatgaagttcagctggctgaccgtgcccgagaagtccctggacaaagaacacagatgcatcgtgcggcacgaaaacaacaagaacggcgtggaccaggaaatcatcgaccacgtgaagcccaaagagacagagaacaccaagcagcccagcaagagctgccacaagcccaaggccatcgtgcacaccgagaaagtgaacatgatgagcctgaccgtgctgggcctgcggatgctgttcgccaaaaccgtggccgtgaacttcctgctgaccgccaagctgttcttcctcaggagtaagaggagcaggctcctgcacagtgactacatgaacatgactccacgccgccccggacccacccgcaagcattaccagccctatgccccaccacgcgacttcgcagcctatcgctccagagtgaagttcagcagaagcgccgacgcccctgcctaccagcagggacagaaccaactgtacaacgagctgaacctgggcagacgggaagagtacgacgtgctggacaagcggagaggcagggaccctgagatgggcggaaagccccagcggagaaagaacccccaggaaggactgtataacgaactccagaaagacaagatggccgaagcctacagcgagatcggcatgaagggcgagcggagaagaggcaagggccacgatggcctgtaccagggcctgagcaccgccaccaaggacacctatgacgccctgcacatgcaggccctgcctccaaga

SEQ ID NO: 26330 - DNA, 897 bp, synthetic construct
  source 1..897: mol_type = other DNA
agccagcctcacaccaagcccagcgtgttcgtgatgaagaacggcaccaacgtggcctgcctcgtgaaagagttctaccccaaggacatcaggatcaacctggtgtccagcaagaagatcaccgagttcgaccccgccatcgtgatctcccccagcggcaagtacaacgccgtgaagctggggaagtacgaggacagcaacagcgtgacctgctccgtgcagcacgacaacaagaccgtgcacagcaccgactttatccccgaggacacattcttcccaagccccgagagcagctgcgacgtgaagctggtggaaaagagcttcgagacagacaccaacctgaacttccagaacctgagcgtgatcggcttcagaatcctgctgctgaaagtggccggctttaacctgctgatgaccctgcggctgtggtccagcaggagtaagaggagcaggctcctgcacagtgactacatgaacatgactccacgccgccccggacccacccgcaagcattaccagccctatgccccaccacgcgacttcgcagcctatcgctccagagtgaagttcagcagaagcgccgacgcccctgcctaccagcagggacagaaccaactgtacaacgagctgaacctgggcagacgggaagagtacgacgtgctggacaagcggagaggcagggaccctgagatgggcggaaagccccagcggagaaagaacccccaggaaggactgtataacgaactccagaaagacaagatggccgaagcctacagcgagatcggcatgaagggcgagcggagaagaggcaagggccacgatggcctgtaccagggcctgagcaccgccaccaaggacacctatgacgccctgcacatgcaggccctgcctccaaga

SEQ ID NO: 26331 - DNA, 867 bp, synthetic construct
  source 1..867: mol_type = other DNA
agccagcctcacaccaagcccagcgtgttcgtgatgaagaacggcaccaacgtggcctgcctcgtgaaagagttctaccccaaggacatcaggatcaacctggtgtccagcaagaagatcaccgagttcgaccccgccatcgtgatctcccccagcggcaagtacaacgccgtgaagctggggaagtacgaggacagcaacagcgtgacctgctccgtgcagcacgacaacaagaccgtgcacagcaccgactttgagagcagctgcgacgtgaagctggtggaaaagagcttcgagacagacaccaacctgaacttccagaacctgagcgtgatcggcttcagaatcctgctgctgaaagtggccggctttaacctgctgatgaccctgcggctgtggtccagcaggagtaagaggagcaggctcctgcacagtgactacatgaacatgactccacgccgccccggacccacccgcaagcattaccagccctatgccccaccacgcgacttcgcagcctatcgctccagagtgaagttcagcagaagcgccgacgcccctgcctaccagcagggacagaaccaactgtacaacgagctgaacctgggcagacgggaagagtacgacgtgctggacaagcggagaggcagggaccctgagatgggcggaaagccccagcggagaaagaacccccaggaaggactgtataacgaactccagaaagacaagatggccgaagcctacagcgagatcggcatgaagggcgagcggagaagaggcaagggccacgatggcctgtaccagggcctgagcaccgccaccaaggacacctatgacgccctgcacatgcaggccctgcctccaaga

SEQ ID NO: 26332 - DNA, 894 bp, synthetic construct
  source 1..894: mol_type = other DNA
agccagcctcacaccaagcccagcgtgttcgtgatgaagaacggcaccaacgtggcctgcctcgtgaaagagttctaccccaaggacatcaggatcaacctggtgtccagcaagaagatcaccgagttcgaccccgccatcgtgatctcccccagcggcaagtacaacgccgtgaagctggggaagtacgaggacagcaacagcgtgacctgctccgtgcagcacgacaacaagaccgtgcacagcaccgactttcccgaggacacattcttcccaagccccgagagcagctgcgacgtgaagctggtggaaaagagcttcgagacagacaccaacctgaacttccagaacctgagcgtgatcggcttcagaatcctgctgctgaaagtggccggctttaacctgctgatgaccctgcggctgtggtccagcaggagtaagaggagcaggctcctgcacagtgactacatgaacatgactccacgccgccccggacccacccgcaagcattaccagccctatgccccaccacgcgacttcgcagcctatcgctccagagtgaagttcagcagaagcgccgacgcccctgcctaccagcagggacagaaccaactgtacaacgagctgaacctgggcagacgggaagagtacgacgtgctggacaagcggagaggcagggaccctgagatgggcggaaagccccagcggagaaagaacccccaggaaggactgtataacgaactccagaaagacaagatggccgaagcctacagcgagatcggcatgaagggcgagcggagaagaggcaagggccacgatggcctgtaccagggcctgagcaccgccaccaaggacacctatgacgccctgcacatgcaggccctgcctccaaga

SEQ ID NO: 26333 - DNA, 876 bp, synthetic construct
  source 1..876: mol_type = other DNA
agccagcctcacaccaagcccagcgtgttcgtgatgaagaacggcaccaacgtggcctgcctcgtgaaagagttctaccccaaggacatcaggatcaacctggtgtccagcaagaagatcaccgagttcgaccccgccatcgtgatctcccccagcggcaagtacaacgccgtgaagctggggaagtacgaggacagcaacagcgtgacctgctccgtgcagcacgacaacaagaccgtgcacagcaccgactttggcagagccgattgcggctttaccagcgagagctaccagcagggcgtgctgagcgccaccatcctgtacgagatcctgctgggcaaggccaccctgtacgccgtgctggtgtctgccctggtgctgatggctatggtcaagcggaaggacagccggggaaggagtaagaggagcaggctcctgcacagtgactacatgaacatgactccacgccgccccggacccacccgcaagcattaccagccctatgccccaccacgcgacttcgcagcctatcgctccagagtgaagttcagcagaagcgccgacgcccctgcctaccagcagggacagaaccaactgtacaacgagctgaacctgggcagacgggaagagtacgacgtgctggacaagcggagaggcagggaccctgagatgggcggaaagccccagcggagaaagaacccccaggaaggactgtataacgaactccagaaagacaagatggccgaagcctacagcgagatcggcatgaagggcgagcggagaagaggcaagggccacgatggcctgtaccagggcctgagcaccgccaccaaggacacctatgacgccctgcacatgcaggccctgcctccaaga

SEQ ID NO: 26334 - DNA, 870 bp, synthetic construct
  source 1..870: mol_type = other DNA
agccagcctcacaccaagcccagcgtgttcgtgatgaagaacggcaccaacgtggcctgcctcgtgaaagagttctaccccaaggacatcaggatcaacctggtgtccagcaagaagatcaccgagttcgaccccgccatcgtgatctcccccagcggcaagtacaacgccgtgaagctggggaagtacgaggacagcaacagcgtgacctgctccgtgcagcacgacaacaagaccgtgcacagcaccgactttgccgattgcggctttaccagcgagagctaccagcagggcgtgctgagcgccaccatcctgtacgagatcctgctgggcaaggccaccctgtacgccgtgctggtgtctgccctggtgctgatggctatggtcaagcggaaggacagccggggaaggagtaagaggagcaggctcctgcacagtgactacatgaacatgactccacgccgccccggacccacccgcaagcattaccagccctatgccccaccacgcgacttcgcagcctatcgctccagagtgaagttcagcagaagcgccgacgcccctgcctaccagcagggacagaaccaactgtacaacgagctgaacctgggcagacgggaagagtacgacgtgctggacaagcggagaggcagggaccctgagatgggcggaaagccccagcggagaaagaacccccaggaaggactgtataacgaactccagaaagacaagatggccgaagcctacagcgagatcggcatgaagggcgagcggagaagaggcaagggccacgatggcctgtaccagggcctgagcaccgccaccaaggacacctatgacgccctgcacatgcaggccctgcctccaaga

SEQ ID NO: 26335 - DNA, 900 bp, synthetic construct
  source 1..900: mol_type = other DNA
agccagcctcacaccaagcccagcgtgttcgtgatgaagaacggcaccaacgtggcctgcctcgtgaaagagttctaccccaaggacatcaggatcaacctggtgtccagcaagaagatcaccgagttcgaccccgccatcgtgatctcccccagcggcaagtacaacgccgtgaagctggggaagtacgaggacagcaacagcgtgacctgctccgtgcagcacgacaacaagaccgtgcacagcaccgactttcagatcgtgtctgccgaagcctggggcagagccgattgcggctttaccagcgagagctaccagcagggcgtgctgagcgccaccatcctgtacgagatcctgctgggcaaggccaccctgtacgccgtgctggtgtctgccctggtgctgatggctatggtcaagcggaaggacagccggggaaggagtaagaggagcaggctcctgcacagtgactacatgaacatgactccacgccgccccggacccacccgcaagcattaccagccctatgccccaccacgcgacttcgcagcctatcgctccagagtgaagttcagcagaagcgccgacgcccctgcctaccagcagggacagaaccaactgtacaacgagctgaacctgggcagacgggaagagtacgacgtgctggacaagcggagaggcagggaccctgagatgggcggaaagccccagcggagaaagaacccccaggaaggactgtataacgaactccagaaagacaagatggccgaagcctacagcgagatcggcatgaagggcgagcggagaagaggcaagggccacgatggcctgtaccagggcctgagcaccgccaccaaggacacctatgacgccctgcacatgcaggccctgcctccaaga

SEQ ID NO: 26336 - DNA, 924 bp, synthetic construct
  source 1..924: mol_type = other DNA
agccagcctcacaccaagcccagcgtgttcgtgatgaagaacggcaccaacgtggcctgcctcgtgaaagagttctaccccaaggacatcaggatcaacctggtgtccagcaagaagatcaccgagttcgaccccgccatcgtgatctcccccagcggcaagtacaacgccgtgaagctggggaagtacgaggacagcaacagcgtgacctgctccgtgcagcacgacaacaagaccgtgcacagcaccgactttttcccacccatcaagaccgatgtgattacaatggaccccaaggacaactgctccaaggacgccaacgataccctgctgctccagctgaccaacaccagcgcctactacatgtacttgttgctgctgctgaagtccgtggtgtacttcgccatcatcacatgctgcctgctgcggagaaccgccttctgctgcaacggcgagaagtctaggagtaagaggagcaggctcctgcacagtgactacatgaacatgactccacgccgccccggacccacccgcaagcattaccagccctatgccccaccacgcgacttcgcagcctatcgctccagagtgaagttcagcagaagcgccgacgcccctgcctaccagcagggacagaaccaactgtacaacgagctgaacctgggcagacgggaagagtacgacgtgctggacaagcggagaggcagggaccctgagatgggcggaaagccccagcggagaaagaacccccaggaaggactgtataacgaactccagaaagacaagatggccgaagcctacagcgagatcggcatgaagggcgagcggagaagaggcaagggccacgatggcctgtaccagggcctgagcaccgccaccaaggacacctatgacgccctgcacatgcaggccctgcctccaaga

SEQ ID NO: 26337 - DNA, 918 bp, synthetic construct
  source 1..918: mol_type = other DNA
agccagcctcacaccaagcccagcgtgttcgtgatgaagaacggcaccaacgtggcctgcctcgtgaaagagttctaccccaaggacatcaggatcaacctggtgtccagcaagaagatcaccgagttcgaccccgccatcgtgatctcccccagcggcaagtacaacgccgtgaagctggggaagtacgaggacagcaacagcgtgacctgctccgtgcagcacgacaacaagaccgtgcacagcaccgactttcccatcaagaccgatgtgattacaatggaccccaaggacaactgctccaaggacgccaacgataccctgctgctccagctgaccaacaccagcgcctactacatgtacttgttgctgctgctgaagtccgtggtgtacttcgccatcatcacatgctgcctgctgcggagaaccgccttctgctgcaacggcgagaagtctaggagtaagaggagcaggctcctgcacagtgactacatgaacatgactccacgccgccccggacccacccgcaagcattaccagccctatgccccaccacgcgacttcgcagcctatcgctccagagtgaagttcagcagaagcgccgacgcccctgcctaccagcagggacagaaccaactgtacaacgagctgaacctgggcagacgggaagagtacgacgtgctggacaagcggagaggcagggaccctgagatgggcggaaagccccagcggagaaagaacccccaggaaggactgtataacgaactccagaaagacaagatggccgaagcctacagcgagatcggcatgaagggcgagcggagaagaggcaagggccacgatggcctgtaccagggcctgagcaccgccaccaaggacacctatgacgccctgcacatgcaggccctgcctccaaga

SEQ ID NO: 26338 - DNA, 894 bp, synthetic construct
  source 1..894: mol_type = other DNA
agccagcctcacaccaagcccagcgtgttcgtgatgaagaacggcaccaacgtggcctgcctcgtgaaagagttctaccccaaggacatcaggatcaacctggtgtccagcaagaagatcaccgagttcgaccccgccatcgtgatctcccccagcggcaagtacaacgccgtgaagctggggaagtacgaggacagcaacagcgtgacctgctccgtgcagcacgacaacaagaccgtgcacagcaccgactttatggaccccaaggacaactgctccaaggacgccaacgataccctgctgctccagctgaccaacaccagcgcctactacatgtacttgttgctgctgctgaagtccgtggtgtacttcgccatcatcacatgctgcctgctgcggagaaccgccttctgctgcaacggcgagaagtctaggagtaagaggagcaggctcctgcacagtgactacatgaacatgactccacgccgccccggacccacccgcaagcattaccagccctatgccccaccacgcgacttcgcagcctatcgctccagagtgaagttcagcagaagcgccgacgcccctgcctaccagcagggacagaaccaactgtacaacgagctgaacctgggcagacgggaagagtacgacgtgctggacaagcggagaggcagggaccctgagatgggcggaaagccccagcggagaaagaacccccaggaaggactgtataacgaactccagaaagacaagatggccgaagcctacagcgagatcggcatgaagggcgagcggagaagaggcaagggccacgatggcctgtaccagggcctgagcaccgccaccaaggacacctatgacgccctgcacatgcaggccctgcctccaaga

SEQ ID NO: 26339 - DNA, 921 bp, synthetic construct; identical to SEQ ID NO: 25283
  source 1..921: mol_type = other DNA

SEQ ID NO: 26340 - DNA, 900 bp, synthetic construct
  source 1..900: mol_type = other DNA
agccagcctcacaccaagcccagcgtgttcgtgatgaagaacggcaccaacgtggcctgcctcgtgaaagagttctaccccaaggacatcaggatcaacctggtgtccagcaagaagatcaccgagttcgaccccgccatcgtgatctcccccagcggcaagtacaacgccgtgaagctggggaagtacgaggacagcaacagcgtgacctgctccgtgcagcacgacaacaagaccgtgcacagcaccgactttgaccacgtgaagcccaaagagacagagaacaccaagcagcccagcaagagctgccacaagcccaaggccatcgtgcacaccgagaaagtgaacatgatgagcctgaccgtgctgggcctgcggatgctgttcgccaaaaccgtggccgtgaacttcctgctgaccgccaagctgttcttcctcaggagtaagaggagcaggctcctgcacagtgactacatgaacatgactccacgccgccccggacccacccgcaagcattaccagccctatgccccaccacgcgacttcgcagcctatcgctccagagtgaagttcagcagaagcgccgacgcccctgcctaccagcagggacagaaccaactgtacaacgagctgaacctgggcagacgggaagagtacgacgtgctggacaagcggagaggcagggaccctgagatgggcggaaagccccagcggagaaagaacccccaggaaggactgtataacgaactccagaaagacaagatggccgaagcctacagcgagatcggcatgaagggcgagcggagaagaggcaagggccacgatggcctgtaccagggcctgagcaccgccaccaaggacacctatgacgccctgcacatgcaggccctgcctccaaga

SEQ ID NO: 26341 - DNA, 918 bp, synthetic construct
  source 1..918: mol_type = other DNA
agccagcctcacaccaagcccagcgtgttcgtgatgaagaacggcaccaacgtggcctgcctcgtgaaagagttctaccccaaggacatcaggatcaacctggtgtccagcaagaagatcaccgagttcgaccccgccatcgtgatctcccccagcggcaagtacaacgccgtgaagctggggaagtacgaggacagcaacagcgtgacctgctccgtgcagcacgacaacaagaccgtgcacagcaccgactttgaagtgaaaaccgactccaccatccccgaggacacattcttcccaagccccgagagcagctgcgacgtgaagctggtggaaaagagcttcgagacagacaccaacctgaacttccagaacctgagcgtgatcggcttcagaatcctgctgctgaaagtggccggctttaacctgctgatgaccctgcggctgtggtccagcaggagtaagaggagcaggctcctgcacagtgactacatgaacatgactccacgccgccccggacccacccgcaagcattaccagccctatgccccaccacgcgacttcgcagcctatcgctccagagtgaagttcagcagaagcgccgacgcccctgcctaccagcagggacagaaccaactgtacaacgagctgaacctgggcagacgggaagagtacgacgtgctggacaagcggagaggcagggaccctgagatgggcggaaagccccagcggagaaagaacccccaggaaggactgtataacgaactccagaaagacaagatggccgaagcctacagcgagatcggcatgaagggcgagcggagaagaggcaagggccacgatggcctgtaccagggcctgagcaccgccaccaaggacacctatgacgccctgcacatgcaggccctgcctccaaga

SEQ ID NO: 26342 - DNA, 888 bp, synthetic construct
  source 1..888: mol_type = other DNA
agccagcctcacaccaagcccagcgtgttcgtgatgaagaacggcaccaacgtggcctgcctcgtgaaagagttctaccccaaggacatcaggatcaacctggtgtccagcaagaagatcaccgagttcgaccccgccatcgtgatctcccccagcggcaagtacaacgccgtgaagctggggaagtacgaggacagcaacagcgtgacctgctccgtgcagcacgacaacaagaccgtgcacagcaccgactttgaagtgaaaaccgactccaccgagagcagctgcgacgtgaagctggtggaaaagagcttcgagacagacaccaacctgaacttccagaacctgagcgtgatcggcttcagaatcctgctgctgaaagtggccggctttaacctgctgatgaccctgcggctgtggtccagcaggagtaagaggagcaggctcctgcacagtgactacatgaacatgactccacgccgccccggacccacccgcaagcattaccagccctatgccccaccacgcgacttcgcagcctatcgctccagagtgaagttcagcagaagcgccgacgcccctgcctaccagcagggacagaaccaactgtacaacgagctgaacctgggcagacgggaagagtacgacgtgctggacaagcggagaggcagggaccctgagatgggcggaaagccccagcggagaaagaacccccaggaaggactgtataacgaactccagaaagacaagatggccgaagcctacagcgagatcggcatgaagggcgagcggagaagaggcaagggccacgatggcctgtaccagggcctgagcaccgccaccaaggacacctatgacgccctgcacatgcaggccctgcctccaaga

SEQ ID NO: 26343 - DNA, 915 bp, synthetic construct
  source 1..915: mol_type = other DNA
agccagcctcacaccaagcccagcgtgttcgtgatgaagaacggcaccaacgtggcctgcctcgtgaaagagttctaccccaaggacatcaggatcaacctggtgtccagcaagaagatcaccgagttcgaccccgccatcgtgatctcccccagcggcaagtacaacgccgtgaagctggggaagtacgaggacagcaacagcgtgacctgctccgtgcagcacgacaacaagaccgtgcacagcaccgactttgaagtgaaaaccgactccacccccgaggacacattcttcccaagccccgagagcagctgcgacgtgaagctggtggaaaagagcttcgagacagacaccaacctgaacttccagaacctgagcgtgatcggcttcagaatcctgctgctgaaagtggccggctttaacctgctgatgaccctgcggctgtggtccagcaggagtaagaggagcaggctcctgcacagtgactacatgaacatgactccacgccgccccggacccacccgcaagcattaccagccctatgccccaccacgcgacttcgcagcctatcgctccagagtgaagttcagcagaagcgccgacgcccctgcctaccagcagggacagaaccaactgtacaacgagctgaacctgggcagacgggaagagtacgacgtgctggacaagcggagaggcagggaccctgagatgggcggaaagccccagcggagaaagaacccccaggaaggactgtataacgaactccagaaagacaagatggccgaagcctacagcgagatcggcatgaagggcgagcggagaagaggcaagggccacgatggcctgtaccagggcctgagcaccgccaccaaggacacctatgacgccctgcacatgcaggccctgcctccaaga

SEQ ID NO: 26344 - DNA, 897 bp, synthetic construct
  source 1..897: mol_type = other DNA
agccagcctcacaccaagcccagcgtgttcgtgatgaagaacggcaccaacgtggcctgcctcgtgaaagagttctaccccaaggacatcaggatcaacctggtgtccagcaagaagatcaccgagttcgaccccgccatcgtgatctcccccagcggcaagtacaacgccgtgaagctggggaagtacgaggacagcaacagcgtgacctgctccgtgcagcacgacaacaagaccgtgcacagcaccgactttgaagtgaaaaccgactccaccggcagagccgattgcggctttaccagcgagagctaccagcagggcgtgctgagcgccaccatcctgtacgagatcctgctgggcaaggccaccctgtacgccgtgctggtgtctgccctggtgctgatggctatggtcaagcggaaggacagccggggaaggagtaagaggagcaggctcctgcacagtgactacatgaacatgactccacgccgccccggacccacccgcaagcattaccagccctatgccccaccacgcgacttcgcagcctatcgctccagagtgaagttcagcagaagcgccgacgcccctgcctaccagcagggacagaaccaactgtacaacgagctgaacctgggcagacgggaagagtacgacgtgctggacaagcggagaggcagggaccctgagatgggcggaaagccccagcggagaaagaacccccaggaaggactgtataacgaactccagaaagacaagatggccgaagcctacagcgagatcggcatgaagggcgagcggagaagaggcaagggccacgatggcctgtaccagggcctgagcaccgccaccaaggacacctatgacgccctgcacatgcaggccctgcctccaaga

SEQ ID NO: 26345 - DNA, 891 bp, synthetic construct
  source 1..891: mol_type = other DNA
agccagcctcacaccaagcccagcgtgttcgtgatgaagaacggcaccaacgtggcctgcctcgtgaaagagttctaccccaaggacatcaggatcaacctggtgtccagcaagaagatcaccgagttcgaccccgccatcgtgatctcccccagcggcaagtacaacgccgtgaagctggggaagtacgaggacagcaacagcgtgacctgctccgtgcagcacgacaacaagaccgtgcacagcaccgactttgaagtgaaaaccgactccaccgccgattgcggctttaccagcgagagctaccagcagggcgtgctgagcgccaccatcctgtacgagatcctgctgggcaaggccaccctgtacgccgtgctggtgtctgccctggtgctgatggctatggtcaagcggaaggacagccggggaaggagtaagaggagcaggctcctgcacagtgactacatgaacatgactccacgccgccccggacccacccgcaagcattaccagccctatgccccaccacgcgacttcgcagcctatcgctccagagtgaagttcagcagaagcgccgacgcccctgcctaccagcagggacagaaccaactgtacaacgagctgaacctgggcagacgggaagagtacgacgtgctggacaagcggagaggcagggaccctgagatgggcggaaagccccagcggagaaagaacccccaggaaggactgtataacgaactccagaaagacaagatggccgaagcctacagcgagatcggcatgaagggcgagcggagaagaggcaagggccacgatggcctgtaccagggcctgagcaccgccaccaaggacacctatgacgccctgcacatgcaggccctgcctccaaga

SEQ ID NO: 26346 - DNA, 921 bp, synthetic construct
  source 1..921: mol_type = other DNA
agccagcctcacaccaagcccagcgtgttcgtgatgaagaacggcaccaacgtggcctgcctcgtgaaagagttctaccccaaggacatcaggatcaacctggtgtccagcaagaagatcaccgagttcgaccccgccatcgtgatctcccccagcggcaagtacaacgccgtgaagctggggaagtacgaggacagcaacagcgtgacctgctccgtgcagcacgacaacaagaccgtgcacagcaccgactttgaagtgaaaaccgactccacccagatcgtgtctgccgaagcctggggcagagccgattgcggctttaccagcgagagctaccagcagggcgtgctgagcgccaccatcctgtacgagatcctgctgggcaaggccaccctgtacgccgtgctggtgtctgccctggtgctgatggctatggtcaagcggaaggacagccggggaaggagtaagaggagcaggctcctgcacagtgactacatgaacatgactccacgccgccccggacccacccgcaagcattaccagccctatgccccaccacgcgacttcgcagcctatcgctccagagtgaagttcagcagaagcgccgacgcccctgcctaccagcagggacagaaccaactgtacaacgagctgaacctgggcagacgggaagagtacgacgtgctggacaagcggagaggcagggaccctgagatgggcggaaagccccagcggagaaagaacccccaggaaggactgtataacgaactccagaaagacaagatggccgaagcctacagcgagatcggcatgaagggcgagcggagaagaggcaagggccacgatggcctgtaccagggcctgagcaccgccaccaaggacacctatgacgccctgcacatgcaggccctgcctccaaga

SEQ ID NO: 26347 - DNA, 945 bp, synthetic construct
  source 1..945: mol_type = other DNA
agccagcctcacaccaagcccagcgtgttcgtgatgaagaacggcaccaacgtggcctgcctcgtgaaagagttctaccccaaggacatcaggatcaacctggtgtccagcaagaagatcaccgagttcgaccccgccatcgtgatctcccccagcggcaagtacaacgccgtgaagctggggaagtacgaggacagcaacagcgtgacctgctccgtgcagcacgacaacaagaccgtgcacagcaccgactttgaagtgaaaaccgactccaccttcccacccatcaagaccgatgtgattacaatggaccccaaggacaactgctccaaggacgccaacgataccctgctgctccagctgaccaacaccagcgcctactacatgtacttgttgctgctgctgaagtccgtggtgtacttcgccatcatcacatgctgcctgctgcggagaaccgccttctgctgcaacggcgagaagtctaggagtaagaggagcaggctcctgcacagtgactacatgaacatgactccacgccgccccggacccacccgcaagcattaccagccctatgccccaccacgcgacttcgcagcctatcgctccagagtgaagttcagcagaagcgccgacgcccctgcctaccagcagggacagaaccaactgtacaacgagctgaacctgggcagacgggaagagtacgacgtgctggacaagcggagaggcagggaccctgagatgggcggaaagccccagcggagaaagaacccccaggaaggactgtataacgaactccagaaagacaagatggccgaagcctacagcgagatcggcatgaagggcgagcggagaagaggcaagggccacgatggcctgtaccagggcctgagcaccgccaccaaggacacctatgacgccctgcacatgcaggccctgcctccaaga

SEQ ID NO: 26348 - DNA, 939 bp, synthetic construct
  source 1..939: mol_type = other DNA
agccagcctcacaccaagcccagcgtgttcgtgatgaagaacggcaccaacgtggcctgcctcgtgaaagagttctaccccaaggacatcaggatcaacctggtgtccagcaagaagatcaccgagttcgaccccgccatcgtgatctcccccagcggcaagtacaacgccgtgaagctggggaagtacgaggacagcaacagcgtgacctgctccgtgcagcacgacaacaagaccgtgcacagcaccgactttgaagtgaaaaccgactccacccccatcaagaccgatgtgattacaatggaccccaaggacaactgctccaaggacgccaacgataccctgctgctccagctgaccaacaccagcgcctactacatgtacttgttgctgctgctgaagtccgtggtgtacttcgccatcatcacatgctgcctgctgcggagaaccgccttctgctgcaacggcgagaagtctaggagtaagaggagcaggctcctgcacagtgactacatgaacatgactccacgccgccccggacccacccgcaagcattaccagccctatgccccaccacgcgacttcgcagcctatcgctccagagtgaagttcagcagaagcgccgacgcccctgcctaccagcagggacagaaccaactgtacaacgagctgaacctgggcagacgggaagagtacgacgtgctggacaagcggagaggcagggaccctgagatgggcggaaagccccagcggagaaagaacccccaggaaggactgtataacgaactccagaaagacaagatggccgaagcctacagcgagatcggcatgaagggcgagcggagaagaggcaagggccacgatggcctgtaccagggcctgagcaccgccaccaaggacacctatgacgccctgcacatgcaggccctgcctccaaga

SEQ ID NO: 26349 - DNA, 915 bp, synthetic construct
  source 1..915: mol_type = other DNA
agccagcctcacaccaagcccagcgtgttcgtgatgaagaacggcaccaacgtggcctgcctcgtgaaagagttctaccccaaggacatcaggatcaacctggtgtccagcaagaagatcaccgagttcgaccccgccatcgtgatctcccccagcggcaagtacaacgccgtgaagctggggaagtacgaggacagcaacagcgtgacctgctccgtgcagcacgacaacaagaccgtgcacagcaccgactttgaagtgaaaaccgactccaccatggaccccaaggacaactgctccaaggacgccaacgataccctgctgctccagctgaccaacaccagcgcctactacatgtacttgttgctgctgctgaagtccgtggtgtacttcgccatcatcacatgctgcctgctgcggagaaccgccttctgctgcaacggcgagaagtctaggagtaagaggagcaggctcctgcacagtgactacatgaacatgactccacgccgccccggacccacccgcaagcattaccagccctatgccccaccacgcgacttcgcagcctatcgctccagagtgaagttcagcagaagcgccgacgcccctgcctaccagcagggacagaaccaactgtacaacgagctgaacctgggcagacgggaagagtacgacgtgctggacaagcggagaggcagggaccctgagatgggcggaaagccccagcggagaaagaacccccaggaaggactgtataacgaactccagaaagacaagatggccgaagcctacagcgagatcggcatgaagggcgagcggagaagaggcaagggccacgatggcctgtaccagggcctgagcaccgccaccaaggacacctatgacgccctgcacatgcaggccctgcctccaaga

SEQ ID NO: 26350 - DNA, 939 bp, synthetic construct; identical to SEQ ID NO: 26348
  source 1..939: mol_type = other DNA

SEQ ID NO: 26351 - DNA, 897 bp, synthetic construct
  source 1..897: mol_type = other DNA
agccagcctcacaccaagcccagcgtgttcgtgatgaagaacggcaccaacgtggcctgcctcgtgaaagagttctaccccaaggacatcaggatcaacctggtgtccagcaagaagatcaccgagttcgaccccgccatcgtgatctcccccagcggcaagtacaacgccgtgaagctggggaagtacgaggacagcaacagcgtgacctgctccgtgcagcacgacaacaagaccgtgcacagcaccgactttgaagtgaaaaccgactccacctgctccaaggacgccaacgataccctgctgctccagctgaccaacaccagcgcctactacatgtacttgttgctgctgctgaagtccgtggtgtacttcgccatcatcacatgctgcctgctgcggagaaccgccttctgctgcaacggcgagaagtctaggagtaagaggagcaggctcctgcacagtgactacatgaacatgactccacgccgccccggacccacccgcaagcattaccagccctatgccccaccacgcgacttcgcagcctatcgctccagagtgaagttcagcagaagcgccgacgcccctgcctaccagcagggacagaaccaactgtacaacgagctgaacctgggcagacgggaagagtacgacgtgctggacaagcggagaggcagggaccctgagatgggcggaaagccccagcggagaaagaacccccaggaaggactgtataacgaactccagaaagacaagatggccgaagcctacagcgagatcggcatgaagggcgagcggagaagaggcaagggccacgatggcctgtaccagggcctgagcaccgccaccaaggacacctatgacgccctgcacatgcaggccctgcctccaaga

SEQ ID NO: 26352 - DNA, 897 bp, synthetic construct; identical to SEQ ID NO: 26330
  source 1..897: mol_type = other DNA

SEQ ID NO: 26353 - DNA, 867 bp, synthetic construct; identical to SEQ ID NO: 26331
  source 1..867: mol_type = other DNA

SEQ ID NO: 26354 - DNA, 894 bp, synthetic construct; identical to SEQ ID NO: 26332
  source 1..894: mol_type = other DNA

SEQ ID NO: 26355 - DNA, 876 bp, synthetic construct; identical to SEQ ID NO: 26333
  source 1..876: mol_type = other DNA

SEQ ID NO: 26356 - DNA, 870 bp, synthetic construct; identical to SEQ ID NO: 26334
  source 1..870: mol_type = other DNA

SEQ ID NO: 26357 - DNA, 900 bp, synthetic construct; identical to SEQ ID NO: 26335
  source 1..900: mol_type = other DNA

SEQ ID NO: 26358 - DNA, 924 bp, synthetic construct; identical to SEQ ID NO: 26336
  source 1..924: mol_type = other DNA

SEQ ID NO: 26359 - DNA, 918 bp, synthetic construct; identical to SEQ ID NO: 26337
  source 1..918: mol_type = other DNA

SEQ ID NO: 26360 - DNA, 894 bp, synthetic construct; identical to SEQ ID NO: 26338
  source 1..894: mol_type = other DNA

SEQ ID NO: 26361 - DNA, 918 bp, synthetic construct; identical to SEQ ID NO: 26337
  source 1..918: mol_type = other DNA

SEQ ID NO: 26362 - DNA, 876 bp, synthetic construct
  source 1..876: mol_type = other DNA
agccagcctcacaccaagcccagcgtgttcgtgatgaagaacggcaccaacgtggcctgcctcgtgaaagagttctaccccaaggacatcaggatcaacctggtgtccagcaagaagatcaccgagttcgaccccgccatcgtgatctcccccagcggcaagtacaacgccgtgaagctggggaagtacgaggacagcaacagcgtgacctgctccgtgcagcacgacaacaagaccgtgcacagcaccgacttttgctccaaggacgccaacgataccctgctgctccagctgaccaacaccagcgcctactacatgtacttgttgctgctgctgaagtccgtggtgtacttcgccatcatcacatgctgcctgctgcggagaaccgccttctgctgcaacggcgagaagtctaggagtaagaggagcaggctcctgcacagtgactacatgaacatgactccacgccgccccggacccacccgcaagcattaccagccctatgccccaccacgcgacttcgcagcctatcgctccagagtgaagttcagcagaagcgccgacgcccctgcctaccagcagggacagaaccaactgtacaacgagctgaacctgggcagacgggaagagtacgacgtgctggacaagcggagaggcagggaccctgagatgggcggaaagccccagcggagaaagaacccccaggaaggactgtataacgaactccagaaagacaagatggccgaagcctacagcgagatcggcatgaagggcgagcggagaagaggcaagggccacgatggcctgtaccagggcctgagcaccgccaccaaggacacctatgacgccctgcacatgcaggccctgcctccaaga

SEQ ID NO: 26363 - DNA, 918 bp, synthetic construct; identical to SEQ ID NO: 26341
  source 1..918: mol_type = other DNA

SEQ ID NO: 26364 - DNA, 888 bp, synthetic construct; identical to SEQ ID NO: 26342
  source 1..888: mol_type = other DNA

SEQ ID NO: 26365 - DNA, 915 bp, synthetic construct; identical to SEQ ID NO: 26343
  source 1..915: mol_type = other DNA

SEQ ID NO: 26366 - DNA, 897 bp, synthetic construct; identical to SEQ ID NO: 26344
  source 1..897: mol_type = other DNA

SEQ ID NO: 26367 - DNA, 891 bp, synthetic construct; identical to SEQ ID NO: 26345
  source 1..891: mol_type = other DNA

SEQ ID NO: 26368 - DNA, 921 bp, synthetic construct; identical to SEQ ID NO: 26346
  source 1..921: mol_type = other DNA

SEQ ID NO: 26369 - DNA, 945 bp, synthetic construct; identical to SEQ ID NO: 26347
  source 1..945: mol_type = other DNA

SEQ ID NO: 26370 - DNA, 939 bp, synthetic construct; identical to SEQ ID NO: 26348
  source 1..939: mol_type = other DNA

SEQ ID NO: 26371 - DNA, 915 bp, synthetic construct; identical to SEQ ID NO: 26349
  source 1..915: mol_type = other DNA

SEQ ID NO: 26372 - DNA, 939 bp, synthetic construct; identical to SEQ ID NO: 26348
  source 1..939: mol_type = other DNA

SEQ ID NO: 26373 - DNA, 897 bp, synthetic construct; identical to SEQ ID NO: 26351
  source 1..897: mol_type = other DNA

SEQ ID NO: 26374 - DNA, 831 bp, synthetic construct
  source 1..831: mol_type = other DNA
ctgcgggatagcaagagcagcgacaagagcgtgtgtctgttcaccgacttcgacagccagaccaacgtgtcccagagcaaggactccgacgtgtacatcaccgataagaccgtgctggacatgcggagcatggacttcaagagcaactccgccgtggcctggtccaacaagtccgatttcgcctgcgccaacgccttcaacaacagcattggcagagccgattgcggctttaccagcgagagctaccagcagggcgtgctgagcgccaccatcctgtacgagatcctgctgggcaaggccaccctgtacgccgtgctggtgtctgccctggtgctgatggctatggtcaagcggaaggacagccggggaaggagtaagaggagcaggctcctgcacagtgactacatgaacatgactccacgccgccccggacccacccgcaagcattaccagccctatgccccaccacgcgacttcgcagcctatcgctccagagtgaagttcagcagaagcgccgacgcccctgcctaccagcagggacagaaccaactgtacaacgagctgaacctgggcagacgggaagagtacgacgtgctggacaagcggagaggcagggaccctgagatgggcggaaagccccagcggagaaagaacccccaggaaggactgtataacgaactccagaaagacaagatggccgaagcctacagcgagatcggcatgaagggcgagcggagaagaggcaagggccacgatggcctgtaccagggcctgagcaccgccaccaaggacacctatgacgccctgcacatgcaggccctgcctccaaga

SEQ ID NO: 26375 - DNA, 825 bp, synthetic construct
  source 1..825: mol_type = other DNA
ctgcgggatagcaagagcagcgacaagagcgtgtgtctgttcaccgacttcgacagccagaccaacgtgtcccagagcaaggactccgacgtgtacatcaccgataagaccgtgctggacatgcggagcatggacttcaagagcaactccgccgtggcctggtccaacaagtccgatttcgcctgcgccaacgccttcaacaacagcattgccgattgcggctttaccagcgagagctaccagcagggcgtgctgagcgccaccatcctgtacgagatcctgctgggcaaggccaccctgtacgccgtgctggtgtctgccctggtgctgatggctatggtcaagcggaaggacagccggggaaggagtaagaggagcaggctcctgcacagtgactacatgaacatgactccacgccgccccggacccacccgcaagcattaccagccctatgccccaccacgcgacttcgcagcctatcgctccagagtgaagttcagcagaagcgccgacgcccctgcctaccagcagggacagaaccaactgtacaacgagctgaacctgggcagacgggaagagtacgacgtgctggacaagcggagaggcagggaccctgagatgggcggaaagccccagcggagaaagaacccccaggaaggactgtataacgaactccagaaagacaagatggccgaagcctacagcgagatcggcatgaagggcgagcggagaagaggcaagggccacgatggcctgtaccagggcctgagcaccgccaccaaggacacctatgacgccctgcacatgcaggccctgcctccaaga

SEQ ID NO: 26376 - DNA, 855 bp, synthetic construct
  source 1..855: mol_type = other DNA
ctgcgggatagcaagagcagcgacaagagcgtgtgtctgttcaccgacttcgacagccagaccaacgtgtcccagagcaaggactccgacgtgtacatcaccgataagaccgtgctggacatgcggagcatggacttcaagagcaactccgccgtggcctggtccaacaagtccgatttcgcctgcgccaacgccttcaacaacagcattcagatcgtgtctgccgaagcctggggcagagccgattgcggctttaccagcgagagctaccagcagggcgtgctgagcgccaccatcctgtacgagatcctgctgggcaaggccaccctgtacgccgtgctggtgtctgccctggtgctgatggctatggtcaagcggaaggacagccggggaaggagtaagaggagcaggctcctgcacagtgactacatgaacatgactccacgccgccccggacccacccgcaagcattaccagccctatgccccaccacgcgacttcgcagcctatcgctccagagtgaagttcagcagaagcgccgacgcccctgcctaccagcagggacagaaccaactgtacaacgagctgaacctgggcagacgggaagagtacgacgtgctggacaagcggagaggcagggaccctgagatgggcggaaagccccagcggagaaagaacccccaggaaggactgtataacgaactccagaaagacaagatggccgaagcctacagcgagatcggcatgaagggcgagcggagaagaggcaagggccacgatggcctgtaccagggcctgagcaccgccaccaaggacacctatgacgccctgcacatgcaggccctgcctccaaga

SEQ ID NO: 26377 - DNA, 879 bp, synthetic construct
  source 1..879: mol_type = other DNA
ctgcgggatagcaagagcagcgacaagagcgtgtgtctgttcaccgacttcgacagccagaccaacgtgtcccagagcaaggactccgacgtgtacatcaccgataagaccgtgctggacatgcggagcatggacttcaagagcaactccgccgtggcctggtccaacaagtccgatttcgcctgcgccaacgccttcaacaacagcattttcccacccatcaagaccgatgtgattacaatggaccccaaggacaactgctccaaggacgccaacgataccctgctgctccagctgaccaacaccagcgcctactacatgtacttgttgctgctgctgaagtccgtggtgtacttcgccatcatcacatgctgcctgctgcggagaaccgccttctgctgcaacggcgagaagtctaggagtaagaggagcaggctcctgcacagtgactacatgaacatgactccacgccgccccggacccacccgcaagcattaccagccctatgccccaccacgcgacttcgcagcctatcgctccagagtgaagttcagcagaagcgccgacgcccctgcctaccagcagggacagaaccaactgtacaacgagctgaacctgggcagacgggaagagtacgacgtgctggacaagcggagaggcagggaccctgagatgggcggaaagccccagcggagaaagaacccccaggaaggactgtataacgaactccagaaagacaagatggccgaagcctacagcgagatcggcatgaagggcgagcggagaagaggcaagggccacgatggcctgtaccagggcctgagcaccgccaccaaggacacctatgacgccctgcacatgcaggccctgcctccaaga

SEQ ID NO: 26378 - DNA, 873 bp, synthetic construct
  source 1..873: mol_type = other DNA
ctgcgggatagcaagagcagcgacaagagcgtgtgtctgttcaccgacttcgacagccagaccaacgtgtcccagagcaaggactccgacgtgtacatcaccgataagaccgtgctggacatgcggagcatggacttcaagagcaactccgccgtggcctggtccaacaagtccgatttcgcctgcgccaacgccttcaacaacagcattcccatcaagaccgatgtgattacaatggaccccaaggacaactgctccaaggacgccaacgataccctgctgctccagctgaccaacaccagcgcctactacatgtacttgttgctgctgctgaagtccgtggtgtacttcgccatcatcacatgctgcctgctgcggagaaccgccttctgctgcaacggcgagaagtctaggagtaagaggagcaggctcctgcacagtgactacatgaacatgactccacgccgccccggacccacccgcaagcattaccagccctatgccccaccacgcgacttcgcagcctatcgctccagagtgaagttcagcagaagcgccgacgcccctgcctaccagcagggacagaaccaactgtacaacgagctgaacctgggcagacgggaagagtacgacgtgctggacaagcggagaggcagggaccctgagatgggcggaaagccccagcggagaaagaacccccaggaaggactgtataacgaactccagaaagacaagatggccgaagcctacagcgagatcggcatgaagggcgagcggagaagaggcaagggccacgatggcctgtaccagggcctgagcaccgccaccaaggacacctatgacgccctgcacatgcaggccctgcctccaaga

SEQ ID NO: 26379 - DNA, 849 bp, synthetic construct
  source 1..849: mol_type = other DNA
ctgcgggatagcaagagcagcgacaagagcgtgtgtctgttcaccgacttcgacagccagaccaacgtgtcccagagcaaggactccgacgtgtacatcaccgataagaccgtgctggacatgcggagcatggacttcaagagcaactccgccgtggcctggtccaacaagtccgatttcgcctgcgccaacgccttcaacaacagcattatggaccccaaggacaactgctccaaggacgccaacgataccctgctgctccagctgaccaacaccagcgcctactacatgtacttgttgctgctgctgaagtccgtggtgtacttcgccatcatcacatgctgcctgctgcggagaaccgccttctgctgcaacggcgagaagtctaggagtaagaggagcaggctcctgcacagtgactacatgaacatgactccacgccgccccggacccacccgcaagcattaccagccctatgccccaccacgcgacttcgcagcctatcgctccagagtgaagttcagcagaagcgccgacgcccctgcctaccagcagggacagaaccaactgtacaacgagctgaacctgggcagacgggaagagtacgacgtgctggacaagcggagaggcagggaccctgagatgggcggaaagccccagcggagaaagaacccccaggaaggactgtataacgaactccagaaagacaagatggccgaagcctacagcgagatcggcatgaagggcgagcggagaagaggcaagggccacgatggcctgtaccagggcctgagcaccgccaccaaggacacctatgacgccctgcacatgcaggccctgcctccaaga

SEQ ID NO: 26380 - DNA, 873 bp, synthetic construct; identical to SEQ ID NO: 26378
  source 1..873: mol_type = other DNA

SEQ ID NO: 26381 - DNA, 831 bp, synthetic construct
  source 1..831: mol_type = other DNA
ctgcgggatagcaagagcagcgacaagagcgtgtgtctgttcaccgacttcgacagccagaccaacgtgtcccagagcaaggactccgacgtgtacatcaccgataagaccgtgctggacatgcggagcatggacttcaagagcaactccgccgtggcctggtccaacaagtccgatttcgcctgcgccaacgccttcaacaacagcatttgctccaaggacgccaacgataccctgctgctccagctgaccaacaccagcgcctactacatgtacttgttgctgctgctgaagtccgtggtgtacttcgccatcatcacatgctgcctgctgcggagaaccgccttctgctgcaacggcgagaagtctaggagtaagaggagcaggctcctgcacagtgactacatgaacatgactccacgccgccccggacccacccgcaagcattaccagccctatgccccaccacgcgacttcgcagcctatcgctccagagtgaagttcagcagaagcgccgacgcccctgcctaccagcagggacagaaccaactgtacaacgagctgaacctgggcagacgggaagagtacgacgtgctggacaagcggagaggcagggaccctgagatgggcggaaagccccagcggagaaagaacccccaggaaggactgtataacgaactccagaaagacaagatggccgaagcctacagcgagatcggcatgaagggcgagcggagaagaggcaagggccacgatggcctgtaccagggcctgagcaccgccaccaaggacacctatgacgccctgcacatgcaggccctgcctccaaga

SEQ ID NO: 26382 - DNA, 876 bp, synthetic construct
  source 1..876: mol_type = other DNA
ctgcgggatagcaagagcagcgacaagagcgtgtgtctgttcaccgacttcgacagccagaccaacgtgtcccagagcaaggactccgacgtgtacatcaccgataagaccgtgctggacatgcggagcatggacttcaagagcaactccgccgtggcctggtccaacaagtccgatttcgcctgcgccaacgccttcaacaacagcattgaagtgaaaaccgactccaccgaccacgtgaagcccaaagagacagagaacaccaagcagcccagcaagagctgccacaagcccaaggccatcgtgcacaccgagaaagtgaacatgatgagcctgaccgtgctgggcctgcggatgctgttcgccaaaaccgtggccgtgaacttcctgctgaccgccaagctgttcttcctcaggagtaagaggagcaggctcctgcacagtgactacatgaacatgactccacgccgccccggacccacccgcaagcattaccagccctatgccccaccacgcgacttcgcagcctatcgctccagagtgaagttcagcagaagcgccgacgcccctgcctaccagcagggacagaaccaactgtacaacgagctgaacctgggcagacgggaagagtacgacgtgctggacaagcggagaggcagggaccctgagatgggcggaaagccccagcggagaaagaacccccaggaaggactgtataacgaactccagaaagacaagatggccgaagcctacagcgagatcggcatgaagggcgagcggagaagaggcaagggccacgatggcctgtaccagggcctgagcaccgccaccaaggacacctatgacgccctgcacatgcaggccctgcctccaaga

SEQ ID NO: 26383 - DNA, 855 bp, synthetic construct
  source 1..855: mol_type = other DNA
ctgcgggatagcaagagcagcgacaagagcgtgtgtctgttcaccgacttcgacagccagaccaacgtgtcccagagcaaggactccgacgtgtacatcaccgataagaccgtgctggacatgcggagcatggacttcaagagcaactccgccgtggcctggtccaacaagtccgatttcgcctgcgccaacgccttcaacaacagcattgaccacgtgaagcccaaagagacagagaacaccaagcagcccagcaagagctgccacaagcccaaggccatcgtgcacaccgagaaagtgaacatgatgagcctgaccgtgctgggcctgcggatgctgttcgccaaaaccgtggccgtgaacttcctgctgaccgccaagctgttcttcctcaggagtaagaggagcaggctcctgcacagtgactacatgaacatgactccacgccgccccggacccacccgcaagcattaccagccctatgccccaccacgcgacttcgcagcctatcgctccagagtgaagttcagcagaagcgccgacgcccctgcctaccagcagggacagaaccaactgtacaacgagctgaacctgggcagacgggaagagtacgacgtgctggacaagcggagaggcagggaccctgagatgggcggaaagccccagcggagaaagaacccccaggaaggactgtataacgaactccagaaagacaagatggccgaagcctacagcgagatcggcatgaagggcgagcggagaagaggcaagggccacgatggcctgtaccagggcctgagcaccgccaccaaggacacctatgacgccctgcacatgcaggccctgcctccaaga

SEQ ID NO: 26384 - DNA, 861 bp, synthetic construct
  source 1..861: mol_type = other DNA
ctgcgggatagcaagagcagcgacaagagcgtgtgtctgttcaccgacttcgacagccagaccaacgtgtcccagagcaaggactccgacgtgtacatcaccgataagaccgtgctggacatgcggagcatggacttcaagagcaactccgccgtggcctggtccaacaagtccgatttcgcctgcgccaacgccttcaacaacagcattatccccgaggacacattcttcccaagccccggcagagccgattgcggctttaccagcgagagctaccagcagggcgtgctgagcgccaccatcctgtacgagatcctgctgggcaaggccaccctgtacgccgtgctggtgtctgccctggtgctgatggctatggtcaagcggaaggacagccggggaaggagtaagaggagcaggctcctgcacagtgactacatgaacatgactccacgccgccccggacccacccgcaagcattaccagccctatgccccaccacgcgacttcgcagcctatcgctccagagtgaagttcagcagaagcgccgacgcccctgcctaccagcagggacagaaccaactgtacaacgagctgaacctgggcagacgggaagagtacgacgtgctggacaagcggagaggcagggaccctgagatgggcggaaagccccagcggagaaagaacccccaggaaggactgtataacgaactccagaaagacaagatggccgaagcctacagcgagatcggcatgaagggcgagcggagaagaggcaagggccacgatggcctgtaccagggcctgagcaccgccaccaaggacacctatgacgccctgcacatgcaggccctgcctccaaga

SEQ ID NO: 26385 - DNA, 855 bp, synthetic construct
  source 1..855: mol_type = other DNA
ctgcgggatagcaagagcagcgacaagagcgtgtgtctgttcaccgacttcgacagccagaccaacgtgtcccagagcaaggactccgacgtgtacatcaccgataagaccgtgctggacatgcggagcatggacttcaagagcaactccgccgtggcctggtccaacaagtccgatttcgcctgcgccaacgccttcaacaacagcattatccccgaggacacattcttcccaagccccgccgattgcggctttaccagcgagagctaccagcagggcgtgctgagcgccaccatcctgtacgagatcctgctgggcaaggccaccctgtacgccgtgctggtgtctgccctggtgctgatggctatggtcaagcggaaggacagccggggaaggagtaagaggagcaggctcctgcacagtgactacatgaacatgactccacgccgccccggacccacccgcaagcattaccagccctatgccccaccacgcgacttcgcagcctatcgctccagagtgaagttcagcagaagcgccgacgcccctgcctaccagcagggacagaaccaactgtacaacgagctgaacctgggcagacgggaagagtacgacgtgctggacaagcggagaggcagggaccctgagatgggcggaaagccccagcggagaaagaacccccaggaaggactgtataacgaactccagaaagacaagatggccgaagcctacagcgagatcggcatgaagggcgagcggagaagaggcaagggccacgatggcctgtaccagggcctgagcaccgccaccaaggacacctatgacgccctgcacatgcaggccctgcctccaaga

SEQ ID NO: 26386 - DNA, 885 bp, synthetic construct
  source 1..885: mol_type = other DNA
ctgcgggatagcaagagcagcgacaagagcgtgtgtctgttcaccgacttcgacagccagaccaacgtgtcccagagcaaggactccgacgtgtacatcaccgataagaccgtgctggacatgcggagcatggacttcaagagcaactccgccgtggcctggtccaacaagtccgatttcgcctgcgccaacgccttcaacaacagcattatccccgaggacacattcttcccaagcccccagatcgtgtctgccgaagcctggggcagagccgattgcggctttaccagcgagagctaccagcagggcgtgctgagcgccaccatcctgtacgagatcctgctgggcaaggccaccctgtacgccgtgctggtgtctgccctggtgctgatggctatggtcaagcggaaggacagccggggaaggagtaagaggagcaggctcctgcacagtgactacatgaacatgactccacgccgccccggacccacccgcaagcattaccagccctatgccccaccacgcgacttcgcagcctatcgctccagagtgaagttcagcagaagcgccgacgcccctgcctaccagcagggacagaaccaactgtacaacgagctgaacctgggcagacgggaagagtacgacgtgctggacaagcggagaggcagggaccctgagatgggcggaaagccccagcggagaaagaacccccaggaaggactgtataacgaactccagaaagacaagatggccgaagcctacagcgagatcggcatgaagggcgagcggagaagaggcaagggccacgatggcctgtaccagggcctgagcaccgccaccaaggacacctatgacgccctgcacatgcaggccctgcctccaaga

SEQ ID NO: 26387 - DNA, 909 bp, synthetic construct
  source 1..909: mol_type = other DNA
ctgcgggatagcaagagcagcgacaagagcgtgtgtctgttcaccgacttcgacagccagaccaacgtgtcccagagcaaggactccgacgtgtacatcaccgataagaccgtgctggacatgcggagcatggacttcaagagcaactccgccgtggcctggtccaacaagtccgatttcgcctgcgccaacgccttcaacaacagcattatccccgaggacacattcttcccaagccccttcccacccatcaagaccgatgtgattacaatggaccccaaggacaactgctccaaggacgccaacgataccctgctgctccagctgaccaacaccagcgcctactacatgtacttgttgctgctgctgaagtccgtggtgtacttcgccatcatcacatgctgcctgctgcggagaaccgccttctgctgcaacggcgagaagtctaggagtaagaggagcaggctcctgcacagtgactacatgaacatgactccacgccgccccggacccacccgcaagcattaccagccctatgccccaccacgcgacttcgcagcctatcgctccagagtgaagttcagcagaagcgccgacgcccctgcctaccagcagggacagaaccaactgtacaacgagctgaacctgggcagacgggaagagtacgacgtgctggacaagcggagaggcagggaccctgagatgggcggaaagccccagcggagaaagaacccccaggaaggactgtataacgaactccagaaagacaagatggccgaagcctacagcgagatcggcatgaagggcgagcggagaagaggcaagggccacgatggcctgtaccagggcctgagcaccgccaccaaggacacctatgacgccctgcacatgcaggccctgcctccaaga

SEQ ID NO: 26388 - DNA, 903 bp, synthetic construct
  source 1..903: mol_type = other DNA
ctgcgggatagcaagagcagcgacaagagcgtgtgtctgttcaccgacttcgacagccagaccaacgtgtcccagagcaaggactccgacgtgtacatcaccgataagaccgtgctggacatgcggagcatggacttcaagagcaactccgccgtggcctggtccaacaagtccgatttcgcctgcgccaacgccttcaacaacagcattatccccgaggacacattcttcccaagcccccccatcaagaccgatgtgattacaatggaccccaaggacaactgctccaaggacgccaacgataccctgctgctccagctgaccaacaccagcgcctactacatgtacttgttgctgctgctgaagtccgtggtgtacttcgccatcatcacatgctgcctgctgcggagaaccgccttctgctgcaacggcgagaagtctaggagtaagaggagcaggctcctgcacagtgactacatgaacatgactccacgccgccccggacccacccgcaagcattaccagccctatgccccaccacgcgacttcgcagcctatcgctccagagtgaagttcagcagaagcgccgacgcccctgcctaccagcagggacagaaccaactgtacaacgagctgaacctgggcagacgggaagagtacgacgtgctggacaagcggagaggcagggaccctgagatgggcggaaagccccagcggagaaagaacccccaggaaggactgtataacgaactccagaaagacaagatggccgaagcctacagcgagatcggcatgaagggcgagcggagaagaggcaagggccacgatggcctgtaccagggcctgagcaccgccaccaaggacacctatgacgccctgcacatgcaggccctgcctccaaga

SEQ ID NO: 26389 - DNA, 879 bp, synthetic construct
  source 1..879: mol_type = other DNA
ctgcgggatagcaagagcagcgacaagagcgtgtgtctgttcaccgacttcgacagccagaccaacgtgtcccagagcaaggactccgacgtgtacatcaccgataagaccgtgctggacatgcggagcatggacttcaagagcaactccgccgtggcctggtccaacaagtccgatttcgcctgcgccaacgccttcaacaacagcattatccccgaggacacattcttcccaagccccatggaccccaaggacaactgctccaaggacgccaacgataccctgctgctccagctgaccaacaccagcgcctactacatgtacttgttgctgctgctgaagtccgtggtgtacttcgccatcatcacatgctgcctgctgcggagaaccgccttctgctgcaacggcgagaagtctaggagtaagaggagcaggctcctgcacagtgactacatgaacatgactccacgccgccccggacccacccgcaagcattaccagccctatgccccaccacgcgacttcgcagcctatcgctccagagtgaagttcagcagaagcgccgacgcccctgcctaccagcagggacagaaccaactgtacaacgagctgaacctgggcagacgggaagagtacgacgtgctggacaagcggagaggcagggaccctgagatgggcggaaagccccagcggagaaagaacccccaggaaggactgtataacgaactccagaaagacaagatggccgaagcctacagcgagatcggcatgaagggcgagcggagaagaggcaagggccacgatggcctgtaccagggcctgagcaccgccaccaaggacacctatgacgccctgcacatgcaggccctgcctccaaga

SEQ ID NO: 26390 - DNA, 903 bp, synthetic construct; identical to SEQ ID NO: 26388
  source 1..903: mol_type = other DNA

SEQ ID NO: 26391 - DNA, 861 bp, synthetic construct
  source 1..861: mol_type = other DNA
ctgcgggatagcaagagcagcgacaagagcgtgtgtctgttcaccgacttcgacagccagaccaacgtgtcccagagcaaggactccgacgtgtacatcaccgataagaccgtgctggacatgcggagcatggacttcaagagcaactccgccgtggcctggtccaacaagtccgatttcgcctgcgccaacgccttcaacaacagcattatccccgaggacacattcttcccaagcccctgctccaaggacgccaacgataccctgctgctccagctgaccaacaccagcgcctactacatgtacttgttgctgctgctgaagtccgtggtgtacttcgccatcatcacatgctgcctgctgcggagaaccgccttctgctgcaacggcgagaagtctaggagtaagaggagcaggctcctgcacagtgactacatgaacatgactccacgccgccccggacccacccgcaagcattaccagccctatgccccaccacgcgacttcgcagcctatcgctccagagtgaagttcagcagaagcgccgacgcccctgcctaccagcagggacagaaccaactgtacaacgagctgaacctgggcagacgggaagagtacgacgtgctggacaagcggagaggcagggaccctgagatgggcggaaagccccagcggagaaagaacccccaggaaggactgtataacgaactccagaaagacaagatggccgaagcctacagcgagatcggcatgaagggcgagcggagaagaggcaagggccacgatggcctgtaccagggcctgagcaccgccaccaaggacacctatgacgccctgcacatgcaggccctgcctccaaga

SEQ ID NO: 26392 - DNA, 906 bp, synthetic construct
  source 1..906: mol_type = other DNA
ctgcgggatagcaagagcagcgacaagagcgtgtgtctgttcaccgacttcgacagccagaccaacgtgtcccagagcaaggactccgacgtgtacatcaccgataagaccgtgctggacatgcggagcatggacttcaagagcaactccgccgtggcctggtccaacaagtccgatttcgcctgcgccaacgccttcaacaacagcattatccccgaggacacattcttcccaagccccgaagtgaaaaccgactccaccgaccacgtgaagcccaaagagacagagaacaccaagcagcccagcaagagctgccacaagcccaaggccatcgtgcacaccgagaaagtgaacatgatgagcctgaccgtgctgggcctgcggatgctgttcgccaaaaccgtggccgtgaacttcctgctgaccgccaagctgttcttcctcaggagtaagaggagcaggctcctgcacagtgactacatgaacatgactccacgccgccccggacccacccgcaagcattaccagccctatgccccaccacgcgacttcgcagcctatcgctccagagtgaagttcagcagaagcgccgacgcccctgcctaccagcagggacagaaccaactgtacaacgagctgaacctgggcagacgggaagagtacgacgtgctggacaagcggagaggcagggaccctgagatgggcggaaagccccagcggagaaagaacccccaggaaggactgtataacgaactccagaaagacaagatggccgaagcctacagcgagatcggcatgaagggcgagcggagaagaggcaagggccacgatggcctgtaccagggcctgagcaccgccaccaaggacacctatgacgccctgcacatgcaggccctgcctccaaga

SEQ ID NO: 26393 - DNA, 885 bp, synthetic construct
  source 1..885: mol_type = other DNA
ctgcgggatagcaagagcagcgacaagagcgtgtgtctgttcaccgacttcgacagccagaccaacgtgtcccagagcaaggactccgacgtgtacatcaccgataagaccgtgctggacatgcggagcatggacttcaagagcaactccgccgtggcctggtccaacaagtccgatttcgcctgcgccaacgccttcaacaacagcattatccccgaggacacattcttcccaagccccgaccacgtgaagcccaaagagacagagaacaccaagcagcccagcaagagctgccacaagcccaaggccatcgtgcacaccgagaaagtgaacatgatgagcctgaccgtgctgggcctgcggatgctgttcgccaaaaccgtggccgtgaacttcctgctgaccgccaagctgttcttcctcaggagtaagaggagcaggctcctgcacagtgactacatgaacatgactccacgccgccccggacccacccgcaagcattaccagccctatgccccaccacgcgacttcgcagcctatcgctccagagtgaagttcagcagaagcgccgacgcccctgcctaccagcagggacagaaccaactgtacaacgagctgaacctgggcagacgggaagagtacgacgtgctggacaagcggagaggcagggaccctgagatgggcggaaagccccagcggagaaagaacccccaggaaggactgtataacgaactccagaaagacaagatggccgaagcctacagcgagatcggcatgaagggcgagcggagaagaggcaagggccacgatggcctgtaccagggcctgagcaccgccaccaaggacacctatgacgccctgcacatgcaggccctgcctccaaga

SEQ ID NO: 26394 - DNA, 873 bp, synthetic construct
  source 1..873: mol_type = other DNA
ctgcgggatagcaagagcagcgacaagagcgtgtgtctgttcaccgacttcgacagccagaccaacgtgtcccagagcaaggactccgacgtgtacatcaccgataagaccgtgctggacatgcggagcatggacttcaagagcaactccgccgtggcctggtccaacaagtccgatttcgcctgcgccaacgccttcaacaacagcattatccccgaggacacattcttcccaagccccgagagcagctgcggcagagccgattgcggctttaccagcgagagctaccagcagggcgtgctgagcgccaccatcctgtacgagatcctgctgggcaaggccaccctgtacgccgtgctggtgtctgccctggtgctgatggctatggtcaagcggaaggacagccggggaaggagtaagaggagcaggctcctgcacagtgactacatgaacatgactccacgccgccccggacccacccgcaagcattaccagccctatgccccaccacgcgacttcgcagcctatcgctccagagtgaagttcagcagaagcgccgacgcccctgcctaccagcagggacagaaccaactgtacaacgagctgaacctgggcagacgggaagagtacgacgtgctggacaagcggagaggcagggaccctgagatgggcggaaagccccagcggagaaagaacccccaggaaggactgtataacgaactccagaaagacaagatggccgaagcctacagcgagatcggcatgaagggcgagcggagaagaggcaagggccacgatggcctgtaccagggcctgagcaccgccaccaaggacacctatgacgccctgcacatgcaggccctgcctccaaga

SEQ ID NO: 26395 - DNA, 867 bp, synthetic construct
  source 1..867: mol_type = other DNA
ctgcgggatagcaagagcagcgacaagagcgtgtgtctgttcaccgacttcgacagccagaccaacgtgtcccagagcaaggactccgacgtgtacatcaccgataagaccgtgctggacatgcggagcatggacttcaagagcaactccgccgtggcctggtccaacaagtccgatttcgcctgcgccaacgccttcaacaacagcattatccccgaggacacattcttcccaagccccgagagcagctgcgccgattgcggctttaccagcgagagctaccagcagggcgtgctgagcgccaccatcctgtacgagatcctgctgggcaaggccaccctgtacgccgtgctggtgtctgccctggtgctgatggctatggtcaagcggaaggacagccggggaaggagtaagaggagcaggctcctgcacagtgactacatgaacatgactccacgccgccccggacccacccgcaagcattaccagccctatgccccaccacgcgacttcgcagcctatcgctccagagtgaagttcagcagaagcgccgacgcccctgcctaccagcagggacagaaccaactgtacaacgagctgaacctgggcagacgggaagagtacgacgtgctggacaagcggagaggcagggaccctgagatgggcggaaagccccagcggagaaagaacccccaggaaggactgtataacgaactccagaaagacaagatggccgaagcctacagcgagatcggcatgaagggcgagcggagaagaggcaagggccacgatggcctgtaccagggcctgagcaccgccaccaaggacacctatgacgccctgcacatgcaggccctgcctccaaga

SEQ ID NO: 26396 - DNA, 897 bp, synthetic construct
  source 1..897: mol_type = other DNA
ctgcgggatagcaagagcagcgacaagagcgtgtgtctgttcaccgacttcgacagccagaccaacgtgtcccagagcaaggactccgacgtgtacatcaccgataagaccgtgctggacatgcggagcatggacttcaagagcaactccgccgtggcctggtccaacaagtccgatttcgcctgcgccaacgccttcaacaacagcattatccccgaggacacattcttcccaagccccgagagcagctgccagatcgtgtctgccgaagcctggggcagagccgattgcggctttaccagcgagagctaccagcagggcgtgctgagcgccaccatcctgtacgagatcctgctgggcaaggccaccctgtacgccgtgctggtgtctgccctggtgctgatggctatggtcaagcggaaggacagccggggaaggagtaagaggagcaggctcctgcacagtgactacatgaacatgactccacgccgccccggacccacccgcaagcattaccagccctatgccccaccacgcgacttcgcagcctatcgctccagagtgaagttcagcagaagcgccgacgcccctgcctaccagcagggacagaaccaactgtacaacgagctgaacctgggcagacgggaagagtacgacgtgctggacaagcggagaggcagggaccctgagatgggcggaaagccccagcggagaaagaacccccaggaaggactgtataacgaactccagaaagacaagatggccgaagcctacagcgagatcggcatgaagggcgagcggagaagaggcaagggccacgatggcctgtaccagggcctgagcaccgccaccaaggacacctatgacgccctgcacatgcaggccctgcctccaaga

SEQ ID NO: 26397 - DNA, 921 bp, synthetic construct
  source 1..921: mol_type = other DNA
ctgcgggatagcaagagcagcgacaagagcgtgtgtctgttcaccgacttcgacagccagaccaacgtgtcccagagcaaggactccgacgtgtacatcaccgataagaccgtgctggacatgcggagcatggacttcaagagcaactccgccgtggcctggtccaacaagtccgatttcgcctgcgccaacgccttcaacaacagcattatccccgaggacacattcttcccaagccccgagagcagctgcttcccacccatcaagaccgatgtgattacaatggaccccaaggacaactgctccaaggacgccaacgataccctgctgctccagctgaccaacaccagcgcctactacatgtacttgttgctgctgctgaagtccgtggtgtacttcgccatcatcacatgctgcctgctgcggagaaccgccttctgctgcaacggcgagaagtctaggagtaagaggagcaggctcctgcacagtgactacatgaacatgactccacgccgccccggacccacccgcaagcattaccagccctatgccccaccacgcgacttcgcagcctatcgctccagagtgaagttcagcagaagcgccgacgcccctgcctaccagcagggacagaaccaactgtacaacgagctgaacctgggcagacgggaagagtacgacgtgctggacaagcggagaggcagggaccctgagatgggcggaaagccccagcggagaaagaacccccaggaaggactgtataacgaactccagaaagacaagatggccgaagcctacagcgagatcggcatgaagggcgagcggagaagaggcaagggccacgatggcctgtaccagggcctgagcaccgccaccaaggacacctatgacgccctgcacatgcaggccctgcctccaaga

SEQ ID NO: 26398 - DNA, 915 bp, synthetic construct
  source 1..915: mol_type = other DNA
ctgcgggatagcaagagcagcgacaagagcgtgtgtctgttcaccgacttcgacagccagaccaacgtgtcccagagcaaggactccgacgtgtacatcaccgataagaccgtgctggacatgcggagcatggacttcaagagcaactccgccgtggcctggtccaacaagtccgatttcgcctgcgccaacgccttcaacaacagcattatccccgaggacacattcttcccaagccccgagagcagctgccccatcaagaccgatgtgattacaatggaccccaaggacaactgctccaaggacgccaacgataccctgctgctccagctgaccaacaccagcgcctactacatgtacttgttgctgctgctgaagtccgtggtgtacttcgccatcatcacatgctgcctgctgcggagaaccgccttctgctgcaacggcgagaagtctaggagtaagaggagcaggctcctgcacagtgactacatgaacatgactccacgccgccccggacccacccgcaagcattaccagccctatgccccaccacgcgacttcgcagcctatcgctccagagtgaagttcagcagaagcgccgacgcccctgcctaccagcagggacagaaccaactgtacaacgagctgaacctgggcagacgggaagagtacgacgtgctggacaagcggagaggcagggaccctgagatgggcggaaagccccagcggagaaagaacccccaggaaggactgtataacgaactccagaaagacaagatggccgaagcctacagcgagatcggcatgaagggcgagcggagaagaggcaagggccacgatggcctgtaccagggcctgagcaccgccaccaaggacacctatgacgccctgcacatgcaggccctgcctccaaga

SEQ ID NO: 26399 - DNA, 891 bp, synthetic construct
  source 1..891: mol_type = other DNA
ctgcgggatagcaagagcagcgacaagagcgtgtgtctgttcaccgacttcgacagccagaccaacgtgtcccagagcaaggactccgacgtgtacatcaccgataagaccgtgctggacatgcggagcatggacttcaagagcaactccgccgtggcctggtccaacaagtccgatttcgcctgcgccaacgccttcaacaacagcattatccccgaggacacattcttcccaagccccgagagcagctgcatggaccccaaggacaactgctccaaggacgccaacgataccctgctgctccagctgaccaacaccagcgcctactacatgtacttgttgctgctgctgaagtccgtggtgtacttcgccatcatcacatgctgcctgctgcggagaaccgccttctgctgcaacggcgagaagtctaggagtaagaggagcaggctcctgcacagtgactacatgaacatgactccacgccgccccggacccacccgcaagcattaccagccctatgccccaccacgcgacttcgcagcctatcgctccagagtgaagttcagcagaagcgccgacgcccctgcctaccagcagggacagaaccaactgtacaacgagctgaacctgggcagacgggaagagtacgacgtgctggacaagcggagaggcagggaccctgagatgggcggaaagccccagcggagaaagaacccccaggaaggactgtataacgaactccagaaagacaagatggccgaagcctacagcgagatcggcatgaagggcgagcggagaagaggcaagggccacgatggcctgtaccagggcctgagcaccgccaccaaggacacctatgacgccctgcacatgcaggccctgcctccaaga

SEQ ID NO: 26400 - DNA, 915 bp, synthetic construct; identical to SEQ ID NO: 26398
  source 1..915: mol_type = other DNA

SEQ ID NO: 26401 - DNA, 873 bp, synthetic construct
  source 1..873: mol_type = other DNA
ctgcgggatagcaagagcagcgacaagagcgtgtgtctgttcaccgacttcgacagccagaccaacgtgtcccagagcaaggactccgacgtgtacatcaccgataagaccgtgctggacatgcggagcatggacttcaagagcaactccgccgtggcctggtccaacaagtccgatttcgcctgcgccaacgccttcaacaacagcattatccccgaggacacattcttcccaagccccgagagcagctgctgctccaaggacgccaacgataccctgctgctccagctgaccaacaccagcgcctactacatgtacttgttgctgctgctgaagtccgtggtgtacttcgccatcatcacatgctgcctgctgcggagaaccgccttctgctgcaacggcgagaagtctaggagtaagaggagcaggctcctgcacagtgactacatgaacatgactccacgccgccccggacccacccgcaagcattaccagccctatgccccaccacgcgacttcgcagcctatcgctccagagtgaagttcagcagaagcgccgacgcccctgcctaccagcagggacagaaccaactgtacaacgagctgaacctgggcagacgggaagagtacgacgtgctggacaagcggagaggcagggaccctgagatgggcggaaagccccagcggagaaagaacccccaggaaggactgtataacgaactccagaaagacaagatggccgaagcctacagcgagatcggcatgaagggcgagcggagaagaggcaagggccacgatggcctgtaccagggcctgagcaccgccaccaaggacacctatgacgccctgcacatgcaggccctgcctccaaga

SEQ ID NO: 26402 - DNA, 918 bp, synthetic construct
  source 1..918: mol_type = other DNA
ctgcgggatagcaagagcagcgacaagagcgtgtgtctgttcaccgacttcgacagccagaccaacgtgtcccagagcaaggactccgacgtgtacatcaccgataagaccgtgctggacatgcggagcatggacttcaagagcaactccgccgtggcctggtccaacaagtccgatttcgcctgcgccaacgccttcaacaacagcattatccccgaggacacattcttcccaagccccgagagcagctgcgaagtgaaaaccgactccaccgaccacgtgaagcccaaagagacagagaacaccaagcagcccagcaagagctgccacaagcccaaggccatcgtgcacaccgagaaagtgaacatgatgagcctgaccgtgctgggcctgcggatgctgttcgccaaaaccgtggccgtgaacttcctgctgaccgccaagctgttcttcctcaggagtaagaggagcaggctcctgcacagtgactacatgaacatgactccacgccgccccggacccacccgcaagcattaccagccctatgccccaccacgcgacttcgcagcctatcgctccagagtgaagttcagcagaagcgccgacgcccctgcctaccagcagggacagaaccaactgtacaacgagctgaacctgggcagacgggaagagtacgacgtgctggacaagcggagaggcagggaccctgagatgggcggaaagccccagcggagaaagaacccccaggaaggactgtataacgaactccagaaagacaagatggccgaagcctacagcgagatcggcatgaagggcgagcggagaagaggcaagggccacgatggcctgtaccagggcctgagcaccgccaccaaggacacctatgacgccctgcacatgcaggccctgcctccaaga

SEQ ID NO: 26403 - DNA, 897 bp, synthetic construct
  source 1..897: mol_type = other DNA
ctgcgggatagcaagagcagcgacaagagcgtgtgtctgttcaccgacttcgacagccagaccaacgtgtcccagagcaaggactccgacgtgtacatcaccgataagaccgtgctggacatgcggagcatggacttcaagagcaactccgccgtggcctggtccaacaagtccgatttcgcctgcgccaacgccttcaacaacagcattatccccgaggacacattcttcccaagccccgagagcagctgcgaccacgtgaagcccaaagagacagagaacaccaagcagcccagcaagagctgccacaagcccaaggccatcgtgcacaccgagaaagtgaacatgatgagcctgaccgtgctgggcctgcggatgctgttcgccaaaaccgtggccgtgaacttcctgctgaccgccaagctgttcttcctcaggagtaagaggagcaggctcctgcacagtgactacatgaacatgactccacgccgccccggacccacccgcaagcattaccagccctatgccccaccacgcgacttcgcagcctatcgctccagagtgaagttcagcagaagcgccgacgcccctgcctaccagcagggacagaaccaactgtacaacgagctgaacctgggcagacgggaagagtacgacgtgctggacaagcggagaggcagggaccctgagatgggcggaaagccccagcggagaaagaacccccaggaaggactgtataacgaactccagaaagacaagatggccgaagcctacagcgagatcggcatgaagggcgagcggagaagaggcaagggccacgatggcctgtaccagggcctgagcaccgccaccaaggacacctatgacgccctgcacatgcaggccctgcctccaaga

SEQ ID NO: 26404 - DNA, 834 bp, synthetic construct
  source 1..834: mol_type = other DNA
ctgcgggatagcaagagcagcgacaagagcgtgtgtctgttcaccgacttcgacagccagaccaacgtgtcccagagcaaggactccgacgtgtacatcaccgataagaccgtgctggacatgcggagcatggacttcaagagcaactccgccgtggcctggtccaacaagtccgatttcgcctgcgccaacgccttcaacaacagcattatcggcagagccgattgcggctttaccagcgagagctaccagcagggcgtgctgagcgccaccatcctgtacgagatcctgctgggcaaggccaccctgtacgccgtgctggtgtctgccctggtgctgatggctatggtcaagcggaaggacagccggggaaggagtaagaggagcaggctcctgcacagtgactacatgaacatgactccacgccgccccggacccacccgcaagcattaccagccctatgccccaccacgcgacttcgcagcctatcgctccagagtgaagttcagcagaagcgccgacgcccctgcctaccagcagggacagaaccaactgtacaacgagctgaacctgggcagacgggaagagtacgacgtgctggacaagcggagaggcagggaccctgagatgggcggaaagccccagcggagaaagaacccccaggaaggactgtataacgaactccagaaagacaagatggccgaagcctacagcgagatcggcatgaagggcgagcggagaagaggcaagggccacgatggcctgtaccagggcctgagcaccgccaccaaggacacctatgacgccctgcacatgcaggccctgcctccaaga

SEQ ID NO: 26405 - DNA, 828 bp, synthetic construct
  source 1..828: mol_type = other DNA
ctgcgggatagcaagagcagcgacaagagcgtgtgtctgttcaccgacttcgacagccagaccaacgtgtcccagagcaaggactccgacgtgtacatcaccgataagaccgtgctggacatgcggagcatggacttcaagagcaactccgccgtggcctggtccaacaagtccgatttcgcctgcgccaacgccttcaacaacagcattatcgccgattgcggctttaccagcgagagctaccagcagggcgtgctgagcgccaccatcctgtacgagatcctgctgggcaaggccaccctgtacgccgtgctggtgtctgccctggtgctgatggctatggtcaagcggaaggacagccggggaaggagtaagaggagcaggctcctgcacagtgactacatgaacatgactccacgccgccccggacccacccgcaagcattaccagccctatgccccaccacgcgacttcgcagcctatcgctccagagtgaagttcagcagaagcgccgacgcccctgcctaccagcagggacagaaccaactgtacaacgagctgaacctgggcagacgggaagagtacgacgtgctggacaagcggagaggcagggaccctgagatgggcggaaagccccagcggagaaagaacccccaggaaggactgtataacgaactccagaaagacaagatggccgaagcctacagcgagatcggcatgaagggcgagcggagaagaggcaagggccacgatggcctgtaccagggcctgagcaccgccaccaaggacacctatgacgccctgcacatgcaggccctgcctccaaga

SEQ ID NO: 26406 - DNA, 858 bp, synthetic construct
  source 1..858: mol_type = other DNA
ctgcgggatagcaagagcagcgacaagagcgtgtgtctgttcaccgacttcgacagccagaccaacgtgtcccagagcaaggactccgacgtgtacatcaccgataagaccgtgctggacatgcggagcatggacttcaagagcaactccgccgtggcctggtccaacaagtccgatttcgcctgcgccaacgccttcaacaacagcattatccagatcgtgtctgccgaagcctggggcagagccgattgcggctttaccagcgagagctaccagcagggcgtgctgagcgccaccatcctgtacgagatcctgctgggcaaggccaccctgtacgccgtgctggtgtctgccctggtgctgatggctatggtcaagcggaaggacagccggggaaggagtaagaggagcaggctcctgcacagtgactacatgaacatgactccacgccgccccggacccacccgcaagcattaccagccctatgccccaccacgcgacttcgcagcctatcgctccagagtgaagttcagcagaagcgccgacgcccctgcctaccagcagggacagaaccaactgtacaacgagctgaacctgggcagacgggaagagtacgacgtgctggacaagcggagaggcagggaccctgagatgggcggaaagccccagcggagaaagaacccccaggaaggactgtataacgaactccagaaagacaagatggccgaagcctacagcgagatcggcatgaagggcgagcggagaagaggcaagggccacgatggcctgtaccagggcctgagcaccgccaccaaggacacctatgacgccctgcacatgcaggccctgcctccaaga

SEQ ID NO: 26407 - DNA, 882 bp, synthetic construct
  source 1..882: mol_type = other DNA
ctgcgggatagcaagagcagcgacaagagcgtgtgtctgttcaccgacttcgacagccagaccaacgtgtcccagagcaaggactccgacgtgtacatcaccgataagaccgtgctggacatgcggagcatggacttcaagagcaactccgccgtggcctggtccaacaagtccgatttcgcctgcgccaacgccttcaacaacagcattatcttcccacccatcaagaccgatgtgattacaatggaccccaaggacaactgctccaaggacgccaacgataccctgctgctccagctgaccaacaccagcgcctactacatgtacttgttgctgctgctgaagtccgtggtgtacttcgccatcatcacatgctgcctgctgcggagaaccgccttctgctgcaacggcgagaagtctaggagtaagaggagcaggctcctgcacagtgactacatgaacatgactccacgccgccccggacccacccgcaagcattaccagccctatgccccaccacgcgacttcgcagcctatcgctccagagtgaagttcagcagaagcgccgacgcccctgcctaccagcagggacagaaccaactgtacaacgagctgaacctgggcagacgggaagagtacgacgtgctggacaagcggagaggcagggaccctgagatgggcggaaagccccagcggagaaagaacccccaggaaggactgtataacgaactccagaaagacaagatggccgaagcctacagcgagatcggcatgaagggcgagcggagaagaggcaagggccacgatggcctgtaccagggcctgagcaccgccaccaaggacacctatgacgccctgcacatgcaggccctgcctccaaga

SEQ ID NO: 26408 - DNA, 876 bp, synthetic construct
  source 1..876: mol_type = other DNA
ctgcgggatagcaagagcagcgacaagagcgtgtgtctgttcaccgacttcgacagccagaccaacgtgtcccagagcaaggactccgacgtgtacatcaccgataagaccgtgctggacatgcggagcatggacttcaagagcaactccgccgtggcctggtccaacaagtccgatttcgcctgcgccaacgccttcaacaacagcattatccccatcaagaccgatgtgattacaatggaccccaaggacaactgctccaaggacgccaacgataccctgctgctccagctgaccaacaccagcgcctactacatgtacttgttgctgctgctgaagtccgtggtgtacttcgccatcatcacatgctgcctgctgcggagaaccgccttctgctgcaacggcgagaagtctaggagtaagaggagcaggctcctgcacagtgactacatgaacatgactccacgccgccccggacccacccgcaagcattaccagccctatgccccaccacgcgacttcgcagcctatcgctccagagtgaagttcagcagaagcgccgacgcccctgcctaccagcagggacagaaccaactgtacaacgagctgaacctgggcagacgggaagagtacgacgtgctggacaagcggagaggcagggaccctgagatgggcggaaagccccagcggagaaagaacccccaggaaggactgtataacgaactccagaaagacaagatggccgaagcctacagcgagatcggcatgaagggcgagcggagaagaggcaagggccacgatggcctgtaccagggcctgagcaccgccaccaaggacacctatgacgccctgcacatgcaggccctgcctccaaga

SEQ ID NO: 26409 - DNA, 852 bp, synthetic construct
  source 1..852: mol_type = other DNA
ctgcgggatagcaagagcagcgacaagagcgtgtgtctgttcaccgacttcgacagccagaccaacgtgtcccagagcaaggactccgacgtgtacatcaccgataagaccgtgctggacatgcggagcatggacttcaagagcaactccgccgtggcctggtccaacaagtccgatttcgcctgcgccaacgccttcaacaacagcattatcatggaccccaaggacaactgctccaaggacgccaacgataccctgctgctccagctgaccaacaccagcgcctactacatgtacttgttgctgctgctgaagtccgtggtgtacttcgccatcatcacatgctgcctgctgcggagaaccgccttctgctgcaacggcgagaagtctaggagtaagaggagcaggctcctgcacagtgactacatgaacatgactccacgccgccccggacccacccgcaagcattaccagccctatgccccaccacgcgacttcgcagcctatcgctccagagtgaagttcagcagaagcgccgacgcccctgcctaccagcagggacagaaccaactgtacaacgagctgaacctgggcagacgggaagagtacgacgtgctggacaagcggagaggcagggaccctgagatgggcggaaagccccagcggagaaagaacccccaggaaggactgtataacgaactccagaaagacaagatggccgaagcctacagcgagatcggcatgaagggcgagcggagaagaggcaagggccacgatggcctgtaccagggcctgagcaccgccaccaaggacacctatgacgccctgcacatgcaggccctgcctccaaga

SEQ ID NO: 26410 - DNA, 876 bp, synthetic construct; identical to SEQ ID NO: 26408
  source 1..876: mol_type = other DNA

SEQ ID NO: 26411 - DNA, 834 bp, synthetic construct
  source 1..834: mol_type = other DNA
ctgcgggatagcaagagcagcgacaagagcgtgtgtctgttcaccgacttcgacagccagaccaacgtgtcccagagcaaggactccgacgtgtacatcaccgataagaccgtgctggacatgcggagcatggacttcaagagcaactccgccgtggcctggtccaacaagtccgatttcgcctgcgccaacgccttcaacaacagcattatctgctccaaggacgccaacgataccctgctgctccagctgaccaacaccagcgcctactacatgtacttgttgctgctgctgaagtccgtggtgtacttcgccatcatcacatgctgcctgctgcggagaaccgccttctgctgcaacggcgagaagtctaggagtaagaggagcaggctcctgcacagtgactacatgaacatgactccacgccgccccggacccacccgcaagcattaccagccctatgccccaccacgcgacttcgcagcctatcgctccagagtgaagttcagcagaagcgccgacgcccctgcctaccagcagggacagaaccaactgtacaacgagctgaacctgggcagacgggaagagtacgacgtgctggacaagcggagaggcagggaccctgagatgggcggaaagccccagcggagaaagaacccccaggaaggactgtataacgaactccagaaagacaagatggccgaagcctacagcgagatcggcatgaagggcgagcggagaagaggcaagggccacgatggcctgtaccagggcctgagcaccgccaccaaggacacctatgacgccctgcacatgcaggccctgcctccaaga

SEQ ID NO: 26412 - DNA, 879 bp, synthetic construct
  source 1..879: mol_type = other DNA
ctgcgggatagcaagagcagcgacaagagcgtgtgtctgttcaccgacttcgacagccagaccaacgtgtcccagagcaaggactccgacgtgtacatcaccgataagaccgtgctggacatgcggagcatggacttcaagagcaactccgccgtggcctggtccaacaagtccgatttcgcctgcgccaacgccttcaacaacagcattatcgaagtgaaaaccgactccaccgaccacgtgaagcccaaagagacagagaacaccaagcagcccagcaagagctgccacaagcccaaggccatcgtgcacaccgagaaagtgaacatgatgagcctgaccgtgctgggcctgcggatgctgttcgccaaaaccgtggccgtgaacttcctgctgaccgccaagctgttcttcctcaggagtaagaggagcaggctcctgcacagtgactacatgaacatgactccacgccgccccggacccacccgcaagcattaccagccctatgccccaccacgcgacttcgcagcctatcgctccagagtgaagttcagcagaagcgccgacgcccctgcctaccagcagggacagaaccaactgtacaacgagctgaacctgggcagacgggaagagtacgacgtgctggacaagcggagaggcagggaccctgagatgggcggaaagccccagcggagaaagaacccccaggaaggactgtataacgaactccagaaagacaagatggccgaagcctacagcgagatcggcatgaagggcgagcggagaagaggcaagggccacgatggcctgtaccagggcctgagcaccgccaccaaggacacctatgacgccctgcacatgcaggccctgcctccaaga

SEQ ID NO: 26413 - DNA, 858 bp, synthetic construct
  source 1..858: mol_type = other DNA
ctgcgggatagcaagagcagcgacaagagcgtgtgtctgttcaccgacttcgacagccagaccaacgtgtcccagagcaaggactccgacgtgtacatcaccgataagaccgtgctggacatgcggagcatggacttcaagagcaactccgccgtggcctggtccaacaagtccgatttcgcctgcgccaacgccttcaacaacagcattatcgaccacgtgaagcccaaagagacagagaacaccaagcagcccagcaagagctgccacaagcccaaggccatcgtgcacaccgagaaagtgaacatgatgagcctgaccgtgctgggcctgcggatgctgttcgccaaaaccgtggccgtgaacttcctgctgaccgccaagctgttcttcctcaggagtaagaggagcaggctcctgcacagtgactacatgaacatgactccacgccgccccggacccacccgcaagcattaccagccctatgccccaccacgcgacttcgcagcctatcgctccagagtgaagttcagcagaagcgccgacgcccctgcctaccagcagggacagaaccaactgtacaacgagctgaacctgggcagacgggaagagtacgacgtgctggacaagcggagaggcagggaccctgagatgggcggaaagccccagcggagaaagaacccccaggaaggactgtataacgaactccagaaagacaagatggccgaagcctacagcgagatcggcatgaagggcgagcggagaagaggcaagggccacgatggcctgtaccagggcctgagcaccgccaccaaggacacctatgacgccctgcacatgcaggccctgcctccaaga

SEQ ID NO: 26414 - DNA, 873 bp, synthetic construct; identical to SEQ ID NO: 26394
  source 1..873: mol_type = other DNA

SEQ ID NO: 26415 - DNA, 867 bp, synthetic construct; identical to SEQ ID NO: 26395
  source 1..867: mol_type = other DNA

SEQ ID NO: 26416 - DNA, 897 bp, synthetic construct; identical to SEQ ID NO: 26396
  source 1..897: mol_type = other DNA

SEQ ID NO: 26417 - DNA, 921 bp, synthetic construct; identical to SEQ ID NO: 26397
  source 1..921: mol_type = other DNA

SEQ ID NO: 26418 - DNA, 915 bp, synthetic construct; identical to SEQ ID NO: 26398
  source 1..915: mol_type = other DNA

SEQ ID NO: 26419 - DNA, 891 bp, synthetic construct; identical to SEQ ID NO: 26399
  source 1..891: mol_type = other DNA

SEQ ID NO: 26420 - DNA, 915 bp, synthetic construct; identical to SEQ ID NO: 26398
  source 1..915: mol_type = other DNA

SEQ ID NO: 26421 - DNA, 873 bp, synthetic construct; identical to SEQ ID NO: 26401
  source 1..873: mol_type = other DNA

SEQ ID NO: 26422 - DNA, 918 bp, synthetic construct; identical to SEQ ID NO: 26402
  source 1..918: mol_type = other DNA

SEQ ID NO: 26423 - DNA, 897 bp, synthetic construct; identical to SEQ ID NO: 26403
  source 1..897: mol_type = other DNA

SEQ ID NO: 26424 - DNA, 993 bp, synthetic construct
  source 1..993: mol_type = other DNA
gaggtggccgtgttcgagcctagcgaggccgagatcagccacacccagaaagccaccctcgtgtgcctggctaccggcttctaccccgaccatgtggaactgtcttggtgggtcaacggcaaagaggtgcacagcggcgtgtctaccgacccccagccactgaaagaacagcccgccctgaacgacagccggtactgcctgagcagcagactgagagtgtccgccaccttctggcagaacccccggaaccacttcagatgccaggtgcagttctacggcctgagcgagaacgacgagtggacccaggacagagccaagcccgtgacccagatcgtgtctgccgaagcctggatccccgaggacacattcttcccaagccccgagagcagctgcgacgtgaagctggtggaaaagagcttcgagacagacaccaacctgaacttccagaacctgagcgtgatcggcttcagaatcctgctgctgaaagtggccggctttaacctgctgatgaccctgcggctgtggtccagcaggagtaagaggagcaggctcctgcacagtgactacatgaacatgactccacgccgccccggacccacccgcaagcattaccagccctatgccccaccacgcgacttcgcagcctatcgctccagagtgaagttcagcagaagcgccgacgcccctgcctaccagcagggacagaaccaactgtacaacgagctgaacctgggcagacgggaagagtacgacgtgctggacaagcggagaggcagggaccctgagatgggcggaaagccccagcggagaaagaacccccaggaaggactgtataacgaactccagaaagacaagatggccgaagcctacagcgagatcggcatgaagggcgagcggagaagaggcaagggccacgatggcctgtaccagggcctgagcaccgccaccaaggacacctatgacgccctgcacatgcaggccctgcctccaaga

SEQ ID NO: 26425 - DNA, 963 bp, synthetic construct
  source 1..963: mol_type = other DNA
gaggtggccgtgttcgagcctagcgaggccgagatcagccacacccagaaagccaccctcgtgtgcctggctaccggcttctaccccgaccatgtggaactgtcttggtgggtcaacggcaaagaggtgcacagcggcgtgtctaccgacccccagccactgaaagaacagcccgccctgaacgacagccggtactgcctgagcagcagactgagagtgtccgccaccttctggcagaacccccggaaccacttcagatgccaggtgcagttctacggcctgagcgagaacgacgagtggacccaggacagagccaagcccgtgacccagatcgtgtctgccgaagcctgggagagcagctgcgacgtgaagctggtggaaaagagcttcgagacagacaccaacctgaacttccagaacctgagcgtgatcggcttcagaatcctgctgctgaaagtggccggctttaacctgctgatgaccctgcggctgtggtccagcaggagtaagaggagcaggctcctgcacagtgactacatgaacatgactccacgccgccccggacccacccgcaagcattaccagccctatgccccaccacgcgacttcgcagcctatcgctccagagtgaagttcagcagaagcgccgacgcccctgcctaccagcagggacagaaccaactgtacaacgagctgaacctgggcagacgggaagagtacgacgtgctggacaagcggagaggcagggaccctgagatgggcggaaagccccagcggagaaagaacccccaggaaggactgtataacgaactccagaaagacaagatggccgaagcctacagcgagatcggcatgaagggcgagcggagaagaggcaagggccacgatggcctgtaccagggcctgagcaccgccaccaaggacacctatgacgccctgcacatgcaggccctgcctccaaga

SEQ ID NO: 26426 - DNA, 990 bp, synthetic construct
  source 1..990: mol_type = other DNA
gaggtggccgtgttcgagcctagcgaggccgagatcagccacacccagaaagccaccctcgtgtgcctggctaccggcttctaccccgaccatgtggaactgtcttggtgggtcaacggcaaagaggtgcacagcggcgtgtctaccgacccccagccactgaaagaacagcccgccctgaacgacagccggtactgcctgagcagcagactgagagtgtccgccaccttctggcagaacccccggaaccacttcagatgccaggtgcagttctacggcctgagcgagaacgacgagtggacccaggacagagccaagcccgtgacccagatcgtgtctgccgaagcctggcccgaggacacattcttcccaagccccgagagcagctgcgacgtgaagctggtggaaaagagcttcgagacagacaccaacctgaacttccagaacctgagcgtgatcggcttcagaatcctgctgctgaaagtggccggctttaacctgctgatgaccctgcggctgtggtccagcaggagtaagaggagcaggctcctgcacagtgactacatgaacatgactccacgccgccccggacccacccgcaagcattaccagccctatgccccaccacgcgacttcgcagcctatcgctccagagtgaagttcagcagaagcgccgacgcccctgcctaccagcagggacagaaccaactgtacaacgagctgaacctgggcagacgggaagagtacgacgtgctggacaagcggagaggcagggaccctgagatgggcggaaagccccagcggagaaagaacccccaggaaggactgtataacgaactccagaaagacaagatggccgaagcctacagcgagatcggcatgaagggcgagcggagaagaggcaagggccacgatggcctgtaccagggcctgagcaccgccaccaaggacacctatgacgccctgcacatgcaggccctgcctccaaga

SEQ ID NO: 26427 - DNA, 1020 bp, synthetic construct
  source 1..1020: mol_type = other DNA
gaggtggccgtgttcgagcctagcgaggccgagatcagccacacccagaaagccaccctcgtgtgcctggctaccggcttctaccccgaccatgtggaactgtcttggtgggtcaacggcaaagaggtgcacagcggcgtgtctaccgacccccagccactgaaagaacagcccgccctgaacgacagccggtactgcctgagcagcagactgagagtgtccgccaccttctggcagaacccccggaaccacttcagatgccaggtgcagttctacggcctgagcgagaacgacgagtggacccaggacagagccaagcccgtgacccagatcgtgtctgccgaagcctggttcccacccatcaagaccgatgtgattacaatggaccccaaggacaactgctccaaggacgccaacgataccctgctgctccagctgaccaacaccagcgcctactacatgtacttgttgctgctgctgaagtccgtggtgtacttcgccatcatcacatgctgcctgctgcggagaaccgccttctgctgcaacggcgagaagtctaggagtaagaggagcaggctcctgcacagtgactacatgaacatgactccacgccgccccggacccacccgcaagcattaccagccctatgccccaccacgcgacttcgcagcctatcgctccagagtgaagttcagcagaagcgccgacgcccctgcctaccagcagggacagaaccaactgtacaacgagctgaacctgggcagacgggaagagtacgacgtgctggacaagcggagaggcagggaccctgagatgggcggaaagccccagcggagaaagaacccccaggaaggactgtataacgaactccagaaagacaagatggccgaagcctacagcgagatcggcatgaagggcgagcggagaagaggcaagggccacgatggcctgtaccagggcctgagcaccgccaccaaggacacctatgacgccctgcacatgcaggccctgcctccaaga

SEQ ID NO: 26428 - DNA, 1014 bp, synthetic construct
  source 1..1014: mol_type = other DNA
gaggtggccgtgttcgagcctagcgaggccgagatcagccacacccagaaagccaccctcgtgtgcctggctaccggcttctaccccgaccatgtggaactgtcttggtgggtcaacggcaaagaggtgcacagcggcgtgtctaccgacccccagccactgaaagaacagcccgccctgaacgacagccggtactgcctgagcagcagactgagagtgtccgccaccttctggcagaacccccggaaccacttcagatgccaggtgcagttctacggcctgagcgagaacgacgagtggacccaggacagagccaagcccgtgacccagatcgtgtctgccgaagcctggcccatcaagaccgatgtgattacaatggaccccaaggacaactgctccaaggacgccaacgataccctgctgctccagctgaccaacaccagcgcctactacatgtacttgttgctgctgctgaagtccgtggtgtacttcgccatcatcacatgctgcctgctgcggagaaccgccttctgctgcaacggcgagaagtctaggagtaagaggagcaggctcctgcacagtgactacatgaacatgactccacgccgccccggacccacccgcaagcattaccagccctatgccccaccacgcgacttcgcagcctatcgctccagagtgaagttcagcagaagcgccgacgcccctgcctaccagcagggacagaaccaactgtacaacgagctgaacctgggcagacgggaagagtacgacgtgctggacaagcggagaggcagggaccctgagatgggcggaaagccccagcggagaaagaacccccaggaaggactgtataacgaactccagaaagacaagatggccgaagcctacagcgagatcggcatgaagggcgagcggagaagaggcaagggccacgatggcctgtaccagggcctgagcaccgccaccaaggacacctatgacgccctgcacatgcaggccctgcctccaaga

SEQ ID NO: 26429 - DNA, 990 bp, synthetic construct
  source 1..990: mol_type = other DNA
gaggtggccgtgttcgagcctagcgaggccgagatcagccacacccagaaagccaccctcgtgtgcctggctaccggcttctaccccgaccatgtggaactgtcttggtgggtcaacggcaaagaggtgcacagcggcgtgtctaccgacccccagccactgaaagaacagcccgccctgaacgacagccggtactgcctgagcagcagactgagagtgtccgccaccttctggcagaacccccggaaccacttcagatgccaggtgcagttctacggcctgagcgagaacgacgagtggacccaggacagagccaagcccgtgacccagatcgtgtctgccgaagcctggatggaccccaaggacaactgctccaaggacgccaacgataccctgctgctccagctgaccaacaccagcgcctactacatgtacttgttgctgctgctgaagtccgtggtgtacttcgccatcatcacatgctgcctgctgcggagaaccgccttctgctgcaacggcgagaagtctaggagtaagaggagcaggctcctgcacagtgactacatgaacatgactccacgccgccccggacccacccgcaagcattaccagccctatgccccaccacgcgacttcgcagcctatcgctccagagtgaagttcagcagaagcgccgacgcccctgcctaccagcagggacagaaccaactgtacaacgagctgaacctgggcagacgggaagagtacgacgtgctggacaagcggagaggcagggaccctgagatgggcggaaagccccagcggagaaagaacccccaggaaggactgtataacgaactccagaaagacaagatggccgaagcctacagcgagatcggcatgaagggcgagcggagaagaggcaagggccacgatggcctgtaccagggcctgagcaccgccaccaaggacacctatgacgccctgcacatgcaggccctgcctccaaga

SEQ ID NO: 26430 - DNA, 1014 bp, synthetic construct; identical to SEQ ID NO: 26428
  source 1..1014: mol_type = other DNA

SEQ ID NO: 26431 - DNA, 972 bp, synthetic construct
  source 1..972: mol_type = other DNA
gaggtggccgtgttcgagcctagcgaggccgagatcagccacacccagaaagccaccctcgtgtgcctggctaccggcttctaccccgaccatgtggaactgtcttggtgggtcaacggcaaagaggtgcacagcggcgtgtctaccgacccccagccactgaaagaacagcccgccctgaacgacagccggtactgcctgagcagcagactgagagtgtccgccaccttctggcagaacccccggaaccacttcagatgccaggtgcagttctacggcctgagcgagaacgacgagtggacccaggacagagccaagcccgtgacccagatcgtgtctgccgaagcctggtgctccaaggacgccaacgataccctgctgctccagctgaccaacaccagcgcctactacatgtacttgttgctgctgctgaagtccgtggtgtacttcgccatcatcacatgctgcctgctgcggagaaccgccttctgctgcaacggcgagaagtctaggagtaagaggagcaggctcctgcacagtgactacatgaacatgactccacgccgccccggacccacccgcaagcattaccagccctatgccccaccacgcgacttcgcagcctatcgctccagagtgaagttcagcagaagcgccgacgcccctgcctaccagcagggacagaaccaactgtacaacgagctgaacctgggcagacgggaagagtacgacgtgctggacaagcggagaggcagggaccctgagatgggcggaaagccccagcggagaaagaacccccaggaaggactgtataacgaactccagaaagacaagatggccgaagcctacagcgagatcggcatgaagggcgagcggagaagaggcaagggccacgatggcctgtaccagggcctgagcaccgccaccaaggacacctatgacgccctgcacatgcaggccctgcctccaaga

SEQ ID NO: 26432 - DNA, 1017 bp, synthetic construct
  source 1..1017: mol_type = other DNA
gaggtggccgtgttcgagcctagcgaggccgagatcagccacacccagaaagccaccctcgtgtgcctggctaccggcttctaccccgaccatgtggaactgtcttggtgggtcaacggcaaagaggtgcacagcggcgtgtctaccgacccccagccactgaaagaacagcccgccctgaacgacagccggtactgcctgagcagcagactgagagtgtccgccaccttctggcagaacccccggaaccacttcagatgccaggtgcagttctacggcctgagcgagaacgacgagtggacccaggacagagccaagcccgtgacccagatcgtgtctgccgaagcctgggaagtgaaaaccgactccaccgaccacgtgaagcccaaagagacagagaacaccaagcagcccagcaagagctgccacaagcccaaggccatcgtgcacaccgagaaagtgaacatgatgagcctgaccgtgctgggcctgcggatgctgttcgccaaaaccgtggccgtgaacttcctgctgaccgccaagctgttcttcctcaggagtaagaggagcaggctcctgcacagtgactacatgaacatgactccacgccgccccggacccacccgcaagcattaccagccctatgccccaccacgcgacttcgcagcctatcgctccagagtgaagttcagcagaagcgccgacgcccctgcctaccagcagggacagaaccaactgtacaacgagctgaacctgggcagacgggaagagtacgacgtgctggacaagcggagaggcagggaccctgagatgggcggaaagccccagcggagaaagaacccccaggaaggactgtataacgaactccagaaagacaagatggccgaagcctacagcgagatcggcatgaagggcgagcggagaagaggcaagggccacgatggcctgtaccagggcctgagcaccgccaccaaggacacctatgacgccctgcacatgcaggccctgcctccaaga

SEQ ID NO: 26433 - DNA, 996 bp, synthetic construct
  source 1..996: mol_type = other DNA
gaggtggccgtgttcgagcctagcgaggccgagatcagccacacccagaaagccaccctcgtgtgcctggctaccggcttctaccccgaccatgtggaactgtcttggtgggtcaacggcaaagaggtgcacagcggcgtgtctaccgacccccagccactgaaagaacagcccgccctgaacgacagccggtactgcctgagcagcagactgagagtgtccgccaccttctggcagaacccccggaaccacttcagatgccaggtgcagttctacggcctgagcgagaacgacgagtggacccaggacagagccaagcccgtgacccagatcgtgtctgccgaagcctgggaccacgtgaagcccaaagagacagagaacaccaagcagcccagcaagagctgccacaagcccaaggccatcgtgcacaccgagaaagtgaacatgatgagcctgaccgtgctgggcctgcggatgctgttcgccaaaaccgtggccgtgaacttcctgctgaccgccaagctgttcttcctcaggagtaagaggagcaggctcctgcacagtgactacatgaacatgactccacgccgccccggacccacccgcaagcattaccagccctatgccccaccacgcgacttcgcagcctatcgctccagagtgaagttcagcagaagcgccgacgcccctgcctaccagcagggacagaaccaactgtacaacgagctgaacctgggcagacgggaagagtacgacgtgctggacaagcggagaggcagggaccctgagatgggcggaaagccccagcggagaaagaacccccaggaaggactgtataacgaactccagaaagacaagatggccgaagcctacagcgagatcggcatgaagggcgagcggagaagaggcaagggccacgatggcctgtaccagggcctgagcaccgccaccaaggacacctatgacgccctgcacatgcaggccctgcctccaaga

SEQ ID NO: 26434 - DNA, 999 bp, synthetic construct
  source 1..999: mol_type = other DNA
gaggtggccgtgttcgagcctagcgaggccgagatcagccacacccagaaagccaccctcgtgtgcctggctaccggcttctaccccgaccatgtggaactgtcttggtgggtcaacggcaaagaggtgcacagcggcgtgtctaccgacccccagccactgaaagaacagcccgccctgaacgacagccggtactgcctgagcagcagactgagagtgtccgccaccttctggcagaacccccggaaccacttcagatgccaggtgcagttctacggcctgagcgagaacgacgagtggacccaggacagagccaagcccgtgacccagatcgtgtctgccgaagcctggggcagaatccccgaggacacattcttcccaagccccgagagcagctgcgacgtgaagctggtggaaaagagcttcgagacagacaccaacctgaacttccagaacctgagcgtgatcggcttcagaatcctgctgctgaaagtggccggctttaacctgctgatgaccctgcggctgtggtccagcaggagtaagaggagcaggctcctgcacagtgactacatgaacatgactccacgccgccccggacccacccgcaagcattaccagccctatgccccaccacgcgacttcgcagcctatcgctccagagtgaagttcagcagaagcgccgacgcccctgcctaccagcagggacagaaccaactgtacaacgagctgaacctgggcagacgggaagagtacgacgtgctggacaagcggagaggcagggaccctgagatgggcggaaagccccagcggagaaagaacccccaggaaggactgtataacgaactccagaaagacaagatggccgaagcctacagcgagatcggcatgaagggcgagcggagaagaggcaagggccacgatggcctgtaccagggcctgagcaccgccaccaaggacacctatgacgccctgcacatgcaggccctgcctccaaga

SEQ ID NO: 26435 - DNA, 969 bp, synthetic construct
  source 1..969: mol_type = other DNA
gaggtggccgtgttcgagcctagcgaggccgagatcagccacacccagaaagccaccctcgtgtgcctggctaccggcttctaccccgaccatgtggaactgtcttggtgggtcaacggcaaagaggtgcacagcggcgtgtctaccgacccccagccactgaaagaacagcccgccctgaacgacagccggtactgcctgagcagcagactgagagtgtccgccaccttctggcagaacccccggaaccacttcagatgccaggtgcagttctacggcctgagcgagaacgacgagtggacccaggacagagccaagcccgtgacccagatcgtgtctgccgaagcctggggcagagagagcagctgcgacgtgaagctggtggaaaagagcttcgagacagacaccaacctgaacttccagaacctgagcgtgatcggcttcagaatcctgctgctgaaagtggccggctttaacctgctgatgaccctgcggctgtggtccagcaggagtaagaggagcaggctcctgcacagtgactacatgaacatgactccacgccgccccggacccacccgcaagcattaccagccctatgccccaccacgcgacttcgcagcctatcgctccagagtgaagttcagcagaagcgccgacgcccctgcctaccagcagggacagaaccaactgtacaacgagctgaacctgggcagacgggaagagtacgacgtgctggacaagcggagaggcagggaccctgagatgggcggaaagccccagcggagaaagaacccccaggaaggactgtataacgaactccagaaagacaagatggccgaagcctacagcgagatcggcatgaagggcgagcggagaagaggcaagggccacgatggcctgtaccagggcctgagcaccgccaccaaggacacctatgacgccctgcacatgcaggccctgcctccaaga

SEQ ID NO: 26436 - DNA, 996 bp, synthetic construct
  source 1..996: mol_type = other DNA
gaggtggccgtgttcgagcctagcgaggccgagatcagccacacccagaaagccaccctcgtgtgcctggctaccggcttctaccccgaccatgtggaactgtcttggtgggtcaacggcaaagaggtgcacagcggcgtgtctaccgacccccagccactgaaagaacagcccgccctgaacgacagccggtactgcctgagcagcagactgagagtgtccgccaccttctggcagaacccccggaaccacttcagatgccaggtgcagttctacggcctgagcgagaacgacgagtggacccaggacagagccaagcccgtgacccagatcgtgtctgccgaagcctggggcagacccgaggacacattcttcccaagccccgagagcagctgcgacgtgaagctggtggaaaagagcttcgagacagacaccaacctgaacttccagaacctgagcgtgatcggcttcagaatcctgctgctgaaagtggccggctttaacctgctgatgaccctgcggctgtggtccagcaggagtaagaggagcaggctcctgcacagtgactacatgaacatgactccacgccgccccggacccacccgcaagcattaccagccctatgccccaccacgcgacttcgcagcctatcgctccagagtgaagttcagcagaagcgccgacgcccctgcctaccagcagggacagaaccaactgtacaacgagctgaacctgggcagacgggaagagtacgacgtgctggacaagcggagaggcagggaccctgagatgggcggaaagccccagcggagaaagaacccccaggaaggactgtataacgaactccagaaagacaagatggccgaagcctacagcgagatcggcatgaagggcgagcggagaagaggcaagggccacgatggcctgtaccagggcctgagcaccgccaccaaggacacctatgacgccctgcacatgcaggccctgcctccaaga

SEQ ID NO: 26437 - DNA, 1026 bp, synthetic construct
  source 1..1026: mol_type = other DNA
gaggtggccgtgttcgagcctagcgaggccgagatcagccacacccagaaagccaccctcgtgtgcctggctaccggcttctaccccgaccatgtggaactgtcttggtgggtcaacggcaaagaggtgcacagcggcgtgtctaccgacccccagccactgaaagaacagcccgccctgaacgacagccggtactgcctgagcagcagactgagagtgtccgccaccttctggcagaacccccggaaccacttcagatgccaggtgcagttctacggcctgagcgagaacgacgagtggacccaggacagagccaagcccgtgacccagatcgtgtctgccgaagcctggggcagattcccacccatcaagaccgatgtgattacaatggaccccaaggacaactgctccaaggacgccaacgataccctgctgctccagctgaccaacaccagcgcctactacatgtacttgttgctgctgctgaagtccgtggtgtacttcgccatcatcacatgctgcctgctgcggagaaccgccttctgctgcaacggcgagaagtctaggagtaagaggagcaggctcctgcacagtgactacatgaacatgactccacgccgccccggacccacccgcaagcattaccagccctatgccccaccacgcgacttcgcagcctatcgctccagagtgaagttcagcagaagcgccgacgcccctgcctaccagcagggacagaaccaactgtacaacgagctgaacctgggcagacgggaagagtacgacgtgctggacaagcggagaggcagggaccctgagatgggcggaaagccccagcggagaaagaacccccaggaaggactgtataacgaactccagaaagacaagatggccgaagcctacagcgagatcggcatgaagggcgagcggagaagaggcaagggccacgatggcctgtaccagggcctgagcaccgccaccaaggacacctatgacgccctgcacatgcaggccctgcctccaaga

SEQ ID NO: 26438 - DNA, 1020 bp, synthetic construct
  source 1..1020: mol_type = other DNA
gaggtggccgtgttcgagcctagcgaggccgagatcagccacacccagaaagccaccctcgtgtgcctggctaccggcttctaccccgaccatgtggaactgtcttggtgggtcaacggcaaagaggtgcacagcggcgtgtctaccgacccccagccactgaaagaacagcccgccctgaacgacagccggtactgcctgagcagcagactgagagtgtccgccaccttctggcagaacccccggaaccacttcagatgccaggtgcagttctacggcctgagcgagaacgacgagtggacccaggacagagccaagcccgtgacccagatcgtgtctgccgaagcctggggcagacccatcaagaccgatgtgattacaatggaccccaaggacaactgctccaaggacgccaacgataccctgctgctccagctgaccaacaccagcgcctactacatgtacttgttgctgctgctgaagtccgtggtgtacttcgccatcatcacatgctgcctgctgcggagaaccgccttctgctgcaacggcgagaagtctaggagtaagaggagcaggctcctgcacagtgactacatgaacatgactccacgccgccccggacccacccgcaagcattaccagccctatgccccaccacgcgacttcgcagcctatcgctccagagtgaagttcagcagaagcgccgacgcccctgcctaccagcagggacagaaccaactgtacaacgagctgaacctgggcagacgggaagagtacgacgtgctggacaagcggagaggcagggaccctgagatgggcggaaagccccagcggagaaagaacccccaggaaggactgtataacgaactccagaaagacaagatggccgaagcctacagcgagatcggcatgaagggcgagcggagaagaggcaagggccacgatggcctgtaccagggcctgagcaccgccaccaaggacacctatgacgccctgcacatgcaggccctgcctccaaga

SEQ ID NO: 26439 - DNA, 996 bp, synthetic construct
  source 1..996: mol_type = other DNA
gaggtggccgtgttcgagcctagcgaggccgagatcagccacacccagaaagccaccctcgtgtgcctggctaccggcttctaccccgaccatgtggaactgtcttggtgggtcaacggcaaagaggtgcacagcggcgtgtctaccgacccccagccactgaaagaacagcccgccctgaacgacagccggtactgcctgagcagcagactgagagtgtccgccaccttctggcagaacccccggaaccacttcagatgccaggtgcagttctacggcctgagcgagaacgacgagtggacccaggacagagccaagcccgtgacccagatcgtgtctgccgaagcctggggcagaatggaccccaaggacaactgctccaaggacgccaacgataccctgctgctccagctgaccaacaccagcgcctactacatgtacttgttgctgctgctgaagtccgtggtgtacttcgccatcatcacatgctgcctgctgcggagaaccgccttctgctgcaacggcgagaagtctaggagtaagaggagcaggctcctgcacagtgactacatgaacatgactccacgccgccccggacccacccgcaagcattaccagccctatgccccaccacgcgacttcgcagcctatcgctccagagtgaagttcagcagaagcgccgacgcccctgcctaccagcagggacagaaccaactgtacaacgagctgaacctgggcagacgggaagagtacgacgtgctggacaagcggagaggcagggaccctgagatgggcggaaagccccagcggagaaagaacccccaggaaggactgtataacgaactccagaaagacaagatggccgaagcctacagcgagatcggcatgaagggcgagcggagaagaggcaagggccacgatggcctgtaccagggcctgagcaccgccaccaaggacacctatgacgccctgcacatgcaggccctgcctccaaga

SEQ ID NO: 26440 - DNA, 1020 bp, synthetic construct; identical to SEQ ID NO: 26438
  source 1..1020: mol_type = other DNA

SEQ ID NO: 26441 - DNA, 978 bp, synthetic construct
  source 1..978: mol_type = other DNA
gaggtggccgtgttcgagcctagcgaggccgagatcagccacacccagaaagccaccctcgtgtgcctggctaccggcttctaccccgaccatgtggaactgtcttggtgggtcaacggcaaagaggtgcacagcggcgtgtctaccgacccccagccactgaaagaacagcccgccctgaacgacagccggtactgcctgagcagcagactgagagtgtccgccaccttctggcagaacccccggaaccacttcagatgccaggtgcagttctacggcctgagcgagaacgacgagtggacccaggacagagccaagcccgtgacccagatcgtgtctgccgaagcctggggcagatgctccaaggacgccaacgataccctgctgctccagctgaccaacaccagcgcctactacatgtacttgttgctgctgctgaagtccgtggtgtacttcgccatcatcacatgctgcctgctgcggagaaccgccttctgctgcaacggcgagaagtctaggagtaagaggagcaggctcctgcacagtgactacatgaacatgactccacgccgccccggacccacccgcaagcattaccagccctatgccccaccacgcgacttcgcagcctatcgctccagagtgaagttcagcagaagcgccgacgcccctgcctaccagcagggacagaaccaactgtacaacgagctgaacctgggcagacgggaagagtacgacgtgctggacaagcggagaggcagggaccctgagatgggcggaaagccccagcggagaaagaacccccaggaaggactgtataacgaactccagaaagacaagatggccgaagcctacagcgagatcggcatgaagggcgagcggagaagaggcaagggccacgatggcctgtaccagggcctgagcaccgccaccaaggacacctatgacgccctgcacatgcaggccctgcctccaaga

SEQ ID NO: 26442 - DNA, 1023 bp, synthetic construct
  source 1..1023: mol_type = other DNA
gaggtggccgtgttcgagcctagcgaggccgagatcagccacacccagaaagccaccctcgtgtgcctggctaccggcttctaccccgaccatgtggaactgtcttggtgggtcaacggcaaagaggtgcacagcggcgtgtctaccgacccccagccactgaaagaacagcccgccctgaacgacagccggtactgcctgagcagcagactgagagtgtccgccaccttctggcagaacccccggaaccacttcagatgccaggtgcagttctacggcctgagcgagaacgacgagtggacccaggacagagccaagcccgtgacccagatcgtgtctgccgaagcctggggcagagaagtgaaaaccgactccaccgaccacgtgaagcccaaagagacagagaacaccaagcagcccagcaagagctgccacaagcccaaggccatcgtgcacaccgagaaagtgaacatgatgagcctgaccgtgctgggcctgcggatgctgttcgccaaaaccgtggccgtgaacttcctgctgaccgccaagctgttcttcctcaggagtaagaggagcaggctcctgcacagtgactacatgaacatgactccacgccgccccggacccacccgcaagcattaccagccctatgccccaccacgcgacttcgcagcctatcgctccagagtgaagttcagcagaagcgccgacgcccctgcctaccagcagggacagaaccaactgtacaacgagctgaacctgggcagacgggaagagtacgacgtgctggacaagcggagaggcagggaccctgagatgggcggaaagccccagcggagaaagaacccccaggaaggactgtataacgaactccagaaagacaagatggccgaagcctacagcgagatcggcatgaagggcgagcggagaagaggcaagggccacgatggcctgtaccagggcctgagcaccgccaccaaggacacctatgacgccctgcacatgcaggccctgcctccaaga

SEQ ID NO: 26443 - DNA, 1002 bp, synthetic construct
  source 1..1002: mol_type = other DNA
gaggtggccgtgttcgagcctagcgaggccgagatcagccacacccagaaagccaccctcgtgtgcctggctaccggcttctaccccgaccatgtggaactgtcttggtgggtcaacggcaaagaggtgcacagcggcgtgtctaccgacccccagccactgaaagaacagcccgccctgaacgacagccggtactgcctgagcagcagactgagagtgtccgccaccttctggcagaacccccggaaccacttcagatgccaggtgcagttctacggcctgagcgagaacgacgagtggacccaggacagagccaagcccgtgacccagatcgtgtctgccgaagcctggggcagagaccacgtgaagcccaaagagacagagaacaccaagcagcccagcaagagctgccacaagcccaaggccatcgtgcacaccgagaaagtgaacatgatgagcctgaccgtgctgggcctgcggatgctgttcgccaaaaccgtggccgtgaacttcctgctgaccgccaagctgttcttcctcaggagtaagaggagcaggctcctgcacagtgactacatgaacatgactccacgccgccccggacccacccgcaagcattaccagccctatgccccaccacgcgacttcgcagcctatcgctccagagtgaagttcagcagaagcgccgacgcccctgcctaccagcagggacagaaccaactgtacaacgagctgaacctgggcagacgggaagagtacgacgtgctggacaagcggagaggcagggaccctgagatgggcggaaagccccagcggagaaagaacccccaggaaggactgtataacgaactccagaaagacaagatggccgaagcctacagcgagatcggcatgaagggcgagcggagaagaggcaagggccacgatggcctgtaccagggcctgagcaccgccaccaaggacacctatgacgccctgcacatgcaggccctgcctccaaga

SEQ ID NO: 26444 - DNA, 1008 bp, synthetic construct
  source 1..1008: mol_type = other DNA
gaggtggccgtgttcgagcctagcgaggccgagatcagccacacccagaaagccaccctcgtgtgcctggctaccggcttctaccccgaccatgtggaactgtcttggtgggtcaacggcaaagaggtgcacagcggcgtgtctaccgacccccagccactgaaagaacagcccgccctgaacgacagccggtactgcctgagcagcagactgagagtgtccgccaccttctggcagaacccccggaaccacttcagatgccaggtgcagttctacggcctgagcgagaacgacgagtggacccaggacagagccaagcccgtgacccagatcgtgtctgccgaagcctggggcagagccgattgcatccccgaggacacattcttcccaagccccgagagcagctgcgacgtgaagctggtggaaaagagcttcgagacagacaccaacctgaacttccagaacctgagcgtgatcggcttcagaatcctgctgctgaaagtggccggctttaacctgctgatgaccctgcggctgtggtccagcaggagtaagaggagcaggctcctgcacagtgactacatgaacatgactccacgccgccccggacccacccgcaagcattaccagccctatgccccaccacgcgacttcgcagcctatcgctccagagtgaagttcagcagaagcgccgacgcccctgcctaccagcagggacagaaccaactgtacaacgagctgaacctgggcagacgggaagagtacgacgtgctggacaagcggagaggcagggaccctgagatgggcggaaagccccagcggagaaagaacccccaggaaggactgtataacgaactccagaaagacaagatggccgaagcctacagcgagatcggcatgaagggcgagcggagaagaggcaagggccacgatggcctgtaccagggcctgagcaccgccaccaaggacacctatgacgccctgcacatgcaggccctgcctccaaga

SEQ ID NO: 26445 - DNA, 978 bp, synthetic construct
  source 1..978: mol_type = other DNA
gaggtggccgtgttcgagcctagcgaggccgagatcagccacacccagaaagccaccctcgtgtgcctggctaccggcttctaccccgaccatgtggaactgtcttggtgggtcaacggcaaagaggtgcacagcggcgtgtctaccgacccccagccactgaaagaacagcccgccctgaacgacagccggtactgcctgagcagcagactgagagtgtccgccaccttctggcagaacccccggaaccacttcagatgccaggtgcagttctacggcctgagcgagaacgacgagtggacccaggacagagccaagcccgtgacccagatcgtgtctgccgaagcctggggcagagccgattgcgagagcagctgcgacgtgaagctggtggaaaagagcttcgagacagacaccaacctgaacttccagaacctgagcgtgatcggcttcagaatcctgctgctgaaagtggccggctttaacctgctgatgaccctgcggctgtggtccagcaggagtaagaggagcaggctcctgcacagtgactacatgaacatgactccacgccgccccggacccacccgcaagcattaccagccctatgccccaccacgcgacttcgcagcctatcgctccagagtgaagttcagcagaagcgccgacgcccctgcctaccagcagggacagaaccaactgtacaacgagctgaacctgggcagacgggaagagtacgacgtgctggacaagcggagaggcagggaccctgagatgggcggaaagccccagcggagaaagaacccccaggaaggactgtataacgaactccagaaagacaagatggccgaagcctacagcgagatcggcatgaagggcgagcggagaagaggcaagggccacgatggcctgtaccagggcctgagcaccgccaccaaggacacctatgacgccctgcacatgcaggccctgcctccaaga

SEQ ID NO: 26446 - DNA, 1005 bp, synthetic construct
  source 1..1005: mol_type = other DNA
gaggtggccgtgttcgagcctagcgaggccgagatcagccacacccagaaagccaccctcgtgtgcctggctaccggcttctaccccgaccatgtggaactgtcttggtgggtcaacggcaaagaggtgcacagcggcgtgtctaccgacccccagccactgaaagaacagcccgccctgaacgacagccggtactgcctgagcagcagactgagagtgtccgccaccttctggcagaacccccggaaccacttcagatgccaggtgcagttctacggcctgagcgagaacgacgagtggacccaggacagagccaagcccgtgacccagatcgtgtctgccgaagcctggggcagagccgattgccccgaggacacattcttcccaagccccgagagcagctgcgacgtgaagctggtggaaaagagcttcgagacagacaccaacctgaacttccagaacctgagcgtgatcggcttcagaatcctgctgctgaaagtggccggctttaacctgctgatgaccctgcggctgtggtccagcaggagtaagaggagcaggctcctgcacagtgactacatgaacatgactccacgccgccccggacccacccgcaagcattaccagccctatgccccaccacgcgacttcgcagcctatcgctccagagtgaagttcagcagaagcgccgacgcccctgcctaccagcagggacagaaccaactgtacaacgagctgaacctgggcagacgggaagagtacgacgtgctggacaagcggagaggcagggaccctgagatgggcggaaagccccagcggagaaagaacccccaggaaggactgtataacgaactccagaaagacaagatggccgaagcctacagcgagatcggcatgaagggcgagcggagaagaggcaagggccacgatggcctgtaccagggcctgagcaccgccaccaaggacacctatgacgccctgcacatgcaggccctgcctccaaga

SEQ ID NO: 26447 - DNA, 1035 bp, synthetic construct
  source 1..1035: mol_type = other DNA
gaggtggccgtgttcgagcctagcgaggccgagatcagccacacccagaaagccaccctcgtgtgcctggctaccggcttctaccccgaccatgtggaactgtcttggtgggtcaacggcaaagaggtgcacagcggcgtgtctaccgacccccagccactgaaagaacagcccgccctgaacgacagccggtactgcctgagcagcagactgagagtgtccgccaccttctggcagaacccccggaaccacttcagatgccaggtgcagttctacggcctgagcgagaacgacgagtggacccaggacagagccaagcccgtgacccagatcgtgtctgccgaagcctggggcagagccgattgcttcccacccatcaagaccgatgtgattacaatggaccccaaggacaactgctccaaggacgccaacgataccctgctgctccagctgaccaacaccagcgcctactacatgtacttgttgctgctgctgaagtccgtggtgtacttcgccatcatcacatgctgcctgctgcggagaaccgccttctgctgcaacggcgagaagtctaggagtaagaggagcaggctcctgcacagtgactacatgaacatgactccacgccgccccggacccacccgcaagcattaccagccctatgccccaccacgcgacttcgcagcctatcgctccagagtgaagttcagcagaagcgccgacgcccctgcctaccagcagggacagaaccaactgtacaacgagctgaacctgggcagacgggaagagtacgacgtgctggacaagcggagaggcagggaccctgagatgggcggaaagccccagcggagaaagaacccccaggaaggactgtataacgaactccagaaagacaagatggccgaagcctacagcgagatcggcatgaagggcgagcggagaagaggcaagggccacgatggcctgtaccagggcctgagcaccgccaccaaggacacctatgacgccctgcacatgcaggccctgcctccaaga

SEQ ID NO: 26448 - DNA, 1029 bp, synthetic construct
  source 1..1029: mol_type = other DNA
gaggtggccgtgttcgagcctagcgaggccgagatcagccacacccagaaagccaccctcgtgtgcctggctaccggcttctaccccgaccatgtggaactgtcttggtgggtcaacggcaaagaggtgcacagcggcgtgtctaccgacccccagccactgaaagaacagcccgccctgaacgacagccggtactgcctgagcagcagactgagagtgtccgccaccttctggcagaacccccggaaccacttcagatgccaggtgcagttctacggcctgagcgagaacgacgagtggacccaggacagagccaagcccgtgacccagatcgtgtctgccgaagcctggggcagagccgattgccccatcaagaccgatgtgattacaatggaccccaaggacaactgctccaaggacgccaacgataccctgctgctccagctgaccaacaccagcgcctactacatgtacttgttgctgctgctgaagtccgtggtgtacttcgccatcatcacatgctgcctgctgcggagaaccgccttctgctgcaacggcgagaagtctaggagtaagaggagcaggctcctgcacagtgactacatgaacatgactccacgccgccccggacccacccgcaagcattaccagccctatgccccaccacgcgacttcgcagcctatcgctccagagtgaagttcagcagaagcgccgacgcccctgcctaccagcagggacagaaccaactgtacaacgagctgaacctgggcagacgggaagagtacgacgtgctggacaagcggagaggcagggaccctgagatgggcggaaagccccagcggagaaagaacccccaggaaggactgtataacgaactccagaaagacaagatggccgaagcctacagcgagatcggcatgaagggcgagcggagaagaggcaagggccacgatggcctgtaccagggcctgagcaccgccaccaaggacacctatgacgccctgcacatgcaggccctgcctccaaga

SEQ ID NO: 26449 - DNA, 1005 bp, synthetic construct
  source 1..1005: mol_type = other DNA
gaggtggccgtgttcgagcctagcgaggccgagatcagccacacccagaaagccaccctcgtgtgcctggctaccggcttctaccccgaccatgtggaactgtcttggtgggtcaacggcaaagaggtgcacagcggcgtgtctaccgacccccagccactgaaagaacagcccgccctgaacgacagccggtactgcctgagcagcagactgagagtgtccgccaccttctggcagaacccccggaaccacttcagatgccaggtgcagttctacggcctgagcgagaacgacgagtggacccaggacagagccaagcccgtgacccagatcgtgtctgccgaagcctggggcagagccgattgcatggaccccaaggacaactgctccaaggacgccaacgataccctgctgctccagctgaccaacaccagcgcctactacatgtacttgttgctgctgctgaagtccgtggtgtacttcgccatcatcacatgctgcctgctgcggagaaccgccttctgctgcaacggcgagaagtctaggagtaagaggagcaggctcctgcacagtgactacatgaacatgactccacgccgccccggacccacccgcaagcattaccagccctatgccccaccacgcgacttcgcagcctatcgctccagagtgaagttcagcagaagcgccgacgcccctgcctaccagcagggacagaaccaactgtacaacgagctgaacctgggcagacgggaagagtacgacgtgctggacaagcggagaggcagggaccctgagatgggcggaaagccccagcggagaaagaacccccaggaaggactgtataacgaactccagaaagacaagatggccgaagcctacagcgagatcggcatgaagggcgagcggagaagaggcaagggccacgatggcctgtaccagggcctgagcaccgccaccaaggacacctatgacgccctgcacatgcaggccctgcctccaaga

SEQ ID NO: 26450 - DNA, 1029 bp, synthetic construct; identical to SEQ ID NO: 26448
  source 1..1029: mol_type = other DNA

SEQ ID NO: 26451 - DNA, 987 bp, synthetic construct
  source 1..987: mol_type = other DNA
gaggtggccgtgttcgagcctagcgaggccgagatcagccacacccagaaagccaccctcgtgtgcctggctaccggcttctaccccgaccatgtggaactgtcttggtgggtcaacggcaaagaggtgcacagcggcgtgtctaccgacccccagccactgaaagaacagcccgccctgaacgacagccggtactgcctgagcagcagactgagagtgtccgccaccttctggcagaacccccggaaccacttcagatgccaggtgcagttctacggcctgagcgagaacgacgagtggacccaggacagagccaagcccgtgacccagatcgtgtctgccgaagcctggggcagagccgattgctgctccaaggacgccaacgataccctgctgctccagctgaccaacaccagcgcctactacatgtacttgttgctgctgctgaagtccgtggtgtacttcgccatcatcacatgctgcctgctgcggagaaccgccttctgctgcaacggcgagaagtctaggagtaagaggagcaggctcctgcacagtgactacatgaacatgactccacgccgccccggacccacccgcaagcattaccagccctatgccccaccacgcgacttcgcagcctatcgctccagagtgaagttcagcagaagcgccgacgcccctgcctaccagcagggacagaaccaactgtacaacgagctgaacctgggcagacgggaagagtacgacgtgctggacaagcggagaggcagggaccctgagatgggcggaaagccccagcggagaaagaacccccaggaaggactgtataacgaactccagaaagacaagatggccgaagcctacagcgagatcggcatgaagggcgagcggagaagaggcaagggccacgatggcctgtaccagggcctgagcaccgccaccaaggacacctatgacgccctgcacatgcaggccctgcctccaaga

SEQ ID NO: 26452 - DNA, 1032 bp, synthetic construct
  source 1..1032: mol_type = other DNA
gaggtggccgtgttcgagcctagcgaggccgagatcagccacacccagaaagccaccctcgtgtgcctggctaccggcttctaccccgaccatgtggaactgtcttggtgggtcaacggcaaagaggtgcacagcggcgtgtctaccgacccccagccactgaaagaacagcccgccctgaacgacagccggtactgcctgagcagcagactgagagtgtccgccaccttctggcagaacccccggaaccacttcagatgccaggtgcagttctacggcctgagcgagaacgacgagtggacccaggacagagccaagcccgtgacccagatcgtgtctgccgaagcctggggcagagccgattgcgaagtgaaaaccgactccaccgaccacgtgaagcccaaagagacagagaacaccaagcagcccagcaagagctgccacaagcccaaggccatcgtgcacaccgagaaagtgaacatgatgagcctgaccgtgctgggcctgcggatgctgttcgccaaaaccgtggccgtgaacttcctgctgaccgccaagctgttcttcctcaggagtaagaggagcaggctcctgcacagtgactacatgaacatgactccacgccgccccggacccacccgcaagcattaccagccctatgccccaccacgcgacttcgcagcctatcgctccagagtgaagttcagcagaagcgccgacgcccctgcctaccagcagggacagaaccaactgtacaacgagctgaacctgggcagacgggaagagtacgacgtgctggacaagcggagaggcagggaccctgagatgggcggaaagccccagcggagaaagaacccccaggaaggactgtataacgaactccagaaagacaagatggccgaagcctacagcgagatcggcatgaagggcgagcggagaagaggcaagggccacgatggcctgtaccagggcctgagcaccgccaccaaggacacctatgacgccctgcacatgcaggccctgcctccaaga

SEQ ID NO: 26453 - DNA, 1011 bp, synthetic construct
  source 1..1011: mol_type = other DNA
gaggtggccgtgttcgagcctagcgaggccgagatcagccacacccagaaagccaccctcgtgtgcctggctaccggcttctaccccgaccatgtggaactgtcttggtgggtcaacggcaaagaggtgcacagcggcgtgtctaccgacccccagccactgaaagaacagcccgccctgaacgacagccggtactgcctgagcagcagactgagagtgtccgccaccttctggcagaacccccggaaccacttcagatgccaggtgcagttctacggcctgagcgagaacgacgagtggacccaggacagagccaagcccgtgacccagatcgtgtctgccgaagcctggggcagagccgattgcgaccacgtgaagcccaaagagacagagaacaccaagcagcccagcaagagctgccacaagcccaaggccatcgtgcacaccgagaaagtgaacatgatgagcctgaccgtgctgggcctgcggatgctgttcgccaaaaccgtggccgtgaacttcctgctgaccgccaagctgttcttcctcaggagtaagaggagcaggctcctgcacagtgactacatgaacatgactccacgccgccccggacccacccgcaagcattaccagccctatgccccaccacgcgacttcgcagcctatcgctccagagtgaagttcagcagaagcgccgacgcccctgcctaccagcagggacagaaccaactgtacaacgagctgaacctgggcagacgggaagagtacgacgtgctggacaagcggagaggcagggaccctgagatgggcggaaagccccagcggagaaagaacccccaggaaggactgtataacgaactccagaaagacaagatggccgaagcctacagcgagatcggcatgaagggcgagcggagaagaggcaagggccacgatggcctgtaccagggcctgagcaccgccaccaaggacacctatgacgccctgcacatgcaggccctgcctccaaga

SEQ ID NO: 26454 - DNA, 969 bp, synthetic construct
  source 1..969: mol_type = other DNA
gaggtggccgtgttcgagcctagcgaggccgagatcagccacacccagaaagccaccctcgtgtgcctggctaccggcttctaccccgaccatgtggaactgtcttggtgggtcaacggcaaagaggtgcacagcggcgtgtctaccgacccccagccactgaaagaacagcccgccctgaacgacagccggtactgcctgagcagcagactgagagtgtccgccaccttctggcagaacccccggaaccacttcagatgccaggtgcagttctacggcctgagcgagaacgacgagtggacccaggacagagccaagcccgtgaccatccccgaggacacattcttcccaagccccgagagcagctgcgacgtgaagctggtggaaaagagcttcgagacagacaccaacctgaacttccagaacctgagcgtgatcggcttcagaatcctgctgctgaaagtggccggctttaacctgctgatgaccctgcggctgtggtccagcaggagtaagaggagcaggctcctgcacagtgactacatgaacatgactccacgccgccccggacccacccgcaagcattaccagccctatgccccaccacgcgacttcgcagcctatcgctccagagtgaagttcagcagaagcgccgacgcccctgcctaccagcagggacagaaccaactgtacaacgagctgaacctgggcagacgggaagagtacgacgtgctggacaagcggagaggcagggaccctgagatgggcggaaagccccagcggagaaagaacccccaggaaggactgtataacgaactccagaaagacaagatggccgaagcctacagcgagatcggcatgaagggcgagcggagaagaggcaagggccacgatggcctgtaccagggcctgagcaccgccaccaaggacacctatgacgccctgcacatgcaggccctgcctccaaga

SEQ ID NO: 26455 - DNA, 939 bp, synthetic construct
  source 1..939: mol_type = other DNA
gaggtggccgtgttcgagcctagcgaggccgagatcagccacacccagaaagccaccctcgtgtgcctggctaccggcttctaccccgaccatgtggaactgtcttggtgggtcaacggcaaagaggtgcacagcggcgtgtctaccgacccccagccactgaaagaacagcccgccctgaacgacagccggtactgcctgagcagcagactgagagtgtccgccaccttctggcagaacccccggaaccacttcagatgccaggtgcagttctacggcctgagcgagaacgacgagtggacccaggacagagccaagcccgtgaccgagagcagctgcgacgtgaagctggtggaaaagagcttcgagacagacaccaacctgaacttccagaacctgagcgtgatcggcttcagaatcctgctgctgaaagtggccggctttaacctgctgatgaccctgcggctgtggtccagcaggagtaagaggagcaggctcctgcacagtgactacatgaacatgactccacgccgccccggacccacccgcaagcattaccagccctatgccccaccacgcgacttcgcagcctatcgctccagagtgaagttcagcagaagcgccgacgcccctgcctaccagcagggacagaaccaactgtacaacgagctgaacctgggcagacgggaagagtacgacgtgctggacaagcggagaggcagggaccctgagatgggcggaaagccccagcggagaaagaacccccaggaaggactgtataacgaactccagaaagacaagatggccgaagcctacagcgagatcggcatgaagggcgagcggagaagaggcaagggccacgatggcctgtaccagggcctgagcaccgccaccaaggacacctatgacgccctgcacatgcaggccctgcctccaaga

SEQ ID NO: 26456 - DNA, 966 bp, synthetic construct
  source 1..966: mol_type = other DNA
gaggtggccgtgttcgagcctagcgaggccgagatcagccacacccagaaagccaccctcgtgtgcctggctaccggcttctaccccgaccatgtggaactgtcttggtgggtcaacggcaaagaggtgcacagcggcgtgtctaccgacccccagccactgaaagaacagcccgccctgaacgacagccggtactgcctgagcagcagactgagagtgtccgccaccttctggcagaacccccggaaccacttcagatgccaggtgcagttctacggcctgagcgagaacgacgagtggacccaggacagagccaagcccgtgacccccgaggacacattcttcccaagccccgagagcagctgcgacgtgaagctggtggaaaagagcttcgagacagacaccaacctgaacttccagaacctgagcgtgatcggcttcagaatcctgctgctgaaagtggccggctttaacctgctgatgaccctgcggctgtggtccagcaggagtaagaggagcaggctcctgcacagtgactacatgaacatgactccacgccgccccggacccacccgcaagcattaccagccctatgccccaccacgcgacttcgcagcctatcgctccagagtgaagttcagcagaagcgccgacgcccctgcctaccagcagggacagaaccaactgtacaacgagctgaacctgggcagacgggaagagtacgacgtgctggacaagcggagaggcagggaccctgagatgggcggaaagccccagcggagaaagaacccccaggaaggactgtataacgaactccagaaagacaagatggccgaagcctacagcgagatcggcatgaagggcgagcggagaagaggcaagggccacgatggcctgtaccagggcctgagcaccgccaccaaggacacctatgacgccctgcacatgcaggccctgcctccaaga

SEQ ID NO: 26457 - DNA, 996 bp, synthetic construct
  source 1..996: mol_type = other DNA
gaggtggccgtgttcgagcctagcgaggccgagatcagccacacccagaaagccaccctcgtgtgcctggctaccggcttctaccccgaccatgtggaactgtcttggtgggtcaacggcaaagaggtgcacagcggcgtgtctaccgacccccagccactgaaagaacagcccgccctgaacgacagccggtactgcctgagcagcagactgagagtgtccgccaccttctggcagaacccccggaaccacttcagatgccaggtgcagttctacggcctgagcgagaacgacgagtggacccaggacagagccaagcccgtgaccttcccacccatcaagaccgatgtgattacaatggaccccaaggacaactgctccaaggacgccaacgataccctgctgctccagctgaccaacaccagcgcctactacatgtacttgttgctgctgctgaagtccgtggtgtacttcgccatcatcacatgctgcctgctgcggagaaccgccttctgctgcaacggcgagaagtctaggagtaagaggagcaggctcctgcacagtgactacatgaacatgactccacgccgccccggacccacccgcaagcattaccagccctatgccccaccacgcgacttcgcagcctatcgctccagagtgaagttcagcagaagcgccgacgcccctgcctaccagcagggacagaaccaactgtacaacgagctgaacctgggcagacgggaagagtacgacgtgctggacaagcggagaggcagggaccctgagatgggcggaaagccccagcggagaaagaacccccaggaaggactgtataacgaactccagaaagacaagatggccgaagcctacagcgagatcggcatgaagggcgagcggagaagaggcaagggccacgatggcctgtaccagggcctgagcaccgccaccaaggacacctatgacgccctgcacatgcaggccctgcctccaaga

SEQ ID NO: 26458 - DNA, 990 bp, synthetic construct
  source 1..990: mol_type = other DNA
gaggtggccgtgttcgagcctagcgaggccgagatcagccacacccagaaagccaccctcgtgtgcctggctaccggcttctaccccgaccatgtggaactgtcttggtgggtcaacggcaaagaggtgcacagcggcgtgtctaccgacccccagccactgaaagaacagcccgccctgaacgacagccggtactgcctgagcagcagactgagagtgtccgccaccttctggcagaacccccggaaccacttcagatgccaggtgcagttctacggcctgagcgagaacgacgagtggacccaggacagagccaagcccgtgacccccatcaagaccgatgtgattacaatggaccccaaggacaactgctccaaggacgccaacgataccctgctgctccagctgaccaacaccagcgcctactacatgtacttgttgctgctgctgaagtccgtggtgtacttcgccatcatcacatgctgcctgctgcggagaaccgccttctgctgcaacggcgagaagtctaggagtaagaggagcaggctcctgcacagtgactacatgaacatgactccacgccgccccggacccacccgcaagcattaccagccctatgccccaccacgcgacttcgcagcctatcgctccagagtgaagttcagcagaagcgccgacgcccctgcctaccagcagggacagaaccaactgtacaacgagctgaacctgggcagacgggaagagtacgacgtgctggacaagcggagaggcagggaccctgagatgggcggaaagccccagcggagaaagaacccccaggaaggactgtataacgaactccagaaagacaagatggccgaagcctacagcgagatcggcatgaagggcgagcggagaagaggcaagggccacgatggcctgtaccagggcctgagcaccgccaccaaggacacctatgacgccctgcacatgcaggccctgcctccaaga

SEQ ID NO: 26459 - DNA, 966 bp, synthetic construct
  source 1..966: mol_type = other DNA
gaggtggccgtgttcgagcctagcgaggccgagatcagccacacccagaaagccaccctcgtgtgcctggctaccggcttctaccccgaccatgtggaactgtcttggtgggtcaacggcaaagaggtgcacagcggcgtgtctaccgacccccagccactgaaagaacagcccgccctgaacgacagccggtactgcctgagcagcagactgagagtgtccgccaccttctggcagaacccccggaaccacttcagatgccaggtgcagttctacggcctgagcgagaacgacgagtggacccaggacagagccaagcccgtgaccatggaccccaaggacaactgctccaaggacgccaacgataccctgctgctccagctgaccaacaccagcgcctactacatgtacttgttgctgctgctgaagtccgtggtgtacttcgccatcatcacatgctgcctgctgcggagaaccgccttctgctgcaacggcgagaagtctaggagtaagaggagcaggctcctgcacagtgactacatgaacatgactccacgccgccccggacccacccgcaagcattaccagccctatgccccaccacgcgacttcgcagcctatcgctccagagtgaagttcagcagaagcgccgacgcccctgcctaccagcagggacagaaccaactgtacaacgagctgaacctgggcagacgggaagagtacgacgtgctggacaagcggagaggcagggaccctgagatgggcggaaagccccagcggagaaagaacccccaggaaggactgtataacgaactccagaaagacaagatggccgaagcctacagcgagatcggcatgaagggcgagcggagaagaggcaagggccacgatggcctgtaccagggcctgagcaccgccaccaaggacacctatgacgccctgcacatgcaggccctgcctccaaga

SEQ ID NO: 26460 - DNA, 990 bp, synthetic construct; identical to SEQ ID NO: 26458
  source 1..990: mol_type = other DNA

SEQ ID NO: 26461 - DNA, 948 bp, synthetic construct
  source 1..948: mol_type = other DNA
gaggtggccgtgttcgagcctagcgaggccgagatcagccacacccagaaagccaccctcgtgtgcctggctaccggcttctaccccgaccatgtggaactgtcttggtgggtcaacggcaaagaggtgcacagcggcgtgtctaccgacccccagccactgaaagaacagcccgccctgaacgacagccggtactgcctgagcagcagactgagagtgtccgccaccttctggcagaacccccggaaccacttcagatgccaggtgcagttctacggcctgagcgagaacgacgagtggacccaggacagagccaagcccgtgacctgctccaaggacgccaacgataccctgctgctccagctgaccaacaccagcgcctactacatgtacttgttgctgctgctgaagtccgtggtgtacttcgccatcatcacatgctgcctgctgcggagaaccgccttctgctgcaacggcgagaagtctaggagtaagaggagcaggctcctgcacagtgactacatgaacatgactccacgccgccccggacccacccgcaagcattaccagccctatgccccaccacgcgacttcgcagcctatcgctccagagtgaagttcagcagaagcgccgacgcccctgcctaccagcagggacagaaccaactgtacaacgagctgaacctgggcagacgggaagagtacgacgtgctggacaagcggagaggcagggaccctgagatgggcggaaagccccagcggagaaagaacccccaggaaggactgtataacgaactccagaaagacaagatggccgaagcctacagcgagatcggcatgaagggcgagcggagaagaggcaagggccacgatggcctgtaccagggcctgagcaccgccaccaaggacacctatgacgccctgcacatgcaggccctgcctccaaga

SEQ ID NO: 26462 - DNA, 993 bp, synthetic construct
  source 1..993: mol_type = other DNA
gaggtggccgtgttcgagcctagcgaggccgagatcagccacacccagaaagccaccctcgtgtgcctggctaccggcttctaccccgaccatgtggaactgtcttggtgggtcaacggcaaagaggtgcacagcggcgtgtctaccgacccccagccactgaaagaacagcccgccctgaacgacagccggtactgcctgagcagcagactgagagtgtccgccaccttctggcagaacccccggaaccacttcagatgccaggtgcagttctacggcctgagcgagaacgacgagtggacccaggacagagccaagcccgtgaccgaagtgaaaaccgactccaccgaccacgtgaagcccaaagagacagagaacaccaagcagcccagcaagagctgccacaagcccaaggccatcgtgcacaccgagaaagtgaacatgatgagcctgaccgtgctgggcctgcggatgctgttcgccaaaaccgtggccgtgaacttcctgctgaccgccaagctgttcttcctcaggagtaagaggagcaggctcctgcacagtgactacatgaacatgactccacgccgccccggacccacccgcaagcattaccagccctatgccccaccacgcgacttcgcagcctatcgctccagagtgaagttcagcagaagcgccgacgcccctgcctaccagcagggacagaaccaactgtacaacgagctgaacctgggcagacgggaagagtacgacgtgctggacaagcggagaggcagggaccctgagatgggcggaaagccccagcggagaaagaacccccaggaaggactgtataacgaactccagaaagacaagatggccgaagcctacagcgagatcggcatgaagggcgagcggagaagaggcaagggccacgatggcctgtaccagggcctgagcaccgccaccaaggacacctatgacgccctgcacatgcaggccctgcctccaaga

SEQ ID NO: 26463 - DNA, 972 bp, synthetic construct
  source 1..972: mol_type = other DNA
gaggtggccgtgttcgagcctagcgaggccgagatcagccacacccagaaagccaccctcgtgtgcctggctaccggcttctaccccgaccatgtggaactgtcttggtgggtcaacggcaaagaggtgcacagcggcgtgtctaccgacccccagccactgaaagaacagcccgccctgaacgacagccggtactgcctgagcagcagactgagagtgtccgccaccttctggcagaacccccggaaccacttcagatgccaggtgcagttctacggcctgagcgagaacgacgagtggacccaggacagagccaagcccgtgaccgaccacgtgaagcccaaagagacagagaacaccaagcagcccagcaagagctgccacaagcccaaggccatcgtgcacaccgagaaagtgaacatgatgagcctgaccgtgctgggcctgcggatgctgttcgccaaaaccgtggccgtgaacttcctgctgaccgccaagctgttcttcctcaggagtaagaggagcaggctcctgcacagtgactacatgaacatgactccacgccgccccggacccacccgcaagcattaccagccctatgccccaccacgcgacttcgcagcctatcgctccagagtgaagttcagcagaagcgccgacgcccctgcctaccagcagggacagaaccaactgtacaacgagctgaacctgggcagacgggaagagtacgacgtgctggacaagcggagaggcagggaccctgagatgggcggaaagccccagcggagaaagaacccccaggaaggactgtataacgaactccagaaagacaagatggccgaagcctacagcgagatcggcatgaagggcgagcggagaagaggcaagggccacgatggcctgtaccagggcctgagcaccgccaccaaggacacctatgacgccctgcacatgcaggccctgcctccaaga

SEQ ID NO: 26464 - DNA, 993 bp, synthetic construct; identical to SEQ ID NO: 26424
  source 1..993: mol_type = other DNA

SEQ ID NO: 26465 - DNA, 963 bp, synthetic construct; identical to SEQ ID NO: 26425
  source 1..963: mol_type = other DNA

SEQ ID NO: 26466 - DNA, 990 bp, synthetic construct; identical to SEQ ID NO: 26426
  source 1..990: mol_type = other DNA

SEQ ID NO: 26467 - DNA, 1020 bp, synthetic construct; identical to SEQ ID NO: 26427
  source 1..1020: mol_type = other DNA

SEQ ID NO: 26468 - DNA, 1014 bp, synthetic construct; identical to SEQ ID NO: 26428
  source 1..1014: mol_type = other DNA

SEQ ID NO: 26469 - DNA, 990 bp, synthetic construct; identical to SEQ ID NO: 26429
  source 1..990: mol_type = other DNA

SEQ ID NO: 26470 - DNA, 1014 bp, synthetic construct; identical to SEQ ID NO: 26428
  source 1..1014: mol_type = other DNA

SEQ ID NO: 26471 - DNA, 972 bp, synthetic construct; identical to SEQ ID NO: 26431
  source 1..972: mol_type = other DNA

SEQ ID NO: 26472 - DNA, 1017 bp, synthetic construct; identical to SEQ ID NO: 26432
  source 1..1017: mol_type = other DNA

SEQ ID NO: 26473 - DNA, 996 bp, synthetic construct; identical to SEQ ID NO: 26433
  source 1..996: mol_type = other DNA

SEQ ID NO: 26474 - DNA, 972 bp, synthetic construct; identical to SEQ ID NO: 26259
  source 1..972: mol_type = other DNA

SEQ ID NO: 26475 - DNA, 942 bp, synthetic construct; identical to SEQ ID NO: 26260
  source 1..942: mol_type = other DNA

SEQ ID NO: 26476 - DNA, 969 bp, synthetic construct; identical to SEQ ID NO: 26261
  source 1..969: mol_type = other DNA

SEQ ID NO: 26477 - DNA, 999 bp, synthetic construct; identical to SEQ ID NO: 26262
  source 1..999: mol_type = other DNA

SEQ ID NO: 26478 - DNA, 993 bp, synthetic construct; identical to SEQ ID NO: 26263
  source 1..993: mol_type = other DNA

SEQ ID NO: 26479 - DNA, 969 bp, synthetic construct; identical to SEQ ID NO: 26264
  source 1..969: mol_type = other DNA

SEQ ID NO: 26480 - DNA, 993 bp, synthetic construct; identical to SEQ ID NO: 26263
  source 1..993: mol_type = other DNA

SEQ ID NO: 26481 - DNA, 951 bp, synthetic construct; identical to SEQ ID NO: 26266
  source 1..951: mol_type = other DNA

SEQ ID NO: 26482 - DNA, 996 bp, synthetic construct; identical to SEQ ID NO: 26267
  source 1..996: mol_type = other DNA

SEQ ID NO: 26483 - DNA, 975 bp, synthetic construct; identical to SEQ ID NO: 26268
  source 1..975: mol_type = other DNA

SEQ ID NO: 26484 - DNA, 939 bp, synthetic construct
  source 1..939: mol_type = other DNA
gccgacgtgtcccccaagcctaccatcttcctgccctctatcgccgagacaaagctccagaaggccggcacctacctgtgcctgctggaaaagttcttcccagatgtgattaagatccactggcaggaaaagaagtccaacaccatcctgggcagccaggaaggcaacaccatgaagaccaacgacacctacatgaagttcagctggctgaccgtgcccgagaagtccctggacaaagaacacagatgcatcgtgcggcacgaaaacaacaagaacggcgtggaccaggaaatcatcatccccgaggacacattcttcccaagccccgagagcagctgcgacgtgaagctggtggaaaagagcttcgagacagacaccaacctgaacttccagaacctgagcgtgatcggcttcagaatcctgctgctgaaagtggccggctttaacctgctgatgaccctgcggctgtggtccagcaggagtaagaggagcaggctcctgcacagtgactacatgaacatgactccacgccgccccggacccacccgcaagcattaccagccctatgccccaccacgcgacttcgcagcctatcgctccagagtgaagttcagcagaagcgccgacgcccctgcctaccagcagggacagaaccaactgtacaacgagctgaacctgggcagacgggaagagtacgacgtgctggacaagcggagaggcagggaccctgagatgggcggaaagccccagcggagaaagaacccccaggaaggactgtataacgaactccagaaagacaagatggccgaagcctacagcgagatcggcatgaagggcgagcggagaagaggcaagggccacgatggcctgtaccagggcctgagcaccgccaccaaggacacctatgacgccctgcacatgcaggccctgcctccaaga

SEQ ID NO: 26485 - DNA, 909 bp, synthetic construct
  source 1..909: mol_type = other DNA
gccgacgtgtcccccaagcctaccatcttcctgccctctatcgccgagacaaagctccagaaggccggcacctacctgtgcctgctggaaaagttcttcccagatgtgattaagatccactggcaggaaaagaagtccaacaccatcctgggcagccaggaaggcaacaccatgaagaccaacgacacctacatgaagttcagctggctgaccgtgcccgagaagtccctggacaaagaacacagatgcatcgtgcggcacgaaaacaacaagaacggcgtggaccaggaaatcatcgagagcagctgcgacgtgaagctggtggaaaagagcttcgagacagacaccaacctgaacttccagaacctgagcgtgatcggcttcagaatcctgctgctgaaagtggccggctttaacctgctgatgaccctgcggctgtggtccagcaggagtaagaggagcaggctcctgcacagtgactacatgaacatgactccacgccgccccggacccacccgcaagcattaccagccctatgccccaccacgcgacttcgcagcctatcgctccagagtgaagttcagcagaagcgccgacgcccctgcctaccagcagggacagaaccaactgtacaacgagctgaacctgggcagacgggaagagtacgacgtgctggacaagcggagaggcagggaccctgagatgggcggaaagccccagcggagaaagaacccccaggaaggactgtataacgaactccagaaagacaagatggccgaagcctacagcgagatcggcatgaagggcgagcggagaagaggcaagggccacgatggcctgtaccagggcctgagcaccgccaccaaggacacctatgacgccctgcacatgcaggccctgcctccaaga

SEQ ID NO: 26486 - DNA, 936 bp, synthetic construct
  source 1..936: mol_type = other DNA
gccgacgtgtcccccaagcctaccatcttcctgccctctatcgccgagacaaagctccagaaggccggcacctacctgtgcctgctggaaaagttcttcccagatgtgattaagatccactggcaggaaaagaagtccaacaccatcctgggcagccaggaaggcaacaccatgaagaccaacgacacctacatgaagttcagctggctgaccgtgcccgagaagtccctggacaaagaacacagatgcatcgtgcggcacgaaaacaacaagaacggcgtggaccaggaaatcatccccgaggacacattcttcccaagccccgagagcagctgcgacgtgaagctggtggaaaagagcttcgagacagacaccaacctgaacttccagaacctgagcgtgatcggcttcagaatcctgctgctgaaagtggccggctttaacctgctgatgaccctgcggctgtggtccagcaggagtaagaggagcaggctcctgcacagtgactacatgaacatgactccacgccgccccggacccacccgcaagcattaccagccctatgccccaccacgcgacttcgcagcctatcgctccagagtgaagttcagcagaagcgccgacgcccctgcctaccagcagggacagaaccaactgtacaacgagctgaacctgggcagacgggaagagtacgacgtgctggacaagcggagaggcagggaccctgagatgggcggaaagccccagcggagaaagaacccccaggaaggactgtataacgaactccagaaagacaagatggccgaagcctacagcgagatcggcatgaagggcgagcggagaagaggcaagggccacgatggcctgtaccagggcctgagcaccgccaccaaggacacctatgacgccctgcacatgcaggccctgcctccaaga

SEQ ID NO: 26487 - DNA, 918 bp, synthetic construct
  source 1..918: mol_type = other DNA
gccgacgtgtcccccaagcctaccatcttcctgccctctatcgccgagacaaagctccagaaggccggcacctacctgtgcctgctggaaaagttcttcccagatgtgattaagatccactggcaggaaaagaagtccaacaccatcctgggcagccaggaaggcaacaccatgaagaccaacgacacctacatgaagttcagctggctgaccgtgcccgagaagtccctggacaaagaacacagatgcatcgtgcggcacgaaaacaacaagaacggcgtggaccaggaaatcatcggcagagccgattgcggctttaccagcgagagctaccagcagggcgtgctgagcgccaccatcctgtacgagatcctgctgggcaaggccaccctgtacgccgtgctggtgtctgccctggtgctgatggctatggtcaagcggaaggacagccggggaaggagtaagaggagcaggctcctgcacagtgactacatgaacatgactccacgccgccccggacccacccgcaagcattaccagccctatgccccaccacgcgacttcgcagcctatcgctccagagtgaagttcagcagaagcgccgacgcccctgcctaccagcagggacagaaccaactgtacaacgagctgaacctgggcagacgggaagagtacgacgtgctggacaagcggagaggcagggaccctgagatgggcggaaagccccagcggagaaagaacccccaggaaggactgtataacgaactccagaaagacaagatggccgaagcctacagcgagatcggcatgaagggcgagcggagaagaggcaagggccacgatggcctgtaccagggcctgagcaccgccaccaaggacacctatgacgccctgcacatgcaggccctgcctccaaga

SEQ ID NO: 26488 - DNA, 912 bp, synthetic construct
  source 1..912: mol_type = other DNA
gccgacgtgtcccccaagcctaccatcttcctgccctctatcgccgagacaaagctccagaaggccggcacctacctgtgcctgctggaaaagttcttcccagatgtgattaagatccactggcaggaaaagaagtccaacaccatcctgggcagccaggaaggcaacaccatgaagaccaacgacacctacatgaagttcagctggctgaccgtgcccgagaagtccctggacaaagaacacagatgcatcgtgcggcacgaaaacaacaagaacggcgtggaccaggaaatcatcgccgattgcggctttaccagcgagagctaccagcagggcgtgctgagcgccaccatcctgtacgagatcctgctgggcaaggccaccctgtacgccgtgctggtgtctgccctggtgctgatggctatggtcaagcggaaggacagccggggaaggagtaagaggagcaggctcctgcacagtgactacatgaacatgactccacgccgccccggacccacccgcaagcattaccagccctatgccccaccacgcgacttcgcagcctatcgctccagagtgaagttcagcagaagcgccgacgcccctgcctaccagcagggacagaaccaactgtacaacgagctgaacctgggcagacgggaagagtacgacgtgctggacaagcggagaggcagggaccctgagatgggcggaaagccccagcggagaaagaacccccaggaaggactgtataacgaactccagaaagacaagatggccgaagcctacagcgagatcggcatgaagggcgagcggagaagaggcaagggccacgatggcctgtaccagggcctgagcaccgccaccaaggacacctatgacgccctgcacatgcaggccctgcctccaaga

SEQ ID NO: 26489 - DNA, 942 bp, synthetic construct
  source 1..942: mol_type = other DNA
gccgacgtgtcccccaagcctaccatcttcctgccctctatcgccgagacaaagctccagaaggccggcacctacctgtgcctgctggaaaagttcttcccagatgtgattaagatccactggcaggaaaagaagtccaacaccatcctgggcagccaggaaggcaacaccatgaagaccaacgacacctacatgaagttcagctggctgaccgtgcccgagaagtccctggacaaagaacacagatgcatcgtgcggcacgaaaacaacaagaacggcgtggaccaggaaatcatccagatcgtgtctgccgaagcctggggcagagccgattgcggctttaccagcgagagctaccagcagggcgtgctgagcgccaccatcctgtacgagatcctgctgggcaaggccaccctgtacgccgtgctggtgtctgccctggtgctgatggctatggtcaagcggaaggacagccggggaaggagtaagaggagcaggctcctgcacagtgactacatgaacatgactccacgccgccccggacccacccgcaagcattaccagccctatgccccaccacgcgacttcgcagcctatcgctccagagtgaagttcagcagaagcgccgacgcccctgcctaccagcagggacagaaccaactgtacaacgagctgaacctgggcagacgggaagagtacgacgtgctggacaagcggagaggcagggaccctgagatgggcggaaagccccagcggagaaagaacccccaggaaggactgtataacgaactccagaaagacaagatggccgaagcctacagcgagatcggcatgaagggcgagcggagaagaggcaagggccacgatggcctgtaccagggcctgagcaccgccaccaaggacacctatgacgccctgcacatgcaggccctgcctccaaga

SEQ ID NO: 26490 - DNA, 963 bp, synthetic construct
  source 1..963: mol_type = other DNA
gccgacgtgtcccccaagcctaccatcttcctgccctctatcgccgagacaaagctccagaaggccggcacctacctgtgcctgctggaaaagttcttcccagatgtgattaagatccactggcaggaaaagaagtccaacaccatcctgggcagccaggaaggcaacaccatgaagaccaacgacacctacatgaagttcagctggctgaccgtgcccgagaagtccctggacaaagaacacagatgcatcgtgcggcacgaaaacaacaagaacggcgtggaccaggaaatcatcgaagtgaaaaccgactccaccgaccacgtgaagcccaaagagacagagaacaccaagcagcccagcaagagctgccacaagcccaaggccatcgtgcacaccgagaaagtgaacatgatgagcctgaccgtgctgggcctgcggatgctgttcgccaaaaccgtggccgtgaacttcctgctgaccgccaagctgttcttcctcaggagtaagaggagcaggctcctgcacagtgactacatgaacatgactccacgccgccccggacccacccgcaagcattaccagccctatgccccaccacgcgacttcgcagcctatcgctccagagtgaagttcagcagaagcgccgacgcccctgcctaccagcagggacagaaccaactgtacaacgagctgaacctgggcagacgggaagagtacgacgtgctggacaagcggagaggcagggaccctgagatgggcggaaagccccagcggagaaagaacccccaggaaggactgtataacgaactccagaaagacaagatggccgaagcctacagcgagatcggcatgaagggcgagcggagaagaggcaagggccacgatggcctgtaccagggcctgagcaccgccaccaaggacacctatgacgccctgcacatgcaggccctgcctccaaga

SEQ ID NO: 26491 - DNA, 942 bp, synthetic construct
  source 1..942: mol_type = other DNA
gccgacgtgtcccccaagcctaccatcttcctgccctctatcgccgagacaaagctccagaaggccggcacctacctgtgcctgctggaaaagttcttcccagatgtgattaagatccactggcaggaaaagaagtccaacaccatcctgggcagccaggaaggcaacaccatgaagaccaacgacacctacatgaagttcagctggctgaccgtgcccgagaagtccctggacaaagaacacagatgcatcgtgcggcacgaaaacaacaagaacggcgtggaccaggaaatcatcgaccacgtgaagcccaaagagacagagaacaccaagcagcccagcaagagctgccacaagcccaaggccatcgtgcacaccgagaaagtgaacatgatgagcctgaccgtgctgggcctgcggatgctgttcgccaaaaccgtggccgtgaacttcctgctgaccgccaagctgttcttcctcaggagtaagaggagcaggctcctgcacagtgactacatgaacatgactccacgccgccccggacccacccgcaagcattaccagccctatgccccaccacgcgacttcgcagcctatcgctccagagtgaagttcagcagaagcgccgacgcccctgcctaccagcagggacagaaccaactgtacaacgagctgaacctgggcagacgggaagagtacgacgtgctggacaagcggagaggcagggaccctgagatgggcggaaagccccagcggagaaagaacccccaggaaggactgtataacgaactccagaaagacaagatggccgaagcctacagcgagatcggcatgaagggcgagcggagaagaggcaagggccacgatggcctgtaccagggcctgagcaccgccaccaaggacacctatgacgccctgcacatgcaggccctgcctccaaga

SEQ ID NO: 26492 - DNA, 945 bp, synthetic construct
  source 1..945: mol_type = other DNA
gccgacgtgtcccccaagcctaccatcttcctgccctctatcgccgagacaaagctccagaaggccggcacctacctgtgcctgctggaaaagttcttcccagatgtgattaagatccactggcaggaaaagaagtccaacaccatcctgggcagccaggaaggcaacaccatgaagaccaacgacacctacatgaagttcagctggctgaccgtgcccgagaagtccctggacaaagaacacagatgcatcgtgcggcacgaaaacaacaagaacggcgtggaccaggaaatcatcttcccaatccccgaggacacattcttcccaagccccgagagcagctgcgacgtgaagctggtggaaaagagcttcgagacagacaccaacctgaacttccagaacctgagcgtgatcggcttcagaatcctgctgctgaaagtggccggctttaacctgctgatgaccctgcggctgtggtccagcaggagtaagaggagcaggctcctgcacagtgactacatgaacatgactccacgccgccccggacccacccgcaagcattaccagccctatgccccaccacgcgacttcgcagcctatcgctccagagtgaagttcagcagaagcgccgacgcccctgcctaccagcagggacagaaccaactgtacaacgagctgaacctgggcagacgggaagagtacgacgtgctggacaagcggagaggcagggaccctgagatgggcggaaagccccagcggagaaagaacccccaggaaggactgtataacgaactccagaaagacaagatggccgaagcctacagcgagatcggcatgaagggcgagcggagaagaggcaagggccacgatggcctgtaccagggcctgagcaccgccaccaaggacacctatgacgccctgcacatgcaggccctgcctccaaga

SEQ ID NO: 26493 - DNA, 915 bp, synthetic construct
  source 1..915: mol_type = other DNA
gccgacgtgtcccccaagcctaccatcttcctgccctctatcgccgagacaaagctccagaaggccggcacctacctgtgcctgctggaaaagttcttcccagatgtgattaagatccactggcaggaaaagaagtccaacaccatcctgggcagccaggaaggcaacaccatgaagaccaacgacacctacatgaagttcagctggctgaccgtgcccgagaagtccctggacaaagaacacagatgcatcgtgcggcacgaaaacaacaagaacggcgtggaccaggaaatcatcttcccagagagcagctgcgacgtgaagctggtggaaaagagcttcgagacagacaccaacctgaacttccagaacctgagcgtgatcggcttcagaatcctgctgctgaaagtggccggctttaacctgctgatgaccctgcggctgtggtccagcaggagtaagaggagcaggctcctgcacagtgactacatgaacatgactccacgccgccccggacccacccgcaagcattaccagccctatgccccaccacgcgacttcgcagcctatcgctccagagtgaagttcagcagaagcgccgacgcccctgcctaccagcagggacagaaccaactgtacaacgagctgaacctgggcagacgggaagagtacgacgtgctggacaagcggagaggcagggaccctgagatgggcggaaagccccagcggagaaagaacccccaggaaggactgtataacgaactccagaaagacaagatggccgaagcctacagcgagatcggcatgaagggcgagcggagaagaggcaagggccacgatggcctgtaccagggcctgagcaccgccaccaaggacacctatgacgccctgcacatgcaggccctgcctccaaga

SEQ ID NO: 26494 - DNA, 942 bp, synthetic construct
  source 1..942: mol_type = other DNA
gccgacgtgtcccccaagcctaccatcttcctgccctctatcgccgagacaaagctccagaaggccggcacctacctgtgcctgctggaaaagttcttcccagatgtgattaagatccactggcaggaaaagaagtccaacaccatcctgggcagccaggaaggcaacaccatgaagaccaacgacacctacatgaagttcagctggctgaccgtgcccgagaagtccctggacaaagaacacagatgcatcgtgcggcacgaaaacaacaagaacggcgtggaccaggaaatcatcttcccacccgaggacacattcttcccaagccccgagagcagctgcgacgtgaagctggtggaaaagagcttcgagacagacaccaacctgaacttccagaacctgagcgtgatcggcttcagaatcctgctgctgaaagtggccggctttaacctgctgatgaccctgcggctgtggtccagcaggagtaagaggagcaggctcctgcacagtgactacatgaacatgactccacgccgccccggacccacccgcaagcattaccagccctatgccccaccacgcgacttcgcagcctatcgctccagagtgaagttcagcagaagcgccgacgcccctgcctaccagcagggacagaaccaactgtacaacgagctgaacctgggcagacgggaagagtacgacgtgctggacaagcggagaggcagggaccctgagatgggcggaaagccccagcggagaaagaacccccaggaaggactgtataacgaactccagaaagacaagatggccgaagcctacagcgagatcggcatgaagggcgagcggagaagaggcaagggccacgatggcctgtaccagggcctgagcaccgccaccaaggacacctatgacgccctgcacatgcaggccctgcctccaaga

SEQ ID NO: 26495 - DNA, 924 bp, synthetic construct
  source 1..924: mol_type = other DNA
gccgacgtgtcccccaagcctaccatcttcctgccctctatcgccgagacaaagctccagaaggccggcacctacctgtgcctgctggaaaagttcttcccagatgtgattaagatccactggcaggaaaagaagtccaacaccatcctgggcagccaggaaggcaacaccatgaagaccaacgacacctacatgaagttcagctggctgaccgtgcccgagaagtccctggacaaagaacacagatgcatcgtgcggcacgaaaacaacaagaacggcgtggaccaggaaatcatcttcccaggcagagccgattgcggctttaccagcgagagctaccagcagggcgtgctgagcgccaccatcctgtacgagatcctgctgggcaaggccaccctgtacgccgtgctggtgtctgccctggtgctgatggctatggtcaagcggaaggacagccggggaaggagtaagaggagcaggctcctgcacagtgactacatgaacatgactccacgccgccccggacccacccgcaagcattaccagccctatgccccaccacgcgacttcgcagcctatcgctccagagtgaagttcagcagaagcgccgacgcccctgcctaccagcagggacagaaccaactgtacaacgagctgaacctgggcagacgggaagagtacgacgtgctggacaagcggagaggcagggaccctgagatgggcggaaagccccagcggagaaagaacccccaggaaggactgtataacgaactccagaaagacaagatggccgaagcctacagcgagatcggcatgaagggcgagcggagaagaggcaagggccacgatggcctgtaccagggcctgagcaccgccaccaaggacacctatgacgccctgcacatgcaggccctgcctccaaga

SEQ ID NO: 26496 - DNA, 918 bp, synthetic construct
  source 1..918: mol_type = other DNA
gccgacgtgtcccccaagcctaccatcttcctgccctctatcgccgagacaaagctccagaaggccggcacctacctgtgcctgctggaaaagttcttcccagatgtgattaagatccactggcaggaaaagaagtccaacaccatcctgggcagccaggaaggcaacaccatgaagaccaacgacacctacatgaagttcagctggctgaccgtgcccgagaagtccctggacaaagaacacagatgcatcgtgcggcacgaaaacaacaagaacggcgtggaccaggaaatcatcttcccagccgattgcggctttaccagcgagagctaccagcagggcgtgctgagcgccaccatcctgtacgagatcctgctgggcaaggccaccctgtacgccgtgctggtgtctgccctggtgctgatggctatggtcaagcggaaggacagccggggaaggagtaagaggagcaggctcctgcacagtgactacatgaacatgactccacgccgccccggacccacccgcaagcattaccagccctatgccccaccacgcgacttcgcagcctatcgctccagagtgaagttcagcagaagcgccgacgcccctgcctaccagcagggacagaaccaactgtacaacgagctgaacctgggcagacgggaagagtacgacgtgctggacaagcggagaggcagggaccctgagatgggcggaaagccccagcggagaaagaacccccaggaaggactgtataacgaactccagaaagacaagatggccgaagcctacagcgagatcggcatgaagggcgagcggagaagaggcaagggccacgatggcctgtaccagggcctgagcaccgccaccaaggacacctatgacgccctgcacatgcaggccctgcctccaaga

SEQ ID NO: 26497 - DNA, 948 bp, synthetic construct
  source 1..948: mol_type = other DNA
gccgacgtgtcccccaagcctaccatcttcctgccctctatcgccgagacaaagctccagaaggccggcacctacctgtgcctgctggaaaagttcttcccagatgtgattaagatccactggcaggaaaagaagtccaacaccatcctgggcagccaggaaggcaacaccatgaagaccaacgacacctacatgaagttcagctggctgaccgtgcccgagaagtccctggacaaagaacacagatgcatcgtgcggcacgaaaacaacaagaacggcgtggaccaggaaatcatcttcccacagatcgtgtctgccgaagcctggggcagagccgattgcggctttaccagcgagagctaccagcagggcgtgctgagcgccaccatcctgtacgagatcctgctgggcaaggccaccctgtacgccgtgctggtgtctgccctggtgctgatggctatggtcaagcggaaggacagccggggaaggagtaagaggagcaggctcctgcacagtgactacatgaacatgactccacgccgccccggacccacccgcaagcattaccagccctatgccccaccacgcgacttcgcagcctatcgctccagagtgaagttcagcagaagcgccgacgcccctgcctaccagcagggacagaaccaactgtacaacgagctgaacctgggcagacgggaagagtacgacgtgctggacaagcggagaggcagggaccctgagatgggcggaaagccccagcggagaaagaacccccaggaaggactgtataacgaactccagaaagacaagatggccgaagcctacagcgagatcggcatgaagggcgagcggagaagaggcaagggccacgatggcctgtaccagggcctgagcaccgccaccaaggacacctatgacgccctgcacatgcaggccctgcctccaaga

SEQ ID NO: 26498 - DNA, 969 bp, synthetic construct
  source 1..969: mol_type = other DNA
gccgacgtgtcccccaagcctaccatcttcctgccctctatcgccgagacaaagctccagaaggccggcacctacctgtgcctgctggaaaagttcttcccagatgtgattaagatccactggcaggaaaagaagtccaacaccatcctgggcagccaggaaggcaacaccatgaagaccaacgacacctacatgaagttcagctggctgaccgtgcccgagaagtccctggacaaagaacacagatgcatcgtgcggcacgaaaacaacaagaacggcgtggaccaggaaatcatcttcccagaagtgaaaaccgactccaccgaccacgtgaagcccaaagagacagagaacaccaagcagcccagcaagagctgccacaagcccaaggccatcgtgcacaccgagaaagtgaacatgatgagcctgaccgtgctgggcctgcggatgctgttcgccaaaaccgtggccgtgaacttcctgctgaccgccaagctgttcttcctcaggagtaagaggagcaggctcctgcacagtgactacatgaacatgactccacgccgccccggacccacccgcaagcattaccagccctatgccccaccacgcgacttcgcagcctatcgctccagagtgaagttcagcagaagcgccgacgcccctgcctaccagcagggacagaaccaactgtacaacgagctgaacctgggcagacgggaagagtacgacgtgctggacaagcggagaggcagggaccctgagatgggcggaaagccccagcggagaaagaacccccaggaaggactgtataacgaactccagaaagacaagatggccgaagcctacagcgagatcggcatgaagggcgagcggagaagaggcaagggccacgatggcctgtaccagggcctgagcaccgccaccaaggacacctatgacgccctgcacatgcaggccctgcctccaaga

SEQ ID NO: 26499 - DNA, 948 bp, synthetic construct
  source 1..948: mol_type = other DNA
gccgacgtgtcccccaagcctaccatcttcctgccctctatcgccgagacaaagctccagaaggccggcacctacctgtgcctgctggaaaagttcttcccagatgtgattaagatccactggcaggaaaagaagtccaacaccatcctgggcagccaggaaggcaacaccatgaagaccaacgacacctacatgaagttcagctggctgaccgtgcccgagaagtccctggacaaagaacacagatgcatcgtgcggcacgaaaacaacaagaacggcgtggaccaggaaatcatcttcccagaccacgtgaagcccaaagagacagagaacaccaagcagcccagcaagagctgccacaagcccaaggccatcgtgcacaccgagaaagtgaacatgatgagcctgaccgtgctgggcctgcggatgctgttcgccaaaaccgtggccgtgaacttcctgctgaccgccaagctgttcttcctcaggagtaagaggagcaggctcctgcacagtgactacatgaacatgactccacgccgccccggacccacccgcaagcattaccagccctatgccccaccacgcgacttcgcagcctatcgctccagagtgaagttcagcagaagcgccgacgcccctgcctaccagcagggacagaaccaactgtacaacgagctgaacctgggcagacgggaagagtacgacgtgctggacaagcggagaggcagggaccctgagatgggcggaaagccccagcggagaaagaacccccaggaaggactgtataacgaactccagaaagacaagatggccgaagcctacagcgagatcggcatgaagggcgagcggagaagaggcaagggccacgatggcctgtaccagggcctgagcaccgccaccaaggacacctatgacgccctgcacatgcaggccctgcctccaaga

SEQ ID NO: 26500 - DNA, 969 bp, synthetic construct
  source 1..969: mol_type = other DNA
gccgacgtgtcccccaagcctaccatcttcctgccctctatcgccgagacaaagctccagaaggccggcacctacctgtgcctgctggaaaagttcttcccagatgtgattaagatccactggcaggaaaagaagtccaacaccatcctgggcagccaggaaggcaacaccatgaagaccaacgacacctacatgaagttcagctggctgaccgtgcccgagaagtccctggacaaagaacacagatgcatcgtgcggcacgaaaacaacaagaacggcgtggaccaggaaatcatcttcccacccatcaagaccgatgtgattacaatccccgaggacacattcttcccaagccccgagagcagctgcgacgtgaagctggtggaaaagagcttcgagacagacaccaacctgaacttccagaacctgagcgtgatcggcttcagaatcctgctgctgaaagtggccggctttaacctgctgatgaccctgcggctgtggtccagcaggagtaagaggagcaggctcctgcacagtgactacatgaacatgactccacgccgccccggacccacccgcaagcattaccagccctatgccccaccacgcgacttcgcagcctatcgctccagagtgaagttcagcagaagcgccgacgcccctgcctaccagcagggacagaaccaactgtacaacgagctgaacctgggcagacgggaagagtacgacgtgctggacaagcggagaggcagggaccctgagatgggcggaaagccccagcggagaaagaacccccaggaaggactgtataacgaactccagaaagacaagatggccgaagcctacagcgagatcggcatgaagggcgagcggagaagaggcaagggccacgatggcctgtaccagggcctgagcaccgccaccaaggacacctatgacgccctgcacatgcaggccctgcctccaaga

SEQ ID NO: 26501 - DNA, 939 bp, synthetic construct
  source 1..939: mol_type = other DNA
gccgacgtgtcccccaagcctaccatcttcctgccctctatcgccgagacaaagctccagaaggccggcacctacctgtgcctgctggaaaagttcttcccagatgtgattaagatccactggcaggaaaagaagtccaacaccatcctgggcagccaggaaggcaacaccatgaagaccaacgacacctacatgaagttcagctggctgaccgtgcccgagaagtccctggacaaagaacacagatgcatcgtgcggcacgaaaacaacaagaacggcgtggaccaggaaatcatcttcccacccatcaagaccgatgtgattacagagagcagctgcgacgtgaagctggtggaaaagagcttcgagacagacaccaacctgaacttccagaacctgagcgtgatcggcttcagaatcctgctgctgaaagtggccggctttaacctgctgatgaccctgcggctgtggtccagcaggagtaagaggagcaggctcctgcacagtgactacatgaacatgactccacgccgccccggacccacccgcaagcattaccagccctatgccccaccacgcgacttcgcagcctatcgctccagagtgaagttcagcagaagcgccgacgcccctgcctaccagcagggacagaaccaactgtacaacgagctgaacctgggcagacgggaagagtacgacgtgctggacaagcggagaggcagggaccctgagatgggcggaaagccccagcggagaaagaacccccaggaaggactgtataacgaactccagaaagacaagatggccgaagcctacagcgagatcggcatgaagggcgagcggagaagaggcaagggccacgatggcctgtaccagggcctgagcaccgccaccaaggacacctatgacgccctgcacatgcaggccctgcctccaaga

SEQ ID NO: 26502 - DNA, 966 bp, synthetic construct
  source 1..966: mol_type = other DNA
gccgacgtgtcccccaagcctaccatcttcctgccctctatcgccgagacaaagctccagaaggccggcacctacctgtgcctgctggaaaagttcttcccagatgtgattaagatccactggcaggaaaagaagtccaacaccatcctgggcagccaggaaggcaacaccatgaagaccaacgacacctacatgaagttcagctggctgaccgtgcccgagaagtccctggacaaagaacacagatgcatcgtgcggcacgaaaacaacaagaacggcgtggaccaggaaatcatcttcccacccatcaagaccgatgtgattacacccgaggacacattcttcccaagccccgagagcagctgcgacgtgaagctggtggaaaagagcttcgagacagacaccaacctgaacttccagaacctgagcgtgatcggcttcagaatcctgctgctgaaagtggccggctttaacctgctgatgaccctgcggctgtggtccagcaggagtaagaggagcaggctcctgcacagtgactacatgaacatgactccacgccgccccggacccacccgcaagcattaccagccctatgccccaccacgcgacttcgcagcctatcgctccagagtgaagttcagcagaagcgccgacgcccctgcctaccagcagggacagaaccaactgtacaacgagctgaacctgggcagacgggaagagtacgacgtgctggacaagcggagaggcagggaccctgagatgggcggaaagccccagcggagaaagaacccccaggaaggactgtataacgaactccagaaagacaagatggccgaagcctacagcgagatcggcatgaagggcgagcggagaagaggcaagggccacgatggcctgtaccagggcctgagcaccgccaccaaggacacctatgacgccctgcacatgcaggccctgcctccaaga

SEQ ID NO: 26503 - DNA, 948 bp, synthetic construct
  source 1..948: mol_type = other DNA
gccgacgtgtcccccaagcctaccatcttcctgccctctatcgccgagacaaagctccagaaggccggcacctacctgtgcctgctggaaaagttcttcccagatgtgattaagatccactggcaggaaaagaagtccaacaccatcctgggcagccaggaaggcaacaccatgaagaccaacgacacctacatgaagttcagctggctgaccgtgcccgagaagtccctggacaaagaacacagatgcatcgtgcggcacgaaaacaacaagaacggcgtggaccaggaaatcatcttcccacccatcaagaccgatgtgattacaggcagagccgattgcggctttaccagcgagagctaccagcagggcgtgctgagcgccaccatcctgtacgagatcctgctgggcaaggccaccctgtacgccgtgctggtgtctgccctggtgctgatggctatggtcaagcggaaggacagccggggaaggagtaagaggagcaggctcctgcacagtgactacatgaacatgactccacgccgccccggacccacccgcaagcattaccagccctatgccccaccacgcgacttcgcagcctatcgctccagagtgaagttcagcagaagcgccgacgcccctgcctaccagcagggacagaaccaactgtacaacgagctgaacctgggcagacgggaagagtacgacgtgctggacaagcggagaggcagggaccctgagatgggcggaaagccccagcggagaaagaacccccaggaaggactgtataacgaactccagaaagacaagatggccgaagcctacagcgagatcggcatgaagggcgagcggagaagaggcaagggccacgatggcctgtaccagggcctgagcaccgccaccaaggacacctatgacgccctgcacatgcaggccctgcctccaaga

SEQ ID NO: 26504 - DNA, 942 bp, synthetic construct
  source 1..942: mol_type = other DNA
gccgacgtgtcccccaagcctaccatcttcctgccctctatcgccgagacaaagctccagaaggccggcacctacctgtgcctgctggaaaagttcttcccagatgtgattaagatccactggcaggaaaagaagtccaacaccatcctgggcagccaggaaggcaacaccatgaagaccaacgacacctacatgaagttcagctggctgaccgtgcccgagaagtccctggacaaagaacacagatgcatcgtgcggcacgaaaacaacaagaacggcgtggaccaggaaatcatcttcccacccatcaagaccgatgtgattacagccgattgcggctttaccagcgagagctaccagcagggcgtgctgagcgccaccatcctgtacgagatcctgctgggcaaggccaccctgtacgccgtgctggtgtctgccctggtgctgatggctatggtcaagcggaaggacagccggggaaggagtaagaggagcaggctcctgcacagtgactacatgaacatgactccacgccgccccggacccacccgcaagcattaccagccctatgccccaccacgcgacttcgcagcctatcgctccagagtgaagttcagcagaagcgccgacgcccctgcctaccagcagggacagaaccaactgtacaacgagctgaacctgggcagacgggaagagtacgacgtgctggacaagcggagaggcagggaccctgagatgggcggaaagccccagcggagaaagaacccccaggaaggactgtataacgaactccagaaagacaagatggccgaagcctacagcgagatcggcatgaagggcgagcggagaagaggcaagggccacgatggcctgtaccagggcctgagcaccgccaccaaggacacctatgacgccctgcacatgcaggccctgcctccaaga

SEQ ID NO: 26505 - DNA, 972 bp, synthetic construct
  source 1..972: mol_type = other DNA
gccgacgtgtcccccaagcctaccatcttcctgccctctatcgccgagacaaagctccagaaggccggcacctacctgtgcctgctggaaaagttcttcccagatgtgattaagatccactggcaggaaaagaagtccaacaccatcctgggcagccaggaaggcaacaccatgaagaccaacgacacctacatgaagttcagctggctgaccgtgcccgagaagtccctggacaaagaacacagatgcatcgtgcggcacgaaaacaacaagaacggcgtggaccaggaaatcatcttcccacccatcaagaccgatgtgattacacagatcgtgtctgccgaagcctggggcagagccgattgcggctttaccagcgagagctaccagcagggcgtgctgagcgccaccatcctgtacgagatcctgctgggcaaggccaccctgtacgccgtgctggtgtctgccctggtgctgatggctatggtcaagcggaaggacagccggggaaggagtaagaggagcaggctcctgcacagtgactacatgaacatgactccacgccgccccggacccacccgcaagcattaccagccctatgccccaccacgcgacttcgcagcctatcgctccagagtgaagttcagcagaagcgccgacgcccctgcctaccagcagggacagaaccaactgtacaacgagctgaacctgggcagacgggaagagtacgacgtgctggacaagcggagaggcagggaccctgagatgggcggaaagccccagcggagaaagaacccccaggaaggactgtataacgaactccagaaagacaagatggccgaagcctacagcgagatcggcatgaagggcgagcggagaagaggcaagggccacgatggcctgtaccagggcctgagcaccgccaccaaggacacctatgacgccctgcacatgcaggccctgcctccaaga

SEQ ID NO: 26506 - DNA, 993 bp, synthetic construct
  source 1..993: mol_type = other DNA
gccgacgtgtcccccaagcctaccatcttcctgccctctatcgccgagacaaagctccagaaggccggcacctacctgtgcctgctggaaaagttcttcccagatgtgattaagatccactggcaggaaaagaagtccaacaccatcctgggcagccaggaaggcaacaccatgaagaccaacgacacctacatgaagttcagctggctgaccgtgcccgagaagtccctggacaaagaacacagatgcatcgtgcggcacgaaaacaacaagaacggcgtggaccaggaaatcatcttcccacccatcaagaccgatgtgattacagaagtgaaaaccgactccaccgaccacgtgaagcccaaagagacagagaacaccaagcagcccagcaagagctgccacaagcccaaggccatcgtgcacaccgagaaagtgaacatgatgagcctgaccgtgctgggcctgcggatgctgttcgccaaaaccgtggccgtgaacttcctgctgaccgccaagctgttcttcctcaggagtaagaggagcaggctcctgcacagtgactacatgaacatgactccacgccgccccggacccacccgcaagcattaccagccctatgccccaccacgcgacttcgcagcctatcgctccagagtgaagttcagcagaagcgccgacgcccctgcctaccagcagggacagaaccaactgtacaacgagctgaacctgggcagacgggaagagtacgacgtgctggacaagcggagaggcagggaccctgagatgggcggaaagccccagcggagaaagaacccccaggaaggactgtataacgaactccagaaagacaagatggccgaagcctacagcgagatcggcatgaagggcgagcggagaagaggcaagggccacgatggcctgtaccagggcctgagcaccgccaccaaggacacctatgacgccctgcacatgcaggccctgcctccaaga

SEQ ID NO: 26507 - DNA, 972 bp, synthetic construct
  source 1..972: mol_type = other DNA
gccgacgtgtcccccaagcctaccatcttcctgccctctatcgccgagacaaagctccagaaggccggcacctacctgtgcctgctggaaaagttcttcccagatgtgattaagatccactggcaggaaaagaagtccaacaccatcctgggcagccaggaaggcaacaccatgaagaccaacgacacctacatgaagttcagctggctgaccgtgcccgagaagtccctggacaaagaacacagatgcatcgtgcggcacgaaaacaacaagaacggcgtggaccaggaaatcatcttcccacccatcaagaccgatgtgattacagaccacgtgaagcccaaagagacagagaacaccaagcagcccagcaagagctgccacaagcccaaggccatcgtgcacaccgagaaagtgaacatgatgagcctgaccgtgctgggcctgcggatgctgttcgccaaaaccgtggccgtgaacttcctgctgaccgccaagctgttcttcctcaggagtaagaggagcaggctcctgcacagtgactacatgaacatgactccacgccgccccggacccacccgcaagcattaccagccctatgccccaccacgcgacttcgcagcctatcgctccagagtgaagttcagcagaagcgccgacgcccctgcctaccagcagggacagaaccaactgtacaacgagctgaacctgggcagacgggaagagtacgacgtgctggacaagcggagaggcagggaccctgagatgggcggaaagccccagcggagaaagaacccccaggaaggactgtataacgaactccagaaagacaagatggccgaagcctacagcgagatcggcatgaagggcgagcggagaagaggcaagggccacgatggcctgtaccagggcctgagcaccgccaccaaggacacctatgacgccctgcacatgcaggccctgcctccaaga

SEQ ID NO: 26508 - DNA, 984 bp, synthetic construct
  source 1..984: mol_type = other DNA
gccgacgtgtcccccaagcctaccatcttcctgccctctatcgccgagacaaagctccagaaggccggcacctacctgtgcctgctggaaaagttcttcccagatgtgattaagatccactggcaggaaaagaagtccaacaccatcctgggcagccaggaaggcaacaccatgaagaccaacgacacctacatgaagttcagctggctgaccgtgcccgagaagtccctggacaaagaacacagatgcatcgtgcggcacgaaaacaacaagaacggcgtggaccaggaaatcatcttcccacccatcaagaccgatgtgattacaatggaccccaaggacatccccgaggacacattcttcccaagccccgagagcagctgcgacgtgaagctggtggaaaagagcttcgagacagacaccaacctgaacttccagaacctgagcgtgatcggcttcagaatcctgctgctgaaagtggccggctttaacctgctgatgaccctgcggctgtggtccagcaggagtaagaggagcaggctcctgcacagtgactacatgaacatgactccacgccgccccggacccacccgcaagcattaccagccctatgccccaccacgcgacttcgcagcctatcgctccagagtgaagttcagcagaagcgccgacgcccctgcctaccagcagggacagaaccaactgtacaacgagctgaacctgggcagacgggaagagtacgacgtgctggacaagcggagaggcagggaccctgagatgggcggaaagccccagcggagaaagaacccccaggaaggactgtataacgaactccagaaagacaagatggccgaagcctacagcgagatcggcatgaagggcgagcggagaagaggcaagggccacgatggcctgtaccagggcctgagcaccgccaccaaggacacctatgacgccctgcacatgcaggccctgcctccaaga

SEQ ID NO: 26509 - DNA, 954 bp, synthetic construct
  source 1..954: mol_type = other DNA
gccgacgtgtcccccaagcctaccatcttcctgccctctatcgccgagacaaagctccagaaggccggcacctacctgtgcctgctggaaaagttcttcccagatgtgattaagatccactggcaggaaaagaagtccaacaccatcctgggcagccaggaaggcaacaccatgaagaccaacgacacctacatgaagttcagctggctgaccgtgcccgagaagtccctggacaaagaacacagatgcatcgtgcggcacgaaaacaacaagaacggcgtggaccaggaaatcatcttcccacccatcaagaccgatgtgattacaatggaccccaaggacgagagcagctgcgacgtgaagctggtggaaaagagcttcgagacagacaccaacctgaacttccagaacctgagcgtgatcggcttcagaatcctgctgctgaaagtggccggctttaacctgctgatgaccctgcggctgtggtccagcaggagtaagaggagcaggctcctgcacagtgactacatgaacatgactccacgccgccccggacccacccgcaagcattaccagccctatgccccaccacgcgacttcgcagcctatcgctccagagtgaagttcagcagaagcgccgacgcccctgcctaccagcagggacagaaccaactgtacaacgagctgaacctgggcagacgggaagagtacgacgtgctggacaagcggagaggcagggaccctgagatgggcggaaagccccagcggagaaagaacccccaggaaggactgtataacgaactccagaaagacaagatggccgaagcctacagcgagatcggcatgaagggcgagcggagaagaggcaagggccacgatggcctgtaccagggcctgagcaccgccaccaaggacacctatgacgccctgcacatgcaggccctgcctccaaga

SEQ ID NO: 26510 - DNA, 981 bp, synthetic construct
  source 1..981: mol_type = other DNA
gccgacgtgtcccccaagcctaccatcttcctgccctctatcgccgagacaaagctccagaaggccggcacctacctgtgcctgctggaaaagttcttcccagatgtgattaagatccactggcaggaaaagaagtccaacaccatcctgggcagccaggaaggcaacaccatgaagaccaacgacacctacatgaagttcagctggctgaccgtgcccgagaagtccctggacaaagaacacagatgcatcgtgcggcacgaaaacaacaagaacggcgtggaccaggaaatcatcttcccacccatcaagaccgatgtgattacaatggaccccaaggaccccgaggacacattcttcccaagccccgagagcagctgcgacgtgaagctggtggaaaagagcttcgagacagacaccaacctgaacttccagaacctgagcgtgatcggcttcagaatcctgctgctgaaagtggccggctttaacctgctgatgaccctgcggctgtggtccagcaggagtaagaggagcaggctcctgcacagtgactacatgaacatgactccacgccgccccggacccacccgcaagcattaccagccctatgccccaccacgcgacttcgcagcctatcgctccagagtgaagttcagcagaagcgccgacgcccctgcctaccagcagggacagaaccaactgtacaacgagctgaacctgggcagacgggaagagtacgacgtgctggacaagcggagaggcagggaccctgagatgggcggaaagccccagcggagaaagaacccccaggaaggactgtataacgaactccagaaagacaagatggccgaagcctacagcgagatcggcatgaagggcgagcggagaagaggcaagggccacgatggcctgtaccagggcctgagcaccgccaccaaggacacctatgacgccctgcacatgcaggccctgcctccaaga

SEQ ID NO: 26511 - DNA, 963 bp, synthetic construct
  source 1..963: mol_type = other DNA
gccgacgtgtcccccaagcctaccatcttcctgccctctatcgccgagacaaagctccagaaggccggcacctacctgtgcctgctggaaaagttcttcccagatgtgattaagatccactggcaggaaaagaagtccaacaccatcctgggcagccaggaaggcaacaccatgaagaccaacgacacctacatgaagttcagctggctgaccgtgcccgagaagtccctggacaaagaacacagatgcatcgtgcggcacgaaaacaacaagaacggcgtggaccaggaaatcatcttcccacccatcaagaccgatgtgattacaatggaccccaaggacggcagagccgattgcggctttaccagcgagagctaccagcagggcgtgctgagcgccaccatcctgtacgagatcctgctgggcaaggccaccctgtacgccgtgctggtgtctgccctggtgctgatggctatggtcaagcggaaggacagccggggaaggagtaagaggagcaggctcctgcacagtgactacatgaacatgactccacgccgccccggacccacccgcaagcattaccagccctatgccccaccacgcgacttcgcagcctatcgctccagagtgaagttcagcagaagcgccgacgcccctgcctaccagcagggacagaaccaactgtacaacgagctgaacctgggcagacgggaagagtacgacgtgctggacaagcggagaggcagggaccctgagatgggcggaaagccccagcggagaaagaacccccaggaaggactgtataacgaactccagaaagacaagatggccgaagcctacagcgagatcggcatgaagggcgagcggagaagaggcaagggccacgatggcctgtaccagggcctgagcaccgccaccaaggacacctatgacgccctgcacatgcaggccctgcctccaaga

SEQ ID NO: 26512 - DNA, 957 bp, synthetic construct
  source 1..957: mol_type = other DNA
gccgacgtgtcccccaagcctaccatcttcctgccctctatcgccgagacaaagctccagaaggccggcacctacctgtgcctgctggaaaagttcttcccagatgtgattaagatccactggcaggaaaagaagtccaacaccatcctgggcagccaggaaggcaacaccatgaagaccaacgacacctacatgaagttcagctggctgaccgtgcccgagaagtccctggacaaagaacacagatgcatcgtgcggcacgaaaacaacaagaacggcgtggaccaggaaatcatcttcccacccatcaagaccgatgtgattacaatggaccccaaggacgccgattgcggctttaccagcgagagctaccagcagggcgtgctgagcgccaccatcctgtacgagatcctgctgggcaaggccaccctgtacgccgtgctggtgtctgccctggtgctgatggctatggtcaagcggaaggacagccggggaaggagtaagaggagcaggctcctgcacagtgactacatgaacatgactccacgccgccccggacccacccgcaagcattaccagccctatgccccaccacgcgacttcgcagcctatcgctccagagtgaagttcagcagaagcgccgacgcccctgcctaccagcagggacagaaccaactgtacaacgagctgaacctgggcagacgggaagagtacgacgtgctggacaagcggagaggcagggaccctgagatgggcggaaagccccagcggagaaagaacccccaggaaggactgtataacgaactccagaaagacaagatggccgaagcctacagcgagatcggcatgaagggcgagcggagaagaggcaagggccacgatggcctgtaccagggcctgagcaccgccaccaaggacacctatgacgccctgcacatgcaggccctgcctccaaga

SEQ ID NO: 26513 - DNA, 987 bp, synthetic construct
  source 1..987: mol_type = other DNA
gccgacgtgtcccccaagcctaccatcttcctgccctctatcgccgagacaaagctccagaaggccggcacctacctgtgcctgctggaaaagttcttcccagatgtgattaagatccactggcaggaaaagaagtccaacaccatcctgggcagccaggaaggcaacaccatgaagaccaacgacacctacatgaagttcagctggctgaccgtgcccgagaagtccctggacaaagaacacagatgcatcgtgcggcacgaaaacaacaagaacggcgtggaccaggaaatcatcttcccacccatcaagaccgatgtgattacaatggaccccaaggaccagatcgtgtctgccgaagcctggggcagagccgattgcggctttaccagcgagagctaccagcagggcgtgctgagcgccaccatcctgtacgagatcctgctgggcaaggccaccctgtacgccgtgctggtgtctgccctggtgctgatggctatggtcaagcggaaggacagccggggaaggagtaagaggagcaggctcctgcacagtgactacatgaacatgactccacgccgccccggacccacccgcaagcattaccagccctatgccccaccacgcgacttcgcagcctatcgctccagagtgaagttcagcagaagcgccgacgcccctgcctaccagcagggacagaaccaactgtacaacgagctgaacctgggcagacgggaagagtacgacgtgctggacaagcggagaggcagggaccctgagatgggcggaaagccccagcggagaaagaacccccaggaaggactgtataacgaactccagaaagacaagatggccgaagcctacagcgagatcggcatgaagggcgagcggagaagaggcaagggccacgatggcctgtaccagggcctgagcaccgccaccaaggacacctatgacgccctgcacatgcaggccctgcctccaaga

SEQ ID NO: 26514 - DNA, 1008 bp, synthetic construct
  source 1..1008: mol_type = other DNA
gccgacgtgtcccccaagcctaccatcttcctgccctctatcgccgagacaaagctccagaaggccggcacctacctgtgcctgctggaaaagttcttcccagatgtgattaagatccactggcaggaaaagaagtccaacaccatcctgggcagccaggaaggcaacaccatgaagaccaacgacacctacatgaagttcagctggctgaccgtgcccgagaagtccctggacaaagaacacagatgcatcgtgcggcacgaaaacaacaagaacggcgtggaccaggaaatcatcttcccacccatcaagaccgatgtgattacaatggaccccaaggacgaagtgaaaaccgactccaccgaccacgtgaagcccaaagagacagagaacaccaagcagcccagcaagagctgccacaagcccaaggccatcgtgcacaccgagaaagtgaacatgatgagcctgaccgtgctgggcctgcggatgctgttcgccaaaaccgtggccgtgaacttcctgctgaccgccaagctgttcttcctcaggagtaagaggagcaggctcctgcacagtgactacatgaacatgactccacgccgccccggacccacccgcaagcattaccagccctatgccccaccacgcgacttcgcagcctatcgctccagagtgaagttcagcagaagcgccgacgcccctgcctaccagcagggacagaaccaactgtacaacgagctgaacctgggcagacgggaagagtacgacgtgctggacaagcggagaggcagggaccctgagatgggcggaaagccccagcggagaaagaacccccaggaaggactgtataacgaactccagaaagacaagatggccgaagcctacagcgagatcggcatgaagggcgagcggagaagaggcaagggccacgatggcctgtaccagggcctgagcaccgccaccaaggacacctatgacgccctgcacatgcaggccctgcctccaaga

SEQ ID NO: 26515 - DNA, 987 bp, synthetic construct
  source 1..987: mol_type = other DNA
gccgacgtgtcccccaagcctaccatcttcctgccctctatcgccgagacaaagctccagaaggccggcacctacctgtgcctgctggaaaagttcttcccagatgtgattaagatccactggcaggaaaagaagtccaacaccatcctgggcagccaggaaggcaacaccatgaagaccaacgacacctacatgaagttcagctggctgaccgtgcccgagaagtccctggacaaagaacacagatgcatcgtgcggcacgaaaacaacaagaacggcgtggaccaggaaatcatcttcccacccatcaagaccgatgtgattacaatggaccccaaggacgaccacgtgaagcccaaagagacagagaacaccaagcagcccagcaagagctgccacaagcccaaggccatcgtgcacaccgagaaagtgaacatgatgagcctgaccgtgctgggcctgcggatgctgttcgccaaaaccgtggccgtgaacttcctgctgaccgccaagctgttcttcctcaggagtaagaggagcaggctcctgcacagtgactacatgaacatgactccacgccgccccggacccacccgcaagcattaccagccctatgccccaccacgcgacttcgcagcctatcgctccagagtgaagttcagcagaagcgccgacgcccctgcctaccagcagggacagaaccaactgtacaacgagctgaacctgggcagacgggaagagtacgacgtgctggacaagcggagaggcagggaccctgagatgggcggaaagccccagcggagaaagaacccccaggaaggactgtataacgaactccagaaagacaagatggccgaagcctacagcgagatcggcatgaagggcgagcggagaagaggcaagggccacgatggcctgtaccagggcctgagcaccgccaccaaggacacctatgacgccctgcacatgcaggccctgcctccaaga

SEQ ID NO: 26516 - DNA, 969 bp, synthetic construct; identical to SEQ ID NO: 26500
  source 1..969: mol_type = other DNA

SEQ ID NO: 26517 - DNA, 939 bp, synthetic construct; identical to SEQ ID NO: 26501
  source 1..939: mol_type = other DNA

SEQ ID NO: 26518 - DNA, 966 bp, synthetic construct; identical to SEQ ID NO: 26502
  source 1..966: mol_type = other DNA

SEQ ID NO: 26519 - DNA, 948 bp, synthetic construct; identical to SEQ ID NO: 26503
  source 1..948: mol_type = other DNA

SEQ ID NO: 26520 - DNA, 942 bp, synthetic construct; identical to SEQ ID NO: 26504
  source 1..942: mol_type = other DNA

SEQ ID NO: 26521 - DNA, 972 bp, synthetic construct; identical to SEQ ID NO: 26505
  source 1..972: mol_type = other DNA

SEQ ID NO: 26522 - DNA, 993 bp, synthetic construct; identical to SEQ ID NO: 26506
  source 1..993: mol_type = other DNA

SEQ ID NO: 26523 - DNA, 972 bp, synthetic construct; identical to SEQ ID NO: 26507
  source 1..972: mol_type = other DNA

SEQ ID NO: 26524 - DNA, 891 bp, synthetic construct
  source 1..891: mol_type = other DNA
cctcacaccaagcccagcgtgttcgtgatgaagaacggcaccaacgtggcctgcctcgtgaaagagttctaccccaaggacatcaggatcaacctggtgtccagcaagaagatcaccgagttcgaccccgccatcgtgatctcccccagcggcaagtacaacgccgtgaagctggggaagtacgaggacagcaacagcgtgacctgctccgtgcagcacgacaacaagaccgtgcacagcaccgactttatccccgaggacacattcttcccaagccccgagagcagctgcgacgtgaagctggtggaaaagagcttcgagacagacaccaacctgaacttccagaacctgagcgtgatcggcttcagaatcctgctgctgaaagtggccggctttaacctgctgatgaccctgcggctgtggtccagcaggagtaagaggagcaggctcctgcacagtgactacatgaacatgactccacgccgccccggacccacccgcaagcattaccagccctatgccccaccacgcgacttcgcagcctatcgctccagagtgaagttcagcagaagcgccgacgcccctgcctaccagcagggacagaaccaactgtacaacgagctgaacctgggcagacgggaagagtacgacgtgctggacaagcggagaggcagggaccctgagatgggcggaaagccccagcggagaaagaacccccaggaaggactgtataacgaactccagaaagacaagatggccgaagcctacagcgagatcggcatgaagggcgagcggagaagaggcaagggccacgatggcctgtaccagggcctgagcaccgccaccaaggacacctatgacgccctgcacatgcaggccctgcctccaaga

SEQ ID NO: 26525 - DNA, 861 bp, synthetic construct
  source 1..861: mol_type = other DNA
cctcacaccaagcccagcgtgttcgtgatgaagaacggcaccaacgtggcctgcctcgtgaaagagttctaccccaaggacatcaggatcaacctggtgtccagcaagaagatcaccgagttcgaccccgccatcgtgatctcccccagcggcaagtacaacgccgtgaagctggggaagtacgaggacagcaacagcgtgacctgctccgtgcagcacgacaacaagaccgtgcacagcaccgactttgagagcagctgcgacgtgaagctggtggaaaagagcttcgagacagacaccaacctgaacttccagaacctgagcgtgatcggcttcagaatcctgctgctgaaagtggccggctttaacctgctgatgaccctgcggctgtggtccagcaggagtaagaggagcaggctcctgcacagtgactacatgaacatgactccacgccgccccggacccacccgcaagcattaccagccctatgccccaccacgcgacttcgcagcctatcgctccagagtgaagttcagcagaagcgccgacgcccctgcctaccagcagggacagaaccaactgtacaacgagctgaacctgggcagacgggaagagtacgacgtgctggacaagcggagaggcagggaccctgagatgggcggaaagccccagcggagaaagaacccccaggaaggactgtataacgaactccagaaagacaagatggccgaagcctacagcgagatcggcatgaagggcgagcggagaagaggcaagggccacgatggcctgtaccagggcctgagcaccgccaccaaggacacctatgacgccctgcacatgcaggccctgcctccaaga

SEQ ID NO: 26526 - DNA, 888 bp, synthetic construct
  source 1..888: mol_type = other DNA
cctcacaccaagcccagcgtgttcgtgatgaagaacggcaccaacgtggcctgcctcgtgaaagagttctaccccaaggacatcaggatcaacctggtgtccagcaagaagatcaccgagttcgaccccgccatcgtgatctcccccagcggcaagtacaacgccgtgaagctggggaagtacgaggacagcaacagcgtgacctgctccgtgcagcacgacaacaagaccgtgcacagcaccgactttcccgaggacacattcttcccaagccccgagagcagctgcgacgtgaagctggtggaaaagagcttcgagacagacaccaacctgaacttccagaacctgagcgtgatcggcttcagaatcctgctgctgaaagtggccggctttaacctgctgatgaccctgcggctgtggtccagcaggagtaagaggagcaggctcctgcacagtgactacatgaacatgactccacgccgccccggacccacccgcaagcattaccagccctatgccccaccacgcgacttcgcagcctatcgctccagagtgaagttcagcagaagcgccgacgcccctgcctaccagcagggacagaaccaactgtacaacgagctgaacctgggcagacgggaagagtacgacgtgctggacaagcggagaggcagggaccctgagatgggcggaaagccccagcggagaaagaacccccaggaaggactgtataacgaactccagaaagacaagatggccgaagcctacagcgagatcggcatgaagggcgagcggagaagaggcaagggccacgatggcctgtaccagggcctgagcaccgccaccaaggacacctatgacgccctgcacatgcaggccctgcctccaaga

SEQ ID NO: 26527 - DNA, 870 bp, synthetic construct
  source 1..870: mol_type = other DNA
cctcacaccaagcccagcgtgttcgtgatgaagaacggcaccaacgtggcctgcctcgtgaaagagttctaccccaaggacatcaggatcaacctggtgtccagcaagaagatcaccgagttcgaccccgccatcgtgatctcccccagcggcaagtacaacgccgtgaagctggggaagtacgaggacagcaacagcgtgacctgctccgtgcagcacgacaacaagaccgtgcacagcaccgactttggcagagccgattgcggctttaccagcgagagctaccagcagggcgtgctgagcgccaccatcctgtacgagatcctgctgggcaaggccaccctgtacgccgtgctggtgtctgccctggtgctgatggctatggtcaagcggaaggacagccggggaaggagtaagaggagcaggctcctgcacagtgactacatgaacatgactccacgccgccccggacccacccgcaagcattaccagccctatgccccaccacgcgacttcgcagcctatcgctccagagtgaagttcagcagaagcgccgacgcccctgcctaccagcagggacagaaccaactgtacaacgagctgaacctgggcagacgggaagagtacgacgtgctggacaagcggagaggcagggaccctgagatgggcggaaagccccagcggagaaagaacccccaggaaggactgtataacgaactccagaaagacaagatggccgaagcctacagcgagatcggcatgaagggcgagcggagaagaggcaagggccacgatggcctgtaccagggcctgagcaccgccaccaaggacacctatgacgccctgcacatgcaggccctgcctccaaga

SEQ ID NO: 26528 - DNA, 864 bp, synthetic construct
  source 1..864: mol_type = other DNA
cctcacaccaagcccagcgtgttcgtgatgaagaacggcaccaacgtggcctgcctcgtgaaagagttctaccccaaggacatcaggatcaacctggtgtccagcaagaagatcaccgagttcgaccccgccatcgtgatctcccccagcggcaagtacaacgccgtgaagctggggaagtacgaggacagcaacagcgtgacctgctccgtgcagcacgacaacaagaccgtgcacagcaccgactttgccgattgcggctttaccagcgagagctaccagcagggcgtgctgagcgccaccatcctgtacgagatcctgctgggcaaggccaccctgtacgccgtgctggtgtctgccctggtgctgatggctatggtcaagcggaaggacagccggggaaggagtaagaggagcaggctcctgcacagtgactacatgaacatgactccacgccgccccggacccacccgcaagcattaccagccctatgccccaccacgcgacttcgcagcctatcgctccagagtgaagttcagcagaagcgccgacgcccctgcctaccagcagggacagaaccaactgtacaacgagctgaacctgggcagacgggaagagtacgacgtgctggacaagcggagaggcagggaccctgagatgggcggaaagccccagcggagaaagaacccccaggaaggactgtataacgaactccagaaagacaagatggccgaagcctacagcgagatcggcatgaagggcgagcggagaagaggcaagggccacgatggcctgtaccagggcctgagcaccgccaccaaggacacctatgacgccctgcacatgcaggccctgcctccaaga

SEQ ID NO: 26529 - DNA, 894 bp, synthetic construct
  source 1..894: mol_type = other DNA
cctcacaccaagcccagcgtgttcgtgatgaagaacggcaccaacgtggcctgcctcgtgaaagagttctaccccaaggacatcaggatcaacctggtgtccagcaagaagatcaccgagttcgaccccgccatcgtgatctcccccagcggcaagtacaacgccgtgaagctggggaagtacgaggacagcaacagcgtgacctgctccgtgcagcacgacaacaagaccgtgcacagcaccgactttcagatcgtgtctgccgaagcctggggcagagccgattgcggctttaccagcgagagctaccagcagggcgtgctgagcgccaccatcctgtacgagatcctgctgggcaaggccaccctgtacgccgtgctggtgtctgccctggtgctgatggctatggtcaagcggaaggacagccggggaaggagtaagaggagcaggctcctgcacagtgactacatgaacatgactccacgccgccccggacccacccgcaagcattaccagccctatgccccaccacgcgacttcgcagcctatcgctccagagtgaagttcagcagaagcgccgacgcccctgcctaccagcagggacagaaccaactgtacaacgagctgaacctgggcagacgggaagagtacgacgtgctggacaagcggagaggcagggaccctgagatgggcggaaagccccagcggagaaagaacccccaggaaggactgtataacgaactccagaaagacaagatggccgaagcctacagcgagatcggcatgaagggcgagcggagaagaggcaagggccacgatggcctgtaccagggcctgagcaccgccaccaaggacacctatgacgccctgcacatgcaggccctgcctccaaga

SEQ ID NO: 26530 - DNA, 918 bp, synthetic construct
  source 1..918: mol_type = other DNA
cctcacaccaagcccagcgtgttcgtgatgaagaacggcaccaacgtggcctgcctcgtgaaagagttctaccccaaggacatcaggatcaacctggtgtccagcaagaagatcaccgagttcgaccccgccatcgtgatctcccccagcggcaagtacaacgccgtgaagctggggaagtacgaggacagcaacagcgtgacctgctccgtgcagcacgacaacaagaccgtgcacagcaccgactttttcccacccatcaagaccgatgtgattacaatggaccccaaggacaactgctccaaggacgccaacgataccctgctgctccagctgaccaacaccagcgcctactacatgtacttgttgctgctgctgaagtccgtggtgtacttcgccatcatcacatgctgcctgctgcggagaaccgccttctgctgcaacggcgagaagtctaggagtaagaggagcaggctcctgcacagtgactacatgaacatgactccacgccgccccggacccacccgcaagcattaccagccctatgccccaccacgcgacttcgcagcctatcgctccagagtgaagttcagcagaagcgccgacgcccctgcctaccagcagggacagaaccaactgtacaacgagctgaacctgggcagacgggaagagtacgacgtgctggacaagcggagaggcagggaccctgagatgggcggaaagccccagcggagaaagaacccccaggaaggactgtataacgaactccagaaagacaagatggccgaagcctacagcgagatcggcatgaagggcgagcggagaagaggcaagggccacgatggcctgtaccagggcctgagcaccgccaccaaggacacctatgacgccctgcacatgcaggccctgcctccaaga

SEQ ID NO: 26531 - DNA, 912 bp, synthetic construct
  source 1..912: mol_type = other DNA
cctcacaccaagcccagcgtgttcgtgatgaagaacggcaccaacgtggcctgcctcgtgaaagagttctaccccaaggacatcaggatcaacctggtgtccagcaagaagatcaccgagttcgaccccgccatcgtgatctcccccagcggcaagtacaacgccgtgaagctggggaagtacgaggacagcaacagcgtgacctgctccgtgcagcacgacaacaagaccgtgcacagcaccgactttcccatcaagaccgatgtgattacaatggaccccaaggacaactgctccaaggacgccaacgataccctgctgctccagctgaccaacaccagcgcctactacatgtacttgttgctgctgctgaagtccgtggtgtacttcgccatcatcacatgctgcctgctgcggagaaccgccttctgctgcaacggcgagaagtctaggagtaagaggagcaggctcctgcacagtgactacatgaacatgactccacgccgccccggacccacccgcaagcattaccagccctatgccccaccacgcgacttcgcagcctatcgctccagagtgaagttcagcagaagcgccgacgcccctgcctaccagcagggacagaaccaactgtacaacgagctgaacctgggcagacgggaagagtacgacgtgctggacaagcggagaggcagggaccctgagatgggcggaaagccccagcggagaaagaacccccaggaaggactgtataacgaactccagaaagacaagatggccgaagcctacagcgagatcggcatgaagggcgagcggagaagaggcaagggccacgatggcctgtaccagggcctgagcaccgccaccaaggacacctatgacgccctgcacatgcaggccctgcctccaaga

SEQ ID NO: 26532 - DNA, 888 bp, synthetic construct
  source 1..888: mol_type = other DNA
cctcacaccaagcccagcgtgttcgtgatgaagaacggcaccaacgtggcctgcctcgtgaaagagttctaccccaaggacatcaggatcaacctggtgtccagcaagaagatcaccgagttcgaccccgccatcgtgatctcccccagcggcaagtacaacgccgtgaagctggggaagtacgaggacagcaacagcgtgacctgctccgtgcagcacgacaacaagaccgtgcacagcaccgactttatggaccccaaggacaactgctccaaggacgccaacgataccctgctgctccagctgaccaacaccagcgcctactacatgtacttgttgctgctgctgaagtccgtggtgtacttcgccatcatcacatgctgcctgctgcggagaaccgccttctgctgcaacggcgagaagtctaggagtaagaggagcaggctcctgcacagtgactacatgaacatgactccacgccgccccggacccacccgcaagcattaccagccctatgccccaccacgcgacttcgcagcctatcgctccagagtgaagttcagcagaagcgccgacgcccctgcctaccagcagggacagaaccaactgtacaacgagctgaacctgggcagacgggaagagtacgacgtgctggacaagcggagaggcagggaccctgagatgggcggaaagccccagcggagaaagaacccccaggaaggactgtataacgaactccagaaagacaagatggccgaagcctacagcgagatcggcatgaagggcgagcggagaagaggcaagggccacgatggcctgtaccagggcctgagcaccgccaccaaggacacctatgacgccctgcacatgcaggccctgcctccaaga

SEQ ID NO: 26533 - DNA, 915 bp, synthetic construct; identical to SEQ ID NO: 25853
  source 1..915: mol_type = other DNA

SEQ ID NO: 26534 - DNA, 894 bp, synthetic construct
  source 1..894: mol_type = other DNA
cctcacaccaagcccagcgtgttcgtgatgaagaacggcaccaacgtggcctgcctcgtgaaagagttctaccccaaggacatcaggatcaacctggtgtccagcaagaagatcaccgagttcgaccccgccatcgtgatctcccccagcggcaagtacaacgccgtgaagctggggaagtacgaggacagcaacagcgtgacctgctccgtgcagcacgacaacaagaccgtgcacagcaccgactttgaccacgtgaagcccaaagagacagagaacaccaagcagcccagcaagagctgccacaagcccaaggccatcgtgcacaccgagaaagtgaacatgatgagcctgaccgtgctgggcctgcggatgctgttcgccaaaaccgtggccgtgaacttcctgctgaccgccaagctgttcttcctcaggagtaagaggagcaggctcctgcacagtgactacatgaacatgactccacgccgccccggacccacccgcaagcattaccagccctatgccccaccacgcgacttcgcagcctatcgctccagagtgaagttcagcagaagcgccgacgcccctgcctaccagcagggacagaaccaactgtacaacgagctgaacctgggcagacgggaagagtacgacgtgctggacaagcggagaggcagggaccctgagatgggcggaaagccccagcggagaaagaacccccaggaaggactgtataacgaactccagaaagacaagatggccgaagcctacagcgagatcggcatgaagggcgagcggagaagaggcaagggccacgatggcctgtaccagggcctgagcaccgccaccaaggacacctatgacgccctgcacatgcaggccctgcctccaaga

SEQ ID NO: 26535 - DNA, 912 bp, synthetic construct
  source 1..912: mol_type = other DNA
cctcacaccaagcccagcgtgttcgtgatgaagaacggcaccaacgtggcctgcctcgtgaaagagttctaccccaaggacatcaggatcaacctggtgtccagcaagaagatcaccgagttcgaccccgccatcgtgatctcccccagcggcaagtacaacgccgtgaagctggggaagtacgaggacagcaacagcgtgacctgctccgtgcagcacgacaacaagaccgtgcacagcaccgactttgaagtgaaaaccgactccaccatccccgaggacacattcttcccaagccccgagagcagctgcgacgtgaagctggtggaaaagagcttcgagacagacaccaacctgaacttccagaacctgagcgtgatcggcttcagaatcctgctgctgaaagtggccggctttaacctgctgatgaccctgcggctgtggtccagcaggagtaagaggagcaggctcctgcacagtgactacatgaacatgactccacgccgccccggacccacccgcaagcattaccagccctatgccccaccacgcgacttcgcagcctatcgctccagagtgaagttcagcagaagcgccgacgcccctgcctaccagcagggacagaaccaactgtacaacgagctgaacctgggcagacgggaagagtacgacgtgctggacaagcggagaggcagggaccctgagatgggcggaaagccccagcggagaaagaacccccaggaaggactgtataacgaactccagaaagacaagatggccgaagcctacagcgagatcggcatgaagggcgagcggagaagaggcaagggccacgatggcctgtaccagggcctgagcaccgccaccaaggacacctatgacgccctgcacatgcaggccctgcctccaaga

SEQ ID NO: 26536 - DNA, 882 bp, synthetic construct
  source 1..882: mol_type = other DNA
cctcacaccaagcccagcgtgttcgtgatgaagaacggcaccaacgtggcctgcctcgtgaaagagttctaccccaaggacatcaggatcaacctggtgtccagcaagaagatcaccgagttcgaccccgccatcgtgatctcccccagcggcaagtacaacgccgtgaagctggggaagtacgaggacagcaacagcgtgacctgctccgtgcagcacgacaacaagaccgtgcacagcaccgactttgaagtgaaaaccgactccaccgagagcagctgcgacgtgaagctggtggaaaagagcttcgagacagacaccaacctgaacttccagaacctgagcgtgatcggcttcagaatcctgctgctgaaagtggccggctttaacctgctgatgaccctgcggctgtggtccagcaggagtaagaggagcaggctcctgcacagtgactacatgaacatgactccacgccgccccggacccacccgcaagcattaccagccctatgccccaccacgcgacttcgcagcctatcgctccagagtgaagttcagcagaagcgccgacgcccctgcctaccagcagggacagaaccaactgtacaacgagctgaacctgggcagacgggaagagtacgacgtgctggacaagcggagaggcagggaccctgagatgggcggaaagccccagcggagaaagaacccccaggaaggactgtataacgaactccagaaagacaagatggccgaagcctacagcgagatcggcatgaagggcgagcggagaagaggcaagggccacgatggcctgtaccagggcctgagcaccgccaccaaggacacctatgacgccctgcacatgcaggccctgcctccaaga

SEQ ID NO: 26537 - DNA, 909 bp, synthetic construct
  source 1..909: mol_type = other DNA
cctcacaccaagcccagcgtgttcgtgatgaagaacggcaccaacgtggcctgcctcgtgaaagagttctaccccaaggacatcaggatcaacctggtgtccagcaagaagatcaccgagttcgaccccgccatcgtgatctcccccagcggcaagtacaacgccgtgaagctggggaagtacgaggacagcaacagcgtgacctgctccgtgcagcacgacaacaagaccgtgcacagcaccgactttgaagtgaaaaccgactccacccccgaggacacattcttcccaagccccgagagcagctgcgacgtgaagctggtggaaaagagcttcgagacagacaccaacctgaacttccagaacctgagcgtgatcggcttcagaatcctgctgctgaaagtggccggctttaacctgctgatgaccctgcggctgtggtccagcaggagtaagaggagcaggctcctgcacagtgactacatgaacatgactccacgccgccccggacccacccgcaagcattaccagccctatgccccaccacgcgacttcgcagcctatcgctccagagtgaagttcagcagaagcgccgacgcccctgcctaccagcagggacagaaccaactgtacaacgagctgaacctgggcagacgggaagagtacgacgtgctggacaagcggagaggcagggaccctgagatgggcggaaagccccagcggagaaagaacccccaggaaggactgtataacgaactccagaaagacaagatggccgaagcctacagcgagatcggcatgaagggcgagcggagaagaggcaagggccacgatggcctgtaccagggcctgagcaccgccaccaaggacacctatgacgccctgcacatgcaggccctgcctccaaga

SEQ ID NO: 26538 - DNA, 891 bp, synthetic construct
  source 1..891: mol_type = other DNA
cctcacaccaagcccagcgtgttcgtgatgaagaacggcaccaacgtggcctgcctcgtgaaagagttctaccccaaggacatcaggatcaacctggtgtccagcaagaagatcaccgagttcgaccccgccatcgtgatctcccccagcggcaagtacaacgccgtgaagctggggaagtacgaggacagcaacagcgtgacctgctccgtgcagcacgacaacaagaccgtgcacagcaccgactttgaagtgaaaaccgactccaccggcagagccgattgcggctttaccagcgagagctaccagcagggcgtgctgagcgccaccatcctgtacgagatcctgctgggcaaggccaccctgtacgccgtgctggtgtctgccctggtgctgatggctatggtcaagcggaaggacagccggggaaggagtaagaggagcaggctcctgcacagtgactacatgaacatgactccacgccgccccggacccacccgcaagcattaccagccctatgccccaccacgcgacttcgcagcctatcgctccagagtgaagttcagcagaagcgccgacgcccctgcctaccagcagggacagaaccaactgtacaacgagctgaacctgggcagacgggaagagtacgacgtgctggacaagcggagaggcagggaccctgagatgggcggaaagccccagcggagaaagaacccccaggaaggactgtataacgaactccagaaagacaagatggccgaagcctacagcgagatcggcatgaagggcgagcggagaagaggcaagggccacgatggcctgtaccagggcctgagcaccgccaccaaggacacctatgacgccctgcacatgcaggccctgcctccaaga

SEQ ID NO: 26539 - DNA, 885 bp, synthetic construct
  source 1..885: mol_type = other DNA
cctcacaccaagcccagcgtgttcgtgatgaagaacggcaccaacgtggcctgcctcgtgaaagagttctaccccaaggacatcaggatcaacctggtgtccagcaagaagatcaccgagttcgaccccgccatcgtgatctcccccagcggcaagtacaacgccgtgaagctggggaagtacgaggacagcaacagcgtgacctgctccgtgcagcacgacaacaagaccgtgcacagcaccgactttgaagtgaaaaccgactccaccgccgattgcggctttaccagcgagagctaccagcagggcgtgctgagcgccaccatcctgtacgagatcctgctgggcaaggccaccctgtacgccgtgctggtgtctgccctggtgctgatggctatggtcaagcggaaggacagccggggaaggagtaagaggagcaggctcctgcacagtgactacatgaacatgactccacgccgccccggacccacccgcaagcattaccagccctatgccccaccacgcgacttcgcagcctatcgctccagagtgaagttcagcagaagcgccgacgcccctgcctaccagcagggacagaaccaactgtacaacgagctgaacctgggcagacgggaagagtacgacgtgctggacaagcggagaggcagggaccctgagatgggcggaaagccccagcggagaaagaacccccaggaaggactgtataacgaactccagaaagacaagatggccgaagcctacagcgagatcggcatgaagggcgagcggagaagaggcaagggccacgatggcctgtaccagggcctgagcaccgccaccaaggacacctatgacgccctgcacatgcaggccctgcctccaaga

SEQ ID NO: 26540 - DNA, 915 bp, synthetic construct
  source 1..915: mol_type = other DNA
cctcacaccaagcccagcgtgttcgtgatgaagaacggcaccaacgtggcctgcctcgtgaaagagttctaccccaaggacatcaggatcaacctggtgtccagcaagaagatcaccgagttcgaccccgccatcgtgatctcccccagcggcaagtacaacgccgtgaagctggggaagtacgaggacagcaacagcgtgacctgctccgtgcagcacgacaacaagaccgtgcacagcaccgactttgaagtgaaaaccgactccacccagatcgtgtctgccgaagcctggggcagagccgattgcggctttaccagcgagagctaccagcagggcgtgctgagcgccaccatcctgtacgagatcctgctgggcaaggccaccctgtacgccgtgctggtgtctgccctggtgctgatggctatggtcaagcggaaggacagccggggaaggagtaagaggagcaggctcctgcacagtgactacatgaacatgactccacgccgccccggacccacccgcaagcattaccagccctatgccccaccacgcgacttcgcagcctatcgctccagagtgaagttcagcagaagcgccgacgcccctgcctaccagcagggacagaaccaactgtacaacgagctgaacctgggcagacgggaagagtacgacgtgctggacaagcggagaggcagggaccctgagatgggcggaaagccccagcggagaaagaacccccaggaaggactgtataacgaactccagaaagacaagatggccgaagcctacagcgagatcggcatgaagggcgagcggagaagaggcaagggccacgatggcctgtaccagggcctgagcaccgccaccaaggacacctatgacgccctgcacatgcaggccctgcctccaaga

SEQ ID NO: 26541 - DNA, 939 bp, synthetic construct
  source 1..939: mol_type = other DNA
cctcacaccaagcccagcgtgttcgtgatgaagaacggcaccaacgtggcctgcctcgtgaaagagttctaccccaaggacatcaggatcaacctggtgtccagcaagaagatcaccgagttcgaccccgccatcgtgatctcccccagcggcaagtacaacgccgtgaagctggggaagtacgaggacagcaacagcgtgacctgctccgtgcagcacgacaacaagaccgtgcacagcaccgactttgaagtgaaaaccgactccaccttcccacccatcaagaccgatgtgattacaatggaccccaaggacaactgctccaaggacgccaacgataccctgctgctccagctgaccaacaccagcgcctactacatgtacttgttgctgctgctgaagtccgtggtgtacttcgccatcatcacatgctgcctgctgcggagaaccgccttctgctgcaacggcgagaagtctaggagtaagaggagcaggctcctgcacagtgactacatgaacatgactccacgccgccccggacccacccgcaagcattaccagccctatgccccaccacgcgacttcgcagcctatcgctccagagtgaagttcagcagaagcgccgacgcccctgcctaccagcagggacagaaccaactgtacaacgagctgaacctgggcagacgggaagagtacgacgtgctggacaagcggagaggcagggaccctgagatgggcggaaagccccagcggagaaagaacccccaggaaggactgtataacgaactccagaaagacaagatggccgaagcctacagcgagatcggcatgaagggcgagcggagaagaggcaagggccacgatggcctgtaccagggcctgagcaccgccaccaaggacacctatgacgccctgcacatgcaggccctgcctccaaga

SEQ ID NO: 26542 - DNA, 933 bp, synthetic construct
  source 1..933: mol_type = other DNA
cctcacaccaagcccagcgtgttcgtgatgaagaacggcaccaacgtggcctgcctcgtgaaagagttctaccccaaggacatcaggatcaacctggtgtccagcaagaagatcaccgagttcgaccccgccatcgtgatctcccccagcggcaagtacaacgccgtgaagctggggaagtacgaggacagcaacagcgtgacctgctccgtgcagcacgacaacaagaccgtgcacagcaccgactttgaagtgaaaaccgactccacccccatcaagaccgatgtgattacaatggaccccaaggacaactgctccaaggacgccaacgataccctgctgctccagctgaccaacaccagcgcctactacatgtacttgttgctgctgctgaagtccgtggtgtacttcgccatcatcacatgctgcctgctgcggagaaccgccttctgctgcaacggcgagaagtctaggagtaagaggagcaggctcctgcacagtgactacatgaacatgactccacgccgccccggacccacccgcaagcattaccagccctatgccccaccacgcgacttcgcagcctatcgctccagagtgaagttcagcagaagcgccgacgcccctgcctaccagcagggacagaaccaactgtacaacgagctgaacctgggcagacgggaagagtacgacgtgctggacaagcggagaggcagggaccctgagatgggcggaaagccccagcggagaaagaacccccaggaaggactgtataacgaactccagaaagacaagatggccgaagcctacagcgagatcggcatgaagggcgagcggagaagaggcaagggccacgatggcctgtaccagggcctgagcaccgccaccaaggacacctatgacgccctgcacatgcaggccctgcctccaaga

SEQ ID NO: 26543 - DNA, 909 bp, synthetic construct
  source 1..909: mol_type = other DNA
cctcacaccaagcccagcgtgttcgtgatgaagaacggcaccaacgtggcctgcctcgtgaaagagttctaccccaaggacatcaggatcaacctggtgtccagcaagaagatcaccgagttcgaccccgccatcgtgatctcccccagcggcaagtacaacgccgtgaagctggggaagtacgaggacagcaacagcgtgacctgctccgtgcagcacgacaacaagaccgtgcacagcaccgactttgaagtgaaaaccgactccaccatggaccccaaggacaactgctccaaggacgccaacgataccctgctgctccagctgaccaacaccagcgcctactacatgtacttgttgctgctgctgaagtccgtggtgtacttcgccatcatcacatgctgcctgctgcggagaaccgccttctgctgcaacggcgagaagtctaggagtaagaggagcaggctcctgcacagtgactacatgaacatgactccacgccgccccggacccacccgcaagcattaccagccctatgccccaccacgcgacttcgcagcctatcgctccagagtgaagttcagcagaagcgccgacgcccctgcctaccagcagggacagaaccaactgtacaacgagctgaacctgggcagacgggaagagtacgacgtgctggacaagcggagaggcagggaccctgagatgggcggaaagccccagcggagaaagaacccccaggaaggactgtataacgaactccagaaagacaagatggccgaagcctacagcgagatcggcatgaagggcgagcggagaagaggcaagggccacgatggcctgtaccagggcctgagcaccgccaccaaggacacctatgacgccctgcacatgcaggccctgcctccaaga

SEQ ID NO: 26544 - DNA, 933 bp, synthetic construct; identical to SEQ ID NO: 26542
  source 1..933: mol_type = other DNA

SEQ ID NO: 26545 - DNA, 891 bp, synthetic construct
  source 1..891: mol_type = other DNA
cctcacaccaagcccagcgtgttcgtgatgaagaacggcaccaacgtggcctgcctcgtgaaagagttctaccccaaggacatcaggatcaacctggtgtccagcaagaagatcaccgagttcgaccccgccatcgtgatctcccccagcggcaagtacaacgccgtgaagctggggaagtacgaggacagcaacagcgtgacctgctccgtgcagcacgacaacaagaccgtgcacagcaccgactttgaagtgaaaaccgactccacctgctccaaggacgccaacgataccctgctgctccagctgaccaacaccagcgcctactacatgtacttgttgctgctgctgaagtccgtggtgtacttcgccatcatcacatgctgcctgctgcggagaaccgccttctgctgcaacggcgagaagtctaggagtaagaggagcaggctcctgcacagtgactacatgaacatgactccacgccgccccggacccacccgcaagcattaccagccctatgccccaccacgcgacttcgcagcctatcgctccagagtgaagttcagcagaagcgccgacgcccctgcctaccagcagggacagaaccaactgtacaacgagctgaacctgggcagacgggaagagtacgacgtgctggacaagcggagaggcagggaccctgagatgggcggaaagccccagcggagaaagaacccccaggaaggactgtataacgaactccagaaagacaagatggccgaagcctacagcgagatcggcatgaagggcgagcggagaagaggcaagggccacgatggcctgtaccagggcctgagcaccgccaccaaggacacctatgacgccctgcacatgcaggccctgcctccaaga

SEQ ID NO: 26546 - DNA, 891 bp, synthetic construct; identical to SEQ ID NO: 26524
  source 1..891: mol_type = other DNA

SEQ ID NO: 26547 - DNA, 861 bp, synthetic construct; identical to SEQ ID NO: 26525
  source 1..861: mol_type = other DNA

SEQ ID NO: 26548 - DNA, 888 bp, synthetic construct; identical to SEQ ID NO: 26526
  source 1..888: mol_type = other DNA

SEQ ID NO: 26549 - DNA, 870 bp, synthetic construct; identical to SEQ ID NO: 26527
  source 1..870: mol_type = other DNA

SEQ ID NO: 26550 - DNA, 864 bp, synthetic construct; identical to SEQ ID NO: 26528
  source 1..864: mol_type = other DNA

SEQ ID NO: 26551 - DNA, 894 bp, synthetic construct; identical to SEQ ID NO: 26529
  source 1..894: mol_type = other DNA

SEQ ID NO: 26552 - DNA, 918 bp, synthetic construct; identical to SEQ ID NO: 26530
  source 1..918: mol_type = other DNA

SEQ ID NO: 26553 - DNA, 912 bp, synthetic construct; identical to SEQ ID NO: 26531
  source 1..912: mol_type = other DNA

SEQ ID NO: 26554 - DNA, 888 bp, synthetic construct; identical to SEQ ID NO: 26532
  source 1..888: mol_type = other DNA

SEQ ID NO: 26555 - DNA, 912 bp, synthetic construct; identical to SEQ ID NO: 26531
  source 1..912: mol_type = other DNA

SEQ ID NO: 26556 - DNA, 870 bp, synthetic construct
  source 1..870: mol_type = other DNA
cctcacaccaagcccagcgtgttcgtgatgaagaacggcaccaacgtggcctgcctcgtgaaagagttctaccccaaggacatcaggatcaacctggtgtccagcaagaagatcaccgagttcgaccccgccatcgtgatctcccccagcggcaagtacaacgccgtgaagctggggaagtacgaggacagcaacagcgtgacctgctccgtgcagcacgacaacaagaccgtgcacagcaccgacttttgctccaaggacgccaacgataccctgctgctccagctgaccaacaccagcgcctactacatgtacttgttgctgctgctgaagtccgtggtgtacttcgccatcatcacatgctgcctgctgcggagaaccgccttctgctgcaacggcgagaagtctaggagtaagaggagcaggctcctgcacagtgactacatgaacatgactccacgccgccccggacccacccgcaagcattaccagccctatgccccaccacgcgacttcgcagcctatcgctccagagtgaagttcagcagaagcgccgacgcccctgcctaccagcagggacagaaccaactgtacaacgagctgaacctgggcagacgggaagagtacgacgtgctggacaagcggagaggcagggaccctgagatgggcggaaagccccagcggagaaagaacccccaggaaggactgtataacgaactccagaaagacaagatggccgaagcctacagcgagatcggcatgaagggcgagcggagaagaggcaagggccacgatggcctgtaccagggcctgagcaccgccaccaaggacacctatgacgccctgcacatgcaggccctgcctccaaga

SEQ ID NO: 26557 - DNA, 912 bp, synthetic construct; identical to SEQ ID NO: 26535
  source 1..912: mol_type = other DNA

SEQ ID NO: 26558 - DNA, 882 bp, synthetic construct; identical to SEQ ID NO: 26536
  source 1..882: mol_type = other DNA

SEQ ID NO: 26559 - DNA, 909 bp, synthetic construct; identical to SEQ ID NO: 26537
  source 1..909: mol_type = other DNA

SEQ ID NO: 26560 - DNA, 891 bp, synthetic construct; identical to SEQ ID NO: 26538
  source 1..891: mol_type = other DNA

SEQ ID NO: 26561 - DNA, 885 bp, synthetic construct; identical to SEQ ID NO: 26539
  source 1..885: mol_type = other DNA

SEQ ID NO: 26562 - DNA, 915 bp, synthetic construct; identical to SEQ ID NO: 26540
  source 1..915: mol_type = other DNA

SEQ ID NO: 26563 - DNA, 939 bp, synthetic construct; identical to SEQ ID NO: 26541
  source 1..939: mol_type = other DNA

SEQ ID NO: 26564 - DNA, 933 bp, synthetic construct; identical to SEQ ID NO: 26542
  source 1..933: mol_type = other DNA

SEQ ID NO: 26565 - DNA, 909 bp, synthetic construct; identical to SEQ ID NO: 26543
  source 1..909: mol_type = other DNA

SEQ ID NO: 26566 - DNA, 933 bp, synthetic construct; identical to SEQ ID NO: 26542
  source 1..933: mol_type = other DNA

SEQ ID NO: 26567 - DNA, 891 bp, synthetic construct; identical to SEQ ID NO: 26545
  source 1..891: mol_type = other DNA

SEQ ID NO: 26568 - DNA, 882 bp, synthetic construct
  source 1..882: mol_type = other DNA
atccagaaccctgatcctgccgtgtaccagctgcgggatagcaagagcagcgacaagagcgtgtgtctgttcaccgacttcgacagccagaccaacgtgtcccagagcaaggactccgacgtgtacatcaccgataagtgcgtgctggacatgcggagcatggacttcaagagcaactccgccgtggcctggtccaacaagtccgatttcgcctgcgccaacgccttcaacaacagcattatccccgaggacacattcttcccaagccccgagagcagctgcgacgtgaagctggtggaaaagagcttcgagacagacaccaacctgaacttccagaacctgagcgtgatcggcctgcggatgctgttcgccaaaaccgtggccgtgaacttcctgctgaccgccaagctgttcttcctcaggagtaagaggagcaggctcctgcacagtgactacatgaacatgactccacgccgccccggacccacccgcaagcattaccagccctatgccccaccacgcgacttcgcagcctatcgctccagagtgaagttcagcagaagcgccgacgcccctgcctaccagcagggacagaaccaactgtacaacgagctgaacctgggcagacgggaagagtacgacgtgctggacaagcggagaggcagggaccctgagatgggcggaaagccccagcggagaaagaacccccaggaaggactgtataacgaactccagaaagacaagatggccgaagcctacagcgagatcggcatgaagggcgagcggagaagaggcaagggccacgatggcctgtaccagggcctgagcaccgccaccaaggacacctatgacgccctgcacatgcaggccctgcctccaaga

SEQ ID NO: 26569 - DNA, 882 bp, synthetic construct
  source 1..882: mol_type = other DNA
atccagaaccctgatcctgccgtgtaccagctgcgggatagcaagagcagcgacaagagcgtgtgtctgttcaccgacttcgacagccagaccaacgtgtcccagagcaaggactccgacgtgtacatcaccgataagtgcgtgctggacatgcggagcatggacttcaagagcaactccgccgtggcctggtccaacaagtccgatttcgcctgcgccaacgccttcaacaacagcattatccccgaggacacattcttcccaagccccgagagcagctgcgacgtgaagctggtggaaaagagcttcgagacagacaccaacctgaacttccagaacctgagcgtgctgggcctgcggatgctgttcgccaaaaccgtggccgtgaacttcctgctgaccgccaagctgttcttcctcaggagtaagaggagcaggctcctgcacagtgactacatgaacatgactccacgccgccccggacccacccgcaagcattaccagccctatgccccaccacgcgacttcgcagcctatcgctccagagtgaagttcagcagaagcgccgacgcccctgcctaccagcagggacagaaccaactgtacaacgagctgaacctgggcagacgggaagagtacgacgtgctggacaagcggagaggcagggaccctgagatgggcggaaagccccagcggagaaagaacccccaggaaggactgtataacgaactccagaaagacaagatggccgaagcctacagcgagatcggcatgaagggcgagcggagaagaggcaagggccacgatggcctgtaccagggcctgagcaccgccaccaaggacacctatgacgccctgcacatgcaggccctgcctccaaga

SEQ ID NO: 26570 - DNA, 882 bp, synthetic construct; identical to SEQ ID NO: 26569
  source 1..882: mol_type = other DNA

SEQ ID NO: 26571 - DNA, 921 bp, synthetic construct
  source 1..921: mol_type = other DNA
agccagcctcacaccaagcccagcgtgttcgtgatgaagaacggcaccaacgtggcctgcctcgtgaaagagttctaccccaaggacatcaggatcaacctggtgtccagcaagaagatcaccgagttcgaccccgccatcgtgatctcccccagcggcaagtacaacgccgtgaagctggggaagtacgaggacagcaacagcgtgacctgctccgtgcagcacgacaacaagaccgtgcacagcaccgactttgaagtgaaaaccgactccaccgaccacgtgaagcccaaagagacagagaacaccaagcagcccagcaagagctgccacaagcccaaggccatcgtgcacaccgagaaagtgaacatgatgagcctgaccgtgctgggcttcagaatcctgctgctgaaagtggccggctttaacctgctgatgaccctgcggctgtggtccagcaggagtaagaggagcaggctcctgcacagtgactacatgaacatgactccacgccgccccggacccacccgcaagcattaccagccctatgccccaccacgcgacttcgcagcctatcgctccagagtgaagttcagcagaagcgccgacgcccctgcctaccagcagggacagaaccaactgtacaacgagctgaacctgggcagacgggaagagtacgacgtgctggacaagcggagaggcagggaccctgagatgggcggaaagccccagcggagaaagaacccccaggaaggactgtataacgaactccagaaagacaagatggccgaagcctacagcgagatcggcatgaagggcgagcggagaagaggcaagggccacgatggcctgtaccagggcctgagcaccgccaccaaggacacctatgacgccctgcacatgcaggccctgcctccaaga

SEQ ID NO: 26572 - DNA, 921 bp, synthetic construct
  source 1..921: mol_type = other DNA
agccagcctcacaccaagcccagcgtgttcgtgatgaagaacggcaccaacgtggcctgcctcgtgaaagagttctaccccaaggacatcaggatcaacctggtgtccagcaagaagatcaccgagttcgaccccgccatcgtgatctcccccagcggcaagtacaacgccgtgaagctggggaagtacgaggacagcaacagcgtgacctgctccgtgcagcacgacaacaagaccgtgcacagcaccgactttgaagtgaaaaccgactccaccgaccacgtgaagcccaaagagacagagaacaccaagcagcccagcaagagctgccacaagcccaaggccatcgtgcacaccgagaaagtgaacatgatgagcctgaccgtgatcggcttcagaatcctgctgctgaaagtggccggctttaacctgctgatgaccctgcggctgtggtccagcaggagtaagaggagcaggctcctgcacagtgactacatgaacatgactccacgccgccccggacccacccgcaagcattaccagccctatgccccaccacgcgacttcgcagcctatcgctccagagtgaagttcagcagaagcgccgacgcccctgcctaccagcagggacagaaccaactgtacaacgagctgaacctgggcagacgggaagagtacgacgtgctggacaagcggagaggcagggaccctgagatgggcggaaagccccagcggagaaagaacccccaggaaggactgtataacgaactccagaaagacaagatggccgaagcctacagcgagatcggcatgaagggcgagcggagaagaggcaagggccacgatggcctgtaccagggcctgagcaccgccaccaaggacacctatgacgccctgcacatgcaggccctgcctccaaga

SEQ ID NO: 26573 - DNA, 1002 bp, synthetic construct
  source 1..1002: mol_type = other DNA
gaggacctgaagaacgtgttcccacctgaggtggccgtgttcgagcctagcgaggccgagatcagccacacccagaaagccaccctcgtgtgcctggctaccggcttctaccccgaccatgtggaactgtcttggtgggtcaacggcaaagaggtgcacagcggcgtgtgtaccgacccccagccactgaaagaacagcccgccctgaacgacagccggtactgcctgagcagcagactgagagtgtccgccaccttctggcagaacccccggaaccacttcagatgccaggtgcagttctacggcctgagcgagaacgacgagtggacccaggacagagccaagcccgtgacccagatcgtgtctgccgaagcctggggcagagccgattgcggctttaccagcgagagctaccagcagggcgtgctgagcgccaccatcctgtacttgttgctgctgctgaagtccgtggtgtacttcgccatcatcacatgctgcctgctgcggagaaccgccttctgctgcaacggcgagaagtctaggagtaagaggagcaggctcctgcacagtgactacatgaacatgactccacgccgccccggacccacccgcaagcattaccagccctatgccccaccacgcgacttcgcagcctatcgctccagagtgaagttcagcagaagcgccgacgcccctgcctaccagcagggacagaaccaactgtacaacgagctgaacctgggcagacgggaagagtacgacgtgctggacaagcggagaggcagggaccctgagatgggcggaaagccccagcggagaaagaacccccaggaaggactgtataacgaactccagaaagacaagatggccgaagcctacagcgagatcggcatgaagggcgagcggagaagaggcaagggccacgatggcctgtaccagggcctgagcaccgccaccaaggacacctatgacgccctgcacatgcaggccctgcctccaaga

SEQ ID NO: 26574 - DNA, 1002 bp, synthetic construct
  source 1..1002: mol_type = other DNA
gaggacctgaagaacgtgttcccacctgaggtggccgtgttcgagcctagcgaggccgagatcagccacacccagaaagccaccctcgtgtgcctggctaccggcttctaccccgaccatgtggaactgtcttggtgggtcaacggcaaagaggtgcacagcggcgtgtgtaccgacccccagccactgaaagaacagcccgccctgaacgacagccggtactgcctgagcagcagactgagagtgtccgccaccttctggcagaacccccggaaccacttcagatgccaggtgcagttctacggcctgagcgagaacgacgagtggacccaggacagagccaagcccgtgacccagatcgtgtctgccgaagcctggggcagagccgattgcggctttaccagcgagagctaccagcagggcgtgctgagcgcctactacatgtacttgttgctgctgctgaagtccgtggtgtacttcgccatcatcacatgctgcctgctgcggagaaccgccttctgctgcaacggcgagaagtctaggagtaagaggagcaggctcctgcacagtgactacatgaacatgactccacgccgccccggacccacccgcaagcattaccagccctatgccccaccacgcgacttcgcagcctatcgctccagagtgaagttcagcagaagcgccgacgcccctgcctaccagcagggacagaaccaactgtacaacgagctgaacctgggcagacgggaagagtacgacgtgctggacaagcggagaggcagggaccctgagatgggcggaaagccccagcggagaaagaacccccaggaaggactgtataacgaactccagaaagacaagatggccgaagcctacagcgagatcggcatgaagggcgagcggagaagaggcaagggccacgatggcctgtaccagggcctgagcaccgccaccaaggacacctatgacgccctgcacatgcaggccctgcctccaaga

SEQ ID NO: 26575 - DNA, 978 bp, synthetic construct
  source 1..978: mol_type = other DNA
gacaagcagctggacgccgacgtgtcccccaagcctaccatcttcctgccctctatcgccgagacaaagctccagaaggccggcacctacctgtgcctgctggaaaagttcttcccagatgtgattaagatccactggcaggaaaagaagtccaacaccatcctgggcagccaggaaggcaacaccatgaagaccaacgacacctacatgaagttcagctggctgaccgtgcccgagaagtccctggacaaagaacacagatgcatcgtgcggcacgaaaacaacaagaacggcgtggaccaggaaatcatcttcccacccatcaagaccgatgtgattacaatggaccccaaggacaactgctccaaggacgccaacgataccctgctgctccagctgaccaacaccagcgcctactacatgtacgagatcctgctgggcaaggccaccctgtacgccgtgctggtgtctgccctggtgctgatggctatggtcaagcggaaggacagccggggaaggagtaagaggagcaggctcctgcacagtgactacatgaacatgactccacgccgccccggacccacccgcaagcattaccagccctatgccccaccacgcgacttcgcagcctatcgctccagagtgaagttcagcagaagcgccgacgcccctgcctaccagcagggacagaaccaactgtacaacgagctgaacctgggcagacgggaagagtacgacgtgctggacaagcggagaggcagggaccctgagatgggcggaaagccccagcggagaaagaacccccaggaaggactgtataacgaactccagaaagacaagatggccgaagcctacagcgagatcggcatgaagggcgagcggagaagaggcaagggccacgatggcctgtaccagggcctgagcaccgccaccaaggacacctatgacgccctgcacatgcaggccctgcctccaaga

SEQ ID NO: 26576 - DNA, 978 bp, synthetic construct
  source 1..978: mol_type = other DNA
gacaagcagctggacgccgacgtgtcccccaagcctaccatcttcctgccctctatcgccgagacaaagctccagaaggccggcacctacctgtgcctgctggaaaagttcttcccagatgtgattaagatccactggcaggaaaagaagtccaacaccatcctgggcagccaggaaggcaacaccatgaagaccaacgacacctacatgaagttcagctggctgaccgtgcccgagaagtccctggacaaagaacacagatgcatcgtgcggcacgaaaacaacaagaacggcgtggaccaggaaatcatcttcccacccatcaagaccgatgtgattacaatggaccccaaggacaactgctccaaggacgccaacgataccctgctgctccagctgaccaacaccagcgccaccatcctgtacgagatcctgctgggcaaggccaccctgtacgccgtgctggtgtctgccctggtgctgatggctatggtcaagcggaaggacagccggggaaggagtaagaggagcaggctcctgcacagtgactacatgaacatgactccacgccgccccggacccacccgcaagcattaccagccctatgccccaccacgcgacttcgcagcctatcgctccagagtgaagttcagcagaagcgccgacgcccctgcctaccagcagggacagaaccaactgtacaacgagctgaacctgggcagacgggaagagtacgacgtgctggacaagcggagaggcagggaccctgagatgggcggaaagccccagcggagaaagaacccccaggaaggactgtataacgaactccagaaagacaagatggccgaagcctacagcgagatcggcatgaagggcgagcggagaagaggcaagggccacgatggcctgtaccagggcctgagcaccgccaccaaggacacctatgacgccctgcacatgcaggccctgcctccaaga

SEQ ID NO: 26577 - DNA, 999 bp, synthetic construct
  source 1..999: mol_type = other DNA
gaggacctgaagaacgtgttcccacctgaggtggccgtgttcgagcctagcgaggccgagatcagccacacccagaaagccaccctcgtgtgcctggctaccggcttctaccccgaccatgtggaactgtcttggtgggtcaacggcaaagaggtgcacagcggcgtgtgtaccgacccccagccactgaaagaacagcccgccctgaacgacagccggtactgcctgagcagcagactgagagtgtccgccaccttctggcagaacccccggaaccacttcagatgccaggtgcagttctacggcctgagcgagaacgacgagtggacccaggacagagccaagcccgtgacccagatcgtgtctgccgaagcctggggcagagccgatagcggctttaccagcgagagctaccagcagggcgtgctgagcgccaccatcctgtacgagatcctgctgggcaaggccaccctgtacgccgtgctggtgtctgccctggtgctgatggctatggtcaagcggaaggacagccggggaaggagtaagaggagcaggctcctgcacagtgactacatgaacatgactccacgccgccccggacccacccgcaagcattaccagccctatgccccaccacgcgacttcgcagcctatcgctccagagtgaagttcagcagaagcgccgacgcccctgcctaccagcagggacagaaccaactgtacaacgagctgaacctgggcagacgggaagagtacgacgtgctggacaagcggagaggcagggaccctgagatgggcggaaagccccagcggagaaagaacccccaggaaggactgtataacgaactccagaaagacaagatggccgaagcctacagcgagatcggcatgaagggcgagcggagaagaggcaagggccacgatggcctgtaccagggcctgagcaccgccaccaaggacacctatgacgccctgcacatgcaggccctgcctccaaga

SEQ ID NO: 26578 - DNA, 882 bp, synthetic construct
  source 1..882: mol_type = other DNA
atccagaaccctgatcctgccgtgtaccagctgcgggatagcaagagcagcgacaagagcgtgtgtctgttcaccgacttcgacagccagaccaacgtgtcccagagcaaggactccgacgtgtacatcaccgataagtgcgtgctggacatgcggagcatggacttcaagagcaactccgccgtggcctggtccaacaagtccgatttcgcctgcgccaacgccttcaacaacagcattatccccgaggacacattcttcccaagccccgagagcagcagcgacgtgaagctggtggaaaagagcttcgagacagacaccaacctgaacttccagaacctgagcgtgatcggcttcagaatcctgctgctgaaagtggccggctttaacctgctgatgaccctgcggctgtggtccagcaggagtaagaggagcaggctcctgcacagtgactacatgaacatgactccacgccgccccggacccacccgcaagcattaccagccctatgccccaccacgcgacttcgcagcctatcgctccagagtgaagttcagcagaagcgccgacgcccctgcctaccagcagggacagaaccaactgtacaacgagctgaacctgggcagacgggaagagtacgacgtgctggacaagcggagaggcagggaccctgagatgggcggaaagccccagcggagaaagaacccccaggaaggactgtataacgaactccagaaagacaagatggccgaagcctacagcgagatcggcatgaagggcgagcggagaagaggcaagggccacgatggcctgtaccagggcctgagcaccgccaccaaggacacctatgacgccctgcacatgcaggccctgcctccaaga

SEQ ID NO: 26579 - DNA, 999 bp, synthetic construct
  source 1..999: mol_type = other DNA
gaggacctgaagaacgtgttcccacctgaggtggccgtgttcgagcctagcgaggccgagatcagccacacccagaaagccaccctcgtgtgcctggctaccggcttctaccccgaccatgtggaactgtcttggtgggtcaacggcaaagaggtgcacagcggcgtgtgtaccgacccccagccactgaaagaacagcccgccctgaacgacagccggtactgcctgagcagcagactgagagtgtccgccaccttctggcagaacccccggaaccacttcagatgccaggtgcagttctacggcctgagcgagaacgacgagtggacccaggacagagccaagcccgtgacccagatcgtgtctgccgaagcctggggcagagccgatggcggctttaccagcgagagctaccagcagggcgtgctgagcgccaccatcctgtacgagatcctgctgggcaaggccaccctgtacgccgtgctggtgtctgccctggtgctgatggctatggtcaagcggaaggacagccggggaaggagtaagaggagcaggctcctgcacagtgactacatgaacatgactccacgccgccccggacccacccgcaagcattaccagccctatgccccaccacgcgacttcgcagcctatcgctccagagtgaagttcagcagaagcgccgacgcccctgcctaccagcagggacagaaccaactgtacaacgagctgaacctgggcagacgggaagagtacgacgtgctggacaagcggagaggcagggaccctgagatgggcggaaagccccagcggagaaagaacccccaggaaggactgtataacgaactccagaaagacaagatggccgaagcctacagcgagatcggcatgaagggcgagcggagaagaggcaagggccacgatggcctgtaccagggcctgagcaccgccaccaaggacacctatgacgccctgcacatgcaggccctgcctccaaga

SEQ ID NO: 26580 - DNA, 882 bp, synthetic construct
  source 1..882: mol_type = other DNA
atccagaaccctgatcctgccgtgtaccagctgcgggatagcaagagcagcgacaagagcgtgtgtctgttcaccgacttcgacagccagaccaacgtgtcccagagcaaggactccgacgtgtacatcaccgataagtgcgtgctggacatgcggagcatggacttcaagagcaactccgccgtggcctggtccaacaagtccgatttcgcctgcgccaacgccttcaacaacagcattatccccgaggacacattcttcccaagccccgagagcagccgggacgtgaagctggtggaaaagagcttcgagacagacaccaacctgaacttccagaacctgagcgtgatcggcttcagaatcctgctgctgaaagtggccggctttaacctgctgatgaccctgcggctgtggtccagcaggagtaagaggagcaggctcctgcacagtgactacatgaacatgactccacgccgccccggacccacccgcaagcattaccagccctatgccccaccacgcgacttcgcagcctatcgctccagagtgaagttcagcagaagcgccgacgcccctgcctaccagcagggacagaaccaactgtacaacgagctgaacctgggcagacgggaagagtacgacgtgctggacaagcggagaggcagggaccctgagatgggcggaaagccccagcggagaaagaacccccaggaaggactgtataacgaactccagaaagacaagatggccgaagcctacagcgagatcggcatgaagggcgagcggagaagaggcaagggccacgatggcctgtaccagggcctgagcaccgccaccaaggacacctatgacgccctgcacatgcaggccctgcctccaaga

SEQ ID NO: 26581 - DNA, 888 bp, synthetic construct
  source 1..888: mol_type = other DNA
gatatccagaaccctgaccctgccgtgtaccagctgagagactctaaatccagtgacaagtctgtctgcctattcaccgattttgattctcaaacaaatgtgtcacaaagtaaggattctgatgtgtatatcacagacaaaactgtgctagacatgaggtctatggacttcaagagcaacagtgctgtggcctggagcaacaaatctgactttgcatgtgcaaacgccttcaacaacagcattattccagaagacaccttcttccccagcccagaaagttcctgtgatgtcaagctggtcgagaaaagctttgaaacagatacgaacctaaactttcaaaacctgtcagtgattgggttccgaatcctcctcctgaaagtggccgggtttaatctgctcatgacgctgcggctgtggtccagcaaacggggcagaaagaaactcctgtatatattcaaacaaccatttatgagaccagtacaaactactcaagaggaagatggctgtagctgccgatttccagaagaagaagaaggaggatgtgaactgagagtgaagttcagcagaagcgccgacgcccctgcctaccagcagggacagaaccaactgtacaacgagctgaacctgggcagacgggaagagtacgacgtgctggacaagcggagaggcagggaccctgagatgggcggaaagccccagcggagaaagaacccccaggaaggactgtataacgaactccagaaagacaagatggccgaagcctacagcgagatcggcatgaagggcgagcggagaagaggcaagggccacgatggcctgtaccagggcctgagcaccgccaccaaggacacctatgacgccctgcacatgcaggccctgcctccaaga

SEQ ID NO: 26582 - DNA, 885 bp, synthetic construct
  source 1..885: mol_type = other DNA
atccagaaccctgaccctgccgtgtaccagctgagagactctaaatccagtgacaagtctgtctgcctattcaccgattttgattctcaaacaaatgtgtcacaaagtaaggattctgatgtgtatatcacagacaaaactgtgctagacatgaggtctatggacttcaagagcaacagtgctgtggcctggagcaacaaatctgactttgcatgtgcaaacgccttcaacaacagcattattccagaagacaccttcttccccagcccagaaagttcctgtgatgtcaagctggtcgagaaaagctttgaaacagatacgaacctaaactttcaaaacctgtcagtgattgggttccgaatcctcctcctgaaagtggccgggtttaatctgctcatgacgctgcggctgtggtccagcaaacggggcagaaagaaactcctgtatatattcaaacaaccatttatgagaccagtacaaactactcaagaggaagatggctgtagctgccgatttccagaagaagaagaaggaggatgtgaactgagagtgaagttcagcagaagcgccgacgcccctgcctaccagcagggacagaaccaactgtacaacgagctgaacctgggcagacgggaagagtacgacgtgctggacaagcggagaggcagggaccctgagatgggcggaaagccccagcggagaaagaacccccaggaaggactgtataacgaactccagaaagacaagatggccgaagcctacagcgagatcggcatgaagggcgagcggagaagaggcaagggccacgatggcctgtaccagggcctgagcaccgccaccaaggacacctatgacgccctgcacatgcaggccctgcctccaaga

SEQ ID NO: 26583 - DNA, 885 bp, synthetic construct
  source 1..885: mol_type = other DNA
atccagaaccctgatcctgccgtgtaccagctgcgggatagcaagagcagcgacaagagcgtgtgtctgttcaccgacttcgacagccagaccaacgtgtcccagagcaaggactccgacgtgtacatcaccgataagtgcgtgctggacatgcggagcatggacttcaagagcaactccgccgtggcctggtccaacaagtccgatttcgcctgcgccaacgccttcaacaacagcattatccccgaggacacattcttcccaagcagcgacgtgccctgcgacgtgaagctggtggaaaagagcttcgagacagacaccaacctgaacttccagaacctgagcgtgatcggcttcagaatcctgctgctgaaagtggccggctttaacctgctgatgaccctgcggctgtggtccagcaaacggggcagaaagaaactcctgtatatattcaaacaaccatttatgagaccagtacaaactactcaagaggaagatggctgtagctgccgatttccagaagaagaagaaggaggatgtgaactgagagtgaagttcagcagaagcgccgacgcccctgcctaccagcagggacagaaccaactgtacaacgagctgaacctgggcagacgggaagagtacgacgtgctggacaagcggagaggcagggaccctgagatgggcggaaagccccagcggagaaagaacccccaggaaggactgtataacgaactccagaaagacaagatggccgaagcctacagcgagatcggcatgaagggcgagcggagaagaggcaagggccacgatggcctgtaccagggcctgagcaccgccaccaaggacacctatgacgccctgcacatgcaggccctgcctccaaga

SEQ ID NO: 26584 - DNA, 885 bp, synthetic construct
  source 1..885: mol_type = other DNA
atccagaaccctgatcctgccgtgtaccagctgcgggatagcaagagcagcgacaagagcgtgtgtctgttcaccgacttcgacagccagaccaacgtgtcccagagcaaggactccgacgtgtacatcaccgataagaccgtgctggacatgcggagcatggacttcaagagcaactccgccgtggcctggtccaacaagtccgatttcgcctgcgccaacgccttcaacaacagcattatccccgaggacacattcttcccaagccccgagagcagctgcgacgtgaagctggtggaaaagagcttcgagacagacaccaacctgaacttccagaacctgagcgtgatcggcttcagaatcctgctgctgaaagtggccggctttaacctgctgatgaccctgcggctgtggtccagcaaacggggcagaaagaaactcctgtatatattcaaacaaccatttatgagaccagtacaaactactcaagaggaagatggctgtagctgccgatttccagaagaagaagaaggaggatgtgaactgagagtgaagttcagcagaagcgccgacgcccctgcctaccagcagggacagaaccaactgtacaacgagctgaacctgggcagacgggaagagtacgacgtgctggacaagcggagaggcagggaccctgagatgggcggaaagccccagcggagaaagaacccccaggaaggactgtataacgaactccagaaagacaagatggccgaagcctacagcgagatcggcatgaagggcgagcggagaagaggcaagggccacgatggcctgtaccagggcctgagcaccgccaccaaggacacctatgacgccctgcacatgcaggccctgcctccaaga

SEQ ID NO: 26585 - DNA, 876 bp, synthetic construct
  source 1..876: mol_type = other DNA
cctgatcctgccgtgtaccagctgcgggatagcaagagcagcgacaagagcgtgtgcctgttcaccgacttcgacagccagaccaacgtgtctcagtctaaggatagtgatgtgtatatcaccgacaagaccgtgctggacatgcggagcatggacttcaagagcaacagcgccgtggcctggtccaacaagagcgacttcgcctgcgccaacgccttcaacaacagcatcatccccgaggacaccttcttccccagccccgagagcagctgcgacgtgaaactggtggagaagagcttcgagacagacaccaacctgaacttccagaacctgagcgtgatcggcttcagaatcctgctgctgaaggtggccggcttcaacctgctgatgaccctgcggctgtggagcagcaaacggggcagaaagaaactcctgtatatattcaaacaaccatttatgagaccagtacaaactactcaagaggaagatggctgtagctgccgatttccagaagaagaagaaggaggatgtgaactgagagtgaagttcagcagaagcgccgacgcccctgcctaccagcagggacagaaccaactgtacaacgagctgaacctgggcagacgggaagagtacgacgtgctggacaagcggagaggcagggaccctgagatgggcggaaagccccagcggagaaagaacccccaggaaggactgtataacgaactccagaaagacaagatggccgaagcctacagcgagatcggcatgaagggcgagcggagaagaggcaagggccacgatggcctgtaccagggcctgagcaccgccaccaaggacacctatgacgccctgcacatgcaggccctgcctccaaga

SEQ ID NO: 26586 - DNA, 885 bp, synthetic construct
  source 1..885: mol_type = other DNA
atccagaaccctgatcctgccgtgtaccagctgcgggatagcaagagcagcgacaagagcgtgtgtctgttcaccgacttcgacagccagaccaacgtgtcccagagcaaggactccgacgtgtacatcaccgataagtgcgtgctggacatgcggagcatggacttcaagagcaactccgccgtggcctggtccaacaagtccgatttcgcctgcgccaacgccttcaacaacagcattatccccgaggacacattcttcccaagccccgagagcagctgcgacgtgaagctggtggaaaagagcttcgagacagacaccaacctgaacttccagaacctgagcgtgatcggcttcagaatcctgctgctgaaagtggccggctttaacctgctgatgaccctgcggctgtggtccagcaaacggggcagaaagaaactcctgtatatattcaaacaaccatttatgagaccagtacaaactactcaagaggaagatggctgtagctgccgatttccagaagaagaagaaggaggatgtgaactgagagtgaagttcagcagaagcgccgacgcccctgcctaccagcagggacagaaccaactgtacaacgagctgaacctgggcagacgggaagagtacgacgtgctggacaagcggagaggcagggaccctgagatgggcggaaagccccagcggagaaagaacccccaggaaggactgtataacgaactccagaaagacaagatggccgaagcctacagcgagatcggcatgaagggcgagcggagaagaggcaagggccacgatggcctgtaccagggcctgagcaccgccaccaaggacacctatgacgccctgcacatgcaggccctgcctccaaga

SEQ ID NO: 26587 - DNA, 876 bp, synthetic construct
  source 1..876: mol_type = other DNA
cctgatcctgccgtgtaccagctgcgggatagcaagagcagcgacaagagcgtgtgtctgttcaccgacttcgacagccagaccaacgtgtcccagagcaaggactccgacgtgtacatcaccgataagtgcgtgctggacatgcggagcatggacttcaagagcaactccgccgtggcctggtccaacaagtccgatttcgcctgcgccaacgccttcaacaacagcattatccccgaggacacattcttcccaagccccgagagcagctgcgacgtgaagctggtggaaaagagcttcgagacagacaccaacctgaacttccagaacctgagcgtgatcggcttcagaatcctgctgctgaaagtggccggctttaacctgctgatgaccctgcggctgtggtccagcaaacggggcagaaagaaactcctgtatatattcaaacaaccatttatgagaccagtacaaactactcaagaggaagatggctgtagctgccgatttccagaagaagaagaaggaggatgtgaactgagagtgaagttcagcagaagcgccgacgcccctgcctaccagcagggacagaaccaactgtacaacgagctgaacctgggcagacgggaagagtacgacgtgctggacaagcggagaggcagggaccctgagatgggcggaaagccccagcggagaaagaacccccaggaaggactgtataacgaactccagaaagacaagatggccgaagcctacagcgagatcggcatgaagggcgagcggagaagaggcaagggccacgatggcctgtaccagggcctgagcaccgccaccaaggacacctatgacgccctgcacatgcaggccctgcctccaaga

SEQ ID NO: 26588 - DNA, 885 bp, synthetic construct
  source 1..885: mol_type = other DNA
atccagaaccctgatcctgccgtgtaccagctgcgggatagcaagagcagcgacaagagcgtgtgtctgttcaccgacttcgacagccagaccaacgtgtcccagagcaaggactccgacgtgtacatcaccgataagaccgtgctggacatgcggagcatggacttcaagagcaactccgccgtggcctggtccaacaagtccgatttcgcctgcgccaacgccttcaacaacagcattatccccgaggacacattcttcccaagcagcgacgtgccctgcgacgtgaagctggtggaaaagagcttcgagacagacaccaacctgaacttccagaacctgagcgtgatcggcttcagaatcctgctgctgaaagtggccggctttaacctgctgatgaccctgcggctgtggtccagcaaacggggcagaaagaaactcctgtatatattcaaacaaccatttatgagaccagtacaaactactcaagaggaagatggctgtagctgccgatttccagaagaagaagaaggaggatgtgaactgagagtgaagttcagcagaagcgccgacgcccctgcctaccagcagggacagaaccaactgtacaacgagctgaacctgggcagacgggaagagtacgacgtgctggacaagcggagaggcagggaccctgagatgggcggaaagccccagcggagaaagaacccccaggaaggactgtataacgaactccagaaagacaagatggccgaagcctacagcgagatcggcatgaagggcgagcggagaagaggcaagggccacgatggcctgtaccagggcctgagcaccgccaccaaggacacctatgacgccctgcacatgcaggccctgcctccaaga

SEQ ID NO: 26589 - DNA, 885 bp, synthetic construct
  source 1..885: mol_type = other DNA
atccagaaccctgatcctgccgtgtaccagctgcgggatagcaagagcagcgacaagagcgtgtgtctgttcaccgacttcgacagccagaccaacgtgtcccagagcaaggactccgacgtgtacatcaccgataagaccgtgctggacatgcggagcatggacttcaagagcaaccgcgccgtggcctggtccaacaagtccgatttcgcctgcgccaacgccttcaacaacagcattatccccgaggacacattcttcccaagccccgagagcagctgcgacgtgaagctggtggaaaagagcttcgagacagacaccaacctgaacttccagaacctgagcgtgatcggcttcagaatcctgctgctgaaagtggccggctttaacctgctgatgaccctgcggctgtggtccagcaaacggggcagaaagaaactcctgtatatattcaaacaaccatttatgagaccagtacaaactactcaagaggaagatggctgtagctgccgatttccagaagaagaagaaggaggatgtgaactgagagtgaagttcagcagaagcgccgacgcccctgcctaccagcagggacagaaccaactgtacaacgagctgaacctgggcagacgggaagagtacgacgtgctggacaagcggagaggcagggaccctgagatgggcggaaagccccagcggagaaagaacccccaggaaggactgtataacgaactccagaaagacaagatggccgaagcctacagcgagatcggcatgaagggcgagcggagaagaggcaagggccacgatggcctgtaccagggcctgagcaccgccaccaaggacacctatgacgccctgcacatgcaggccctgcctccaaga

SEQ ID NO: 26590 - DNA, 885 bp, synthetic construct
  source 1..885: mol_type = other DNA
atccagaaccctgatcctgccgtgtaccagctgcgggatagcaagagcagcgacaagagcgtgtgtctgttcaccgacttcgacagccagaccaacgtgtcccagagcaaggactccgacgtgtacatcaccgataagaccgtgctggacatgcggagcatggacttcaagagcaaccgcgccgtggcctggtccaacaagtccgatttcgcctgcgccaacgccttcaacaacagcattatccccgaggacacattcttcccaagcagcgacgtgccctgcgacgtgaagctggtggaaaagagcttcgagacagacaccaacctgaacttccagaacctgagcgtgatcggcttcagaatcctgctgctgaaagtggccggctttaacctgctgatgaccctgcggctgtggtccagcaaacggggcagaaagaaactcctgtatatattcaaacaaccatttatgagaccagtacaaactactcaagaggaagatggctgtagctgccgatttccagaagaagaagaaggaggatgtgaactgagagtgaagttcagcagaagcgccgacgcccctgcctaccagcagggacagaaccaactgtacaacgagctgaacctgggcagacgggaagagtacgacgtgctggacaagcggagaggcagggaccctgagatgggcggaaagccccagcggagaaagaacccccaggaaggactgtataacgaactccagaaagacaagatggccgaagcctacagcgagatcggcatgaagggcgagcggagaagaggcaagggccacgatggcctgtaccagggcctgagcaccgccaccaaggacacctatgacgccctgcacatgcaggccctgcctccaaga

SEQ ID NO: 26591 - DNA, 885 bp, synthetic construct
  source 1..885: mol_type = other DNA
atccagaaccctgatcctgccgtgtaccagctgcgggatagcaagagcagcgacaagagcgtgtgtctgttcaccgacttcgacagccagaccaacgtgtcccagagcaaggactccgacgtgtacatcaccgataagaccgtgctggacatgcggagcatggacttcaagagcaactccgccgtggcctggtccaacaagtccgatttcgcctgcgccaacgccttcaacaacagcattatccccgaggacacattcttcccaagcagcgacagcagctgcgacgtgaagctggtggaaaagagcttcgagacagacaccaacctgaacttccagaacctgagcgtgatcggcttcagaatcctgctgctgaaagtggccggctttaacctgctgatgaccctgcggctgtggtccagcaaacggggcagaaagaaactcctgtatatattcaaacaaccatttatgagaccagtacaaactactcaagaggaagatggctgtagctgccgatttccagaagaagaagaaggaggatgtgaactgagagtgaagttcagcagaagcgccgacgcccctgcctaccagcagggacagaaccaactgtacaacgagctgaacctgggcagacgggaagagtacgacgtgctggacaagcggagaggcagggaccctgagatgggcggaaagccccagcggagaaagaacccccaggaaggactgtataacgaactccagaaagacaagatggccgaagcctacagcgagatcggcatgaagggcgagcggagaagaggcaagggccacgatggcctgtaccagggcctgagcaccgccaccaaggacacctatgacgccctgcacatgcaggccctgcctccaaga

SEQ ID NO: 26592 - DNA, 1182 bp, synthetic construct
  source 1..1182: mol_type = other DNA
atccagaaccctgatcctgccgtgtaccagctgcgggatagcaagagcagcgacaagagcgtgtgtctgttcaccgacttcgacagccagaccaacgtgtcccagagcaaggactccgacgtgtacatcaccgataagaccgtgctggacatgcggagcatggacttcaagagcaactccgccgtggcctggtccaacaagtccgatttcgcctgcgccaacgccttcaacaacagcattatccccgaggacacattcttcccaagccccgagagcagctgcggtacccagagttttgggttgttggaccctaaattgtgctatctgttggacggaatcctgttcatttacggagtgatcctgaccgcattgttcctgcgggttaagttttccagatccgcagacgcacccgcttaccaacaagggcagaaccaactctacaatgaacttaatttggggcggagggaagagtacgacgttctggacaaaaggaggggacgagatcccgagatgggcggaaagcctcagcgaaggaagaatccgcaagaggggctttataacgaactccagaaagataaaatggcagaagcctatagtgagattgggatgaagggagaaaggaggaggggtaaaggtcacgatgggttgtaccaaggattgagcacagccactaaagatacctatgatgcgctccacatgcaggccctgccgccaagaaaacggggcagaaagaaactcctgtatatattcaaacaaccatttatgagaccagtacaaactactcaagaggaagatggctgtagctgccgatttccagaagaagaagaaggaggatgtgaactgagagtgaagttcagcagaagcgccgacgcccctgcctaccagcagggacagaaccaactgtacaacgagctgaacctgggcagacgggaagagtacgacgtgctggacaagcggagaggcagggaccctgagatgggcggaaagccccagcggagaaagaacccccaggaaggactgtataacgaactccagaaagacaagatggccgaagcctacagcgagatcggcatgaagggcgagcggagaagaggcaagggccacgatggcctgtaccagggcctgagcaccgccaccaaggacacctatgacgccctgcacatgcaggccctgcctccaaga

SEQ ID NO: 26593 - DNA, 873 bp, synthetic construct
  source 1..873: mol_type = other DNA
atccagaaccctgaacctgccgtgtaccagctgaaggaccccagaagccaggacagcaccctgtgcctgttcaccgacttcgacagccagatcaacgtgcccaagacaatggaaagcggcaccttcatcaccgacaagaccgtgctggacatgaaggctatggacagcaagagcaacggcgccattgcctggtccaaccagaccagcttcacatgccaggacatcttcaaagagacaaacgccacctacccctccagcgacgtgccctgtgacgccaccctgaccgagaagtccttcgagacagacatgaacctcaacttccagaacctgagcgtgatgggcctgcgaatcctgctgctgaaagtggccggcttcaacctgctgatgaccctgcggctgtggtccagcaaacggggcagaaagaaactcctgtatatattcaaacaaccatttatgagaccagtacaaactactcaagaggaagatggctgtagctgccgatttccagaagaagaagaaggaggatgtgaactgagagtgaagttcagcagaagcgccgacgcccctgcctaccagcagggacagaaccaactgtacaacgagctgaacctgggcagacgggaagagtacgacgtgctggacaagcggagaggcagggaccctgagatgggcggaaagccccagcggagaaagaacccccaggaaggactgtataacgaactccagaaagacaagatggccgaagcctacagcgagatcggcatgaagggcgagcggagaagaggcaagggccacgatggcctgtaccagggcctgagcaccgccaccaaggacacctatgacgccctgcacatgcaggccctgcctccaaga

SEQ ID NO: 26594 - DNA, 864 bp, synthetic construct
  source 1..864: mol_type = other DNA
gtgcaggaccctgaccctagcgtgtaccagatgagaagccccaagaccggcaggaccgtgtgcctgttcaccgacttcgacagccaggccgacttccagaagcctgagggggccaccgtgatctccctgaacagcaccgtgctggacatgaaagtgatggacagcaagagcaacggcgctctgacctggaacagcgagacaaacatcgagtgcaaagagaacttccagcagcccttctaccccagcagcaactactcctgcgacgccaagctgatcgagaagtccttcgagacagacatggacctgaacttctacaacctgctggtcatcggcctgagaatcctgctgctgaaagtgatcggcttcaacctgttcatgaccctgaggctgtggtcctgcaaacggggcagaaagaaactcctgtatatattcaaacaaccatttatgagaccagtacaaactactcaagaggaagatggctgtagctgccgatttccagaagaagaagaaggaggatgtgaactgagagtgaagttcagcagaagcgccgacgcccctgcctaccagcagggacagaaccaactgtacaacgagctgaacctgggcagacgggaagagtacgacgtgctggacaagcggagaggcagggaccctgagatgggcggaaagccccagcggagaaagaacccccaggaaggactgtataacgaactccagaaagacaagatggccgaagcctacagcgagatcggcatgaagggcgagcggagaagaggcaagggccacgatggcctgtaccagggcctgagcaccgccaccaaggacacctatgacgccctgcacatgcaggccctgcctccaaga

SEQ ID NO: 26595 - DNA, 996 bp, synthetic construct
  source 1..996: mol_type = other DNA
gaggacctgaacaaggtgttcccacccgaggtcgctgtgtttgagccatcagaagcagagatctcccacacccaaaaggccacactggtgtgcctggccacaggcttcttccccgaccacgtggagctgagctggtgggtgaatgggaaggaggtgcacagtggggtcagcacagacccgcagcccctcaaggagcagcccgccctcaatgactccagatactgcctgagcagccgcctgagggtctcggccaccttctggcagaacccccgcaaccacttccgctgtcaagtccagttctacgggctctcggagaatgacgagtggacccaggatagggccaaacccgtcacccagatcgtcagcgccgaggcctggggtagagcagactgtggctttacctcggtgtcctaccagcaaggggtcctgtctgccaccatcctctatgagatcctgctagggaaggccaccctgtatgctgtgctggtcagcgcccttgtgttgatggccatggtcaagagaaaggatttcaaacggggcagaaagaaactcctgtatatattcaaacaaccatttatgagaccagtacaaactactcaagaggaagatggctgtagctgccgatttccagaagaagaagaaggaggatgtgaactgagagtgaagttcagcagaagcgccgacgcccctgcctaccagcagggacagaaccaactgtacaacgagctgaacctgggcagacgggaagagtacgacgtgctggacaagcggagaggcagggaccctgagatgggcggaaagccccagcggagaaagaacccccaggaaggactgtataacgaactccagaaagacaagatggccgaagcctacagcgagatcggcatgaagggcgagcggagaagaggcaagggccacgatggcctgtaccagggcctgagcaccgccaccaaggacacctatgacgccctgcacatgcaggccctgcctccaaga

SEQ ID NO: 26596 - DNA, 1002 bp, synthetic construct
  source 1..1002: mol_type = other DNA
gaggacctgaaaaacgtgttcccacccgaggtcgctgtgtttgagccatcagaagcagagatctcccacacccaaaaggccacactggtatgcctggccacaggcttctaccccgaccacgtggagctgagctggtgggtgaatgggaaggaggtgcacagtggggtcagcacagacccgcagcccctcaaggagcagcccgccctcaatgactccagatactgcctgagcagccgcctgagggtctcggccaccttctggcagaacccccgcaaccacttccgctgtcaagtccagttctacgggctctcggagaatgacgagtggacccaggatagggccaaacccgtcacccagatcgtcagcgccgaggcctggggtagagcagactgtggcttcacctccgagtcttaccagcaaggggtcctgtctgccaccatcctctatgagatcttgctagggaaggccaccttgtatgccgtgctggtcagtgccctcgtgctgatggccatggtcaagagaaaggattccagaggcaaacggggcagaaagaaactcctgtatatattcaaacaaccatttatgagaccagtacaaactactcaagaggaagatggctgtagctgccgatttccagaagaagaagaaggaggatgtgaactgagagtgaagttcagcagaagcgccgacgcccctgcctaccagcagggacagaaccaactgtacaacgagctgaacctgggcagacgggaagagtacgacgtgctggacaagcggagaggcagggaccctgagatgggcggaaagccccagcggagaaagaacccccaggaaggactgtataacgaactccagaaagacaagatggccgaagcctacagcgagatcggcatgaagggcgagcggagaagaggcaagggccacgatggcctgtaccagggcctgagcaccgccaccaaggacacctatgacgccctgcacatgcaggccctgcctccaaga

SEQ ID NO: 26597 - DNA, 1002 bp, synthetic construct; identical to SEQ ID NO: 26596
  source 1..1002: mol_type = other DNA

SEQ ID NO: 26598 - DNA, 1002 bp, synthetic construct
  source 1..1002: mol_type = other DNA
gaggacctgaagaacgtgttcccacctgaggtggccgtgttcgagcctagcgaggccgagatcagccacacccagaaagccaccctcgtgtgcctggctaccggcttctaccccgaccatgtggaactgtcttggtgggtcaacggcaaagaggtgcacagcggcgtgtgtaccgacccccagccactgaaagaacagcccgccctgaacgacagccggtactgcctgagcagcagactgagagtgtccgccaccttctggcagaacccccggaaccacttcagatgccaggtgcagttctacggcctgagcgagaacgacgagtggacccaggacagagccaagcccgtgacccagatcgtgtctgccgaagcctggggcagagccgattgcggctttaccagcgagagctaccagcagggcgtgctgagcgccaccatcctgtacgagatcctgctgggcaaggccaccctgtacgccgtgctggtgtctgccctggtgctgatggctatggtcaagcggaaggacagccggggaaaacggggcagaaagaaactcctgtatatattcaaacaaccatttatgagaccagtacaaactactcaagaggaagatggctgtagctgccgatttccagaagaagaagaaggaggatgtgaactgagagtgaagttcagcagaagcgccgacgcccctgcctaccagcagggacagaaccaactgtacaacgagctgaacctgggcagacgggaagagtacgacgtgctggacaagcggagaggcagggaccctgagatgggcggaaagccccagcggagaaagaacccccaggaaggactgtataacgaactccagaaagacaagatggccgaagcctacagcgagatcggcatgaagggcgagcggagaagaggcaagggccacgatggcctgtaccagggcctgagcaccgccaccaaggacacctatgacgccctgcacatgcaggccctgcctccaaga

SEQ ID NO: 26599 - DNA, 1002 bp, synthetic construct
  source 1..1002: mol_type = other DNA
gaggacctgaagaacgtgttcccacctgaggtggccgtgttcgagcctagcaaggccgagatcgcccacacccagaaagccaccctcgtgtgcctggctaccggcttctaccccgaccatgtggaactgtcttggtgggtcaacggcaaagaggtgcacagcggcgtgtgtaccgacccccagccactgaaagaacagcccgccctgaacgacagccggtactgcctgagcagcagactgagagtgtccgccaccttctggcagaacccccggaaccacttcagatgccaggtgcagttctacggcctgagcgagaacgacgagtggacccaggacagagccaagcccgtgacccagatcgtgtctgccgaagcctggggcagagccgattgcggcatcaccagcgccagctaccaccagggcgtgctgagcgccaccatcctgtacgagatcctgctgggcaaggccaccctgtacgccgtgctggtgtctgccctggtgctgatggctatggtcaagcggaaggacagccggggaaaacggggcagaaagaaactcctgtatatattcaaacaaccatttatgagaccagtacaaactactcaagaggaagatggctgtagctgccgatttccagaagaagaagaaggaggatgtgaactgagagtgaagttcagcagaagcgccgacgcccctgcctaccagcagggacagaaccaactgtacaacgagctgaacctgggcagacgggaagagtacgacgtgctggacaagcggagaggcagggaccctgagatgggcggaaagccccagcggagaaagaacccccaggaaggactgtataacgaactccagaaagacaagatggccgaagcctacagcgagatcggcatgaagggcgagcggagaagaggcaagggccacgatggcctgtaccagggcctgagcaccgccaccaaggacacctatgacgccctgcacatgcaggccctgcctccaaga

SEQ ID NO: 26600 - DNA, 1002 bp, synthetic construct
  source 1..1002: mol_type = other DNA
gaggacctgaagaacgtgttcccacctgaggtggccgtgttcgagcctagcgaggccgagatcagccacacccagaaagccaccctcgtgtgcctggctaccggcttctaccccgaccatgtggaactgtcttggtgggtcaacggcaaagaggtgcacagcggcgtgtctaccgacccccagccactgaaagaacagcccgccctgaacgacagccggtactgcctgagcagcagactgagagtgtccgccaccttctggcagaacccccggaaccacttcagatgccaggtgcagttctacggcctgagcgagaacgacgagtggacccaggacagagccaagcccgtgacccagatcgtgtctgccgaagcctggggcagagccgattgcggctttaccagcgagagctaccagcagggcgtgctgagcgccaccatcctgtacgagatcctgctgggcaaggccaccctgtacgccgtgctggtgtctgccctggtgctgatggctatggtcaagcggaaggacagccggggaaaacggggcagaaagaaactcctgtatatattcaaacaaccatttatgagaccagtacaaactactcaagaggaagatggctgtagctgccgatttccagaagaagaagaaggaggatgtgaactgagagtgaagttcagcagaagcgccgacgcccctgcctaccagcagggacagaaccaactgtacaacgagctgaacctgggcagacgggaagagtacgacgtgctggacaagcggagaggcagggaccctgagatgggcggaaagccccagcggagaaagaacccccaggaaggactgtataacgaactccagaaagacaagatggccgaagcctacagcgagatcggcatgaagggcgagcggagaagaggcaagggccacgatggcctgtaccagggcctgagcaccgccaccaaggacacctatgacgccctgcacatgcaggccctgcctccaaga

SEQ ID NO: 26601 - DNA, 999 bp, synthetic construct
  source 1..999: mol_type = other DNA
gacctgaagaacgtgttcccacctgaggtggccgtgttcgagcctagcgaggccgagatcagccacacccagaaagccaccctcgtgtgcctggctaccggcttctaccccgaccatgtggaactgtcttggtgggtcaacggcaaagaggtgcacagcggcgtgtctaccgacccccagccactgaaagaacagcccgccctgaacgacagccggtactgcctgagcagcagactgagagtgtccgccaccttctggcagaacccccggaaccacttcagatgccaggtgcagttctacggcctgagcgagaacgacgagtggacccaggacagagccaagcccgtgacccagatcgtgtctgccgaagcctggggcagagccgattgcggctttaccagcgagagctaccagcagggcgtgctgagcgccaccatcctgtacgagatcctgctgggcaaggccaccctgtacgccgtgctggtgtctgccctggtgctgatggctatggtcaagcggaaggacagccggggaaaacggggcagaaagaaactcctgtatatattcaaacaaccatttatgagaccagtacaaactactcaagaggaagatggctgtagctgccgatttccagaagaagaagaaggaggatgtgaactgagagtgaagttcagcagaagcgccgacgcccctgcctaccagcagggacagaaccaactgtacaacgagctgaacctgggcagacgggaagagtacgacgtgctggacaagcggagaggcagggaccctgagatgggcggaaagccccagcggagaaagaacccccaggaaggactgtataacgaactccagaaagacaagatggccgaagcctacagcgagatcggcatgaagggcgagcggagaagaggcaagggccacgatggcctgtaccagggcctgagcaccgccaccaaggacacctatgacgccctgcacatgcaggccctgcctccaaga

SEQ ID NO: 26602 - DNA, 996 bp, synthetic construct
  source 1..996: mol_type = other DNA
gaggacctgaagaacgtgttcccacctgaggtggccgtgttcgagcccagcgaggccgagatttcacacactcagaaagccacactcgtatgtctggcgactggtttctttcccgaccacgtggagctgtcttggtgggtgaacggcaaagaggtgcacagcggggtctctaccgacccccagccactgaaagagcagcccgccctgaacgacagccggtactgcctctcttctcggctgagagtgtccgccaccttctggcagaacccccggaaccacttcagatgccaggtgcagttctacggcctgagcgagaacgacgagtggacccaggacagagccaagcctgtgacccagatcgtgagtgctgaagcgtggggacgcgccgattgcggctttaccagcgagagctaccagcagggcgtgctgtctgccaccatcctgtacgagatcctgctgggcaaggccaccctgtacgccgtgctggtgtccgccctggtgctgatggctatggtgaagcggaaggacttcaaacggggcagaaagaaactcctgtatatattcaaacaaccatttatgagaccagtacaaactactcaagaggaagatggctgtagctgccgatttccagaagaagaagaaggaggatgtgaactgagagtgaagttcagcagaagcgccgacgcccctgcctaccagcagggacagaaccaactgtacaacgagctgaacctgggcagacgggaagagtacgacgtgctggacaagcggagaggcagggaccctgagatgggcggaaagccccagcggagaaagaacccccaggaaggactgtataacgaactccagaaagacaagatggccgaagcctacagcgagatcggcatgaagggcgagcggagaagaggcaagggccacgatggcctgtaccagggcctgagcaccgccaccaaggacacctatgacgccctgcacatgcaggccctgcctccaaga

SEQ ID NO: 26603 - DNA, 996 bp, synthetic construct
  source 1..996: mol_type = other DNA
gaggacctgaacaaggtgttcccacctgaggtggccgtgttcgagcccagcgaggccgagatttcacacactcagaaagccacactcgtatgtctggcgactggtttctttcccgaccacgtggagctgtcttggtgggtgaacggcaaagaggtgcacagcggggtctctaccgacccccagccactgaaagagcagcccgccctgaacgacagccggtactgcctctcttctcggctgagagtgtccgccaccttctggcagaacccccggaaccacttcagatgccaggtgcagttctacggcctgagcgagaacgacgagtggacccaggacagagccaagcctgtgacccagatcgtgagtgctgaagcgtggggacgcgccgattgcggctttaccagcgtgagctaccagcagggcgtgctgtctgccaccatcctgtacgagatcctgctgggcaaggccaccctgtacgccgtgctggtgtccgccctggtgctgatggctatggtgaagcggaaggacttcaaacggggcagaaagaaactcctgtatatattcaaacaaccatttatgagaccagtacaaactactcaagaggaagatggctgtagctgccgatttccagaagaagaagaaggaggatgtgaactgagagtgaagttcagcagaagcgccgacgcccctgcctaccagcagggacagaaccaactgtacaacgagctgaacctgggcagacgggaagagtacgacgtgctggacaagcggagaggcagggaccctgagatgggcggaaagccccagcggagaaagaacccccaggaaggactgtataacgaactccagaaagacaagatggccgaagcctacagcgagatcggcatgaagggcgagcggagaagaggcaagggccacgatggcctgtaccagggcctgagcaccgccaccaaggacacctatgacgccctgcacatgcaggccctgcctccaaga

SEQ ID NO: 26604 - DNA, 1002 bp, synthetic construct
  source 1..1002: mol_type = other DNA
gaggacctgaagaacgtgttcccacctgaggtggccgtgttcgagcctagcaaggccgagatcgcccacacccagaaagccaccctcgtgtgcctggctaccggcttctaccccgaccatgtggaactgtcttggtgggtcaacggcaaagaggtgcacagcggcgtgtctaccgacccccagccactgaaagaacagcccgccctgaacgacagccggtactgcctgagcagcagactgagagtgtccgccaccttctggcagaacccccggaaccacttcagatgccaggtgcagttctacggcctgagcgagaacgacgagtggacccaggacagagccaagcccgtgacccagatcgtgtctgccgaagcctggggcagagccgattgcggcatcaccagcgccagctaccaccagggcgtgctgagcgccaccatcctgtacgagatcctgctgggcaaggccaccctgtacgccgtgctggtgtctgccctggtgctgatggctatggtcaagcggaaggacagccggggaaaacggggcagaaagaaactcctgtatatattcaaacaaccatttatgagaccagtacaaactactcaagaggaagatggctgtagctgccgatttccagaagaagaagaaggaggatgtgaactgagagtgaagttcagcagaagcgccgacgcccctgcctaccagcagggacagaaccaactgtacaacgagctgaacctgggcagacgggaagagtacgacgtgctggacaagcggagaggcagggaccctgagatgggcggaaagccccagcggagaaagaacccccaggaaggactgtataacgaactccagaaagacaagatggccgaagcctacagcgagatcggcatgaagggcgagcggagaagaggcaagggccacgatggcctgtaccagggcctgagcaccgccaccaaggacacctatgacgccctgcacatgcaggccctgcctccaaga

SEQ ID NO: 26605 - DNA, 1002 bp, synthetic construct
  source 1..1002: mol_type = other DNA
gaggacctgaagaacgtgttcccacctgaggtggccgtgttcgagcctagcaaggccgagatcgcccacacccagaaagccaccctcgtgtgcctggctaccggcttctaccccgaccatgtggaactgtcttggtgggtcaacggcaaagaggtgcacagcggcgtgtctaccgacccccagccactgaaagaacagcccgccctgaacgacagccggtactgcctgagcagcagactgagagtgtccgccaccttctggcagaacccccggaaccacttcagatgccaggtgcagttctacggcctgagcgagaacgacgagtggacccaggacagagccaagcccgtgacccagatcgtgtctgccgaagcctggggcagagccgattgcggctttaccagcgagagctaccagcagggcgtgctgagcgccaccatcctgtacgagatcctgctgggcaaggccaccctgtacgccgtgctggtgtctgccctggtgctgatggctatggtcaagcggaaggacagccggggaaaacggggcagaaagaaactcctgtatatattcaaacaaccatttatgagaccagtacaaactactcaagaggaagatggctgtagctgccgatttccagaagaagaagaaggaggatgtgaactgagagtgaagttcagcagaagcgccgacgcccctgcctaccagcagggacagaaccaactgtacaacgagctgaacctgggcagacgggaagagtacgacgtgctggacaagcggagaggcagggaccctgagatgggcggaaagccccagcggagaaagaacccccaggaaggactgtataacgaactccagaaagacaagatggccgaagcctacagcgagatcggcatgaagggcgagcggagaagaggcaagggccacgatggcctgtaccagggcctgagcaccgccaccaaggacacctatgacgccctgcacatgcaggccctgcctccaaga

SEQ ID NO: 26606 - DNA, 1002 bp, synthetic construct
  source 1..1002: mol_type = other DNA
gaggacctgaagaacgtgttcccacctgaggtggccgtgttcgagcctagcaaggccgagatcagccacacccagaaagccaccctcgtgtgcctggctaccggcttctaccccgaccatgtggaactgtcttggtgggtcaacggcaaagaggtgcacagcggcgtgtctaccgacccccagccactgaaagaacagcccgccctgaacgacagccggtactgcctgagcagcagactgagagtgtccgccaccttctggcagaacccccggaaccacttcagatgccaggtgcagttctacggcctgagcgagaacgacgagtggacccaggacagagccaagcccgtgacccagatcgtgtctgccgaagcctggggcagagccgattgcggcatcaccagcgagagctaccagcagggcgtgctgagcgccaccatcctgtacgagatcctgctgggcaaggccaccctgtacgccgtgctggtgtctgccctggtgctgatggctatggtcaagcggaaggacagccggggaaaacggggcagaaagaaactcctgtatatattcaaacaaccatttatgagaccagtacaaactactcaagaggaagatggctgtagctgccgatttccagaagaagaagaaggaggatgtgaactgagagtgaagttcagcagaagcgccgacgcccctgcctaccagcagggacagaaccaactgtacaacgagctgaacctgggcagacgggaagagtacgacgtgctggacaagcggagaggcagggaccctgagatgggcggaaagccccagcggagaaagaacccccaggaaggactgtataacgaactccagaaagacaagatggccgaagcctacagcgagatcggcatgaagggcgagcggagaagaggcaagggccacgatggcctgtaccagggcctgagcaccgccaccaaggacacctatgacgccctgcacatgcaggccctgcctccaaga

SEQ ID NO: 26607 - DNA, 1002 bp, synthetic construct
  source 1..1002: mol_type = other DNA
gaggacctgaagaacgtgttcccacctgaggtggccgtgttcgagcctagcaaggccgagatcagccacacccagaaagccaccctcgtgtgcctggctaccggcttctaccccgaccatgtggaactgtcttggtgggtcaacggcaaagaggtgcacagcggcgtgtctaccgacccccagccactgaaagaacagcccgccctgaacgacagccggtactgcctgagcagcagactgagagtgtccgccaccttctggcagaacccccggaaccacttcagatgccaggtgcagttctacggcctgagcgagaacgacgagtggacccaggacagagccaagcccgtgacccagatcgtgtctgccgaagcctggggcagagccgattgcggctttaccagcgccagctaccagcagggcgtgctgagcgccaccatcctgtacgagatcctgctgggcaaggccaccctgtacgccgtgctggtgtctgccctggtgctgatggctatggtcaagcggaaggacagccggggaaaacggggcagaaagaaactcctgtatatattcaaacaaccatttatgagaccagtacaaactactcaagaggaagatggctgtagctgccgatttccagaagaagaagaaggaggatgtgaactgagagtgaagttcagcagaagcgccgacgcccctgcctaccagcagggacagaaccaactgtacaacgagctgaacctgggcagacgggaagagtacgacgtgctggacaagcggagaggcagggaccctgagatgggcggaaagccccagcggagaaagaacccccaggaaggactgtataacgaactccagaaagacaagatggccgaagcctacagcgagatcggcatgaagggcgagcggagaagaggcaagggccacgatggcctgtaccagggcctgagcaccgccaccaaggacacctatgacgccctgcacatgcaggccctgcctccaaga

SEQ ID NO: 26608 - DNA, 1002 bp, synthetic construct
  source 1..1002: mol_type = other DNA
gaggacctgaagaacgtgttcccacctgaggtggccgtgttcgagcctagcaaggccgagatcagccacacccagaaagccaccctcgtgtgcctggctaccggcttctaccccgaccatgtggaactgtcttggtgggtcaacggcaaagaggtgcacagcggcgtgtctaccgacccccagccactgaaagaacagcccgccctgaacgacagccggtactgcctgagcagcagactgagagtgtccgccaccttctggcagaacccccggaaccacttcagatgccaggtgcagttctacggcctgagcgagaacgacgagtggacccaggacagagccaagcccgtgacccagatcgtgtctgccgaagcctggggcagagccgattgcggctttaccagcgagagctaccaccagggcgtgctgagcgccaccatcctgtacgagatcctgctgggcaaggccaccctgtacgccgtgctggtgtctgccctggtgctgatggctatggtcaagcggaaggacagccggggaaaacggggcagaaagaaactcctgtatatattcaaacaaccatttatgagaccagtacaaactactcaagaggaagatggctgtagctgccgatttccagaagaagaagaaggaggatgtgaactgagagtgaagttcagcagaagcgccgacgcccctgcctaccagcagggacagaaccaactgtacaacgagctgaacctgggcagacgggaagagtacgacgtgctggacaagcggagaggcagggaccctgagatgggcggaaagccccagcggagaaagaacccccaggaaggactgtataacgaactccagaaagacaagatggccgaagcctacagcgagatcggcatgaagggcgagcggagaagaggcaagggccacgatggcctgtaccagggcctgagcaccgccaccaaggacacctatgacgccctgcacatgcaggccctgcctccaaga

SEQ ID NO: 26609 - DNA, 1002 bp, synthetic construct
  source 1..1002: mol_type = other DNA
gaggacctgaagaacgtgttcccacctgaggtggccgtgttcgagcctagcagggccgagatcgcccacacccagaaagccaccctcgtgtgcctggctaccggcttctaccccgaccatgtggaactgtcttggtgggtcaacggcaaagaggtgcacagcggcgtgtctaccgacccccagccactgaaagaacagcccgccctgaacgacagccggtactgcctgagcagcagactgagagtgtccgccaccttctggcagaacccccggaaccacttcagatgccaggtgcagttctacggcctgagcgagaacgacgagtggacccaggacagagccaagcccgtgacccagatcgtgtctgccgaagcctggggcagagccgattgcggctttaccagcgagagctaccagcagggcgtgctgagcgccaccatcctgtacgagatcctgctgggcaaggccaccctgtacgccgtgctggtgtctgccctggtgctgatggctatggtcaagcggaaggacagccggggaaaacggggcagaaagaaactcctgtatatattcaaacaaccatttatgagaccagtacaaactactcaagaggaagatggctgtagctgccgatttccagaagaagaagaaggaggatgtgaactgagagtgaagttcagcagaagcgccgacgcccctgcctaccagcagggacagaaccaactgtacaacgagctgaacctgggcagacgggaagagtacgacgtgctggacaagcggagaggcagggaccctgagatgggcggaaagccccagcggagaaagaacccccaggaaggactgtataacgaactccagaaagacaagatggccgaagcctacagcgagatcggcatgaagggcgagcggagaagaggcaagggccacgatggcctgtaccagggcctgagcaccgccaccaaggacacctatgacgccctgcacatgcaggccctgcctccaaga

SEQ ID NO: 26610 - DNA, 1002 bp, synthetic construct
  source 1..1002: mol_type = other DNA
gaggacctgaagaacgtgttcccacctgaggtggccgtgttcgagcctagcagggccgagatcagccacacccagaaagccaccctcgtgtgcctggctaccggcttctaccccgaccatgtggaactgtcttggtgggtcaacggcaaagaggtgcacagcggcgtgtctaccgacccccagccactgaaagaacagcccgccctgaacgacagccggtactgcctgagcagcagactgagagtgtccgccaccttctggcagaacccccggaaccacttcagatgccaggtgcagttctacggcctgagcgagaacgacgagtggacccaggacagagccaagcccgtgacccagatcgtgtctgccgaagcctggggcagagccgattgcggctttaccagcgagagctaccagcagggcgtgctgagcgccaccatcctgtacgagatcctgctgggcaaggccaccctgtacgccgtgctggtgtctgccctggtgctgatggctatggtcaagcggaaggacagccggggaaaacggggcagaaagaaactcctgtatatattcaaacaaccatttatgagaccagtacaaactactcaagaggaagatggctgtagctgccgatttccagaagaagaagaaggaggatgtgaactgagagtgaagttcagcagaagcgccgacgcccctgcctaccagcagggacagaaccaactgtacaacgagctgaacctgggcagacgggaagagtacgacgtgctggacaagcggagaggcagggaccctgagatgggcggaaagccccagcggagaaagaacccccaggaaggactgtataacgaactccagaaagacaagatggccgaagcctacagcgagatcggcatgaagggcgagcggagaagaggcaagggccacgatggcctgtaccagggcctgagcaccgccaccaaggacacctatgacgccctgcacatgcaggccctgcctccaaga

SEQ ID NO: 26611 - DNA, 1002 bp, synthetic construct
  source 1..1002: mol_type = other DNA
gaggacctgaagaacgtgttcccacctgaggtggccgtgttcgagcctagcaaggccgagatcgcccacacccagaaagccaccctcgtgtgcctggctaccggcttctaccccgaccatgtggaactgtcttggtgggtcaacggcaaagaggtgcacagcggcgtgtctaccgacccccagccactgaaagaacagcccgccctgaacgacagccggtactgcctgagcagcggactgagagtgtccgccaccttctggcagaacccccggaaccacttcagatgccaggtgcagttctacggcctgagcgagaacgacgagtggacccaggacagagccaagcccgtgacccagatcgtgtctgccgaagcctggggcagagccgattgcggcatcaccagcgccagctaccaccagggcgtgctgagcgccaccatcctgtacgagatcctgctgggcaaggccaccctgtacgccgtgctggtgtctgccctggtgctgatggctatggtcaagcggaaggacagccggggaaaacggggcagaaagaaactcctgtatatattcaaacaaccatttatgagaccagtacaaactactcaagaggaagatggctgtagctgccgatttccagaagaagaagaaggaggatgtgaactgagagtgaagttcagcagaagcgccgacgcccctgcctaccagcagggacagaaccaactgtacaacgagctgaacctgggcagacgggaagagtacgacgtgctggacaagcggagaggcagggaccctgagatgggcggaaagccccagcggagaaagaacccccaggaaggactgtataacgaactccagaaagacaagatggccgaagcctacagcgagatcggcatgaagggcgagcggagaagaggcaagggccacgatggcctgtaccagggcctgagcaccgccaccaaggacacctatgacgccctgcacatgcaggccctgcctccaaga

SEQ ID NO: 26612 - DNA, 1002 bp, synthetic construct
  source 1..1002: mol_type = other DNA
gaggacctgaagaacgtgttcccacctgaggtggccgtgttcgagcctagcaaggccgagatcgcccacacccagaaagccaccctcgtgtgcctggctaccggcttctaccccgaccatgtggaactgtcttggtgggtcaacggcaaagaggtgcacagcggcgtgtctaccgacccccagccactgaaagaacagcccgccctgaacgacagccggtactgcctgagcagcggactgagagtgtccgccaccttctggcagaacccccggaaccacttcagatgccaggtgcagttctacggcctgagcgagaacgacgagtggacccaggacagagccaagcccgtgacccagatcgtgtctgccgaagcctggggcagagccgattgcggctttaccagcgagagctaccagcagggcgtgctgagcgccaccatcctgtacgagatcctgctgggcaaggccaccctgtacgccgtgctggtgtctgccctggtgctgatggctatggtcaagcggaaggacagccggggaaaacggggcagaaagaaactcctgtatatattcaaacaaccatttatgagaccagtacaaactactcaagaggaagatggctgtagctgccgatttccagaagaagaagaaggaggatgtgaactgagagtgaagttcagcagaagcgccgacgcccctgcctaccagcagggacagaaccaactgtacaacgagctgaacctgggcagacgggaagagtacgacgtgctggacaagcggagaggcagggaccctgagatgggcggaaagccccagcggagaaagaacccccaggaaggactgtataacgaactccagaaagacaagatggccgaagcctacagcgagatcggcatgaagggcgagcggagaagaggcaagggccacgatggcctgtaccagggcctgagcaccgccaccaaggacacctatgacgccctgcacatgcaggccctgcctccaaga

SEQ ID NO: 26613 - DNA, 1002 bp, synthetic construct
  source 1..1002: mol_type = other DNA
gaggacctgaagaacgtgttcccacctgaggtggccgtgttcgagcctagcgaggccgagatcagccacacccagaaagccaccctcgtgtgcctggctaccggcttctaccccgaccatgtggaactgtcttggtgggtcaacggcaaagaggtgcacagcggcgtgtctaccgacccccagccactgaaagaacagcccgccctgaacgacagccggtactgcctgagcagcggactgagagtgtccgccaccttctggcagaacccccggaaccacttcagatgccaggtgcagttctacggcctgagcgagaacgacgagtggacccaggacagagccaagcccgtgacccagatcgtgtctgccgaagcctggggcagagccgattgcggctttaccagcgagagctaccagcagggcgtgctgagcgccaccatcctgtacgagatcctgctgggcaaggccaccctgtacgccgtgctggtgtctgccctggtgctgatggctatggtcaagcggaaggacagccggggaaaacggggcagaaagaaactcctgtatatattcaaacaaccatttatgagaccagtacaaactactcaagaggaagatggctgtagctgccgatttccagaagaagaagaaggaggatgtgaactgagagtgaagttcagcagaagcgccgacgcccctgcctaccagcagggacagaaccaactgtacaacgagctgaacctgggcagacgggaagagtacgacgtgctggacaagcggagaggcagggaccctgagatgggcggaaagccccagcggagaaagaacccccaggaaggactgtataacgaactccagaaagacaagatggccgaagcctacagcgagatcggcatgaagggcgagcggagaagaggcaagggccacgatggcctgtaccagggcctgagcaccgccaccaaggacacctatgacgccctgcacatgcaggccctgcctccaaga

SEQ ID NO: 26614 - DNA, 978 bp, synthetic construct
  source 1..978: mol_type = other DNA
gaggatctgcggaacgtgaccccacccaaggtgtccctgttcgagcccagcaaggccgagatcgccaataaacagaaggccaccctcgtgtgcctggccagaggcttcttccccgaccacgtggaactgtcttggtgggtcaacggcaaagaggtgcacagcggcgtcagcaccgaccctcaggcctacaaagagagcaactacagctactgcctgagcagtcggctgcgggtgtccgccaccttctggcacaacccccggaaccacttcagatgccaggtgcagttccacggcctgagcgaagaggacaagtggcccgagggcagccccaagcctgtcacccagaacatcagcgccgaggcctggggcagagcctgtggcatcaccagcagctaccagcagggcgtgctgagcgccaccatcctgtacgagatcctgctgggcaaggccaccctgtacgccgtgctggtgtccaccctggtggtcatggctatggtcaagcggaagaacagcaaacggggcagaaagaaactcctgtatatattcaaacaaccatttatgagaccagtacaaactactcaagaggaagatggctgtagctgccgatttccagaagaagaagaaggaggatgtgaactgagagtgaagttcagcagaagcgccgacgcccctgcctaccagcagggacagaaccaactgtacaacgagctgaacctgggcagacgggaagagtacgacgtgctggacaagcggagaggcagggaccctgagatgggcggaaagccccagcggagaaagaacccccaggaaggactgtataacgaactccagaaagacaagatggccgaagcctacagcgagatcggcatgaagggcgagcggagaagaggcaagggccacgatggcctgtaccagggcctgagcaccgccaccaaggacacctatgacgccctgcacatgcaggccctgcctccaaga

SEQ ID NO: 26615 - DNA, 996 bp, synthetic construct
  source 1..996: mol_type = other DNA
gaggacctccagaaagtgaccccccctaccgtgaccgtgttcgagccttctgaggccgagatcagccggacccagaaagccacactcgtgtgcctggctcggggcttctaccccgatcacgtggaactgtcttggtgggtcaacggcaaagaagtgaccagcggcttcagcaccgacccccagcctgacaaagagcggcccagcgagaacgacagcagctactgcctgagcagcagactgagagtgtccgccagcttctggcacaacccccggaaccacttcagatgccaggtgcagttctacggcctgggcgacgacgacgagtggaagtacgacagagtgaagcccatcacccagaacatcagcgccgaagcctggggcagagccgattgcggctttacctccgtcagctaccaccagggcgtgctgagcgccaccatcctgtacgagatcctgctgggcaaggccaccctgtacgccgtgctggtgtctatcctggtgctgatggctaaagtgaagcggaagggcagcaaacggggcagaaagaaactcctgtatatattcaaacaaccatttatgagaccagtacaaactactcaagaggaagatggctgtagctgccgatttccagaagaagaagaaggaggatgtgaactgagagtgaagttcagcagaagcgccgacgcccctgcctaccagcagggacagaaccaactgtacaacgagctgaacctgggcagacgggaagagtacgacgtgctggacaagcggagaggcagggaccctgagatgggcggaaagccccagcggagaaagaacccccaggaaggactgtataacgaactccagaaagacaagatggccgaagcctacagcgagatcggcatgaagggcgagcggagaagaggcaagggccacgatggcctgtaccagggcctgagcaccgccaccaaggacacctatgacgccctgcacatgcaggccctgcctccaaga

SEQ ID NO: 26616 - DNA, 1293 bp, synthetic construct
  source 1..1293: mol_type = other DNA
gaggacctgaagaacgtgttcccacctgaggtggccgtgttcgagcctagcgaggccgagatcagccacacccagaaagccaccctcgtgtgcctggctaccggcttctaccccgaccatgtggaactgtcttggtgggtcaacggcaaagaggtgcacagcggcgtgtctaccgacccccagccactgaaagaacagcccgccctgaacgacagccggtactgcctgagcagcagactgagagtgtccgccaccttctggcagaacccccggaaccacttcagatgccaggtgcagttctacggcctgagcgagaacgacgagtggacccaggacagagccaagcccgtgacccagatcgtgtctgccgaagcctggggcagagccgattgcggatcccagagcttcggcctgctggaccccaagctgtgctacctgctggatggcatcctgttcatctacggcgtgatcctgaccgccctgttcctgagagtgaagttcagcagaagcgccgacgcccctgcctaccagcagggacagaaccaactgtacaacgagctgaacctgggcagacgggaagagtacgacgtgctggacaagcggagaggcagggaccctgagatgggcggaaagccccagcggagaaagaacccccaggaaggactgtataacgaactccagaaagacaagatggccgaagcctacagcgagatcggcatgaagggcgagcggagaagaggcaagggccacgatggcctgtaccagggcctgagcaccgccaccaaggacacctatgacgccctgcacatgcaggccctgcctccaagaaaacggggcagaaagaaactcctgtatatattcaaacaaccatttatgagaccagtacaaactactcaagaggaagatggctgtagctgccgatttccagaagaagaagaaggaggatgtgaactgagagtgaagttcagcagaagcgccgacgcccctgcctaccagcagggacagaaccaactgtacaacgagctgaacctgggcagacgggaagagtacgacgtgctggacaagcggagaggcagggaccctgagatgggcggaaagccccagcggagaaagaacccccaggaaggactgtataacgaactccagaaagacaagatggccgaagcctacagcgagatcggcatgaagggcgagcggagaagaggcaagggccacgatggcctgtaccagggcctgagcaccgccaccaaggacacctatgacgccctgcacatgcaggccctgcctccaaga

SEQ ID NO: 26617 - DNA, 1272 bp, synthetic construct
  source 1..1272: mol_type = other DNA
  misc_feature 540: note = n is a, c, g, or t
gggtgtccagccctacccacaggtgtgggcggcacaccctttccttctctggccccaccaatcatgctgctggtggatggaaagcagcagatggtggtggtctgcctggtccttgatgttgcaccccctggccttgacagccccatctggttctcagccggcaatggcagtgcactggatgccttcacctatggcccttccccagcaacggatggcacctggaccaacttggcccatctctccctgccttctgaggagctggcatcctgggagcctttggtctgccacactgggcctggggctgagggtcacagcaggagtacacagcccatgcatctgtcaggagaggcttctacagccaggacctgcccccaggagcctctcagggggacaccgggtggggcgctgtggctgggggtcctgcggctgctgctcttcaagctgctgctgtttgacctgctcctgacctgcagctgcctgtgcgaccccgcgggcccgctgccttcccccgcaaccaccacccgcctgcgagccctcggntcccatcgactgcacccggccacggagactgggggacgagaggccaccagctcacccagaccccagcctcgggaccgccgctggggtgacacccctccgggtcggaagcccgggagcccagtatggggggaagggtcttacctcagcagttaccccacttgcccagcacaggcctggtgctcaagatctcgcctcagggctccttcctccagtcttggagcattttttgcaggtgacctgcctcctcctctgcaggctggagctgccaaacggggcagaaagaaactcctgtatatattcaaacaaccatttatgagaccagtacaaactactcaagaggaagatggctgtagctgccgatttccagaagaagaagaaggaggatgtgaactgagagtgaagttcagcagaagcgccgacgcccctgcctaccagcagggacagaaccaactgtacaacgagctgaacctgggcagacgggaagagtacgacgtgctggacaagcggagaggcagggaccctgagatgggcggaaagccccagcggagaaagaacccccaggaaggactgtataacgaactccagaaagacaagatggccgaagcctacagcgagatcggcatgaagggcgagcggagaagaggcaagggccacgatggcctgtaccagggcctgagcaccgccaccaaggacacctatgacgccctgcacatgcaggccctgcctccaaga

SEQ ID NO: 26618 - DNA, 1239 bp, synthetic construct
  source 1..1239: mol_type = other DNA
accccattcccttctctggcccctcccatcatgctgctggtggacggcaagcagcagatggtggtcgtgtgcctggtgctggatgtggccccacctggactggacagccccatctggtttagcgccggcaatggctctgccctggacgcctttacctacggcccaagccctgccaccgatggcacctggacaaatctggcccacctgagcctgcccagcgaggaactggcttcttgggagcctctcgtgtgccacacaggacctggcgctgagggacacagcagatccacccagcctatgcacctgtctggcgaggccagcaccgccagaacctgtcctcaggaacctctgagaggcacccctggcggagcactgtggctgggagtgctgagactgctgctgttcaagctgctgctgtttgacctgctgctgacctgctcctgtctgtgcgatcctgccggccctctgccttctcctgccaccaccacaagactgagagccctgggcagccacagactgcaccctgccacagagacaggcggcagagaggccacaagcagccctagaccccagcccagagacagaagatggggcgataccccccctggcagaaagcctggatctccagtgtggggcgagggcagctacctgagcagctaccctacatgccctgcccaggcttggtgcagcagaagcgcactgagagcacccagctctagcctgggagccttctttgccggcgatctgcctccaccactccaggctggcgctgctaaacggggcagaaagaaactcctgtatatattcaaacaaccatttatgagaccagtacaaactactcaagaggaagatggctgtagctgccgatttccagaagaagaagaaggaggatgtgaactgagagtgaagttcagcagaagcgccgacgcccctgcctaccagcagggacagaaccaactgtacaacgagctgaacctgggcagacgggaagagtacgacgtgctggacaagcggagaggcagggaccctgagatgggcggaaagccccagcggagaaagaacccccaggaaggactgtataacgaactccagaaagacaagatggccgaagcctacagcgagatcggcatgaagggcgagcggagaagaggcaagggccacgatggcctgtaccagggcctgagcaccgccaccaaggacacctatgacgccctgcacatgcaggccctgcctccaaga

SEQ ID NO: 26619 - DNA, 1095 bp, synthetic construct
  source 1..1095: mol_type = other DNA
accccattcccttctctggcccctcccatcatgctgctggtggacggcaagcagcagatggtggtcgtgtgcctggtgctggatgtggccccacctggactggacagccccatctggtttagcgccggcaatggctctgccctggacgcctttacctacggcccaagccctgccaccgatggcacctggacaaatctggcccacctgagcctgcccagcgaggaactggcttcttgggagcctctcgtgtgccacacaggacctggcgctgagggacacagcagatccacccagcctatgcacctgtctggcgaggccagcaccgccagaacctgtcctcaggaacctctgagaggcacccctggcggagcactgtggctgggagtgctgagactgctgctgttcaagctgctgctgtttgacctgctgctgacctgctcctgtctgtgcgatcctgccggccctctgccttctcctgccaccaccacaagactgagagccctgggcagccacagactgcaccctgccacagagacaggcggcagagaggccacaagcagccctagaccccagcccagagacagaagatggggcgataccccccctggcagaaagcctggatctccagtcaaacggggcagaaagaaactcctgtatatattcaaacaaccatttatgagaccagtacaaactactcaagaggaagatggctgtagctgccgatttccagaagaagaagaaggaggatgtgaactgagagtgaagttcagcagaagcgccgacgcccctgcctaccagcagggacagaaccaactgtacaacgagctgaacctgggcagacgggaagagtacgacgtgctggacaagcggagaggcagggaccctgagatgggcggaaagccccagcggagaaagaacccccaggaaggactgtataacgaactccagaaagacaagatggccgaagcctacagcgagatcggcatgaagggcgagcggagaagaggcaagggccacgatggcctgtaccagggcctgagcaccgccaccaaggacacctatgacgccctgcacatgcaggccctgcctccaaga

SEQ ID NO: 26620 - DNA, 1032 bp, synthetic construct
  source 1..1032: mol_type = other DNA
gataaacaacttgatgcagatgtttcccccaagcccactatttttcttccttcaattgctgaaacaaaactccagaaggctggaacatacctttgtcttcttgagaaatttttcccagatattattaagatacattggcaagaaaagaagagcaacacgattctgggatcccaggaggggaacaccatgaagactaacgacacatacatgaaatttagctggttaacggtgccagaagagtcactggacaaagaacacagatgtatcgtcagacatgagaataataaaaacggaattgatcaagaaattatctttcctccaataaagacagatgtcaccacagtggatcccaaatacaattattcaaaggatgcaaatgatgtcatcacaatggatcccaaagacaattggtcaaaagatgcaaatgatacactactgctgcagctcacaaacacctctgcatattacatgtacctcctcctgctcctcaagagtgtggtctattttgccatcatcacctgctgtctgcttggaagaacggctttctgctgcaatggagagaaatcaaaacggggcagaaagaaactcctgtatatattcaaacaaccatttatgagaccagtacaaactactcaagaggaagatggctgtagctgccgatttccagaagaagaagaaggaggatgtgaactgagagtgaagttcagcagaagcgccgacgcccctgcctaccagcagggacagaaccaactgtacaacgagctgaacctgggcagacgggaagagtacgacgtgctggacaagcggagaggcagggaccctgagatgggcggaaagccccagcggagaaagaacccccaggaaggactgtataacgaactccagaaagacaagatggccgaagcctacagcgagatcggcatgaagggcgagcggagaagaggcaagggccacgatggcctgtaccagggcctgagcaccgccaccaaggacacctatgacgccctgcacatgcaggccctgcctccaaga

SEQ ID NO: 26621 - DNA, 984 bp, synthetic construct
  source 1..984: mol_type = other DNA
gacaagcagctggacgccgacgtgtcccccaagcctaccatcttcctgccctctatcgccgagacaaagctccagaaggccggcacctacctgtgcctgctggaaaagttcttcccagatgtgattaagatccactggcaggaaaagaagtccaacaccatcctgggcagccaggaaggcaacaccatgaagaccaacgacacctacatgaagttcagctggctgaccgtgcccgagaagtccctggacaaagaacacagatgcatcgtgcggcacgaaaacaacaagaacggcgtggaccaggaaatcatcttcccacccatcaagaccgatgtgattacaatggaccccaaggacaactgctccaaggacgccaacgataccctgctgctccagctgaccaacaccagcgcctactacatgtacttgttgctgctgctgaagtccgtggtgtacttcgccatcatcacatgctgcctgctgcggagaaccgccttctgctgcaacggcgagaagtctaaacggggcagaaagaaactcctgtatatattcaaacaaccatttatgagaccagtacaaactactcaagaggaagatggctgtagctgccgatttccagaagaagaagaaggaggatgtgaactgagagtgaagttcagcagaagcgccgacgcccctgcctaccagcagggacagaaccaactgtacaacgagctgaacctgggcagacgggaagagtacgacgtgctggacaagcggagaggcagggaccctgagatgggcggaaagccccagcggagaaagaacccccaggaaggactgtataacgaactccagaaagacaagatggccgaagcctacagcgagatcggcatgaagggcgagcggagaagaggcaagggccacgatggcctgtaccagggcctgagcaccgccaccaaggacacctatgacgccctgcacatgcaggccctgcctccaaga

SEQ ID NO: 26622 - DNA, 924 bp, synthetic construct
  source 1..924: mol_type = other DNA
agtcagcctcataccaaaccatccgtttttgtcatgaaaaatggaacaaatgtcgcttgtctggtgaaggaattctaccccaaggatataagaataaatctcgtgtcatccaagaagataacagagtttgatcctgctattgtcatctctcccagtgggaagtacaatgctgtcaagcttggtaaatatgaagattcaaattcagtgacatgttcagttcaacacgacaataaaactgtgcactccactgactttgaagtgaagacagattctacagatcacgtaaaaccaaaggaaactgaaaacacaaagcaaccttcaaagagctgccataaacccaaagccatagttcataccgagaaggtgaacatgatgtccctcacagtgcttgggctacgaatgctgtttgcaaagactgttgccgtcaattttctcttgactgccaagttatttttcttgaaacggggcagaaagaaactcctgtatatattcaaacaaccatttatgagaccagtacaaactactcaagaggaagatggctgtagctgccgatttccagaagaagaagaaggaggatgtgaactgagagtgaagttcagcagaagcgccgacgcccctgcctaccagcagggacagaaccaactgtacaacgagctgaacctgggcagacgggaagagtacgacgtgctggacaagcggagaggcagggaccctgagatgggcggaaagccccagcggagaaagaacccccaggaaggactgtataacgaactccagaaagacaagatggccgaagcctacagcgagatcggcatgaagggcgagcggagaagaggcaagggccacgatggcctgtaccagggcctgagcaccgccaccaaggacacctatgacgccctgcacatgcaggccctgcctccaaga

SEQ ID NO: 26623 - DNA, 924 bp, synthetic construct
  source 1..924: mol_type = other DNA
agccagcctcacaccaagcccagcgtgttcgtgatgaagaacggcaccaacgtggcctgcctcgtgaaagagttctaccccaaggacatcaggatcaacctggtgtccagcaagaagatcaccgagttcgaccccgccatcgtgatctcccccagcggcaagtacaacgccgtgaagctggggaagtacgaggacagcaacagcgtgacctgctccgtgcagcacgacaacaagaccgtgcacagcaccgactttgaagtgaaaaccgactccaccgaccacgtgaagcccaaagagacagagaacaccaagcagcccagcaagagctgccacaagcccaaggccatcgtgcacaccgagaaagtgaacatgatgagcctgaccgtgctgggcctgcggatgctgttcgccaaaaccgtggccgtgaacttcctgctgaccgccaagctgttcttcctcaaacggggcagaaagaaactcctgtatatattcaaacaaccatttatgagaccagtacaaactactcaagaggaagatggctgtagctgccgatttccagaagaagaagaaggaggatgtgaactgagagtgaagttcagcagaagcgccgacgcccctgcctaccagcagggacagaaccaactgtacaacgagctgaacctgggcagacgggaagagtacgacgtgctggacaagcggagaggcagggaccctgagatgggcggaaagccccagcggagaaagaacccccaggaaggactgtataacgaactccagaaagacaagatggccgaagcctacagcgagatcggcatgaagggcgagcggagaagaggcaagggccacgatggcctgtaccagggcctgagcaccgccaccaaggacacctatgacgccctgcacatgcaggccctgcctccaaga

SEQ ID NO: 26624 - DNA, 786 bp, synthetic construct
  source 1..786: mol_type = other DNA
atccagaaccctgatcctgccgtgtacatcaccgataagaccgtgctggacatgcggagcatggacttcaagagcaactccgccgtggcctggtccaacaagtccgatttcgcctgcgccaacgccttcaacaacagcattatccccgaggacacattcttcccaagccccgagagcagctgcgacgtgaagctggtggaaaagagcttcgagacagacaccaacctgaacttccagaacctgagcgtgatcggcttcagaatcctgctgctgaaagtggccggctttaacctgctgatgaccctgcggctgtggtccagcaaacggggcagaaagaaactcctgtatatattcaaacaaccatttatgagaccagtacaaactactcaagaggaagatggctgtagctgccgatttccagaagaagaagaaggaggatgtgaactgagagtgaagttcagcagaagcgccgacgcccctgcctaccagcagggacagaaccaactgtacaacgagctgaacctgggcagacgggaagagtacgacgtgctggacaagcggagaggcagggaccctgagatgggcggaaagccccagcggagaaagaacccccaggaaggactgtataacgaactccagaaagacaagatggccgaagcctacagcgagatcggcatgaagggcgagcggagaagaggcaagggccacgatggcctgtaccagggcctgagcaccgccaccaaggacacctatgacgccctgcacatgcaggccctgcctccaaga

SEQ ID NO: 26625 - DNA, 1002 bp, synthetic construct
  source 1..1002: mol_type = other DNA
gaggacctgaagaacgtgttcccacctgaggtggccgtgttcgagcctagcagggccgagatcagccacacccagaaagccaccctcgtgtgcctggctaccggcttctaccccgaccatgtggaactgtcttggtgggtcaacggcaaagaggtgcacagcggcgtgtgtaccgacccccagccactgaaagaacagcccgccctgaacgacagccggtactgcctgagcagcagactgagagtgtccgccaccttctggcagaacccccggaaccacttcagatgccaggtgcagttctacggcctgagcgagaacgacgagtggacccaggacagagccaagcccgtgacccagatcgtgtctgccgaagcctggggcagagccgattgcggctttaccagcgagagctaccagcagggcgtgctgagcgccaccatcctgtacgagatcctgctgggcaaggccaccctgtacgccgtgctggtgtctgccctggtgctgatggctatggtcaagcggaaggacagccggggaaaacggggcagaaagaaactcctgtatatattcaaacaaccatttatgagaccagtacaaactactcaagaggaagatggctgtagctgccgatttccagaagaagaagaaggaggatgtgaactgagagtgaagttcagcagaagcgccgacgcccctgcctaccagcagggacagaaccaactgtacaacgagctgaacctgggcagacgggaagagtacgacgtgctggacaagcggagaggcagggaccctgagatgggcggaaagccccagcggagaaagaacccccaggaaggactgtataacgaactccagaaagacaagatggccgaagcctacagcgagatcggcatgaagggcgagcggagaagaggcaagggccacgatggcctgtaccagggcctgagcaccgccaccaaggacacctatgacgccctgcacatgcaggccctgcctccaaga

SEQ ID NO: 26626 - DNA, 1002 bp, synthetic construct
  source 1..1002: mol_type = other DNA
gaggacctgaagaacgtgttcccacctgaggtggccgtgttcgagcctagcagggccgagatcgcccacacccagaaagccaccctcgtgtgcctggctaccggcttctaccccgaccatgtggaactgtcttggtgggtcaacggcaaagaggtgcacagcggcgtgtgtaccgacccccagccactgaaagaacagcccgccctgaacgacagccggtactgcctgagcagcagactgagagtgtccgccaccttctggcagaacccccggaaccacttcagatgccaggtgcagttctacggcctgagcgagaacgacgagtggacccaggacagagccaagcccgtgacccagatcgtgtctgccgaagcctggggcagagccgattgcggctttaccagcgagagctaccagcagggcgtgctgagcgccaccatcctgtacgagatcctgctgggcaaggccaccctgtacgccgtgctggtgtctgccctggtgctgatggctatggtcaagcggaaggacagccggggaaaacggggcagaaagaaactcctgtatatattcaaacaaccatttatgagaccagtacaaactactcaagaggaagatggctgtagctgccgatttccagaagaagaagaaggaggatgtgaactgagagtgaagttcagcagaagcgccgacgcccctgcctaccagcagggacagaaccaactgtacaacgagctgaacctgggcagacgggaagagtacgacgtgctggacaagcggagaggcagggaccctgagatgggcggaaagccccagcggagaaagaacccccaggaaggactgtataacgaactccagaaagacaagatggccgaagcctacagcgagatcggcatgaagggcgagcggagaagaggcaagggccacgatggcctgtaccagggcctgagcaccgccaccaaggacacctatgacgccctgcacatgcaggccctgcctccaaga

SEQ ID NO: 26627 - DNA, 645 bp, synthetic construct
  source 1..645: mol_type = other DNA
atccccgaggacacattcttcccaagccccgagagcagctgcgacgtgaagctggtggaaaagagcttcgagacagacaccaacctgaacttccagaacctgagcgtgatcggcttcagaatcctgctgctgaaagtggccggctttaacctgctgatgaccctgcggctgtggtccagcaaacggggcagaaagaaactcctgtatatattcaaacaaccatttatgagaccagtacaaactactcaagaggaagatggctgtagctgccgatttccagaagaagaagaaggaggatgtgaactgagagtgaagttcagcagaagcgccgacgcccctgcctaccagcagggacagaaccaactgtacaacgagctgaacctgggcagacgggaagagtacgacgtgctggacaagcggagaggcagggaccctgagatgggcggaaagccccagcggagaaagaacccccaggaaggactgtataacgaactccagaaagacaagatggccgaagcctacagcgagatcggcatgaagggcgagcggagaagaggcaagggccacgatggcctgtaccagggcctgagcaccgccaccaaggacacctatgacgccctgcacatgcaggccctgcctccaaga

SEQ ID NO: 26628 - DNA, 615 bp, synthetic construct
  source 1..615: mol_type = other DNA
gagagcagctgcgacgtgaagctggtggaaaagagcttcgagacagacaccaacctgaacttccagaacctgagcgtgatcggcttcagaatcctgctgctgaaagtggccggctttaacctgctgatgaccctgcggctgtggtccagcaaacggggcagaaagaaactcctgtatatattcaaacaaccatttatgagaccagtacaaactactcaagaggaagatggctgtagctgccgatttccagaagaagaagaaggaggatgtgaactgagagtgaagttcagcagaagcgccgacgcccctgcctaccagcagggacagaaccaactgtacaacgagctgaacctgggcagacgggaagagtacgacgtgctggacaagcggagaggcagggaccctgagatgggcggaaagccccagcggagaaagaacccccaggaaggactgtataacgaactccagaaagacaagatggccgaagcctacagcgagatcggcatgaagggcgagcggagaagaggcaagggccacgatggcctgtaccagggcctgagcaccgccaccaaggacacctatgacgccctgcacatgcaggccctgcctccaaga

SEQ ID NO: 26629 - DNA, 1002 bp, synthetic construct; identical to SEQ ID NO: 26598
  source 1..1002: mol_type = other DNA

SEQ ID NO: 26630 - DNA, 810 bp, synthetic construct
  source 1..810: mol_type = other DNA
gaacagcccgccctgaacgacagccggtactgcctgagcagcagactgagagtgtccgccaccttctggcagaacccccggaaccacttcagatgccaggtgcagttctacggcctgagcgagaacgacgagtggacccaggacagagccaagcccgtgacccagatcgtgtctgccgaagcctggggcagagccgattgcggctttaccagcgagagctaccagcagggcgtgctgagcgccaccatcctgtacgagatcctgctgggcaaggccaccctgtacgccgtgctggtgtctgccctggtgctgatggctatggtcaagcggaaggacagccggggaaaacggggcagaaagaaactcctgtatatattcaaacaaccatttatgagaccagtacaaactactcaagaggaagatggctgtagctgccgatttccagaagaagaagaaggaggatgtgaactgagagtgaagttcagcagaagcgccgacgcccctgcctaccagcagggacagaaccaactgtacaacgagctgaacctgggcagacgggaagagtacgacgtgctggacaagcggagaggcagggaccctgagatgggcggaaagccccagcggagaaagaacccccaggaaggactgtataacgaactccagaaagacaagatggccgaagcctacagcgagatcggcatgaagggcgagcggagaagaggcaagggccacgatggcctgtaccagggcctgagcaccgccaccaaggacacctatgacgccctgcacatgcaggccctgcctccaaga

SEQ ID NO: 26631 - DNA, 624 bp, synthetic construct
  source 1..624: mol_type = other DNA
ggcagagccgattgcggctttaccagcgagagctaccagcagggcgtgctgagcgccaccatcctgtacgagatcctgctgggcaaggccaccctgtacgccgtgctggtgtctgccctggtgctgatggctatggtcaagcggaaggacagccggggaaaacggggcagaaagaaactcctgtatatattcaaacaaccatttatgagaccagtacaaactactcaagaggaagatggctgtagctgccgatttccagaagaagaagaaggaggatgtgaactgagagtgaagttcagcagaagcgccgacgcccctgcctaccagcagggacagaaccaactgtacaacgagctgaacctgggcagacgggaagagtacgacgtgctggacaagcggagaggcagggaccctgagatgggcggaaagccccagcggagaaagaacccccaggaaggactgtataacgaactccagaaagacaagatggccgaagcctacagcgagatcggcatgaagggcgagcggagaagaggcaagggccacgatggcctgtaccagggcctgagcaccgccaccaaggacacctatgacgccctgcacatgcaggccctgcctccaaga

SEQ ID NO: 26632 - DNA, 618 bp, synthetic construct
  source 1..618: mol_type = other DNA
gccgattgcggctttaccagcgagagctaccagcagggcgtgctgagcgccaccatcctgtacgagatcctgctgggcaaggccaccctgtacgccgtgctggtgtctgccctggtgctgatggctatggtcaagcggaaggacagccggggaaaacggggcagaaagaaactcctgtatatattcaaacaaccatttatgagaccagtacaaactactcaagaggaagatggctgtagctgccgatttccagaagaagaagaaggaggatgtgaactgagagtgaagttcagcagaagcgccgacgcccctgcctaccagcagggacagaaccaactgtacaacgagctgaacctgggcagacgggaagagtacgacgtgctggacaagcggagaggcagggaccctgagatgggcggaaagccccagcggagaaagaacccccaggaaggactgtataacgaactccagaaagacaagatggccgaagcctacagcgagatcggcatgaagggcgagcggagaagaggcaagggccacgatggcctgtaccagggcctgagcaccgccaccaaggacacctatgacgccctgcacatgcaggccctgcctccaaga

SEQ ID NO: 26633 - DNA, 984 bp, synthetic construct; identical to SEQ ID NO: 26621
  source 1..984: mol_type = other DNA

SEQ ID NO: 26634 - DNA, 969 bp, synthetic construct
  source 1..969: mol_type = other DNA
gccgacgtgtcccccaagcctaccatcttcctgccctctatcgccgagacaaagctccagaaggccggcacctacctgtgcctgctggaaaagttcttcccagatgtgattaagatccactggcaggaaaagaagtccaacaccatcctgggcagccaggaaggcaacaccatgaagaccaacgacacctacatgaagttcagctggctgaccgtgcccgagaagtccctggacaaagaacacagatgcatcgtgcggcacgaaaacaacaagaacggcgtggaccaggaaatcatcttcccacccatcaagaccgatgtgattacaatggaccccaaggacaactgctccaaggacgccaacgataccctgctgctccagctgaccaacaccagcgcctactacatgtacttgttgctgctgctgaagtccgtggtgtacttcgccatcatcacatgctgcctgctgcggagaaccgccttctgctgcaacggcgagaagtctaaacggggcagaaagaaactcctgtatatattcaaacaaccatttatgagaccagtacaaactactcaagaggaagatggctgtagctgccgatttccagaagaagaagaaggaggatgtgaactgagagtgaagttcagcagaagcgccgacgcccctgcctaccagcagggacagaaccaactgtacaacgagctgaacctgggcagacgggaagagtacgacgtgctggacaagcggagaggcagggaccctgagatgggcggaaagccccagcggagaaagaacccccaggaaggactgtataacgaactccagaaagacaagatggccgaagcctacagcgagatcggcatgaagggcgagcggagaagaggcaagggccacgatggcctgtaccagggcctgagcaccgccaccaaggacacctatgacgccctgcacatgcaggccctgcctccaaga

SEQ ID NO: 26635 - DNA, 963 bp, synthetic construct
  source 1..963: mol_type = other DNA
gtgtcccccaagcctaccatcttcctgccctctatcgccgagacaaagctccagaaggccggcacctacctgtgcctgctggaaaagttcttcccagatgtgattaagatccactggcaggaaaagaagtccaacaccatcctgggcagccaggaaggcaacaccatgaagaccaacgacacctacatgaagttcagctggctgaccgtgcccgagaagtccctggacaaagaacacagatgcatcgtgcggcacgaaaacaacaagaacggcgtggaccaggaaatcatcttcccacccatcaagaccgatgtgattacaatggaccccaaggacaactgctccaaggacgccaacgataccctgctgctccagctgaccaacaccagcgcctactacatgtacttgttgctgctgctgaagtccgtggtgtacttcgccatcatcacatgctgcctgctgcggagaaccgccttctgctgcaacggcgagaagtctaaacggggcagaaagaaactcctgtatatattcaaacaaccatttatgagaccagtacaaactactcaagaggaagatggctgtagctgccgatttccagaagaagaagaaggaggatgtgaactgagagtgaagttcagcagaagcgccgacgcccctgcctaccagcagggacagaaccaactgtacaacgagctgaacctgggcagacgggaagagtacgacgtgctggacaagcggagaggcagggaccctgagatgggcggaaagccccagcggagaaagaacccccaggaaggactgtataacgaactccagaaagacaagatggccgaagcctacagcgagatcggcatgaagggcgagcggagaagaggcaagggccacgatggcctgtaccagggcctgagcaccgccaccaaggacacctatgacgccctgcacatgcaggccctgcctccaaga

SEQ ID NO: 26636 - DNA, 948 bp, synthetic construct
  source 1..948: mol_type = other DNA
accatcttcctgccctctatcgccgagacaaagctccagaaggccggcacctacctgtgcctgctggaaaagttcttcccagatgtgattaagatccactggcaggaaaagaagtccaacaccatcctgggcagccaggaaggcaacaccatgaagaccaacgacacctacatgaagttcagctggctgaccgtgcccgagaagtccctggacaaagaacacagatgcatcgtgcggcacgaaaacaacaagaacggcgtggaccaggaaatcatcttcccacccatcaagaccgatgtgattacaatggaccccaaggacaactgctccaaggacgccaacgataccctgctgctccagctgaccaacaccagcgcctactacatgtacttgttgctgctgctgaagtccgtggtgtacttcgccatcatcacatgctgcctgctgcggagaaccgccttctgctgcaacggcgagaagtctaaacggggcagaaagaaactcctgtatatattcaaacaaccatttatgagaccagtacaaactactcaagaggaagatggctgtagctgccgatttccagaagaagaagaaggaggatgtgaactgagagtgaagttcagcagaagcgccgacgcccctgcctaccagcagggacagaaccaactgtacaacgagctgaacctgggcagacgggaagagtacgacgtgctggacaagcggagaggcagggaccctgagatgggcggaaagccccagcggagaaagaacccccaggaaggactgtataacgaactccagaaagacaagatggccgaagcctacagcgagatcggcatgaagggcgagcggagaagaggcaagggccacgatggcctgtaccagggcctgagcaccgccaccaaggacacctatgacgccctgcacatgcaggccctgcctccaaga

SEQ ID NO: 26637 - DNA, 666 bp, synthetic construct
  source 1..666: mol_type = other DNA
cccatcaagaccgatgtgattacaatggaccccaaggacaactgctccaaggacgccaacgataccctgctgctccagctgaccaacaccagcgcctactacatgtacttgttgctgctgctgaagtccgtggtgtacttcgccatcatcacatgctgcctgctgcggagaaccgccttctgctgcaacggcgagaagtctaaacggggcagaaagaaactcctgtatatattcaaacaaccatttatgagaccagtacaaactactcaagaggaagatggctgtagctgccgatttccagaagaagaagaaggaggatgtgaactgagagtgaagttcagcagaagcgccgacgcccctgcctaccagcagggacagaaccaactgtacaacgagctgaacctgggcagacgggaagagtacgacgtgctggacaagcggagaggcagggaccctgagatgggcggaaagccccagcggagaaagaacccccaggaaggactgtataacgaactccagaaagacaagatggccgaagcctacagcgagatcggcatgaagggcgagcggagaagaggcaagggccacgatggcctgtaccagggcctgagcaccgccaccaaggacacctatgacgccctgcacatgcaggccctgcctccaaga

SEQ ID NO: 26638 - DNA, 642 bp, synthetic construct
  source 1..642: mol_type = other DNA
atggaccccaaggacaactgctccaaggacgccaacgataccctgctgctccagctgaccaacaccagcgcctactacatgtacttgttgctgctgctgaagtccgtggtgtacttcgccatcatcacatgctgcctgctgcggagaaccgccttctgctgcaacggcgagaagtctaaacggggcagaaagaaactcctgtatatattcaaacaaccatttatgagaccagtacaaactactcaagaggaagatggctgtagctgccgatttccagaagaagaagaaggaggatgtgaactgagagtgaagttcagcagaagcgccgacgcccctgcctaccagcagggacagaaccaactgtacaacgagctgaacctgggcagacgggaagagtacgacgtgctggacaagcggagaggcagggaccctgagatgggcggaaagccccagcggagaaagaacccccaggaaggactgtataacgaactccagaaagacaagatggccgaagcctacagcgagatcggcatgaagggcgagcggagaagaggcaagggccacgatggcctgtaccagggcctgagcaccgccaccaaggacacctatgacgccctgcacatgcaggccctgcctccaaga

SEQ ID NO: 26639 - DNA, 924 bp, synthetic construct; identical to SEQ ID NO: 26623
  source 1..924: mol_type = other DNA

SEQ ID NO: 26640 - DNA, 669 bp, synthetic construct
  source 1..669: mol_type = other DNA
gaagtgaaaaccgactccaccgaccacgtgaagcccaaagagacagagaacaccaagcagcccagcaagagctgccacaagcccaaggccatcgtgcacaccgagaaagtgaacatgatgagcctgaccgtgctgggcctgcggatgctgttcgccaaaaccgtggccgtgaacttcctgctgaccgccaagctgttcttcctcaaacggggcagaaagaaactcctgtatatattcaaacaaccatttatgagaccagtacaaactactcaagaggaagatggctgtagctgccgatttccagaagaagaagaaggaggatgtgaactgagagtgaagttcagcagaagcgccgacgcccctgcctaccagcagggacagaaccaactgtacaacgagctgaacctgggcagacgggaagagtacgacgtgctggacaagcggagaggcagggaccctgagatgggcggaaagccccagcggagaaagaacccccaggaaggactgtataacgaactccagaaagacaagatggccgaagcctacagcgagatcggcatgaagggcgagcggagaagaggcaagggccacgatggcctgtaccagggcctgagcaccgccaccaaggacacctatgacgccctgcacatgcaggccctgcctccaaga

SEQ ID NO: 26641 - DNA, 648 bp, synthetic construct
  source 1..648: mol_type = other DNA
gaccacgtgaagcccaaagagacagagaacaccaagcagcccagcaagagctgccacaagcccaaggccatcgtgcacaccgagaaagtgaacatgatgagcctgaccgtgctgggcctgcggatgctgttcgccaaaaccgtggccgtgaacttcctgctgaccgccaagctgttcttcctcaaacggggcagaaagaaactcctgtatatattcaaacaaccatttatgagaccagtacaaactactcaagaggaagatggctgtagctgccgatttccagaagaagaagaaggaggatgtgaactgagagtgaagttcagcagaagcgccgacgcccctgcctaccagcagggacagaaccaactgtacaacgagctgaacctgggcagacgggaagagtacgacgtgctggacaagcggagaggcagggaccctgagatgggcggaaagccccagcggagaaagaacccccaggaaggactgtataacgaactccagaaagacaagatggccgaagcctacagcgagatcggcatgaagggcgagcggagaagaggcaagggccacgatggcctgtaccagggcctgagcaccgccaccaaggacacctatgacgccctgcacatgcaggccctgcctccaaga

SEQ ID NO: 26642 - DNA, 996 bp, synthetic construct
  source 1..996: mol_type = other DNA
gaggacctgaagaacgtgttcccacctgaggtggccgtgttcgagcctagcgaggccgagatcagccacacccagaaagccaccctcgtgtgcctggctaccggcttctaccccgaccatgtggaactgtcttggtgggtcaacggcaaagaggtgcacagcggcgtgtgtaccgacccccagccactgaaagaacagcccgccctgaacgacagccggtactgcctgagcagcagactgagagtgtccgccaccttctggcagaacccccggaaccacttcagatgccaggtgcagttctacggcctgagcgagaacgacgagtggacccaggacagagccaagcccgtgacccagatcgtgtctgccgaagcctggggcagagccgattgcgacgtgaagctggtggaaaagagcttcgagacagacaccaacctgaacttccagaacctgagcgtgatcggcttcagaatcctgctgctgaaagtggccggctttaacctgctgatgaccctgcggctgtggtccagcaaacggggcagaaagaaactcctgtatatattcaaacaaccatttatgagaccagtacaaactactcaagaggaagatggctgtagctgccgatttccagaagaagaagaaggaggatgtgaactgagagtgaagttcagcagaagcgccgacgcccctgcctaccagcagggacagaaccaactgtacaacgagctgaacctgggcagacgggaagagtacgacgtgctggacaagcggagaggcagggaccctgagatgggcggaaagccccagcggagaaagaacccccaggaaggactgtataacgaactccagaaagacaagatggccgaagcctacagcgagatcggcatgaagggcgagcggagaagaggcaagggccacgatggcctgtaccagggcctgagcaccgccaccaaggacacctatgacgccctgcacatgcaggccctgcctccaaga

SEQ ID NO: 26643 - DNA, 891 bp, synthetic construct
  source 1..891: mol_type = other DNA
atccagaaccctgatcctgccgtgtaccagctgcgggatagcaagagcagcgacaagagcgtgtgtctgttcaccgacttcgacagccagaccaacgtgtcccagagcaaggactccgacgtgtacatcaccgataagtgcgtgctggacatgcggagcatggacttcaagagcaactccgccgtggcctggtccaacaagtccgatttcgcctgcgccaacgccttcaacaacagcattatccccgaggacacattcttcccaagccccgagagcagctgcggctttaccagcgagagctaccagcagggcgtgctgagcgccaccatcctgtacgagatcctgctgggcaaggccaccctgtacgccgtgctggtgtctgccctggtgctgatggctatggtcaagcggaaggacagccggggaaaacggggcagaaagaaactcctgtatatattcaaacaaccatttatgagaccagtacaaactactcaagaggaagatggctgtagctgccgatttccagaagaagaagaaggaggatgtgaactgagagtgaagttcagcagaagcgccgacgcccctgcctaccagcagggacagaaccaactgtacaacgagctgaacctgggcagacgggaagagtacgacgtgctggacaagcggagaggcagggaccctgagatgggcggaaagccccagcggagaaagaacccccaggaaggactgtataacgaactccagaaagacaagatggccgaagcctacagcgagatcggcatgaagggcgagcggagaagaggcaagggccacgatggcctgtaccagggcctgagcaccgccaccaaggacacctatgacgccctgcacatgcaggccctgcctccaaga

SEQ ID NO: 26644 - DNA, 987 bp, synthetic construct
  source 1..987: mol_type = other DNA
gaggacctgaagaacgtgttcccacctgaggtggccgtgttcgagcctagcgaggccgagatcagccacacccagaaagccaccctcgtgtgcctggctaccggcttctaccccgaccatgtggaactgtcttggtgggtcaacggcaaagaggtgcacagcggcgtgtgtaccgacccccagccactgaaagaacagcccgccctgaacgacagccggtactgcctgagcagcagactgagagtgtccgccaccttctggcagaacccccggaaccacttcagatgccaggtgcagttctacggcctgagcgagaacgacgagtggacccaggacagagccaagcccgtgacccagatcgtgtctgccgaagcctggggcagagccgattgcggctttaccagcgagagctaccagcagggcgtgctgagcgccaccaacctgagcgtgatcggcttcagaatcctgctgctgaaagtggccggctttaacctgctgatgaccctgcggctgtggtccagcaaacggggcagaaagaaactcctgtatatattcaaacaaccatttatgagaccagtacaaactactcaagaggaagatggctgtagctgccgatttccagaagaagaagaaggaggatgtgaactgagagtgaagttcagcagaagcgccgacgcccctgcctaccagcagggacagaaccaactgtacaacgagctgaacctgggcagacgggaagagtacgacgtgctggacaagcggagaggcagggaccctgagatgggcggaaagccccagcggagaaagaacccccaggaaggactgtataacgaactccagaaagacaagatggccgaagcctacagcgagatcggcatgaagggcgagcggagaagaggcaagggccacgatggcctgtaccagggcctgagcaccgccaccaaggacacctatgacgccctgcacatgcaggccctgcctccaaga

SEQ ID NO: 26645 - DNA, 900 bp, synthetic construct
  source 1..900: mol_type = other DNA
atccagaaccctgatcctgccgtgtaccagctgcgggatagcaagagcagcgacaagagcgtgtgtctgttcaccgacttcgacagccagaccaacgtgtcccagagcaaggactccgacgtgtacatcaccgataagtgcgtgctggacatgcggagcatggacttcaagagcaactccgccgtggcctggtccaacaagtccgatttcgcctgcgccaacgccttcaacaacagcattatccccgaggacacattcttcccaagccccgagagcagctgcgacgtgaagctggtggaaaagagcttcgagacagacaccaacctgaacttccagatcctgtacgagatcctgctgggcaaggccaccctgtacgccgtgctggtgtctgccctggtgctgatggctatggtcaagcggaaggacagccggggaaaacggggcagaaagaaactcctgtatatattcaaacaaccatttatgagaccagtacaaactactcaagaggaagatggctgtagctgccgatttccagaagaagaagaaggaggatgtgaactgagagtgaagttcagcagaagcgccgacgcccctgcctaccagcagggacagaaccaactgtacaacgagctgaacctgggcagacgggaagagtacgacgtgctggacaagcggagaggcagggaccctgagatgggcggaaagccccagcggagaaagaacccccaggaaggactgtataacgaactccagaaagacaagatggccgaagcctacagcgagatcggcatgaagggcgagcggagaagaggcaagggccacgatggcctgtaccagggcctgagcaccgccaccaaggacacctatgacgccctgcacatgcaggccctgcctccaaga

SEQ ID NO: 26646 - DNA, 945 bp, synthetic construct
  source 1..945: mol_type = other DNA
atccagaaccctgatcctgccgtgtaccagctgcgggatagcaagagcagcgacaagagcgtgtgtctgttcaccgacttcgacagccagaccaacgtgtcccagagcaaggactccgacgtgtacatcaccgataagtgcgtgctggacatgcggagcatggacttcaagagcaactccgccgtggcctggtccaacaagtccgatttcgcctgcgccaacgccttcaacaacagcattatccccgaggacacattcttcccaagccccgagagcagcgactccaccgaccacgtgaagcccaaagagacagagaacaccaagcagcccagcaagagctgccacaagcccaaggccatcgtgcacaccgagaaagtgaacatgatgagcctgaccgtgctgggcctgcggatgctgttcgccaaaaccgtggccgtgaacttcctgctgaccgccaagctgttcttcctcctcaccgccaaacggggcagaaagaaactcctgtatatattcaaacaaccatttatgagaccagtacaaactactcaagaggaagatggctgtagctgccgatttccagaagaagaagaaggaggatgtgaactgagagtgaagttcagcagaagcgccgacgcccctgcctaccagcagggacagaaccaactgtacaacgagctgaacctgggcagacgggaagagtacgacgtgctggacaagcggagaggcagggaccctgagatgggcggaaagccccagcggagaaagaacccccaggaaggactgtataacgaactccagaaagacaagatggccgaagcctacagcgagatcggcatgaagggcgagcggagaagaggcaagggccacgatggcctgtaccagggcctgagcaccgccaccaaggacacctatgacgccctgcacatgcaggccctgcctccaaga

SEQ ID NO: 26647 - DNA, 1254 bp, synthetic construct
  source 1..1254: mol_type = other DNA
gaggacctgaagaacgtgttcccacctgaggtggccgtgttcgagcctagcgaggccgagatcagccacacccagaaagccaccctcgtgtgcctggctaccggcttctaccccgaccatgtggaactgtcttggtgggtcaacggcaaagaggtgcacagcggcgtgtgtaccgacccccagccactgaaagaacagcccgccctgaacgacagccggtactgcctgagcagcagactgagagtgtccgccaccttctggcagaacccccggaaccacttcagatgccaggtgcagttctacggcctgagcgagaacgacgagtggacccaggacagagccaagcccgtgacccagatcgtgtctgccgaagcctggggcagagccgatgatgtgattaagatccactggcaggaaaagaagtccaacaccatcctgggcagccaggaaggcaacaccatgaagaccaacgacacctacatgaagttcagctggctgaccgtgcccgagaagtccctggacaaagaacacagatgcatcgtgcggcacgaaaacaacaagaacggcgtggaccaggaaatcatcttcccacccatcaagaccgatgtgattacaatggaccccaaggacaactgctccaaggacgccaacgataccctgctgctccagctgaccaacaccagcgcctactacatgtacttgttgctgctgctgaagtccgtggtgtacttcgccatcatcacatgctgcctgctgatggctatggtcaagcggaaggacagccggggaaaacggggcagaaagaaactcctgtatatattcaaacaaccatttatgagaccagtacaaactactcaagaggaagatggctgtagctgccgatttccagaagaagaagaaggaggatgtgaactgagagtgaagttcagcagaagcgccgacgcccctgcctaccagcagggacagaaccaactgtacaacgagctgaacctgggcagacgggaagagtacgacgtgctggacaagcggagaggcagggaccctgagatgggcggaaagccccagcggagaaagaacccccaggaaggactgtataacgaactccagaaagacaagatggccgaagcctacagcgagatcggcatgaagggcgagcggagaagaggcaagggccacgatggcctgtaccagggcctgagcaccgccaccaaggacacctatgacgccctgcacatgcaggccctgcctccaaga

SEQ ID NO: 26648 - DNA, 996 bp, synthetic construct
  source 1..996: mol_type = other DNA
gaggacctgaagaacgtgttcccacctgaggtggccgtgttcgagcctagcgaggccgagatcagccacacccagaaagccaccctcgtgtgcctggctaccggcttctaccccgaccatgtggaactgtcttggtgggtcaacggcaaagaggtgcacagcggcgtgtctaccgacccccagccactgaaagaacagcccgccctgaacgacagccggtactgcctgagcagcagactgagagtgtccgccaccttctggcagaacccccggaaccacttcagatgccaggtgcagttctacggcctgagcgagaacgacgagtggacccaggacagagccaagcccgtgacccagatcgtgtctgccgaagcctggggcagagccgattgcgacgtgaagctggtggaaaagagcttcgagacagacaccaacctgaacttccagaacctgagcgtgatcggcttcagaatcctgctgctgaaagtggccggctttaacctgctgatgaccctgcggctgtggtccagcaaacggggcagaaagaaactcctgtatatattcaaacaaccatttatgagaccagtacaaactactcaagaggaagatggctgtagctgccgatttccagaagaagaagaaggaggatgtgaactgagagtgaagttcagcagaagcgccgacgcccctgcctaccagcagggacagaaccaactgtacaacgagctgaacctgggcagacgggaagagtacgacgtgctggacaagcggagaggcagggaccctgagatgggcggaaagccccagcggagaaagaacccccaggaaggactgtataacgaactccagaaagacaagatggccgaagcctacagcgagatcggcatgaagggcgagcggagaagaggcaagggccacgatggcctgtaccagggcctgagcaccgccaccaaggacacctatgacgccctgcacatgcaggccctgcctccaaga

SEQ ID NO: 26649 - DNA, 891 bp, synthetic construct
  source 1..891: mol_type = other DNA
atccagaaccctgatcctgccgtgtaccagctgcgggatagcaagagcagcgacaagagcgtgtgtctgttcaccgacttcgacagccagaccaacgtgtcccagagcaaggactccgacgtgtacatcaccgataagaccgtgctggacatgcggagcatggacttcaagagcaactccgccgtggcctggtccaacaagtccgatttcgcctgcgccaacgccttcaacaacagcattatccccgaggacacattcttcccaagccccgagagcagctgcggctttaccagcgagagctaccagcagggcgtgctgagcgccaccatcctgtacgagatcctgctgggcaaggccaccctgtacgccgtgctggtgtctgccctggtgctgatggctatggtcaagcggaaggacagccggggaaaacggggcagaaagaaactcctgtatatattcaaacaaccatttatgagaccagtacaaactactcaagaggaagatggctgtagctgccgatttccagaagaagaagaaggaggatgtgaactgagagtgaagttcagcagaagcgccgacgcccctgcctaccagcagggacagaaccaactgtacaacgagctgaacctgggcagacgggaagagtacgacgtgctggacaagcggagaggcagggaccctgagatgggcggaaagccccagcggagaaagaacccccaggaaggactgtataacgaactccagaaagacaagatggccgaagcctacagcgagatcggcatgaagggcgagcggagaagaggcaagggccacgatggcctgtaccagggcctgagcaccgccaccaaggacacctatgacgccctgcacatgcaggccctgcctccaaga

SEQ ID NO: 26650 - DNA, 987 bp, synthetic construct
  source 1..987: mol_type = other DNA
gaggacctgaagaacgtgttcccacctgaggtggccgtgttcgagcctagcgaggccgagatcagccacacccagaaagccaccctcgtgtgcctggctaccggcttctaccccgaccatgtggaactgtcttggtgggtcaacggcaaagaggtgcacagcggcgtgtctaccgacccccagccactgaaagaacagcccgccctgaacgacagccggtactgcctgagcagcagactgagagtgtccgccaccttctggcagaacccccggaaccacttcagatgccaggtgcagttctacggcctgagcgagaacgacgagtggacccaggacagagccaagcccgtgacccagatcgtgtctgccgaagcctggggcagagccgattgcggctttaccagcgagagctaccagcagggcgtgctgagcgccaccaacctgagcgtgatcggcttcagaatcctgctgctgaaagtggccggctttaacctgctgatgaccctgcggctgtggtccagcaaacggggcagaaagaaactcctgtatatattcaaacaaccatttatgagaccagtacaaactactcaagaggaagatggctgtagctgccgatttccagaagaagaagaaggaggatgtgaactgagagtgaagttcagcagaagcgccgacgcccctgcctaccagcagggacagaaccaactgtacaacgagctgaacctgggcagacgggaagagtacgacgtgctggacaagcggagaggcagggaccctgagatgggcggaaagccccagcggagaaagaacccccaggaaggactgtataacgaactccagaaagacaagatggccgaagcctacagcgagatcggcatgaagggcgagcggagaagaggcaagggccacgatggcctgtaccagggcctgagcaccgccaccaaggacacctatgacgccctgcacatgcaggccctgcctccaaga

SEQ ID NO: 26651 - DNA, 900 bp, synthetic construct
  source 1..900: mol_type = other DNA
atccagaaccctgatcctgccgtgtaccagctgcgggatagcaagagcagcgacaagagcgtgtgtctgttcaccgacttcgacagccagaccaacgtgtcccagagcaaggactccgacgtgtacatcaccgataagaccgtgctggacatgcggagcatggacttcaagagcaactccgccgtggcctggtccaacaagtccgatttcgcctgcgccaacgccttcaacaacagcattatccccgaggacacattcttcccaagccccgagagcagctgcgacgtgaagctggtggaaaagagcttcgagacagacaccaacctgaacttccagatcctgtacgagatcctgctgggcaaggccaccctgtacgccgtgctggtgtctgccctggtgctgatggctatggtcaagcggaaggacagccggggaaaacggggcagaaagaaactcctgtatatattcaaacaaccatttatgagaccagtacaaactactcaagaggaagatggctgtagctgccgatttccagaagaagaagaaggaggatgtgaactgagagtgaagttcagcagaagcgccgacgcccctgcctaccagcagggacagaaccaactgtacaacgagctgaacctgggcagacgggaagagtacgacgtgctggacaagcggagaggcagggaccctgagatgggcggaaagccccagcggagaaagaacccccaggaaggactgtataacgaactccagaaagacaagatggccgaagcctacagcgagatcggcatgaagggcgagcggagaagaggcaagggccacgatggcctgtaccagggcctgagcaccgccaccaaggacacctatgacgccctgcacatgcaggccctgcctccaaga

SEQ ID NO: 26652 - DNA, 945 bp, synthetic construct
  source 1..945: mol_type = other DNA
atccagaaccctgatcctgccgtgtaccagctgcgggatagcaagagcagcgacaagagcgtgtgtctgttcaccgacttcgacagccagaccaacgtgtcccagagcaaggactccgacgtgtacatcaccgataagaccgtgctggacatgcggagcatggacttcaagagcaactccgccgtggcctggtccaacaagtccgatttcgcctgcgccaacgccttcaacaacagcattatccccgaggacacattcttcccaagccccgagagcagcgactccaccgaccacgtgaagcccaaagagacagagaacaccaagcagcccagcaagagctgccacaagcccaaggccatcgtgcacaccgagaaagtgaacatgatgagcctgaccgtgctgggcctgcggatgctgttcgccaaaaccgtggccgtgaacttcctgctgaccgccaagctgttcttcctcctcaccgccaaacggggcagaaagaaactcctgtatatattcaaacaaccatttatgagaccagtacaaactactcaagaggaagatggctgtagctgccgatttccagaagaagaagaaggaggatgtgaactgagagtgaagttcagcagaagcgccgacgcccctgcctaccagcagggacagaaccaactgtacaacgagctgaacctgggcagacgggaagagtacgacgtgctggacaagcggagaggcagggaccctgagatgggcggaaagccccagcggagaaagaacccccaggaaggactgtataacgaactccagaaagacaagatggccgaagcctacagcgagatcggcatgaagggcgagcggagaagaggcaagggccacgatggcctgtaccagggcctgagcaccgccaccaaggacacctatgacgccctgcacatgcaggccctgcctccaaga

SEQ ID NO: 26653 - DNA, 1254 bp, synthetic construct
  source 1..1254: mol_type = other DNA
gaggacctgaagaacgtgttcccacctgaggtggccgtgttcgagcctagcgaggccgagatcagccacacccagaaagccaccctcgtgtgcctggctaccggcttctaccccgaccatgtggaactgtcttggtgggtcaacggcaaagaggtgcacagcggcgtgtctaccgacccccagccactgaaagaacagcccgccctgaacgacagccggtactgcctgagcagcagactgagagtgtccgccaccttctggcagaacccccggaaccacttcagatgccaggtgcagttctacggcctgagcgagaacgacgagtggacccaggacagagccaagcccgtgacccagatcgtgtctgccgaagcctggggcagagccgatgatgtgattaagatccactggcaggaaaagaagtccaacaccatcctgggcagccaggaaggcaacaccatgaagaccaacgacacctacatgaagttcagctggctgaccgtgcccgagaagtccctggacaaagaacacagatgcatcgtgcggcacgaaaacaacaagaacggcgtggaccaggaaatcatcttcccacccatcaagaccgatgtgattacaatggaccccaaggacaactgctccaaggacgccaacgataccctgctgctccagctgaccaacaccagcgcctactacatgtacttgttgctgctgctgaagtccgtggtgtacttcgccatcatcacatgctgcctgctgatggctatggtcaagcggaaggacagccggggaaaacggggcagaaagaaactcctgtatatattcaaacaaccatttatgagaccagtacaaactactcaagaggaagatggctgtagctgccgatttccagaagaagaagaaggaggatgtgaactgagagtgaagttcagcagaagcgccgacgcccctgcctaccagcagggacagaaccaactgtacaacgagctgaacctgggcagacgggaagagtacgacgtgctggacaagcggagaggcagggaccctgagatgggcggaaagccccagcggagaaagaacccccaggaaggactgtataacgaactccagaaagacaagatggccgaagcctacagcgagatcggcatgaagggcgagcggagaagaggcaagggccacgatggcctgtaccagggcctgagcaccgccaccaaggacacctatgacgccctgcacatgcaggccctgcctccaaga

SEQ ID NO: 26654 - DNA, 936 bp, synthetic construct
  source 1..936: mol_type = other DNA
atccagaaccctgatcctgccgtgtaccagctgcgggatagcaagagcagcgacaagagcgtgtgtctgttcaccgacttcgacagccagaccaacgtgtcccagagcaaggactccgacgtgtacatcaccgataagtgcgtgctggacatgcggagcatggacttcaagagcaactccgccgtggcctggtccaacaagtccgatttcgcctgcgccaacgccttcaacaacagcattatccccgaggacacattcttcccaagccccgagagcagcgactccaccgaccacgtgaagcccaaagagacagagaacaccaagcagcccagcaagagctgccacaagcccaaggccatcgtgcacaccgagaaagtgaacatgatgagcctgaccgtgctgggcctgcggatgctgttcgccaaaaccgtggccgtgaacttcctgctgaccgccaagctgttcttcctcaaacggggcagaaagaaactcctgtatatattcaaacaaccatttatgagaccagtacaaactactcaagaggaagatggctgtagctgccgatttccagaagaagaagaaggaggatgtgaactgagagtgaagttcagcagaagcgccgacgcccctgcctaccagcagggacagaaccaactgtacaacgagctgaacctgggcagacgggaagagtacgacgtgctggacaagcggagaggcagggaccctgagatgggcggaaagccccagcggagaaagaacccccaggaaggactgtataacgaactccagaaagacaagatggccgaagcctacagcgagatcggcatgaagggcgagcggagaagaggcaagggccacgatggcctgtaccagggcctgagcaccgccaccaaggacacctatgacgccctgcacatgcaggccctgcctccaaga

SEQ ID NO: 26655 - DNA, 1257 bp, synthetic construct
  source 1..1257: mol_type = other DNA
gaggacctgaagaacgtgttcccacctgaggtggccgtgttcgagcctagcgaggccgagatcagccacacccagaaagccaccctcgtgtgcctggctaccggcttctaccccgaccatgtggaactgtcttggtgggtcaacggcaaagaggtgcacagcggcgtgtgtaccgacccccagccactgaaagaacagcccgccctgaacgacagccggtactgcctgagcagcagactgagagtgtccgccaccttctggcagaacccccggaaccacttcagatgccaggtgcagttctacggcctgagcgagaacgacgagtggacccaggacagagccaagcccgtgacccagatcgtgtctgccgaagcctggggcagagccgatgatgtgattaagatccactggcaggaaaagaagtccaacaccatcctgggcagccaggaaggcaacaccatgaagaccaacgacacctacatgaagttcagctggctgaccgtgcccgagaagtccctggacaaagaacacagatgcatcgtgcggcacgaaaacaacaagaacggcgtggaccaggaaatcatcttcccacccatcaagaccgatgtgattacaatggaccccaaggacaactgctccaaggacgccaacgataccctgctgctccagctgaccaacaccagcgcctactacatgtacttgttgctgctgctgaagtccgtggtgtacttcgccatcatcacatgctgcctgctgcggagaaccgccttctgctgcaacggcgagaagtctaaacggggcagaaagaaactcctgtatatattcaaacaaccatttatgagaccagtacaaactactcaagaggaagatggctgtagctgccgatttccagaagaagaagaaggaggatgtgaactgagagtgaagttcagcagaagcgccgacgcccctgcctaccagcagggacagaaccaactgtacaacgagctgaacctgggcagacgggaagagtacgacgtgctggacaagcggagaggcagggaccctgagatgggcggaaagccccagcggagaaagaacccccaggaaggactgtataacgaactccagaaagacaagatggccgaagcctacagcgagatcggcatgaagggcgagcggagaagaggcaagggccacgatggcctgtaccagggcctgagcaccgccaccaaggacacctatgacgccctgcacatgcaggccctgcctccaaga

SEQ ID NO: 26656 - DNA, 936 bp, synthetic construct
  source 1..936: mol_type = other DNA
atccagaaccctgatcctgccgtgtaccagctgcgggatagcaagagcagcgacaagagcgtgtgtctgttcaccgacttcgacagccagaccaacgtgtcccagagcaaggactccgacgtgtacatcaccgataagaccgtgctggacatgcggagcatggacttcaagagcaactccgccgtggcctggtccaacaagtccgatttcgcctgcgccaacgccttcaacaacagcattatccccgaggacacattcttcccaagccccgagagcagcgactccaccgaccacgtgaagcccaaagagacagagaacaccaagcagcccagcaagagctgccacaagcccaaggccatcgtgcacaccgagaaagtgaacatgatgagcctgaccgtgctgggcctgcggatgctgttcgccaaaaccgtggccgtgaacttcctgctgaccgccaagctgttcttcctcaaacggggcagaaagaaactcctgtatatattcaaacaaccatttatgagaccagtacaaactactcaagaggaagatggctgtagctgccgatttccagaagaagaagaaggaggatgtgaactgagagtgaagttcagcagaagcgccgacgcccctgcctaccagcagggacagaaccaactgtacaacgagctgaacctgggcagacgggaagagtacgacgtgctggacaagcggagaggcagggaccctgagatgggcggaaagccccagcggagaaagaacccccaggaaggactgtataacgaactccagaaagacaagatggccgaagcctacagcgagatcggcatgaagggcgagcggagaagaggcaagggccacgatggcctgtaccagggcctgagcaccgccaccaaggacacctatgacgccctgcacatgcaggccctgcctccaaga

SEQ ID NO: 26657 - DNA, 1257 bp, synthetic construct
  source 1..1257: mol_type = other DNA
gaggacctgaagaacgtgttcccacctgaggtggccgtgttcgagcctagcgaggccgagatcagccacacccagaaagccaccctcgtgtgcctggctaccggcttctaccccgaccatgtggaactgtcttggtgggtcaacggcaaagaggtgcacagcggcgtgtctaccgacccccagccactgaaagaacagcccgccctgaacgacagccggtactgcctgagcagcagactgagagtgtccgccaccttctggcagaacccccggaaccacttcagatgccaggtgcagttctacggcctgagcgagaacgacgagtggacccaggacagagccaagcccgtgacccagatcgtgtctgccgaagcctggggcagagccgatgatgtgattaagatccactggcaggaaaagaagtccaacaccatcctgggcagccaggaaggcaacaccatgaagaccaacgacacctacatgaagttcagctggctgaccgtgcccgagaagtccctggacaaagaacacagatgcatcgtgcggcacgaaaacaacaagaacggcgtggaccaggaaatcatcttcccacccatcaagaccgatgtgattacaatggaccccaaggacaactgctccaaggacgccaacgataccctgctgctccagctgaccaacaccagcgcctactacatgtacttgttgctgctgctgaagtccgtggtgtacttcgccatcatcacatgctgcctgctgcggagaaccgccttctgctgcaacggcgagaagtctaaacggggcagaaagaaactcctgtatatattcaaacaaccatttatgagaccagtacaaactactcaagaggaagatggctgtagctgccgatttccagaagaagaagaaggaggatgtgaactgagagtgaagttcagcagaagcgccgacgcccctgcctaccagcagggacagaaccaactgtacaacgagctgaacctgggcagacgggaagagtacgacgtgctggacaagcggagaggcagggaccctgagatgggcggaaagccccagcggagaaagaacccccaggaaggactgtataacgaactccagaaagacaagatggccgaagcctacagcgagatcggcatgaagggcgagcggagaagaggcaagggccacgatggcctgtaccagggcctgagcaccgccaccaaggacacctatgacgccctgcacatgcaggccctgcctccaaga

SEQ ID NO: 26658 - DNA, 891 bp, synthetic construct; identical to SEQ ID NO: 26643
  source 1..891: mol_type = other DNA

SEQ ID NO: 26659 - DNA, 888 bp, synthetic construct
  source 1..888: mol_type = other DNA
cagaaccctgatcctgccgtgtaccagctgcgggatagcaagagcagcgacaagagcgtgtgtctgttcaccgacttcgacagccagaccaacgtgtcccagagcaaggactccgacgtgtacatcaccgataagtgcgtgctggacatgcggagcatggacttcaagagcaactccgccgtggcctggtccaacaagtccgatttcgcctgcgccaacgccttcaacaacagcattatccccgaggacacattcttcccaagccccgagagcagctgcggctttaccagcgagagctaccagcagggcgtgctgagcgccaccatcctgtacgagatcctgctgggcaaggccaccctgtacgccgtgctggtgtctgccctggtgctgatggctatggtcaagcggaaggacagccggggaaaacggggcagaaagaaactcctgtatatattcaaacaaccatttatgagaccagtacaaactactcaagaggaagatggctgtagctgccgatttccagaagaagaagaaggaggatgtgaactgagagtgaagttcagcagaagcgccgacgcccctgcctaccagcagggacagaaccaactgtacaacgagctgaacctgggcagacgggaagagtacgacgtgctggacaagcggagaggcagggaccctgagatgggcggaaagccccagcggagaaagaacccccaggaaggactgtataacgaactccagaaagacaagatggccgaagcctacagcgagatcggcatgaagggcgagcggagaagaggcaagggccacgatggcctgtaccagggcctgagcaccgccaccaaggacacctatgacgccctgcacatgcaggccctgcctccaaga

SEQ ID NO: 26660 - DNA, 885 bp, synthetic construct
  source 1..885: mol_type = other DNA
aaccctgatcctgccgtgtaccagctgcgggatagcaagagcagcgacaagagcgtgtgtctgttcaccgacttcgacagccagaccaacgtgtcccagagcaaggactccgacgtgtacatcaccgataagtgcgtgctggacatgcggagcatggacttcaagagcaactccgccgtggcctggtccaacaagtccgatttcgcctgcgccaacgccttcaacaacagcattatccccgaggacacattcttcccaagccccgagagcagctgcggctttaccagcgagagctaccagcagggcgtgctgagcgccaccatcctgtacgagatcctgctgggcaaggccaccctgtacgccgtgctggtgtctgccctggtgctgatggctatggtcaagcggaaggacagccggggaaaacggggcagaaagaaactcctgtatatattcaaacaaccatttatgagaccagtacaaactactcaagaggaagatggctgtagctgccgatttccagaagaagaagaaggaggatgtgaactgagagtgaagttcagcagaagcgccgacgcccctgcctaccagcagggacagaaccaactgtacaacgagctgaacctgggcagacgggaagagtacgacgtgctggacaagcggagaggcagggaccctgagatgggcggaaagccccagcggagaaagaacccccaggaaggactgtataacgaactccagaaagacaagatggccgaagcctacagcgagatcggcatgaagggcgagcggagaagaggcaagggccacgatggcctgtaccagggcctgagcaccgccaccaaggacacctatgacgccctgcacatgcaggccctgcctccaaga

SEQ ID NO: 26661 - DNA, 882 bp, synthetic construct
  source 1..882: mol_type = other DNA
cctgatcctgccgtgtaccagctgcgggatagcaagagcagcgacaagagcgtgtgtctgttcaccgacttcgacagccagaccaacgtgtcccagagcaaggactccgacgtgtacatcaccgataagtgcgtgctggacatgcggagcatggacttcaagagcaactccgccgtggcctggtccaacaagtccgatttcgcctgcgccaacgccttcaacaacagcattatccccgaggacacattcttcccaagccccgagagcagctgcggctttaccagcgagagctaccagcagggcgtgctgagcgccaccatcctgtacgagatcctgctgggcaaggccaccctgtacgccgtgctggtgtctgccctggtgctgatggctatggtcaagcggaaggacagccggggaaaacggggcagaaagaaactcctgtatatattcaaacaaccatttatgagaccagtacaaactactcaagaggaagatggctgtagctgccgatttccagaagaagaagaaggaggatgtgaactgagagtgaagttcagcagaagcgccgacgcccctgcctaccagcagggacagaaccaactgtacaacgagctgaacctgggcagacgggaagagtacgacgtgctggacaagcggagaggcagggaccctgagatgggcggaaagccccagcggagaaagaacccccaggaaggactgtataacgaactccagaaagacaagatggccgaagcctacagcgagatcggcatgaagggcgagcggagaagaggcaagggccacgatggcctgtaccagggcctgagcaccgccaccaaggacacctatgacgccctgcacatgcaggccctgcctccaaga

SEQ ID NO: 26662 - DNA, 879 bp, synthetic construct
  source 1..879: mol_type = other DNA
gatcctgccgtgtaccagctgcgggatagcaagagcagcgacaagagcgtgtgtctgttcaccgacttcgacagccagaccaacgtgtcccagagcaaggactccgacgtgtacatcaccgataagtgcgtgctggacatgcggagcatggacttcaagagcaactccgccgtggcctggtccaacaagtccgatttcgcctgcgccaacgccttcaacaacagcattatccccgaggacacattcttcccaagccccgagagcagctgcggctttaccagcgagagctaccagcagggcgtgctgagcgccaccatcctgtacgagatcctgctgggcaaggccaccctgtacgccgtgctggtgtctgccctggtgctgatggctatggtcaagcggaaggacagccggggaaaacggggcagaaagaaactcctgtatatattcaaacaaccatttatgagaccagtacaaactactcaagaggaagatggctgtagctgccgatttccagaagaagaagaaggaggatgtgaactgagagtgaagttcagcagaagcgccgacgcccctgcctaccagcagggacagaaccaactgtacaacgagctgaacctgggcagacgggaagagtacgacgtgctggacaagcggagaggcagggaccctgagatgggcggaaagccccagcggagaaagaacccccaggaaggactgtataacgaactccagaaagacaagatggccgaagcctacagcgagatcggcatgaagggcgagcggagaagaggcaagggccacgatggcctgtaccagggcctgagcaccgccaccaaggacacctatgacgccctgcacatgcaggccctgcctccaaga

SEQ ID NO: 26663 - DNA, 876 bp, synthetic construct
  source 1..876: mol_type = other DNA
cctgccgtgtaccagctgcgggatagcaagagcagcgacaagagcgtgtgtctgttcaccgacttcgacagccagaccaacgtgtcccagagcaaggactccgacgtgtacatcaccgataagtgcgtgctggacatgcggagcatggacttcaagagcaactccgccgtggcctggtccaacaagtccgatttcgcctgcgccaacgccttcaacaacagcattatccccgaggacacattcttcccaagccccgagagcagctgcggctttaccagcgagagctaccagcagggcgtgctgagcgccaccatcctgtacgagatcctgctgggcaaggccaccctgtacgccgtgctggtgtctgccctggtgctgatggctatggtcaagcggaaggacagccggggaaaacggggcagaaagaaactcctgtatatattcaaacaaccatttatgagaccagtacaaactactcaagaggaagatggctgtagctgccgatttccagaagaagaagaaggaggatgtgaactgagagtgaagttcagcagaagcgccgacgcccctgcctaccagcagggacagaaccaactgtacaacgagctgaacctgggcagacgggaagagtacgacgtgctggacaagcggagaggcagggaccctgagatgggcggaaagccccagcggagaaagaacccccaggaaggactgtataacgaactccagaaagacaagatggccgaagcctacagcgagatcggcatgaagggcgagcggagaagaggcaagggccacgatggcctgtaccagggcctgagcaccgccaccaaggacacctatgacgccctgcacatgcaggccctgcctccaaga

SEQ ID NO: 26664 - DNA, 873 bp, synthetic construct
  source 1..873: mol_type = other DNA
gccgtgtaccagctgcgggatagcaagagcagcgacaagagcgtgtgtctgttcaccgacttcgacagccagaccaacgtgtcccagagcaaggactccgacgtgtacatcaccgataagtgcgtgctggacatgcggagcatggacttcaagagcaactccgccgtggcctggtccaacaagtccgatttcgcctgcgccaacgccttcaacaacagcattatccccgaggacacattcttcccaagccccgagagcagctgcggctttaccagcgagagctaccagcagggcgtgctgagcgccaccatcctgtacgagatcctgctgggcaaggccaccctgtacgccgtgctggtgtctgccctggtgctgatggctatggtcaagcggaaggacagccggggaaaacggggcagaaagaaactcctgtatatattcaaacaaccatttatgagaccagtacaaactactcaagaggaagatggctgtagctgccgatttccagaagaagaagaaggaggatgtgaactgagagtgaagttcagcagaagcgccgacgcccctgcctaccagcagggacagaaccaactgtacaacgagctgaacctgggcagacgggaagagtacgacgtgctggacaagcggagaggcagggaccctgagatgggcggaaagccccagcggagaaagaacccccaggaaggactgtataacgaactccagaaagacaagatggccgaagcctacagcgagatcggcatgaagggcgagcggagaagaggcaagggccacgatggcctgtaccagggcctgagcaccgccaccaaggacacctatgacgccctgcacatgcaggccctgcctccaaga

SEQ ID NO: 26665 - DNA, 870 bp, synthetic construct
  source 1..870: mol_type = other DNA
gtgtaccagctgcgggatagcaagagcagcgacaagagcgtgtgtctgttcaccgacttcgacagccagaccaacgtgtcccagagcaaggactccgacgtgtacatcaccgataagtgcgtgctggacatgcggagcatggacttcaagagcaactccgccgtggcctggtccaacaagtccgatttcgcctgcgccaacgccttcaacaacagcattatccccgaggacacattcttcccaagccccgagagcagctgcggctttaccagcgagagctaccagcagggcgtgctgagcgccaccatcctgtacgagatcctgctgggcaaggccaccctgtacgccgtgctggtgtctgccctggtgctgatggctatggtcaagcggaaggacagccggggaaaacggggcagaaagaaactcctgtatatattcaaacaaccatttatgagaccagtacaaactactcaagaggaagatggctgtagctgccgatttccagaagaagaagaaggaggatgtgaactgagagtgaagttcagcagaagcgccgacgcccctgcctaccagcagggacagaaccaactgtacaacgagctgaacctgggcagacgggaagagtacgacgtgctggacaagcggagaggcagggaccctgagatgggcggaaagccccagcggagaaagaacccccaggaaggactgtataacgaactccagaaagacaagatggccgaagcctacagcgagatcggcatgaagggcgagcggagaagaggcaagggccacgatggcctgtaccagggcctgagcaccgccaccaaggacacctatgacgccctgcacatgcaggccctgcctccaaga

SEQ ID NO: 26666 - DNA, 867 bp, synthetic construct
  source 1..867: mol_type = other DNA
taccagctgcgggatagcaagagcagcgacaagagcgtgtgtctgttcaccgacttcgacagccagaccaacgtgtcccagagcaaggactccgacgtgtacatcaccgataagtgcgtgctggacatgcggagcatggacttcaagagcaactccgccgtggcctggtccaacaagtccgatttcgcctgcgccaacgccttcaacaacagcattatccccgaggacacattcttcccaagccccgagagcagctgcggctttaccagcgagagctaccagcagggcgtgctgagcgccaccatcctgtacgagatcctgctgggcaaggccaccctgtacgccgtgctggtgtctgccctggtgctgatggctatggtcaagcggaaggacagccggggaaaacggggcagaaagaaactcctgtatatattcaaacaaccatttatgagaccagtacaaactactcaagaggaagatggctgtagctgccgatttccagaagaagaagaaggaggatgtgaactgagagtgaagttcagcagaagcgccgacgcccctgcctaccagcagggacagaaccaactgtacaacgagctgaacctgggcagacgggaagagtacgacgtgctggacaagcggagaggcagggaccctgagatgggcggaaagccccagcggagaaagaacccccaggaaggactgtataacgaactccagaaagacaagatggccgaagcctacagcgagatcggcatgaagggcgagcggagaagaggcaagggccacgatggcctgtaccagggcctgagcaccgccaccaaggacacctatgacgccctgcacatgcaggccctgcctccaaga

SEQ ID NO: 26667 - DNA, 864 bp, synthetic construct
  source 1..864: mol_type = other DNA
cagctgcgggatagcaagagcagcgacaagagcgtgtgtctgttcaccgacttcgacagccagaccaacgtgtcccagagcaaggactccgacgtgtacatcaccgataagtgcgtgctggacatgcggagcatggacttcaagagcaactccgccgtggcctggtccaacaagtccgatttcgcctgcgccaacgccttcaacaacagcattatccccgaggacacattcttcccaagccccgagagcagctgcggctttaccagcgagagctaccagcagggcgtgctgagcgccaccatcctgtacgagatcctgctgggcaaggccaccctgtacgccgtgctggtgtctgccctggtgctgatggctatggtcaagcggaaggacagccggggaaaacggggcagaaagaaactcctgtatatattcaaacaaccatttatgagaccagtacaaactactcaagaggaagatggctgtagctgccgatttccagaagaagaagaaggaggatgtgaactgagagtgaagttcagcagaagcgccgacgcccctgcctaccagcagggacagaaccaactgtacaacgagctgaacctgggcagacgggaagagtacgacgtgctggacaagcggagaggcagggaccctgagatgggcggaaagccccagcggagaaagaacccccaggaaggactgtataacgaactccagaaagacaagatggccgaagcctacagcgagatcggcatgaagggcgagcggagaagaggcaagggccacgatggcctgtaccagggcctgagcaccgccaccaaggacacctatgacgccctgcacatgcaggccctgcctccaaga

SEQ ID NO: 26668 - DNA, 861 bp, synthetic construct
  source 1..861: mol_type = other DNA
ctgcgggatagcaagagcagcgacaagagcgtgtgtctgttcaccgacttcgacagccagaccaacgtgtcccagagcaaggactccgacgtgtacatcaccgataagtgcgtgctggacatgcggagcatggacttcaagagcaactccgccgtggcctggtccaacaagtccgatttcgcctgcgccaacgccttcaacaacagcattatccccgaggacacattcttcccaagccccgagagcagctgcggctttaccagcgagagctaccagcagggcgtgctgagcgccaccatcctgtacgagatcctgctgggcaaggccaccctgtacgccgtgctggtgtctgccctggtgctgatggctatggtcaagcggaaggacagccggggaaaacggggcagaaagaaactcctgtatatattcaaacaaccatttatgagaccagtacaaactactcaagaggaagatggctgtagctgccgatttccagaagaagaagaaggaggatgtgaactgagagtgaagttcagcagaagcgccgacgcccctgcctaccagcagggacagaaccaactgtacaacgagctgaacctgggcagacgggaagagtacgacgtgctggacaagcggagaggcagggaccctgagatgggcggaaagccccagcggagaaagaacccccaggaaggactgtataacgaactccagaaagacaagatggccgaagcctacagcgagatcggcatgaagggcgagcggagaagaggcaagggccacgatggcctgtaccagggcctgagcaccgccaccaaggacacctatgacgccctgcacatgcaggccctgcctccaaga

SEQ ID NO: 26669 - DNA, 858 bp, synthetic construct
  source 1..858: mol_type = other DNA
cgggatagcaagagcagcgacaagagcgtgtgtctgttcaccgacttcgacagccagaccaacgtgtcccagagcaaggactccgacgtgtacatcaccgataagtgcgtgctggacatgcggagcatggacttcaagagcaactccgccgtggcctggtccaacaagtccgatttcgcctgcgccaacgccttcaacaacagcattatccccgaggacacattcttcccaagccccgagagcagctgcggctttaccagcgagagctaccagcagggcgtgctgagcgccaccatcctgtacgagatcctgctgggcaaggccaccctgtacgccgtgctggtgtctgccctggtgctgatggctatggtcaagcggaaggacagccggggaaaacggggcagaaagaaactcctgtatatattcaaacaaccatttatgagaccagtacaaactactcaagaggaagatggctgtagctgccgatttccagaagaagaagaaggaggatgtgaactgagagtgaagttcagcagaagcgccgacgcccctgcctaccagcagggacagaaccaactgtacaacgagctgaacctgggcagacgggaagagtacgacgtgctggacaagcggagaggcagggaccctgagatgggcggaaagccccagcggagaaagaacccccaggaaggactgtataacgaactccagaaagacaagatggccgaagcctacagcgagatcggcatgaagggcgagcggagaagaggcaagggccacgatggcctgtaccagggcctgagcaccgccaccaaggacacctatgacgccctgcacatgcaggccctgcctccaaga

SEQ ID NO: 26670 - DNA, 855 bp, synthetic construct
  source 1..855: mol_type = other DNA
gatagcaagagcagcgacaagagcgtgtgtctgttcaccgacttcgacagccagaccaacgtgtcccagagcaaggactccgacgtgtacatcaccgataagtgcgtgctggacatgcggagcatggacttcaagagcaactccgccgtggcctggtccaacaagtccgatttcgcctgcgccaacgccttcaacaacagcattatccccgaggacacattcttcccaagccccgagagcagctgcggctttaccagcgagagctaccagcagggcgtgctgagcgccaccatcctgtacgagatcctgctgggcaaggccaccctgtacgccgtgctggtgtctgccctggtgctgatggctatggtcaagcggaaggacagccggggaaaacggggcagaaagaaactcctgtatatattcaaacaaccatttatgagaccagtacaaactactcaagaggaagatggctgtagctgccgatttccagaagaagaagaaggaggatgtgaactgagagtgaagttcagcagaagcgccgacgcccctgcctaccagcagggacagaaccaactgtacaacgagctgaacctgggcagacgggaagagtacgacgtgctggacaagcggagaggcagggaccctgagatgggcggaaagccccagcggagaaagaacccccaggaaggactgtataacgaactccagaaagacaagatggccgaagcctacagcgagatcggcatgaagggcgagcggagaagaggcaagggccacgatggcctgtaccagggcctgagcaccgccaccaaggacacctatgacgccctgcacatgcaggccctgcctccaaga

SEQ ID NO: 26671 - DNA, 852 bp, synthetic construct
  source 1..852: mol_type = other DNA
agcaagagcagcgacaagagcgtgtgtctgttcaccgacttcgacagccagaccaacgtgtcccagagcaaggactccgacgtgtacatcaccgataagtgcgtgctggacatgcggagcatggacttcaagagcaactccgccgtggcctggtccaacaagtccgatttcgcctgcgccaacgccttcaacaacagcattatccccgaggacacattcttcccaagccccgagagcagctgcggctttaccagcgagagctaccagcagggcgtgctgagcgccaccatcctgtacgagatcctgctgggcaaggccaccctgtacgccgtgctggtgtctgccctggtgctgatggctatggtcaagcggaaggacagccggggaaaacggggcagaaagaaactcctgtatatattcaaacaaccatttatgagaccagtacaaactactcaagaggaagatggctgtagctgccgatttccagaagaagaagaaggaggatgtgaactgagagtgaagttcagcagaagcgccgacgcccctgcctaccagcagggacagaaccaactgtacaacgagctgaacctgggcagacgggaagagtacgacgtgctggacaagcggagaggcagggaccctgagatgggcggaaagccccagcggagaaagaacccccaggaaggactgtataacgaactccagaaagacaagatggccgaagcctacagcgagatcggcatgaagggcgagcggagaagaggcaagggccacgatggcctgtaccagggcctgagcaccgccaccaaggacacctatgacgccctgcacatgcaggccctgcctccaaga

SEQ ID NO: 26672 - DNA, 849 bp, synthetic construct
  source 1..849: mol_type = other DNA
aagagcagcgacaagagcgtgtgtctgttcaccgacttcgacagccagaccaacgtgtcccagagcaaggactccgacgtgtacatcaccgataagtgcgtgctggacatgcggagcatggacttcaagagcaactccgccgtggcctggtccaacaagtccgatttcgcctgcgccaacgccttcaacaacagcattatccccgaggacacattcttcccaagccccgagagcagctgcggctttaccagcgagagctaccagcagggcgtgctgagcgccaccatcctgtacgagatcctgctgggcaaggccaccctgtacgccgtgctggtgtctgccctggtgctgatggctatggtcaagcggaaggacagccggggaaaacggggcagaaagaaactcctgtatatattcaaacaaccatttatgagaccagtacaaactactcaagaggaagatggctgtagctgccgatttccagaagaagaagaaggaggatgtgaactgagagtgaagttcagcagaagcgccgacgcccctgcctaccagcagggacagaaccaactgtacaacgagctgaacctgggcagacgggaagagtacgacgtgctggacaagcggagaggcagggaccctgagatgggcggaaagccccagcggagaaagaacccccaggaaggactgtataacgaactccagaaagacaagatggccgaagcctacagcgagatcggcatgaagggcgagcggagaagaggcaagggccacgatggcctgtaccagggcctgagcaccgccaccaaggacacctatgacgccctgcacatgcaggccctgcctccaaga

SEQ ID NO: 26673 - DNA, 846 bp, synthetic construct
  source 1..846: mol_type = other DNA
agcagcgacaagagcgtgtgtctgttcaccgacttcgacagccagaccaacgtgtcccagagcaaggactccgacgtgtacatcaccgataagtgcgtgctggacatgcggagcatggacttcaagagcaactccgccgtggcctggtccaacaagtccgatttcgcctgcgccaacgccttcaacaacagcattatccccgaggacacattcttcccaagccccgagagcagctgcggctttaccagcgagagctaccagcagggcgtgctgagcgccaccatcctgtacgagatcctgctgggcaaggccaccctgtacgccgtgctggtgtctgccctggtgctgatggctatggtcaagcggaaggacagccggggaaaacggggcagaaagaaactcctgtatatattcaaacaaccatttatgagaccagtacaaactactcaagaggaagatggctgtagctgccgatttccagaagaagaagaaggaggatgtgaactgagagtgaagttcagcagaagcgccgacgcccctgcctaccagcagggacagaaccaactgtacaacgagctgaacctgggcagacgggaagagtacgacgtgctggacaagcggagaggcagggaccctgagatgggcggaaagccccagcggagaaagaacccccaggaaggactgtataacgaactccagaaagacaagatggccgaagcctacagcgagatcggcatgaagggcgagcggagaagaggcaagggccacgatggcctgtaccagggcctgagcaccgccaccaaggacacctatgacgccctgcacatgcaggccctgcctccaaga

SEQ ID NO: 26674 - DNA, 843 bp, synthetic construct
  source 1..843: mol_type = other DNA
agcgacaagagcgtgtgtctgttcaccgacttcgacagccagaccaacgtgtcccagagcaaggactccgacgtgtacatcaccgataagtgcgtgctggacatgcggagcatggacttcaagagcaactccgccgtggcctggtccaacaagtccgatttcgcctgcgccaacgccttcaacaacagcattatccccgaggacacattcttcccaagccccgagagcagctgcggctttaccagcgagagctaccagcagggcgtgctgagcgccaccatcctgtacgagatcctgctgggcaaggccaccctgtacgccgtgctggtgtctgccctggtgctgatggctatggtcaagcggaaggacagccggggaaaacggggcagaaagaaactcctgtatatattcaaacaaccatttatgagaccagtacaaactactcaagaggaagatggctgtagctgccgatttccagaagaagaagaaggaggatgtgaactgagagtgaagttcagcagaagcgccgacgcccctgcctaccagcagggacagaaccaactgtacaacgagctgaacctgggcagacgggaagagtacgacgtgctggacaagcggagaggcagggaccctgagatgggcggaaagccccagcggagaaagaacccccaggaaggactgtataacgaactccagaaagacaagatggccgaagcctacagcgagatcggcatgaagggcgagcggagaagaggcaagggccacgatggcctgtaccagggcctgagcaccgccaccaaggacacctatgacgccctgcacatgcaggccctgcctccaaga

SEQ ID NO: 26675 - DNA, 840 bp, synthetic construct
  source 1..840: mol_type = other DNA
gacaagagcgtgtgtctgttcaccgacttcgacagccagaccaacgtgtcccagagcaaggactccgacgtgtacatcaccgataagtgcgtgctggacatgcggagcatggacttcaagagcaactccgccgtggcctggtccaacaagtccgatttcgcctgcgccaacgccttcaacaacagcattatccccgaggacacattcttcccaagccccgagagcagctgcggctttaccagcgagagctaccagcagggcgtgctgagcgccaccatcctgtacgagatcctgctgggcaaggccaccctgtacgccgtgctggtgtctgccctggtgctgatggctatggtcaagcggaaggacagccggggaaaacggggcagaaagaaactcctgtatatattcaaacaaccatttatgagaccagtacaaactactcaagaggaagatggctgtagctgccgatttccagaagaagaagaaggaggatgtgaactgagagtgaagttcagcagaagcgccgacgcccctgcctaccagcagggacagaaccaactgtacaacgagctgaacctgggcagacgggaagagtacgacgtgctggacaagcggagaggcagggaccctgagatgggcggaaagccccagcggagaaagaacccccaggaaggactgtataacgaactccagaaagacaagatggccgaagcctacagcgagatcggcatgaagggcgagcggagaagaggcaagggccacgatggcctgtaccagggcctgagcaccgccaccaaggacacctatgacgccctgcacatgcaggccctgcctccaaga

SEQ ID NO: 26676 - DNA, 837 bp, synthetic construct
  source 1..837: mol_type = other DNA
aagagcgtgtgtctgttcaccgacttcgacagccagaccaacgtgtcccagagcaaggactccgacgtgtacatcaccgataagtgcgtgctggacatgcggagcatggacttcaagagcaactccgccgtggcctggtccaacaagtccgatttcgcctgcgccaacgccttcaacaacagcattatccccgaggacacattcttcccaagccccgagagcagctgcggctttaccagcgagagctaccagcagggcgtgctgagcgccaccatcctgtacgagatcctgctgggcaaggccaccctgtacgccgtgctggtgtctgccctggtgctgatggctatggtcaagcggaaggacagccggggaaaacggggcagaaagaaactcctgtatatattcaaacaaccatttatgagaccagtacaaactactcaagaggaagatggctgtagctgccgatttccagaagaagaagaaggaggatgtgaactgagagtgaagttcagcagaagcgccgacgcccctgcctaccagcagggacagaaccaactgtacaacgagctgaacctgggcagacgggaagagtacgacgtgctggacaagcggagaggcagggaccctgagatgggcggaaagccccagcggagaaagaacccccaggaaggactgtataacgaactccagaaagacaagatggccgaagcctacagcgagatcggcatgaagggcgagcggagaagaggcaagggccacgatggcctgtaccagggcctgagcaccgccaccaaggacacctatgacgccctgcacatgcaggccctgcctccaaga

SEQ ID NO: 26677 - DNA, 834 bp, synthetic construct
  source 1..834: mol_type = other DNA
agcgtgtgtctgttcaccgacttcgacagccagaccaacgtgtcccagagcaaggactccgacgtgtacatcaccgataagtgcgtgctggacatgcggagcatggacttcaagagcaactccgccgtggcctggtccaacaagtccgatttcgcctgcgccaacgccttcaacaacagcattatccccgaggacacattcttcccaagccccgagagcagctgcggctttaccagcgagagctaccagcagggcgtgctgagcgccaccatcctgtacgagatcctgctgggcaaggccaccctgtacgccgtgctggtgtctgccctggtgctgatggctatggtcaagcggaaggacagccggggaaaacggggcagaaagaaactcctgtatatattcaaacaaccatttatgagaccagtacaaactactcaagaggaagatggctgtagctgccgatttccagaagaagaagaaggaggatgtgaactgagagtgaagttcagcagaagcgccgacgcccctgcctaccagcagggacagaaccaactgtacaacgagctgaacctgggcagacgggaagagtacgacgtgctggacaagcggagaggcagggaccctgagatgggcggaaagccccagcggagaaagaacccccaggaaggactgtataacgaactccagaaagacaagatggccgaagcctacagcgagatcggcatgaagggcgagcggagaagaggcaagggccacgatggcctgtaccagggcctgagcaccgccaccaaggacacctatgacgccctgcacatgcaggccctgcctccaaga

SEQ ID NO: 26678 - DNA, 831 bp, synthetic construct
  source 1..831: mol_type = other DNA
gtgtgtctgttcaccgacttcgacagccagaccaacgtgtcccagagcaaggactccgacgtgtacatcaccgataagtgcgtgctggacatgcggagcatggacttcaagagcaactccgccgtggcctggtccaacaagtccgatttcgcctgcgccaacgccttcaacaacagcattatccccgaggacacattcttcccaagccccgagagcagctgcggctttaccagcgagagctaccagcagggcgtgctgagcgccaccatcctgtacgagatcctgctgggcaaggccaccctgtacgccgtgctggtgtctgccctggtgctgatggctatggtcaagcggaaggacagccggggaaaacggggcagaaagaaactcctgtatatattcaaacaaccatttatgagaccagtacaaactactcaagaggaagatggctgtagctgccgatttccagaagaagaagaaggaggatgtgaactgagagtgaagttcagcagaagcgccgacgcccctgcctaccagcagggacagaaccaactgtacaacgagctgaacctgggcagacgggaagagtacgacgtgctggacaagcggagaggcagggaccctgagatgggcggaaagccccagcggagaaagaacccccaggaaggactgtataacgaactccagaaagacaagatggccgaagcctacagcgagatcggcatgaagggcgagcggagaagaggcaagggccacgatggcctgtaccagggcctgagcaccgccaccaaggacacctatgacgccctgcacatgcaggccctgcctccaaga

SEQ ID NO: 26679 - DNA, 816 bp, synthetic construct
  source 1..816: mol_type = other DNA
gacttcgacagccagaccaacgtgtcccagagcaaggactccgacgtgtacatcaccgataagtgcgtgctggacatgcggagcatggacttcaagagcaactccgccgtggcctggtccaacaagtccgatttcgcctgcgccaacgccttcaacaacagcattatccccgaggacacattcttcccaagccccgagagcagctgcggctttaccagcgagagctaccagcagggcgtgctgagcgccaccatcctgtacgagatcctgctgggcaaggccaccctgtacgccgtgctggtgtctgccctggtgctgatggctatggtcaagcggaaggacagccggggaaaacggggcagaaagaaactcctgtatatattcaaacaaccatttatgagaccagtacaaactactcaagaggaagatggctgtagctgccgatttccagaagaagaagaaggaggatgtgaactgagagtgaagttcagcagaagcgccgacgcccctgcctaccagcagggacagaaccaactgtacaacgagctgaacctgggcagacgggaagagtacgacgtgctggacaagcggagaggcagggaccctgagatgggcggaaagccccagcggagaaagaacccccaggaaggactgtataacgaactccagaaagacaagatggccgaagcctacagcgagatcggcatgaagggcgagcggagaagaggcaagggccacgatggcctgtaccagggcctgagcaccgccaccaaggacacctatgacgccctgcacatgcaggccctgcctccaaga

SEQ ID NO: 26680 - DNA, 801 bp, synthetic construct
  source 1..801: mol_type = other DNA
accaacgtgtcccagagcaaggactccgacgtgtacatcaccgataagtgcgtgctggacatgcggagcatggacttcaagagcaactccgccgtggcctggtccaacaagtccgatttcgcctgcgccaacgccttcaacaacagcattatccccgaggacacattcttcccaagccccgagagcagctgcggctttaccagcgagagctaccagcagggcgtgctgagcgccaccatcctgtacgagatcctgctgggcaaggccaccctgtacgccgtgctggtgtctgccctggtgctgatggctatggtcaagcggaaggacagccggggaaaacggggcagaaagaaactcctgtatatattcaaacaaccatttatgagaccagtacaaactactcaagaggaagatggctgtagctgccgatttccagaagaagaagaaggaggatgtgaactgagagtgaagttcagcagaagcgccgacgcccctgcctaccagcagggacagaaccaactgtacaacgagctgaacctgggcagacgggaagagtacgacgtgctggacaagcggagaggcagggaccctgagatgggcggaaagccccagcggagaaagaacccccaggaaggactgtataacgaactccagaaagacaagatggccgaagcctacagcgagatcggcatgaagggcgagcggagaagaggcaagggccacgatggcctgtaccagggcctgagcaccgccaccaaggacacctatgacgccctgcacatgcaggccctgcctccaaga

SEQ ID NO: 26681 - DNA, 900 bp, synthetic construct; identical to SEQ ID NO: 26645
  source 1..900: mol_type = other DNA

SEQ ID NO: 26682 - DNA, 897 bp, synthetic construct
  source 1..897: mol_type = other DNA
cagaaccctgatcctgccgtgtaccagctgcgggatagcaagagcagcgacaagagcgtgtgtctgttcaccgacttcgacagccagaccaacgtgtcccagagcaaggactccgacgtgtacatcaccgataagtgcgtgctggacatgcggagcatggacttcaagagcaactccgccgtggcctggtccaacaagtccgatttcgcctgcgccaacgccttcaacaacagcattatccccgaggacacattcttcccaagccccgagagcagctgcgacgtgaagctggtggaaaagagcttcgagacagacaccaacctgaacttccagatcctgtacgagatcctgctgggcaaggccaccctgtacgccgtgctggtgtctgccctggtgctgatggctatggtcaagcggaaggacagccggggaaaacggggcagaaagaaactcctgtatatattcaaacaaccatttatgagaccagtacaaactactcaagaggaagatggctgtagctgccgatttccagaagaagaagaaggaggatgtgaactgagagtgaagttcagcagaagcgccgacgcccctgcctaccagcagggacagaaccaactgtacaacgagctgaacctgggcagacgggaagagtacgacgtgctggacaagcggagaggcagggaccctgagatgggcggaaagccccagcggagaaagaacccccaggaaggactgtataacgaactccagaaagacaagatggccgaagcctacagcgagatcggcatgaagggcgagcggagaagaggcaagggccacgatggcctgtaccagggcctgagcaccgccaccaaggacacctatgacgccctgcacatgcaggccctgcctccaaga

SEQ ID NO: 26683 - DNA, 894 bp, synthetic construct
  source 1..894: mol_type = other DNA
aaccctgatcctgccgtgtaccagctgcgggatagcaagagcagcgacaagagcgtgtgtctgttcaccgacttcgacagccagaccaacgtgtcccagagcaaggactccgacgtgtacatcaccgataagtgcgtgctggacatgcggagcatggacttcaagagcaactccgccgtggcctggtccaacaagtccgatttcgcctgcgccaacgccttcaacaacagcattatccccgaggacacattcttcccaagccccgagagcagctgcgacgtgaagctggtggaaaagagcttcgagacagacaccaacctgaacttccagatcctgtacgagatcctgctgggcaaggccaccctgtacgccgtgctggtgtctgccctggtgctgatggctatggtcaagcggaaggacagccggggaaaacggggcagaaagaaactcctgtatatattcaaacaaccatttatgagaccagtacaaactactcaagaggaagatggctgtagctgccgatttccagaagaagaagaaggaggatgtgaactgagagtgaagttcagcagaagcgccgacgcccctgcctaccagcagggacagaaccaactgtacaacgagctgaacctgggcagacgggaagagtacgacgtgctggacaagcggagaggcagggaccctgagatgggcggaaagccccagcggagaaagaacccccaggaaggactgtataacgaactccagaaagacaagatggccgaagcctacagcgagatcggcatgaagggcgagcggagaagaggcaagggccacgatggcctgtaccagggcctgagcaccgccaccaaggacacctatgacgccctgcacatgcaggccctgcctccaaga

SEQ ID NO: 26684 - DNA, 891 bp, synthetic construct
  source 1..891: mol_type = other DNA
cctgatcctgccgtgtaccagctgcgggatagcaagagcagcgacaagagcgtgtgtctgttcaccgacttcgacagccagaccaacgtgtcccagagcaaggactccgacgtgtacatcaccgataagtgcgtgctggacatgcggagcatggacttcaagagcaactccgccgtggcctggtccaacaagtccgatttcgcctgcgccaacgccttcaacaacagcattatccccgaggacacattcttcccaagccccgagagcagctgcgacgtgaagctggtggaaaagagcttcgagacagacaccaacctgaacttccagatcctgtacgagatcctgctgggcaaggccaccctgtacgccgtgctggtgtctgccctggtgctgatggctatggtcaagcggaaggacagccggggaaaacggggcagaaagaaactcctgtatatattcaaacaaccatttatgagaccagtacaaactactcaagaggaagatggctgtagctgccgatttccagaagaagaagaaggaggatgtgaactgagagtgaagttcagcagaagcgccgacgcccctgcctaccagcagggacagaaccaactgtacaacgagctgaacctgggcagacgggaagagtacgacgtgctggacaagcggagaggcagggaccctgagatgggcggaaagccccagcggagaaagaacccccaggaaggactgtataacgaactccagaaagacaagatggccgaagcctacagcgagatcggcatgaagggcgagcggagaagaggcaagggccacgatggcctgtaccagggcctgagcaccgccaccaaggacacctatgacgccctgcacatgcaggccctgcctccaaga

SEQ ID NO: 26685 - DNA, 888 bp, synthetic construct
  source 1..888: mol_type = other DNA
gatcctgccgtgtaccagctgcgggatagcaagagcagcgacaagagcgtgtgtctgttcaccgacttcgacagccagaccaacgtgtcccagagcaaggactccgacgtgtacatcaccgataagtgcgtgctggacatgcggagcatggacttcaagagcaactccgccgtggcctggtccaacaagtccgatttcgcctgcgccaacgccttcaacaacagcattatccccgaggacacattcttcccaagccccgagagcagctgcgacgtgaagctggtggaaaagagcttcgagacagacaccaacctgaacttccagatcctgtacgagatcctgctgggcaaggccaccctgtacgccgtgctggtgtctgccctggtgctgatggctatggtcaagcggaaggacagccggggaaaacggggcagaaagaaactcctgtatatattcaaacaaccatttatgagaccagtacaaactactcaagaggaagatggctgtagctgccgatttccagaagaagaagaaggaggatgtgaactgagagtgaagttcagcagaagcgccgacgcccctgcctaccagcagggacagaaccaactgtacaacgagctgaacctgggcagacgggaagagtacgacgtgctggacaagcggagaggcagggaccctgagatgggcggaaagccccagcggagaaagaacccccaggaaggactgtataacgaactccagaaagacaagatggccgaagcctacagcgagatcggcatgaagggcgagcggagaagaggcaagggccacgatggcctgtaccagggcctgagcaccgccaccaaggacacctatgacgccctgcacatgcaggccctgcctccaaga

SEQ ID NO: 26686 - DNA, 885 bp, synthetic construct
  source 1..885: mol_type = other DNA
cctgccgtgtaccagctgcgggatagcaagagcagcgacaagagcgtgtgtctgttcaccgacttcgacagccagaccaacgtgtcccagagcaaggactccgacgtgtacatcaccgataagtgcgtgctggacatgcggagcatggacttcaagagcaactccgccgtggcctggtccaacaagtccgatttcgcctgcgccaacgccttcaacaacagcattatccccgaggacacattcttcccaagccccgagagcagctgcgacgtgaagctggtggaaaagagcttcgagacagacaccaacctgaacttccagatcctgtacgagatcctgctgggcaaggccaccctgtacgccgtgctggtgtctgccctggtgctgatggctatggtcaagcggaaggacagccggggaaaacggggcagaaagaaactcctgtatatattcaaacaaccatttatgagaccagtacaaactactcaagaggaagatggctgtagctgccgatttccagaagaagaagaaggaggatgtgaactgagagtgaagttcagcagaagcgccgacgcccctgcctaccagcagggacagaaccaactgtacaacgagctgaacctgggcagacgggaagagtacgacgtgctggacaagcggagaggcagggaccctgagatgggcggaaagccccagcggagaaagaacccccaggaaggactgtataacgaactccagaaagacaagatggccgaagcctacagcgagatcggcatgaagggcgagcggagaagaggcaagggccacgatggcctgtaccagggcctgagcaccgccaccaaggacacctatgacgccctgcacatgcaggccctgcctccaaga

SEQ ID NO: 26687 - DNA, 882 bp, synthetic construct
  source 1..882: mol_type = other DNA
gccgtgtaccagctgcgggatagcaagagcagcgacaagagcgtgtgtctgttcaccgacttcgacagccagaccaacgtgtcccagagcaaggactccgacgtgtacatcaccgataagtgcgtgctggacatgcggagcatggacttcaagagcaactccgccgtggcctggtccaacaagtccgatttcgcctgcgccaacgccttcaacaacagcattatccccgaggacacattcttcccaagccccgagagcagctgcgacgtgaagctggtggaaaagagcttcgagacagacaccaacctgaacttccagatcctgtacgagatcctgctgggcaaggccaccctgtacgccgtgctggtgtctgccctggtgctgatggctatggtcaagcggaaggacagccggggaaaacggggcagaaagaaactcctgtatatattcaaacaaccatttatgagaccagtacaaactactcaagaggaagatggctgtagctgccgatttccagaagaagaagaaggaggatgtgaactgagagtgaagttcagcagaagcgccgacgcccctgcctaccagcagggacagaaccaactgtacaacgagctgaacctgggcagacgggaagagtacgacgtgctggacaagcggagaggcagggaccctgagatgggcggaaagccccagcggagaaagaacccccaggaaggactgtataacgaactccagaaagacaagatggccgaagcctacagcgagatcggcatgaagggcgagcggagaagaggcaagggccacgatggcctgtaccagggcctgagcaccgccaccaaggacacctatgacgccctgcacatgcaggccctgcctccaaga

SEQ ID NO: 26688 - DNA, 879 bp, synthetic construct
  source 1..879: mol_type = other DNA
gtgtaccagctgcgggatagcaagagcagcgacaagagcgtgtgtctgttcaccgacttcgacagccagaccaacgtgtcccagagcaaggactccgacgtgtacatcaccgataagtgcgtgctggacatgcggagcatggacttcaagagcaactccgccgtggcctggtccaacaagtccgatttcgcctgcgccaacgccttcaacaacagcattatccccgaggacacattcttcccaagccccgagagcagctgcgacgtgaagctggtggaaaagagcttcgagacagacaccaacctgaacttccagatcctgtacgagatcctgctgggcaaggccaccctgtacgccgtgctggtgtctgccctggtgctgatggctatggtcaagcggaaggacagccggggaaaacggggcagaaagaaactcctgtatatattcaaacaaccatttatgagaccagtacaaactactcaagaggaagatggctgtagctgccgatttccagaagaagaagaaggaggatgtgaactgagagtgaagttcagcagaagcgccgacgcccctgcctaccagcagggacagaaccaactgtacaacgagctgaacctgggcagacgggaagagtacgacgtgctggacaagcggagaggcagggaccctgagatgggcggaaagccccagcggagaaagaacccccaggaaggactgtataacgaactccagaaagacaagatggccgaagcctacagcgagatcggcatgaagggcgagcggagaagaggcaagggccacgatggcctgtaccagggcctgagcaccgccaccaaggacacctatgacgccctgcacatgcaggccctgcctccaaga

SEQ ID NO: 26689 - DNA, 876 bp, synthetic construct
  source 1..876: mol_type = other DNA
taccagctgcgggatagcaagagcagcgacaagagcgtgtgtctgttcaccgacttcgacagccagaccaacgtgtcccagagcaaggactccgacgtgtacatcaccgataagtgcgtgctggacatgcggagcatggacttcaagagcaactccgccgtggcctggtccaacaagtccgatttcgcctgcgccaacgccttcaacaacagcattatccccgaggacacattcttcccaagccccgagagcagctgcgacgtgaagctggtggaaaagagcttcgagacagacaccaacctgaacttccagatcctgtacgagatcctgctgggcaaggccaccctgtacgccgtgctggtgtctgccctggtgctgatggctatggtcaagcggaaggacagccggggaaaacggggcagaaagaaactcctgtatatattcaaacaaccatttatgagaccagtacaaactactcaagaggaagatggctgtagctgccgatttccagaagaagaagaaggaggatgtgaactgagagtgaagttcagcagaagcgccgacgcccctgcctaccagcagggacagaaccaactgtacaacgagctgaacctgggcagacgggaagagtacgacgtgctggacaagcggagaggcagggaccctgagatgggcggaaagccccagcggagaaagaacccccaggaaggactgtataacgaactccagaaagacaagatggccgaagcctacagcgagatcggcatgaagggcgagcggagaagaggcaagggccacgatggcctgtaccagggcctgagcaccgccaccaaggacacctatgacgccctgcacatgcaggccctgcctccaaga

SEQ ID NO: 26690 - DNA, 873 bp, synthetic construct
  source 1..873: mol_type = other DNA
cagctgcgggatagcaagagcagcgacaagagcgtgtgtctgttcaccgacttcgacagccagaccaacgtgtcccagagcaaggactccgacgtgtacatcaccgataagtgcgtgctggacatgcggagcatggacttcaagagcaactccgccgtggcctggtccaacaagtccgatttcgcctgcgccaacgccttcaacaacagcattatccccgaggacacattcttcccaagccccgagagcagctgcgacgtgaagctggtggaaaagagcttcgagacagacaccaacctgaacttccagatcctgtacgagatcctgctgggcaaggccaccctgtacgccgtgctggtgtctgccctggtgctgatggctatggtcaagcggaaggacagccggggaaaacggggcagaaagaaactcctgtatatattcaaacaaccatttatgagaccagtacaaactactcaagaggaagatggctgtagctgccgatttccagaagaagaagaaggaggatgtgaactgagagtgaagttcagcagaagcgccgacgcccctgcctaccagcagggacagaaccaactgtacaacgagctgaacctgggcagacgggaagagtacgacgtgctggacaagcggagaggcagggaccctgagatgggcggaaagccccagcggagaaagaacccccaggaaggactgtataacgaactccagaaagacaagatggccgaagcctacagcgagatcggcatgaagggcgagcggagaagaggcaagggccacgatggcctgtaccagggcctgagcaccgccaccaaggacacctatgacgccctgcacatgcaggccctgcctccaaga

SEQ ID NO: 26691 - DNA, 870 bp, synthetic construct
  source 1..870: mol_type = other DNA
ctgcgggatagcaagagcagcgacaagagcgtgtgtctgttcaccgacttcgacagccagaccaacgtgtcccagagcaaggactccgacgtgtacatcaccgataagtgcgtgctggacatgcggagcatggacttcaagagcaactccgccgtggcctggtccaacaagtccgatttcgcctgcgccaacgccttcaacaacagcattatccccgaggacacattcttcccaagccccgagagcagctgcgacgtgaagctggtggaaaagagcttcgagacagacaccaacctgaacttccagatcctgtacgagatcctgctgggcaaggccaccctgtacgccgtgctggtgtctgccctggtgctgatggctatggtcaagcggaaggacagccggggaaaacggggcagaaagaaactcctgtatatattcaaacaaccatttatgagaccagtacaaactactcaagaggaagatggctgtagctgccgatttccagaagaagaagaaggaggatgtgaactgagagtgaagttcagcagaagcgccgacgcccctgcctaccagcagggacagaaccaactgtacaacgagctgaacctgggcagacgggaagagtacgacgtgctggacaagcggagaggcagggaccctgagatgggcggaaagccccagcggagaaagaacccccaggaaggactgtataacgaactccagaaagacaagatggccgaagcctacagcgagatcggcatgaagggcgagcggagaagaggcaagggccacgatggcctgtaccagggcctgagcaccgccaccaaggacacctatgacgccctgcacatgcaggccctgcctccaaga

SEQ ID NO: 26692 - DNA, 867 bp, synthetic construct
  source 1..867: mol_type = other DNA
cgggatagcaagagcagcgacaagagcgtgtgtctgttcaccgacttcgacagccagaccaacgtgtcccagagcaaggactccgacgtgtacatcaccgataagtgcgtgctggacatgcggagcatggacttcaagagcaactccgccgtggcctggtccaacaagtccgatttcgcctgcgccaacgccttcaacaacagcattatccccgaggacacattcttcccaagccccgagagcagctgcgacgtgaagctggtggaaaagagcttcgagacagacaccaacctgaacttccagatcctgtacgagatcctgctgggcaaggccaccctgtacgccgtgctggtgtctgccctggtgctgatggctatggtcaagcggaaggacagccggggaaaacggggcagaaagaaactcctgtatatattcaaacaaccatttatgagaccagtacaaactactcaagaggaagatggctgtagctgccgatttccagaagaagaagaaggaggatgtgaactgagagtgaagttcagcagaagcgccgacgcccctgcctaccagcagggacagaaccaactgtacaacgagctgaacctgggcagacgggaagagtacgacgtgctggacaagcggagaggcagggaccctgagatgggcggaaagccccagcggagaaagaacccccaggaaggactgtataacgaactccagaaagacaagatggccgaagcctacagcgagatcggcatgaagggcgagcggagaagaggcaagggccacgatggcctgtaccagggcctgagcaccgccaccaaggacacctatgacgccctgcacatgcaggccctgcctccaaga

SEQ ID NO: 26693 - DNA, 864 bp, synthetic construct
  source 1..864: mol_type = other DNA
gatagcaagagcagcgacaagagcgtgtgtctgttcaccgacttcgacagccagaccaacgtgtcccagagcaaggactccgacgtgtacatcaccgataagtgcgtgctggacatgcggagcatggacttcaagagcaactccgccgtggcctggtccaacaagtccgatttcgcctgcgccaacgccttcaacaacagcattatccccgaggacacattcttcccaagccccgagagcagctgcgacgtgaagctggtggaaaagagcttcgagacagacaccaacctgaacttccagatcctgtacgagatcctgctgggcaaggccaccctgtacgccgtgctggtgtctgccctggtgctgatggctatggtcaagcggaaggacagccggggaaaacggggcagaaagaaactcctgtatatattcaaacaaccatttatgagaccagtacaaactactcaagaggaagatggctgtagctgccgatttccagaagaagaagaaggaggatgtgaactgagagtgaagttcagcagaagcgccgacgcccctgcctaccagcagggacagaaccaactgtacaacgagctgaacctgggcagacgggaagagtacgacgtgctggacaagcggagaggcagggaccctgagatgggcggaaagccccagcggagaaagaacccccaggaaggactgtataacgaactccagaaagacaagatggccgaagcctacagcgagatcggcatgaagggcgagcggagaagaggcaagggccacgatggcctgtaccagggcctgagcaccgccaccaaggacacctatgacgccctgcacatgcaggccctgcctccaaga

SEQ ID NO: 26694 - DNA, 861 bp, synthetic construct
  source 1..861: mol_type = other DNA
agcaagagcagcgacaagagcgtgtgtctgttcaccgacttcgacagccagaccaacgtgtcccagagcaaggactccgacgtgtacatcaccgataagtgcgtgctggacatgcggagcatggacttcaagagcaactccgccgtggcctggtccaacaagtccgatttcgcctgcgccaacgccttcaacaacagcattatccccgaggacacattcttcccaagccccgagagcagctgcgacgtgaagctggtggaaaagagcttcgagacagacaccaacctgaacttccagatcctgtacgagatcctgctgggcaaggccaccctgtacgccgtgctggtgtctgccctggtgctgatggctatggtcaagcggaaggacagccggggaaaacggggcagaaagaaactcctgtatatattcaaacaaccatttatgagaccagtacaaactactcaagaggaagatggctgtagctgccgatttccagaagaagaagaaggaggatgtgaactgagagtgaagttcagcagaagcgccgacgcccctgcctaccagcagggacagaaccaactgtacaacgagctgaacctgggcagacgggaagagtacgacgtgctggacaagcggagaggcagggaccctgagatgggcggaaagccccagcggagaaagaacccccaggaaggactgtataacgaactccagaaagacaagatggccgaagcctacagcgagatcggcatgaagggcgagcggagaagaggcaagggccacgatggcctgtaccagggcctgagcaccgccaccaaggacacctatgacgccctgcacatgcaggccctgcctccaaga

SEQ ID NO: 26695 - DNA, 858 bp, synthetic construct
  source 1..858: mol_type = other DNA
aagagcagcgacaagagcgtgtgtctgttcaccgacttcgacagccagaccaacgtgtcccagagcaaggactccgacgtgtacatcaccgataagtgcgtgctggacatgcggagcatggacttcaagagcaactccgccgtggcctggtccaacaagtccgatttcgcctgcgccaacgccttcaacaacagcattatccccgaggacacattcttcccaagccccgagagcagctgcgacgtgaagctggtggaaaagagcttcgagacagacaccaacctgaacttccagatcctgtacgagatcctgctgggcaaggccaccctgtacgccgtgctggtgtctgccctggtgctgatggctatggtcaagcggaaggacagccggggaaaacggggcagaaagaaactcctgtatatattcaaacaaccatttatgagaccagtacaaactactcaagaggaagatggctgtagctgccgatttccagaagaagaagaaggaggatgtgaactgagagtgaagttcagcagaagcgccgacgcccctgcctaccagcagggacagaaccaactgtacaacgagctgaacctgggcagacgggaagagtacgacgtgctggacaagcggagaggcagggaccctgagatgggcggaaagccccagcggagaaagaacccccaggaaggactgtataacgaactccagaaagacaagatggccgaagcctacagcgagatcggcatgaagggcgagcggagaagaggcaagggccacgatggcctgtaccagggcctgagcaccgccaccaaggacacctatgacgccctgcacatgcaggccctgcctccaaga

SEQ ID NO: 26696 - DNA, 855 bp, synthetic construct
  source 1..855: mol_type = other DNA
agcagcgacaagagcgtgtgtctgttcaccgacttcgacagccagaccaacgtgtcccagagcaaggactccgacgtgtacatcaccgataagtgcgtgctggacatgcggagcatggacttcaagagcaactccgccgtggcctggtccaacaagtccgatttcgcctgcgccaacgccttcaacaacagcattatccccgaggacacattcttcccaagccccgagagcagctgcgacgtgaagctggtggaaaagagcttcgagacagacaccaacctgaacttccagatcctgtacgagatcctgctgggcaaggccaccctgtacgccgtgctggtgtctgccctggtgctgatggctatggtcaagcggaaggacagccggggaaaacggggcagaaagaaactcctgtatatattcaaacaaccatttatgagaccagtacaaactactcaagaggaagatggctgtagctgccgatttccagaagaagaagaaggaggatgtgaactgagagtgaagttcagcagaagcgccgacgcccctgcctaccagcagggacagaaccaactgtacaacgagctgaacctgggcagacgggaagagtacgacgtgctggacaagcggagaggcagggaccctgagatgggcggaaagccccagcggagaaagaacccccaggaaggactgtataacgaactccagaaagacaagatggccgaagcctacagcgagatcggcatgaagggcgagcggagaagaggcaagggccacgatggcctgtaccagggcctgagcaccgccaccaaggacacctatgacgccctgcacatgcaggccctgcctccaaga

SEQ ID NO: 26697 - DNA, 852 bp, synthetic construct
  source 1..852: mol_type = other DNA
agcgacaagagcgtgtgtctgttcaccgacttcgacagccagaccaacgtgtcccagagcaaggactccgacgtgtacatcaccgataagtgcgtgctggacatgcggagcatggacttcaagagcaactccgccgtggcctggtccaacaagtccgatttcgcctgcgccaacgccttcaacaacagcattatccccgaggacacattcttcccaagccccgagagcagctgcgacgtgaagctggtggaaaagagcttcgagacagacaccaacctgaacttccagatcctgtacgagatcctgctgggcaaggccaccctgtacgccgtgctggtgtctgccctggtgctgatggctatggtcaagcggaaggacagccggggaaaacggggcagaaagaaactcctgtatatattcaaacaaccatttatgagaccagtacaaactactcaagaggaagatggctgtagctgccgatttccagaagaagaagaaggaggatgtgaactgagagtgaagttcagcagaagcgccgacgcccctgcctaccagcagggacagaaccaactgtacaacgagctgaacctgggcagacgggaagagtacgacgtgctggacaagcggagaggcagggaccctgagatgggcggaaagccccagcggagaaagaacccccaggaaggactgtataacgaactccagaaagacaagatggccgaagcctacagcgagatcggcatgaagggcgagcggagaagaggcaagggccacgatggcctgtaccagggcctgagcaccgccaccaaggacacctatgacgccctgcacatgcaggccctgcctccaaga

SEQ ID NO: 26698 - DNA, 849 bp, synthetic construct
  source 1..849: mol_type = other DNA
gacaagagcgtgtgtctgttcaccgacttcgacagccagaccaacgtgtcccagagcaaggactccgacgtgtacatcaccgataagtgcgtgctggacatgcggagcatggacttcaagagcaactccgccgtggcctggtccaacaagtccgatttcgcctgcgccaacgccttcaacaacagcattatccccgaggacacattcttcccaagccccgagagcagctgcgacgtgaagctggtggaaaagagcttcgagacagacaccaacctgaacttccagatcctgtacgagatcctgctgggcaaggccaccctgtacgccgtgctggtgtctgccctggtgctgatggctatggtcaagcggaaggacagccggggaaaacggggcagaaagaaactcctgtatatattcaaacaaccatttatgagaccagtacaaactactcaagaggaagatggctgtagctgccgatttccagaagaagaagaaggaggatgtgaactgagagtgaagttcagcagaagcgccgacgcccctgcctaccagcagggacagaaccaactgtacaacgagctgaacctgggcagacgggaagagtacgacgtgctggacaagcggagaggcagggaccctgagatgggcggaaagccccagcggagaaagaacccccaggaaggactgtataacgaactccagaaagacaagatggccgaagcctacagcgagatcggcatgaagggcgagcggagaagaggcaagggccacgatggcctgtaccagggcctgagcaccgccaccaaggacacctatgacgccctgcacatgcaggccctgcctccaaga

SEQ ID NO: 26699 - DNA, 846 bp, synthetic construct
  source 1..846: mol_type = other DNA
aagagcgtgtgtctgttcaccgacttcgacagccagaccaacgtgtcccagagcaaggactccgacgtgtacatcaccgataagtgcgtgctggacatgcggagcatggacttcaagagcaactccgccgtggcctggtccaacaagtccgatttcgcctgcgccaacgccttcaacaacagcattatccccgaggacacattcttcccaagccccgagagcagctgcgacgtgaagctggtggaaaagagcttcgagacagacaccaacctgaacttccagatcctgtacgagatcctgctgggcaaggccaccctgtacgccgtgctggtgtctgccctggtgctgatggctatggtcaagcggaaggacagccggggaaaacggggcagaaagaaactcctgtatatattcaaacaaccatttatgagaccagtacaaactactcaagaggaagatggctgtagctgccgatttccagaagaagaagaaggaggatgtgaactgagagtgaagttcagcagaagcgccgacgcccctgcctaccagcagggacagaaccaactgtacaacgagctgaacctgggcagacgggaagagtacgacgtgctggacaagcggagaggcagggaccctgagatgggcggaaagccccagcggagaaagaacccccaggaaggactgtataacgaactccagaaagacaagatggccgaagcctacagcgagatcggcatgaagggcgagcggagaagaggcaagggccacgatggcctgtaccagggcctgagcaccgccaccaaggacacctatgacgccctgcacatgcaggccctgcctccaaga

SEQ ID NO: 26700 - DNA, 843 bp, synthetic construct
  source 1..843: mol_type = other DNA
agcgtgtgtctgttcaccgacttcgacagccagaccaacgtgtcccagagcaaggactccgacgtgtacatcaccgataagtgcgtgctggacatgcggagcatggacttcaagagcaactccgccgtggcctggtccaacaagtccgatttcgcctgcgccaacgccttcaacaacagcattatccccgaggacacattcttcccaagccccgagagcagctgcgacgtgaagctggtggaaaagagcttcgagacagacaccaacctgaacttccagatcctgtacgagatcctgctgggcaaggccaccctgtacgccgtgctggtgtctgccctggtgctgatggctatggtcaagcggaaggacagccggggaaaacggggcagaaagaaactcctgtatatattcaaacaaccatttatgagaccagtacaaactactcaagaggaagatggctgtagctgccgatttccagaagaagaagaaggaggatgtgaactgagagtgaagttcagcagaagcgccgacgcccctgcctaccagcagggacagaaccaactgtacaacgagctgaacctgggcagacgggaagagtacgacgtgctggacaagcggagaggcagggaccctgagatgggcggaaagccccagcggagaaagaacccccaggaaggactgtataacgaactccagaaagacaagatggccgaagcctacagcgagatcggcatgaagggcgagcggagaagaggcaagggccacgatggcctgtaccagggcctgagcaccgccaccaaggacacctatgacgccctgcacatgcaggccctgcctccaaga

SEQ ID NO: 26701 - DNA, 840 bp, synthetic construct
  source 1..840: mol_type = other DNA
gtgtgtctgttcaccgacttcgacagccagaccaacgtgtcccagagcaaggactccgacgtgtacatcaccgataagtgcgtgctggacatgcggagcatggacttcaagagcaactccgccgtggcctggtccaacaagtccgatttcgcctgcgccaacgccttcaacaacagcattatccccgaggacacattcttcccaagccccgagagcagctgcgacgtgaagctggtggaaaagagcttcgagacagacaccaacctgaacttccagatcctgtacgagatcctgctgggcaaggccaccctgtacgccgtgctggtgtctgccctggtgctgatggctatggtcaagcggaaggacagccggggaaaacggggcagaaagaaactcctgtatatattcaaacaaccatttatgagaccagtacaaactactcaagaggaagatggctgtagctgccgatttccagaagaagaagaaggaggatgtgaactgagagtgaagttcagcagaagcgccgacgcccctgcctaccagcagggacagaaccaactgtacaacgagctgaacctgggcagacgggaagagtacgacgtgctggacaagcggagaggcagggaccctgagatgggcggaaagccccagcggagaaagaacccccaggaaggactgtataacgaactccagaaagacaagatggccgaagcctacagcgagatcggcatgaagggcgagcggagaagaggcaagggccacgatggcctgtaccagggcctgagcaccgccaccaaggacacctatgacgccctgcacatgcaggccctgcctccaaga

SEQ ID NO: 26702 - DNA, 825 bp, synthetic construct
  source 1..825: mol_type = other DNA
gacttcgacagccagaccaacgtgtcccagagcaaggactccgacgtgtacatcaccgataagtgcgtgctggacatgcggagcatggacttcaagagcaactccgccgtggcctggtccaacaagtccgatttcgcctgcgccaacgccttcaacaacagcattatccccgaggacacattcttcccaagccccgagagcagctgcgacgtgaagctggtggaaaagagcttcgagacagacaccaacctgaacttccagatcctgtacgagatcctgctgggcaaggccaccctgtacgccgtgctggtgtctgccctggtgctgatggctatggtcaagcggaaggacagccggggaaaacggggcagaaagaaactcctgtatatattcaaacaaccatttatgagaccagtacaaactactcaagaggaagatggctgtagctgccgatttccagaagaagaagaaggaggatgtgaactgagagtgaagttcagcagaagcgccgacgcccctgcctaccagcagggacagaaccaactgtacaacgagctgaacctgggcagacgggaagagtacgacgtgctggacaagcggagaggcagggaccctgagatgggcggaaagccccagcggagaaagaacccccaggaaggactgtataacgaactccagaaagacaagatggccgaagcctacagcgagatcggcatgaagggcgagcggagaagaggcaagggccacgatggcctgtaccagggcctgagcaccgccaccaaggacacctatgacgccctgcacatgcaggccctgcctccaaga

SEQ ID NO: 26703 - DNA, 810 bp, synthetic construct
  source 1..810: mol_type = other DNA
accaacgtgtcccagagcaaggactccgacgtgtacatcaccgataagtgcgtgctggacatgcggagcatggacttcaagagcaactccgccgtggcctggtccaacaagtccgatttcgcctgcgccaacgccttcaacaacagcattatccccgaggacacattcttcccaagccccgagagcagctgcgacgtgaagctggtggaaaagagcttcgagacagacaccaacctgaacttccagatcctgtacgagatcctgctgggcaaggccaccctgtacgccgtgctggtgtctgccctggtgctgatggctatggtcaagcggaaggacagccggggaaaacggggcagaaagaaactcctgtatatattcaaacaaccatttatgagaccagtacaaactactcaagaggaagatggctgtagctgccgatttccagaagaagaagaaggaggatgtgaactgagagtgaagttcagcagaagcgccgacgcccctgcctaccagcagggacagaaccaactgtacaacgagctgaacctgggcagacgggaagagtacgacgtgctggacaagcggagaggcagggaccctgagatgggcggaaagccccagcggagaaagaacccccaggaaggactgtataacgaactccagaaagacaagatggccgaagcctacagcgagatcggcatgaagggcgagcggagaagaggcaagggccacgatggcctgtaccagggcctgagcaccgccaccaaggacacctatgacgccctgcacatgcaggccctgcctccaaga

SEQ ID NO: 26704 - DNA, 945 bp, synthetic construct; identical to SEQ ID NO: 26646
  source 1..945: mol_type = other DNA

SEQ ID NO: 26705 - DNA, 942 bp, synthetic construct
  source 1..942: mol_type = other DNA
cagaaccctgatcctgccgtgtaccagctgcgggatagcaagagcagcgacaagagcgtgtgtctgttcaccgacttcgacagccagaccaacgtgtcccagagcaaggactccgacgtgtacatcaccgataagtgcgtgctggacatgcggagcatggacttcaagagcaactccgccgtggcctggtccaacaagtccgatttcgcctgcgccaacgccttcaacaacagcattatccccgaggacacattcttcccaagccccgagagcagcgactccaccgaccacgtgaagcccaaagagacagagaacaccaagcagcccagcaagagctgccacaagcccaaggccatcgtgcacaccgagaaagtgaacatgatgagcctgaccgtgctgggcctgcggatgctgttcgccaaaaccgtggccgtgaacttcctgctgaccgccaagctgttcttcctcctcaccgccaaacggggcagaaagaaactcctgtatatattcaaacaaccatttatgagaccagtacaaactactcaagaggaagatggctgtagctgccgatttccagaagaagaagaaggaggatgtgaactgagagtgaagttcagcagaagcgccgacgcccctgcctaccagcagggacagaaccaactgtacaacgagctgaacctgggcagacgggaagagtacgacgtgctggacaagcggagaggcagggaccctgagatgggcggaaagccccagcggagaaagaacccccaggaaggactgtataacgaactccagaaagacaagatggccgaagcctacagcgagatcggcatgaagggcgagcggagaagaggcaagggccacgatggcctgtaccagggcctgagcaccgccaccaaggacacctatgacgccctgcacatgcaggccctgcctccaaga

SEQ ID NO: 26706 - DNA, 939 bp, synthetic construct
  source 1..939: mol_type = other DNA
aaccctgatcctgccgtgtaccagctgcgggatagcaagagcagcgacaagagcgtgtgtctgttcaccgacttcgacagccagaccaacgtgtcccagagcaaggactccgacgtgtacatcaccgataagtgcgtgctggacatgcggagcatggacttcaagagcaactccgccgtggcctggtccaacaagtccgatttcgcctgcgccaacgccttcaacaacagcattatccccgaggacacattcttcccaagccccgagagcagcgactccaccgaccacgtgaagcccaaagagacagagaacaccaagcagcccagcaagagctgccacaagcccaaggccatcgtgcacaccgagaaagtgaacatgatgagcctgaccgtgctgggcctgcggatgctgttcgccaaaaccgtggccgtgaacttcctgctgaccgccaagctgttcttcctcctcaccgccaaacggggcagaaagaaactcctgtatatattcaaacaaccatttatgagaccagtacaaactactcaagaggaagatggctgtagctgccgatttccagaagaagaagaaggaggatgtgaactgagagtgaagttcagcagaagcgccgacgcccctgcctaccagcagggacagaaccaactgtacaacgagctgaacctgggcagacgggaagagtacgacgtgctggacaagcggagaggcagggaccctgagatgggcggaaagccccagcggagaaagaacccccaggaaggactgtataacgaactccagaaagacaagatggccgaagcctacagcgagatcggcatgaagggcgagcggagaagaggcaagggccacgatggcctgtaccagggcctgagcaccgccaccaaggacacctatgacgccctgcacatgcaggccctgcctccaaga

SEQ ID NO: 26707 - DNA, 936 bp, synthetic construct
  source 1..936: mol_type = other DNA
cctgatcctgccgtgtaccagctgcgggatagcaagagcagcgacaagagcgtgtgtctgttcaccgacttcgacagccagaccaacgtgtcccagagcaaggactccgacgtgtacatcaccgataagtgcgtgctggacatgcggagcatggacttcaagagcaactccgccgtggcctggtccaacaagtccgatttcgcctgcgccaacgccttcaacaacagcattatccccgaggacacattcttcccaagccccgagagcagcgactccaccgaccacgtgaagcccaaagagacagagaacaccaagcagcccagcaagagctgccacaagcccaaggccatcgtgcacaccgagaaagtgaacatgatgagcctgaccgtgctgggcctgcggatgctgttcgccaaaaccgtggccgtgaacttcctgctgaccgccaagctgttcttcctcctcaccgccaaacggggcagaaagaaactcctgtatatattcaaacaaccatttatgagaccagtacaaactactcaagaggaagatggctgtagctgccgatttccagaagaagaagaaggaggatgtgaactgagagtgaagttcagcagaagcgccgacgcccctgcctaccagcagggacagaaccaactgtacaacgagctgaacctgggcagacgggaagagtacgacgtgctggacaagcggagaggcagggaccctgagatgggcggaaagccccagcggagaaagaacccccaggaaggactgtataacgaactccagaaagacaagatggccgaagcctacagcgagatcggcatgaagggcgagcggagaagaggcaagggccacgatggcctgtaccagggcctgagcaccgccaccaaggacacctatgacgccctgcacatgcaggccctgcctccaaga

SEQ ID NO: 26708 - DNA, 933 bp, synthetic construct
  source 1..933: mol_type = other DNA
gatcctgccgtgtaccagctgcgggatagcaagagcagcgacaagagcgtgtgtctgttcaccgacttcgacagccagaccaacgtgtcccagagcaaggactccgacgtgtacatcaccgataagtgcgtgctggacatgcggagcatggacttcaagagcaactccgccgtggcctggtccaacaagtccgatttcgcctgcgccaacgccttcaacaacagcattatccccgaggacacattcttcccaagccccgagagcagcgactccaccgaccacgtgaagcccaaagagacagagaacaccaagcagcccagcaagagctgccacaagcccaaggccatcgtgcacaccgagaaagtgaacatgatgagcctgaccgtgctgggcctgcggatgctgttcgccaaaaccgtggccgtgaacttcctgctgaccgccaagctgttcttcctcctcaccgccaaacggggcagaaagaaactcctgtatatattcaaacaaccatttatgagaccagtacaaactactcaagaggaagatggctgtagctgccgatttccagaagaagaagaaggaggatgtgaactgagagtgaagttcagcagaagcgccgacgcccctgcctaccagcagggacagaaccaactgtacaacgagctgaacctgggcagacgggaagagtacgacgtgctggacaagcggagaggcagggaccctgagatgggcggaaagccccagcggagaaagaacccccaggaaggactgtataacgaactccagaaagacaagatggccgaagcctacagcgagatcggcatgaagggcgagcggagaagaggcaagggccacgatggcctgtaccagggcctgagcaccgccaccaaggacacctatgacgccctgcacatgcaggccctgcctccaaga

SEQ ID NO: 26709 - DNA, 930 bp, synthetic construct
  source 1..930: mol_type = other DNA
cctgccgtgtaccagctgcgggatagcaagagcagcgacaagagcgtgtgtctgttcaccgacttcgacagccagaccaacgtgtcccagagcaaggactccgacgtgtacatcaccgataagtgcgtgctggacatgcggagcatggacttcaagagcaactccgccgtggcctggtccaacaagtccgatttcgcctgcgccaacgccttcaacaacagcattatccccgaggacacattcttcccaagccccgagagcagcgactccaccgaccacgtgaagcccaaagagacagagaacaccaagcagcccagcaagagctgccacaagcccaaggccatcgtgcacaccgagaaagtgaacatgatgagcctgaccgtgctgggcctgcggatgctgttcgccaaaaccgtggccgtgaacttcctgctgaccgccaagctgttcttcctcctcaccgccaaacggggcagaaagaaactcctgtatatattcaaacaaccatttatgagaccagtacaaactactcaagaggaagatggctgtagctgccgatttccagaagaagaagaaggaggatgtgaactgagagtgaagttcagcagaagcgccgacgcccctgcctaccagcagggacagaaccaactgtacaacgagctgaacctgggcagacgggaagagtacgacgtgctggacaagcggagaggcagggaccctgagatgggcggaaagccccagcggagaaagaacccccaggaaggactgtataacgaactccagaaagacaagatggccgaagcctacagcgagatcggcatgaagggcgagcggagaagaggcaagggccacgatggcctgtaccagggcctgagcaccgccaccaaggacacctatgacgccctgcacatgcaggccctgcctccaaga

SEQ ID NO: 26710 - DNA, 927 bp, synthetic construct
  source 1..927: mol_type = other DNA
gccgtgtaccagctgcgggatagcaagagcagcgacaagagcgtgtgtctgttcaccgacttcgacagccagaccaacgtgtcccagagcaaggactccgacgtgtacatcaccgataagtgcgtgctggacatgcggagcatggacttcaagagcaactccgccgtggcctggtccaacaagtccgatttcgcctgcgccaacgccttcaacaacagcattatccccgaggacacattcttcccaagccccgagagcagcgactccaccgaccacgtgaagcccaaagagacagagaacaccaagcagcccagcaagagctgccacaagcccaaggccatcgtgcacaccgagaaagtgaacatgatgagcctgaccgtgctgggcctgcggatgctgttcgccaaaaccgtggccgtgaacttcctgctgaccgccaagctgttcttcctcctcaccgccaaacggggcagaaagaaactcctgtatatattcaaacaaccatttatgagaccagtacaaactactcaagaggaagatggctgtagctgccgatttccagaagaagaagaaggaggatgtgaactgagagtgaagttcagcagaagcgccgacgcccctgcctaccagcagggacagaaccaactgtacaacgagctgaacctgggcagacgggaagagtacgacgtgctggacaagcggagaggcagggaccctgagatgggcggaaagccccagcggagaaagaacccccaggaaggactgtataacgaactccagaaagacaagatggccgaagcctacagcgagatcggcatgaagggcgagcggagaagaggcaagggccacgatggcctgtaccagggcctgagcaccgccaccaaggacacctatgacgccctgcacatgcaggccctgcctccaaga

SEQ ID NO: 26711 - DNA, 924 bp, synthetic construct
  source 1..924: mol_type = other DNA
gtgtaccagctgcgggatagcaagagcagcgacaagagcgtgtgtctgttcaccgacttcgacagccagaccaacgtgtcccagagcaaggactccgacgtgtacatcaccgataagtgcgtgctggacatgcggagcatggacttcaagagcaactccgccgtggcctggtccaacaagtccgatttcgcctgcgccaacgccttcaacaacagcattatccccgaggacacattcttcccaagccccgagagcagcgactccaccgaccacgtgaagcccaaagagacagagaacaccaagcagcccagcaagagctgccacaagcccaaggccatcgtgcacaccgagaaagtgaacatgatgagcctgaccgtgctgggcctgcggatgctgttcgccaaaaccgtggccgtgaacttcctgctgaccgccaagctgttcttcctcctcaccgccaaacggggcagaaagaaactcctgtatatattcaaacaaccatttatgagaccagtacaaactactcaagaggaagatggctgtagctgccgatttccagaagaagaagaaggaggatgtgaactgagagtgaagttcagcagaagcgccgacgcccctgcctaccagcagggacagaaccaactgtacaacgagctgaacctgggcagacgggaagagtacgacgtgctggacaagcggagaggcagggaccctgagatgggcggaaagccccagcggagaaagaacccccaggaaggactgtataacgaactccagaaagacaagatggccgaagcctacagcgagatcggcatgaagggcgagcggagaagaggcaagggccacgatggcctgtaccagggcctgagcaccgccaccaaggacacctatgacgccctgcacatgcaggccctgcctccaaga

SEQ ID NO: 26712 - DNA, 921 bp, synthetic construct
  source 1..921: mol_type = other DNA
taccagctgcgggatagcaagagcagcgacaagagcgtgtgtctgttcaccgacttcgacagccagaccaacgtgtcccagagcaaggactccgacgtgtacatcaccgataagtgcgtgctggacatgcggagcatggacttcaagagcaactccgccgtggcctggtccaacaagtccgatttcgcctgcgccaacgccttcaacaacagcattatccccgaggacacattcttcccaagccccgagagcagcgactccaccgaccacgtgaagcccaaagagacagagaacaccaagcagcccagcaagagctgccacaagcccaaggccatcgtgcacaccgagaaagtgaacatgatgagcctgaccgtgctgggcctgcggatgctgttcgccaaaaccgtggccgtgaacttcctgctgaccgccaagctgttcttcctcctcaccgccaaacggggcagaaagaaactcctgtatatattcaaacaaccatttatgagaccagtacaaactactcaagaggaagatggctgtagctgccgatttccagaagaagaagaaggaggatgtgaactgagagtgaagttcagcagaagcgccgacgcccctgcctaccagcagggacagaaccaactgtacaacgagctgaacctgggcagacgggaagagtacgacgtgctggacaagcggagaggcagggaccctgagatgggcggaaagccccagcggagaaagaacccccaggaaggactgtataacgaactccagaaagacaagatggccgaagcctacagcgagatcggcatgaagggcgagcggagaagaggcaagggccacgatggcctgtaccagggcctgagcaccgccaccaaggacacctatgacgccctgcacatgcaggccctgcctccaaga

SEQ ID NO: 26713 - DNA, 918 bp, synthetic construct
  source 1..918: mol_type = other DNA
cagctgcgggatagcaagagcagcgacaagagcgtgtgtctgttcaccgacttcgacagccagaccaacgtgtcccagagcaaggactccgacgtgtacatcaccgataagtgcgtgctggacatgcggagcatggacttcaagagcaactccgccgtggcctggtccaacaagtccgatttcgcctgcgccaacgccttcaacaacagcattatccccgaggacacattcttcccaagccccgagagcagcgactccaccgaccacgtgaagcccaaagagacagagaacaccaagcagcccagcaagagctgccacaagcccaaggccatcgtgcacaccgagaaagtgaacatgatgagcctgaccgtgctgggcctgcggatgctgttcgccaaaaccgtggccgtgaacttcctgctgaccgccaagctgttcttcctcctcaccgccaaacggggcagaaagaaactcctgtatatattcaaacaaccatttatgagaccagtacaaactactcaagaggaagatggctgtagctgccgatttccagaagaagaagaaggaggatgtgaactgagagtgaagttcagcagaagcgccgacgcccctgcctaccagcagggacagaaccaactgtacaacgagctgaacctgggcagacgggaagagtacgacgtgctggacaagcggagaggcagggaccctgagatgggcggaaagccccagcggagaaagaacccccaggaaggactgtataacgaactccagaaagacaagatggccgaagcctacagcgagatcggcatgaagggcgagcggagaagaggcaagggccacgatggcctgtaccagggcctgagcaccgccaccaaggacacctatgacgccctgcacatgcaggccctgcctccaaga

SEQ ID NO: 26714 - DNA, 915 bp, synthetic construct
  source 1..915: mol_type = other DNA
ctgcgggatagcaagagcagcgacaagagcgtgtgtctgttcaccgacttcgacagccagaccaacgtgtcccagagcaaggactccgacgtgtacatcaccgataagtgcgtgctggacatgcggagcatggacttcaagagcaactccgccgtggcctggtccaacaagtccgatttcgcctgcgccaacgccttcaacaacagcattatccccgaggacacattcttcccaagccccgagagcagcgactccaccgaccacgtgaagcccaaagagacagagaacaccaagcagcccagcaagagctgccacaagcccaaggccatcgtgcacaccgagaaagtgaacatgatgagcctgaccgtgctgggcctgcggatgctgttcgccaaaaccgtggccgtgaacttcctgctgaccgccaagctgttcttcctcctcaccgccaaacggggcagaaagaaactcctgtatatattcaaacaaccatttatgagaccagtacaaactactcaagaggaagatggctgtagctgccgatttccagaagaagaagaaggaggatgtgaactgagagtgaagttcagcagaagcgccgacgcccctgcctaccagcagggacagaaccaactgtacaacgagctgaacctgggcagacgggaagagtacgacgtgctggacaagcggagaggcagggaccctgagatgggcggaaagccccagcggagaaagaacccccaggaaggactgtataacgaactccagaaagacaagatggccgaagcctacagcgagatcggcatgaagggcgagcggagaagaggcaagggccacgatggcctgtaccagggcctgagcaccgccaccaaggacacctatgacgccctgcacatgcaggccctgcctccaaga

SEQ ID NO: 26715 - DNA, 912 bp, synthetic construct
  source 1..912: mol_type = other DNA
cgggatagcaagagcagcgacaagagcgtgtgtctgttcaccgacttcgacagccagaccaacgtgtcccagagcaaggactccgacgtgtacatcaccgataagtgcgtgctggacatgcggagcatggacttcaagagcaactccgccgtggcctggtccaacaagtccgatttcgcctgcgccaacgccttcaacaacagcattatccccgaggacacattcttcccaagccccgagagcagcgactccaccgaccacgtgaagcccaaagagacagagaacaccaagcagcccagcaagagctgccacaagcccaaggccatcgtgcacaccgagaaagtgaacatgatgagcctgaccgtgctgggcctgcggatgctgttcgccaaaaccgtggccgtgaacttcctgctgaccgccaagctgttcttcctcctcaccgccaaacggggcagaaagaaactcctgtatatattcaaacaaccatttatgagaccagtacaaactactcaagaggaagatggctgtagctgccgatttccagaagaagaagaaggaggatgtgaactgagagtgaagttcagcagaagcgccgacgcccctgcctaccagcagggacagaaccaactgtacaacgagctgaacctgggcagacgggaagagtacgacgtgctggacaagcggagaggcagggaccctgagatgggcggaaagccccagcggagaaagaacccccaggaaggactgtataacgaactccagaaagacaagatggccgaagcctacagcgagatcggcatgaagggcgagcggagaagaggcaagggccacgatggcctgtaccagggcctgagcaccgccaccaaggacacctatgacgccctgcacatgcaggccctgcctccaaga

SEQ ID NO: 26716 - DNA, 909 bp, synthetic construct
  source 1..909: mol_type = other DNA
gatagcaagagcagcgacaagagcgtgtgtctgttcaccgacttcgacagccagaccaacgtgtcccagagcaaggactccgacgtgtacatcaccgataagtgcgtgctggacatgcggagcatggacttcaagagcaactccgccgtggcctggtccaacaagtccgatttcgcctgcgccaacgccttcaacaacagcattatccccgaggacacattcttcccaagccccgagagcagcgactccaccgaccacgtgaagcccaaagagacagagaacaccaagcagcccagcaagagctgccacaagcccaaggccatcgtgcacaccgagaaagtgaacatgatgagcctgaccgtgctgggcctgcggatgctgttcgccaaaaccgtggccgtgaacttcctgctgaccgccaagctgttcttcctcctcaccgccaaacggggcagaaagaaactcctgtatatattcaaacaaccatttatgagaccagtacaaactactcaagaggaagatggctgtagctgccgatttccagaagaagaagaaggaggatgtgaactgagagtgaagttcagcagaagcgccgacgcccctgcctaccagcagggacagaaccaactgtacaacgagctgaacctgggcagacgggaagagtacgacgtgctggacaagcggagaggcagggaccctgagatgggcggaaagccccagcggagaaagaacccccaggaaggactgtataacgaactccagaaagacaagatggccgaagcctacagcgagatcggcatgaagggcgagcggagaagaggcaagggccacgatggcctgtaccagggcctgagcaccgccaccaaggacacctatgacgccctgcacatgcaggccctgcctccaaga

SEQ ID NO: 26717 - DNA, 906 bp, synthetic construct
  source 1..906: mol_type = other DNA
agcaagagcagcgacaagagcgtgtgtctgttcaccgacttcgacagccagaccaacgtgtcccagagcaaggactccgacgtgtacatcaccgataagtgcgtgctggacatgcggagcatggacttcaagagcaactccgccgtggcctggtccaacaagtccgatttcgcctgcgccaacgccttcaacaacagcattatccccgaggacacattcttcccaagccccgagagcagcgactccaccgaccacgtgaagcccaaagagacagagaacaccaagcagcccagcaagagctgccacaagcccaaggccatcgtgcacaccgagaaagtgaacatgatgagcctgaccgtgctgggcctgcggatgctgttcgccaaaaccgtggccgtgaacttcctgctgaccgccaagctgttcttcctcctcaccgccaaacggggcagaaagaaactcctgtatatattcaaacaaccatttatgagaccagtacaaactactcaagaggaagatggctgtagctgccgatttccagaagaagaagaaggaggatgtgaactgagagtgaagttcagcagaagcgccgacgcccctgcctaccagcagggacagaaccaactgtacaacgagctgaacctgggcagacgggaagagtacgacgtgctggacaagcggagaggcagggaccctgagatgggcggaaagccccagcggagaaagaacccccaggaaggactgtataacgaactccagaaagacaagatggccgaagcctacagcgagatcggcatgaagggcgagcggagaagaggcaagggccacgatggcctgtaccagggcctgagcaccgccaccaaggacacctatgacgccctgcacatgcaggccctgcctccaaga

SEQ ID NO: 26718 - DNA, 903 bp, synthetic construct
  source 1..903: mol_type = other DNA
aagagcagcgacaagagcgtgtgtctgttcaccgacttcgacagccagaccaacgtgtcccagagcaaggactccgacgtgtacatcaccgataagtgcgtgctggacatgcggagcatggacttcaagagcaactccgccgtggcctggtccaacaagtccgatttcgcctgcgccaacgccttcaacaacagcattatccccgaggacacattcttcccaagccccgagagcagcgactccaccgaccacgtgaagcccaaagagacagagaacaccaagcagcccagcaagagctgccacaagcccaaggccatcgtgcacaccgagaaagtgaacatgatgagcctgaccgtgctgggcctgcggatgctgttcgccaaaaccgtggccgtgaacttcctgctgaccgccaagctgttcttcctcctcaccgccaaacggggcagaaagaaactcctgtatatattcaaacaaccatttatgagaccagtacaaactactcaagaggaagatggctgtagctgccgatttccagaagaagaagaaggaggatgtgaactgagagtgaagttcagcagaagcgccgacgcccctgcctaccagcagggacagaaccaactgtacaacgagctgaacctgggcagacgggaagagtacgacgtgctggacaagcggagaggcagggaccctgagatgggcggaaagccccagcggagaaagaacccccaggaaggactgtataacgaactccagaaagacaagatggccgaagcctacagcgagatcggcatgaagggcgagcggagaagaggcaagggccacgatggcctgtaccagggcctgagcaccgccaccaaggacacctatgacgccctgcacatgcaggccctgcctccaaga

SEQ ID NO: 26719 - DNA, 900 bp, synthetic construct
  source 1..900: mol_type = other DNA
agcagcgacaagagcgtgtgtctgttcaccgacttcgacagccagaccaacgtgtcccagagcaaggactccgacgtgtacatcaccgataagtgcgtgctggacatgcggagcatggacttcaagagcaactccgccgtggcctggtccaacaagtccgatttcgcctgcgccaacgccttcaacaacagcattatccccgaggacacattcttcccaagccccgagagcagcgactccaccgaccacgtgaagcccaaagagacagagaacaccaagcagcccagcaagagctgccacaagcccaaggccatcgtgcacaccgagaaagtgaacatgatgagcctgaccgtgctgggcctgcggatgctgttcgccaaaaccgtggccgtgaacttcctgctgaccgccaagctgttcttcctcctcaccgccaaacggggcagaaagaaactcctgtatatattcaaacaaccatttatgagaccagtacaaactactcaagaggaagatggctgtagctgccgatttccagaagaagaagaaggaggatgtgaactgagagtgaagttcagcagaagcgccgacgcccctgcctaccagcagggacagaaccaactgtacaacgagctgaacctgggcagacgggaagagtacgacgtgctggacaagcggagaggcagggaccctgagatgggcggaaagccccagcggagaaagaacccccaggaaggactgtataacgaactccagaaagacaagatggccgaagcctacagcgagatcggcatgaagggcgagcggagaagaggcaagggccacgatggcctgtaccagggcctgagcaccgccaccaaggacacctatgacgccctgcacatgcaggccctgcctccaaga

SEQ ID NO: 26720 - DNA, 897 bp, synthetic construct
  source 1..897: mol_type = other DNA
agcgacaagagcgtgtgtctgttcaccgacttcgacagccagaccaacgtgtcccagagcaaggactccgacgtgtacatcaccgataagtgcgtgctggacatgcggagcatggacttcaagagcaactccgccgtggcctggtccaacaagtccgatttcgcctgcgccaacgccttcaacaacagcattatccccgaggacacattcttcccaagccccgagagcagcgactccaccgaccacgtgaagcccaaagagacagagaacaccaagcagcccagcaagagctgccacaagcccaaggccatcgtgcacaccgagaaagtgaacatgatgagcctgaccgtgctgggcctgcggatgctgttcgccaaaaccgtggccgtgaacttcctgctgaccgccaagctgttcttcctcctcaccgccaaacggggcagaaagaaactcctgtatatattcaaacaaccatttatgagaccagtacaaactactcaagaggaagatggctgtagctgccgatttccagaagaagaagaaggaggatgtgaactgagagtgaagttcagcagaagcgccgacgcccctgcctaccagcagggacagaaccaactgtacaacgagctgaacctgggcagacgggaagagtacgacgtgctggacaagcggagaggcagggaccctgagatgggcggaaagccccagcggagaaagaacccccaggaaggactgtataacgaactccagaaagacaagatggccgaagcctacagcgagatcggcatgaagggcgagcggagaagaggcaagggccacgatggcctgtaccagggcctgagcaccgccaccaaggacacctatgacgccctgcacatgcaggccctgcctccaaga

SEQ ID NO: 26721 - DNA, 894 bp, synthetic construct
  source 1..894: mol_type = other DNA
gacaagagcgtgtgtctgttcaccgacttcgacagccagaccaacgtgtcccagagcaaggactccgacgtgtacatcaccgataagtgcgtgctggacatgcggagcatggacttcaagagcaactccgccgtggcctggtccaacaagtccgatttcgcctgcgccaacgccttcaacaacagcattatccccgaggacacattcttcccaagccccgagagcagcgactccaccgaccacgtgaagcccaaagagacagagaacaccaagcagcccagcaagagctgccacaagcccaaggccatcgtgcacaccgagaaagtgaacatgatgagcctgaccgtgctgggcctgcggatgctgttcgccaaaaccgtggccgtgaacttcctgctgaccgccaagctgttcttcctcctcaccgccaaacggggcagaaagaaactcctgtatatattcaaacaaccatttatgagaccagtacaaactactcaagaggaagatggctgtagctgccgatttccagaagaagaagaaggaggatgtgaactgagagtgaagttcagcagaagcgccgacgcccctgcctaccagcagggacagaaccaactgtacaacgagctgaacctgggcagacgggaagagtacgacgtgctggacaagcggagaggcagggaccctgagatgggcggaaagccccagcggagaaagaacccccaggaaggactgtataacgaactccagaaagacaagatggccgaagcctacagcgagatcggcatgaagggcgagcggagaagaggcaagggccacgatggcctgtaccagggcctgagcaccgccaccaaggacacctatgacgccctgcacatgcaggccctgcctccaaga

SEQ ID NO: 26722 - DNA, 891 bp, synthetic construct
  source 1..891: mol_type = other DNA
aagagcgtgtgtctgttcaccgacttcgacagccagaccaacgtgtcccagagcaaggactccgacgtgtacatcaccgataagtgcgtgctggacatgcggagcatggacttcaagagcaactccgccgtggcctggtccaacaagtccgatttcgcctgcgccaacgccttcaacaacagcattatccccgaggacacattcttcccaagccccgagagcagcgactccaccgaccacgtgaagcccaaagagacagagaacaccaagcagcccagcaagagctgccacaagcccaaggccatcgtgcacaccgagaaagtgaacatgatgagcctgaccgtgctgggcctgcggatgctgttcgccaaaaccgtggccgtgaacttcctgctgaccgccaagctgttcttcctcctcaccgccaaacggggcagaaagaaactcctgtatatattcaaacaaccatttatgagaccagtacaaactactcaagaggaagatggctgtagctgccgatttccagaagaagaagaaggaggatgtgaactgagagtgaagttcagcagaagcgccgacgcccctgcctaccagcagggacagaaccaactgtacaacgagctgaacctgggcagacgggaagagtacgacgtgctggacaagcggagaggcagggaccctgagatgggcggaaagccccagcggagaaagaacccccaggaaggactgtataacgaactccagaaagacaagatggccgaagcctacagcgagatcggcatgaagggcgagcggagaagaggcaagggccacgatggcctgtaccagggcctgagcaccgccaccaaggacacctatgacgccctgcacatgcaggccctgcctccaaga

SEQ ID NO: 26723 - DNA, 888 bp, synthetic construct
  source 1..888: mol_type = other DNA
agcgtgtgtctgttcaccgacttcgacagccagaccaacgtgtcccagagcaaggactccgacgtgtacatcaccgataagtgcgtgctggacatgcggagcatggacttcaagagcaactccgccgtggcctggtccaacaagtccgatttcgcctgcgccaacgccttcaacaacagcattatccccgaggacacattcttcccaagccccgagagcagcgactccaccgaccacgtgaagcccaaagagacagagaacaccaagcagcccagcaagagctgccacaagcccaaggccatcgtgcacaccgagaaagtgaacatgatgagcctgaccgtgctgggcctgcggatgctgttcgccaaaaccgtggccgtgaacttcctgctgaccgccaagctgttcttcctcctcaccgccaaacggggcagaaagaaactcctgtatatattcaaacaaccatttatgagaccagtacaaactactcaagaggaagatggctgtagctgccgatttccagaagaagaagaaggaggatgtgaactgagagtgaagttcagcagaagcgccgacgcccctgcctaccagcagggacagaaccaactgtacaacgagctgaacctgggcagacgggaagagtacgacgtgctggacaagcggagaggcagggaccctgagatgggcggaaagccccagcggagaaagaacccccaggaaggactgtataacgaactccagaaagacaagatggccgaagcctacagcgagatcggcatgaagggcgagcggagaagaggcaagggccacgatggcctgtaccagggcctgagcaccgccaccaaggacacctatgacgccctgcacatgcaggccctgcctccaaga

SEQ ID NO: 26724 - DNA, 885 bp, synthetic construct
  source 1..885: mol_type = other DNA
gtgtgtctgttcaccgacttcgacagccagaccaacgtgtcccagagcaaggactccgacgtgtacatcaccgataagtgcgtgctggacatgcggagcatggacttcaagagcaactccgccgtggcctggtccaacaagtccgatttcgcctgcgccaacgccttcaacaacagcattatccccgaggacacattcttcccaagccccgagagcagcgactccaccgaccacgtgaagcccaaagagacagagaacaccaagcagcccagcaagagctgccacaagcccaaggccatcgtgcacaccgagaaagtgaacatgatgagcctgaccgtgctgggcctgcggatgctgttcgccaaaaccgtggccgtgaacttcctgctgaccgccaagctgttcttcctcctcaccgccaaacggggcagaaagaaactcctgtatatattcaaacaaccatttatgagaccagtacaaactactcaagaggaagatggctgtagctgccgatttccagaagaagaagaaggaggatgtgaactgagagtgaagttcagcagaagcgccgacgcccctgcctaccagcagggacagaaccaactgtacaacgagctgaacctgggcagacgggaagagtacgacgtgctggacaagcggagaggcagggaccctgagatgggcggaaagccccagcggagaaagaacccccaggaaggactgtataacgaactccagaaagacaagatggccgaagcctacagcgagatcggcatgaagggcgagcggagaagaggcaagggccacgatggcctgtaccagggcctgagcaccgccaccaaggacacctatgacgccctgcacatgcaggccctgcctccaaga

SEQ ID NO: 26725 - DNA, 870 bp, synthetic construct
  source 1..870: mol_type = other DNA
gacttcgacagccagaccaacgtgtcccagagcaaggactccgacgtgtacatcaccgataagtgcgtgctggacatgcggagcatggacttcaagagcaactccgccgtggcctggtccaacaagtccgatttcgcctgcgccaacgccttcaacaacagcattatccccgaggacacattcttcccaagccccgagagcagcgactccaccgaccacgtgaagcccaaagagacagagaacaccaagcagcccagcaagagctgccacaagcccaaggccatcgtgcacaccgagaaagtgaacatgatgagcctgaccgtgctgggcctgcggatgctgttcgccaaaaccgtggccgtgaacttcctgctgaccgccaagctgttcttcctcctcaccgccaaacggggcagaaagaaactcctgtatatattcaaacaaccatttatgagaccagtacaaactactcaagaggaagatggctgtagctgccgatttccagaagaagaagaaggaggatgtgaactgagagtgaagttcagcagaagcgccgacgcccctgcctaccagcagggacagaaccaactgtacaacgagctgaacctgggcagacgggaagagtacgacgtgctggacaagcggagaggcagggaccctgagatgggcggaaagccccagcggagaaagaacccccaggaaggactgtataacgaactccagaaagacaagatggccgaagcctacagcgagatcggcatgaagggcgagcggagaagaggcaagggccacgatggcctgtaccagggcctgagcaccgccaccaaggacacctatgacgccctgcacatgcaggccctgcctccaaga

SEQ ID NO: 26726 - DNA, 855 bp, synthetic construct
  source 1..855: mol_type = other DNA
accaacgtgtcccagagcaaggactccgacgtgtacatcaccgataagtgcgtgctggacatgcggagcatggacttcaagagcaactccgccgtggcctggtccaacaagtccgatttcgcctgcgccaacgccttcaacaacagcattatccccgaggacacattcttcccaagccccgagagcagcgactccaccgaccacgtgaagcccaaagagacagagaacaccaagcagcccagcaagagctgccacaagcccaaggccatcgtgcacaccgagaaagtgaacatgatgagcctgaccgtgctgggcctgcggatgctgttcgccaaaaccgtggccgtgaacttcctgctgaccgccaagctgttcttcctcctcaccgccaaacggggcagaaagaaactcctgtatatattcaaacaaccatttatgagaccagtacaaactactcaagaggaagatggctgtagctgccgatttccagaagaagaagaaggaggatgtgaactgagagtgaagttcagcagaagcgccgacgcccctgcctaccagcagggacagaaccaactgtacaacgagctgaacctgggcagacgggaagagtacgacgtgctggacaagcggagaggcagggaccctgagatgggcggaaagccccagcggagaaagaacccccaggaaggactgtataacgaactccagaaagacaagatggccgaagcctacagcgagatcggcatgaagggcgagcggagaagaggcaagggccacgatggcctgtaccagggcctgagcaccgccaccaaggacacctatgacgccctgcacatgcaggccctgcctccaaga

SEQ ID NO: 26727 - DNA, 936 bp, synthetic construct; identical to SEQ ID NO: 26654
  source 1..936: mol_type = other DNA

SEQ ID NO: 26728 - DNA, 933 bp, synthetic construct
  source 1..933: mol_type = other DNA
cagaaccctgatcctgccgtgtaccagctgcgggatagcaagagcagcgacaagagcgtgtgtctgttcaccgacttcgacagccagaccaacgtgtcccagagcaaggactccgacgtgtacatcaccgataagtgcgtgctggacatgcggagcatggacttcaagagcaactccgccgtggcctggtccaacaagtccgatttcgcctgcgccaacgccttcaacaacagcattatccccgaggacacattcttcccaagccccgagagcagcgactccaccgaccacgtgaagcccaaagagacagagaacaccaagcagcccagcaagagctgccacaagcccaaggccatcgtgcacaccgagaaagtgaacatgatgagcctgaccgtgctgggcctgcggatgctgttcgccaaaaccgtggccgtgaacttcctgctgaccgccaagctgttcttcctcaaacggggcagaaagaaactcctgtatatattcaaacaaccatttatgagaccagtacaaactactcaagaggaagatggctgtagctgccgatttccagaagaagaagaaggaggatgtgaactgagagtgaagttcagcagaagcgccgacgcccctgcctaccagcagggacagaaccaactgtacaacgagctgaacctgggcagacgggaagagtacgacgtgctggacaagcggagaggcagggaccctgagatgggcggaaagccccagcggagaaagaacccccaggaaggactgtataacgaactccagaaagacaagatggccgaagcctacagcgagatcggcatgaagggcgagcggagaagaggcaagggccacgatggcctgtaccagggcctgagcaccgccaccaaggacacctatgacgccctgcacatgcaggccctgcctccaaga

SEQ ID NO: 26729 - DNA, 930 bp, synthetic construct
  source 1..930: mol_type = other DNA
aaccctgatcctgccgtgtaccagctgcgggatagcaagagcagcgacaagagcgtgtgtctgttcaccgacttcgacagccagaccaacgtgtcccagagcaaggactccgacgtgtacatcaccgataagtgcgtgctggacatgcggagcatggacttcaagagcaactccgccgtggcctggtccaacaagtccgatttcgcctgcgccaacgccttcaacaacagcattatccccgaggacacattcttcccaagccccgagagcagcgactccaccgaccacgtgaagcccaaagagacagagaacaccaagcagcccagcaagagctgccacaagcccaaggccatcgtgcacaccgagaaagtgaacatgatgagcctgaccgtgctgggcctgcggatgctgttcgccaaaaccgtggccgtgaacttcctgctgaccgccaagctgttcttcctcaaacggggcagaaagaaactcctgtatatattcaaacaaccatttatgagaccagtacaaactactcaagaggaagatggctgtagctgccgatttccagaagaagaagaaggaggatgtgaactgagagtgaagttcagcagaagcgccgacgcccctgcctaccagcagggacagaaccaactgtacaacgagctgaacctgggcagacgggaagagtacgacgtgctggacaagcggagaggcagggaccctgagatgggcggaaagccccagcggagaaagaacccccaggaaggactgtataacgaactccagaaagacaagatggccgaagcctacagcgagatcggcatgaagggcgagcggagaagaggcaagggccacgatggcctgtaccagggcctgagcaccgccaccaaggacacctatgacgccctgcacatgcaggccctgcctccaaga

SEQ ID NO: 26730 - DNA, 927 bp, synthetic construct
  source 1..927: mol_type = other DNA
cctgatcctgccgtgtaccagctgcgggatagcaagagcagcgacaagagcgtgtgtctgttcaccgacttcgacagccagaccaacgtgtcccagagcaaggactccgacgtgtacatcaccgataagtgcgtgctggacatgcggagcatggacttcaagagcaactccgccgtggcctggtccaacaagtccgatttcgcctgcgccaacgccttcaacaacagcattatccccgaggacacattcttcccaagccccgagagcagcgactccaccgaccacgtgaagcccaaagagacagagaacaccaagcagcccagcaagagctgccacaagcccaaggccatcgtgcacaccgagaaagtgaacatgatgagcctgaccgtgctgggcctgcggatgctgttcgccaaaaccgtggccgtgaacttcctgctgaccgccaagctgttcttcctcaaacggggcagaaagaaactcctgtatatattcaaacaaccatttatgagaccagtacaaactactcaagaggaagatggctgtagctgccgatttccagaagaagaagaaggaggatgtgaactgagagtgaagttcagcagaagcgccgacgcccctgcctaccagcagggacagaaccaactgtacaacgagctgaacctgggcagacgggaagagtacgacgtgctggacaagcggagaggcagggaccctgagatgggcggaaagccccagcggagaaagaacccccaggaaggactgtataacgaactccagaaagacaagatggccgaagcctacagcgagatcggcatgaagggcgagcggagaagaggcaagggccacgatggcctgtaccagggcctgagcaccgccaccaaggacacctatgacgccctgcacatgcaggccctgcctccaaga

SEQ ID NO: 26731 - DNA, 924 bp, synthetic construct
  source 1..924: mol_type = other DNA
gatcctgccgtgtaccagctgcgggatagcaagagcagcgacaagagcgtgtgtctgttcaccgacttcgacagccagaccaacgtgtcccagagcaaggactccgacgtgtacatcaccgataagtgcgtgctggacatgcggagcatggacttcaagagcaactccgccgtggcctggtccaacaagtccgatttcgcctgcgccaacgccttcaacaacagcattatccccgaggacacattcttcccaagccccgagagcagcgactccaccgaccacgtgaagcccaaagagacagagaacaccaagcagcccagcaagagctgccacaagcccaaggccatcgtgcacaccgagaaagtgaacatgatgagcctgaccgtgctgggcctgcggatgctgttcgccaaaaccgtggccgtgaacttcctgctgaccgccaagctgttcttcctcaaacggggcagaaagaaactcctgtatatattcaaacaaccatttatgagaccagtacaaactactcaagaggaagatggctgtagctgccgatttccagaagaagaagaaggaggatgtgaactgagagtgaagttcagcagaagcgccgacgcccctgcctaccagcagggacagaaccaactgtacaacgagctgaacctgggcagacgggaagagtacgacgtgctggacaagcggagaggcagggaccctgagatgggcggaaagccccagcggagaaagaacccccaggaaggactgtataacgaactccagaaagacaagatggccgaagcctacagcgagatcggcatgaagggcgagcggagaagaggcaagggccacgatggcctgtaccagggcctgagcaccgccaccaaggacacctatgacgccctgcacatgcaggccctgcctccaaga

SEQ ID NO: 26732 - DNA, 921 bp, synthetic construct
  source 1..921: mol_type = other DNA
cctgccgtgtaccagctgcgggatagcaagagcagcgacaagagcgtgtgtctgttcaccgacttcgacagccagaccaacgtgtcccagagcaaggactccgacgtgtacatcaccgataagtgcgtgctggacatgcggagcatggacttcaagagcaactccgccgtggcctggtccaacaagtccgatttcgcctgcgccaacgccttcaacaacagcattatccccgaggacacattcttcccaagccccgagagcagcgactccaccgaccacgtgaagcccaaagagacagagaacaccaagcagcccagcaagagctgccacaagcccaaggccatcgtgcacaccgagaaagtgaacatgatgagcctgaccgtgctgggcctgcggatgctgttcgccaaaaccgtggccgtgaacttcctgctgaccgccaagctgttcttcctcaaacggggcagaaagaaactcctgtatatattcaaacaaccatttatgagaccagtacaaactactcaagaggaagatggctgtagctgccgatttccagaagaagaagaaggaggatgtgaactgagagtgaagttcagcagaagcgccgacgcccctgcctaccagcagggacagaaccaactgtacaacgagctgaacctgggcagacgggaagagtacgacgtgctggacaagcggagaggcagggaccctgagatgggcggaaagccccagcggagaaagaacccccaggaaggactgtataacgaactccagaaagacaagatggccgaagcctacagcgagatcggcatgaagggcgagcggagaagaggcaagggccacgatggcctgtaccagggcctgagcaccgccaccaaggacacctatgacgccctgcacatgcaggccctgcctccaaga

SEQ ID NO: 26733 - DNA, 918 bp, synthetic construct
  source 1..918: mol_type = other DNA
gccgtgtaccagctgcgggatagcaagagcagcgacaagagcgtgtgtctgttcaccgacttcgacagccagaccaacgtgtcccagagcaaggactccgacgtgtacatcaccgataagtgcgtgctggacatgcggagcatggacttcaagagcaactccgccgtggcctggtccaacaagtccgatttcgcctgcgccaacgccttcaacaacagcattatccccgaggacacattcttcccaagccccgagagcagcgactccaccgaccacgtgaagcccaaagagacagagaacaccaagcagcccagcaagagctgccacaagcccaaggccatcgtgcacaccgagaaagtgaacatgatgagcctgaccgtgctgggcctgcggatgctgttcgccaaaaccgtggccgtgaacttcctgctgaccgccaagctgttcttcctcaaacggggcagaaagaaactcctgtatatattcaaacaaccatttatgagaccagtacaaactactcaagaggaagatggctgtagctgccgatttccagaagaagaagaaggaggatgtgaactgagagtgaagttcagcagaagcgccgacgcccctgcctaccagcagggacagaaccaactgtacaacgagctgaacctgggcagacgggaagagtacgacgtgctggacaagcggagaggcagggaccctgagatgggcggaaagccccagcggagaaagaacccccaggaaggactgtataacgaactccagaaagacaagatggccgaagcctacagcgagatcggcatgaagggcgagcggagaagaggcaagggccacgatggcctgtaccagggcctgagcaccgccaccaaggacacctatgacgccctgcacatgcaggccctgcctccaaga

SEQ ID NO: 26734 - DNA, 915 bp, synthetic construct
  source 1..915: mol_type = other DNA
gtgtaccagctgcgggatagcaagagcagcgacaagagcgtgtgtctgttcaccgacttcgacagccagaccaacgtgtcccagagcaaggactccgacgtgtacatcaccgataagtgcgtgctggacatgcggagcatggacttcaagagcaactccgccgtggcctggtccaacaagtccgatttcgcctgcgccaacgccttcaacaacagcattatccccgaggacacattcttcccaagccccgagagcagcgactccaccgaccacgtgaagcccaaagagacagagaacaccaagcagcccagcaagagctgccacaagcccaaggccatcgtgcacaccgagaaagtgaacatgatgagcctgaccgtgctgggcctgcggatgctgttcgccaaaaccgtggccgtgaacttcctgctgaccgccaagctgttcttcctcaaacggggcagaaagaaactcctgtatatattcaaacaaccatttatgagaccagtacaaactactcaagaggaagatggctgtagctgccgatttccagaagaagaagaaggaggatgtgaactgagagtgaagttcagcagaagcgccgacgcccctgcctaccagcagggacagaaccaactgtacaacgagctgaacctgggcagacgggaagagtacgacgtgctggacaagcggagaggcagggaccctgagatgggcggaaagccccagcggagaaagaacccccaggaaggactgtataacgaactccagaaagacaagatggccgaagcctacagcgagatcggcatgaagggcgagcggagaagaggcaagggccacgatggcctgtaccagggcctgagcaccgccaccaaggacacctatgacgccctgcacatgcaggccctgcctccaaga

SEQ ID NO: 26735 - DNA, 912 bp, synthetic construct
  source 1..912: mol_type = other DNA
taccagctgcgggatagcaagagcagcgacaagagcgtgtgtctgttcaccgacttcgacagccagaccaacgtgtcccagagcaaggactccgacgtgtacatcaccgataagtgcgtgctggacatgcggagcatggacttcaagagcaactccgccgtggcctggtccaacaagtccgatttcgcctgcgccaacgccttcaacaacagcattatccccgaggacacattcttcccaagccccgagagcagcgactccaccgaccacgtgaagcccaaagagacagagaacaccaagcagcccagcaagagctgccacaagcccaaggccatcgtgcacaccgagaaagtgaacatgatgagcctgaccgtgctgggcctgcggatgctgttcgccaaaaccgtggccgtgaacttcctgctgaccgccaagctgttcttcctcaaacggggcagaaagaaactcctgtatatattcaaacaaccatttatgagaccagtacaaactactcaagaggaagatggctgtagctgccgatttccagaagaagaagaaggaggatgtgaactgagagtgaagttcagcagaagcgccgacgcccctgcctaccagcagggacagaaccaactgtacaacgagctgaacctgggcagacgggaagagtacgacgtgctggacaagcggagaggcagggaccctgagatgggcggaaagccccagcggagaaagaacccccaggaaggactgtataacgaactccagaaagacaagatggccgaagcctacagcgagatcggcatgaagggcgagcggagaagaggcaagggccacgatggcctgtaccagggcctgagcaccgccaccaaggacacctatgacgccctgcacatgcaggccctgcctccaaga

SEQ ID NO: 26736 - DNA, 909 bp, synthetic construct
  source 1..909: mol_type = other DNA
cagctgcgggatagcaagagcagcgacaagagcgtgtgtctgttcaccgacttcgacagccagaccaacgtgtcccagagcaaggactccgacgtgtacatcaccgataagtgcgtgctggacatgcggagcatggacttcaagagcaactccgccgtggcctggtccaacaagtccgatttcgcctgcgccaacgccttcaacaacagcattatccccgaggacacattcttcccaagccccgagagcagcgactccaccgaccacgtgaagcccaaagagacagagaacaccaagcagcccagcaagagctgccacaagcccaaggccatcgtgcacaccgagaaagtgaacatgatgagcctgaccgtgctgggcctgcggatgctgttcgccaaaaccgtggccgtgaacttcctgctgaccgccaagctgttcttcctcaaacggggcagaaagaaactcctgtatatattcaaacaaccatttatgagaccagtacaaactactcaagaggaagatggctgtagctgccgatttccagaagaagaagaaggaggatgtgaactgagagtgaagttcagcagaagcgccgacgcccctgcctaccagcagggacagaaccaactgtacaacgagctgaacctgggcagacgggaagagtacgacgtgctggacaagcggagaggcagggaccctgagatgggcggaaagccccagcggagaaagaacccccaggaaggactgtataacgaactccagaaagacaagatggccgaagcctacagcgagatcggcatgaagggcgagcggagaagaggcaagggccacgatggcctgtaccagggcctgagcaccgccaccaaggacacctatgacgccctgcacatgcaggccctgcctccaaga

SEQ ID NO: 26737 - DNA, 906 bp, synthetic construct
  source 1..906: mol_type = other DNA
ctgcgggatagcaagagcagcgacaagagcgtgtgtctgttcaccgacttcgacagccagaccaacgtgtcccagagcaaggactccgacgtgtacatcaccgataagtgcgtgctggacatgcggagcatggacttcaagagcaactccgccgtggcctggtccaacaagtccgatttcgcctgcgccaacgccttcaacaacagcattatccccgaggacacattcttcccaagccccgagagcagcgactccaccgaccacgtgaagcccaaagagacagagaacaccaagcagcccagcaagagctgccacaagcccaaggccatcgtgcacaccgagaaagtgaacatgatgagcctgaccgtgctgggcctgcggatgctgttcgccaaaaccgtggccgtgaacttcctgctgaccgccaagctgttcttcctcaaacggggcagaaagaaactcctgtatatattcaaacaaccatttatgagaccagtacaaactactcaagaggaagatggctgtagctgccgatttccagaagaagaagaaggaggatgtgaactgagagtgaagttcagcagaagcgccgacgcccctgcctaccagcagggacagaaccaactgtacaacgagctgaacctgggcagacgggaagagtacgacgtgctggacaagcggagaggcagggaccctgagatgggcggaaagccccagcggagaaagaacccccaggaaggactgtataacgaactccagaaagacaagatggccgaagcctacagcgagatcggcatgaagggcgagcggagaagaggcaagggccacgatggcctgtaccagggcctgagcaccgccaccaaggacacctatgacgccctgcacatgcaggccctgcctccaaga

SEQ ID NO: 26738 - DNA, 903 bp, synthetic construct
  source 1..903: mol_type = other DNA
cgggatagcaagagcagcgacaagagcgtgtgtctgttcaccgacttcgacagccagaccaacgtgtcccagagcaaggactccgacgtgtacatcaccgataagtgcgtgctggacatgcggagcatggacttcaagagcaactccgccgtggcctggtccaacaagtccgatttcgcctgcgccaacgccttcaacaacagcattatccccgaggacacattcttcccaagccccgagagcagcgactccaccgaccacgtgaagcccaaagagacagagaacaccaagcagcccagcaagagctgccacaagcccaaggccatcgtgcacaccgagaaagtgaacatgatgagcctgaccgtgctgggcctgcggatgctgttcgccaaaaccgtggccgtgaacttcctgctgaccgccaagctgttcttcctcaaacggggcagaaagaaactcctgtatatattcaaacaaccatttatgagaccagtacaaactactcaagaggaagatggctgtagctgccgatttccagaagaagaagaaggaggatgtgaactgagagtgaagttcagcagaagcgccgacgcccctgcctaccagcagggacagaaccaactgtacaacgagctgaacctgggcagacgggaagagtacgacgtgctggacaagcggagaggcagggaccctgagatgggcggaaagccccagcggagaaagaacccccaggaaggactgtataacgaactccagaaagacaagatggccgaagcctacagcgagatcggcatgaagggcgagcggagaagaggcaagggccacgatggcctgtaccagggcctgagcaccgccaccaaggacacctatgacgccctgcacatgcaggccctgcctccaaga

SEQ ID NO: 26739 - DNA, 900 bp, synthetic construct
  source 1..900: mol_type = other DNA
gatagcaagagcagcgacaagagcgtgtgtctgttcaccgacttcgacagccagaccaacgtgtcccagagcaaggactccgacgtgtacatcaccgataagtgcgtgctggacatgcggagcatggacttcaagagcaactccgccgtggcctggtccaacaagtccgatttcgcctgcgccaacgccttcaacaacagcattatccccgaggacacattcttcccaagccccgagagcagcgactccaccgaccacgtgaagcccaaagagacagagaacaccaagcagcccagcaagagctgccacaagcccaaggccatcgtgcacaccgagaaagtgaacatgatgagcctgaccgtgctgggcctgcggatgctgttcgccaaaaccgtggccgtgaacttcctgctgaccgccaagctgttcttcctcaaacggggcagaaagaaactcctgtatatattcaaacaaccatttatgagaccagtacaaactactcaagaggaagatggctgtagctgccgatttccagaagaagaagaaggaggatgtgaactgagagtgaagttcagcagaagcgccgacgcccctgcctaccagcagggacagaaccaactgtacaacgagctgaacctgggcagacgggaagagtacgacgtgctggacaagcggagaggcagggaccctgagatgggcggaaagccccagcggagaaagaacccccaggaaggactgtataacgaactccagaaagacaagatggccgaagcctacagcgagatcggcatgaagggcgagcggagaagaggcaagggccacgatggcctgtaccagggcctgagcaccgccaccaaggacacctatgacgccctgcacatgcaggccctgcctccaaga

SEQ ID NO: 26740 - DNA, 897 bp, synthetic construct
  source 1..897: mol_type = other DNA
agcaagagcagcgacaagagcgtgtgtctgttcaccgacttcgacagccagaccaacgtgtcccagagcaaggactccgacgtgtacatcaccgataagtgcgtgctggacatgcggagcatggacttcaagagcaactccgccgtggcctggtccaacaagtccgatttcgcctgcgccaacgccttcaacaacagcattatccccgaggacacattcttcccaagccccgagagcagcgactccaccgaccacgtgaagcccaaagagacagagaacaccaagcagcccagcaagagctgccacaagcccaaggccatcgtgcacaccgagaaagtgaacatgatgagcctgaccgtgctgggcctgcggatgctgttcgccaaaaccgtggccgtgaacttcctgctgaccgccaagctgttcttcctcaaacggggcagaaagaaactcctgtatatattcaaacaaccatttatgagaccagtacaaactactcaagaggaagatggctgtagctgccgatttccagaagaagaagaaggaggatgtgaactgagagtgaagttcagcagaagcgccgacgcccctgcctaccagcagggacagaaccaactgtacaacgagctgaacctgggcagacgggaagagtacgacgtgctggacaagcggagaggcagggaccctgagatgggcggaaagccccagcggagaaagaacccccaggaaggactgtataacgaactccagaaagacaagatggccgaagcctacagcgagatcggcatgaagggcgagcggagaagaggcaagggccacgatggcctgtaccagggcctgagcaccgccaccaaggacacctatgacgccctgcacatgcaggccctgcctccaaga

SEQ ID NO: 26741 - DNA, 894 bp, synthetic construct
  source 1..894: mol_type = other DNA
aagagcagcgacaagagcgtgtgtctgttcaccgacttcgacagccagaccaacgtgtcccagagcaaggactccgacgtgtacatcaccgataagtgcgtgctggacatgcggagcatggacttcaagagcaactccgccgtggcctggtccaacaagtccgatttcgcctgcgccaacgccttcaacaacagcattatccccgaggacacattcttcccaagccccgagagcagcgactccaccgaccacgtgaagcccaaagagacagagaacaccaagcagcccagcaagagctgccacaagcccaaggccatcgtgcacaccgagaaagtgaacatgatgagcctgaccgtgctgggcctgcggatgctgttcgccaaaaccgtggccgtgaacttcctgctgaccgccaagctgttcttcctcaaacggggcagaaagaaactcctgtatatattcaaacaaccatttatgagaccagtacaaactactcaagaggaagatggctgtagctgccgatttccagaagaagaagaaggaggatgtgaactgagagtgaagttcagcagaagcgccgacgcccctgcctaccagcagggacagaaccaactgtacaacgagctgaacctgggcagacgggaagagtacgacgtgctggacaagcggagaggcagggaccctgagatgggcggaaagccccagcggagaaagaacccccaggaaggactgtataacgaactccagaaagacaagatggccgaagcctacagcgagatcggcatgaagggcgagcggagaagaggcaagggccacgatggcctgtaccagggcctgagcaccgccaccaaggacacctatgacgccctgcacatgcaggccctgcctccaaga

SEQ ID NO: 26742 - DNA, 891 bp, synthetic construct
  source 1..891: mol_type = other DNA
agcagcgacaagagcgtgtgtctgttcaccgacttcgacagccagaccaacgtgtcccagagcaaggactccgacgtgtacatcaccgataagtgcgtgctggacatgcggagcatggacttcaagagcaactccgccgtggcctggtccaacaagtccgatttcgcctgcgccaacgccttcaacaacagcattatccccgaggacacattcttcccaagccccgagagcagcgactccaccgaccacgtgaagcccaaagagacagagaacaccaagcagcccagcaagagctgccacaagcccaaggccatcgtgcacaccgagaaagtgaacatgatgagcctgaccgtgctgggcctgcggatgctgttcgccaaaaccgtggccgtgaacttcctgctgaccgccaagctgttcttcctcaaacggggcagaaagaaactcctgtatatattcaaacaaccatttatgagaccagtacaaactactcaagaggaagatggctgtagctgccgatttccagaagaagaagaaggaggatgtgaactgagagtgaagttcagcagaagcgccgacgcccctgcctaccagcagggacagaaccaactgtacaacgagctgaacctgggcagacgggaagagtacgacgtgctggacaagcggagaggcagggaccctgagatgggcggaaagccccagcggagaaagaacccccaggaaggactgtataacgaactccagaaagacaagatggccgaagcctacagcgagatcggcatgaagggcgagcggagaagaggcaagggccacgatggcctgtaccagggcctgagcaccgccaccaaggacacctatgacgccctgcacatgcaggccctgcctccaaga

SEQ ID NO: 26743 - DNA, 888 bp, synthetic construct
  source 1..888: mol_type = other DNA
agcgacaagagcgtgtgtctgttcaccgacttcgacagccagaccaacgtgtcccagagcaaggactccgacgtgtacatcaccgataagtgcgtgctggacatgcggagcatggacttcaagagcaactccgccgtggcctggtccaacaagtccgatttcgcctgcgccaacgccttcaacaacagcattatccccgaggacacattcttcccaagccccgagagcagcgactccaccgaccacgtgaagcccaaagagacagagaacaccaagcagcccagcaagagctgccacaagcccaaggccatcgtgcacaccgagaaagtgaacatgatgagcctgaccgtgctgggcctgcggatgctgttcgccaaaaccgtggccgtgaacttcctgctgaccgccaagctgttcttcctcaaacggggcagaaagaaactcctgtatatattcaaacaaccatttatgagaccagtacaaactactcaagaggaagatggctgtagctgccgatttccagaagaagaagaaggaggatgtgaactgagagtgaagttcagcagaagcgccgacgcccctgcctaccagcagggacagaaccaactgtacaacgagctgaacctgggcagacgggaagagtacgacgtgctggacaagcggagaggcagggaccctgagatgggcggaaagccccagcggagaaagaacccccaggaaggactgtataacgaactccagaaagacaagatggccgaagcctacagcgagatcggcatgaagggcgagcggagaagaggcaagggccacgatggcctgtaccagggcctgagcaccgccaccaaggacacctatgacgccctgcacatgcaggccctgcctccaaga

SEQ ID NO: 26744 - DNA, 885 bp, synthetic construct
  source 1..885: mol_type = other DNA
gacaagagcgtgtgtctgttcaccgacttcgacagccagaccaacgtgtcccagagcaaggactccgacgtgtacatcaccgataagtgcgtgctggacatgcggagcatggacttcaagagcaactccgccgtggcctggtccaacaagtccgatttcgcctgcgccaacgccttcaacaacagcattatccccgaggacacattcttcccaagccccgagagcagcgactccaccgaccacgtgaagcccaaagagacagagaacaccaagcagcccagcaagagctgccacaagcccaaggccatcgtgcacaccgagaaagtgaacatgatgagcctgaccgtgctgggcctgcggatgctgttcgccaaaaccgtggccgtgaacttcctgctgaccgccaagctgttcttcctcaaacggggcagaaagaaactcctgtatatattcaaacaaccatttatgagaccagtacaaactactcaagaggaagatggctgtagctgccgatttccagaagaagaagaaggaggatgtgaactgagagtgaagttcagcagaagcgccgacgcccctgcctaccagcagggacagaaccaactgtacaacgagctgaacctgggcagacgggaagagtacgacgtgctggacaagcggagaggcagggaccctgagatgggcggaaagccccagcggagaaagaacccccaggaaggactgtataacgaactccagaaagacaagatggccgaagcctacagcgagatcggcatgaagggcgagcggagaagaggcaagggccacgatggcctgtaccagggcctgagcaccgccaccaaggacacctatgacgccctgcacatgcaggccctgcctccaaga

SEQ ID NO: 26745 - DNA, 882 bp, synthetic construct
  source 1..882: mol_type = other DNA
aagagcgtgtgtctgttcaccgacttcgacagccagaccaacgtgtcccagagcaaggactccgacgtgtacatcaccgataagtgcgtgctggacatgcggagcatggacttcaagagcaactccgccgtggcctggtccaacaagtccgatttcgcctgcgccaacgccttcaacaacagcattatccccgaggacacattcttcccaagccccgagagcagcgactccaccgaccacgtgaagcccaaagagacagagaacaccaagcagcccagcaagagctgccacaagcccaaggccatcgtgcacaccgagaaagtgaacatgatgagcctgaccgtgctgggcctgcggatgctgttcgccaaaaccgtggccgtgaacttcctgctgaccgccaagctgttcttcctcaaacggggcagaaagaaactcctgtatatattcaaacaaccatttatgagaccagtacaaactactcaagaggaagatggctgtagctgccgatttccagaagaagaagaaggaggatgtgaactgagagtgaagttcagcagaagcgccgacgcccctgcctaccagcagggacagaaccaactgtacaacgagctgaacctgggcagacgggaagagtacgacgtgctggacaagcggagaggcagggaccctgagatgggcggaaagccccagcggagaaagaacccccaggaaggactgtataacgaactccagaaagacaagatggccgaagcctacagcgagatcggcatgaagggcgagcggagaagaggcaagggccacgatggcctgtaccagggcctgagcaccgccaccaaggacacctatgacgccctgcacatgcaggccctgcctccaaga

SEQ ID NO: 26746 - DNA, 879 bp, synthetic construct
  source 1..879: mol_type = other DNA
agcgtgtgtctgttcaccgacttcgacagccagaccaacgtgtcccagagcaaggactccgacgtgtacatcaccgataagtgcgtgctggacatgcggagcatggacttcaagagcaactccgccgtggcctggtccaacaagtccgatttcgcctgcgccaacgccttcaacaacagcattatccccgaggacacattcttcccaagccccgagagcagcgactccaccgaccacgtgaagcccaaagagacagagaacaccaagcagcccagcaagagctgccacaagcccaaggccatcgtgcacaccgagaaagtgaacatgatgagcctgaccgtgctgggcctgcggatgctgttcgccaaaaccgtggccgtgaacttcctgctgaccgccaagctgttcttcctcaaacggggcagaaagaaactcctgtatatattcaaacaaccatttatgagaccagtacaaactactcaagaggaagatggctgtagctgccgatttccagaagaagaagaaggaggatgtgaactgagagtgaagttcagcagaagcgccgacgcccctgcctaccagcagggacagaaccaactgtacaacgagctgaacctgggcagacgggaagagtacgacgtgctggacaagcggagaggcagggaccctgagatgggcggaaagccccagcggagaaagaacccccaggaaggactgtataacgaactccagaaagacaagatggccgaagcctacagcgagatcggcatgaagggcgagcggagaagaggcaagggccacgatggcctgtaccagggcctgagcaccgccaccaaggacacctatgacgccctgcacatgcaggccctgcctccaaga

SEQ ID NO: 26747 - DNA, 876 bp, synthetic construct
  source 1..876: mol_type = other DNA
gtgtgtctgttcaccgacttcgacagccagaccaacgtgtcccagagcaaggactccgacgtgtacatcaccgataagtgcgtgctggacatgcggagcatggacttcaagagcaactccgccgtggcctggtccaacaagtccgatttcgcctgcgccaacgccttcaacaacagcattatccccgaggacacattcttcccaagccccgagagcagcgactccaccgaccacgtgaagcccaaagagacagagaacaccaagcagcccagcaagagctgccacaagcccaaggccatcgtgcacaccgagaaagtgaacatgatgagcctgaccgtgctgggcctgcggatgctgttcgccaaaaccgtggccgtgaacttcctgctgaccgccaagctgttcttcctcaaacggggcagaaagaaactcctgtatatattcaaacaaccatttatgagaccagtacaaactactcaagaggaagatggctgtagctgccgatttccagaagaagaagaaggaggatgtgaactgagagtgaagttcagcagaagcgccgacgcccctgcctaccagcagggacagaaccaactgtacaacgagctgaacctgggcagacgggaagagtacgacgtgctggacaagcggagaggcagggaccctgagatgggcggaaagccccagcggagaaagaacccccaggaaggactgtataacgaactccagaaagacaagatggccgaagcctacagcgagatcggcatgaagggcgagcggagaagaggcaagggccacgatggcctgtaccagggcctgagcaccgccaccaaggacacctatgacgccctgcacatgcaggccctgcctccaaga

SEQ ID NO: 26748 - DNA, 861 bp, synthetic construct
  source 1..861: mol_type = other DNA
gacttcgacagccagaccaacgtgtcccagagcaaggactccgacgtgtacatcaccgataagtgcgtgctggacatgcggagcatggacttcaagagcaactccgccgtggcctggtccaacaagtccgatttcgcctgcgccaacgccttcaacaacagcattatccccgaggacacattcttcccaagccccgagagcagcgactccaccgaccacgtgaagcccaaagagacagagaacaccaagcagcccagcaagagctgccacaagcccaaggccatcgtgcacaccgagaaagtgaacatgatgagcctgaccgtgctgggcctgcggatgctgttcgccaaaaccgtggccgtgaacttcctgctgaccgccaagctgttcttcctcaaacggggcagaaagaaactcctgtatatattcaaacaaccatttatgagaccagtacaaactactcaagaggaagatggctgtagctgccgatttccagaagaagaagaaggaggatgtgaactgagagtgaagttcagcagaagcgccgacgcccctgcctaccagcagggacagaaccaactgtacaacgagctgaacctgggcagacgggaagagtacgacgtgctggacaagcggagaggcagggaccctgagatgggcggaaagccccagcggagaaagaacccccaggaaggactgtataacgaactccagaaagacaagatggccgaagcctacagcgagatcggcatgaagggcgagcggagaagaggcaagggccacgatggcctgtaccagggcctgagcaccgccaccaaggacacctatgacgccctgcacatgcaggccctgcctccaaga

SEQ ID NO: 26749 - DNA, 846 bp, synthetic construct
  source 1..846: mol_type = other DNA
accaacgtgtcccagagcaaggactccgacgtgtacatcaccgataagtgcgtgctggacatgcggagcatggacttcaagagcaactccgccgtggcctggtccaacaagtccgatttcgcctgcgccaacgccttcaacaacagcattatccccgaggacacattcttcccaagccccgagagcagcgactccaccgaccacgtgaagcccaaagagacagagaacaccaagcagcccagcaagagctgccacaagcccaaggccatcgtgcacaccgagaaagtgaacatgatgagcctgaccgtgctgggcctgcggatgctgttcgccaaaaccgtggccgtgaacttcctgctgaccgccaagctgttcttcctcaaacggggcagaaagaaactcctgtatatattcaaacaaccatttatgagaccagtacaaactactcaagaggaagatggctgtagctgccgatttccagaagaagaagaaggaggatgtgaactgagagtgaagttcagcagaagcgccgacgcccctgcctaccagcagggacagaaccaactgtacaacgagctgaacctgggcagacgggaagagtacgacgtgctggacaagcggagaggcagggaccctgagatgggcggaaagccccagcggagaaagaacccccaggaaggactgtataacgaactccagaaagacaagatggccgaagcctacagcgagatcggcatgaagggcgagcggagaagaggcaagggccacgatggcctgtaccagggcctgagcaccgccaccaaggacacctatgacgccctgcacatgcaggccctgcctccaaga

SEQ ID NO: 26750 - DNA, 984 bp, synthetic construct
  source 1..984: mol_type = other DNA
ggacagcctaaggccaatcctaccgtgacactgttccctccaagcagcgaagaactccaggccaacaaggccacacttgtgtgcctgatctccgacttctaccctggggctgtgacagtggcttggaaggccgatggatctcctgtgaaagccggcgtggaaaccaccaagccatccaagcagagcaacaacaaatacgccgccagctcctacctgagcctgacacctgagcagtggaagtcccacagatcctacagctgccaagtgacccacgaaggcagcaccgtggaaaagacagtggcccctacagagtgcagccccatcaagaccgatgtgattacaatggaccccaaggacaactgctccaaggacgccaacgataccctgctgctccagctgaccaacaccagcgcctactacatgtacttgttgctgctgctgaagtccgtggtgtacttcgccatcatcacatgctgcctgctgcggagaaccgccttctgctgcaacggcgagaagtctaaacggggcagaaagaaactcctgtatatattcaaacaaccatttatgagaccagtacaaactactcaagaggaagatggctgtagctgccgatttccagaagaagaagaaggaggatgtgaactgagagtgaagttcagcagaagcgccgacgcccctgcctaccagcagggacagaaccaactgtacaacgagctgaacctgggcagacgggaagagtacgacgtgctggacaagcggagaggcagggaccctgagatgggcggaaagccccagcggagaaagaacccccaggaaggactgtataacgaactccagaaagacaagatggccgaagcctacagcgagatcggcatgaagggcgagcggagaagaggcaagggccacgatggcctgtaccagggcctgagcaccgccaccaaggacacctatgacgccctgcacatgcaggccctgcctccaaga

SEQ ID NO: 26751 - DNA, 981 bp, synthetic construct
  source 1..981: mol_type = other DNA
cagcctaaggccaatcctaccgtgacactgttccctccaagcagcgaagaactccaggccaacaaggccacacttgtgtgcctgatctccgacttctaccctggggctgtgacagtggcttggaaggccgatggatctcctgtgaaagccggcgtggaaaccaccaagccatccaagcagagcaacaacaaatacgccgccagctcctacctgagcctgacacctgagcagtggaagtcccacagatcctacagctgccaagtgacccacgaaggcagcaccgtggaaaagacagtggcccctacagagtgcagccccatcaagaccgatgtgattacaatggaccccaaggacaactgctccaaggacgccaacgataccctgctgctccagctgaccaacaccagcgcctactacatgtacttgttgctgctgctgaagtccgtggtgtacttcgccatcatcacatgctgcctgctgcggagaaccgccttctgctgcaacggcgagaagtctaaacggggcagaaagaaactcctgtatatattcaaacaaccatttatgagaccagtacaaactactcaagaggaagatggctgtagctgccgatttccagaagaagaagaaggaggatgtgaactgagagtgaagttcagcagaagcgccgacgcccctgcctaccagcagggacagaaccaactgtacaacgagctgaacctgggcagacgggaagagtacgacgtgctggacaagcggagaggcagggaccctgagatgggcggaaagccccagcggagaaagaacccccaggaaggactgtataacgaactccagaaagacaagatggccgaagcctacagcgagatcggcatgaagggcgagcggagaagaggcaagggccacgatggcctgtaccagggcctgagcaccgccaccaaggacacctatgacgccctgcacatgcaggccctgcctccaaga

SEQ ID NO: 26752 - DNA, 978 bp, synthetic construct
  source 1..978: mol_type = other DNA
cctaaggccaatcctaccgtgacactgttccctccaagcagcgaagaactccaggccaacaaggccacacttgtgtgcctgatctccgacttctaccctggggctgtgacagtggcttggaaggccgatggatctcctgtgaaagccggcgtggaaaccaccaagccatccaagcagagcaacaacaaatacgccgccagctcctacctgagcctgacacctgagcagtggaagtcccacagatcctacagctgccaagtgacccacgaaggcagcaccgtggaaaagacagtggcccctacagagtgcagccccatcaagaccgatgtgattacaatggaccccaaggacaactgctccaaggacgccaacgataccctgctgctccagctgaccaacaccagcgcctactacatgtacttgttgctgctgctgaagtccgtggtgtacttcgccatcatcacatgctgcctgctgcggagaaccgccttctgctgcaacggcgagaagtctaaacggggcagaaagaaactcctgtatatattcaaacaaccatttatgagaccagtacaaactactcaagaggaagatggctgtagctgccgatttccagaagaagaagaaggaggatgtgaactgagagtgaagttcagcagaagcgccgacgcccctgcctaccagcagggacagaaccaactgtacaacgagctgaacctgggcagacgggaagagtacgacgtgctggacaagcggagaggcagggaccctgagatgggcggaaagccccagcggagaaagaacccccaggaaggactgtataacgaactccagaaagacaagatggccgaagcctacagcgagatcggcatgaagggcgagcggagaagaggcaagggccacgatggcctgtaccagggcctgagcaccgccaccaaggacacctatgacgccctgcacatgcaggccctgcctccaaga

SEQ ID NO: 26753 - DNA, 975 bp, synthetic construct
  source 1..975: mol_type = other DNA
aaggccaatcctaccgtgacactgttccctccaagcagcgaagaactccaggccaacaaggccacacttgtgtgcctgatctccgacttctaccctggggctgtgacagtggcttggaaggccgatggatctcctgtgaaagccggcgtggaaaccaccaagccatccaagcagagcaacaacaaatacgccgccagctcctacctgagcctgacacctgagcagtggaagtcccacagatcctacagctgccaagtgacccacgaaggcagcaccgtggaaaagacagtggcccctacagagtgcagccccatcaagaccgatgtgattacaatggaccccaaggacaactgctccaaggacgccaacgataccctgctgctccagctgaccaacaccagcgcctactacatgtacttgttgctgctgctgaagtccgtggtgtacttcgccatcatcacatgctgcctgctgcggagaaccgccttctgctgcaacggcgagaagtctaaacggggcagaaagaaactcctgtatatattcaaacaaccatttatgagaccagtacaaactactcaagaggaagatggctgtagctgccgatttccagaagaagaagaaggaggatgtgaactgagagtgaagttcagcagaagcgccgacgcccctgcctaccagcagggacagaaccaactgtacaacgagctgaacctgggcagacgggaagagtacgacgtgctggacaagcggagaggcagggaccctgagatgggcggaaagccccagcggagaaagaacccccaggaaggactgtataacgaactccagaaagacaagatggccgaagcctacagcgagatcggcatgaagggcgagcggagaagaggcaagggccacgatggcctgtaccagggcctgagcaccgccaccaaggacacctatgacgccctgcacatgcaggccctgcctccaaga

SEQ ID NO: 26754 - DNA, 972 bp, synthetic construct
  source 1..972: mol_type = other DNA
gccaatcctaccgtgacactgttccctccaagcagcgaagaactccaggccaacaaggccacacttgtgtgcctgatctccgacttctaccctggggctgtgacagtggcttggaaggccgatggatctcctgtgaaagccggcgtggaaaccaccaagccatccaagcagagcaacaacaaatacgccgccagctcctacctgagcctgacacctgagcagtggaagtcccacagatcctacagctgccaagtgacccacgaaggcagcaccgtggaaaagacagtggcccctacagagtgcagccccatcaagaccgatgtgattacaatggaccccaaggacaactgctccaaggacgccaacgataccctgctgctccagctgaccaacaccagcgcctactacatgtacttgttgctgctgctgaagtccgtggtgtacttcgccatcatcacatgctgcctgctgcggagaaccgccttctgctgcaacggcgagaagtctaaacggggcagaaagaaactcctgtatatattcaaacaaccatttatgagaccagtacaaactactcaagaggaagatggctgtagctgccgatttccagaagaagaagaaggaggatgtgaactgagagtgaagttcagcagaagcgccgacgcccctgcctaccagcagggacagaaccaactgtacaacgagctgaacctgggcagacgggaagagtacgacgtgctggacaagcggagaggcagggaccctgagatgggcggaaagccccagcggagaaagaacccccaggaaggactgtataacgaactccagaaagacaagatggccgaagcctacagcgagatcggcatgaagggcgagcggagaagaggcaagggccacgatggcctgtaccagggcctgagcaccgccaccaaggacacctatgacgccctgcacatgcaggccctgcctccaaga

SEQ ID NO: 26755 - DNA, 969 bp, synthetic construct
  source 1..969: mol_type = other DNA
aatcctaccgtgacactgttccctccaagcagcgaagaactccaggccaacaaggccacacttgtgtgcctgatctccgacttctaccctggggctgtgacagtggcttggaaggccgatggatctcctgtgaaagccggcgtggaaaccaccaagccatccaagcagagcaacaacaaatacgccgccagctcctacctgagcctgacacctgagcagtggaagtcccacagatcctacagctgccaagtgacccacgaaggcagcaccgtggaaaagacagtggcccctacagagtgcagccccatcaagaccgatgtgattacaatggaccccaaggacaactgctccaaggacgccaacgataccctgctgctccagctgaccaacaccagcgcctactacatgtacttgttgctgctgctgaagtccgtggtgtacttcgccatcatcacatgctgcctgctgcggagaaccgccttctgctgcaacggcgagaagtctaaacggggcagaaagaaactcctgtatatattcaaacaaccatttatgagaccagtacaaactactcaagaggaagatggctgtagctgccgatttccagaagaagaagaaggaggatgtgaactgagagtgaagttcagcagaagcgccgacgcccctgcctaccagcagggacagaaccaactgtacaacgagctgaacctgggcagacgggaagagtacgacgtgctggacaagcggagaggcagggaccctgagatgggcggaaagccccagcggagaaagaacccccaggaaggactgtataacgaactccagaaagacaagatggccgaagcctacagcgagatcggcatgaagggcgagcggagaagaggcaagggccacgatggcctgtaccagggcctgagcaccgccaccaaggacacctatgacgccctgcacatgcaggccctgcctccaaga

SEQ ID NO: 26756 - DNA, 966 bp, synthetic construct
  source 1..966: mol_type = other DNA
cctaccgtgacactgttccctccaagcagcgaagaactccaggccaacaaggccacacttgtgtgcctgatctccgacttctaccctggggctgtgacagtggcttggaaggccgatggatctcctgtgaaagccggcgtggaaaccaccaagccatccaagcagagcaacaacaaatacgccgccagctcctacctgagcctgacacctgagcagtggaagtcccacagatcctacagctgccaagtgacccacgaaggcagcaccgtggaaaagacagtggcccctacagagtgcagccccatcaagaccgatgtgattacaatggaccccaaggacaactgctccaaggacgccaacgataccctgctgctccagctgaccaacaccagcgcctactacatgtacttgttgctgctgctgaagtccgtggtgtacttcgccatcatcacatgctgcctgctgcggagaaccgccttctgctgcaacggcgagaagtctaaacggggcagaaagaaactcctgtatatattcaaacaaccatttatgagaccagtacaaactactcaagaggaagatggctgtagctgccgatttccagaagaagaagaaggaggatgtgaactgagagtgaagttcagcagaagcgccgacgcccctgcctaccagcagggacagaaccaactgtacaacgagctgaacctgggcagacgggaagagtacgacgtgctggacaagcggagaggcagggaccctgagatgggcggaaagccccagcggagaaagaacccccaggaaggactgtataacgaactccagaaagacaagatggccgaagcctacagcgagatcggcatgaagggcgagcggagaagaggcaagggccacgatggcctgtaccagggcctgagcaccgccaccaaggacacctatgacgccctgcacatgcaggccctgcctccaaga

SEQ ID NO: 26757 - DNA, 963 bp, synthetic construct
  source 1..963: mol_type = other DNA
accgtgacactgttccctccaagcagcgaagaactccaggccaacaaggccacacttgtgtgcctgatctccgacttctaccctggggctgtgacagtggcttggaaggccgatggatctcctgtgaaagccggcgtggaaaccaccaagccatccaagcagagcaacaacaaatacgccgccagctcctacctgagcctgacacctgagcagtggaagtcccacagatcctacagctgccaagtgacccacgaaggcagcaccgtggaaaagacagtggcccctacagagtgcagccccatcaagaccgatgtgattacaatggaccccaaggacaactgctccaaggacgccaacgataccctgctgctccagctgaccaacaccagcgcctactacatgtacttgttgctgctgctgaagtccgtggtgtacttcgccatcatcacatgctgcctgctgcggagaaccgccttctgctgcaacggcgagaagtctaaacggggcagaaagaaactcctgtatatattcaaacaaccatttatgagaccagtacaaactactcaagaggaagatggctgtagctgccgatttccagaagaagaagaaggaggatgtgaactgagagtgaagttcagcagaagcgccgacgcccctgcctaccagcagggacagaaccaactgtacaacgagctgaacctgggcagacgggaagagtacgacgtgctggacaagcggagaggcagggaccctgagatgggcggaaagccccagcggagaaagaacccccaggaaggactgtataacgaactccagaaagacaagatggccgaagcctacagcgagatcggcatgaagggcgagcggagaagaggcaagggccacgatggcctgtaccagggcctgagcaccgccaccaaggacacctatgacgccctgcacatgcaggccctgcctccaaga

SEQ ID NO: 26758 - DNA, 960 bp, synthetic construct
  source 1..960: mol_type = other DNA
gtgacactgttccctccaagcagcgaagaactccaggccaacaaggccacacttgtgtgcctgatctccgacttctaccctggggctgtgacagtggcttggaaggccgatggatctcctgtgaaagccggcgtggaaaccaccaagccatccaagcagagcaacaacaaatacgccgccagctcctacctgagcctgacacctgagcagtggaagtcccacagatcctacagctgccaagtgacccacgaaggcagcaccgtggaaaagacagtggcccctacagagtgcagccccatcaagaccgatgtgattacaatggaccccaaggacaactgctccaaggacgccaacgataccctgctgctccagctgaccaacaccagcgcctactacatgtacttgttgctgctgctgaagtccgtggtgtacttcgccatcatcacatgctgcctgctgcggagaaccgccttctgctgcaacggcgagaagtctaaacggggcagaaagaaactcctgtatatattcaaacaaccatttatgagaccagtacaaactactcaagaggaagatggctgtagctgccgatttccagaagaagaagaaggaggatgtgaactgagagtgaagttcagcagaagcgccgacgcccctgcctaccagcagggacagaaccaactgtacaacgagctgaacctgggcagacgggaagagtacgacgtgctggacaagcggagaggcagggaccctgagatgggcggaaagccccagcggagaaagaacccccaggaaggactgtataacgaactccagaaagacaagatggccgaagcctacagcgagatcggcatgaagggcgagcggagaagaggcaagggccacgatggcctgtaccagggcctgagcaccgccaccaaggacacctatgacgccctgcacatgcaggccctgcctccaaga

SEQ ID NO: 26759 - DNA, 957 bp, synthetic construct
  source 1..957: mol_type = other DNA
acactgttccctccaagcagcgaagaactccaggccaacaaggccacacttgtgtgcctgatctccgacttctaccctggggctgtgacagtggcttggaaggccgatggatctcctgtgaaagccggcgtggaaaccaccaagccatccaagcagagcaacaacaaatacgccgccagctcctacctgagcctgacacctgagcagtggaagtcccacagatcctacagctgccaagtgacccacgaaggcagcaccgtggaaaagacagtggcccctacagagtgcagccccatcaagaccgatgtgattacaatggaccccaaggacaactgctccaaggacgccaacgataccctgctgctccagctgaccaacaccagcgcctactacatgtacttgttgctgctgctgaagtccgtggtgtacttcgccatcatcacatgctgcctgctgcggagaaccgccttctgctgcaacggcgagaagtctaaacggggcagaaagaaactcctgtatatattcaaacaaccatttatgagaccagtacaaactactcaagaggaagatggctgtagctgccgatttccagaagaagaagaaggaggatgtgaactgagagtgaagttcagcagaagcgccgacgcccctgcctaccagcagggacagaaccaactgtacaacgagctgaacctgggcagacgggaagagtacgacgtgctggacaagcggagaggcagggaccctgagatgggcggaaagccccagcggagaaagaacccccaggaaggactgtataacgaactccagaaagacaagatggccgaagcctacagcgagatcggcatgaagggcgagcggagaagaggcaagggccacgatggcctgtaccagggcctgagcaccgccaccaaggacacctatgacgccctgcacatgcaggccctgcctccaaga

SEQ ID NO: 26760 - DNA, 954 bp, synthetic construct
  source 1..954: mol_type = other DNA
ctgttccctccaagcagcgaagaactccaggccaacaaggccacacttgtgtgcctgatctccgacttctaccctggggctgtgacagtggcttggaaggccgatggatctcctgtgaaagccggcgtggaaaccaccaagccatccaagcagagcaacaacaaatacgccgccagctcctacctgagcctgacacctgagcagtggaagtcccacagatcctacagctgccaagtgacccacgaaggcagcaccgtggaaaagacagtggcccctacagagtgcagccccatcaagaccgatgtgattacaatggaccccaaggacaactgctccaaggacgccaacgataccctgctgctccagctgaccaacaccagcgcctactacatgtacttgttgctgctgctgaagtccgtggtgtacttcgccatcatcacatgctgcctgctgcggagaaccgccttctgctgcaacggcgagaagtctaaacggggcagaaagaaactcctgtatatattcaaacaaccatttatgagaccagtacaaactactcaagaggaagatggctgtagctgccgatttccagaagaagaagaaggaggatgtgaactgagagtgaagttcagcagaagcgccgacgcccctgcctaccagcagggacagaaccaactgtacaacgagctgaacctgggcagacgggaagagtacgacgtgctggacaagcggagaggcagggaccctgagatgggcggaaagccccagcggagaaagaacccccaggaaggactgtataacgaactccagaaagacaagatggccgaagcctacagcgagatcggcatgaagggcgagcggagaagaggcaagggccacgatggcctgtaccagggcctgagcaccgccaccaaggacacctatgacgccctgcacatgcaggccctgcctccaaga

SEQ ID NO: 26761 - DNA, 987 bp, synthetic construct
  source 1..987: mol_type = other DNA
ggacagcctaaggccaatcctaccgtgacactgttccctccaagcagcgaagaactccaggccaacaaggccacacttgtgtgcctgatctccgacttctaccctggggctgtgacagtggcttggaaggccgatggatctcctgtgaaagccggcgtggaaaccaccaagccatccaagcagagcaacaacaaatacgccgccagctcctacctgagcctgacacctgagcagtggaagtcccacagatcctacagctgccaagtgacccacgaaggcagcaccgtggaaaagacagtggcccctacagagtgcagcgaagtgaaaaccgactccaccgaccacgtgaagcccaaagagacagagaacaccaagcagcccagcaagagctgccacaagcccaaggccatcgtgcacaccgagaaagtgaacatgatgagcctgaccgtgctgggcctgcggatgctgttcgccaaaaccgtggccgtgaacttcctgctgaccgccaagctgttcttcctcaaacggggcagaaagaaactcctgtatatattcaaacaaccatttatgagaccagtacaaactactcaagaggaagatggctgtagctgccgatttccagaagaagaagaaggaggatgtgaactgagagtgaagttcagcagaagcgccgacgcccctgcctaccagcagggacagaaccaactgtacaacgagctgaacctgggcagacgggaagagtacgacgtgctggacaagcggagaggcagggaccctgagatgggcggaaagccccagcggagaaagaacccccaggaaggactgtataacgaactccagaaagacaagatggccgaagcctacagcgagatcggcatgaagggcgagcggagaagaggcaagggccacgatggcctgtaccagggcctgagcaccgccaccaaggacacctatgacgccctgcacatgcaggccctgcctccaaga

SEQ ID NO: 26762 - DNA, 984 bp, synthetic construct
  source 1..984: mol_type = other DNA
cagcctaaggccaatcctaccgtgacactgttccctccaagcagcgaagaactccaggccaacaaggccacacttgtgtgcctgatctccgacttctaccctggggctgtgacagtggcttggaaggccgatggatctcctgtgaaagccggcgtggaaaccaccaagccatccaagcagagcaacaacaaatacgccgccagctcctacctgagcctgacacctgagcagtggaagtcccacagatcctacagctgccaagtgacccacgaaggcagcaccgtggaaaagacagtggcccctacagagtgcagcgaagtgaaaaccgactccaccgaccacgtgaagcccaaagagacagagaacaccaagcagcccagcaagagctgccacaagcccaaggccatcgtgcacaccgagaaagtgaacatgatgagcctgaccgtgctgggcctgcggatgctgttcgccaaaaccgtggccgtgaacttcctgctgaccgccaagctgttcttcctcaaacggggcagaaagaaactcctgtatatattcaaacaaccatttatgagaccagtacaaactactcaagaggaagatggctgtagctgccgatttccagaagaagaagaaggaggatgtgaactgagagtgaagttcagcagaagcgccgacgcccctgcctaccagcagggacagaaccaactgtacaacgagctgaacctgggcagacgggaagagtacgacgtgctggacaagcggagaggcagggaccctgagatgggcggaaagccccagcggagaaagaacccccaggaaggactgtataacgaactccagaaagacaagatggccgaagcctacagcgagatcggcatgaagggcgagcggagaagaggcaagggccacgatggcctgtaccagggcctgagcaccgccaccaaggacacctatgacgccctgcacatgcaggccctgcctccaaga

SEQ ID NO: 26763 - DNA, 981 bp, synthetic construct
  source 1..981: mol_type = other DNA
cctaaggccaatcctaccgtgacactgttccctccaagcagcgaagaactccaggccaacaaggccacacttgtgtgcctgatctccgacttctaccctggggctgtgacagtggcttggaaggccgatggatctcctgtgaaagccggcgtggaaaccaccaagccatccaagcagagcaacaacaaatacgccgccagctcctacctgagcctgacacctgagcagtggaagtcccacagatcctacagctgccaagtgacccacgaaggcagcaccgtggaaaagacagtggcccctacagagtgcagcgaagtgaaaaccgactccaccgaccacgtgaagcccaaagagacagagaacaccaagcagcccagcaagagctgccacaagcccaaggccatcgtgcacaccgagaaagtgaacatgatgagcctgaccgtgctgggcctgcggatgctgttcgccaaaaccgtggccgtgaacttcctgctgaccgccaagctgttcttcctcaaacggggcagaaagaaactcctgtatatattcaaacaaccatttatgagaccagtacaaactactcaagaggaagatggctgtagctgccgatttccagaagaagaagaaggaggatgtgaactgagagtgaagttcagcagaagcgccgacgcccctgcctaccagcagggacagaaccaactgtacaacgagctgaacctgggcagacgggaagagtacgacgtgctggacaagcggagaggcagggaccctgagatgggcggaaagccccagcggagaaagaacccccaggaaggactgtataacgaactccagaaagacaagatggccgaagcctacagcgagatcggcatgaagggcgagcggagaagaggcaagggccacgatggcctgtaccagggcctgagcaccgccaccaaggacacctatgacgccctgcacatgcaggccctgcctccaaga

SEQ ID NO: 26764 - DNA, 978 bp, synthetic construct
  source 1..978: mol_type = other DNA
aaggccaatcctaccgtgacactgttccctccaagcagcgaagaactccaggccaacaaggccacacttgtgtgcctgatctccgacttctaccctggggctgtgacagtggcttggaaggccgatggatctcctgtgaaagccggcgtggaaaccaccaagccatccaagcagagcaacaacaaatacgccgccagctcctacctgagcctgacacctgagcagtggaagtcccacagatcctacagctgccaagtgacccacgaaggcagcaccgtggaaaagacagtggcccctacagagtgcagcgaagtgaaaaccgactccaccgaccacgtgaagcccaaagagacagagaacaccaagcagcccagcaagagctgccacaagcccaaggccatcgtgcacaccgagaaagtgaacatgatgagcctgaccgtgctgggcctgcggatgctgttcgccaaaaccgtggccgtgaacttcctgctgaccgccaagctgttcttcctcaaacggggcagaaagaaactcctgtatatattcaaacaaccatttatgagaccagtacaaactactcaagaggaagatggctgtagctgccgatttccagaagaagaagaaggaggatgtgaactgagagtgaagttcagcagaagcgccgacgcccctgcctaccagcagggacagaaccaactgtacaacgagctgaacctgggcagacgggaagagtacgacgtgctggacaagcggagaggcagggaccctgagatgggcggaaagccccagcggagaaagaacccccaggaaggactgtataacgaactccagaaagacaagatggccgaagcctacagcgagatcggcatgaagggcgagcggagaagaggcaagggccacgatggcctgtaccagggcctgagcaccgccaccaaggacacctatgacgccctgcacatgcaggccctgcctccaaga

SEQ ID NO: 26765 - DNA, 975 bp, synthetic construct
  source 1..975: mol_type = other DNA
gccaatcctaccgtgacactgttccctccaagcagcgaagaactccaggccaacaaggccacacttgtgtgcctgatctccgacttctaccctggggctgtgacagtggcttggaaggccgatggatctcctgtgaaagccggcgtggaaaccaccaagccatccaagcagagcaacaacaaatacgccgccagctcctacctgagcctgacacctgagcagtggaagtcccacagatcctacagctgccaagtgacccacgaaggcagcaccgtggaaaagacagtggcccctacagagtgcagcgaagtgaaaaccgactccaccgaccacgtgaagcccaaagagacagagaacaccaagcagcccagcaagagctgccacaagcccaaggccatcgtgcacaccgagaaagtgaacatgatgagcctgaccgtgctgggcctgcggatgctgttcgccaaaaccgtggccgtgaacttcctgctgaccgccaagctgttcttcctcaaacggggcagaaagaaactcctgtatatattcaaacaaccatttatgagaccagtacaaactactcaagaggaagatggctgtagctgccgatttccagaagaagaagaaggaggatgtgaactgagagtgaagttcagcagaagcgccgacgcccctgcctaccagcagggacagaaccaactgtacaacgagctgaacctgggcagacgggaagagtacgacgtgctggacaagcggagaggcagggaccctgagatgggcggaaagccccagcggagaaagaacccccaggaaggactgtataacgaactccagaaagacaagatggccgaagcctacagcgagatcggcatgaagggcgagcggagaagaggcaagggccacgatggcctgtaccagggcctgagcaccgccaccaaggacacctatgacgccctgcacatgcaggccctgcctccaaga

SEQ ID NO: 26766 - DNA, 972 bp, synthetic construct
  source 1..972: mol_type = other DNA
aatcctaccgtgacactgttccctccaagcagcgaagaactccaggccaacaaggccacacttgtgtgcctgatctccgacttctaccctggggctgtgacagtggcttggaaggccgatggatctcctgtgaaagccggcgtggaaaccaccaagccatccaagcagagcaacaacaaatacgccgccagctcctacctgagcctgacacctgagcagtggaagtcccacagatcctacagctgccaagtgacccacgaaggcagcaccgtggaaaagacagtggcccctacagagtgcagcgaagtgaaaaccgactccaccgaccacgtgaagcccaaagagacagagaacaccaagcagcccagcaagagctgccacaagcccaaggccatcgtgcacaccgagaaagtgaacatgatgagcctgaccgtgctgggcctgcggatgctgttcgccaaaaccgtggccgtgaacttcctgctgaccgccaagctgttcttcctcaaacggggcagaaagaaactcctgtatatattcaaacaaccatttatgagaccagtacaaactactcaagaggaagatggctgtagctgccgatttccagaagaagaagaaggaggatgtgaactgagagtgaagttcagcagaagcgccgacgcccctgcctaccagcagggacagaaccaactgtacaacgagctgaacctgggcagacgggaagagtacgacgtgctggacaagcggagaggcagggaccctgagatgggcggaaagccccagcggagaaagaacccccaggaaggactgtataacgaactccagaaagacaagatggccgaagcctacagcgagatcggcatgaagggcgagcggagaagaggcaagggccacgatggcctgtaccagggcctgagcaccgccaccaaggacacctatgacgccctgcacatgcaggccctgcctccaaga

SEQ ID NO: 26767 - DNA, 969 bp, synthetic construct
  source 1..969: mol_type = other DNA
cctaccgtgacactgttccctccaagcagcgaagaactccaggccaacaaggccacacttgtgtgcctgatctccgacttctaccctggggctgtgacagtggcttggaaggccgatggatctcctgtgaaagccggcgtggaaaccaccaagccatccaagcagagcaacaacaaatacgccgccagctcctacctgagcctgacacctgagcagtggaagtcccacagatcctacagctgccaagtgacccacgaaggcagcaccgtggaaaagacagtggcccctacagagtgcagcgaagtgaaaaccgactccaccgaccacgtgaagcccaaagagacagagaacaccaagcagcccagcaagagctgccacaagcccaaggccatcgtgcacaccgagaaagtgaacatgatgagcctgaccgtgctgggcctgcggatgctgttcgccaaaaccgtggccgtgaacttcctgctgaccgccaagctgttcttcctcaaacggggcagaaagaaactcctgtatatattcaaacaaccatttatgagaccagtacaaactactcaagaggaagatggctgtagctgccgatttccagaagaagaagaaggaggatgtgaactgagagtgaagttcagcagaagcgccgacgcccctgcctaccagcagggacagaaccaactgtacaacgagctgaacctgggcagacgggaagagtacgacgtgctggacaagcggagaggcagggaccctgagatgggcggaaagccccagcggagaaagaacccccaggaaggactgtataacgaactccagaaagacaagatggccgaagcctacagcgagatcggcatgaagggcgagcggagaagaggcaagggccacgatggcctgtaccagggcctgagcaccgccaccaaggacacctatgacgccctgcacatgcaggccctgcctccaaga

SEQ ID NO: 26768 - DNA, 966 bp, synthetic construct
  source 1..966: mol_type = other DNA
accgtgacactgttccctccaagcagcgaagaactccaggccaacaaggccacacttgtgtgcctgatctccgacttctaccctggggctgtgacagtggcttggaaggccgatggatctcctgtgaaagccggcgtggaaaccaccaagccatccaagcagagcaacaacaaatacgccgccagctcctacctgagcctgacacctgagcagtggaagtcccacagatcctacagctgccaagtgacccacgaaggcagcaccgtggaaaagacagtggcccctacagagtgcagcgaagtgaaaaccgactccaccgaccacgtgaagcccaaagagacagagaacaccaagcagcccagcaagagctgccacaagcccaaggccatcgtgcacaccgagaaagtgaacatgatgagcctgaccgtgctgggcctgcggatgctgttcgccaaaaccgtggccgtgaacttcctgctgaccgccaagctgttcttcctcaaacggggcagaaagaaactcctgtatatattcaaacaaccatttatgagaccagtacaaactactcaagaggaagatggctgtagctgccgatttccagaagaagaagaaggaggatgtgaactgagagtgaagttcagcagaagcgccgacgcccctgcctaccagcagggacagaaccaactgtacaacgagctgaacctgggcagacgggaagagtacgacgtgctggacaagcggagaggcagggaccctgagatgggcggaaagccccagcggagaaagaacccccaggaaggactgtataacgaactccagaaagacaagatggccgaagcctacagcgagatcggcatgaagggcgagcggagaagaggcaagggccacgatggcctgtaccagggcctgagcaccgccaccaaggacacctatgacgccctgcacatgcaggccctgcctccaaga

SEQ ID NO: 26769 - DNA, 963 bp, synthetic construct
  source 1..963: mol_type = other DNA
gtgacactgttccctccaagcagcgaagaactccaggccaacaaggccacacttgtgtgcctgatctccgacttctaccctggggctgtgacagtggcttggaaggccgatggatctcctgtgaaagccggcgtggaaaccaccaagccatccaagcagagcaacaacaaatacgccgccagctcctacctgagcctgacacctgagcagtggaagtcccacagatcctacagctgccaagtgacccacgaaggcagcaccgtggaaaagacagtggcccctacagagtgcagcgaagtgaaaaccgactccaccgaccacgtgaagcccaaagagacagagaacaccaagcagcccagcaagagctgccacaagcccaaggccatcgtgcacaccgagaaagtgaacatgatgagcctgaccgtgctgggcctgcggatgctgttcgccaaaaccgtggccgtgaacttcctgctgaccgccaagctgttcttcctcaaacggggcagaaagaaactcctgtatatattcaaacaaccatttatgagaccagtacaaactactcaagaggaagatggctgtagctgccgatttccagaagaagaagaaggaggatgtgaactgagagtgaagttcagcagaagcgccgacgcccctgcctaccagcagggacagaaccaactgtacaacgagctgaacctgggcagacgggaagagtacgacgtgctggacaagcggagaggcagggaccctgagatgggcggaaagccccagcggagaaagaacccccaggaaggactgtataacgaactccagaaagacaagatggccgaagcctacagcgagatcggcatgaagggcgagcggagaagaggcaagggccacgatggcctgtaccagggcctgagcaccgccaccaaggacacctatgacgccctgcacatgcaggccctgcctccaaga

SEQ ID NO: 26770 - DNA, 960 bp, synthetic construct
  source 1..960: mol_type = other DNA
acactgttccctccaagcagcgaagaactccaggccaacaaggccacacttgtgtgcctgatctccgacttctaccctggggctgtgacagtggcttggaaggccgatggatctcctgtgaaagccggcgtggaaaccaccaagccatccaagcagagcaacaacaaatacgccgccagctcctacctgagcctgacacctgagcagtggaagtcccacagatcctacagctgccaagtgacccacgaaggcagcaccgtggaaaagacagtggcccctacagagtgcagcgaagtgaaaaccgactccaccgaccacgtgaagcccaaagagacagagaacaccaagcagcccagcaagagctgccacaagcccaaggccatcgtgcacaccgagaaagtgaacatgatgagcctgaccgtgctgggcctgcggatgctgttcgccaaaaccgtggccgtgaacttcctgctgaccgccaagctgttcttcctcaaacggggcagaaagaaactcctgtatatattcaaacaaccatttatgagaccagtacaaactactcaagaggaagatggctgtagctgccgatttccagaagaagaagaaggaggatgtgaactgagagtgaagttcagcagaagcgccgacgcccctgcctaccagcagggacagaaccaactgtacaacgagctgaacctgggcagacgggaagagtacgacgtgctggacaagcggagaggcagggaccctgagatgggcggaaagccccagcggagaaagaacccccaggaaggactgtataacgaactccagaaagacaagatggccgaagcctacagcgagatcggcatgaagggcgagcggagaagaggcaagggccacgatggcctgtaccagggcctgagcaccgccaccaaggacacctatgacgccctgcacatgcaggccctgcctccaaga

SEQ ID NO: 26771 - DNA, 957 bp, synthetic construct
  source 1..957: mol_type = other DNA
ctgttccctccaagcagcgaagaactccaggccaacaaggccacacttgtgtgcctgatctccgacttctaccctggggctgtgacagtggcttggaaggccgatggatctcctgtgaaagccggcgtggaaaccaccaagccatccaagcagagcaacaacaaatacgccgccagctcctacctgagcctgacacctgagcagtggaagtcccacagatcctacagctgccaagtgacccacgaaggcagcaccgtggaaaagacagtggcccctacagagtgcagcgaagtgaaaaccgactccaccgaccacgtgaagcccaaagagacagagaacaccaagcagcccagcaagagctgccacaagcccaaggccatcgtgcacaccgagaaagtgaacatgatgagcctgaccgtgctgggcctgcggatgctgttcgccaaaaccgtggccgtgaacttcctgctgaccgccaagctgttcttcctcaaacggggcagaaagaaactcctgtatatattcaaacaaccatttatgagaccagtacaaactactcaagaggaagatggctgtagctgccgatttccagaagaagaagaaggaggatgtgaactgagagtgaagttcagcagaagcgccgacgcccctgcctaccagcagggacagaaccaactgtacaacgagctgaacctgggcagacgggaagagtacgacgtgctggacaagcggagaggcagggaccctgagatgggcggaaagccccagcggagaaagaacccccaggaaggactgtataacgaactccagaaagacaagatggccgaagcctacagcgagatcggcatgaagggcgagcggagaagaggcaagggccacgatggcctgtaccagggcctgagcaccgccaccaaggacacctatgacgccctgcacatgcaggccctgcctccaaga

SEQ ID NO: 26772 - DNA, 942 bp, synthetic construct
  source 1..942: mol_type = other DNA
ggacagcctaaggccaatcctaccgtgacactgttccctccaagcagcgaagaactccaggccaacaaggccacacttgtgtgcctgatctccgacttctaccctggggctgtgacagtggcttggaaggccgatggatctcctgtgaaagccggcgtggaaaccaccaagccatccaagcagagcaacaacaaatacgccgccagctcctacctgagcctgacacctgagcagtggaagtcccacagatcctacagctgccaagtgacccacgaaggcagcaccgtggaaaagacagtggcccctacagagtgcagcggcagagccgattgcggctttaccagcgagagctaccagcagggcgtgctgagcgccaccatcctgtacgagatcctgctgggcaaggccaccctgtacgccgtgctggtgtctgccctggtgctgatggctatggtcaagcggaaggacagccggggaaaacggggcagaaagaaactcctgtatatattcaaacaaccatttatgagaccagtacaaactactcaagaggaagatggctgtagctgccgatttccagaagaagaagaaggaggatgtgaactgagagtgaagttcagcagaagcgccgacgcccctgcctaccagcagggacagaaccaactgtacaacgagctgaacctgggcagacgggaagagtacgacgtgctggacaagcggagaggcagggaccctgagatgggcggaaagccccagcggagaaagaacccccaggaaggactgtataacgaactccagaaagacaagatggccgaagcctacagcgagatcggcatgaagggcgagcggagaagaggcaagggccacgatggcctgtaccagggcctgagcaccgccaccaaggacacctatgacgccctgcacatgcaggccctgcctccaaga

SEQ ID NO: 26773 - DNA, 939 bp, synthetic construct
  source 1..939: mol_type = other DNA
cagcctaaggccaatcctaccgtgacactgttccctccaagcagcgaagaactccaggccaacaaggccacacttgtgtgcctgatctccgacttctaccctggggctgtgacagtggcttggaaggccgatggatctcctgtgaaagccggcgtggaaaccaccaagccatccaagcagagcaacaacaaatacgccgccagctcctacctgagcctgacacctgagcagtggaagtcccacagatcctacagctgccaagtgacccacgaaggcagcaccgtggaaaagacagtggcccctacagagtgcagcggcagagccgattgcggctttaccagcgagagctaccagcagggcgtgctgagcgccaccatcctgtacgagatcctgctgggcaaggccaccctgtacgccgtgctggtgtctgccctggtgctgatggctatggtcaagcggaaggacagccggggaaaacggggcagaaagaaactcctgtatatattcaaacaaccatttatgagaccagtacaaactactcaagaggaagatggctgtagctgccgatttccagaagaagaagaaggaggatgtgaactgagagtgaagttcagcagaagcgccgacgcccctgcctaccagcagggacagaaccaactgtacaacgagctgaacctgggcagacgggaagagtacgacgtgctggacaagcggagaggcagggaccctgagatgggcggaaagccccagcggagaaagaacccccaggaaggactgtataacgaactccagaaagacaagatggccgaagcctacagcgagatcggcatgaagggcgagcggagaagaggcaagggccacgatggcctgtaccagggcctgagcaccgccaccaaggacacctatgacgccctgcacatgcaggccctgcctccaaga

SEQ ID NO: 26774 - DNA, 936 bp, synthetic construct
  source 1..936: mol_type = other DNA
cctaaggccaatcctaccgtgacactgttccctccaagcagcgaagaactccaggccaacaaggccacacttgtgtgcctgatctccgacttctaccctggggctgtgacagtggcttggaaggccgatggatctcctgtgaaagccggcgtggaaaccaccaagccatccaagcagagcaacaacaaatacgccgccagctcctacctgagcctgacacctgagcagtggaagtcccacagatcctacagctgccaagtgacccacgaaggcagcaccgtggaaaagacagtggcccctacagagtgcagcggcagagccgattgcggctttaccagcgagagctaccagcagggcgtgctgagcgccaccatcctgtacgagatcctgctgggcaaggccaccctgtacgccgtgctggtgtctgccctggtgctgatggctatggtcaagcggaaggacagccggggaaaacggggcagaaagaaactcctgtatatattcaaacaaccatttatgagaccagtacaaactactcaagaggaagatggctgtagctgccgatttccagaagaagaagaaggaggatgtgaactgagagtgaagttcagcagaagcgccgacgcccctgcctaccagcagggacagaaccaactgtacaacgagctgaacctgggcagacgggaagagtacgacgtgctggacaagcggagaggcagggaccctgagatgggcggaaagccccagcggagaaagaacccccaggaaggactgtataacgaactccagaaagacaagatggccgaagcctacagcgagatcggcatgaagggcgagcggagaagaggcaagggccacgatggcctgtaccagggcctgagcaccgccaccaaggacacctatgacgccctgcacatgcaggccctgcctccaaga

SEQ ID NO: 26775 - DNA, 933 bp, synthetic construct
  source 1..933: mol_type = other DNA
aaggccaatcctaccgtgacactgttccctccaagcagcgaagaactccaggccaacaaggccacacttgtgtgcctgatctccgacttctaccctggggctgtgacagtggcttggaaggccgatggatctcctgtgaaagccggcgtggaaaccaccaagccatccaagcagagcaacaacaaatacgccgccagctcctacctgagcctgacacctgagcagtggaagtcccacagatcctacagctgccaagtgacccacgaaggcagcaccgtggaaaagacagtggcccctacagagtgcagcggcagagccgattgcggctttaccagcgagagctaccagcagggcgtgctgagcgccaccatcctgtacgagatcctgctgggcaaggccaccctgtacgccgtgctggtgtctgccctggtgctgatggctatggtcaagcggaaggacagccggggaaaacggggcagaaagaaactcctgtatatattcaaacaaccatttatgagaccagtacaaactactcaagaggaagatggctgtagctgccgatttccagaagaagaagaaggaggatgtgaactgagagtgaagttcagcagaagcgccgacgcccctgcctaccagcagggacagaaccaactgtacaacgagctgaacctgggcagacgggaagagtacgacgtgctggacaagcggagaggcagggaccctgagatgggcggaaagccccagcggagaaagaacccccaggaaggactgtataacgaactccagaaagacaagatggccgaagcctacagcgagatcggcatgaagggcgagcggagaagaggcaagggccacgatggcctgtaccagggcctgagcaccgccaccaaggacacctatgacgccctgcacatgcaggccctgcctccaaga

SEQ ID NO: 26776 - DNA, 930 bp, synthetic construct
  source 1..930: mol_type = other DNA
gccaatcctaccgtgacactgttccctccaagcagcgaagaactccaggccaacaaggccacacttgtgtgcctgatctccgacttctaccctggggctgtgacagtggcttggaaggccgatggatctcctgtgaaagccggcgtggaaaccaccaagccatccaagcagagcaacaacaaatacgccgccagctcctacctgagcctgacacctgagcagtggaagtcccacagatcctacagctgccaagtgacccacgaaggcagcaccgtggaaaagacagtggcccctacagagtgcagcggcagagccgattgcggctttaccagcgagagctaccagcagggcgtgctgagcgccaccatcctgtacgagatcctgctgggcaaggccaccctgtacgccgtgctggtgtctgccctggtgctgatggctatggtcaagcggaaggacagccggggaaaacggggcagaaagaaactcctgtatatattcaaacaaccatttatgagaccagtacaaactactcaagaggaagatggctgtagctgccgatttccagaagaagaagaaggaggatgtgaactgagagtgaagttcagcagaagcgccgacgcccctgcctaccagcagggacagaaccaactgtacaacgagctgaacctgggcagacgggaagagtacgacgtgctggacaagcggagaggcagggaccctgagatgggcggaaagccccagcggagaaagaacccccaggaaggactgtataacgaactccagaaagacaagatggccgaagcctacagcgagatcggcatgaagggcgagcggagaagaggcaagggccacgatggcctgtaccagggcctgagcaccgccaccaaggacacctatgacgccctgcacatgcaggccctgcctccaaga

SEQ ID NO: 26777 - DNA, 927 bp, synthetic construct
  source 1..927: mol_type = other DNA
aatcctaccgtgacactgttccctccaagcagcgaagaactccaggccaacaaggccacacttgtgtgcctgatctccgacttctaccctggggctgtgacagtggcttggaaggccgatggatctcctgtgaaagccggcgtggaaaccaccaagccatccaagcagagcaacaacaaatacgccgccagctcctacctgagcctgacacctgagcagtggaagtcccacagatcctacagctgccaagtgacccacgaaggcagcaccgtggaaaagacagtggcccctacagagtgcagcggcagagccgattgcggctttaccagcgagagctaccagcagggcgtgctgagcgccaccatcctgtacgagatcctgctgggcaaggccaccctgtacgccgtgctggtgtctgccctggtgctgatggctatggtcaagcggaaggacagccggggaaaacggggcagaaagaaactcctgtatatattcaaacaaccatttatgagaccagtacaaactactcaagaggaagatggctgtagctgccgatttccagaagaagaagaaggaggatgtgaactgagagtgaagttcagcagaagcgccgacgcccctgcctaccagcagggacagaaccaactgtacaacgagctgaacctgggcagacgggaagagtacgacgtgctggacaagcggagaggcagggaccctgagatgggcggaaagccccagcggagaaagaacccccaggaaggactgtataacgaactccagaaagacaagatggccgaagcctacagcgagatcggcatgaagggcgagcggagaagaggcaagggccacgatggcctgtaccagggcctgagcaccgccaccaaggacacctatgacgccctgcacatgcaggccctgcctccaaga

SEQ ID NO: 26778 - DNA, 924 bp, synthetic construct
  source 1..924: mol_type = other DNA
cctaccgtgacactgttccctccaagcagcgaagaactccaggccaacaaggccacacttgtgtgcctgatctccgacttctaccctggggctgtgacagtggcttggaaggccgatggatctcctgtgaaagccggcgtggaaaccaccaagccatccaagcagagcaacaacaaatacgccgccagctcctacctgagcctgacacctgagcagtggaagtcccacagatcctacagctgccaagtgacccacgaaggcagcaccgtggaaaagacagtggcccctacagagtgcagcggcagagccgattgcggctttaccagcgagagctaccagcagggcgtgctgagcgccaccatcctgtacgagatcctgctgggcaaggccaccctgtacgccgtgctggtgtctgccctggtgctgatggctatggtcaagcggaaggacagccggggaaaacggggcagaaagaaactcctgtatatattcaaacaaccatttatgagaccagtacaaactactcaagaggaagatggctgtagctgccgatttccagaagaagaagaaggaggatgtgaactgagagtgaagttcagcagaagcgccgacgcccctgcctaccagcagggacagaaccaactgtacaacgagctgaacctgggcagacgggaagagtacgacgtgctggacaagcggagaggcagggaccctgagatgggcggaaagccccagcggagaaagaacccccaggaaggactgtataacgaactccagaaagacaagatggccgaagcctacagcgagatcggcatgaagggcgagcggagaagaggcaagggccacgatggcctgtaccagggcctgagcaccgccaccaaggacacctatgacgccctgcacatgcaggccctgcctccaaga

SEQ ID NO: 26779 - DNA, 921 bp, synthetic construct
  source 1..921: mol_type = other DNA
accgtgacactgttccctccaagcagcgaagaactccaggccaacaaggccacacttgtgtgcctgatctccgacttctaccctggggctgtgacagtggcttggaaggccgatggatctcctgtgaaagccggcgtggaaaccaccaagccatccaagcagagcaacaacaaatacgccgccagctcctacctgagcctgacacctgagcagtggaagtcccacagatcctacagctgccaagtgacccacgaaggcagcaccgtggaaaagacagtggcccctacagagtgcagcggcagagccgattgcggctttaccagcgagagctaccagcagggcgtgctgagcgccaccatcctgtacgagatcctgctgggcaaggccaccctgtacgccgtgctggtgtctgccctggtgctgatggctatggtcaagcggaaggacagccggggaaaacggggcagaaagaaactcctgtatatattcaaacaaccatttatgagaccagtacaaactactcaagaggaagatggctgtagctgccgatttccagaagaagaagaaggaggatgtgaactgagagtgaagttcagcagaagcgccgacgcccctgcctaccagcagggacagaaccaactgtacaacgagctgaacctgggcagacgggaagagtacgacgtgctggacaagcggagaggcagggaccctgagatgggcggaaagccccagcggagaaagaacccccaggaaggactgtataacgaactccagaaagacaagatggccgaagcctacagcgagatcggcatgaagggcgagcggagaagaggcaagggccacgatggcctgtaccagggcctgagcaccgccaccaaggacacctatgacgccctgcacatgcaggccctgcctccaaga

SEQ ID NO: 26780 - DNA, 918 bp, synthetic construct
  source 1..918: mol_type = other DNA
gtgacactgttccctccaagcagcgaagaactccaggccaacaaggccacacttgtgtgcctgatctccgacttctaccctggggctgtgacagtggcttggaaggccgatggatctcctgtgaaagccggcgtggaaaccaccaagccatccaagcagagcaacaacaaatacgccgccagctcctacctgagcctgacacctgagcagtggaagtcccacagatcctacagctgccaagtgacccacgaaggcagcaccgtggaaaagacagtggcccctacagagtgcagcggcagagccgattgcggctttaccagcgagagctaccagcagggcgtgctgagcgccaccatcctgtacgagatcctgctgggcaaggccaccctgtacgccgtgctggtgtctgccctggtgctgatggctatggtcaagcggaaggacagccggggaaaacggggcagaaagaaactcctgtatatattcaaacaaccatttatgagaccagtacaaactactcaagaggaagatggctgtagctgccgatttccagaagaagaagaaggaggatgtgaactgagagtgaagttcagcagaagcgccgacgcccctgcctaccagcagggacagaaccaactgtacaacgagctgaacctgggcagacgggaagagtacgacgtgctggacaagcggagaggcagggaccctgagatgggcggaaagccccagcggagaaagaacccccaggaaggactgtataacgaactccagaaagacaagatggccgaagcctacagcgagatcggcatgaagggcgagcggagaagaggcaagggccacgatggcctgtaccagggcctgagcaccgccaccaaggacacctatgacgccctgcacatgcaggccctgcctccaaga

SEQ ID NO: 26781 - DNA, 915 bp, synthetic construct
  source 1..915: mol_type = other DNA
acactgttccctccaagcagcgaagaactccaggccaacaaggccacacttgtgtgcctgatctccgacttctaccctggggctgtgacagtggcttggaaggccgatggatctcctgtgaaagccggcgtggaaaccaccaagccatccaagcagagcaacaacaaatacgccgccagctcctacctgagcctgacacctgagcagtggaagtcccacagatcctacagctgccaagtgacccacgaaggcagcaccgtggaaaagacagtggcccctacagagtgcagcggcagagccgattgcggctttaccagcgagagctaccagcagggcgtgctgagcgccaccatcctgtacgagatcctgctgggcaaggccaccctgtacgccgtgctggtgtctgccctggtgctgatggctatggtcaagcggaaggacagccggggaaaacggggcagaaagaaactcctgtatatattcaaacaaccatttatgagaccagtacaaactactcaagaggaagatggctgtagctgccgatttccagaagaagaagaaggaggatgtgaactgagagtgaagttcagcagaagcgccgacgcccctgcctaccagcagggacagaaccaactgtacaacgagctgaacctgggcagacgggaagagtacgacgtgctggacaagcggagaggcagggaccctgagatgggcggaaagccccagcggagaaagaacccccaggaaggactgtataacgaactccagaaagacaagatggccgaagcctacagcgagatcggcatgaagggcgagcggagaagaggcaagggccacgatggcctgtaccagggcctgagcaccgccaccaaggacacctatgacgccctgcacatgcaggccctgcctccaaga

SEQ ID NO: 26782 - DNA, 912 bp, synthetic construct
  source 1..912: mol_type = other DNA
ctgttccctccaagcagcgaagaactccaggccaacaaggccacacttgtgtgcctgatctccgacttctaccctggggctgtgacagtggcttggaaggccgatggatctcctgtgaaagccggcgtggaaaccaccaagccatccaagcagagcaacaacaaatacgccgccagctcctacctgagcctgacacctgagcagtggaagtcccacagatcctacagctgccaagtgacccacgaaggcagcaccgtggaaaagacagtggcccctacagagtgcagcggcagagccgattgcggctttaccagcgagagctaccagcagggcgtgctgagcgccaccatcctgtacgagatcctgctgggcaaggccaccctgtacgccgtgctggtgtctgccctggtgctgatggctatggtcaagcggaaggacagccggggaaaacggggcagaaagaaactcctgtatatattcaaacaaccatttatgagaccagtacaaactactcaagaggaagatggctgtagctgccgatttccagaagaagaagaaggaggatgtgaactgagagtgaagttcagcagaagcgccgacgcccctgcctaccagcagggacagaaccaactgtacaacgagctgaacctgggcagacgggaagagtacgacgtgctggacaagcggagaggcagggaccctgagatgggcggaaagccccagcggagaaagaacccccaggaaggactgtataacgaactccagaaagacaagatggccgaagcctacagcgagatcggcatgaagggcgagcggagaagaggcaagggccacgatggcctgtaccagggcctgagcaccgccaccaaggacacctatgacgccctgcacatgcaggccctgcctccaaga

SEQ ID NO: 26783 - DNA, 963 bp, synthetic construct
  source 1..963: mol_type = other DNA
ggacagcctaaggccaatcctaccgtgacactgttccctccaagcagcgaagaactccaggccaacaaggccacacttgtgtgcctgatctccgacttctaccctggggctgtgacagtggcttggaaggccgatggatctcctgtgaaagccggcgtggaaaccaccaagccatccaagcagagcaacaacaaatacgccgccagctcctacctgagcctgacacctgagcagtggaagtcccacagatcctacagctgccaagtgacccacgaaggcagcaccgtggaaaagacagtggcccctacagagtgcagcatccccgaggacacattcttcccaagccccgagagcagctgcgacgtgaagctggtggaaaagagcttcgagacagacaccaacctgaacttccagaacctgagcgtgatcggcttcagaatcctgctgctgaaagtggccggctttaacctgctgatgaccctgcggctgtggtccagcaaacggggcagaaagaaactcctgtatatattcaaacaaccatttatgagaccagtacaaactactcaagaggaagatggctgtagctgccgatttccagaagaagaagaaggaggatgtgaactgagagtgaagttcagcagaagcgccgacgcccctgcctaccagcagggacagaaccaactgtacaacgagctgaacctgggcagacgggaagagtacgacgtgctggacaagcggagaggcagggaccctgagatgggcggaaagccccagcggagaaagaacccccaggaaggactgtataacgaactccagaaagacaagatggccgaagcctacagcgagatcggcatgaagggcgagcggagaagaggcaagggccacgatggcctgtaccagggcctgagcaccgccaccaaggacacctatgacgccctgcacatgcaggccctgcctccaaga

SEQ ID NO: 26784 - DNA, 960 bp, synthetic construct
  source 1..960: mol_type = other DNA
cagcctaaggccaatcctaccgtgacactgttccctccaagcagcgaagaactccaggccaacaaggccacacttgtgtgcctgatctccgacttctaccctggggctgtgacagtggcttggaaggccgatggatctcctgtgaaagccggcgtggaaaccaccaagccatccaagcagagcaacaacaaatacgccgccagctcctacctgagcctgacacctgagcagtggaagtcccacagatcctacagctgccaagtgacccacgaaggcagcaccgtggaaaagacagtggcccctacagagtgcagcatccccgaggacacattcttcccaagccccgagagcagctgcgacgtgaagctggtggaaaagagcttcgagacagacaccaacctgaacttccagaacctgagcgtgatcggcttcagaatcctgctgctgaaagtggccggctttaacctgctgatgaccctgcggctgtggtccagcaaacggggcagaaagaaactcctgtatatattcaaacaaccatttatgagaccagtacaaactactcaagaggaagatggctgtagctgccgatttccagaagaagaagaaggaggatgtgaactgagagtgaagttcagcagaagcgccgacgcccctgcctaccagcagggacagaaccaactgtacaacgagctgaacctgggcagacgggaagagtacgacgtgctggacaagcggagaggcagggaccctgagatgggcggaaagccccagcggagaaagaacccccaggaaggactgtataacgaactccagaaagacaagatggccgaagcctacagcgagatcggcatgaagggcgagcggagaagaggcaagggccacgatggcctgtaccagggcctgagcaccgccaccaaggacacctatgacgccctgcacatgcaggccctgcctccaaga

SEQ ID NO: 26785 - DNA, 957 bp, synthetic construct
  source 1..957: mol_type = other DNA
cctaaggccaatcctaccgtgacactgttccctccaagcagcgaagaactccaggccaacaaggccacacttgtgtgcctgatctccgacttctaccctggggctgtgacagtggcttggaaggccgatggatctcctgtgaaagccggcgtggaaaccaccaagccatccaagcagagcaacaacaaatacgccgccagctcctacctgagcctgacacctgagcagtggaagtcccacagatcctacagctgccaagtgacccacgaaggcagcaccgtggaaaagacagtggcccctacagagtgcagcatccccgaggacacattcttcccaagccccgagagcagctgcgacgtgaagctggtggaaaagagcttcgagacagacaccaacctgaacttccagaacctgagcgtgatcggcttcagaatcctgctgctgaaagtggccggctttaacctgctgatgaccctgcggctgtggtccagcaaacggggcagaaagaaactcctgtatatattcaaacaaccatttatgagaccagtacaaactactcaagaggaagatggctgtagctgccgatttccagaagaagaagaaggaggatgtgaactgagagtgaagttcagcagaagcgccgacgcccctgcctaccagcagggacagaaccaactgtacaacgagctgaacctgggcagacgggaagagtacgacgtgctggacaagcggagaggcagggaccctgagatgggcggaaagccccagcggagaaagaacccccaggaaggactgtataacgaactccagaaagacaagatggccgaagcctacagcgagatcggcatgaagggcgagcggagaagaggcaagggccacgatggcctgtaccagggcctgagcaccgccaccaaggacacctatgacgccctgcacatgcaggccctgcctccaaga

SEQ ID NO: 26786 - DNA, 954 bp, synthetic construct
  source 1..954: mol_type = other DNA
aaggccaatcctaccgtgacactgttccctccaagcagcgaagaactccaggccaacaaggccacacttgtgtgcctgatctccgacttctaccctggggctgtgacagtggcttggaaggccgatggatctcctgtgaaagccggcgtggaaaccaccaagccatccaagcagagcaacaacaaatacgccgccagctcctacctgagcctgacacctgagcagtggaagtcccacagatcctacagctgccaagtgacccacgaaggcagcaccgtggaaaagacagtggcccctacagagtgcagcatccccgaggacacattcttcccaagccccgagagcagctgcgacgtgaagctggtggaaaagagcttcgagacagacaccaacctgaacttccagaacctgagcgtgatcggcttcagaatcctgctgctgaaagtggccggctttaacctgctgatgaccctgcggctgtggtccagcaaacggggcagaaagaaactcctgtatatattcaaacaaccatttatgagaccagtacaaactactcaagaggaagatggctgtagctgccgatttccagaagaagaagaaggaggatgtgaactgagagtgaagttcagcagaagcgccgacgcccctgcctaccagcagggacagaaccaactgtacaacgagctgaacctgggcagacgggaagagtacgacgtgctggacaagcggagaggcagggaccctgagatgggcggaaagccccagcggagaaagaacccccaggaaggactgtataacgaactccagaaagacaagatggccgaagcctacagcgagatcggcatgaagggcgagcggagaagaggcaagggccacgatggcctgtaccagggcctgagcaccgccaccaaggacacctatgacgccctgcacatgcaggccctgcctccaaga

SEQ ID NO: 26787 - DNA, 951 bp, synthetic construct
  source 1..951: mol_type = other DNA
gccaatcctaccgtgacactgttccctccaagcagcgaagaactccaggccaacaaggccacacttgtgtgcctgatctccgacttctaccctggggctgtgacagtggcttggaaggccgatggatctcctgtgaaagccggcgtggaaaccaccaagccatccaagcagagcaacaacaaatacgccgccagctcctacctgagcctgacacctgagcagtggaagtcccacagatcctacagctgccaagtgacccacgaaggcagcaccgtggaaaagacagtggcccctacagagtgcagcatccccgaggacacattcttcccaagccccgagagcagctgcgacgtgaagctggtggaaaagagcttcgagacagacaccaacctgaacttccagaacctgagcgtgatcggcttcagaatcctgctgctgaaagtggccggctttaacctgctgatgaccctgcggctgtggtccagcaaacggggcagaaagaaactcctgtatatattcaaacaaccatttatgagaccagtacaaactactcaagaggaagatggctgtagctgccgatttccagaagaagaagaaggaggatgtgaactgagagtgaagttcagcagaagcgccgacgcccctgcctaccagcagggacagaaccaactgtacaacgagctgaacctgggcagacgggaagagtacgacgtgctggacaagcggagaggcagggaccctgagatgggcggaaagccccagcggagaaagaacccccaggaaggactgtataacgaactccagaaagacaagatggccgaagcctacagcgagatcggcatgaagggcgagcggagaagaggcaagggccacgatggcctgtaccagggcctgagcaccgccaccaaggacacctatgacgccctgcacatgcaggccctgcctccaaga

SEQ ID NO: 26788 - DNA, 948 bp, synthetic construct
  source 1..948: mol_type = other DNA
aatcctaccgtgacactgttccctccaagcagcgaagaactccaggccaacaaggccacacttgtgtgcctgatctccgacttctaccctggggctgtgacagtggcttggaaggccgatggatctcctgtgaaagccggcgtggaaaccaccaagccatccaagcagagcaacaacaaatacgccgccagctcctacctgagcctgacacctgagcagtggaagtcccacagatcctacagctgccaagtgacccacgaaggcagcaccgtggaaaagacagtggcccctacagagtgcagcatccccgaggacacattcttcccaagccccgagagcagctgcgacgtgaagctggtggaaaagagcttcgagacagacaccaacctgaacttccagaacctgagcgtgatcggcttcagaatcctgctgctgaaagtggccggctttaacctgctgatgaccctgcggctgtggtccagcaaacggggcagaaagaaactcctgtatatattcaaacaaccatttatgagaccagtacaaactactcaagaggaagatggctgtagctgccgatttccagaagaagaagaaggaggatgtgaactgagagtgaagttcagcagaagcgccgacgcccctgcctaccagcagggacagaaccaactgtacaacgagctgaacctgggcagacgggaagagtacgacgtgctggacaagcggagaggcagggaccctgagatgggcggaaagccccagcggagaaagaacccccaggaaggactgtataacgaactccagaaagacaagatggccgaagcctacagcgagatcggcatgaagggcgagcggagaagaggcaagggccacgatggcctgtaccagggcctgagcaccgccaccaaggacacctatgacgccctgcacatgcaggccctgcctccaaga

SEQ ID NO: 26789 - DNA, 945 bp, synthetic construct
  source 1..945: mol_type = other DNA
cctaccgtgacactgttccctccaagcagcgaagaactccaggccaacaaggccacacttgtgtgcctgatctccgacttctaccctggggctgtgacagtggcttggaaggccgatggatctcctgtgaaagccggcgtggaaaccaccaagccatccaagcagagcaacaacaaatacgccgccagctcctacctgagcctgacacctgagcagtggaagtcccacagatcctacagctgccaagtgacccacgaaggcagcaccgtggaaaagacagtggcccctacagagtgcagcatccccgaggacacattcttcccaagccccgagagcagctgcgacgtgaagctggtggaaaagagcttcgagacagacaccaacctgaacttccagaacctgagcgtgatcggcttcagaatcctgctgctgaaagtggccggctttaacctgctgatgaccctgcggctgtggtccagcaaacggggcagaaagaaactcctgtatatattcaaacaaccatttatgagaccagtacaaactactcaagaggaagatggctgtagctgccgatttccagaagaagaagaaggaggatgtgaactgagagtgaagttcagcagaagcgccgacgcccctgcctaccagcagggacagaaccaactgtacaacgagctgaacctgggcagacgggaagagtacgacgtgctggacaagcggagaggcagggaccctgagatgggcggaaagccccagcggagaaagaacccccaggaaggactgtataacgaactccagaaagacaagatggccgaagcctacagcgagatcggcatgaagggcgagcggagaagaggcaagggccacgatggcctgtaccagggcctgagcaccgccaccaaggacacctatgacgccctgcacatgcaggccctgcctccaaga

SEQ ID NO: 26790 - DNA, 942 bp, synthetic construct
  source 1..942: mol_type = other DNA
accgtgacactgttccctccaagcagcgaagaactccaggccaacaaggccacacttgtgtgcctgatctccgacttctaccctggggctgtgacagtggcttggaaggccgatggatctcctgtgaaagccggcgtggaaaccaccaagccatccaagcagagcaacaacaaatacgccgccagctcctacctgagcctgacacctgagcagtggaagtcccacagatcctacagctgccaagtgacccacgaaggcagcaccgtggaaaagacagtggcccctacagagtgcagcatccccgaggacacattcttcccaagccccgagagcagctgcgacgtgaagctggtggaaaagagcttcgagacagacaccaacctgaacttccagaacctgagcgtgatcggcttcagaatcctgctgctgaaagtggccggctttaacctgctgatgaccctgcggctgtggtccagcaaacggggcagaaagaaactcctgtatatattcaaacaaccatttatgagaccagtacaaactactcaagaggaagatggctgtagctgccgatttccagaagaagaagaaggaggatgtgaactgagagtgaagttcagcagaagcgccgacgcccctgcctaccagcagggacagaaccaactgtacaacgagctgaacctgggcagacgggaagagtacgacgtgctggacaagcggagaggcagggaccctgagatgggcggaaagccccagcggagaaagaacccccaggaaggactgtataacgaactccagaaagacaagatggccgaagcctacagcgagatcggcatgaagggcgagcggagaagaggcaagggccacgatggcctgtaccagggcctgagcaccgccaccaaggacacctatgacgccctgcacatgcaggccctgcctccaaga

SEQ ID NO: 26791 - DNA, 939 bp, synthetic construct
  source 1..939: mol_type = other DNA
gtgacactgttccctccaagcagcgaagaactccaggccaacaaggccacacttgtgtgcctgatctccgacttctaccctggggctgtgacagtggcttggaaggccgatggatctcctgtgaaagccggcgtggaaaccaccaagccatccaagcagagcaacaacaaatacgccgccagctcctacctgagcctgacacctgagcagtggaagtcccacagatcctacagctgccaagtgacccacgaaggcagcaccgtggaaaagacagtggcccctacagagtgcagcatccccgaggacacattcttcccaagccccgagagcagctgcgacgtgaagctggtggaaaagagcttcgagacagacaccaacctgaacttccagaacctgagcgtgatcggcttcagaatcctgctgctgaaagtggccggctttaacctgctgatgaccctgcggctgtggtccagcaaacggggcagaaagaaactcctgtatatattcaaacaaccatttatgagaccagtacaaactactcaagaggaagatggctgtagctgccgatttccagaagaagaagaaggaggatgtgaactgagagtgaagttcagcagaagcgccgacgcccctgcctaccagcagggacagaaccaactgtacaacgagctgaacctgggcagacgggaagagtacgacgtgctggacaagcggagaggcagggaccctgagatgggcggaaagccccagcggagaaagaacccccaggaaggactgtataacgaactccagaaagacaagatggccgaagcctacagcgagatcggcatgaagggcgagcggagaagaggcaagggccacgatggcctgtaccagggcctgagcaccgccaccaaggacacctatgacgccctgcacatgcaggccctgcctccaaga

SEQ ID NO: 26792 - DNA, 936 bp, synthetic construct
  source 1..936: mol_type = other DNA
acactgttccctccaagcagcgaagaactccaggccaacaaggccacacttgtgtgcctgatctccgacttctaccctggggctgtgacagtggcttggaaggccgatggatctcctgtgaaagccggcgtggaaaccaccaagccatccaagcagagcaacaacaaatacgccgccagctcctacctgagcctgacacctgagcagtggaagtcccacagatcctacagctgccaagtgacccacgaaggcagcaccgtggaaaagacagtggcccctacagagtgcagcatccccgaggacacattcttcccaagccccgagagcagctgcgacgtgaagctggtggaaaagagcttcgagacagacaccaacctgaacttccagaacctgagcgtgatcggcttcagaatcctgctgctgaaagtggccggctttaacctgctgatgaccctgcggctgtggtccagcaaacggggcagaaagaaactcctgtatatattcaaacaaccatttatgagaccagtacaaactactcaagaggaagatggctgtagctgccgatttccagaagaagaagaaggaggatgtgaactgagagtgaagttcagcagaagcgccgacgcccctgcctaccagcagggacagaaccaactgtacaacgagctgaacctgggcagacgggaagagtacgacgtgctggacaagcggagaggcagggaccctgagatgggcggaaagccccagcggagaaagaacccccaggaaggactgtataacgaactccagaaagacaagatggccgaagcctacagcgagatcggcatgaagggcgagcggagaagaggcaagggccacgatggcctgtaccagggcctgagcaccgccaccaaggacacctatgacgccctgcacatgcaggccctgcctccaaga

SEQ ID NO: 26793 - DNA, 933 bp, synthetic construct
  source 1..933: mol_type = other DNA
ctgttccctccaagcagcgaagaactccaggccaacaaggccacacttgtgtgcctgatctccgacttctaccctggggctgtgacagtggcttggaaggccgatggatctcctgtgaaagccggcgtggaaaccaccaagccatccaagcagagcaacaacaaatacgccgccagctcctacctgagcctgacacctgagcagtggaagtcccacagatcctacagctgccaagtgacccacgaaggcagcaccgtggaaaagacagtggcccctacagagtgcagcatccccgaggacacattcttcccaagccccgagagcagctgcgacgtgaagctggtggaaaagagcttcgagacagacaccaacctgaacttccagaacctgagcgtgatcggcttcagaatcctgctgctgaaagtggccggctttaacctgctgatgaccctgcggctgtggtccagcaaacggggcagaaagaaactcctgtatatattcaaacaaccatttatgagaccagtacaaactactcaagaggaagatggctgtagctgccgatttccagaagaagaagaaggaggatgtgaactgagagtgaagttcagcagaagcgccgacgcccctgcctaccagcagggacagaaccaactgtacaacgagctgaacctgggcagacgggaagagtacgacgtgctggacaagcggagaggcagggaccctgagatgggcggaaagccccagcggagaaagaacccccaggaaggactgtataacgaactccagaaagacaagatggccgaagcctacagcgagatcggcatgaagggcgagcggagaagaggcaagggccacgatggcctgtaccagggcctgagcaccgccaccaaggacacctatgacgccctgcacatgcaggccctgcctccaaga

SEQ ID NO: 26794 - DNA, 993 bp, synthetic construct
  source 1..993: mol_type = other DNA
gacctgaagaacgtgttcccacctgaggtggccgtgttcgagcctagcgaggccgagatcagccacacccagaaagccaccctcgtgtgcctggctaccggcttctaccccgaccatgtggaactgtcttggtgggtcaacggcaaagaggtgcacagcggcgtgtgtaccgacccccagccactgaaagaacagcccgccctgaacgacagccggtactgcctgagcagcagactgagagtgtccgccaccttctggcagaacccccggaaccacttcagatgccaggtgcagttctacggcctgagcgagaacgacgagtggacccaggacagagccaagcccgtgacccagatcgtgtctgccgaagcctggggcagagccgattgcgacgtgaagctggtggaaaagagcttcgagacagacaccaacctgaacttccagaacctgagcgtgatcggcttcagaatcctgctgctgaaagtggccggctttaacctgctgatgaccctgcggctgtggtccagcaaacggggcagaaagaaactcctgtatatattcaaacaaccatttatgagaccagtacaaactactcaagaggaagatggctgtagctgccgatttccagaagaagaagaaggaggatgtgaactgagagtgaagttcagcagaagcgccgacgcccctgcctaccagcagggacagaaccaactgtacaacgagctgaacctgggcagacgggaagagtacgacgtgctggacaagcggagaggcagggaccctgagatgggcggaaagccccagcggagaaagaacccccaggaaggactgtataacgaactccagaaagacaagatggccgaagcctacagcgagatcggcatgaagggcgagcggagaagaggcaagggccacgatggcctgtaccagggcctgagcaccgccaccaaggacacctatgacgccctgcacatgcaggccctgcctccaaga

SEQ ID NO: 26795 - DNA, 990 bp, synthetic construct
  source 1..990: mol_type = other DNA
ctgaagaacgtgttcccacctgaggtggccgtgttcgagcctagcgaggccgagatcagccacacccagaaagccaccctcgtgtgcctggctaccggcttctaccccgaccatgtggaactgtcttggtgggtcaacggcaaagaggtgcacagcggcgtgtgtaccgacccccagccactgaaagaacagcccgccctgaacgacagccggtactgcctgagcagcagactgagagtgtccgccaccttctggcagaacccccggaaccacttcagatgccaggtgcagttctacggcctgagcgagaacgacgagtggacccaggacagagccaagcccgtgacccagatcgtgtctgccgaagcctggggcagagccgattgcgacgtgaagctggtggaaaagagcttcgagacagacaccaacctgaacttccagaacctgagcgtgatcggcttcagaatcctgctgctgaaagtggccggctttaacctgctgatgaccctgcggctgtggtccagcaaacggggcagaaagaaactcctgtatatattcaaacaaccatttatgagaccagtacaaactactcaagaggaagatggctgtagctgccgatttccagaagaagaagaaggaggatgtgaactgagagtgaagttcagcagaagcgccgacgcccctgcctaccagcagggacagaaccaactgtacaacgagctgaacctgggcagacgggaagagtacgacgtgctggacaagcggagaggcagggaccctgagatgggcggaaagccccagcggagaaagaacccccaggaaggactgtataacgaactccagaaagacaagatggccgaagcctacagcgagatcggcatgaagggcgagcggagaagaggcaagggccacgatggcctgtaccagggcctgagcaccgccaccaaggacacctatgacgccctgcacatgcaggccctgcctccaaga

SEQ ID NO: 26796 - DNA, 987 bp, synthetic construct
  source 1..987: mol_type = other DNA
aagaacgtgttcccacctgaggtggccgtgttcgagcctagcgaggccgagatcagccacacccagaaagccaccctcgtgtgcctggctaccggcttctaccccgaccatgtggaactgtcttggtgggtcaacggcaaagaggtgcacagcggcgtgtgtaccgacccccagccactgaaagaacagcccgccctgaacgacagccggtactgcctgagcagcagactgagagtgtccgccaccttctggcagaacccccggaaccacttcagatgccaggtgcagttctacggcctgagcgagaacgacgagtggacccaggacagagccaagcccgtgacccagatcgtgtctgccgaagcctggggcagagccgattgcgacgtgaagctggtggaaaagagcttcgagacagacaccaacctgaacttccagaacctgagcgtgatcggcttcagaatcctgctgctgaaagtggccggctttaacctgctgatgaccctgcggctgtggtccagcaaacggggcagaaagaaactcctgtatatattcaaacaaccatttatgagaccagtacaaactactcaagaggaagatggctgtagctgccgatttccagaagaagaagaaggaggatgtgaactgagagtgaagttcagcagaagcgccgacgcccctgcctaccagcagggacagaaccaactgtacaacgagctgaacctgggcagacgggaagagtacgacgtgctggacaagcggagaggcagggaccctgagatgggcggaaagccccagcggagaaagaacccccaggaaggactgtataacgaactccagaaagacaagatggccgaagcctacagcgagatcggcatgaagggcgagcggagaagaggcaagggccacgatggcctgtaccagggcctgagcaccgccaccaaggacacctatgacgccctgcacatgcaggccctgcctccaaga

SEQ ID NO: 26797 - DNA, 984 bp, synthetic construct
  source 1..984: mol_type = other DNA
aacgtgttcccacctgaggtggccgtgttcgagcctagcgaggccgagatcagccacacccagaaagccaccctcgtgtgcctggctaccggcttctaccccgaccatgtggaactgtcttggtgggtcaacggcaaagaggtgcacagcggcgtgtgtaccgacccccagccactgaaagaacagcccgccctgaacgacagccggtactgcctgagcagcagactgagagtgtccgccaccttctggcagaacccccggaaccacttcagatgccaggtgcagttctacggcctgagcgagaacgacgagtggacccaggacagagccaagcccgtgacccagatcgtgtctgccgaagcctggggcagagccgattgcgacgtgaagctggtggaaaagagcttcgagacagacaccaacctgaacttccagaacctgagcgtgatcggcttcagaatcctgctgctgaaagtggccggctttaacctgctgatgaccctgcggctgtggtccagcaaacggggcagaaagaaactcctgtatatattcaaacaaccatttatgagaccagtacaaactactcaagaggaagatggctgtagctgccgatttccagaagaagaagaaggaggatgtgaactgagagtgaagttcagcagaagcgccgacgcccctgcctaccagcagggacagaaccaactgtacaacgagctgaacctgggcagacgggaagagtacgacgtgctggacaagcggagaggcagggaccctgagatgggcggaaagccccagcggagaaagaacccccaggaaggactgtataacgaactccagaaagacaagatggccgaagcctacagcgagatcggcatgaagggcgagcggagaagaggcaagggccacgatggcctgtaccagggcctgagcaccgccaccaaggacacctatgacgccctgcacatgcaggccctgcctccaaga

SEQ ID NO: 26798 - DNA, 981 bp, synthetic construct
  source 1..981: mol_type = other DNA
gtgttcccacctgaggtggccgtgttcgagcctagcgaggccgagatcagccacacccagaaagccaccctcgtgtgcctggctaccggcttctaccccgaccatgtggaactgtcttggtgggtcaacggcaaagaggtgcacagcggcgtgtgtaccgacccccagccactgaaagaacagcccgccctgaacgacagccggtactgcctgagcagcagactgagagtgtccgccaccttctggcagaacccccggaaccacttcagatgccaggtgcagttctacggcctgagcgagaacgacgagtggacccaggacagagccaagcccgtgacccagatcgtgtctgccgaagcctggggcagagccgattgcgacgtgaagctggtggaaaagagcttcgagacagacaccaacctgaacttccagaacctgagcgtgatcggcttcagaatcctgctgctgaaagtggccggctttaacctgctgatgaccctgcggctgtggtccagcaaacggggcagaaagaaactcctgtatatattcaaacaaccatttatgagaccagtacaaactactcaagaggaagatggctgtagctgccgatttccagaagaagaagaaggaggatgtgaactgagagtgaagttcagcagaagcgccgacgcccctgcctaccagcagggacagaaccaactgtacaacgagctgaacctgggcagacgggaagagtacgacgtgctggacaagcggagaggcagggaccctgagatgggcggaaagccccagcggagaaagaacccccaggaaggactgtataacgaactccagaaagacaagatggccgaagcctacagcgagatcggcatgaagggcgagcggagaagaggcaagggccacgatggcctgtaccagggcctgagcaccgccaccaaggacacctatgacgccctgcacatgcaggccctgcctccaaga

SEQ ID NO: 26799 - DNA, 978 bp, synthetic construct
  source 1..978: mol_type = other DNA
ttcccacctgaggtggccgtgttcgagcctagcgaggccgagatcagccacacccagaaagccaccctcgtgtgcctggctaccggcttctaccccgaccatgtggaactgtcttggtgggtcaacggcaaagaggtgcacagcggcgtgtgtaccgacccccagccactgaaagaacagcccgccctgaacgacagccggtactgcctgagcagcagactgagagtgtccgccaccttctggcagaacccccggaaccacttcagatgccaggtgcagttctacggcctgagcgagaacgacgagtggacccaggacagagccaagcccgtgacccagatcgtgtctgccgaagcctggggcagagccgattgcgacgtgaagctggtggaaaagagcttcgagacagacaccaacctgaacttccagaacctgagcgtgatcggcttcagaatcctgctgctgaaagtggccggctttaacctgctgatgaccctgcggctgtggtccagcaaacggggcagaaagaaactcctgtatatattcaaacaaccatttatgagaccagtacaaactactcaagaggaagatggctgtagctgccgatttccagaagaagaagaaggaggatgtgaactgagagtgaagttcagcagaagcgccgacgcccctgcctaccagcagggacagaaccaactgtacaacgagctgaacctgggcagacgggaagagtacgacgtgctggacaagcggagaggcagggaccctgagatgggcggaaagccccagcggagaaagaacccccaggaaggactgtataacgaactccagaaagacaagatggccgaagcctacagcgagatcggcatgaagggcgagcggagaagaggcaagggccacgatggcctgtaccagggcctgagcaccgccaccaaggacacctatgacgccctgcacatgcaggccctgcctccaaga

SEQ ID NO: 26800 - DNA, 975 bp, synthetic construct
  source 1..975: mol_type = other DNA
ccacctgaggtggccgtgttcgagcctagcgaggccgagatcagccacacccagaaagccaccctcgtgtgcctggctaccggcttctaccccgaccatgtggaactgtcttggtgggtcaacggcaaagaggtgcacagcggcgtgtgtaccgacccccagccactgaaagaacagcccgccctgaacgacagccggtactgcctgagcagcagactgagagtgtccgccaccttctggcagaacccccggaaccacttcagatgccaggtgcagttctacggcctgagcgagaacgacgagtggacccaggacagagccaagcccgtgacccagatcgtgtctgccgaagcctggggcagagccgattgcgacgtgaagctggtggaaaagagcttcgagacagacaccaacctgaacttccagaacctgagcgtgatcggcttcagaatcctgctgctgaaagtggccggctttaacctgctgatgaccctgcggctgtggtccagcaaacggggcagaaagaaactcctgtatatattcaaacaaccatttatgagaccagtacaaactactcaagaggaagatggctgtagctgccgatttccagaagaagaagaaggaggatgtgaactgagagtgaagttcagcagaagcgccgacgcccctgcctaccagcagggacagaaccaactgtacaacgagctgaacctgggcagacgggaagagtacgacgtgctggacaagcggagaggcagggaccctgagatgggcggaaagccccagcggagaaagaacccccaggaaggactgtataacgaactccagaaagacaagatggccgaagcctacagcgagatcggcatgaagggcgagcggagaagaggcaagggccacgatggcctgtaccagggcctgagcaccgccaccaaggacacctatgacgccctgcacatgcaggccctgcctccaaga

SEQ ID NO: 26801 - DNA, 972 bp, synthetic construct
  source 1..972: mol_type = other DNA
cctgaggtggccgtgttcgagcctagcgaggccgagatcagccacacccagaaagccaccctcgtgtgcctggctaccggcttctaccccgaccatgtggaactgtcttggtgggtcaacggcaaagaggtgcacagcggcgtgtgtaccgacccccagccactgaaagaacagcccgccctgaacgacagccggtactgcctgagcagcagactgagagtgtccgccaccttctggcagaacccccggaaccacttcagatgccaggtgcagttctacggcctgagcgagaacgacgagtggacccaggacagagccaagcccgtgacccagatcgtgtctgccgaagcctggggcagagccgattgcgacgtgaagctggtggaaaagagcttcgagacagacaccaacctgaacttccagaacctgagcgtgatcggcttcagaatcctgctgctgaaagtggccggctttaacctgctgatgaccctgcggctgtggtccagcaaacggggcagaaagaaactcctgtatatattcaaacaaccatttatgagaccagtacaaactactcaagaggaagatggctgtagctgccgatttccagaagaagaagaaggaggatgtgaactgagagtgaagttcagcagaagcgccgacgcccctgcctaccagcagggacagaaccaactgtacaacgagctgaacctgggcagacgggaagagtacgacgtgctggacaagcggagaggcagggaccctgagatgggcggaaagccccagcggagaaagaacccccaggaaggactgtataacgaactccagaaagacaagatggccgaagcctacagcgagatcggcatgaagggcgagcggagaagaggcaagggccacgatggcctgtaccagggcctgagcaccgccaccaaggacacctatgacgccctgcacatgcaggccctgcctccaaga

SEQ ID NO: 26802 - DNA, 969 bp, synthetic construct
  source 1..969: mol_type = other DNA
gaggtggccgtgttcgagcctagcgaggccgagatcagccacacccagaaagccaccctcgtgtgcctggctaccggcttctaccccgaccatgtggaactgtcttggtgggtcaacggcaaagaggtgcacagcggcgtgtgtaccgacccccagccactgaaagaacagcccgccctgaacgacagccggtactgcctgagcagcagactgagagtgtccgccaccttctggcagaacccccggaaccacttcagatgccaggtgcagttctacggcctgagcgagaacgacgagtggacccaggacagagccaagcccgtgacccagatcgtgtctgccgaagcctggggcagagccgattgcgacgtgaagctggtggaaaagagcttcgagacagacaccaacctgaacttccagaacctgagcgtgatcggcttcagaatcctgctgctgaaagtggccggctttaacctgctgatgaccctgcggctgtggtccagcaaacggggcagaaagaaactcctgtatatattcaaacaaccatttatgagaccagtacaaactactcaagaggaagatggctgtagctgccgatttccagaagaagaagaaggaggatgtgaactgagagtgaagttcagcagaagcgccgacgcccctgcctaccagcagggacagaaccaactgtacaacgagctgaacctgggcagacgggaagagtacgacgtgctggacaagcggagaggcagggaccctgagatgggcggaaagccccagcggagaaagaacccccaggaaggactgtataacgaactccagaaagacaagatggccgaagcctacagcgagatcggcatgaagggcgagcggagaagaggcaagggccacgatggcctgtaccagggcctgagcaccgccaccaaggacacctatgacgccctgcacatgcaggccctgcctccaaga

SEQ ID NO: 26803 - DNA, 966 bp, synthetic construct
  source 1..966: mol_type = other DNA
gtggccgtgttcgagcctagcgaggccgagatcagccacacccagaaagccaccctcgtgtgcctggctaccggcttctaccccgaccatgtggaactgtcttggtgggtcaacggcaaagaggtgcacagcggcgtgtgtaccgacccccagccactgaaagaacagcccgccctgaacgacagccggtactgcctgagcagcagactgagagtgtccgccaccttctggcagaacccccggaaccacttcagatgccaggtgcagttctacggcctgagcgagaacgacgagtggacccaggacagagccaagcccgtgacccagatcgtgtctgccgaagcctggggcagagccgattgcgacgtgaagctggtggaaaagagcttcgagacagacaccaacctgaacttccagaacctgagcgtgatcggcttcagaatcctgctgctgaaagtggccggctttaacctgctgatgaccctgcggctgtggtccagcaaacggggcagaaagaaactcctgtatatattcaaacaaccatttatgagaccagtacaaactactcaagaggaagatggctgtagctgccgatttccagaagaagaagaaggaggatgtgaactgagagtgaagttcagcagaagcgccgacgcccctgcctaccagcagggacagaaccaactgtacaacgagctgaacctgggcagacgggaagagtacgacgtgctggacaagcggagaggcagggaccctgagatgggcggaaagccccagcggagaaagaacccccaggaaggactgtataacgaactccagaaagacaagatggccgaagcctacagcgagatcggcatgaagggcgagcggagaagaggcaagggccacgatggcctgtaccagggcctgagcaccgccaccaaggacacctatgacgccctgcacatgcaggccctgcctccaaga

SEQ ID NO: 26804 - DNA, 963 bp, synthetic construct
  source 1..963: mol_type = other DNA
gccgtgttcgagcctagcgaggccgagatcagccacacccagaaagccaccctcgtgtgcctggctaccggcttctaccccgaccatgtggaactgtcttggtgggtcaacggcaaagaggtgcacagcggcgtgtgtaccgacccccagccactgaaagaacagcccgccctgaacgacagccggtactgcctgagcagcagactgagagtgtccgccaccttctggcagaacccccggaaccacttcagatgccaggtgcagttctacggcctgagcgagaacgacgagtggacccaggacagagccaagcccgtgacccagatcgtgtctgccgaagcctggggcagagccgattgcgacgtgaagctggtggaaaagagcttcgagacagacaccaacctgaacttccagaacctgagcgtgatcggcttcagaatcctgctgctgaaagtggccggctttaacctgctgatgaccctgcggctgtggtccagcaaacggggcagaaagaaactcctgtatatattcaaacaaccatttatgagaccagtacaaactactcaagaggaagatggctgtagctgccgatttccagaagaagaagaaggaggatgtgaactgagagtgaagttcagcagaagcgccgacgcccctgcctaccagcagggacagaaccaactgtacaacgagctgaacctgggcagacgggaagagtacgacgtgctggacaagcggagaggcagggaccctgagatgggcggaaagccccagcggagaaagaacccccaggaaggactgtataacgaactccagaaagacaagatggccgaagcctacagcgagatcggcatgaagggcgagcggagaagaggcaagggccacgatggcctgtaccagggcctgagcaccgccaccaaggacacctatgacgccctgcacatgcaggccctgcctccaaga

SEQ ID NO: 26805 - DNA, 960 bp, synthetic construct
  source 1..960: mol_type = other DNA
gtgttcgagcctagcgaggccgagatcagccacacccagaaagccaccctcgtgtgcctggctaccggcttctaccccgaccatgtggaactgtcttggtgggtcaacggcaaagaggtgcacagcggcgtgtgtaccgacccccagccactgaaagaacagcccgccctgaacgacagccggtactgcctgagcagcagactgagagtgtccgccaccttctggcagaacccccggaaccacttcagatgccaggtgcagttctacggcctgagcgagaacgacgagtggacccaggacagagccaagcccgtgacccagatcgtgtctgccgaagcctggggcagagccgattgcgacgtgaagctggtggaaaagagcttcgagacagacaccaacctgaacttccagaacctgagcgtgatcggcttcagaatcctgctgctgaaagtggccggctttaacctgctgatgaccctgcggctgtggtccagcaaacggggcagaaagaaactcctgtatatattcaaacaaccatttatgagaccagtacaaactactcaagaggaagatggctgtagctgccgatttccagaagaagaagaaggaggatgtgaactgagagtgaagttcagcagaagcgccgacgcccctgcctaccagcagggacagaaccaactgtacaacgagctgaacctgggcagacgggaagagtacgacgtgctggacaagcggagaggcagggaccctgagatgggcggaaagccccagcggagaaagaacccccaggaaggactgtataacgaactccagaaagacaagatggccgaagcctacagcgagatcggcatgaagggcgagcggagaagaggcaagggccacgatggcctgtaccagggcctgagcaccgccaccaaggacacctatgacgccctgcacatgcaggccctgcctccaaga

SEQ ID NO: 26806 - DNA, 957 bp, synthetic construct
  source 1..957: mol_type = other DNA
ttcgagcctagcgaggccgagatcagccacacccagaaagccaccctcgtgtgcctggctaccggcttctaccccgaccatgtggaactgtcttggtgggtcaacggcaaagaggtgcacagcggcgtgtgtaccgacccccagccactgaaagaacagcccgccctgaacgacagccggtactgcctgagcagcagactgagagtgtccgccaccttctggcagaacccccggaaccacttcagatgccaggtgcagttctacggcctgagcgagaacgacgagtggacccaggacagagccaagcccgtgacccagatcgtgtctgccgaagcctggggcagagccgattgcgacgtgaagctggtggaaaagagcttcgagacagacaccaacctgaacttccagaacctgagcgtgatcggcttcagaatcctgctgctgaaagtggccggctttaacctgctgatgaccctgcggctgtggtccagcaaacggggcagaaagaaactcctgtatatattcaaacaaccatttatgagaccagtacaaactactcaagaggaagatggctgtagctgccgatttccagaagaagaagaaggaggatgtgaactgagagtgaagttcagcagaagcgccgacgcccctgcctaccagcagggacagaaccaactgtacaacgagctgaacctgggcagacgggaagagtacgacgtgctggacaagcggagaggcagggaccctgagatgggcggaaagccccagcggagaaagaacccccaggaaggactgtataacgaactccagaaagacaagatggccgaagcctacagcgagatcggcatgaagggcgagcggagaagaggcaagggccacgatggcctgtaccagggcctgagcaccgccaccaaggacacctatgacgccctgcacatgcaggccctgcctccaaga

SEQ ID NO: 26807 - DNA, 954 bp, synthetic construct
  source 1..954: mol_type = other DNA
gagcctagcgaggccgagatcagccacacccagaaagccaccctcgtgtgcctggctaccggcttctaccccgaccatgtggaactgtcttggtgggtcaacggcaaagaggtgcacagcggcgtgtgtaccgacccccagccactgaaagaacagcccgccctgaacgacagccggtactgcctgagcagcagactgagagtgtccgccaccttctggcagaacccccggaaccacttcagatgccaggtgcagttctacggcctgagcgagaacgacgagtggacccaggacagagccaagcccgtgacccagatcgtgtctgccgaagcctggggcagagccgattgcgacgtgaagctggtggaaaagagcttcgagacagacaccaacctgaacttccagaacctgagcgtgatcggcttcagaatcctgctgctgaaagtggccggctttaacctgctgatgaccctgcggctgtggtccagcaaacggggcagaaagaaactcctgtatatattcaaacaaccatttatgagaccagtacaaactactcaagaggaagatggctgtagctgccgatttccagaagaagaagaaggaggatgtgaactgagagtgaagttcagcagaagcgccgacgcccctgcctaccagcagggacagaaccaactgtacaacgagctgaacctgggcagacgggaagagtacgacgtgctggacaagcggagaggcagggaccctgagatgggcggaaagccccagcggagaaagaacccccaggaaggactgtataacgaactccagaaagacaagatggccgaagcctacagcgagatcggcatgaagggcgagcggagaagaggcaagggccacgatggcctgtaccagggcctgagcaccgccaccaaggacacctatgacgccctgcacatgcaggccctgcctccaaga

SEQ ID NO: 26808 - DNA, 951 bp, synthetic construct
  source 1..951: mol_type = other DNA
cctagcgaggccgagatcagccacacccagaaagccaccctcgtgtgcctggctaccggcttctaccccgaccatgtggaactgtcttggtgggtcaacggcaaagaggtgcacagcggcgtgtgtaccgacccccagccactgaaagaacagcccgccctgaacgacagccggtactgcctgagcagcagactgagagtgtccgccaccttctggcagaacccccggaaccacttcagatgccaggtgcagttctacggcctgagcgagaacgacgagtggacccaggacagagccaagcccgtgacccagatcgtgtctgccgaagcctggggcagagccgattgcgacgtgaagctggtggaaaagagcttcgagacagacaccaacctgaacttccagaacctgagcgtgatcggcttcagaatcctgctgctgaaagtggccggctttaacctgctgatgaccctgcggctgtggtccagcaaacggggcagaaagaaactcctgtatatattcaaacaaccatttatgagaccagtacaaactactcaagaggaagatggctgtagctgccgatttccagaagaagaagaaggaggatgtgaactgagagtgaagttcagcagaagcgccgacgcccctgcctaccagcagggacagaaccaactgtacaacgagctgaacctgggcagacgggaagagtacgacgtgctggacaagcggagaggcagggaccctgagatgggcggaaagccccagcggagaaagaacccccaggaaggactgtataacgaactccagaaagacaagatggccgaagcctacagcgagatcggcatgaagggcgagcggagaagaggcaagggccacgatggcctgtaccagggcctgagcaccgccaccaaggacacctatgacgccctgcacatgcaggccctgcctccaaga

SEQ ID NO: 26809 - DNA, 948 bp, synthetic construct
  source 1..948: mol_type = other DNA
agcgaggccgagatcagccacacccagaaagccaccctcgtgtgcctggctaccggcttctaccccgaccatgtggaactgtcttggtgggtcaacggcaaagaggtgcacagcggcgtgtgtaccgacccccagccactgaaagaacagcccgccctgaacgacagccggtactgcctgagcagcagactgagagtgtccgccaccttctggcagaacccccggaaccacttcagatgccaggtgcagttctacggcctgagcgagaacgacgagtggacccaggacagagccaagcccgtgacccagatcgtgtctgccgaagcctggggcagagccgattgcgacgtgaagctggtggaaaagagcttcgagacagacaccaacctgaacttccagaacctgagcgtgatcggcttcagaatcctgctgctgaaagtggccggctttaacctgctgatgaccctgcggctgtggtccagcaaacggggcagaaagaaactcctgtatatattcaaacaaccatttatgagaccagtacaaactactcaagaggaagatggctgtagctgccgatttccagaagaagaagaaggaggatgtgaactgagagtgaagttcagcagaagcgccgacgcccctgcctaccagcagggacagaaccaactgtacaacgagctgaacctgggcagacgggaagagtacgacgtgctggacaagcggagaggcagggaccctgagatgggcggaaagccccagcggagaaagaacccccaggaaggactgtataacgaactccagaaagacaagatggccgaagcctacagcgagatcggcatgaagggcgagcggagaagaggcaagggccacgatggcctgtaccagggcctgagcaccgccaccaaggacacctatgacgccctgcacatgcaggccctgcctccaaga

SEQ ID NO: 26810 - DNA, 945 bp, synthetic construct
  source 1..945: mol_type = other DNA
gaggccgagatcagccacacccagaaagccaccctcgtgtgcctggctaccggcttctaccccgaccatgtggaactgtcttggtgggtcaacggcaaagaggtgcacagcggcgtgtgtaccgacccccagccactgaaagaacagcccgccctgaacgacagccggtactgcctgagcagcagactgagagtgtccgccaccttctggcagaacccccggaaccacttcagatgccaggtgcagttctacggcctgagcgagaacgacgagtggacccaggacagagccaagcccgtgacccagatcgtgtctgccgaagcctggggcagagccgattgcgacgtgaagctggtggaaaagagcttcgagacagacaccaacctgaacttccagaacctgagcgtgatcggcttcagaatcctgctgctgaaagtggccggctttaacctgctgatgaccctgcggctgtggtccagcaaacggggcagaaagaaactcctgtatatattcaaacaaccatttatgagaccagtacaaactactcaagaggaagatggctgtagctgccgatttccagaagaagaagaaggaggatgtgaactgagagtgaagttcagcagaagcgccgacgcccctgcctaccagcagggacagaaccaactgtacaacgagctgaacctgggcagacgggaagagtacgacgtgctggacaagcggagaggcagggaccctgagatgggcggaaagccccagcggagaaagaacccccaggaaggactgtataacgaactccagaaagacaagatggccgaagcctacagcgagatcggcatgaagggcgagcggagaagaggcaagggccacgatggcctgtaccagggcctgagcaccgccaccaaggacacctatgacgccctgcacatgcaggccctgcctccaaga

SEQ ID NO: 26811 - DNA, 942 bp, synthetic construct
  source 1..942: mol_type = other DNA
gccgagatcagccacacccagaaagccaccctcgtgtgcctggctaccggcttctaccccgaccatgtggaactgtcttggtgggtcaacggcaaagaggtgcacagcggcgtgtgtaccgacccccagccactgaaagaacagcccgccctgaacgacagccggtactgcctgagcagcagactgagagtgtccgccaccttctggcagaacccccggaaccacttcagatgccaggtgcagttctacggcctgagcgagaacgacgagtggacccaggacagagccaagcccgtgacccagatcgtgtctgccgaagcctggggcagagccgattgcgacgtgaagctggtggaaaagagcttcgagacagacaccaacctgaacttccagaacctgagcgtgatcggcttcagaatcctgctgctgaaagtggccggctttaacctgctgatgaccctgcggctgtggtccagcaaacggggcagaaagaaactcctgtatatattcaaacaaccatttatgagaccagtacaaactactcaagaggaagatggctgtagctgccgatttccagaagaagaagaaggaggatgtgaactgagagtgaagttcagcagaagcgccgacgcccctgcctaccagcagggacagaaccaactgtacaacgagctgaacctgggcagacgggaagagtacgacgtgctggacaagcggagaggcagggaccctgagatgggcggaaagccccagcggagaaagaacccccaggaaggactgtataacgaactccagaaagacaagatggccgaagcctacagcgagatcggcatgaagggcgagcggagaagaggcaagggccacgatggcctgtaccagggcctgagcaccgccaccaaggacacctatgacgccctgcacatgcaggccctgcctccaaga

SEQ ID NO: 26812 - DNA, 939 bp, synthetic construct
  source 1..939: mol_type = other DNA
gagatcagccacacccagaaagccaccctcgtgtgcctggctaccggcttctaccccgaccatgtggaactgtcttggtgggtcaacggcaaagaggtgcacagcggcgtgtgtaccgacccccagccactgaaagaacagcccgccctgaacgacagccggtactgcctgagcagcagactgagagtgtccgccaccttctggcagaacccccggaaccacttcagatgccaggtgcagttctacggcctgagcgagaacgacgagtggacccaggacagagccaagcccgtgacccagatcgtgtctgccgaagcctggggcagagccgattgcgacgtgaagctggtggaaaagagcttcgagacagacaccaacctgaacttccagaacctgagcgtgatcggcttcagaatcctgctgctgaaagtggccggctttaacctgctgatgaccctgcggctgtggtccagcaaacggggcagaaagaaactcctgtatatattcaaacaaccatttatgagaccagtacaaactactcaagaggaagatggctgtagctgccgatttccagaagaagaagaaggaggatgtgaactgagagtgaagttcagcagaagcgccgacgcccctgcctaccagcagggacagaaccaactgtacaacgagctgaacctgggcagacgggaagagtacgacgtgctggacaagcggagaggcagggaccctgagatgggcggaaagccccagcggagaaagaacccccaggaaggactgtataacgaactccagaaagacaagatggccgaagcctacagcgagatcggcatgaagggcgagcggagaagaggcaagggccacgatggcctgtaccagggcctgagcaccgccaccaaggacacctatgacgccctgcacatgcaggccctgcctccaaga

SEQ ID NO: 26813 - DNA, 936 bp, synthetic construct
  source 1..936: mol_type = other DNA
atcagccacacccagaaagccaccctcgtgtgcctggctaccggcttctaccccgaccatgtggaactgtcttggtgggtcaacggcaaagaggtgcacagcggcgtgtgtaccgacccccagccactgaaagaacagcccgccctgaacgacagccggtactgcctgagcagcagactgagagtgtccgccaccttctggcagaacccccggaaccacttcagatgccaggtgcagttctacggcctgagcgagaacgacgagtggacccaggacagagccaagcccgtgacccagatcgtgtctgccgaagcctggggcagagccgattgcgacgtgaagctggtggaaaagagcttcgagacagacaccaacctgaacttccagaacctgagcgtgatcggcttcagaatcctgctgctgaaagtggccggctttaacctgctgatgaccctgcggctgtggtccagcaaacggggcagaaagaaactcctgtatatattcaaacaaccatttatgagaccagtacaaactactcaagaggaagatggctgtagctgccgatttccagaagaagaagaaggaggatgtgaactgagagtgaagttcagcagaagcgccgacgcccctgcctaccagcagggacagaaccaactgtacaacgagctgaacctgggcagacgggaagagtacgacgtgctggacaagcggagaggcagggaccctgagatgggcggaaagccccagcggagaaagaacccccaggaaggactgtataacgaactccagaaagacaagatggccgaagcctacagcgagatcggcatgaagggcgagcggagaagaggcaagggccacgatggcctgtaccagggcctgagcaccgccaccaaggacacctatgacgccctgcacatgcaggccctgcctccaaga

SEQ ID NO: 26814 - DNA, 933 bp, synthetic construct
  source 1..933: mol_type = other DNA
agccacacccagaaagccaccctcgtgtgcctggctaccggcttctaccccgaccatgtggaactgtcttggtgggtcaacggcaaagaggtgcacagcggcgtgtgtaccgacccccagccactgaaagaacagcccgccctgaacgacagccggtactgcctgagcagcagactgagagtgtccgccaccttctggcagaacccccggaaccacttcagatgccaggtgcagttctacggcctgagcgagaacgacgagtggacccaggacagagccaagcccgtgacccagatcgtgtctgccgaagcctggggcagagccgattgcgacgtgaagctggtggaaaagagcttcgagacagacaccaacctgaacttccagaacctgagcgtgatcggcttcagaatcctgctgctgaaagtggccggctttaacctgctgatgaccctgcggctgtggtccagcaaacggggcagaaagaaactcctgtatatattcaaacaaccatttatgagaccagtacaaactactcaagaggaagatggctgtagctgccgatttccagaagaagaagaaggaggatgtgaactgagagtgaagttcagcagaagcgccgacgcccctgcctaccagcagggacagaaccaactgtacaacgagctgaacctgggcagacgggaagagtacgacgtgctggacaagcggagaggcagggaccctgagatgggcggaaagccccagcggagaaagaacccccaggaaggactgtataacgaactccagaaagacaagatggccgaagcctacagcgagatcggcatgaagggcgagcggagaagaggcaagggccacgatggcctgtaccagggcctgagcaccgccaccaaggacacctatgacgccctgcacatgcaggccctgcctccaaga

SEQ ID NO: 26815 - DNA, 918 bp, synthetic construct
  source 1..918: mol_type = other DNA
gccaccctcgtgtgcctggctaccggcttctaccccgaccatgtggaactgtcttggtgggtcaacggcaaagaggtgcacagcggcgtgtgtaccgacccccagccactgaaagaacagcccgccctgaacgacagccggtactgcctgagcagcagactgagagtgtccgccaccttctggcagaacccccggaaccacttcagatgccaggtgcagttctacggcctgagcgagaacgacgagtggacccaggacagagccaagcccgtgacccagatcgtgtctgccgaagcctggggcagagccgattgcgacgtgaagctggtggaaaagagcttcgagacagacaccaacctgaacttccagaacctgagcgtgatcggcttcagaatcctgctgctgaaagtggccggctttaacctgctgatgaccctgcggctgtggtccagcaaacggggcagaaagaaactcctgtatatattcaaacaaccatttatgagaccagtacaaactactcaagaggaagatggctgtagctgccgatttccagaagaagaagaaggaggatgtgaactgagagtgaagttcagcagaagcgccgacgcccctgcctaccagcagggacagaaccaactgtacaacgagctgaacctgggcagacgggaagagtacgacgtgctggacaagcggagaggcagggaccctgagatgggcggaaagccccagcggagaaagaacccccaggaaggactgtataacgaactccagaaagacaagatggccgaagcctacagcgagatcggcatgaagggcgagcggagaagaggcaagggccacgatggcctgtaccagggcctgagcaccgccaccaaggacacctatgacgccctgcacatgcaggccctgcctccaaga

SEQ ID NO: 26816 - DNA, 903 bp, synthetic construct
  source 1..903: mol_type = other DNA
ctggctaccggcttctaccccgaccatgtggaactgtcttggtgggtcaacggcaaagaggtgcacagcggcgtgtgtaccgacccccagccactgaaagaacagcccgccctgaacgacagccggtactgcctgagcagcagactgagagtgtccgccaccttctggcagaacccccggaaccacttcagatgccaggtgcagttctacggcctgagcgagaacgacgagtggacccaggacagagccaagcccgtgacccagatcgtgtctgccgaagcctggggcagagccgattgcgacgtgaagctggtggaaaagagcttcgagacagacaccaacctgaacttccagaacctgagcgtgatcggcttcagaatcctgctgctgaaagtggccggctttaacctgctgatgaccctgcggctgtggtccagcaaacggggcagaaagaaactcctgtatatattcaaacaaccatttatgagaccagtacaaactactcaagaggaagatggctgtagctgccgatttccagaagaagaagaaggaggatgtgaactgagagtgaagttcagcagaagcgccgacgcccctgcctaccagcagggacagaaccaactgtacaacgagctgaacctgggcagacgggaagagtacgacgtgctggacaagcggagaggcagggaccctgagatgggcggaaagccccagcggagaaagaacccccaggaaggactgtataacgaactccagaaagacaagatggccgaagcctacagcgagatcggcatgaagggcgagcggagaagaggcaagggccacgatggcctgtaccagggcctgagcaccgccaccaaggacacctatgacgccctgcacatgcaggccctgcctccaaga

SEQ ID NO: 26817 - DNA, 984 bp, synthetic construct
  source 1..984: mol_type = other DNA
gacctgaagaacgtgttcccacctgaggtggccgtgttcgagcctagcgaggccgagatcagccacacccagaaagccaccctcgtgtgcctggctaccggcttctaccccgaccatgtggaactgtcttggtgggtcaacggcaaagaggtgcacagcggcgtgtgtaccgacccccagccactgaaagaacagcccgccctgaacgacagccggtactgcctgagcagcagactgagagtgtccgccaccttctggcagaacccccggaaccacttcagatgccaggtgcagttctacggcctgagcgagaacgacgagtggacccaggacagagccaagcccgtgacccagatcgtgtctgccgaagcctggggcagagccgattgcggctttaccagcgagagctaccagcagggcgtgctgagcgccaccaacctgagcgtgatcggcttcagaatcctgctgctgaaagtggccggctttaacctgctgatgaccctgcggctgtggtccagcaaacggggcagaaagaaactcctgtatatattcaaacaaccatttatgagaccagtacaaactactcaagaggaagatggctgtagctgccgatttccagaagaagaagaaggaggatgtgaactgagagtgaagttcagcagaagcgccgacgcccctgcctaccagcagggacagaaccaactgtacaacgagctgaacctgggcagacgggaagagtacgacgtgctggacaagcggagaggcagggaccctgagatgggcggaaagccccagcggagaaagaacccccaggaaggactgtataacgaactccagaaagacaagatggccgaagcctacagcgagatcggcatgaagggcgagcggagaagaggcaagggccacgatggcctgtaccagggcctgagcaccgccaccaaggacacctatgacgccctgcacatgcaggccctgcctccaaga

SEQ ID NO: 26818 - DNA, 981 bp, synthetic construct
  source 1..981: mol_type = other DNA
ctgaagaacgtgttcccacctgaggtggccgtgttcgagcctagcgaggccgagatcagccacacccagaaagccaccctcgtgtgcctggctaccggcttctaccccgaccatgtggaactgtcttggtgggtcaacggcaaagaggtgcacagcggcgtgtgtaccgacccccagccactgaaagaacagcccgccctgaacgacagccggtactgcctgagcagcagactgagagtgtccgccaccttctggcagaacccccggaaccacttcagatgccaggtgcagttctacggcctgagcgagaacgacgagtggacccaggacagagccaagcccgtgacccagatcgtgtctgccgaagcctggggcagagccgattgcggctttaccagcgagagctaccagcagggcgtgctgagcgccaccaacctgagcgtgatcggcttcagaatcctgctgctgaaagtggccggctttaacctgctgatgaccctgcggctgtggtccagcaaacggggcagaaagaaactcctgtatatattcaaacaaccatttatgagaccagtacaaactactcaagaggaagatggctgtagctgccgatttccagaagaagaagaaggaggatgtgaactgagagtgaagttcagcagaagcgccgacgcccctgcctaccagcagggacagaaccaactgtacaacgagctgaacctgggcagacgggaagagtacgacgtgctggacaagcggagaggcagggaccctgagatgggcggaaagccccagcggagaaagaacccccaggaaggactgtataacgaactccagaaagacaagatggccgaagcctacagcgagatcggcatgaagggcgagcggagaagaggcaagggccacgatggcctgtaccagggcctgagcaccgccaccaaggacacctatgacgccctgcacatgcaggccctgcctccaaga

SEQ ID NO: 26819 - DNA, 978 bp, synthetic construct
  source 1..978: mol_type = other DNA
aagaacgtgttcccacctgaggtggccgtgttcgagcctagcgaggccgagatcagccacacccagaaagccaccctcgtgtgcctggctaccggcttctaccccgaccatgtggaactgtcttggtgggtcaacggcaaagaggtgcacagcggcgtgtgtaccgacccccagccactgaaagaacagcccgccctgaacgacagccggtactgcctgagcagcagactgagagtgtccgccaccttctggcagaacccccggaaccacttcagatgccaggtgcagttctacggcctgagcgagaacgacgagtggacccaggacagagccaagcccgtgacccagatcgtgtctgccgaagcctggggcagagccgattgcggctttaccagcgagagctaccagcagggcgtgctgagcgccaccaacctgagcgtgatcggcttcagaatcctgctgctgaaagtggccggctttaacctgctgatgaccctgcggctgtggtccagcaaacggggcagaaagaaactcctgtatatattcaaacaaccatttatgagaccagtacaaactactcaagaggaagatggctgtagctgccgatttccagaagaagaagaaggaggatgtgaactgagagtgaagttcagcagaagcgccgacgcccctgcctaccagcagggacagaaccaactgtacaacgagctgaacctgggcagacgggaagagtacgacgtgctggacaagcggagaggcagggaccctgagatgggcggaaagccccagcggagaaagaacccccaggaaggactgtataacgaactccagaaagacaagatggccgaagcctacagcgagatcggcatgaagggcgagcggagaagaggcaagggccacgatggcctgtaccagggcctgagcaccgccaccaaggacacctatgacgccctgcacatgcaggccctgcctccaaga

SEQ ID NO: 26820 - DNA, 975 bp, synthetic construct
  source 1..975: mol_type = other DNA
aacgtgttcccacctgaggtggccgtgttcgagcctagcgaggccgagatcagccacacccagaaagccaccctcgtgtgcctggctaccggcttctaccccgaccatgtggaactgtcttggtgggtcaacggcaaagaggtgcacagcggcgtgtgtaccgacccccagccactgaaagaacagcccgccctgaacgacagccggtactgcctgagcagcagactgagagtgtccgccaccttctggcagaacccccggaaccacttcagatgccaggtgcagttctacggcctgagcgagaacgacgagtggacccaggacagagccaagcccgtgacccagatcgtgtctgccgaagcctggggcagagccgattgcggctttaccagcgagagctaccagcagggcgtgctgagcgccaccaacctgagcgtgatcggcttcagaatcctgctgctgaaagtggccggctttaacctgctgatgaccctgcggctgtggtccagcaaacggggcagaaagaaactcctgtatatattcaaacaaccatttatgagaccagtacaaactactcaagaggaagatggctgtagctgccgatttccagaagaagaagaaggaggatgtgaactgagagtgaagttcagcagaagcgccgacgcccctgcctaccagcagggacagaaccaactgtacaacgagctgaacctgggcagacgggaagagtacgacgtgctggacaagcggagaggcagggaccctgagatgggcggaaagccccagcggagaaagaacccccaggaaggactgtataacgaactccagaaagacaagatggccgaagcctacagcgagatcggcatgaagggcgagcggagaagaggcaagggccacgatggcctgtaccagggcctgagcaccgccaccaaggacacctatgacgccctgcacatgcaggccctgcctccaaga

SEQ ID NO: 26821 - DNA, 972 bp, synthetic construct
  source 1..972: mol_type = other DNA
gtgttcccacctgaggtggccgtgttcgagcctagcgaggccgagatcagccacacccagaaagccaccctcgtgtgcctggctaccggcttctaccccgaccatgtggaactgtcttggtgggtcaacggcaaagaggtgcacagcggcgtgtgtaccgacccccagccactgaaagaacagcccgccctgaacgacagccggtactgcctgagcagcagactgagagtgtccgccaccttctggcagaacccccggaaccacttcagatgccaggtgcagttctacggcctgagcgagaacgacgagtggacccaggacagagccaagcccgtgacccagatcgtgtctgccgaagcctggggcagagccgattgcggctttaccagcgagagctaccagcagggcgtgctgagcgccaccaacctgagcgtgatcggcttcagaatcctgctgctgaaagtggccggctttaacctgctgatgaccctgcggctgtggtccagcaaacggggcagaaagaaactcctgtatatattcaaacaaccatttatgagaccagtacaaactactcaagaggaagatggctgtagctgccgatttccagaagaagaagaaggaggatgtgaactgagagtgaagttcagcagaagcgccgacgcccctgcctaccagcagggacagaaccaactgtacaacgagctgaacctgggcagacgggaagagtacgacgtgctggacaagcggagaggcagggaccctgagatgggcggaaagccccagcggagaaagaacccccaggaaggactgtataacgaactccagaaagacaagatggccgaagcctacagcgagatcggcatgaagggcgagcggagaagaggcaagggccacgatggcctgtaccagggcctgagcaccgccaccaaggacacctatgacgccctgcacatgcaggccctgcctccaaga

SEQ ID NO: 26822 - DNA, 969 bp, synthetic construct
  source 1..969: mol_type = other DNA
ttcccacctgaggtggccgtgttcgagcctagcgaggccgagatcagccacacccagaaagccaccctcgtgtgcctggctaccggcttctaccccgaccatgtggaactgtcttggtgggtcaacggcaaagaggtgcacagcggcgtgtgtaccgacccccagccactgaaagaacagcccgccctgaacgacagccggtactgcctgagcagcagactgagagtgtccgccaccttctggcagaacccccggaaccacttcagatgccaggtgcagttctacggcctgagcgagaacgacgagtggacccaggacagagccaagcccgtgacccagatcgtgtctgccgaagcctggggcagagccgattgcggctttaccagcgagagctaccagcagggcgtgctgagcgccaccaacctgagcgtgatcggcttcagaatcctgctgctgaaagtggccggctttaacctgctgatgaccctgcggctgtggtccagcaaacggggcagaaagaaactcctgtatatattcaaacaaccatttatgagaccagtacaaactactcaagaggaagatggctgtagctgccgatttccagaagaagaagaaggaggatgtgaactgagagtgaagttcagcagaagcgccgacgcccctgcctaccagcagggacagaaccaactgtacaacgagctgaacctgggcagacgggaagagtacgacgtgctggacaagcggagaggcagggaccctgagatgggcggaaagccccagcggagaaagaacccccaggaaggactgtataacgaactccagaaagacaagatggccgaagcctacagcgagatcggcatgaagggcgagcggagaagaggcaagggccacgatggcctgtaccagggcctgagcaccgccaccaaggacacctatgacgccctgcacatgcaggccctgcctccaaga

SEQ ID NO: 26823 - DNA, 966 bp, synthetic construct
  source 1..966: mol_type = other DNA
ccacctgaggtggccgtgttcgagcctagcgaggccgagatcagccacacccagaaagccaccctcgtgtgcctggctaccggcttctaccccgaccatgtggaactgtcttggtgggtcaacggcaaagaggtgcacagcggcgtgtgtaccgacccccagccactgaaagaacagcccgccctgaacgacagccggtactgcctgagcagcagactgagagtgtccgccaccttctggcagaacccccggaaccacttcagatgccaggtgcagttctacggcctgagcgagaacgacgagtggacccaggacagagccaagcccgtgacccagatcgtgtctgccgaagcctggggcagagccgattgcggctttaccagcgagagctaccagcagggcgtgctgagcgccaccaacctgagcgtgatcggcttcagaatcctgctgctgaaagtggccggctttaacctgctgatgaccctgcggctgtggtccagcaaacggggcagaaagaaactcctgtatatattcaaacaaccatttatgagaccagtacaaactactcaagaggaagatggctgtagctgccgatttccagaagaagaagaaggaggatgtgaactgagagtgaagttcagcagaagcgccgacgcccctgcctaccagcagggacagaaccaactgtacaacgagctgaacctgggcagacgggaagagtacgacgtgctggacaagcggagaggcagggaccctgagatgggcggaaagccccagcggagaaagaacccccaggaaggactgtataacgaactccagaaagacaagatggccgaagcctacagcgagatcggcatgaagggcgagcggagaagaggcaagggccacgatggcctgtaccagggcctgagcaccgccaccaaggacacctatgacgccctgcacatgcaggccctgcctccaaga

SEQ ID NO: 26824 - DNA, 963 bp, synthetic construct
  source 1..963: mol_type = other DNA
cctgaggtggccgtgttcgagcctagcgaggccgagatcagccacacccagaaagccaccctcgtgtgcctggctaccggcttctaccccgaccatgtggaactgtcttggtgggtcaacggcaaagaggtgcacagcggcgtgtgtaccgacccccagccactgaaagaacagcccgccctgaacgacagccggtactgcctgagcagcagactgagagtgtccgccaccttctggcagaacccccggaaccacttcagatgccaggtgcagttctacggcctgagcgagaacgacgagtggacccaggacagagccaagcccgtgacccagatcgtgtctgccgaagcctggggcagagccgattgcggctttaccagcgagagctaccagcagggcgtgctgagcgccaccaacctgagcgtgatcggcttcagaatcctgctgctgaaagtggccggctttaacctgctgatgaccctgcggctgtggtccagcaaacggggcagaaagaaactcctgtatatattcaaacaaccatttatgagaccagtacaaactactcaagaggaagatggctgtagctgccgatttccagaagaagaagaaggaggatgtgaactgagagtgaagttcagcagaagcgccgacgcccctgcctaccagcagggacagaaccaactgtacaacgagctgaacctgggcagacgggaagagtacgacgtgctggacaagcggagaggcagggaccctgagatgggcggaaagccccagcggagaaagaacccccaggaaggactgtataacgaactccagaaagacaagatggccgaagcctacagcgagatcggcatgaagggcgagcggagaagaggcaagggccacgatggcctgtaccagggcctgagcaccgccaccaaggacacctatgacgccctgcacatgcaggccctgcctccaaga

SEQ ID NO: 26825 - DNA, 960 bp, synthetic construct
  source 1..960: mol_type = other DNA
gaggtggccgtgttcgagcctagcgaggccgagatcagccacacccagaaagccaccctcgtgtgcctggctaccggcttctaccccgaccatgtggaactgtcttggtgggtcaacggcaaagaggtgcacagcggcgtgtgtaccgacccccagccactgaaagaacagcccgccctgaacgacagccggtactgcctgagcagcagactgagagtgtccgccaccttctggcagaacccccggaaccacttcagatgccaggtgcagttctacggcctgagcgagaacgacgagtggacccaggacagagccaagcccgtgacccagatcgtgtctgccgaagcctggggcagagccgattgcggctttaccagcgagagctaccagcagggcgtgctgagcgccaccaacctgagcgtgatcggcttcagaatcctgctgctgaaagtggccggctttaacctgctgatgaccctgcggctgtggtccagcaaacggggcagaaagaaactcctgtatatattcaaacaaccatttatgagaccagtacaaactactcaagaggaagatggctgtagctgccgatttccagaagaagaagaaggaggatgtgaactgagagtgaagttcagcagaagcgccgacgcccctgcctaccagcagggacagaaccaactgtacaacgagctgaacctgggcagacgggaagagtacgacgtgctggacaagcggagaggcagggaccctgagatgggcggaaagccccagcggagaaagaacccccaggaaggactgtataacgaactccagaaagacaagatggccgaagcctacagcgagatcggcatgaagggcgagcggagaagaggcaagggccacgatggcctgtaccagggcctgagcaccgccaccaaggacacctatgacgccctgcacatgcaggccctgcctccaaga

SEQ ID NO: 26826 - DNA, 957 bp, synthetic construct
  source 1..957: mol_type = other DNA
gtggccgtgttcgagcctagcgaggccgagatcagccacacccagaaagccaccctcgtgtgcctggctaccggcttctaccccgaccatgtggaactgtcttggtgggtcaacggcaaagaggtgcacagcggcgtgtgtaccgacccccagccactgaaagaacagcccgccctgaacgacagccggtactgcctgagcagcagactgagagtgtccgccaccttctggcagaacccccggaaccacttcagatgccaggtgcagttctacggcctgagcgagaacgacgagtggacccaggacagagccaagcccgtgacccagatcgtgtctgccgaagcctggggcagagccgattgcggctttaccagcgagagctaccagcagggcgtgctgagcgccaccaacctgagcgtgatcggcttcagaatcctgctgctgaaagtggccggctttaacctgctgatgaccctgcggctgtggtccagcaaacggggcagaaagaaactcctgtatatattcaaacaaccatttatgagaccagtacaaactactcaagaggaagatggctgtagctgccgatttccagaagaagaagaaggaggatgtgaactgagagtgaagttcagcagaagcgccgacgcccctgcctaccagcagggacagaaccaactgtacaacgagctgaacctgggcagacgggaagagtacgacgtgctggacaagcggagaggcagggaccctgagatgggcggaaagccccagcggagaaagaacccccaggaaggactgtataacgaactccagaaagacaagatggccgaagcctacagcgagatcggcatgaagggcgagcggagaagaggcaagggccacgatggcctgtaccagggcctgagcaccgccaccaaggacacctatgacgccctgcacatgcaggccctgcctccaaga

SEQ ID NO: 26827 - DNA, 954 bp, synthetic construct
  source 1..954: mol_type = other DNA
gccgtgttcgagcctagcgaggccgagatcagccacacccagaaagccaccctcgtgtgcctggctaccggcttctaccccgaccatgtggaactgtcttggtgggtcaacggcaaagaggtgcacagcggcgtgtgtaccgacccccagccactgaaagaacagcccgccctgaacgacagccggtactgcctgagcagcagactgagagtgtccgccaccttctggcagaacccccggaaccacttcagatgccaggtgcagttctacggcctgagcgagaacgacgagtggacccaggacagagccaagcccgtgacccagatcgtgtctgccgaagcctggggcagagccgattgcggctttaccagcgagagctaccagcagggcgtgctgagcgccaccaacctgagcgtgatcggcttcagaatcctgctgctgaaagtggccggctttaacctgctgatgaccctgcggctgtggtccagcaaacggggcagaaagaaactcctgtatatattcaaacaaccatttatgagaccagtacaaactactcaagaggaagatggctgtagctgccgatttccagaagaagaagaaggaggatgtgaactgagagtgaagttcagcagaagcgccgacgcccctgcctaccagcagggacagaaccaactgtacaacgagctgaacctgggcagacgggaagagtacgacgtgctggacaagcggagaggcagggaccctgagatgggcggaaagccccagcggagaaagaacccccaggaaggactgtataacgaactccagaaagacaagatggccgaagcctacagcgagatcggcatgaagggcgagcggagaagaggcaagggccacgatggcctgtaccagggcctgagcaccgccaccaaggacacctatgacgccctgcacatgcaggccctgcctccaaga

SEQ ID NO: 26828 - DNA, 951 bp, synthetic construct
  source 1..951: mol_type = other DNA
gtgttcgagcctagcgaggccgagatcagccacacccagaaagccaccctcgtgtgcctggctaccggcttctaccccgaccatgtggaactgtcttggtgggtcaacggcaaagaggtgcacagcggcgtgtgtaccgacccccagccactgaaagaacagcccgccctgaacgacagccggtactgcctgagcagcagactgagagtgtccgccaccttctggcagaacccccggaaccacttcagatgccaggtgcagttctacggcctgagcgagaacgacgagtggacccaggacagagccaagcccgtgacccagatcgtgtctgccgaagcctggggcagagccgattgcggctttaccagcgagagctaccagcagggcgtgctgagcgccaccaacctgagcgtgatcggcttcagaatcctgctgctgaaagtggccggctttaacctgctgatgaccctgcggctgtggtccagcaaacggggcagaaagaaactcctgtatatattcaaacaaccatttatgagaccagtacaaactactcaagaggaagatggctgtagctgccgatttccagaagaagaagaaggaggatgtgaactgagagtgaagttcagcagaagcgccgacgcccctgcctaccagcagggacagaaccaactgtacaacgagctgaacctgggcagacgggaagagtacgacgtgctggacaagcggagaggcagggaccctgagatgggcggaaagccccagcggagaaagaacccccaggaaggactgtataacgaactccagaaagacaagatggccgaagcctacagcgagatcggcatgaagggcgagcggagaagaggcaagggccacgatggcctgtaccagggcctgagcaccgccaccaaggacacctatgacgccctgcacatgcaggccctgcctccaaga

SEQ ID NO: 26829 - DNA, 948 bp, synthetic construct
  source 1..948: mol_type = other DNA
ttcgagcctagcgaggccgagatcagccacacccagaaagccaccctcgtgtgcctggctaccggcttctaccccgaccatgtggaactgtcttggtgggtcaacggcaaagaggtgcacagcggcgtgtgtaccgacccccagccactgaaagaacagcccgccctgaacgacagccggtactgcctgagcagcagactgagagtgtccgccaccttctggcagaacccccggaaccacttcagatgccaggtgcagttctacggcctgagcgagaacgacgagtggacccaggacagagccaagcccgtgacccagatcgtgtctgccgaagcctggggcagagccgattgcggctttaccagcgagagctaccagcagggcgtgctgagcgccaccaacctgagcgtgatcggcttcagaatcctgctgctgaaagtggccggctttaacctgctgatgaccctgcggctgtggtccagcaaacggggcagaaagaaactcctgtatatattcaaacaaccatttatgagaccagtacaaactactcaagaggaagatggctgtagctgccgatttccagaagaagaagaaggaggatgtgaactgagagtgaagttcagcagaagcgccgacgcccctgcctaccagcagggacagaaccaactgtacaacgagctgaacctgggcagacgggaagagtacgacgtgctggacaagcggagaggcagggaccctgagatgggcggaaagccccagcggagaaagaacccccaggaaggactgtataacgaactccagaaagacaagatggccgaagcctacagcgagatcggcatgaagggcgagcggagaagaggcaagggccacgatggcctgtaccagggcctgagcaccgccaccaaggacacctatgacgccctgcacatgcaggccctgcctccaaga

SEQ ID NO: 26830 - DNA, 945 bp, synthetic construct
  source 1..945: mol_type = other DNA
gagcctagcgaggccgagatcagccacacccagaaagccaccctcgtgtgcctggctaccggcttctaccccgaccatgtggaactgtcttggtgggtcaacggcaaagaggtgcacagcggcgtgtgtaccgacccccagccactgaaagaacagcccgccctgaacgacagccggtactgcctgagcagcagactgagagtgtccgccaccttctggcagaacccccggaaccacttcagatgccaggtgcagttctacggcctgagcgagaacgacgagtggacccaggacagagccaagcccgtgacccagatcgtgtctgccgaagcctggggcagagccgattgcggctttaccagcgagagctaccagcagggcgtgctgagcgccaccaacctgagcgtgatcggcttcagaatcctgctgctgaaagtggccggctttaacctgctgatgaccctgcggctgtggtccagcaaacggggcagaaagaaactcctgtatatattcaaacaaccatttatgagaccagtacaaactactcaagaggaagatggctgtagctgccgatttccagaagaagaagaaggaggatgtgaactgagagtgaagttcagcagaagcgccgacgcccctgcctaccagcagggacagaaccaactgtacaacgagctgaacctgggcagacgggaagagtacgacgtgctggacaagcggagaggcagggaccctgagatgggcggaaagccccagcggagaaagaacccccaggaaggactgtataacgaactccagaaagacaagatggccgaagcctacagcgagatcggcatgaagggcgagcggagaagaggcaagggccacgatggcctgtaccagggcctgagcaccgccaccaaggacacctatgacgccctgcacatgcaggccctgcctccaaga

SEQ ID NO: 26831 - DNA, 942 bp, synthetic construct
  source 1..942: mol_type = other DNA
cctagcgaggccgagatcagccacacccagaaagccaccctcgtgtgcctggctaccggcttctaccccgaccatgtggaactgtcttggtgggtcaacggcaaagaggtgcacagcggcgtgtgtaccgacccccagccactgaaagaacagcccgccctgaacgacagccggtactgcctgagcagcagactgagagtgtccgccaccttctggcagaacccccggaaccacttcagatgccaggtgcagttctacggcctgagcgagaacgacgagtggacccaggacagagccaagcccgtgacccagatcgtgtctgccgaagcctggggcagagccgattgcggctttaccagcgagagctaccagcagggcgtgctgagcgccaccaacctgagcgtgatcggcttcagaatcctgctgctgaaagtggccggctttaacctgctgatgaccctgcggctgtggtccagcaaacggggcagaaagaaactcctgtatatattcaaacaaccatttatgagaccagtacaaactactcaagaggaagatggctgtagctgccgatttccagaagaagaagaaggaggatgtgaactgagagtgaagttcagcagaagcgccgacgcccctgcctaccagcagggacagaaccaactgtacaacgagctgaacctgggcagacgggaagagtacgacgtgctggacaagcggagaggcagggaccctgagatgggcggaaagccccagcggagaaagaacccccaggaaggactgtataacgaactccagaaagacaagatggccgaagcctacagcgagatcggcatgaagggcgagcggagaagaggcaagggccacgatggcctgtaccagggcctgagcaccgccaccaaggacacctatgacgccctgcacatgcaggccctgcctccaaga

SEQ ID NO: 26832 - DNA, 939 bp, synthetic construct
  source 1..939: mol_type = other DNA
agcgaggccgagatcagccacacccagaaagccaccctcgtgtgcctggctaccggcttctaccccgaccatgtggaactgtcttggtgggtcaacggcaaagaggtgcacagcggcgtgtgtaccgacccccagccactgaaagaacagcccgccctgaacgacagccggtactgcctgagcagcagactgagagtgtccgccaccttctggcagaacccccggaaccacttcagatgccaggtgcagttctacggcctgagcgagaacgacgagtggacccaggacagagccaagcccgtgacccagatcgtgtctgccgaagcctggggcagagccgattgcggctttaccagcgagagctaccagcagggcgtgctgagcgccaccaacctgagcgtgatcggcttcagaatcctgctgctgaaagtggccggctttaacctgctgatgaccctgcggctgtggtccagcaaacggggcagaaagaaactcctgtatatattcaaacaaccatttatgagaccagtacaaactactcaagaggaagatggctgtagctgccgatttccagaagaagaagaaggaggatgtgaactgagagtgaagttcagcagaagcgccgacgcccctgcctaccagcagggacagaaccaactgtacaacgagctgaacctgggcagacgggaagagtacgacgtgctggacaagcggagaggcagggaccctgagatgggcggaaagccccagcggagaaagaacccccaggaaggactgtataacgaactccagaaagacaagatggccgaagcctacagcgagatcggcatgaagggcgagcggagaagaggcaagggccacgatggcctgtaccagggcctgagcaccgccaccaaggacacctatgacgccctgcacatgcaggccctgcctccaaga

SEQ ID NO: 26833 - DNA, 936 bp, synthetic construct
  source 1..936: mol_type = other DNA
gaggccgagatcagccacacccagaaagccaccctcgtgtgcctggctaccggcttctaccccgaccatgtggaactgtcttggtgggtcaacggcaaagaggtgcacagcggcgtgtgtaccgacccccagccactgaaagaacagcccgccctgaacgacagccggtactgcctgagcagcagactgagagtgtccgccaccttctggcagaacccccggaaccacttcagatgccaggtgcagttctacggcctgagcgagaacgacgagtggacccaggacagagccaagcccgtgacccagatcgtgtctgccgaagcctggggcagagccgattgcggctttaccagcgagagctaccagcagggcgtgctgagcgccaccaacctgagcgtgatcggcttcagaatcctgctgctgaaagtggccggctttaacctgctgatgaccctgcggctgtggtccagcaaacggggcagaaagaaactcctgtatatattcaaacaaccatttatgagaccagtacaaactactcaagaggaagatggctgtagctgccgatttccagaagaagaagaaggaggatgtgaactgagagtgaagttcagcagaagcgccgacgcccctgcctaccagcagggacagaaccaactgtacaacgagctgaacctgggcagacgggaagagtacgacgtgctggacaagcggagaggcagggaccctgagatgggcggaaagccccagcggagaaagaacccccaggaaggactgtataacgaactccagaaagacaagatggccgaagcctacagcgagatcggcatgaagggcgagcggagaagaggcaagggccacgatggcctgtaccagggcctgagcaccgccaccaaggacacctatgacgccctgcacatgcaggccctgcctccaaga

SEQ ID NO: 26834 - DNA, 933 bp, synthetic construct
  source 1..933: mol_type = other DNA
gccgagatcagccacacccagaaagccaccctcgtgtgcctggctaccggcttctaccccgaccatgtggaactgtcttggtgggtcaacggcaaagaggtgcacagcggcgtgtgtaccgacccccagccactgaaagaacagcccgccctgaacgacagccggtactgcctgagcagcagactgagagtgtccgccaccttctggcagaacccccggaaccacttcagatgccaggtgcagttctacggcctgagcgagaacgacgagtggacccaggacagagccaagcccgtgacccagatcgtgtctgccgaagcctggggcagagccgattgcggctttaccagcgagagctaccagcagggcgtgctgagcgccaccaacctgagcgtgatcggcttcagaatcctgctgctgaaagtggccggctttaacctgctgatgaccctgcggctgtggtccagcaaacggggcagaaagaaactcctgtatatattcaaacaaccatttatgagaccagtacaaactactcaagaggaagatggctgtagctgccgatttccagaagaagaagaaggaggatgtgaactgagagtgaagttcagcagaagcgccgacgcccctgcctaccagcagggacagaaccaactgtacaacgagctgaacctgggcagacgggaagagtacgacgtgctggacaagcggagaggcagggaccctgagatgggcggaaagccccagcggagaaagaacccccaggaaggactgtataacgaactccagaaagacaagatggccgaagcctacagcgagatcggcatgaagggcgagcggagaagaggcaagggccacgatggcctgtaccagggcctgagcaccgccaccaaggacacctatgacgccctgcacatgcaggccctgcctccaaga

SEQ ID NO: 26835 - DNA, 930 bp, synthetic construct
  source 1..930: mol_type = other DNA
gagatcagccacacccagaaagccaccctcgtgtgcctggctaccggcttctaccccgaccatgtggaactgtcttggtgggtcaacggcaaagaggtgcacagcggcgtgtgtaccgacccccagccactgaaagaacagcccgccctgaacgacagccggtactgcctgagcagcagactgagagtgtccgccaccttctggcagaacccccggaaccacttcagatgccaggtgcagttctacggcctgagcgagaacgacgagtggacccaggacagagccaagcccgtgacccagatcgtgtctgccgaagcctggggcagagccgattgcggctttaccagcgagagctaccagcagggcgtgctgagcgccaccaacctgagcgtgatcggcttcagaatcctgctgctgaaagtggccggctttaacctgctgatgaccctgcggctgtggtccagcaaacggggcagaaagaaactcctgtatatattcaaacaaccatttatgagaccagtacaaactactcaagaggaagatggctgtagctgccgatttccagaagaagaagaaggaggatgtgaactgagagtgaagttcagcagaagcgccgacgcccctgcctaccagcagggacagaaccaactgtacaacgagctgaacctgggcagacgggaagagtacgacgtgctggacaagcggagaggcagggaccctgagatgggcggaaagccccagcggagaaagaacccccaggaaggactgtataacgaactccagaaagacaagatggccgaagcctacagcgagatcggcatgaagggcgagcggagaagaggcaagggccacgatggcctgtaccagggcctgagcaccgccaccaaggacacctatgacgccctgcacatgcaggccctgcctccaaga

SEQ ID NO: 26836 - DNA, 927 bp, synthetic construct
  source 1..927: mol_type = other DNA
atcagccacacccagaaagccaccctcgtgtgcctggctaccggcttctaccccgaccatgtggaactgtcttggtgggtcaacggcaaagaggtgcacagcggcgtgtgtaccgacccccagccactgaaagaacagcccgccctgaacgacagccggtactgcctgagcagcagactgagagtgtccgccaccttctggcagaacccccggaaccacttcagatgccaggtgcagttctacggcctgagcgagaacgacgagtggacccaggacagagccaagcccgtgacccagatcgtgtctgccgaagcctggggcagagccgattgcggctttaccagcgagagctaccagcagggcgtgctgagcgccaccaacctgagcgtgatcggcttcagaatcctgctgctgaaagtggccggctttaacctgctgatgaccctgcggctgtggtccagcaaacggggcagaaagaaactcctgtatatattcaaacaaccatttatgagaccagtacaaactactcaagaggaagatggctgtagctgccgatttccagaagaagaagaaggaggatgtgaactgagagtgaagttcagcagaagcgccgacgcccctgcctaccagcagggacagaaccaactgtacaacgagctgaacctgggcagacgggaagagtacgacgtgctggacaagcggagaggcagggaccctgagatgggcggaaagccccagcggagaaagaacccccaggaaggactgtataacgaactccagaaagacaagatggccgaagcctacagcgagatcggcatgaagggcgagcggagaagaggcaagggccacgatggcctgtaccagggcctgagcaccgccaccaaggacacctatgacgccctgcacatgcaggccctgcctccaaga

SEQ ID NO: 26837 - DNA, 924 bp, synthetic construct
  source 1..924: mol_type = other DNA
agccacacccagaaagccaccctcgtgtgcctggctaccggcttctaccccgaccatgtggaactgtcttggtgggtcaacggcaaagaggtgcacagcggcgtgtgtaccgacccccagccactgaaagaacagcccgccctgaacgacagccggtactgcctgagcagcagactgagagtgtccgccaccttctggcagaacccccggaaccacttcagatgccaggtgcagttctacggcctgagcgagaacgacgagtggacccaggacagagccaagcccgtgacccagatcgtgtctgccgaagcctggggcagagccgattgcggctttaccagcgagagctaccagcagggcgtgctgagcgccaccaacctgagcgtgatcggcttcagaatcctgctgctgaaagtggccggctttaacctgctgatgaccctgcggctgtggtccagcaaacggggcagaaagaaactcctgtatatattcaaacaaccatttatgagaccagtacaaactactcaagaggaagatggctgtagctgccgatttccagaagaagaagaaggaggatgtgaactgagagtgaagttcagcagaagcgccgacgcccctgcctaccagcagggacagaaccaactgtacaacgagctgaacctgggcagacgggaagagtacgacgtgctggacaagcggagaggcagggaccctgagatgggcggaaagccccagcggagaaagaacccccaggaaggactgtataacgaactccagaaagacaagatggccgaagcctacagcgagatcggcatgaagggcgagcggagaagaggcaagggccacgatggcctgtaccagggcctgagcaccgccaccaaggacacctatgacgccctgcacatgcaggccctgcctccaaga

SEQ ID NO: 26838 - DNA, 909 bp, synthetic construct
  source 1..909: mol_type = other DNA
gccaccctcgtgtgcctggctaccggcttctaccccgaccatgtggaactgtcttggtgggtcaacggcaaagaggtgcacagcggcgtgtgtaccgacccccagccactgaaagaacagcccgccctgaacgacagccggtactgcctgagcagcagactgagagtgtccgccaccttctggcagaacccccggaaccacttcagatgccaggtgcagttctacggcctgagcgagaacgacgagtggacccaggacagagccaagcccgtgacccagatcgtgtctgccgaagcctggggcagagccgattgcggctttaccagcgagagctaccagcagggcgtgctgagcgccaccaacctgagcgtgatcggcttcagaatcctgctgctgaaagtggccggctttaacctgctgatgaccctgcggctgtggtccagcaaacggggcagaaagaaactcctgtatatattcaaacaaccatttatgagaccagtacaaactactcaagaggaagatggctgtagctgccgatttccagaagaagaagaaggaggatgtgaactgagagtgaagttcagcagaagcgccgacgcccctgcctaccagcagggacagaaccaactgtacaacgagctgaacctgggcagacgggaagagtacgacgtgctggacaagcggagaggcagggaccctgagatgggcggaaagccccagcggagaaagaacccccaggaaggactgtataacgaactccagaaagacaagatggccgaagcctacagcgagatcggcatgaagggcgagcggagaagaggcaagggccacgatggcctgtaccagggcctgagcaccgccaccaaggacacctatgacgccctgcacatgcaggccctgcctccaaga

SEQ ID NO: 26839 - DNA, 894 bp, synthetic construct
  source 1..894: mol_type = other DNA
ctggctaccggcttctaccccgaccatgtggaactgtcttggtgggtcaacggcaaagaggtgcacagcggcgtgtgtaccgacccccagccactgaaagaacagcccgccctgaacgacagccggtactgcctgagcagcagactgagagtgtccgccaccttctggcagaacccccggaaccacttcagatgccaggtgcagttctacggcctgagcgagaacgacgagtggacccaggacagagccaagcccgtgacccagatcgtgtctgccgaagcctggggcagagccgattgcggctttaccagcgagagctaccagcagggcgtgctgagcgccaccaacctgagcgtgatcggcttcagaatcctgctgctgaaagtggccggctttaacctgctgatgaccctgcggctgtggtccagcaaacggggcagaaagaaactcctgtatatattcaaacaaccatttatgagaccagtacaaactactcaagaggaagatggctgtagctgccgatttccagaagaagaagaaggaggatgtgaactgagagtgaagttcagcagaagcgccgacgcccctgcctaccagcagggacagaaccaactgtacaacgagctgaacctgggcagacgggaagagtacgacgtgctggacaagcggagaggcagggaccctgagatgggcggaaagccccagcggagaaagaacccccaggaaggactgtataacgaactccagaaagacaagatggccgaagcctacagcgagatcggcatgaagggcgagcggagaagaggcaagggccacgatggcctgtaccagggcctgagcaccgccaccaaggacacctatgacgccctgcacatgcaggccctgcctccaaga

SEQ ID NO: 26840 - DNA, 1251 bp, synthetic construct
  source 1..1251: mol_type = other DNA
gacctgaagaacgtgttcccacctgaggtggccgtgttcgagcctagcgaggccgagatcagccacacccagaaagccaccctcgtgtgcctggctaccggcttctaccccgaccatgtggaactgtcttggtgggtcaacggcaaagaggtgcacagcggcgtgtgtaccgacccccagccactgaaagaacagcccgccctgaacgacagccggtactgcctgagcagcagactgagagtgtccgccaccttctggcagaacccccggaaccacttcagatgccaggtgcagttctacggcctgagcgagaacgacgagtggacccaggacagagccaagcccgtgacccagatcgtgtctgccgaagcctggggcagagccgatgatgtgattaagatccactggcaggaaaagaagtccaacaccatcctgggcagccaggaaggcaacaccatgaagaccaacgacacctacatgaagttcagctggctgaccgtgcccgagaagtccctggacaaagaacacagatgcatcgtgcggcacgaaaacaacaagaacggcgtggaccaggaaatcatcttcccacccatcaagaccgatgtgattacaatggaccccaaggacaactgctccaaggacgccaacgataccctgctgctccagctgaccaacaccagcgcctactacatgtacttgttgctgctgctgaagtccgtggtgtacttcgccatcatcacatgctgcctgctgatggctatggtcaagcggaaggacagccggggaaaacggggcagaaagaaactcctgtatatattcaaacaaccatttatgagaccagtacaaactactcaagaggaagatggctgtagctgccgatttccagaagaagaagaaggaggatgtgaactgagagtgaagttcagcagaagcgccgacgcccctgcctaccagcagggacagaaccaactgtacaacgagctgaacctgggcagacgggaagagtacgacgtgctggacaagcggagaggcagggaccctgagatgggcggaaagccccagcggagaaagaacccccaggaaggactgtataacgaactccagaaagacaagatggccgaagcctacagcgagatcggcatgaagggcgagcggagaagaggcaagggccacgatggcctgtaccagggcctgagcaccgccaccaaggacacctatgacgccctgcacatgcaggccctgcctccaaga

SEQ ID NO: 26841 - DNA, 1248 bp, synthetic construct
  source 1..1248: mol_type = other DNA
ctgaagaacgtgttcccacctgaggtggccgtgttcgagcctagcgaggccgagatcagccacacccagaaagccaccctcgtgtgcctggctaccggcttctaccccgaccatgtggaactgtcttggtgggtcaacggcaaagaggtgcacagcggcgtgtgtaccgacccccagccactgaaagaacagcccgccctgaacgacagccggtactgcctgagcagcagactgagagtgtccgccaccttctggcagaacccccggaaccacttcagatgccaggtgcagttctacggcctgagcgagaacgacgagtggacccaggacagagccaagcccgtgacccagatcgtgtctgccgaagcctggggcagagccgatgatgtgattaagatccactggcaggaaaagaagtccaacaccatcctgggcagccaggaaggcaacaccatgaagaccaacgacacctacatgaagttcagctggctgaccgtgcccgagaagtccctggacaaagaacacagatgcatcgtgcggcacgaaaacaacaagaacggcgtggaccaggaaatcatcttcccacccatcaagaccgatgtgattacaatggaccccaaggacaactgctccaaggacgccaacgataccctgctgctccagctgaccaacaccagcgcctactacatgtacttgttgctgctgctgaagtccgtggtgtacttcgccatcatcacatgctgcctgctgatggctatggtcaagcggaaggacagccggggaaaacggggcagaaagaaactcctgtatatattcaaacaaccatttatgagaccagtacaaactactcaagaggaagatggctgtagctgccgatttccagaagaagaagaaggaggatgtgaactgagagtgaagttcagcagaagcgccgacgcccctgcctaccagcagggacagaaccaactgtacaacgagctgaacctgggcagacgggaagagtacgacgtgctggacaagcggagaggcagggaccctgagatgggcggaaagccccagcggagaaagaacccccaggaaggactgtataacgaactccagaaagacaagatggccgaagcctacagcgagatcggcatgaagggcgagcggagaagaggcaagggccacgatggcctgtaccagggcctgagcaccgccaccaaggacacctatgacgccctgcacatgcaggccctgcctccaaga

SEQ ID NO: 26842 - DNA, 1245 bp, synthetic construct
  source 1..1245: mol_type = other DNA
aagaacgtgttcccacctgaggtggccgtgttcgagcctagcgaggccgagatcagccacacccagaaagccaccctcgtgtgcctggctaccggcttctaccccgaccatgtggaactgtcttggtgggtcaacggcaaagaggtgcacagcggcgtgtgtaccgacccccagccactgaaagaacagcccgccctgaacgacagccggtactgcctgagcagcagactgagagtgtccgccaccttctggcagaacccccggaaccacttcagatgccaggtgcagttctacggcctgagcgagaacgacgagtggacccaggacagagccaagcccgtgacccagatcgtgtctgccgaagcctggggcagagccgatgatgtgattaagatccactggcaggaaaagaagtccaacaccatcctgggcagccaggaaggcaacaccatgaagaccaacgacacctacatgaagttcagctggctgaccgtgcccgagaagtccctggacaaagaacacagatgcatcgtgcggcacgaaaacaacaagaacggcgtggaccaggaaatcatcttcccacccatcaagaccgatgtgattacaatggaccccaaggacaactgctccaaggacgccaacgataccctgctgctccagctgaccaacaccagcgcctactacatgtacttgttgctgctgctgaagtccgtggtgtacttcgccatcatcacatgctgcctgctgatggctatggtcaagcggaaggacagccggggaaaacggggcagaaagaaactcctgtatatattcaaacaaccatttatgagaccagtacaaactactcaagaggaagatggctgtagctgccgatttccagaagaagaagaaggaggatgtgaactgagagtgaagttcagcagaagcgccgacgcccctgcctaccagcagggacagaaccaactgtacaacgagctgaacctgggcagacgggaagagtacgacgtgctggacaagcggagaggcagggaccctgagatgggcggaaagccccagcggagaaagaacccccaggaaggactgtataacgaactccagaaagacaagatggccgaagcctacagcgagatcggcatgaagggcgagcggagaagaggcaagggccacgatggcctgtaccagggcctgagcaccgccaccaaggacacctatgacgccctgcacatgcaggccctgcctccaaga

SEQ ID NO: 26843 - DNA, 1242 bp, synthetic construct
  source 1..1242: mol_type = other DNA
aacgtgttcccacctgaggtggccgtgttcgagcctagcgaggccgagatcagccacacccagaaagccaccctcgtgtgcctggctaccggcttctaccccgaccatgtggaactgtcttggtgggtcaacggcaaagaggtgcacagcggcgtgtgtaccgacccccagccactgaaagaacagcccgccctgaacgacagccggtactgcctgagcagcagactgagagtgtccgccaccttctggcagaacccccggaaccacttcagatgccaggtgcagttctacggcctgagcgagaacgacgagtggacccaggacagagccaagcccgtgacccagatcgtgtctgccgaagcctggggcagagccgatgatgtgattaagatccactggcaggaaaagaagtccaacaccatcctgggcagccaggaaggcaacaccatgaagaccaacgacacctacatgaagttcagctggctgaccgtgcccgagaagtccctggacaaagaacacagatgcatcgtgcggcacgaaaacaacaagaacggcgtggaccaggaaatcatcttcccacccatcaagaccgatgtgattacaatggaccccaaggacaactgctccaaggacgccaacgataccctgctgctccagctgaccaacaccagcgcctactacatgtacttgttgctgctgctgaagtccgtggtgtacttcgccatcatcacatgctgcctgctgatggctatggtcaagcggaaggacagccggggaaaacggggcagaaagaaactcctgtatatattcaaacaaccatttatgagaccagtacaaactactcaagaggaagatggctgtagctgccgatttccagaagaagaagaaggaggatgtgaactgagagtgaagttcagcagaagcgccgacgcccctgcctaccagcagggacagaaccaactgtacaacgagctgaacctgggcagacgggaagagtacgacgtgctggacaagcggagaggcagggaccctgagatgggcggaaagccccagcggagaaagaacccccaggaaggactgtataacgaactccagaaagacaagatggccgaagcctacagcgagatcggcatgaagggcgagcggagaagaggcaagggccacgatggcctgtaccagggcctgagcaccgccaccaaggacacctatgacgccctgcacatgcaggccctgcctccaaga

SEQ ID NO: 26844 - DNA, 1239 bp, synthetic construct
  source 1..1239: mol_type = other DNA
gtgttcccacctgaggtggccgtgttcgagcctagcgaggccgagatcagccacacccagaaagccaccctcgtgtgcctggctaccggcttctaccccgaccatgtggaactgtcttggtgggtcaacggcaaagaggtgcacagcggcgtgtgtaccgacccccagccactgaaagaacagcccgccctgaacgacagccggtactgcctgagcagcagactgagagtgtccgccaccttctggcagaacccccggaaccacttcagatgccaggtgcagttctacggcctgagcgagaacgacgagtggacccaggacagagccaagcccgtgacccagatcgtgtctgccgaagcctggggcagagccgatgatgtgattaagatccactggcaggaaaagaagtccaacaccatcctgggcagccaggaaggcaacaccatgaagaccaacgacacctacatgaagttcagctggctgaccgtgcccgagaagtccctggacaaagaacacagatgcatcgtgcggcacgaaaacaacaagaacggcgtggaccaggaaatcatcttcccacccatcaagaccgatgtgattacaatggaccccaaggacaactgctccaaggacgccaacgataccctgctgctccagctgaccaacaccagcgcctactacatgtacttgttgctgctgctgaagtccgtggtgtacttcgccatcatcacatgctgcctgctgatggctatggtcaagcggaaggacagccggggaaaacggggcagaaagaaactcctgtatatattcaaacaaccatttatgagaccagtacaaactactcaagaggaagatggctgtagctgccgatttccagaagaagaagaaggaggatgtgaactgagagtgaagttcagcagaagcgccgacgcccctgcctaccagcagggacagaaccaactgtacaacgagctgaacctgggcagacgggaagagtacgacgtgctggacaagcggagaggcagggaccctgagatgggcggaaagccccagcggagaaagaacccccaggaaggactgtataacgaactccagaaagacaagatggccgaagcctacagcgagatcggcatgaagggcgagcggagaagaggcaagggccacgatggcctgtaccagggcctgagcaccgccaccaaggacacctatgacgccctgcacatgcaggccctgcctccaaga

SEQ ID NO: 26845 - DNA, 1236 bp, synthetic construct
  source 1..1236: mol_type = other DNA
ttcccacctgaggtggccgtgttcgagcctagcgaggccgagatcagccacacccagaaagccaccctcgtgtgcctggctaccggcttctaccccgaccatgtggaactgtcttggtgggtcaacggcaaagaggtgcacagcggcgtgtgtaccgacccccagccactgaaagaacagcccgccctgaacgacagccggtactgcctgagcagcagactgagagtgtccgccaccttctggcagaacccccggaaccacttcagatgccaggtgcagttctacggcctgagcgagaacgacgagtggacccaggacagagccaagcccgtgacccagatcgtgtctgccgaagcctggggcagagccgatgatgtgattaagatccactggcaggaaaagaagtccaacaccatcctgggcagccaggaaggcaacaccatgaagaccaacgacacctacatgaagttcagctggctgaccgtgcccgagaagtccctggacaaagaacacagatgcatcgtgcggcacgaaaacaacaagaacggcgtggaccaggaaatcatcttcccacccatcaagaccgatgtgattacaatggaccccaaggacaactgctccaaggacgccaacgataccctgctgctccagctgaccaacaccagcgcctactacatgtacttgttgctgctgctgaagtccgtggtgtacttcgccatcatcacatgctgcctgctgatggctatggtcaagcggaaggacagccggggaaaacggggcagaaagaaactcctgtatatattcaaacaaccatttatgagaccagtacaaactactcaagaggaagatggctgtagctgccgatttccagaagaagaagaaggaggatgtgaactgagagtgaagttcagcagaagcgccgacgcccctgcctaccagcagggacagaaccaactgtacaacgagctgaacctgggcagacgggaagagtacgacgtgctggacaagcggagaggcagggaccctgagatgggcggaaagccccagcggagaaagaacccccaggaaggactgtataacgaactccagaaagacaagatggccgaagcctacagcgagatcggcatgaagggcgagcggagaagaggcaagggccacgatggcctgtaccagggcctgagcaccgccaccaaggacacctatgacgccctgcacatgcaggccctgcctccaaga

SEQ ID NO: 26846 - DNA, 1233 bp, synthetic construct
  source 1..1233: mol_type = other DNA
ccacctgaggtggccgtgttcgagcctagcgaggccgagatcagccacacccagaaagccaccctcgtgtgcctggctaccggcttctaccccgaccatgtggaactgtcttggtgggtcaacggcaaagaggtgcacagcggcgtgtgtaccgacccccagccactgaaagaacagcccgccctgaacgacagccggtactgcctgagcagcagactgagagtgtccgccaccttctggcagaacccccggaaccacttcagatgccaggtgcagttctacggcctgagcgagaacgacgagtggacccaggacagagccaagcccgtgacccagatcgtgtctgccgaagcctggggcagagccgatgatgtgattaagatccactggcaggaaaagaagtccaacaccatcctgggcagccaggaaggcaacaccatgaagaccaacgacacctacatgaagttcagctggctgaccgtgcccgagaagtccctggacaaagaacacagatgcatcgtgcggcacgaaaacaacaagaacggcgtggaccaggaaatcatcttcccacccatcaagaccgatgtgattacaatggaccccaaggacaactgctccaaggacgccaacgataccctgctgctccagctgaccaacaccagcgcctactacatgtacttgttgctgctgctgaagtccgtggtgtacttcgccatcatcacatgctgcctgctgatggctatggtcaagcggaaggacagccggggaaaacggggcagaaagaaactcctgtatatattcaaacaaccatttatgagaccagtacaaactactcaagaggaagatggctgtagctgccgatttccagaagaagaagaaggaggatgtgaactgagagtgaagttcagcagaagcgccgacgcccctgcctaccagcagggacagaaccaactgtacaacgagctgaacctgggcagacgggaagagtacgacgtgctggacaagcggagaggcagggaccctgagatgggcggaaagccccagcggagaaagaacccccaggaaggactgtataacgaactccagaaagacaagatggccgaagcctacagcgagatcggcatgaagggcgagcggagaagaggcaagggccacgatggcctgtaccagggcctgagcaccgccaccaaggacacctatgacgccctgcacatgcaggccctgcctccaaga

SEQ ID NO: 26847 - DNA, 1230 bp, synthetic construct
  source 1..1230: mol_type = other DNA
cctgaggtggccgtgttcgagcctagcgaggccgagatcagccacacccagaaagccaccctcgtgtgcctggctaccggcttctaccccgaccatgtggaactgtcttggtgggtcaacggcaaagaggtgcacagcggcgtgtgtaccgacccccagccactgaaagaacagcccgccctgaacgacagccggtactgcctgagcagcagactgagagtgtccgccaccttctggcagaacccccggaaccacttcagatgccaggtgcagttctacggcctgagcgagaacgacgagtggacccaggacagagccaagcccgtgacccagatcgtgtctgccgaagcctggggcagagccgatgatgtgattaagatccactggcaggaaaagaagtccaacaccatcctgggcagccaggaaggcaacaccatgaagaccaacgacacctacatgaagttcagctggctgaccgtgcccgagaagtccctggacaaagaacacagatgcatcgtgcggcacgaaaacaacaagaacggcgtggaccaggaaatcatcttcccacccatcaagaccgatgtgattacaatggaccccaaggacaactgctccaaggacgccaacgataccctgctgctccagctgaccaacaccagcgcctactacatgtacttgttgctgctgctgaagtccgtggtgtacttcgccatcatcacatgctgcctgctgatggctatggtcaagcggaaggacagccggggaaaacggggcagaaagaaactcctgtatatattcaaacaaccatttatgagaccagtacaaactactcaagaggaagatggctgtagctgccgatttccagaagaagaagaaggaggatgtgaactgagagtgaagttcagcagaagcgccgacgcccctgcctaccagcagggacagaaccaactgtacaacgagctgaacctgggcagacgggaagagtacgacgtgctggacaagcggagaggcagggaccctgagatgggcggaaagccccagcggagaaagaacccccaggaaggactgtataacgaactccagaaagacaagatggccgaagcctacagcgagatcggcatgaagggcgagcggagaagaggcaagggccacgatggcctgtaccagggcctgagcaccgccaccaaggacacctatgacgccctgcacatgcaggccctgcctccaaga

SEQ ID NO: 26848 - DNA, 1227 bp, synthetic construct
  source 1..1227: mol_type = other DNA
gaggtggccgtgttcgagcctagcgaggccgagatcagccacacccagaaagccaccctcgtgtgcctggctaccggcttctaccccgaccatgtggaactgtcttggtgggtcaacggcaaagaggtgcacagcggcgtgtgtaccgacccccagccactgaaagaacagcccgccctgaacgacagccggtactgcctgagcagcagactgagagtgtccgccaccttctggcagaacccccggaaccacttcagatgccaggtgcagttctacggcctgagcgagaacgacgagtggacccaggacagagccaagcccgtgacccagatcgtgtctgccgaagcctggggcagagccgatgatgtgattaagatccactggcaggaaaagaagtccaacaccatcctgggcagccaggaaggcaacaccatgaagaccaacgacacctacatgaagttcagctggctgaccgtgcccgagaagtccctggacaaagaacacagatgcatcgtgcggcacgaaaacaacaagaacggcgtggaccaggaaatcatcttcccacccatcaagaccgatgtgattacaatggaccccaaggacaactgctccaaggacgccaacgataccctgctgctccagctgaccaacaccagcgcctactacatgtacttgttgctgctgctgaagtccgtggtgtacttcgccatcatcacatgctgcctgctgatggctatggtcaagcggaaggacagccggggaaaacggggcagaaagaaactcctgtatatattcaaacaaccatttatgagaccagtacaaactactcaagaggaagatggctgtagctgccgatttccagaagaagaagaaggaggatgtgaactgagagtgaagttcagcagaagcgccgacgcccctgcctaccagcagggacagaaccaactgtacaacgagctgaacctgggcagacgggaagagtacgacgtgctggacaagcggagaggcagggaccctgagatgggcggaaagccccagcggagaaagaacccccaggaaggactgtataacgaactccagaaagacaagatggccgaagcctacagcgagatcggcatgaagggcgagcggagaagaggcaagggccacgatggcctgtaccagggcctgagcaccgccaccaaggacacctatgacgccctgcacatgcaggccctgcctccaaga

SEQ ID NO: 26849 - DNA, 1224 bp, synthetic construct
  source 1..1224: mol_type = other DNA
gtggccgtgttcgagcctagcgaggccgagatcagccacacccagaaagccaccctcgtgtgcctggctaccggcttctaccccgaccatgtggaactgtcttggtgggtcaacggcaaagaggtgcacagcggcgtgtgtaccgacccccagccactgaaagaacagcccgccctgaacgacagccggtactgcctgagcagcagactgagagtgtccgccaccttctggcagaacccccggaaccacttcagatgccaggtgcagttctacggcctgagcgagaacgacgagtggacccaggacagagccaagcccgtgacccagatcgtgtctgccgaagcctggggcagagccgatgatgtgattaagatccactggcaggaaaagaagtccaacaccatcctgggcagccaggaaggcaacaccatgaagaccaacgacacctacatgaagttcagctggctgaccgtgcccgagaagtccctggacaaagaacacagatgcatcgtgcggcacgaaaacaacaagaacggcgtggaccaggaaatcatcttcccacccatcaagaccgatgtgattacaatggaccccaaggacaactgctccaaggacgccaacgataccctgctgctccagctgaccaacaccagcgcctactacatgtacttgttgctgctgctgaagtccgtggtgtacttcgccatcatcacatgctgcctgctgatggctatggtcaagcggaaggacagccggggaaaacggggcagaaagaaactcctgtatatattcaaacaaccatttatgagaccagtacaaactactcaagaggaagatggctgtagctgccgatttccagaagaagaagaaggaggatgtgaactgagagtgaagttcagcagaagcgccgacgcccctgcctaccagcagggacagaaccaactgtacaacgagctgaacctgggcagacgggaagagtacgacgtgctggacaagcggagaggcagggaccctgagatgggcggaaagccccagcggagaaagaacccccaggaaggactgtataacgaactccagaaagacaagatggccgaagcctacagcgagatcggcatgaagggcgagcggagaagaggcaagggccacgatggcctgtaccagggcctgagcaccgccaccaaggacacctatgacgccctgcacatgcaggccctgcctccaaga

SEQ ID NO: 26850 - DNA, 1221 bp, synthetic construct
  source 1..1221: mol_type = other DNA
gccgtgttcgagcctagcgaggccgagatcagccacacccagaaagccaccctcgtgtgcctggctaccggcttctaccccgaccatgtggaactgtcttggtgggtcaacggcaaagaggtgcacagcggcgtgtgtaccgacccccagccactgaaagaacagcccgccctgaacgacagccggtactgcctgagcagcagactgagagtgtccgccaccttctggcagaacccccggaaccacttcagatgccaggtgcagttctacggcctgagcgagaacgacgagtggacccaggacagagccaagcccgtgacccagatcgtgtctgccgaagcctggggcagagccgatgatgtgattaagatccactggcaggaaaagaagtccaacaccatcctgggcagccaggaaggcaacaccatgaagaccaacgacacctacatgaagttcagctggctgaccgtgcccgagaagtccctggacaaagaacacagatgcatcgtgcggcacgaaaacaacaagaacggcgtggaccaggaaatcatcttcccacccatcaagaccgatgtgattacaatggaccccaaggacaactgctccaaggacgccaacgataccctgctgctccagctgaccaacaccagcgcctactacatgtacttgttgctgctgctgaagtccgtggtgtacttcgccatcatcacatgctgcctgctgatggctatggtcaagcggaaggacagccggggaaaacggggcagaaagaaactcctgtatatattcaaacaaccatttatgagaccagtacaaactactcaagaggaagatggctgtagctgccgatttccagaagaagaagaaggaggatgtgaactgagagtgaagttcagcagaagcgccgacgcccctgcctaccagcagggacagaaccaactgtacaacgagctgaacctgggcagacgggaagagtacgacgtgctggacaagcggagaggcagggaccctgagatgggcggaaagccccagcggagaaagaacccccaggaaggactgtataacgaactccagaaagacaagatggccgaagcctacagcgagatcggcatgaagggcgagcggagaagaggcaagggccacgatggcctgtaccagggcctgagcaccgccaccaaggacacctatgacgccctgcacatgcaggccctgcctccaaga

SEQ ID NO: 26851 - DNA, 1257 bp, synthetic construct; identical to SEQ ID NO: 26655
  source 1..1257: mol_type = other DNA

SEQ ID NO: 26852 - DNA, 1254 bp, synthetic construct
  source 1..1254: mol_type = other DNA
gacctgaagaacgtgttcccacctgaggtggccgtgttcgagcctagcgaggccgagatcagccacacccagaaagccaccctcgtgtgcctggctaccggcttctaccccgaccatgtggaactgtcttggtgggtcaacggcaaagaggtgcacagcggcgtgtgtaccgacccccagccactgaaagaacagcccgccctgaacgacagccggtactgcctgagcagcagactgagagtgtccgccaccttctggcagaacccccggaaccacttcagatgccaggtgcagttctacggcctgagcgagaacgacgagtggacccaggacagagccaagcccgtgacccagatcgtgtctgccgaagcctggggcagagccgatgatgtgattaagatccactggcaggaaaagaagtccaacaccatcctgggcagccaggaaggcaacaccatgaagaccaacgacacctacatgaagttcagctggctgaccgtgcccgagaagtccctggacaaagaacacagatgcatcgtgcggcacgaaaacaacaagaacggcgtggaccaggaaatcatcttcccacccatcaagaccgatgtgattacaatggaccccaaggacaactgctccaaggacgccaacgataccctgctgctccagctgaccaacaccagcgcctactacatgtacttgttgctgctgctgaagtccgtggtgtacttcgccatcatcacatgctgcctgctgcggagaaccgccttctgctgcaacggcgagaagtctaaacggggcagaaagaaactcctgtatatattcaaacaaccatttatgagaccagtacaaactactcaagaggaagatggctgtagctgccgatttccagaagaagaagaaggaggatgtgaactgagagtgaagttcagcagaagcgccgacgcccctgcctaccagcagggacagaaccaactgtacaacgagctgaacctgggcagacgggaagagtacgacgtgctggacaagcggagaggcagggaccctgagatgggcggaaagccccagcggagaaagaacccccaggaaggactgtataacgaactccagaaagacaagatggccgaagcctacagcgagatcggcatgaagggcgagcggagaagaggcaagggccacgatggcctgtaccagggcctgagcaccgccaccaaggacacctatgacgccctgcacatgcaggccctgcctccaaga

SEQ ID NO: 26853 - DNA, 1251 bp, synthetic construct
  source 1..1251: mol_type = other DNA
ctgaagaacgtgttcccacctgaggtggccgtgttcgagcctagcgaggccgagatcagccacacccagaaagccaccctcgtgtgcctggctaccggcttctaccccgaccatgtggaactgtcttggtgggtcaacggcaaagaggtgcacagcggcgtgtgtaccgacccccagccactgaaagaacagcccgccctgaacgacagccggtactgcctgagcagcagactgagagtgtccgccaccttctggcagaacccccggaaccacttcagatgccaggtgcagttctacggcctgagcgagaacgacgagtggacccaggacagagccaagcccgtgacccagatcgtgtctgccgaagcctggggcagagccgatgatgtgattaagatccactggcaggaaaagaagtccaacaccatcctgggcagccaggaaggcaacaccatgaagaccaacgacacctacatgaagttcagctggctgaccgtgcccgagaagtccctggacaaagaacacagatgcatcgtgcggcacgaaaacaacaagaacggcgtggaccaggaaatcatcttcccacccatcaagaccgatgtgattacaatggaccccaaggacaactgctccaaggacgccaacgataccctgctgctccagctgaccaacaccagcgcctactacatgtacttgttgctgctgctgaagtccgtggtgtacttcgccatcatcacatgctgcctgctgcggagaaccgccttctgctgcaacggcgagaagtctaaacggggcagaaagaaactcctgtatatattcaaacaaccatttatgagaccagtacaaactactcaagaggaagatggctgtagctgccgatttccagaagaagaagaaggaggatgtgaactgagagtgaagttcagcagaagcgccgacgcccctgcctaccagcagggacagaaccaactgtacaacgagctgaacctgggcagacgggaagagtacgacgtgctggacaagcggagaggcagggaccctgagatgggcggaaagccccagcggagaaagaacccccaggaaggactgtataacgaactccagaaagacaagatggccgaagcctacagcgagatcggcatgaagggcgagcggagaagaggcaagggccacgatggcctgtaccagggcctgagcaccgccaccaaggacacctatgacgccctgcacatgcaggccctgcctccaaga

SEQ ID NO: 26854 - DNA, 1248 bp, synthetic construct
  source 1..1248: mol_type = other DNA
aagaacgtgttcccacctgaggtggccgtgttcgagcctagcgaggccgagatcagccacacccagaaagccaccctcgtgtgcctggctaccggcttctaccccgaccatgtggaactgtcttggtgggtcaacggcaaagaggtgcacagcggcgtgtgtaccgacccccagccactgaaagaacagcccgccctgaacgacagccggtactgcctgagcagcagactgagagtgtccgccaccttctggcagaacccccggaaccacttcagatgccaggtgcagttctacggcctgagcgagaacgacgagtggacccaggacagagccaagcccgtgacccagatcgtgtctgccgaagcctggggcagagccgatgatgtgattaagatccactggcaggaaaagaagtccaacaccatcctgggcagccaggaaggcaacaccatgaagaccaacgacacctacatgaagttcagctggctgaccgtgcccgagaagtccctggacaaagaacacagatgcatcgtgcggcacgaaaacaacaagaacggcgtggaccaggaaatcatcttcccacccatcaagaccgatgtgattacaatggaccccaaggacaactgctccaaggacgccaacgataccctgctgctccagctgaccaacaccagcgcctactacatgtacttgttgctgctgctgaagtccgtggtgtacttcgccatcatcacatgctgcctgctgcggagaaccgccttctgctgcaacggcgagaagtctaaacggggcagaaagaaactcctgtatatattcaaacaaccatttatgagaccagtacaaactactcaagaggaagatggctgtagctgccgatttccagaagaagaagaaggaggatgtgaactgagagtgaagttcagcagaagcgccgacgcccctgcctaccagcagggacagaaccaactgtacaacgagctgaacctgggcagacgggaagagtacgacgtgctggacaagcggagaggcagggaccctgagatgggcggaaagccccagcggagaaagaacccccaggaaggactgtataacgaactccagaaagacaagatggccgaagcctacagcgagatcggcatgaagggcgagcggagaagaggcaagggccacgatggcctgtaccagggcctgagcaccgccaccaaggacacctatgacgccctgcacatgcaggccctgcctccaaga

SEQ ID NO: 26855 - DNA, 1245 bp, synthetic construct
  source 1..1245: mol_type = other DNA
aacgtgttcccacctgaggtggccgtgttcgagcctagcgaggccgagatcagccacacccagaaagccaccctcgtgtgcctggctaccggcttctaccccgaccatgtggaactgtcttggtgggtcaacggcaaagaggtgcacagcggcgtgtgtaccgacccccagccactgaaagaacagcccgccctgaacgacagccggtactgcctgagcagcagactgagagtgtccgccaccttctggcagaacccccggaaccacttcagatgccaggtgcagttctacggcctgagcgagaacgacgagtggacccaggacagagccaagcccgtgacccagatcgtgtctgccgaagcctggggcagagccgatgatgtgattaagatccactggcaggaaaagaagtccaacaccatcctgggcagccaggaaggcaacaccatgaagaccaacgacacctacatgaagttcagctggctgaccgtgcccgagaagtccctggacaaagaacacagatgcatcgtgcggcacgaaaacaacaagaacggcgtggaccaggaaatcatcttcccacccatcaagaccgatgtgattacaatggaccccaaggacaactgctccaaggacgccaacgataccctgctgctccagctgaccaacaccagcgcctactacatgtacttgttgctgctgctgaagtccgtggtgtacttcgccatcatcacatgctgcctgctgcggagaaccgccttctgctgcaacggcgagaagtctaaacggggcagaaagaaactcctgtatatattcaaacaaccatttatgagaccagtacaaactactcaagaggaagatggctgtagctgccgatttccagaagaagaagaaggaggatgtgaactgagagtgaagttcagcagaagcgccgacgcccctgcctaccagcagggacagaaccaactgtacaacgagctgaacctgggcagacgggaagagtacgacgtgctggacaagcggagaggcagggaccctgagatgggcggaaagccccagcggagaaagaacccccaggaaggactgtataacgaactccagaaagacaagatggccgaagcctacagcgagatcggcatgaagggcgagcggagaagaggcaagggccacgatggcctgtaccagggcctgagcaccgccaccaaggacacctatgacgccctgcacatgcaggccctgcctccaaga

SEQ ID NO: 26856 - DNA, 1242 bp, synthetic construct
  source 1..1242: mol_type = other DNA
gtgttcccacctgaggtggccgtgttcgagcctagcgaggccgagatcagccacacccagaaagccaccctcgtgtgcctggctaccggcttctaccccgaccatgtggaactgtcttggtgggtcaacggcaaagaggtgcacagcggcgtgtgtaccgacccccagccactgaaagaacagcccgccctgaacgacagccggtactgcctgagcagcagactgagagtgtccgccaccttctggcagaacccccggaaccacttcagatgccaggtgcagttctacggcctgagcgagaacgacgagtggacccaggacagagccaagcccgtgacccagatcgtgtctgccgaagcctggggcagagccgatgatgtgattaagatccactggcaggaaaagaagtccaacaccatcctgggcagccaggaaggcaacaccatgaagaccaacgacacctacatgaagttcagctggctgaccgtgcccgagaagtccctggacaaagaacacagatgcatcgtgcggcacgaaaacaacaagaacggcgtggaccaggaaatcatcttcccacccatcaagaccgatgtgattacaatggaccccaaggacaactgctccaaggacgccaacgataccctgctgctccagctgaccaacaccagcgcctactacatgtacttgttgctgctgctgaagtccgtggtgtacttcgccatcatcacatgctgcctgctgcggagaaccgccttctgctgcaacggcgagaagtctaaacggggcagaaagaaactcctgtatatattcaaacaaccatttatgagaccagtacaaactactcaagaggaagatggctgtagctgccgatttccagaagaagaagaaggaggatgtgaactgagagtgaagttcagcagaagcgccgacgcccctgcctaccagcagggacagaaccaactgtacaacgagctgaacctgggcagacgggaagagtacgacgtgctggacaagcggagaggcagggaccctgagatgggcggaaagccccagcggagaaagaacccccaggaaggactgtataacgaactccagaaagacaagatggccgaagcctacagcgagatcggcatgaagggcgagcggagaagaggcaagggccacgatggcctgtaccagggcctgagcaccgccaccaaggacacctatgacgccctgcacatgcaggccctgcctccaaga

SEQ ID NO: 26857 - DNA, 1239 bp, synthetic construct
  source 1..1239: mol_type = other DNA
ttcccacctgaggtggccgtgttcgagcctagcgaggccgagatcagccacacccagaaagccaccctcgtgtgcctggctaccggcttctaccccgaccatgtggaactgtcttggtgggtcaacggcaaagaggtgcacagcggcgtgtgtaccgacccccagccactgaaagaacagcccgccctgaacgacagccggtactgcctgagcagcagactgagagtgtccgccaccttctggcagaacccccggaaccacttcagatgccaggtgcagttctacggcctgagcgagaacgacgagtggacccaggacagagccaagcccgtgacccagatcgtgtctgccgaagcctggggcagagccgatgatgtgattaagatccactggcaggaaaagaagtccaacaccatcctgggcagccaggaaggcaacaccatgaagaccaacgacacctacatgaagttcagctggctgaccgtgcccgagaagtccctggacaaagaacacagatgcatcgtgcggcacgaaaacaacaagaacggcgtggaccaggaaatcatcttcccacccatcaagaccgatgtgattacaatggaccccaaggacaactgctccaaggacgccaacgataccctgctgctccagctgaccaacaccagcgcctactacatgtacttgttgctgctgctgaagtccgtggtgtacttcgccatcatcacatgctgcctgctgcggagaaccgccttctgctgcaacggcgagaagtctaaacggggcagaaagaaactcctgtatatattcaaacaaccatttatgagaccagtacaaactactcaagaggaagatggctgtagctgccgatttccagaagaagaagaaggaggatgtgaactgagagtgaagttcagcagaagcgccgacgcccctgcctaccagcagggacagaaccaactgtacaacgagctgaacctgggcagacgggaagagtacgacgtgctggacaagcggagaggcagggaccctgagatgggcggaaagccccagcggagaaagaacccccaggaaggactgtataacgaactccagaaagacaagatggccgaagcctacagcgagatcggcatgaagggcgagcggagaagaggcaagggccacgatggcctgtaccagggcctgagcaccgccaccaaggacacctatgacgccctgcacatgcaggccctgcctccaaga

SEQ ID NO: 26858 - DNA, 1236 bp, synthetic construct
  source 1..1236: mol_type = other DNA
ccacctgaggtggccgtgttcgagcctagcgaggccgagatcagccacacccagaaagccaccctcgtgtgcctggctaccggcttctaccccgaccatgtggaactgtcttggtgggtcaacggcaaagaggtgcacagcggcgtgtgtaccgacccccagccactgaaagaacagcccgccctgaacgacagccggtactgcctgagcagcagactgagagtgtccgccaccttctggcagaacccccggaaccacttcagatgccaggtgcagttctacggcctgagcgagaacgacgagtggacccaggacagagccaagcccgtgacccagatcgtgtctgccgaagcctggggcagagccgatgatgtgattaagatccactggcaggaaaagaagtccaacaccatcctgggcagccaggaaggcaacaccatgaagaccaacgacacctacatgaagttcagctggctgaccgtgcccgagaagtccctggacaaagaacacagatgcatcgtgcggcacgaaaacaacaagaacggcgtggaccaggaaatcatcttcccacccatcaagaccgatgtgattacaatggaccccaaggacaactgctccaaggacgccaacgataccctgctgctccagctgaccaacaccagcgcctactacatgtacttgttgctgctgctgaagtccgtggtgtacttcgccatcatcacatgctgcctgctgcggagaaccgccttctgctgcaacggcgagaagtctaaacggggcagaaagaaactcctgtatatattcaaacaaccatttatgagaccagtacaaactactcaagaggaagatggctgtagctgccgatttccagaagaagaagaaggaggatgtgaactgagagtgaagttcagcagaagcgccgacgcccctgcctaccagcagggacagaaccaactgtacaacgagctgaacctgggcagacgggaagagtacgacgtgctggacaagcggagaggcagggaccctgagatgggcggaaagccccagcggagaaagaacccccaggaaggactgtataacgaactccagaaagacaagatggccgaagcctacagcgagatcggcatgaagggcgagcggagaagaggcaagggccacgatggcctgtaccagggcctgagcaccgccaccaaggacacctatgacgccctgcacatgcaggccctgcctccaaga

SEQ ID NO: 26859 - DNA, 1233 bp, synthetic construct
  source 1..1233: mol_type = other DNA
cctgaggtggccgtgttcgagcctagcgaggccgagatcagccacacccagaaagccaccctcgtgtgcctggctaccggcttctaccccgaccatgtggaactgtcttggtgggtcaacggcaaagaggtgcacagcggcgtgtgtaccgacccccagccactgaaagaacagcccgccctgaacgacagccggtactgcctgagcagcagactgagagtgtccgccaccttctggcagaacccccggaaccacttcagatgccaggtgcagttctacggcctgagcgagaacgacgagtggacccaggacagagccaagcccgtgacccagatcgtgtctgccgaagcctggggcagagccgatgatgtgattaagatccactggcaggaaaagaagtccaacaccatcctgggcagccaggaaggcaacaccatgaagaccaacgacacctacatgaagttcagctggctgaccgtgcccgagaagtccctggacaaagaacacagatgcatcgtgcggcacgaaaacaacaagaacggcgtggaccaggaaatcatcttcccacccatcaagaccgatgtgattacaatggaccccaaggacaactgctccaaggacgccaacgataccctgctgctccagctgaccaacaccagcgcctactacatgtacttgttgctgctgctgaagtccgtggtgtacttcgccatcatcacatgctgcctgctgcggagaaccgccttctgctgcaacggcgagaagtctaaacggggcagaaagaaactcctgtatatattcaaacaaccatttatgagaccagtacaaactactcaagaggaagatggctgtagctgccgatttccagaagaagaagaaggaggatgtgaactgagagtgaagttcagcagaagcgccgacgcccctgcctaccagcagggacagaaccaactgtacaacgagctgaacctgggcagacgggaagagtacgacgtgctggacaagcggagaggcagggaccctgagatgggcggaaagccccagcggagaaagaacccccaggaaggactgtataacgaactccagaaagacaagatggccgaagcctacagcgagatcggcatgaagggcgagcggagaagaggcaagggccacgatggcctgtaccagggcctgagcaccgccaccaaggacacctatgacgccctgcacatgcaggccctgcctccaaga

SEQ ID NO: 26860 - DNA, 1230 bp, synthetic construct
  source 1..1230: mol_type = other DNA
gaggtggccgtgttcgagcctagcgaggccgagatcagccacacccagaaagccaccctcgtgtgcctggctaccggcttctaccccgaccatgtggaactgtcttggtgggtcaacggcaaagaggtgcacagcggcgtgtgtaccgacccccagccactgaaagaacagcccgccctgaacgacagccggtactgcctgagcagcagactgagagtgtccgccaccttctggcagaacccccggaaccacttcagatgccaggtgcagttctacggcctgagcgagaacgacgagtggacccaggacagagccaagcccgtgacccagatcgtgtctgccgaagcctggggcagagccgatgatgtgattaagatccactggcaggaaaagaagtccaacaccatcctgggcagccaggaaggcaacaccatgaagaccaacgacacctacatgaagttcagctggctgaccgtgcccgagaagtccctggacaaagaacacagatgcatcgtgcggcacgaaaacaacaagaacggcgtggaccaggaaatcatcttcccacccatcaagaccgatgtgattacaatggaccccaaggacaactgctccaaggacgccaacgataccctgctgctccagctgaccaacaccagcgcctactacatgtacttgttgctgctgctgaagtccgtggtgtacttcgccatcatcacatgctgcctgctgcggagaaccgccttctgctgcaacggcgagaagtctaaacggggcagaaagaaactcctgtatatattcaaacaaccatttatgagaccagtacaaactactcaagaggaagatggctgtagctgccgatttccagaagaagaagaaggaggatgtgaactgagagtgaagttcagcagaagcgccgacgcccctgcctaccagcagggacagaaccaactgtacaacgagctgaacctgggcagacgggaagagtacgacgtgctggacaagcggagaggcagggaccctgagatgggcggaaagccccagcggagaaagaacccccaggaaggactgtataacgaactccagaaagacaagatggccgaagcctacagcgagatcggcatgaagggcgagcggagaagaggcaagggccacgatggcctgtaccagggcctgagcaccgccaccaaggacacctatgacgccctgcacatgcaggccctgcctccaaga

SEQ ID NO: 26861 - DNA, 1227 bp, synthetic construct
  source 1..1227: mol_type = other DNA
gtggccgtgttcgagcctagcgaggccgagatcagccacacccagaaagccaccctcgtgtgcctggctaccggcttctaccccgaccatgtggaactgtcttggtgggtcaacggcaaagaggtgcacagcggcgtgtgtaccgacccccagccactgaaagaacagcccgccctgaacgacagccggtactgcctgagcagcagactgagagtgtccgccaccttctggcagaacccccggaaccacttcagatgccaggtgcagttctacggcctgagcgagaacgacgagtggacccaggacagagccaagcccgtgacccagatcgtgtctgccgaagcctggggcagagccgatgatgtgattaagatccactggcaggaaaagaagtccaacaccatcctgggcagccaggaaggcaacaccatgaagaccaacgacacctacatgaagttcagctggctgaccgtgcccgagaagtccctggacaaagaacacagatgcatcgtgcggcacgaaaacaacaagaacggcgtggaccaggaaatcatcttcccacccatcaagaccgatgtgattacaatggaccccaaggacaactgctccaaggacgccaacgataccctgctgctccagctgaccaacaccagcgcctactacatgtacttgttgctgctgctgaagtccgtggtgtacttcgccatcatcacatgctgcctgctgcggagaaccgccttctgctgcaacggcgagaagtctaaacggggcagaaagaaactcctgtatatattcaaacaaccatttatgagaccagtacaaactactcaagaggaagatggctgtagctgccgatttccagaagaagaagaaggaggatgtgaactgagagtgaagttcagcagaagcgccgacgcccctgcctaccagcagggacagaaccaactgtacaacgagctgaacctgggcagacgggaagagtacgacgtgctggacaagcggagaggcagggaccctgagatgggcggaaagccccagcggagaaagaacccccaggaaggactgtataacgaactccagaaagacaagatggccgaagcctacagcgagatcggcatgaagggcgagcggagaagaggcaagggccacgatggcctgtaccagggcctgagcaccgccaccaaggacacctatgacgccctgcacatgcaggccctgcctccaaga

SEQ ID NO: 26862 - DNA, 885 bp, synthetic construct; identical to SEQ ID NO: 26586
  source 1..885: mol_type = other DNA

SEQ ID NO: 26863 - DNA, 882 bp, synthetic construct
  source 1..882: mol_type = other DNA
cagaaccctgatcctgccgtgtaccagctgcgggatagcaagagcagcgacaagagcgtgtgtctgttcaccgacttcgacagccagaccaacgtgtcccagagcaaggactccgacgtgtacatcaccgataagtgcgtgctggacatgcggagcatggacttcaagagcaactccgccgtggcctggtccaacaagtccgatttcgcctgcgccaacgccttcaacaacagcattatccccgaggacacattcttcccaagccccgagagcagctgcgacgtgaagctggtggaaaagagcttcgagacagacaccaacctgaacttccagaacctgagcgtgatcggcttcagaatcctgctgctgaaagtggccggctttaacctgctgatgaccctgcggctgtggtccagcaaacggggcagaaagaaactcctgtatatattcaaacaaccatttatgagaccagtacaaactactcaagaggaagatggctgtagctgccgatttccagaagaagaagaaggaggatgtgaactgagagtgaagttcagcagaagcgccgacgcccctgcctaccagcagggacagaaccaactgtacaacgagctgaacctgggcagacgggaagagtacgacgtgctggacaagcggagaggcagggaccctgagatgggcggaaagccccagcggagaaagaacccccaggaaggactgtataacgaactccagaaagacaagatggccgaagcctacagcgagatcggcatgaagggcgagcggagaagaggcaagggccacgatggcctgtaccagggcctgagcaccgccaccaaggacacctatgacgccctgcacatgcaggccctgcctccaaga

SEQ ID NO: 26864 - DNA, 879 bp, synthetic construct
  source 1..879: mol_type = other DNA
aaccctgatcctgccgtgtaccagctgcgggatagcaagagcagcgacaagagcgtgtgtctgttcaccgacttcgacagccagaccaacgtgtcccagagcaaggactccgacgtgtacatcaccgataagtgcgtgctggacatgcggagcatggacttcaagagcaactccgccgtggcctggtccaacaagtccgatttcgcctgcgccaacgccttcaacaacagcattatccccgaggacacattcttcccaagccccgagagcagctgcgacgtgaagctggtggaaaagagcttcgagacagacaccaacctgaacttccagaacctgagcgtgatcggcttcagaatcctgctgctgaaagtggccggctttaacctgctgatgaccctgcggctgtggtccagcaaacggggcagaaagaaactcctgtatatattcaaacaaccatttatgagaccagtacaaactactcaagaggaagatggctgtagctgccgatttccagaagaagaagaaggaggatgtgaactgagagtgaagttcagcagaagcgccgacgcccctgcctaccagcagggacagaaccaactgtacaacgagctgaacctgggcagacgggaagagtacgacgtgctggacaagcggagaggcagggaccctgagatgggcggaaagccccagcggagaaagaacccccaggaaggactgtataacgaactccagaaagacaagatggccgaagcctacagcgagatcggcatgaagggcgagcggagaagaggcaagggccacgatggcctgtaccagggcctgagcaccgccaccaaggacacctatgacgccctgcacatgcaggccctgcctccaaga

SEQ ID NO: 26865 - DNA, 876 bp, synthetic construct; identical to SEQ ID NO: 26587
  source 1..876: mol_type = other DNA

SEQ ID NO: 26866 - DNA, 873 bp, synthetic construct
  source 1..873: mol_type = other DNA
gatcctgccgtgtaccagctgcgggatagcaagagcagcgacaagagcgtgtgtctgttcaccgacttcgacagccagaccaacgtgtcccagagcaaggactccgacgtgtacatcaccgataagtgcgtgctggacatgcggagcatggacttcaagagcaactccgccgtggcctggtccaacaagtccgatttcgcctgcgccaacgccttcaacaacagcattatccccgaggacacattcttcccaagccccgagagcagctgcgacgtgaagctggtggaaaagagcttcgagacagacaccaacctgaacttccagaacctgagcgtgatcggcttcagaatcctgctgctgaaagtggccggctttaacctgctgatgaccctgcggctgtggtccagcaaacggggcagaaagaaactcctgtatatattcaaacaaccatttatgagaccagtacaaactactcaagaggaagatggctgtagctgccgatttccagaagaagaagaaggaggatgtgaactgagagtgaagttcagcagaagcgccgacgcccctgcctaccagcagggacagaaccaactgtacaacgagctgaacctgggcagacgggaagagtacgacgtgctggacaagcggagaggcagggaccctgagatgggcggaaagccccagcggagaaagaacccccaggaaggactgtataacgaactccagaaagacaagatggccgaagcctacagcgagatcggcatgaagggcgagcggagaagaggcaagggccacgatggcctgtaccagggcctgagcaccgccaccaaggacacctatgacgccctgcacatgcaggccctgcctccaaga

SEQ ID NO: 26867 - DNA, 870 bp, synthetic construct
  source 1..870: mol_type = other DNA
cctgccgtgtaccagctgcgggatagcaagagcagcgacaagagcgtgtgtctgttcaccgacttcgacagccagaccaacgtgtcccagagcaaggactccgacgtgtacatcaccgataagtgcgtgctggacatgcggagcatggacttcaagagcaactccgccgtggcctggtccaacaagtccgatttcgcctgcgccaacgccttcaacaacagcattatccccgaggacacattcttcccaagccccgagagcagctgcgacgtgaagctggtggaaaagagcttcgagacagacaccaacctgaacttccagaacctgagcgtgatcggcttcagaatcctgctgctgaaagtggccggctttaacctgctgatgaccctgcggctgtggtccagcaaacggggcagaaagaaactcctgtatatattcaaacaaccatttatgagaccagtacaaactactcaagaggaagatggctgtagctgccgatttccagaagaagaagaaggaggatgtgaactgagagtgaagttcagcagaagcgccgacgcccctgcctaccagcagggacagaaccaactgtacaacgagctgaacctgggcagacgggaagagtacgacgtgctggacaagcggagaggcagggaccctgagatgggcggaaagccccagcggagaaagaacccccaggaaggactgtataacgaactccagaaagacaagatggccgaagcctacagcgagatcggcatgaagggcgagcggagaagaggcaagggccacgatggcctgtaccagggcctgagcaccgccaccaaggacacctatgacgccctgcacatgcaggccctgcctccaaga

SEQ ID NO: 26868 - DNA, 867 bp, synthetic construct
  source 1..867: mol_type = other DNA
gccgtgtaccagctgcgggatagcaagagcagcgacaagagcgtgtgtctgttcaccgacttcgacagccagaccaacgtgtcccagagcaaggactccgacgtgtacatcaccgataagtgcgtgctggacatgcggagcatggacttcaagagcaactccgccgtggcctggtccaacaagtccgatttcgcctgcgccaacgccttcaacaacagcattatccccgaggacacattcttcccaagccccgagagcagctgcgacgtgaagctggtggaaaagagcttcgagacagacaccaacctgaacttccagaacctgagcgtgatcggcttcagaatcctgctgctgaaagtggccggctttaacctgctgatgaccctgcggctgtggtccagcaaacggggcagaaagaaactcctgtatatattcaaacaaccatttatgagaccagtacaaactactcaagaggaagatggctgtagctgccgatttccagaagaagaagaaggaggatgtgaactgagagtgaagttcagcagaagcgccgacgcccctgcctaccagcagggacagaaccaactgtacaacgagctgaacctgggcagacgggaagagtacgacgtgctggacaagcggagaggcagggaccctgagatgggcggaaagccccagcggagaaagaacccccaggaaggactgtataacgaactccagaaagacaagatggccgaagcctacagcgagatcggcatgaagggcgagcggagaagaggcaagggccacgatggcctgtaccagggcctgagcaccgccaccaaggacacctatgacgccctgcacatgcaggccctgcctccaaga

SEQ ID NO: 26869 - DNA, 864 bp, synthetic construct
  source 1..864: mol_type = other DNA
gtgtaccagctgcgggatagcaagagcagcgacaagagcgtgtgtctgttcaccgacttcgacagccagaccaacgtgtcccagagcaaggactccgacgtgtacatcaccgataagtgcgtgctggacatgcggagcatggacttcaagagcaactccgccgtggcctggtccaacaagtccgatttcgcctgcgccaacgccttcaacaacagcattatccccgaggacacattcttcccaagccccgagagcagctgcgacgtgaagctggtggaaaagagcttcgagacagacaccaacctgaacttccagaacctgagcgtgatcggcttcagaatcctgctgctgaaagtggccggctttaacctgctgatgaccctgcggctgtggtccagcaaacggggcagaaagaaactcctgtatatattcaaacaaccatttatgagaccagtacaaactactcaagaggaagatggctgtagctgccgatttccagaagaagaagaaggaggatgtgaactgagagtgaagttcagcagaagcgccgacgcccctgcctaccagcagggacagaaccaactgtacaacgagctgaacctgggcagacgggaagagtacgacgtgctggacaagcggagaggcagggaccctgagatgggcggaaagccccagcggagaaagaacccccaggaaggactgtataacgaactccagaaagacaagatggccgaagcctacagcgagatcggcatgaagggcgagcggagaagaggcaagggccacgatggcctgtaccagggcctgagcaccgccaccaaggacacctatgacgccctgcacatgcaggccctgcctccaaga

SEQ ID NO: 26870 - DNA, 861 bp, synthetic construct
  source 1..861: mol_type = other DNA
taccagctgcgggatagcaagagcagcgacaagagcgtgtgtctgttcaccgacttcgacagccagaccaacgtgtcccagagcaaggactccgacgtgtacatcaccgataagtgcgtgctggacatgcggagcatggacttcaagagcaactccgccgtggcctggtccaacaagtccgatttcgcctgcgccaacgccttcaacaacagcattatccccgaggacacattcttcccaagccccgagagcagctgcgacgtgaagctggtggaaaagagcttcgagacagacaccaacctgaacttccagaacctgagcgtgatcggcttcagaatcctgctgctgaaagtggccggctttaacctgctgatgaccctgcggctgtggtccagcaaacggggcagaaagaaactcctgtatatattcaaacaaccatttatgagaccagtacaaactactcaagaggaagatggctgtagctgccgatttccagaagaagaagaaggaggatgtgaactgagagtgaagttcagcagaagcgccgacgcccctgcctaccagcagggacagaaccaactgtacaacgagctgaacctgggcagacgggaagagtacgacgtgctggacaagcggagaggcagggaccctgagatgggcggaaagccccagcggagaaagaacccccaggaaggactgtataacgaactccagaaagacaagatggccgaagcctacagcgagatcggcatgaagggcgagcggagaagaggcaagggccacgatggcctgtaccagggcctgagcaccgccaccaaggacacctatgacgccctgcacatgcaggccctgcctccaaga

SEQ ID NO: 26871 - DNA, 858 bp, synthetic construct
  source 1..858: mol_type = other DNA
cagctgcgggatagcaagagcagcgacaagagcgtgtgtctgttcaccgacttcgacagccagaccaacgtgtcccagagcaaggactccgacgtgtacatcaccgataagtgcgtgctggacatgcggagcatggacttcaagagcaactccgccgtggcctggtccaacaagtccgatttcgcctgcgccaacgccttcaacaacagcattatccccgaggacacattcttcccaagccccgagagcagctgcgacgtgaagctggtggaaaagagcttcgagacagacaccaacctgaacttccagaacctgagcgtgatcggcttcagaatcctgctgctgaaagtggccggctttaacctgctgatgaccctgcggctgtggtccagcaaacggggcagaaagaaactcctgtatatattcaaacaaccatttatgagaccagtacaaactactcaagaggaagatggctgtagctgccgatttccagaagaagaagaaggaggatgtgaactgagagtgaagttcagcagaagcgccgacgcccctgcctaccagcagggacagaaccaactgtacaacgagctgaacctgggcagacgggaagagtacgacgtgctggacaagcggagaggcagggaccctgagatgggcggaaagccccagcggagaaagaacccccaggaaggactgtataacgaactccagaaagacaagatggccgaagcctacagcgagatcggcatgaagggcgagcggagaagaggcaagggccacgatggcctgtaccagggcctgagcaccgccaccaaggacacctatgacgccctgcacatgcaggccctgcctccaaga

SEQ ID NO: 26872 - DNA, 855 bp, synthetic construct
  source 1..855: mol_type = other DNA
ctgcgggatagcaagagcagcgacaagagcgtgtgtctgttcaccgacttcgacagccagaccaacgtgtcccagagcaaggactccgacgtgtacatcaccgataagtgcgtgctggacatgcggagcatggacttcaagagcaactccgccgtggcctggtccaacaagtccgatttcgcctgcgccaacgccttcaacaacagcattatccccgaggacacattcttcccaagccccgagagcagctgcgacgtgaagctggtggaaaagagcttcgagacagacaccaacctgaacttccagaacctgagcgtgatcggcttcagaatcctgctgctgaaagtggccggctttaacctgctgatgaccctgcggctgtggtccagcaaacggggcagaaagaaactcctgtatatattcaaacaaccatttatgagaccagtacaaactactcaagaggaagatggctgtagctgccgatttccagaagaagaagaaggaggatgtgaactgagagtgaagttcagcagaagcgccgacgcccctgcctaccagcagggacagaaccaactgtacaacgagctgaacctgggcagacgggaagagtacgacgtgctggacaagcggagaggcagggaccctgagatgggcggaaagccccagcggagaaagaacccccaggaaggactgtataacgaactccagaaagacaagatggccgaagcctacagcgagatcggcatgaagggcgagcggagaagaggcaagggccacgatggcctgtaccagggcctgagcaccgccaccaaggacacctatgacgccctgcacatgcaggccctgcctccaaga

SEQ ID NO: 26873 - DNA, 852 bp, synthetic construct
  source 1..852: mol_type = other DNA
cgggatagcaagagcagcgacaagagcgtgtgtctgttcaccgacttcgacagccagaccaacgtgtcccagagcaaggactccgacgtgtacatcaccgataagtgcgtgctggacatgcggagcatggacttcaagagcaactccgccgtggcctggtccaacaagtccgatttcgcctgcgccaacgccttcaacaacagcattatccccgaggacacattcttcccaagccccgagagcagctgcgacgtgaagctggtggaaaagagcttcgagacagacaccaacctgaacttccagaacctgagcgtgatcggcttcagaatcctgctgctgaaagtggccggctttaacctgctgatgaccctgcggctgtggtccagcaaacggggcagaaagaaactcctgtatatattcaaacaaccatttatgagaccagtacaaactactcaagaggaagatggctgtagctgccgatttccagaagaagaagaaggaggatgtgaactgagagtgaagttcagcagaagcgccgacgcccctgcctaccagcagggacagaaccaactgtacaacgagctgaacctgggcagacgggaagagtacgacgtgctggacaagcggagaggcagggaccctgagatgggcggaaagccccagcggagaaagaacccccaggaaggactgtataacgaactccagaaagacaagatggccgaagcctacagcgagatcggcatgaagggcgagcggagaagaggcaagggccacgatggcctgtaccagggcctgagcaccgccaccaaggacacctatgacgccctgcacatgcaggccctgcctccaaga

SEQ ID NO: 26874 - DNA, 849 bp, synthetic construct
  source 1..849: mol_type = other DNA
gatagcaagagcagcgacaagagcgtgtgtctgttcaccgacttcgacagccagaccaacgtgtcccagagcaaggactccgacgtgtacatcaccgataagtgcgtgctggacatgcggagcatggacttcaagagcaactccgccgtggcctggtccaacaagtccgatttcgcctgcgccaacgccttcaacaacagcattatccccgaggacacattcttcccaagccccgagagcagctgcgacgtgaagctggtggaaaagagcttcgagacagacaccaacctgaacttccagaacctgagcgtgatcggcttcagaatcctgctgctgaaagtggccggctttaacctgctgatgaccctgcggctgtggtccagcaaacggggcagaaagaaactcctgtatatattcaaacaaccatttatgagaccagtacaaactactcaagaggaagatggctgtagctgccgatttccagaagaagaagaaggaggatgtgaactgagagtgaagttcagcagaagcgccgacgcccctgcctaccagcagggacagaaccaactgtacaacgagctgaacctgggcagacgggaagagtacgacgtgctggacaagcggagaggcagggaccctgagatgggcggaaagccccagcggagaaagaacccccaggaaggactgtataacgaactccagaaagacaagatggccgaagcctacagcgagatcggcatgaagggcgagcggagaagaggcaagggccacgatggcctgtaccagggcctgagcaccgccaccaaggacacctatgacgccctgcacatgcaggccctgcctccaaga

SEQ ID NO: 26875 - DNA, 846 bp, synthetic construct
  source 1..846: mol_type = other DNA
agcaagagcagcgacaagagcgtgtgtctgttcaccgacttcgacagccagaccaacgtgtcccagagcaaggactccgacgtgtacatcaccgataagtgcgtgctggacatgcggagcatggacttcaagagcaactccgccgtggcctggtccaacaagtccgatttcgcctgcgccaacgccttcaacaacagcattatccccgaggacacattcttcccaagccccgagagcagctgcgacgtgaagctggtggaaaagagcttcgagacagacaccaacctgaacttccagaacctgagcgtgatcggcttcagaatcctgctgctgaaagtggccggctttaacctgctgatgaccctgcggctgtggtccagcaaacggggcagaaagaaactcctgtatatattcaaacaaccatttatgagaccagtacaaactactcaagaggaagatggctgtagctgccgatttccagaagaagaagaaggaggatgtgaactgagagtgaagttcagcagaagcgccgacgcccctgcctaccagcagggacagaaccaactgtacaacgagctgaacctgggcagacgggaagagtacgacgtgctggacaagcggagaggcagggaccctgagatgggcggaaagccccagcggagaaagaacccccaggaaggactgtataacgaactccagaaagacaagatggccgaagcctacagcgagatcggcatgaagggcgagcggagaagaggcaagggccacgatggcctgtaccagggcctgagcaccgccaccaaggacacctatgacgccctgcacatgcaggccctgcctccaaga

SEQ ID NO: 26876 - DNA, 843 bp, synthetic construct
  source 1..843: mol_type = other DNA
aagagcagcgacaagagcgtgtgtctgttcaccgacttcgacagccagaccaacgtgtcccagagcaaggactccgacgtgtacatcaccgataagtgcgtgctggacatgcggagcatggacttcaagagcaactccgccgtggcctggtccaacaagtccgatttcgcctgcgccaacgccttcaacaacagcattatccccgaggacacattcttcccaagccccgagagcagctgcgacgtgaagctggtggaaaagagcttcgagacagacaccaacctgaacttccagaacctgagcgtgatcggcttcagaatcctgctgctgaaagtggccggctttaacctgctgatgaccctgcggctgtggtccagcaaacggggcagaaagaaactcctgtatatattcaaacaaccatttatgagaccagtacaaactactcaagaggaagatggctgtagctgccgatttccagaagaagaagaaggaggatgtgaactgagagtgaagttcagcagaagcgccgacgcccctgcctaccagcagggacagaaccaactgtacaacgagctgaacctgggcagacgggaagagtacgacgtgctggacaagcggagaggcagggaccctgagatgggcggaaagccccagcggagaaagaacccccaggaaggactgtataacgaactccagaaagacaagatggccgaagcctacagcgagatcggcatgaagggcgagcggagaagaggcaagggccacgatggcctgtaccagggcctgagcaccgccaccaaggacacctatgacgccctgcacatgcaggccctgcctccaaga

SEQ ID NO: 26877 - DNA, 840 bp, synthetic construct
  source 1..840: mol_type = other DNA
agcagcgacaagagcgtgtgtctgttcaccgacttcgacagccagaccaacgtgtcccagagcaaggactccgacgtgtacatcaccgataagtgcgtgctggacatgcggagcatggacttcaagagcaactccgccgtggcctggtccaacaagtccgatttcgcctgcgccaacgccttcaacaacagcattatccccgaggacacattcttcccaagccccgagagcagctgcgacgtgaagctggtggaaaagagcttcgagacagacaccaacctgaacttccagaacctgagcgtgatcggcttcagaatcctgctgctgaaagtggccggctttaacctgctgatgaccctgcggctgtggtccagcaaacggggcagaaagaaactcctgtatatattcaaacaaccatttatgagaccagtacaaactactcaagaggaagatggctgtagctgccgatttccagaagaagaagaaggaggatgtgaactgagagtgaagttcagcagaagcgccgacgcccctgcctaccagcagggacagaaccaactgtacaacgagctgaacctgggcagacgggaagagtacgacgtgctggacaagcggagaggcagggaccctgagatgggcggaaagccccagcggagaaagaacccccaggaaggactgtataacgaactccagaaagacaagatggccgaagcctacagcgagatcggcatgaagggcgagcggagaagaggcaagggccacgatggcctgtaccagggcctgagcaccgccaccaaggacacctatgacgccctgcacatgcaggccctgcctccaaga

SEQ ID NO: 26878 - DNA, 837 bp, synthetic construct
  source 1..837: mol_type = other DNA
agcgacaagagcgtgtgtctgttcaccgacttcgacagccagaccaacgtgtcccagagcaaggactccgacgtgtacatcaccgataagtgcgtgctggacatgcggagcatggacttcaagagcaactccgccgtggcctggtccaacaagtccgatttcgcctgcgccaacgccttcaacaacagcattatccccgaggacacattcttcccaagccccgagagcagctgcgacgtgaagctggtggaaaagagcttcgagacagacaccaacctgaacttccagaacctgagcgtgatcggcttcagaatcctgctgctgaaagtggccggctttaacctgctgatgaccctgcggctgtggtccagcaaacggggcagaaagaaactcctgtatatattcaaacaaccatttatgagaccagtacaaactactcaagaggaagatggctgtagctgccgatttccagaagaagaagaaggaggatgtgaactgagagtgaagttcagcagaagcgccgacgcccctgcctaccagcagggacagaaccaactgtacaacgagctgaacctgggcagacgggaagagtacgacgtgctggacaagcggagaggcagggaccctgagatgggcggaaagccccagcggagaaagaacccccaggaaggactgtataacgaactccagaaagacaagatggccgaagcctacagcgagatcggcatgaagggcgagcggagaagaggcaagggccacgatggcctgtaccagggcctgagcaccgccaccaaggacacctatgacgccctgcacatgcaggccctgcctccaaga

SEQ ID NO: 26879 - DNA, 834 bp, synthetic construct
  source 1..834: mol_type = other DNA
gacaagagcgtgtgtctgttcaccgacttcgacagccagaccaacgtgtcccagagcaaggactccgacgtgtacatcaccgataagtgcgtgctggacatgcggagcatggacttcaagagcaactccgccgtggcctggtccaacaagtccgatttcgcctgcgccaacgccttcaacaacagcattatccccgaggacacattcttcccaagccccgagagcagctgcgacgtgaagctggtggaaaagagcttcgagacagacaccaacctgaacttccagaacctgagcgtgatcggcttcagaatcctgctgctgaaagtggccggctttaacctgctgatgaccctgcggctgtggtccagcaaacggggcagaaagaaactcctgtatatattcaaacaaccatttatgagaccagtacaaactactcaagaggaagatggctgtagctgccgatttccagaagaagaagaaggaggatgtgaactgagagtgaagttcagcagaagcgccgacgcccctgcctaccagcagggacagaaccaactgtacaacgagctgaacctgggcagacgggaagagtacgacgtgctggacaagcggagaggcagggaccctgagatgggcggaaagccccagcggagaaagaacccccaggaaggactgtataacgaactccagaaagacaagatggccgaagcctacagcgagatcggcatgaagggcgagcggagaagaggcaagggccacgatggcctgtaccagggcctgagcaccgccaccaaggacacctatgacgccctgcacatgcaggccctgcctccaaga

SEQ ID NO: 26880 - DNA, 831 bp, synthetic construct
  source 1..831: mol_type = other DNA
aagagcgtgtgtctgttcaccgacttcgacagccagaccaacgtgtcccagagcaaggactccgacgtgtacatcaccgataagtgcgtgctggacatgcggagcatggacttcaagagcaactccgccgtggcctggtccaacaagtccgatttcgcctgcgccaacgccttcaacaacagcattatccccgaggacacattcttcccaagccccgagagcagctgcgacgtgaagctggtggaaaagagcttcgagacagacaccaacctgaacttccagaacctgagcgtgatcggcttcagaatcctgctgctgaaagtggccggctttaacctgctgatgaccctgcggctgtggtccagcaaacggggcagaaagaaactcctgtatatattcaaacaaccatttatgagaccagtacaaactactcaagaggaagatggctgtagctgccgatttccagaagaagaagaaggaggatgtgaactgagagtgaagttcagcagaagcgccgacgcccctgcctaccagcagggacagaaccaactgtacaacgagctgaacctgggcagacgggaagagtacgacgtgctggacaagcggagaggcagggaccctgagatgggcggaaagccccagcggagaaagaacccccaggaaggactgtataacgaactccagaaagacaagatggccgaagcctacagcgagatcggcatgaagggcgagcggagaagaggcaagggccacgatggcctgtaccagggcctgagcaccgccaccaaggacacctatgacgccctgcacatgcaggccctgcctccaaga

SEQ ID NO: 26881 - DNA, 828 bp, synthetic construct
  source 1..828: mol_type = other DNA
agcgtgtgtctgttcaccgacttcgacagccagaccaacgtgtcccagagcaaggactccgacgtgtacatcaccgataagtgcgtgctggacatgcggagcatggacttcaagagcaactccgccgtggcctggtccaacaagtccgatttcgcctgcgccaacgccttcaacaacagcattatccccgaggacacattcttcccaagccccgagagcagctgcgacgtgaagctggtggaaaagagcttcgagacagacaccaacctgaacttccagaacctgagcgtgatcggcttcagaatcctgctgctgaaagtggccggctttaacctgctgatgaccctgcggctgtggtccagcaaacggggcagaaagaaactcctgtatatattcaaacaaccatttatgagaccagtacaaactactcaagaggaagatggctgtagctgccgatttccagaagaagaagaaggaggatgtgaactgagagtgaagttcagcagaagcgccgacgcccctgcctaccagcagggacagaaccaactgtacaacgagctgaacctgggcagacgggaagagtacgacgtgctggacaagcggagaggcagggaccctgagatgggcggaaagccccagcggagaaagaacccccaggaaggactgtataacgaactccagaaagacaagatggccgaagcctacagcgagatcggcatgaagggcgagcggagaagaggcaagggccacgatggcctgtaccagggcctgagcaccgccaccaaggacacctatgacgccctgcacatgcaggccctgcctccaaga

SEQ ID NO: 26882 - DNA, 825 bp, synthetic construct
  source 1..825: mol_type = other DNA
gtgtgtctgttcaccgacttcgacagccagaccaacgtgtcccagagcaaggactccgacgtgtacatcaccgataagtgcgtgctggacatgcggagcatggacttcaagagcaactccgccgtggcctggtccaacaagtccgatttcgcctgcgccaacgccttcaacaacagcattatccccgaggacacattcttcccaagccccgagagcagctgcgacgtgaagctggtggaaaagagcttcgagacagacaccaacctgaacttccagaacctgagcgtgatcggcttcagaatcctgctgctgaaagtggccggctttaacctgctgatgaccctgcggctgtggtccagcaaacggggcagaaagaaactcctgtatatattcaaacaaccatttatgagaccagtacaaactactcaagaggaagatggctgtagctgccgatttccagaagaagaagaaggaggatgtgaactgagagtgaagttcagcagaagcgccgacgcccctgcctaccagcagggacagaaccaactgtacaacgagctgaacctgggcagacgggaagagtacgacgtgctggacaagcggagaggcagggaccctgagatgggcggaaagccccagcggagaaagaacccccaggaaggactgtataacgaactccagaaagacaagatggccgaagcctacagcgagatcggcatgaagggcgagcggagaagaggcaagggccacgatggcctgtaccagggcctgagcaccgccaccaaggacacctatgacgccctgcacatgcaggccctgcctccaaga

SEQ ID NO: 26883 - DNA, 822 bp, synthetic construct
  source 1..822: mol_type = other DNA
tgtctgttcaccgacttcgacagccagaccaacgtgtcccagagcaaggactccgacgtgtacatcaccgataagtgcgtgctggacatgcggagcatggacttcaagagcaactccgccgtggcctggtccaacaagtccgatttcgcctgcgccaacgccttcaacaacagcattatccccgaggacacattcttcccaagccccgagagcagctgcgacgtgaagctggtggaaaagagcttcgagacagacaccaacctgaacttccagaacctgagcgtgatcggcttcagaatcctgctgctgaaagtggccggctttaacctgctgatgaccctgcggctgtggtccagcaaacggggcagaaagaaactcctgtatatattcaaacaaccatttatgagaccagtacaaactactcaagaggaagatggctgtagctgccgatttccagaagaagaagaaggaggatgtgaactgagagtgaagttcagcagaagcgccgacgcccctgcctaccagcagggacagaaccaactgtacaacgagctgaacctgggcagacgggaagagtacgacgtgctggacaagcggagaggcagggaccctgagatgggcggaaagccccagcggagaaagaacccccaggaaggactgtataacgaactccagaaagacaagatggccgaagcctacagcgagatcggcatgaagggcgagcggagaagaggcaagggccacgatggcctgtaccagggcctgagcaccgccaccaaggacacctatgacgccctgcacatgcaggccctgcctccaaga

SEQ ID NO: 26884 - DNA, 819 bp, synthetic construct
  source 1..819: mol_type = other DNA
ctgttcaccgacttcgacagccagaccaacgtgtcccagagcaaggactccgacgtgtacatcaccgataagtgcgtgctggacatgcggagcatggacttcaagagcaactccgccgtggcctggtccaacaagtccgatttcgcctgcgccaacgccttcaacaacagcattatccccgaggacacattcttcccaagccccgagagcagctgcgacgtgaagctggtggaaaagagcttcgagacagacaccaacctgaacttccagaacctgagcgtgatcggcttcagaatcctgctgctgaaagtggccggctttaacctgctgatgaccctgcggctgtggtccagcaaacggggcagaaagaaactcctgtatatattcaaacaaccatttatgagaccagtacaaactactcaagaggaagatggctgtagctgccgatttccagaagaagaagaaggaggatgtgaactgagagtgaagttcagcagaagcgccgacgcccctgcctaccagcagggacagaaccaactgtacaacgagctgaacctgggcagacgggaagagtacgacgtgctggacaagcggagaggcagggaccctgagatgggcggaaagccccagcggagaaagaacccccaggaaggactgtataacgaactccagaaagacaagatggccgaagcctacagcgagatcggcatgaagggcgagcggagaagaggcaagggccacgatggcctgtaccagggcctgagcaccgccaccaaggacacctatgacgccctgcacatgcaggccctgcctccaaga

SEQ ID NO: 26885 - DNA, 816 bp, synthetic construct
  source 1..816: mol_type = other DNA
ttcaccgacttcgacagccagaccaacgtgtcccagagcaaggactccgacgtgtacatcaccgataagtgcgtgctggacatgcggagcatggacttcaagagcaactccgccgtggcctggtccaacaagtccgatttcgcctgcgccaacgccttcaacaacagcattatccccgaggacacattcttcccaagccccgagagcagctgcgacgtgaagctggtggaaaagagcttcgagacagacaccaacctgaacttccagaacctgagcgtgatcggcttcagaatcctgctgctgaaagtggccggctttaacctgctgatgaccctgcggctgtggtccagcaaacggggcagaaagaaactcctgtatatattcaaacaaccatttatgagaccagtacaaactactcaagaggaagatggctgtagctgccgatttccagaagaagaagaaggaggatgtgaactgagagtgaagttcagcagaagcgccgacgcccctgcctaccagcagggacagaaccaactgtacaacgagctgaacctgggcagacgggaagagtacgacgtgctggacaagcggagaggcagggaccctgagatgggcggaaagccccagcggagaaagaacccccaggaaggactgtataacgaactccagaaagacaagatggccgaagcctacagcgagatcggcatgaagggcgagcggagaagaggcaagggccacgatggcctgtaccagggcctgagcaccgccaccaaggacacctatgacgccctgcacatgcaggccctgcctccaaga

SEQ ID NO: 26886 - DNA, 813 bp, synthetic construct
  source 1..813: mol_type = other DNA
accgacttcgacagccagaccaacgtgtcccagagcaaggactccgacgtgtacatcaccgataagtgcgtgctggacatgcggagcatggacttcaagagcaactccgccgtggcctggtccaacaagtccgatttcgcctgcgccaacgccttcaacaacagcattatccccgaggacacattcttcccaagccccgagagcagctgcgacgtgaagctggtggaaaagagcttcgagacagacaccaacctgaacttccagaacctgagcgtgatcggcttcagaatcctgctgctgaaagtggccggctttaacctgctgatgaccctgcggctgtggtccagcaaacggggcagaaagaaactcctgtatatattcaaacaaccatttatgagaccagtacaaactactcaagaggaagatggctgtagctgccgatttccagaagaagaagaaggaggatgtgaactgagagtgaagttcagcagaagcgccgacgcccctgcctaccagcagggacagaaccaactgtacaacgagctgaacctgggcagacgggaagagtacgacgtgctggacaagcggagaggcagggaccctgagatgggcggaaagccccagcggagaaagaacccccaggaaggactgtataacgaactccagaaagacaagatggccgaagcctacagcgagatcggcatgaagggcgagcggagaagaggcaagggccacgatggcctgtaccagggcctgagcaccgccaccaaggacacctatgacgccctgcacatgcaggccctgcctccaaga

SEQ ID NO: 26887 - DNA, 810 bp, synthetic construct
  source 1..810: mol_type = other DNA
gacttcgacagccagaccaacgtgtcccagagcaaggactccgacgtgtacatcaccgataagtgcgtgctggacatgcggagcatggacttcaagagcaactccgccgtggcctggtccaacaagtccgatttcgcctgcgccaacgccttcaacaacagcattatccccgaggacacattcttcccaagccccgagagcagctgcgacgtgaagctggtggaaaagagcttcgagacagacaccaacctgaacttccagaacctgagcgtgatcggcttcagaatcctgctgctgaaagtggccggctttaacctgctgatgaccctgcggctgtggtccagcaaacggggcagaaagaaactcctgtatatattcaaacaaccatttatgagaccagtacaaactactcaagaggaagatggctgtagctgccgatttccagaagaagaagaaggaggatgtgaactgagagtgaagttcagcagaagcgccgacgcccctgcctaccagcagggacagaaccaactgtacaacgagctgaacctgggcagacgggaagagtacgacgtgctggacaagcggagaggcagggaccctgagatgggcggaaagccccagcggagaaagaacccccaggaaggactgtataacgaactccagaaagacaagatggccgaagcctacagcgagatcggcatgaagggcgagcggagaagaggcaagggccacgatggcctgtaccagggcctgagcaccgccaccaaggacacctatgacgccctgcacatgcaggccctgcctccaaga

SEQ ID NO: 26888 - DNA, 807 bp, synthetic construct
  source 1..807: mol_type = other DNA
ttcgacagccagaccaacgtgtcccagagcaaggactccgacgtgtacatcaccgataagtgcgtgctggacatgcggagcatggacttcaagagcaactccgccgtggcctggtccaacaagtccgatttcgcctgcgccaacgccttcaacaacagcattatccccgaggacacattcttcccaagccccgagagcagctgcgacgtgaagctggtggaaaagagcttcgagacagacaccaacctgaacttccagaacctgagcgtgatcggcttcagaatcctgctgctgaaagtggccggctttaacctgctgatgaccctgcggctgtggtccagcaaacggggcagaaagaaactcctgtatatattcaaacaaccatttatgagaccagtacaaactactcaagaggaagatggctgtagctgccgatttccagaagaagaagaaggaggatgtgaactgagagtgaagttcagcagaagcgccgacgcccctgcctaccagcagggacagaaccaactgtacaacgagctgaacctgggcagacgggaagagtacgacgtgctggacaagcggagaggcagggaccctgagatgggcggaaagccccagcggagaaagaacccccaggaaggactgtataacgaactccagaaagacaagatggccgaagcctacagcgagatcggcatgaagggcgagcggagaagaggcaagggccacgatggcctgtaccagggcctgagcaccgccaccaaggacacctatgacgccctgcacatgcaggccctgcctccaaga

SEQ ID NO: 26889 - DNA, 804 bp, synthetic construct
  source 1..804: mol_type = other DNA
gacagccagaccaacgtgtcccagagcaaggactccgacgtgtacatcaccgataagtgcgtgctggacatgcggagcatggacttcaagagcaactccgccgtggcctggtccaacaagtccgatttcgcctgcgccaacgccttcaacaacagcattatccccgaggacacattcttcccaagccccgagagcagctgcgacgtgaagctggtggaaaagagcttcgagacagacaccaacctgaacttccagaacctgagcgtgatcggcttcagaatcctgctgctgaaagtggccggctttaacctgctgatgaccctgcggctgtggtccagcaaacggggcagaaagaaactcctgtatatattcaaacaaccatttatgagaccagtacaaactactcaagaggaagatggctgtagctgccgatttccagaagaagaagaaggaggatgtgaactgagagtgaagttcagcagaagcgccgacgcccctgcctaccagcagggacagaaccaactgtacaacgagctgaacctgggcagacgggaagagtacgacgtgctggacaagcggagaggcagggaccctgagatgggcggaaagccccagcggagaaagaacccccaggaaggactgtataacgaactccagaaagacaagatggccgaagcctacagcgagatcggcatgaagggcgagcggagaagaggcaagggccacgatggcctgtaccagggcctgagcaccgccaccaaggacacctatgacgccctgcacatgcaggccctgcctccaaga

SEQ ID NO: 26890 - DNA, 801 bp, synthetic construct
  source 1..801: mol_type = other DNA
agccagaccaacgtgtcccagagcaaggactccgacgtgtacatcaccgataagtgcgtgctggacatgcggagcatggacttcaagagcaactccgccgtggcctggtccaacaagtccgatttcgcctgcgccaacgccttcaacaacagcattatccccgaggacacattcttcccaagccccgagagcagctgcgacgtgaagctggtggaaaagagcttcgagacagacaccaacctgaacttccagaacctgagcgtgatcggcttcagaatcctgctgctgaaagtggccggctttaacctgctgatgaccctgcggctgtggtccagcaaacggggcagaaagaaactcctgtatatattcaaacaaccatttatgagaccagtacaaactactcaagaggaagatggctgtagctgccgatttccagaagaagaagaaggaggatgtgaactgagagtgaagttcagcagaagcgccgacgcccctgcctaccagcagggacagaaccaactgtacaacgagctgaacctgggcagacgggaagagtacgacgtgctggacaagcggagaggcagggaccctgagatgggcggaaagccccagcggagaaagaacccccaggaaggactgtataacgaactccagaaagacaagatggccgaagcctacagcgagatcggcatgaagggcgagcggagaagaggcaagggccacgatggcctgtaccagggcctgagcaccgccaccaaggacacctatgacgccctgcacatgcaggccctgcctccaaga

SEQ ID NO: 26891 - DNA, 798 bp, synthetic construct
  source 1..798: mol_type = other DNA
cagaccaacgtgtcccagagcaaggactccgacgtgtacatcaccgataagtgcgtgctggacatgcggagcatggacttcaagagcaactccgccgtggcctggtccaacaagtccgatttcgcctgcgccaacgccttcaacaacagcattatccccgaggacacattcttcccaagccccgagagcagctgcgacgtgaagctggtggaaaagagcttcgagacagacaccaacctgaacttccagaacctgagcgtgatcggcttcagaatcctgctgctgaaagtggccggctttaacctgctgatgaccctgcggctgtggtccagcaaacggggcagaaagaaactcctgtatatattcaaacaaccatttatgagaccagtacaaactactcaagaggaagatggctgtagctgccgatttccagaagaagaagaaggaggatgtgaactgagagtgaagttcagcagaagcgccgacgcccctgcctaccagcagggacagaaccaactgtacaacgagctgaacctgggcagacgggaagagtacgacgtgctggacaagcggagaggcagggaccctgagatgggcggaaagccccagcggagaaagaacccccaggaaggactgtataacgaactccagaaagacaagatggccgaagcctacagcgagatcggcatgaagggcgagcggagaagaggcaagggccacgatggcctgtaccagggcctgagcaccgccaccaaggacacctatgacgccctgcacatgcaggccctgcctccaaga

SEQ ID NO: 26892 - DNA, 795 bp, synthetic construct
  source 1..795: mol_type = other DNA
accaacgtgtcccagagcaaggactccgacgtgtacatcaccgataagtgcgtgctggacatgcggagcatggacttcaagagcaactccgccgtggcctggtccaacaagtccgatttcgcctgcgccaacgccttcaacaacagcattatccccgaggacacattcttcccaagccccgagagcagctgcgacgtgaagctggtggaaaagagcttcgagacagacaccaacctgaacttccagaacctgagcgtgatcggcttcagaatcctgctgctgaaagtggccggctttaacctgctgatgaccctgcggctgtggtccagcaaacggggcagaaagaaactcctgtatatattcaaacaaccatttatgagaccagtacaaactactcaagaggaagatggctgtagctgccgatttccagaagaagaagaaggaggatgtgaactgagagtgaagttcagcagaagcgccgacgcccctgcctaccagcagggacagaaccaactgtacaacgagctgaacctgggcagacgggaagagtacgacgtgctggacaagcggagaggcagggaccctgagatgggcggaaagccccagcggagaaagaacccccaggaaggactgtataacgaactccagaaagacaagatggccgaagcctacagcgagatcggcatgaagggcgagcggagaagaggcaagggccacgatggcctgtaccagggcctgagcaccgccaccaaggacacctatgacgccctgcacatgcaggccctgcctccaaga

SEQ ID NO: 26893 - DNA, 792 bp, synthetic construct
  source 1..792: mol_type = other DNA
aacgtgtcccagagcaaggactccgacgtgtacatcaccgataagtgcgtgctggacatgcggagcatggacttcaagagcaactccgccgtggcctggtccaacaagtccgatttcgcctgcgccaacgccttcaacaacagcattatccccgaggacacattcttcccaagccccgagagcagctgcgacgtgaagctggtggaaaagagcttcgagacagacaccaacctgaacttccagaacctgagcgtgatcggcttcagaatcctgctgctgaaagtggccggctttaacctgctgatgaccctgcggctgtggtccagcaaacggggcagaaagaaactcctgtatatattcaaacaaccatttatgagaccagtacaaactactcaagaggaagatggctgtagctgccgatttccagaagaagaagaaggaggatgtgaactgagagtgaagttcagcagaagcgccgacgcccctgcctaccagcagggacagaaccaactgtacaacgagctgaacctgggcagacgggaagagtacgacgtgctggacaagcggagaggcagggaccctgagatgggcggaaagccccagcggagaaagaacccccaggaaggactgtataacgaactccagaaagacaagatggccgaagcctacagcgagatcggcatgaagggcgagcggagaagaggcaagggccacgatggcctgtaccagggcctgagcaccgccaccaaggacacctatgacgccctgcacatgcaggccctgcctccaaga

SEQ ID NO: 26894 - DNA, 789 bp, synthetic construct
  source 1..789: mol_type = other DNA
gtgtcccagagcaaggactccgacgtgtacatcaccgataagtgcgtgctggacatgcggagcatggacttcaagagcaactccgccgtggcctggtccaacaagtccgatttcgcctgcgccaacgccttcaacaacagcattatccccgaggacacattcttcccaagccccgagagcagctgcgacgtgaagctggtggaaaagagcttcgagacagacaccaacctgaacttccagaacctgagcgtgatcggcttcagaatcctgctgctgaaagtggccggctttaacctgctgatgaccctgcggctgtggtccagcaaacggggcagaaagaaactcctgtatatattcaaacaaccatttatgagaccagtacaaactactcaagaggaagatggctgtagctgccgatttccagaagaagaagaaggaggatgtgaactgagagtgaagttcagcagaagcgccgacgcccctgcctaccagcagggacagaaccaactgtacaacgagctgaacctgggcagacgggaagagtacgacgtgctggacaagcggagaggcagggaccctgagatgggcggaaagccccagcggagaaagaacccccaggaaggactgtataacgaactccagaaagacaagatggccgaagcctacagcgagatcggcatgaagggcgagcggagaagaggcaagggccacgatggcctgtaccagggcctgagcaccgccaccaaggacacctatgacgccctgcacatgcaggccctgcctccaaga

SEQ ID NO: 26895 - DNA, 786 bp, synthetic construct
  source 1..786: mol_type = other DNA
tcccagagcaaggactccgacgtgtacatcaccgataagtgcgtgctggacatgcggagcatggacttcaagagcaactccgccgtggcctggtccaacaagtccgatttcgcctgcgccaacgccttcaacaacagcattatccccgaggacacattcttcccaagccccgagagcagctgcgacgtgaagctggtggaaaagagcttcgagacagacaccaacctgaacttccagaacctgagcgtgatcggcttcagaatcctgctgctgaaagtggccggctttaacctgctgatgaccctgcggctgtggtccagcaaacggggcagaaagaaactcctgtatatattcaaacaaccatttatgagaccagtacaaactactcaagaggaagatggctgtagctgccgatttccagaagaagaagaaggaggatgtgaactgagagtgaagttcagcagaagcgccgacgcccctgcctaccagcagggacagaaccaactgtacaacgagctgaacctgggcagacgggaagagtacgacgtgctggacaagcggagaggcagggaccctgagatgggcggaaagccccagcggagaaagaacccccaggaaggactgtataacgaactccagaaagacaagatggccgaagcctacagcgagatcggcatgaagggcgagcggagaagaggcaagggccacgatggcctgtaccagggcctgagcaccgccaccaaggacacctatgacgccctgcacatgcaggccctgcctccaaga

SEQ ID NO: 26896 - DNA, 783 bp, synthetic construct
  source 1..783: mol_type = other DNA
cagagcaaggactccgacgtgtacatcaccgataagtgcgtgctggacatgcggagcatggacttcaagagcaactccgccgtggcctggtccaacaagtccgatttcgcctgcgccaacgccttcaacaacagcattatccccgaggacacattcttcccaagccccgagagcagctgcgacgtgaagctggtggaaaagagcttcgagacagacaccaacctgaacttccagaacctgagcgtgatcggcttcagaatcctgctgctgaaagtggccggctttaacctgctgatgaccctgcggctgtggtccagcaaacggggcagaaagaaactcctgtatatattcaaacaaccatttatgagaccagtacaaactactcaagaggaagatggctgtagctgccgatttccagaagaagaagaaggaggatgtgaactgagagtgaagttcagcagaagcgccgacgcccctgcctaccagcagggacagaaccaactgtacaacgagctgaacctgggcagacgggaagagtacgacgtgctggacaagcggagaggcagggaccctgagatgggcggaaagccccagcggagaaagaacccccaggaaggactgtataacgaactccagaaagacaagatggccgaagcctacagcgagatcggcatgaagggcgagcggagaagaggcaagggccacgatggcctgtaccagggcctgagcaccgccaccaaggacacctatgacgccctgcacatgcaggccctgcctccaaga

SEQ ID NO: 26897 - DNA, 780 bp, synthetic construct
  source 1..780: mol_type = other DNA
agcaaggactccgacgtgtacatcaccgataagtgcgtgctggacatgcggagcatggacttcaagagcaactccgccgtggcctggtccaacaagtccgatttcgcctgcgccaacgccttcaacaacagcattatccccgaggacacattcttcccaagccccgagagcagctgcgacgtgaagctggtggaaaagagcttcgagacagacaccaacctgaacttccagaacctgagcgtgatcggcttcagaatcctgctgctgaaagtggccggctttaacctgctgatgaccctgcggctgtggtccagcaaacggggcagaaagaaactcctgtatatattcaaacaaccatttatgagaccagtacaaactactcaagaggaagatggctgtagctgccgatttccagaagaagaagaaggaggatgtgaactgagagtgaagttcagcagaagcgccgacgcccctgcctaccagcagggacagaaccaactgtacaacgagctgaacctgggcagacgggaagagtacgacgtgctggacaagcggagaggcagggaccctgagatgggcggaaagccccagcggagaaagaacccccaggaaggactgtataacgaactccagaaagacaagatggccgaagcctacagcgagatcggcatgaagggcgagcggagaagaggcaagggccacgatggcctgtaccagggcctgagcaccgccaccaaggacacctatgacgccctgcacatgcaggccctgcctccaaga

SEQ ID NO: 26898 - DNA, 777 bp, synthetic construct
  source 1..777: mol_type = other DNA
aaggactccgacgtgtacatcaccgataagtgcgtgctggacatgcggagcatggacttcaagagcaactccgccgtggcctggtccaacaagtccgatttcgcctgcgccaacgccttcaacaacagcattatccccgaggacacattcttcccaagccccgagagcagctgcgacgtgaagctggtggaaaagagcttcgagacagacaccaacctgaacttccagaacctgagcgtgatcggcttcagaatcctgctgctgaaagtggccggctttaacctgctgatgaccctgcggctgtggtccagcaaacggggcagaaagaaactcctgtatatattcaaacaaccatttatgagaccagtacaaactactcaagaggaagatggctgtagctgccgatttccagaagaagaagaaggaggatgtgaactgagagtgaagttcagcagaagcgccgacgcccctgcctaccagcagggacagaaccaactgtacaacgagctgaacctgggcagacgggaagagtacgacgtgctggacaagcggagaggcagggaccctgagatgggcggaaagccccagcggagaaagaacccccaggaaggactgtataacgaactccagaaagacaagatggccgaagcctacagcgagatcggcatgaagggcgagcggagaagaggcaagggccacgatggcctgtaccagggcctgagcaccgccaccaaggacacctatgacgccctgcacatgcaggccctgcctccaaga

SEQ ID NO: 26899 - DNA, 774 bp, synthetic construct
  source 1..774: mol_type = other DNA
gactccgacgtgtacatcaccgataagtgcgtgctggacatgcggagcatggacttcaagagcaactccgccgtggcctggtccaacaagtccgatttcgcctgcgccaacgccttcaacaacagcattatccccgaggacacattcttcccaagccccgagagcagctgcgacgtgaagctggtggaaaagagcttcgagacagacaccaacctgaacttccagaacctgagcgtgatcggcttcagaatcctgctgctgaaagtggccggctttaacctgctgatgaccctgcggctgtggtccagcaaacggggcagaaagaaactcctgtatatattcaaacaaccatttatgagaccagtacaaactactcaagaggaagatggctgtagctgccgatttccagaagaagaagaaggaggatgtgaactgagagtgaagttcagcagaagcgccgacgcccctgcctaccagcagggacagaaccaactgtacaacgagctgaacctgggcagacgggaagagtacgacgtgctggacaagcggagaggcagggaccctgagatgggcggaaagccccagcggagaaagaacccccaggaaggactgtataacgaactccagaaagacaagatggccgaagcctacagcgagatcggcatgaagggcgagcggagaagaggcaagggccacgatggcctgtaccagggcctgagcaccgccaccaaggacacctatgacgccctgcacatgcaggccctgcctccaaga

SEQ ID NO: 26900 - DNA, 771 bp, synthetic construct
  source 1..771: mol_type = other DNA
tccgacgtgtacatcaccgataagtgcgtgctggacatgcggagcatggacttcaagagcaactccgccgtggcctggtccaacaagtccgatttcgcctgcgccaacgccttcaacaacagcattatccccgaggacacattcttcccaagccccgagagcagctgcgacgtgaagctggtggaaaagagcttcgagacagacaccaacctgaacttccagaacctgagcgtgatcggcttcagaatcctgctgctgaaagtggccggctttaacctgctgatgaccctgcggctgtggtccagcaaacggggcagaaagaaactcctgtatatattcaaacaaccatttatgagaccagtacaaactactcaagaggaagatggctgtagctgccgatttccagaagaagaagaaggaggatgtgaactgagagtgaagttcagcagaagcgccgacgcccctgcctaccagcagggacagaaccaactgtacaacgagctgaacctgggcagacgggaagagtacgacgtgctggacaagcggagaggcagggaccctgagatgggcggaaagccccagcggagaaagaacccccaggaaggactgtataacgaactccagaaagacaagatggccgaagcctacagcgagatcggcatgaagggcgagcggagaagaggcaagggccacgatggcctgtaccagggcctgagcaccgccaccaaggacacctatgacgccctgcacatgcaggccctgcctccaaga

SEQ ID NO: 26901 - DNA, 768 bp, synthetic construct
  source 1..768: mol_type = other DNA
gacgtgtacatcaccgataagtgcgtgctggacatgcggagcatggacttcaagagcaactccgccgtggcctggtccaacaagtccgatttcgcctgcgccaacgccttcaacaacagcattatccccgaggacacattcttcccaagccccgagagcagctgcgacgtgaagctggtggaaaagagcttcgagacagacaccaacctgaacttccagaacctgagcgtgatcggcttcagaatcctgctgctgaaagtggccggctttaacctgctgatgaccctgcggctgtggtccagcaaacggggcagaaagaaactcctgtatatattcaaacaaccatttatgagaccagtacaaactactcaagaggaagatggctgtagctgccgatttccagaagaagaagaaggaggatgtgaactgagagtgaagttcagcagaagcgccgacgcccctgcctaccagcagggacagaaccaactgtacaacgagctgaacctgggcagacgggaagagtacgacgtgctggacaagcggagaggcagggaccctgagatgggcggaaagccccagcggagaaagaacccccaggaaggactgtataacgaactccagaaagacaagatggccgaagcctacagcgagatcggcatgaagggcgagcggagaagaggcaagggccacgatggcctgtaccagggcctgagcaccgccaccaaggacacctatgacgccctgcacatgcaggccctgcctccaaga

SEQ ID NO: 26902 - DNA, 765 bp, synthetic construct
  source 1..765: mol_type = other DNA
gtgtacatcaccgataagtgcgtgctggacatgcggagcatggacttcaagagcaactccgccgtggcctggtccaacaagtccgatttcgcctgcgccaacgccttcaacaacagcattatccccgaggacacattcttcccaagccccgagagcagctgcgacgtgaagctggtggaaaagagcttcgagacagacaccaacctgaacttccagaacctgagcgtgatcggcttcagaatcctgctgctgaaagtggccggctttaacctgctgatgaccctgcggctgtggtccagcaaacggggcagaaagaaactcctgtatatattcaaacaaccatttatgagaccagtacaaactactcaagaggaagatggctgtagctgccgatttccagaagaagaagaaggaggatgtgaactgagagtgaagttcagcagaagcgccgacgcccctgcctaccagcagggacagaaccaactgtacaacgagctgaacctgggcagacgggaagagtacgacgtgctggacaagcggagaggcagggaccctgagatgggcggaaagccccagcggagaaagaacccccaggaaggactgtataacgaactccagaaagacaagatggccgaagcctacagcgagatcggcatgaagggcgagcggagaagaggcaagggccacgatggcctgtaccagggcctgagcaccgccaccaaggacacctatgacgccctgcacatgcaggccctgcctccaaga

SEQ ID NO: 26903 - DNA, 762 bp, synthetic construct
  source 1..762: mol_type = other DNA
tacatcaccgataagtgcgtgctggacatgcggagcatggacttcaagagcaactccgccgtggcctggtccaacaagtccgatttcgcctgcgccaacgccttcaacaacagcattatccccgaggacacattcttcccaagccccgagagcagctgcgacgtgaagctggtggaaaagagcttcgagacagacaccaacctgaacttccagaacctgagcgtgatcggcttcagaatcctgctgctgaaagtggccggctttaacctgctgatgaccctgcggctgtggtccagcaaacggggcagaaagaaactcctgtatatattcaaacaaccatttatgagaccagtacaaactactcaagaggaagatggctgtagctgccgatttccagaagaagaagaaggaggatgtgaactgagagtgaagttcagcagaagcgccgacgcccctgcctaccagcagggacagaaccaactgtacaacgagctgaacctgggcagacgggaagagtacgacgtgctggacaagcggagaggcagggaccctgagatgggcggaaagccccagcggagaaagaacccccaggaaggactgtataacgaactccagaaagacaagatggccgaagcctacagcgagatcggcatgaagggcgagcggagaagaggcaagggccacgatggcctgtaccagggcctgagcaccgccaccaaggacacctatgacgccctgcacatgcaggccctgcctccaaga

SEQ ID NO: 26904 - DNA, 759 bp, synthetic construct
  source 1..759: mol_type = other DNA
atcaccgataagtgcgtgctggacatgcggagcatggacttcaagagcaactccgccgtggcctggtccaacaagtccgatttcgcctgcgccaacgccttcaacaacagcattatccccgaggacacattcttcccaagccccgagagcagctgcgacgtgaagctggtggaaaagagcttcgagacagacaccaacctgaacttccagaacctgagcgtgatcggcttcagaatcctgctgctgaaagtggccggctttaacctgctgatgaccctgcggctgtggtccagcaaacggggcagaaagaaactcctgtatatattcaaacaaccatttatgagaccagtacaaactactcaagaggaagatggctgtagctgccgatttccagaagaagaagaaggaggatgtgaactgagagtgaagttcagcagaagcgccgacgcccctgcctaccagcagggacagaaccaactgtacaacgagctgaacctgggcagacgggaagagtacgacgtgctggacaagcggagaggcagggaccctgagatgggcggaaagccccagcggagaaagaacccccaggaaggactgtataacgaactccagaaagacaagatggccgaagcctacagcgagatcggcatgaagggcgagcggagaagaggcaagggccacgatggcctgtaccagggcctgagcaccgccaccaaggacacctatgacgccctgcacatgcaggccctgcctccaaga

SEQ ID NO: 26905 - DNA, 756 bp, synthetic construct
  source 1..756: mol_type = other DNA
accgataagtgcgtgctggacatgcggagcatggacttcaagagcaactccgccgtggcctggtccaacaagtccgatttcgcctgcgccaacgccttcaacaacagcattatccccgaggacacattcttcccaagccccgagagcagctgcgacgtgaagctggtggaaaagagcttcgagacagacaccaacctgaacttccagaacctgagcgtgatcggcttcagaatcctgctgctgaaagtggccggctttaacctgctgatgaccctgcggctgtggtccagcaaacggggcagaaagaaactcctgtatatattcaaacaaccatttatgagaccagtacaaactactcaagaggaagatggctgtagctgccgatttccagaagaagaagaaggaggatgtgaactgagagtgaagttcagcagaagcgccgacgcccctgcctaccagcagggacagaaccaactgtacaacgagctgaacctgggcagacgggaagagtacgacgtgctggacaagcggagaggcagggaccctgagatgggcggaaagccccagcggagaaagaacccccaggaaggactgtataacgaactccagaaagacaagatggccgaagcctacagcgagatcggcatgaagggcgagcggagaagaggcaagggccacgatggcctgtaccagggcctgagcaccgccaccaaggacacctatgacgccctgcacatgcaggccctgcctccaaga

SEQ ID NO: 26906 - DNA, 753 bp, synthetic construct
  source 1..753: mol_type = other DNA
gataagtgcgtgctggacatgcggagcatggacttcaagagcaactccgccgtggcctggtccaacaagtccgatttcgcctgcgccaacgccttcaacaacagcattatccccgaggacacattcttcccaagccccgagagcagctgcgacgtgaagctggtggaaaagagcttcgagacagacaccaacctgaacttccagaacctgagcgtgatcggcttcagaatcctgctgctgaaagtggccggctttaacctgctgatgaccctgcggctgtggtccagcaaacggggcagaaagaaactcctgtatatattcaaacaaccatttatgagaccagtacaaactactcaagaggaagatggctgtagctgccgatttccagaagaagaagaaggaggatgtgaactgagagtgaagttcagcagaagcgccgacgcccctgcctaccagcagggacagaaccaactgtacaacgagctgaacctgggcagacgggaagagtacgacgtgctggacaagcggagaggcagggaccctgagatgggcggaaagccccagcggagaaagaacccccaggaaggactgtataacgaactccagaaagacaagatggccgaagcctacagcgagatcggcatgaagggcgagcggagaagaggcaagggccacgatggcctgtaccagggcctgagcaccgccaccaaggacacctatgacgccctgcacatgcaggccctgcctccaaga

SEQ ID NO: 26907 - DNA, 747 bp, synthetic construct
  source 1..747: mol_type = other DNA
tgcgtgctggacatgcggagcatggacttcaagagcaactccgccgtggcctggtccaacaagtccgatttcgcctgcgccaacgccttcaacaacagcattatccccgaggacacattcttcccaagccccgagagcagctgcgacgtgaagctggtggaaaagagcttcgagacagacaccaacctgaacttccagaacctgagcgtgatcggcttcagaatcctgctgctgaaagtggccggctttaacctgctgatgaccctgcggctgtggtccagcaaacggggcagaaagaaactcctgtatatattcaaacaaccatttatgagaccagtacaaactactcaagaggaagatggctgtagctgccgatttccagaagaagaagaaggaggatgtgaactgagagtgaagttcagcagaagcgccgacgcccctgcctaccagcagggacagaaccaactgtacaacgagctgaacctgggcagacgggaagagtacgacgtgctggacaagcggagaggcagggaccctgagatgggcggaaagccccagcggagaaagaacccccaggaaggactgtataacgaactccagaaagacaagatggccgaagcctacagcgagatcggcatgaagggcgagcggagaagaggcaagggccacgatggcctgtaccagggcctgagcaccgccaccaaggacacctatgacgccctgcacatgcaggccctgcctccaaga

SEQ ID NO: 26908 - DNA, 744 bp, synthetic construct
  source 1..744: mol_type = other DNA
gtgctggacatgcggagcatggacttcaagagcaactccgccgtggcctggtccaacaagtccgatttcgcctgcgccaacgccttcaacaacagcattatccccgaggacacattcttcccaagccccgagagcagctgcgacgtgaagctggtggaaaagagcttcgagacagacaccaacctgaacttccagaacctgagcgtgatcggcttcagaatcctgctgctgaaagtggccggctttaacctgctgatgaccctgcggctgtggtccagcaaacggggcagaaagaaactcctgtatatattcaaacaaccatttatgagaccagtacaaactactcaagaggaagatggctgtagctgccgatttccagaagaagaagaaggaggatgtgaactgagagtgaagttcagcagaagcgccgacgcccctgcctaccagcagggacagaaccaactgtacaacgagctgaacctgggcagacgggaagagtacgacgtgctggacaagcggagaggcagggaccctgagatgggcggaaagccccagcggagaaagaacccccaggaaggactgtataacgaactccagaaagacaagatggccgaagcctacagcgagatcggcatgaagggcgagcggagaagaggcaagggccacgatggcctgtaccagggcctgagcaccgccaccaaggacacctatgacgccctgcacatgcaggccctgcctccaaga

SEQ ID NO: 26909 - DNA, 741 bp, synthetic construct
  source 1..741: mol_type = other DNA
ctggacatgcggagcatggacttcaagagcaactccgccgtggcctggtccaacaagtccgatttcgcctgcgccaacgccttcaacaacagcattatccccgaggacacattcttcccaagccccgagagcagctgcgacgtgaagctggtggaaaagagcttcgagacagacaccaacctgaacttccagaacctgagcgtgatcggcttcagaatcctgctgctgaaagtggccggctttaacctgctgatgaccctgcggctgtggtccagcaaacggggcagaaagaaactcctgtatatattcaaacaaccatttatgagaccagtacaaactactcaagaggaagatggctgtagctgccgatttccagaagaagaagaaggaggatgtgaactgagagtgaagttcagcagaagcgccgacgcccctgcctaccagcagggacagaaccaactgtacaacgagctgaacctgggcagacgggaagagtacgacgtgctggacaagcggagaggcagggaccctgagatgggcggaaagccccagcggagaaagaacccccaggaaggactgtataacgaactccagaaagacaagatggccgaagcctacagcgagatcggcatgaagggcgagcggagaagaggcaagggccacgatggcctgtaccagggcctgagcaccgccaccaaggacacctatgacgccctgcacatgcaggccctgcctccaaga

SEQ ID NO: 26910 - DNA, 738 bp, synthetic construct
  source 1..738: mol_type = other DNA
gacatgcggagcatggacttcaagagcaactccgccgtggcctggtccaacaagtccgatttcgcctgcgccaacgccttcaacaacagcattatccccgaggacacattcttcccaagccccgagagcagctgcgacgtgaagctggtggaaaagagcttcgagacagacaccaacctgaacttccagaacctgagcgtgatcggcttcagaatcctgctgctgaaagtggccggctttaacctgctgatgaccctgcggctgtggtccagcaaacggggcagaaagaaactcctgtatatattcaaacaaccatttatgagaccagtacaaactactcaagaggaagatggctgtagctgccgatttccagaagaagaagaaggaggatgtgaactgagagtgaagttcagcagaagcgccgacgcccctgcctaccagcagggacagaaccaactgtacaacgagctgaacctgggcagacgggaagagtacgacgtgctggacaagcggagaggcagggaccctgagatgggcggaaagccccagcggagaaagaacccccaggaaggactgtataacgaactccagaaagacaagatggccgaagcctacagcgagatcggcatgaagggcgagcggagaagaggcaagggccacgatggcctgtaccagggcctgagcaccgccaccaaggacacctatgacgccctgcacatgcaggccctgcctccaaga

SEQ ID NO: 26911 - DNA, 735 bp, synthetic construct
  source 1..735: mol_type = other DNA
atgcggagcatggacttcaagagcaactccgccgtggcctggtccaacaagtccgatttcgcctgcgccaacgccttcaacaacagcattatccccgaggacacattcttcccaagccccgagagcagctgcgacgtgaagctggtggaaaagagcttcgagacagacaccaacctgaacttccagaacctgagcgtgatcggcttcagaatcctgctgctgaaagtggccggctttaacctgctgatgaccctgcggctgtggtccagcaaacggggcagaaagaaactcctgtatatattcaaacaaccatttatgagaccagtacaaactactcaagaggaagatggctgtagctgccgatttccagaagaagaagaaggaggatgtgaactgagagtgaagttcagcagaagcgccgacgcccctgcctaccagcagggacagaaccaactgtacaacgagctgaacctgggcagacgggaagagtacgacgtgctggacaagcggagaggcagggaccctgagatgggcggaaagccccagcggagaaagaacccccaggaaggactgtataacgaactccagaaagacaagatggccgaagcctacagcgagatcggcatgaagggcgagcggagaagaggcaagggccacgatggcctgtaccagggcctgagcaccgccaccaaggacacctatgacgccctgcacatgcaggccctgcctccaaga

SEQ ID NO: 26912 - DNA, 732 bp, synthetic construct
  source 1..732: mol_type = other DNA
cggagcatggacttcaagagcaactccgccgtggcctggtccaacaagtccgatttcgcctgcgccaacgccttcaacaacagcattatccccgaggacacattcttcccaagccccgagagcagctgcgacgtgaagctggtggaaaagagcttcgagacagacaccaacctgaacttccagaacctgagcgtgatcggcttcagaatcctgctgctgaaagtggccggctttaacctgctgatgaccctgcggctgtggtccagcaaacggggcagaaagaaactcctgtatatattcaaacaaccatttatgagaccagtacaaactactcaagaggaagatggctgtagctgccgatttccagaagaagaagaaggaggatgtgaactgagagtgaagttcagcagaagcgccgacgcccctgcctaccagcagggacagaaccaactgtacaacgagctgaacctgggcagacgggaagagtacgacgtgctggacaagcggagaggcagggaccctgagatgggcggaaagccccagcggagaaagaacccccaggaaggactgtataacgaactccagaaagacaagatggccgaagcctacagcgagatcggcatgaagggcgagcggagaagaggcaagggccacgatggcctgtaccagggcctgagcaccgccaccaaggacacctatgacgccctgcacatgcaggccctgcctccaaga

SEQ ID NO: 26913 - DNA, 729 bp, synthetic construct
  source 1..729: mol_type = other DNA
agcatggacttcaagagcaactccgccgtggcctggtccaacaagtccgatttcgcctgcgccaacgccttcaacaacagcattatccccgaggacacattcttcccaagccccgagagcagctgcgacgtgaagctggtggaaaagagcttcgagacagacaccaacctgaacttccagaacctgagcgtgatcggcttcagaatcctgctgctgaaagtggccggctttaacctgctgatgaccctgcggctgtggtccagcaaacggggcagaaagaaactcctgtatatattcaaacaaccatttatgagaccagtacaaactactcaagaggaagatggctgtagctgccgatttccagaagaagaagaaggaggatgtgaactgagagtgaagttcagcagaagcgccgacgcccctgcctaccagcagggacagaaccaactgtacaacgagctgaacctgggcagacgggaagagtacgacgtgctggacaagcggagaggcagggaccctgagatgggcggaaagccccagcggagaaagaacccccaggaaggactgtataacgaactccagaaagacaagatggccgaagcctacagcgagatcggcatgaagggcgagcggagaagaggcaagggccacgatggcctgtaccagggcctgagcaccgccaccaaggacacctatgacgccctgcacatgcaggccctgcctccaaga

SEQ ID NO: 26914 - DNA, 726 bp, synthetic construct
  source 1..726: mol_type = other DNA
atggacttcaagagcaactccgccgtggcctggtccaacaagtccgatttcgcctgcgccaacgccttcaacaacagcattatccccgaggacacattcttcccaagccccgagagcagctgcgacgtgaagctggtggaaaagagcttcgagacagacaccaacctgaacttccagaacctgagcgtgatcggcttcagaatcctgctgctgaaagtggccggctttaacctgctgatgaccctgcggctgtggtccagcaaacggggcagaaagaaactcctgtatatattcaaacaaccatttatgagaccagtacaaactactcaagaggaagatggctgtagctgccgatttccagaagaagaagaaggaggatgtgaactgagagtgaagttcagcagaagcgccgacgcccctgcctaccagcagggacagaaccaactgtacaacgagctgaacctgggcagacgggaagagtacgacgtgctggacaagcggagaggcagggaccctgagatgggcggaaagccccagcggagaaagaacccccaggaaggactgtataacgaactccagaaagacaagatggccgaagcctacagcgagatcggcatgaagggcgagcggagaagaggcaagggccacgatggcctgtaccagggcctgagcaccgccaccaaggacacctatgacgccctgcacatgcaggccctgcctccaaga

SEQ ID NO: 26915 - DNA, 723 bp, synthetic construct
  source 1..723: mol_type = other DNA
gacttcaagagcaactccgccgtggcctggtccaacaagtccgatttcgcctgcgccaacgccttcaacaacagcattatccccgaggacacattcttcccaagccccgagagcagctgcgacgtgaagctggtggaaaagagcttcgagacagacaccaacctgaacttccagaacctgagcgtgatcggcttcagaatcctgctgctgaaagtggccggctttaacctgctgatgaccctgcggctgtggtccagcaaacggggcagaaagaaactcctgtatatattcaaacaaccatttatgagaccagtacaaactactcaagaggaagatggctgtagctgccgatttccagaagaagaagaaggaggatgtgaactgagagtgaagttcagcagaagcgccgacgcccctgcctaccagcagggacagaaccaactgtacaacgagctgaacctgggcagacgggaagagtacgacgtgctggacaagcggagaggcagggaccctgagatgggcggaaagccccagcggagaaagaacccccaggaaggactgtataacgaactccagaaagacaagatggccgaagcctacagcgagatcggcatgaagggcgagcggagaagaggcaagggccacgatggcctgtaccagggcctgagcaccgccaccaaggacacctatgacgccctgcacatgcaggccctgcctccaaga

SEQ ID NO: 26916 - DNA, 720 bp, synthetic construct
  source 1..720: mol_type = other DNA
ttcaagagcaactccgccgtggcctggtccaacaagtccgatttcgcctgcgccaacgccttcaacaacagcattatccccgaggacacattcttcccaagccccgagagcagctgcgacgtgaagctggtggaaaagagcttcgagacagacaccaacctgaacttccagaacctgagcgtgatcggcttcagaatcctgctgctgaaagtggccggctttaacctgctgatgaccctgcggctgtggtccagcaaacggggcagaaagaaactcctgtatatattcaaacaaccatttatgagaccagtacaaactactcaagaggaagatggctgtagctgccgatttccagaagaagaagaaggaggatgtgaactgagagtgaagttcagcagaagcgccgacgcccctgcctaccagcagggacagaaccaactgtacaacgagctgaacctgggcagacgggaagagtacgacgtgctggacaagcggagaggcagggaccctgagatgggcggaaagccccagcggagaaagaacccccaggaaggactgtataacgaactccagaaagacaagatggccgaagcctacagcgagatcggcatgaagggcgagcggagaagaggcaagggccacgatggcctgtaccagggcctgagcaccgccaccaaggacacctatgacgccctgcacatgcaggccctgcctccaaga

SEQ ID NO: 26917 - DNA, 717 bp, synthetic construct
  source 1..717: mol_type = other DNA
aagagcaactccgccgtggcctggtccaacaagtccgatttcgcctgcgccaacgccttcaacaacagcattatccccgaggacacattcttcccaagccccgagagcagctgcgacgtgaagctggtggaaaagagcttcgagacagacaccaacctgaacttccagaacctgagcgtgatcggcttcagaatcctgctgctgaaagtggccggctttaacctgctgatgaccctgcggctgtggtccagcaaacggggcagaaagaaactcctgtatatattcaaacaaccatttatgagaccagtacaaactactcaagaggaagatggctgtagctgccgatttccagaagaagaagaaggaggatgtgaactgagagtgaagttcagcagaagcgccgacgcccctgcctaccagcagggacagaaccaactgtacaacgagctgaacctgggcagacgggaagagtacgacgtgctggacaagcggagaggcagggaccctgagatgggcggaaagccccagcggagaaagaacccccaggaaggactgtataacgaactccagaaagacaagatggccgaagcctacagcgagatcggcatgaagggcgagcggagaagaggcaagggccacgatggcctgtaccagggcctgagcaccgccaccaaggacacctatgacgccctgcacatgcaggccctgcctccaaga

SEQ ID NO: 26918 - DNA, 714 bp, synthetic construct
  source 1..714: mol_type = other DNA
agcaactccgccgtggcctggtccaacaagtccgatttcgcctgcgccaacgccttcaacaacagcattatccccgaggacacattcttcccaagccccgagagcagctgcgacgtgaagctggtggaaaagagcttcgagacagacaccaacctgaacttccagaacctgagcgtgatcggcttcagaatcctgctgctgaaagtggccggctttaacctgctgatgaccctgcggctgtggtccagcaaacggggcagaaagaaactcctgtatatattcaaacaaccatttatgagaccagtacaaactactcaagaggaagatggctgtagctgccgatttccagaagaagaagaaggaggatgtgaactgagagtgaagttcagcagaagcgccgacgcccctgcctaccagcagggacagaaccaactgtacaacgagctgaacctgggcagacgggaagagtacgacgtgctggacaagcggagaggcagggaccctgagatgggcggaaagccccagcggagaaagaacccccaggaaggactgtataacgaactccagaaagacaagatggccgaagcctacagcgagatcggcatgaagggcgagcggagaagaggcaagggccacgatggcctgtaccagggcctgagcaccgccaccaaggacacctatgacgccctgcacatgcaggccctgcctccaaga

SEQ ID NO: 26919 - DNA, 711 bp, synthetic construct
  source 1..711: mol_type = other DNA
aactccgccgtggcctggtccaacaagtccgatttcgcctgcgccaacgccttcaacaacagcattatccccgaggacacattcttcccaagccccgagagcagctgcgacgtgaagctggtggaaaagagcttcgagacagacaccaacctgaacttccagaacctgagcgtgatcggcttcagaatcctgctgctgaaagtggccggctttaacctgctgatgaccctgcggctgtggtccagcaaacggggcagaaagaaactcctgtatatattcaaacaaccatttatgagaccagtacaaactactcaagaggaagatggctgtagctgccgatttccagaagaagaagaaggaggatgtgaactgagagtgaagttcagcagaagcgccgacgcccctgcctaccagcagggacagaaccaactgtacaacgagctgaacctgggcagacgggaagagtacgacgtgctggacaagcggagaggcagggaccctgagatgggcggaaagccccagcggagaaagaacccccaggaaggactgtataacgaactccagaaagacaagatggccgaagcctacagcgagatcggcatgaagggcgagcggagaagaggcaagggccacgatggcctgtaccagggcctgagcaccgccaccaaggacacctatgacgccctgcacatgcaggccctgcctccaaga

SEQ ID NO: 26920 - DNA, 708 bp, synthetic construct
  source 1..708: mol_type = other DNA
tccgccgtggcctggtccaacaagtccgatttcgcctgcgccaacgccttcaacaacagcattatccccgaggacacattcttcccaagccccgagagcagctgcgacgtgaagctggtggaaaagagcttcgagacagacaccaacctgaacttccagaacctgagcgtgatcggcttcagaatcctgctgctgaaagtggccggctttaacctgctgatgaccctgcggctgtggtccagcaaacggggcagaaagaaactcctgtatatattcaaacaaccatttatgagaccagtacaaactactcaagaggaagatggctgtagctgccgatttccagaagaagaagaaggaggatgtgaactgagagtgaagttcagcagaagcgccgacgcccctgcctaccagcagggacagaaccaactgtacaacgagctgaacctgggcagacgggaagagtacgacgtgctggacaagcggagaggcagggaccctgagatgggcggaaagccccagcggagaaagaacccccaggaaggactgtataacgaactccagaaagacaagatggccgaagcctacagcgagatcggcatgaagggcgagcggagaagaggcaagggccacgatggcctgtaccagggcctgagcaccgccaccaaggacacctatgacgccctgcacatgcaggccctgcctccaaga

SEQ ID NO: 26921 - DNA, 705 bp, synthetic construct
  source 1..705: mol_type = other DNA
gccgtggcctggtccaacaagtccgatttcgcctgcgccaacgccttcaacaacagcattatccccgaggacacattcttcccaagccccgagagcagctgcgacgtgaagctggtggaaaagagcttcgagacagacaccaacctgaacttccagaacctgagcgtgatcggcttcagaatcctgctgctgaaagtggccggctttaacctgctgatgaccctgcggctgtggtccagcaaacggggcagaaagaaactcctgtatatattcaaacaaccatttatgagaccagtacaaactactcaagaggaagatggctgtagctgccgatttccagaagaagaagaaggaggatgtgaactgagagtgaagttcagcagaagcgccgacgcccctgcctaccagcagggacagaaccaactgtacaacgagctgaacctgggcagacgggaagagtacgacgtgctggacaagcggagaggcagggaccctgagatgggcggaaagccccagcggagaaagaacccccaggaaggactgtataacgaactccagaaagacaagatggccgaagcctacagcgagatcggcatgaagggcgagcggagaagaggcaagggccacgatggcctgtaccagggcctgagcaccgccaccaaggacacctatgacgccctgcacatgcaggccctgcctccaaga

SEQ ID NO: 26922 - DNA, 702 bp, synthetic construct
  source 1..702: mol_type = other DNA
gtggcctggtccaacaagtccgatttcgcctgcgccaacgccttcaacaacagcattatccccgaggacacattcttcccaagccccgagagcagctgcgacgtgaagctggtggaaaagagcttcgagacagacaccaacctgaacttccagaacctgagcgtgatcggcttcagaatcctgctgctgaaagtggccggctttaacctgctgatgaccctgcggctgtggtccagcaaacggggcagaaagaaactcctgtatatattcaaacaaccatttatgagaccagtacaaactactcaagaggaagatggctgtagctgccgatttccagaagaagaagaaggaggatgtgaactgagagtgaagttcagcagaagcgccgacgcccctgcctaccagcagggacagaaccaactgtacaacgagctgaacctgggcagacgggaagagtacgacgtgctggacaagcggagaggcagggaccctgagatgggcggaaagccccagcggagaaagaacccccaggaaggactgtataacgaactccagaaagacaagatggccgaagcctacagcgagatcggcatgaagggcgagcggagaagaggcaagggccacgatggcctgtaccagggcctgagcaccgccaccaaggacacctatgacgccctgcacatgcaggccctgcctccaaga

SEQ ID NO: 26923 - DNA, 699 bp, synthetic construct
  source 1..699: mol_type = other DNA
gcctggtccaacaagtccgatttcgcctgcgccaacgccttcaacaacagcattatccccgaggacacattcttcccaagccccgagagcagctgcgacgtgaagctggtggaaaagagcttcgagacagacaccaacctgaacttccagaacctgagcgtgatcggcttcagaatcctgctgctgaaagtggccggctttaacctgctgatgaccctgcggctgtggtccagcaaacggggcagaaagaaactcctgtatatattcaaacaaccatttatgagaccagtacaaactactcaagaggaagatggctgtagctgccgatttccagaagaagaagaaggaggatgtgaactgagagtgaagttcagcagaagcgccgacgcccctgcctaccagcagggacagaaccaactgtacaacgagctgaacctgggcagacgggaagagtacgacgtgctggacaagcggagaggcagggaccctgagatgggcggaaagccccagcggagaaagaacccccaggaaggactgtataacgaactccagaaagacaagatggccgaagcctacagcgagatcggcatgaagggcgagcggagaagaggcaagggccacgatggcctgtaccagggcctgagcaccgccaccaaggacacctatgacgccctgcacatgcaggccctgcctccaaga

SEQ ID NO: 26924 - DNA, 696 bp, synthetic construct
  source 1..696: mol_type = other DNA
tggtccaacaagtccgatttcgcctgcgccaacgccttcaacaacagcattatccccgaggacacattcttcccaagccccgagagcagctgcgacgtgaagctggtggaaaagagcttcgagacagacaccaacctgaacttccagaacctgagcgtgatcggcttcagaatcctgctgctgaaagtggccggctttaacctgctgatgaccctgcggctgtggtccagcaaacggggcagaaagaaactcctgtatatattcaaacaaccatttatgagaccagtacaaactactcaagaggaagatggctgtagctgccgatttccagaagaagaagaaggaggatgtgaactgagagtgaagttcagcagaagcgccgacgcccctgcctaccagcagggacagaaccaactgtacaacgagctgaacctgggcagacgggaagagtacgacgtgctggacaagcggagaggcagggaccctgagatgggcggaaagccccagcggagaaagaacccccaggaaggactgtataacgaactccagaaagacaagatggccgaagcctacagcgagatcggcatgaagggcgagcggagaagaggcaagggccacgatggcctgtaccagggcctgagcaccgccaccaaggacacctatgacgccctgcacatgcaggccctgcctccaaga

SEQ ID NO: 26925 - DNA, 693 bp, synthetic construct
  source 1..693: mol_type = other DNA
tccaacaagtccgatttcgcctgcgccaacgccttcaacaacagcattatccccgaggacacattcttcccaagccccgagagcagctgcgacgtgaagctggtggaaaagagcttcgagacagacaccaacctgaacttccagaacctgagcgtgatcggcttcagaatcctgctgctgaaagtggccggctttaacctgctgatgaccctgcggctgtggtccagcaaacggggcagaaagaaactcctgtatatattcaaacaaccatttatgagaccagtacaaactactcaagaggaagatggctgtagctgccgatttccagaagaagaagaaggaggatgtgaactgagagtgaagttcagcagaagcgccgacgcccctgcctaccagcagggacagaaccaactgtacaacgagctgaacctgggcagacgggaagagtacgacgtgctggacaagcggagaggcagggaccctgagatgggcggaaagccccagcggagaaagaacccccaggaaggactgtataacgaactccagaaagacaagatggccgaagcctacagcgagatcggcatgaagggcgagcggagaagaggcaagggccacgatggcctgtaccagggcctgagcaccgccaccaaggacacctatgacgccctgcacatgcaggccctgcctccaaga

SEQ ID NO: 26926 - DNA, 690 bp, synthetic construct
  source 1..690: mol_type = other DNA
aacaagtccgatttcgcctgcgccaacgccttcaacaacagcattatccccgaggacacattcttcccaagccccgagagcagctgcgacgtgaagctggtggaaaagagcttcgagacagacaccaacctgaacttccagaacctgagcgtgatcggcttcagaatcctgctgctgaaagtggccggctttaacctgctgatgaccctgcggctgtggtccagcaaacggggcagaaagaaactcctgtatatattcaaacaaccatttatgagaccagtacaaactactcaagaggaagatggctgtagctgccgatttccagaagaagaagaaggaggatgtgaactgagagtgaagttcagcagaagcgccgacgcccctgcctaccagcagggacagaaccaactgtacaacgagctgaacctgggcagacgggaagagtacgacgtgctggacaagcggagaggcagggaccctgagatgggcggaaagccccagcggagaaagaacccccaggaaggactgtataacgaactccagaaagacaagatggccgaagcctacagcgagatcggcatgaagggcgagcggagaagaggcaagggccacgatggcctgtaccagggcctgagcaccgccaccaaggacacctatgacgccctgcacatgcaggccctgcctccaaga

SEQ ID NO: 26927 - DNA, 687 bp, synthetic construct
  source 1..687: mol_type = other DNA
aagtccgatttcgcctgcgccaacgccttcaacaacagcattatccccgaggacacattcttcccaagccccgagagcagctgcgacgtgaagctggtggaaaagagcttcgagacagacaccaacctgaacttccagaacctgagcgtgatcggcttcagaatcctgctgctgaaagtggccggctttaacctgctgatgaccctgcggctgtggtccagcaaacggggcagaaagaaactcctgtatatattcaaacaaccatttatgagaccagtacaaactactcaagaggaagatggctgtagctgccgatttccagaagaagaagaaggaggatgtgaactgagagtgaagttcagcagaagcgccgacgcccctgcctaccagcagggacagaaccaactgtacaacgagctgaacctgggcagacgggaagagtacgacgtgctggacaagcggagaggcagggaccctgagatgggcggaaagccccagcggagaaagaacccccaggaaggactgtataacgaactccagaaagacaagatggccgaagcctacagcgagatcggcatgaagggcgagcggagaagaggcaagggccacgatggcctgtaccagggcctgagcaccgccaccaaggacacctatgacgccctgcacatgcaggccctgcctccaaga

SEQ ID NO: 26928 - DNA, 684 bp, synthetic construct
  source 1..684: mol_type = other DNA
tccgatttcgcctgcgccaacgccttcaacaacagcattatccccgaggacacattcttcccaagccccgagagcagctgcgacgtgaagctggtggaaaagagcttcgagacagacaccaacctgaacttccagaacctgagcgtgatcggcttcagaatcctgctgctgaaagtggccggctttaacctgctgatgaccctgcggctgtggtccagcaaacggggcagaaagaaactcctgtatatattcaaacaaccatttatgagaccagtacaaactactcaagaggaagatggctgtagctgccgatttccagaagaagaagaaggaggatgtgaactgagagtgaagttcagcagaagcgccgacgcccctgcctaccagcagggacagaaccaactgtacaacgagctgaacctgggcagacgggaagagtacgacgtgctggacaagcggagaggcagggaccctgagatgggcggaaagccccagcggagaaagaacccccaggaaggactgtataacgaactccagaaagacaagatggccgaagcctacagcgagatcggcatgaagggcgagcggagaagaggcaagggccacgatggcctgtaccagggcctgagcaccgccaccaaggacacctatgacgccctgcacatgcaggccctgcctccaaga

SEQ ID NO: 26929 - DNA, 681 bp, synthetic construct
  source 1..681: mol_type = other DNA
gatttcgcctgcgccaacgccttcaacaacagcattatccccgaggacacattcttcccaagccccgagagcagctgcgacgtgaagctggtggaaaagagcttcgagacagacaccaacctgaacttccagaacctgagcgtgatcggcttcagaatcctgctgctgaaagtggccggctttaacctgctgatgaccctgcggctgtggtccagcaaacggggcagaaagaaactcctgtatatattcaaacaaccatttatgagaccagtacaaactactcaagaggaagatggctgtagctgccgatttccagaagaagaagaaggaggatgtgaactgagagtgaagttcagcagaagcgccgacgcccctgcctaccagcagggacagaaccaactgtacaacgagctgaacctgggcagacgggaagagtacgacgtgctggacaagcggagaggcagggaccctgagatgggcggaaagccccagcggagaaagaacccccaggaaggactgtataacgaactccagaaagacaagatggccgaagcctacagcgagatcggcatgaagggcgagcggagaagaggcaagggccacgatggcctgtaccagggcctgagcaccgccaccaaggacacctatgacgccctgcacatgcaggccctgcctccaaga

SEQ ID NO: 26930 - DNA, 678 bp, synthetic construct
  source 1..678: mol_type = other DNA
ttcgcctgcgccaacgccttcaacaacagcattatccccgaggacacattcttcccaagccccgagagcagctgcgacgtgaagctggtggaaaagagcttcgagacagacaccaacctgaacttccagaacctgagcgtgatcggcttcagaatcctgctgctgaaagtggccggctttaacctgctgatgaccctgcggctgtggtccagcaaacggggcagaaagaaactcctgtatatattcaaacaaccatttatgagaccagtacaaactactcaagaggaagatggctgtagctgccgatttccagaagaagaagaaggaggatgtgaactgagagtgaagttcagcagaagcgccgacgcccctgcctaccagcagggacagaaccaactgtacaacgagctgaacctgggcagacgggaagagtacgacgtgctggacaagcggagaggcagggaccctgagatgggcggaaagccccagcggagaaagaacccccaggaaggactgtataacgaactccagaaagacaagatggccgaagcctacagcgagatcggcatgaagggcgagcggagaagaggcaagggccacgatggcctgtaccagggcctgagcaccgccaccaaggacacctatgacgccctgcacatgcaggccctgcctccaaga

SEQ ID NO: 26931 - DNA, 675 bp, synthetic construct
  source 1..675: mol_type = other DNA
gcctgcgccaacgccttcaacaacagcattatccccgaggacacattcttcccaagccccgagagcagctgcgacgtgaagctggtggaaaagagcttcgagacagacaccaacctgaacttccagaacctgagcgtgatcggcttcagaatcctgctgctgaaagtggccggctttaacctgctgatgaccctgcggctgtggtccagcaaacggggcagaaagaaactcctgtatatattcaaacaaccatttatgagaccagtacaaactactcaagaggaagatggctgtagctgccgatttccagaagaagaagaaggaggatgtgaactgagagtgaagttcagcagaagcgccgacgcccctgcctaccagcagggacagaaccaactgtacaacgagctgaacctgggcagacgggaagagtacgacgtgctggacaagcggagaggcagggaccctgagatgggcggaaagccccagcggagaaagaacccccaggaaggactgtataacgaactccagaaagacaagatggccgaagcctacagcgagatcggcatgaagggcgagcggagaagaggcaagggccacgatggcctgtaccagggcctgagcaccgccaccaaggacacctatgacgccctgcacatgcaggccctgcctccaaga

SEQ ID NO: 26932 - DNA, 672 bp, synthetic construct
  source 1..672: mol_type = other DNA
tgcgccaacgccttcaacaacagcattatccccgaggacacattcttcccaagccccgagagcagctgcgacgtgaagctggtggaaaagagcttcgagacagacaccaacctgaacttccagaacctgagcgtgatcggcttcagaatcctgctgctgaaagtggccggctttaacctgctgatgaccctgcggctgtggtccagcaaacggggcagaaagaaactcctgtatatattcaaacaaccatttatgagaccagtacaaactactcaagaggaagatggctgtagctgccgatttccagaagaagaagaaggaggatgtgaactgagagtgaagttcagcagaagcgccgacgcccctgcctaccagcagggacagaaccaactgtacaacgagctgaacctgggcagacgggaagagtacgacgtgctggacaagcggagaggcagggaccctgagatgggcggaaagccccagcggagaaagaacccccaggaaggactgtataacgaactccagaaagacaagatggccgaagcctacagcgagatcggcatgaagggcgagcggagaagaggcaagggccacgatggcctgtaccagggcctgagcaccgccaccaaggacacctatgacgccctgcacatgcaggccctgcctccaaga

SEQ ID NO: 26933 - DNA, 669 bp, synthetic construct
  source 1..669: mol_type = other DNA
gccaacgccttcaacaacagcattatccccgaggacacattcttcccaagccccgagagcagctgcgacgtgaagctggtggaaaagagcttcgagacagacaccaacctgaacttccagaacctgagcgtgatcggcttcagaatcctgctgctgaaagtggccggctttaacctgctgatgaccctgcggctgtggtccagcaaacggggcagaaagaaactcctgtatatattcaaacaaccatttatgagaccagtacaaactactcaagaggaagatggctgtagctgccgatttccagaagaagaagaaggaggatgtgaactgagagtgaagttcagcagaagcgccgacgcccctgcctaccagcagggacagaaccaactgtacaacgagctgaacctgggcagacgggaagagtacgacgtgctggacaagcggagaggcagggaccctgagatgggcggaaagccccagcggagaaagaacccccaggaaggactgtataacgaactccagaaagacaagatggccgaagcctacagcgagatcggcatgaagggcgagcggagaagaggcaagggccacgatggcctgtaccagggcctgagcaccgccaccaaggacacctatgacgccctgcacatgcaggccctgcctccaaga

SEQ ID NO: 26934 - DNA, 666 bp, synthetic construct
  source 1..666: mol_type = other DNA
aacgccttcaacaacagcattatccccgaggacacattcttcccaagccccgagagcagctgcgacgtgaagctggtggaaaagagcttcgagacagacaccaacctgaacttccagaacctgagcgtgatcggcttcagaatcctgctgctgaaagtggccggctttaacctgctgatgaccctgcggctgtggtccagcaaacggggcagaaagaaactcctgtatatattcaaacaaccatttatgagaccagtacaaactactcaagaggaagatggctgtagctgccgatttccagaagaagaagaaggaggatgtgaactgagagtgaagttcagcagaagcgccgacgcccctgcctaccagcagggacagaaccaactgtacaacgagctgaacctgggcagacgggaagagtacgacgtgctggacaagcggagaggcagggaccctgagatgggcggaaagccccagcggagaaagaacccccaggaaggactgtataacgaactccagaaagacaagatggccgaagcctacagcgagatcggcatgaagggcgagcggagaagaggcaagggccacgatggcctgtaccagggcctgagcaccgccaccaaggacacctatgacgccctgcacatgcaggccctgcctccaaga

SEQ ID NO: 26935 - DNA, 663 bp, synthetic construct
  source 1..663: mol_type = other DNA
gccttcaacaacagcattatccccgaggacacattcttcccaagccccgagagcagctgcgacgtgaagctggtggaaaagagcttcgagacagacaccaacctgaacttccagaacctgagcgtgatcggcttcagaatcctgctgctgaaagtggccggctttaacctgctgatgaccctgcggctgtggtccagcaaacggggcagaaagaaactcctgtatatattcaaacaaccatttatgagaccagtacaaactactcaagaggaagatggctgtagctgccgatttccagaagaagaagaaggaggatgtgaactgagagtgaagttcagcagaagcgccgacgcccctgcctaccagcagggacagaaccaactgtacaacgagctgaacctgggcagacgggaagagtacgacgtgctggacaagcggagaggcagggaccctgagatgggcggaaagccccagcggagaaagaacccccaggaaggactgtataacgaactccagaaagacaagatggccgaagcctacagcgagatcggcatgaagggcgagcggagaagaggcaagggccacgatggcctgtaccagggcctgagcaccgccaccaaggacacctatgacgccctgcacatgcaggccctgcctccaaga

SEQ ID NO: 26936 - DNA, 660 bp, synthetic construct
  source 1..660: mol_type = other DNA
ttcaacaacagcattatccccgaggacacattcttcccaagccccgagagcagctgcgacgtgaagctggtggaaaagagcttcgagacagacaccaacctgaacttccagaacctgagcgtgatcggcttcagaatcctgctgctgaaagtggccggctttaacctgctgatgaccctgcggctgtggtccagcaaacggggcagaaagaaactcctgtatatattcaaacaaccatttatgagaccagtacaaactactcaagaggaagatggctgtagctgccgatttccagaagaagaagaaggaggatgtgaactgagagtgaagttcagcagaagcgccgacgcccctgcctaccagcagggacagaaccaactgtacaacgagctgaacctgggcagacgggaagagtacgacgtgctggacaagcggagaggcagggaccctgagatgggcggaaagccccagcggagaaagaacccccaggaaggactgtataacgaactccagaaagacaagatggccgaagcctacagcgagatcggcatgaagggcgagcggagaagaggcaagggccacgatggcctgtaccagggcctgagcaccgccaccaaggacacctatgacgccctgcacatgcaggccctgcctccaaga

SEQ ID NO: 26937 - DNA, 657 bp, synthetic construct
  source 1..657: mol_type = other DNA
aacaacagcattatccccgaggacacattcttcccaagccccgagagcagctgcgacgtgaagctggtggaaaagagcttcgagacagacaccaacctgaacttccagaacctgagcgtgatcggcttcagaatcctgctgctgaaagtggccggctttaacctgctgatgaccctgcggctgtggtccagcaaacggggcagaaagaaactcctgtatatattcaaacaaccatttatgagaccagtacaaactactcaagaggaagatggctgtagctgccgatttccagaagaagaagaaggaggatgtgaactgagagtgaagttcagcagaagcgccgacgcccctgcctaccagcagggacagaaccaactgtacaacgagctgaacctgggcagacgggaagagtacgacgtgctggacaagcggagaggcagggaccctgagatgggcggaaagccccagcggagaaagaacccccaggaaggactgtataacgaactccagaaagacaagatggccgaagcctacagcgagatcggcatgaagggcgagcggagaagaggcaagggccacgatggcctgtaccagggcctgagcaccgccaccaaggacacctatgacgccctgcacatgcaggccctgcctccaaga

SEQ ID NO: 26938 - DNA, 654 bp, synthetic construct
  source 1..654: mol_type = other DNA
aacagcattatccccgaggacacattcttcccaagccccgagagcagctgcgacgtgaagctggtggaaaagagcttcgagacagacaccaacctgaacttccagaacctgagcgtgatcggcttcagaatcctgctgctgaaagtggccggctttaacctgctgatgaccctgcggctgtggtccagcaaacggggcagaaagaaactcctgtatatattcaaacaaccatttatgagaccagtacaaactactcaagaggaagatggctgtagctgccgatttccagaagaagaagaaggaggatgtgaactgagagtgaagttcagcagaagcgccgacgcccctgcctaccagcagggacagaaccaactgtacaacgagctgaacctgggcagacgggaagagtacgacgtgctggacaagcggagaggcagggaccctgagatgggcggaaagccccagcggagaaagaacccccaggaaggactgtataacgaactccagaaagacaagatggccgaagcctacagcgagatcggcatgaagggcgagcggagaagaggcaagggccacgatggcctgtaccagggcctgagcaccgccaccaaggacacctatgacgccctgcacatgcaggccctgcctccaaga

SEQ ID NO: 26939 - DNA, 651 bp, synthetic construct
  source 1..651: mol_type = other DNA
agcattatccccgaggacacattcttcccaagccccgagagcagctgcgacgtgaagctggtggaaaagagcttcgagacagacaccaacctgaacttccagaacctgagcgtgatcggcttcagaatcctgctgctgaaagtggccggctttaacctgctgatgaccctgcggctgtggtccagcaaacggggcagaaagaaactcctgtatatattcaaacaaccatttatgagaccagtacaaactactcaagaggaagatggctgtagctgccgatttccagaagaagaagaaggaggatgtgaactgagagtgaagttcagcagaagcgccgacgcccctgcctaccagcagggacagaaccaactgtacaacgagctgaacctgggcagacgggaagagtacgacgtgctggacaagcggagaggcagggaccctgagatgggcggaaagccccagcggagaaagaacccccaggaaggactgtataacgaactccagaaagacaagatggccgaagcctacagcgagatcggcatgaagggcgagcggagaagaggcaagggccacgatggcctgtaccagggcctgagcaccgccaccaaggacacctatgacgccctgcacatgcaggccctgcctccaaga

SEQ ID NO: 26940 - DNA, 648 bp, synthetic construct
  source 1..648: mol_type = other DNA
attatccccgaggacacattcttcccaagccccgagagcagctgcgacgtgaagctggtggaaaagagcttcgagacagacaccaacctgaacttccagaacctgagcgtgatcggcttcagaatcctgctgctgaaagtggccggctttaacctgctgatgaccctgcggctgtggtccagcaaacggggcagaaagaaactcctgtatatattcaaacaaccatttatgagaccagtacaaactactcaagaggaagatggctgtagctgccgatttccagaagaagaagaaggaggatgtgaactgagagtgaagttcagcagaagcgccgacgcccctgcctaccagcagggacagaaccaactgtacaacgagctgaacctgggcagacgggaagagtacgacgtgctggacaagcggagaggcagggaccctgagatgggcggaaagccccagcggagaaagaacccccaggaaggactgtataacgaactccagaaagacaagatggccgaagcctacagcgagatcggcatgaagggcgagcggagaagaggcaagggccacgatggcctgtaccagggcctgagcaccgccaccaaggacacctatgacgccctgcacatgcaggccctgcctccaaga

SEQ ID NO: 26941 - DNA, 645 bp, synthetic construct; identical to SEQ ID NO: 26627
  source 1..645: mol_type = other DNA

SEQ ID NO: 26942 - DNA, 642 bp, synthetic construct
  source 1..642: mol_type = other DNA
cccgaggacacattcttcccaagccccgagagcagctgcgacgtgaagctggtggaaaagagcttcgagacagacaccaacctgaacttccagaacctgagcgtgatcggcttcagaatcctgctgctgaaagtggccggctttaacctgctgatgaccctgcggctgtggtccagcaaacggggcagaaagaaactcctgtatatattcaaacaaccatttatgagaccagtacaaactactcaagaggaagatggctgtagctgccgatttccagaagaagaagaaggaggatgtgaactgagagtgaagttcagcagaagcgccgacgcccctgcctaccagcagggacagaaccaactgtacaacgagctgaacctgggcagacgggaagagtacgacgtgctggacaagcggagaggcagggaccctgagatgggcggaaagccccagcggagaaagaacccccaggaaggactgtataacgaactccagaaagacaagatggccgaagcctacagcgagatcggcatgaagggcgagcggagaagaggcaagggccacgatggcctgtaccagggcctgagcaccgccaccaaggacacctatgacgccctgcacatgcaggccctgcctccaaga

SEQ ID NO: 26943 - DNA, 639 bp, synthetic construct
  source 1..639: mol_type = other DNA
gaggacacattcttcccaagccccgagagcagctgcgacgtgaagctggtggaaaagagcttcgagacagacaccaacctgaacttccagaacctgagcgtgatcggcttcagaatcctgctgctgaaagtggccggctttaacctgctgatgaccctgcggctgtggtccagcaaacggggcagaaagaaactcctgtatatattcaaacaaccatttatgagaccagtacaaactactcaagaggaagatggctgtagctgccgatttccagaagaagaagaaggaggatgtgaactgagagtgaagttcagcagaagcgccgacgcccctgcctaccagcagggacagaaccaactgtacaacgagctgaacctgggcagacgggaagagtacgacgtgctggacaagcggagaggcagggaccctgagatgggcggaaagccccagcggagaaagaacccccaggaaggactgtataacgaactccagaaagacaagatggccgaagcctacagcgagatcggcatgaagggcgagcggagaagaggcaagggccacgatggcctgtaccagggcctgagcaccgccaccaaggacacctatgacgccctgcacatgcaggccctgcctccaaga

SEQ ID NO: 26944 - DNA, 636 bp, synthetic construct
  source 1..636: mol_type = other DNA
gacacattcttcccaagccccgagagcagctgcgacgtgaagctggtggaaaagagcttcgagacagacaccaacctgaacttccagaacctgagcgtgatcggcttcagaatcctgctgctgaaagtggccggctttaacctgctgatgaccctgcggctgtggtccagcaaacggggcagaaagaaactcctgtatatattcaaacaaccatttatgagaccagtacaaactactcaagaggaagatggctgtagctgccgatttccagaagaagaagaaggaggatgtgaactgagagtgaagttcagcagaagcgccgacgcccctgcctaccagcagggacagaaccaactgtacaacgagctgaacctgggcagacgggaagagtacgacgtgctggacaagcggagaggcagggaccctgagatgggcggaaagccccagcggagaaagaacccccaggaaggactgtataacgaactccagaaagacaagatggccgaagcctacagcgagatcggcatgaagggcgagcggagaagaggcaagggccacgatggcctgtaccagggcctgagcaccgccaccaaggacacctatgacgccctgcacatgcaggccctgcctccaaga

SEQ ID NO: 26945 - DNA, 633 bp, synthetic construct
  source 1..633: mol_type = other DNA
acattcttcccaagccccgagagcagctgcgacgtgaagctggtggaaaagagcttcgagacagacaccaacctgaacttccagaacctgagcgtgatcggcttcagaatcctgctgctgaaagtggccggctttaacctgctgatgaccctgcggctgtggtccagcaaacggggcagaaagaaactcctgtatatattcaaacaaccatttatgagaccagtacaaactactcaagaggaagatggctgtagctgccgatttccagaagaagaagaaggaggatgtgaactgagagtgaagttcagcagaagcgccgacgcccctgcctaccagcagggacagaaccaactgtacaacgagctgaacctgggcagacgggaagagtacgacgtgctggacaagcggagaggcagggaccctgagatgggcggaaagccccagcggagaaagaacccccaggaaggactgtataacgaactccagaaagacaagatggccgaagcctacagcgagatcggcatgaagggcgagcggagaagaggcaagggccacgatggcctgtaccagggcctgagcaccgccaccaaggacacctatgacgccctgcacatgcaggccctgcctccaaga

SEQ ID NO: 26946 - DNA, 630 bp, synthetic construct
  source 1..630: mol_type = other DNA
ttcttcccaagccccgagagcagctgcgacgtgaagctggtggaaaagagcttcgagacagacaccaacctgaacttccagaacctgagcgtgatcggcttcagaatcctgctgctgaaagtggccggctttaacctgctgatgaccctgcggctgtggtccagcaaacggggcagaaagaaactcctgtatatattcaaacaaccatttatgagaccagtacaaactactcaagaggaagatggctgtagctgccgatttccagaagaagaagaaggaggatgtgaactgagagtgaagttcagcagaagcgccgacgcccctgcctaccagcagggacagaaccaactgtacaacgagctgaacctgggcagacgggaagagtacgacgtgctggacaagcggagaggcagggaccctgagatgggcggaaagccccagcggagaaagaacccccaggaaggactgtataacgaactccagaaagacaagatggccgaagcctacagcgagatcggcatgaagggcgagcggagaagaggcaagggccacgatggcctgtaccagggcctgagcaccgccaccaaggacacctatgacgccctgcacatgcaggccctgcctccaaga

SEQ ID NO: 26947 - DNA, 627 bp, synthetic construct
  source 1..627: mol_type = other DNA
ttcccaagccccgagagcagctgcgacgtgaagctggtggaaaagagcttcgagacagacaccaacctgaacttccagaacctgagcgtgatcggcttcagaatcctgctgctgaaagtggccggctttaacctgctgatgaccctgcggctgtggtccagcaaacggggcagaaagaaactcctgtatatattcaaacaaccatttatgagaccagtacaaactactcaagaggaagatggctgtagctgccgatttccagaagaagaagaaggaggatgtgaactgagagtgaagttcagcagaagcgccgacgcccctgcctaccagcagggacagaaccaactgtacaacgagctgaacctgggcagacgggaagagtacgacgtgctggacaagcggagaggcagggaccctgagatgggcggaaagccccagcggagaaagaacccccaggaaggactgtataacgaactccagaaagacaagatggccgaagcctacagcgagatcggcatgaagggcgagcggagaagaggcaagggccacgatggcctgtaccagggcctgagcaccgccaccaaggacacctatgacgccctgcacatgcaggccctgcctccaaga

SEQ ID NO: 26948 - DNA, 624 bp, synthetic construct
  source 1..624: mol_type = other DNA
ccaagccccgagagcagctgcgacgtgaagctggtggaaaagagcttcgagacagacaccaacctgaacttccagaacctgagcgtgatcggcttcagaatcctgctgctgaaagtggccggctttaacctgctgatgaccctgcggctgtggtccagcaaacggggcagaaagaaactcctgtatatattcaaacaaccatttatgagaccagtacaaactactcaagaggaagatggctgtagctgccgatttccagaagaagaagaaggaggatgtgaactgagagtgaagttcagcagaagcgccgacgcccctgcctaccagcagggacagaaccaactgtacaacgagctgaacctgggcagacgggaagagtacgacgtgctggacaagcggagaggcagggaccctgagatgggcggaaagccccagcggagaaagaacccccaggaaggactgtataacgaactccagaaagacaagatggccgaagcctacagcgagatcggcatgaagggcgagcggagaagaggcaagggccacgatggcctgtaccagggcctgagcaccgccaccaaggacacctatgacgccctgcacatgcaggccctgcctccaaga

SEQ ID NO: 26949 - DNA, 621 bp, synthetic construct
  source 1..621: mol_type = other DNA
agccccgagagcagctgcgacgtgaagctggtggaaaagagcttcgagacagacaccaacctgaacttccagaacctgagcgtgatcggcttcagaatcctgctgctgaaagtggccggctttaacctgctgatgaccctgcggctgtggtccagcaaacggggcagaaagaaactcctgtatatattcaaacaaccatttatgagaccagtacaaactactcaagaggaagatggctgtagctgccgatttccagaagaagaagaaggaggatgtgaactgagagtgaagttcagcagaagcgccgacgcccctgcctaccagcagggacagaaccaactgtacaacgagctgaacctgggcagacgggaagagtacgacgtgctggacaagcggagaggcagggaccctgagatgggcggaaagccccagcggagaaagaacccccaggaaggactgtataacgaactccagaaagacaagatggccgaagcctacagcgagatcggcatgaagggcgagcggagaagaggcaagggccacgatggcctgtaccagggcctgagcaccgccaccaaggacacctatgacgccctgcacatgcaggccctgcctccaaga

SEQ ID NO: 26950 - DNA, 618 bp, synthetic construct
  source 1..618: mol_type = other DNA
cccgagagcagctgcgacgtgaagctggtggaaaagagcttcgagacagacaccaacctgaacttccagaacctgagcgtgatcggcttcagaatcctgctgctgaaagtggccggctttaacctgctgatgaccctgcggctgtggtccagcaaacggggcagaaagaaactcctgtatatattcaaacaaccatttatgagaccagtacaaactactcaagaggaagatggctgtagctgccgatttccagaagaagaagaaggaggatgtgaactgagagtgaagttcagcagaagcgccgacgcccctgcctaccagcagggacagaaccaactgtacaacgagctgaacctgggcagacgggaagagtacgacgtgctggacaagcggagaggcagggaccctgagatgggcggaaagccccagcggagaaagaacccccaggaaggactgtataacgaactccagaaagacaagatggccgaagcctacagcgagatcggcatgaagggcgagcggagaagaggcaagggccacgatggcctgtaccagggcctgagcaccgccaccaaggacacctatgacgccctgcacatgcaggccctgcctccaaga

SEQ ID NO: 26951 - DNA, 615 bp, synthetic construct; identical to SEQ ID NO: 26628
  source 1..615: mol_type = other DNA

SEQ ID NO: 26952 - DNA, 612 bp, synthetic construct
  source 1..612: mol_type = other DNA
agcagctgcgacgtgaagctggtggaaaagagcttcgagacagacaccaacctgaacttccagaacctgagcgtgatcggcttcagaatcctgctgctgaaagtggccggctttaacctgctgatgaccctgcggctgtggtccagcaaacggggcagaaagaaactcctgtatatattcaaacaaccatttatgagaccagtacaaactactcaagaggaagatggctgtagctgccgatttccagaagaagaagaaggaggatgtgaactgagagtgaagttcagcagaagcgccgacgcccctgcctaccagcagggacagaaccaactgtacaacgagctgaacctgggcagacgggaagagtacgacgtgctggacaagcggagaggcagggaccctgagatgggcggaaagccccagcggagaaagaacccccaggaaggactgtataacgaactccagaaagacaagatggccgaagcctacagcgagatcggcatgaagggcgagcggagaagaggcaagggccacgatggcctgtaccagggcctgagcaccgccaccaaggacacctatgacgccctgcacatgcaggccctgcctccaaga

SEQ ID NO: 26953 - DNA, 609 bp, synthetic construct
  source 1..609: mol_type = other DNA
agctgcgacgtgaagctggtggaaaagagcttcgagacagacaccaacctgaacttccagaacctgagcgtgatcggcttcagaatcctgctgctgaaagtggccggctttaacctgctgatgaccctgcggctgtggtccagcaaacggggcagaaagaaactcctgtatatattcaaacaaccatttatgagaccagtacaaactactcaagaggaagatggctgtagctgccgatttccagaagaagaagaaggaggatgtgaactgagagtgaagttcagcagaagcgccgacgcccctgcctaccagcagggacagaaccaactgtacaacgagctgaacctgggcagacgggaagagtacgacgtgctggacaagcggagaggcagggaccctgagatgggcggaaagccccagcggagaaagaacccccaggaaggactgtataacgaactccagaaagacaagatggccgaagcctacagcgagatcggcatgaagggcgagcggagaagaggcaagggccacgatggcctgtaccagggcctgagcaccgccaccaaggacacctatgacgccctgcacatgcaggccctgcctccaaga

SEQ ID NO: 26954 - DNA, 606 bp, synthetic construct
  source 1..606: mol_type = other DNA
tgcgacgtgaagctggtggaaaagagcttcgagacagacaccaacctgaacttccagaacctgagcgtgatcggcttcagaatcctgctgctgaaagtggccggctttaacctgctgatgaccctgcggctgtggtccagcaaacggggcagaaagaaactcctgtatatattcaaacaaccatttatgagaccagtacaaactactcaagaggaagatggctgtagctgccgatttccagaagaagaagaaggaggatgtgaactgagagtgaagttcagcagaagcgccgacgcccctgcctaccagcagggacagaaccaactgtacaacgagctgaacctgggcagacgggaagagtacgacgtgctggacaagcggagaggcagggaccctgagatgggcggaaagccccagcggagaaagaacccccaggaaggactgtataacgaactccagaaagacaagatggccgaagcctacagcgagatcggcatgaagggcgagcggagaagaggcaagggccacgatggcctgtaccagggcctgagcaccgccaccaaggacacctatgacgccctgcacatgcaggccctgcctccaaga

SEQ ID NO: 26955 - DNA, 603 bp, synthetic construct
  source 1..603: mol_type = other DNA
gacgtgaagctggtggaaaagagcttcgagacagacaccaacctgaacttccagaacctgagcgtgatcggcttcagaatcctgctgctgaaagtggccggctttaacctgctgatgaccctgcggctgtggtccagcaaacggggcagaaagaaactcctgtatatattcaaacaaccatttatgagaccagtacaaactactcaagaggaagatggctgtagctgccgatttccagaagaagaagaaggaggatgtgaactgagagtgaagttcagcagaagcgccgacgcccctgcctaccagcagggacagaaccaactgtacaacgagctgaacctgggcagacgggaagagtacgacgtgctggacaagcggagaggcagggaccctgagatgggcggaaagccccagcggagaaagaacccccaggaaggactgtataacgaactccagaaagacaagatggccgaagcctacagcgagatcggcatgaagggcgagcggagaagaggcaagggccacgatggcctgtaccagggcctgagcaccgccaccaaggacacctatgacgccctgcacatgcaggccctgcctccaaga

SEQ ID NO: 26956 - DNA, 600 bp, synthetic construct
  source 1..600: mol_type = other DNA
gtgaagctggtggaaaagagcttcgagacagacaccaacctgaacttccagaacctgagcgtgatcggcttcagaatcctgctgctgaaagtggccggctttaacctgctgatgaccctgcggctgtggtccagcaaacggggcagaaagaaactcctgtatatattcaaacaaccatttatgagaccagtacaaactactcaagaggaagatggctgtagctgccgatttccagaagaagaagaaggaggatgtgaactgagagtgaagttcagcagaagcgccgacgcccctgcctaccagcagggacagaaccaactgtacaacgagctgaacctgggcagacgggaagagtacgacgtgctggacaagcggagaggcagggaccctgagatgggcggaaagccccagcggagaaagaacccccaggaaggactgtataacgaactccagaaagacaagatggccgaagcctacagcgagatcggcatgaagggcgagcggagaagaggcaagggccacgatggcctgtaccagggcctgagcaccgccaccaaggacacctatgacgccctgcacatgcaggccctgcctccaaga

SEQ ID NO: 26957 - DNA, 597 bp, synthetic construct
  source 1..597: mol_type = other DNA
aagctggtggaaaagagcttcgagacagacaccaacctgaacttccagaacctgagcgtgatcggcttcagaatcctgctgctgaaagtggccggctttaacctgctgatgaccctgcggctgtggtccagcaaacggggcagaaagaaactcctgtatatattcaaacaaccatttatgagaccagtacaaactactcaagaggaagatggctgtagctgccgatttccagaagaagaagaaggaggatgtgaactgagagtgaagttcagcagaagcgccgacgcccctgcctaccagcagggacagaaccaactgtacaacgagctgaacctgggcagacgggaagagtacgacgtgctggacaagcggagaggcagggaccctgagatgggcggaaagccccagcggagaaagaacccccaggaaggactgtataacgaactccagaaagacaagatggccgaagcctacagcgagatcggcatgaagggcgagcggagaagaggcaagggccacgatggcctgtaccagggcctgagcaccgccaccaaggacacctatgacgccctgcacatgcaggccctgcctccaaga

SEQ ID NO: 26958 - DNA, 594 bp, synthetic construct
  source 1..594: mol_type = other DNA
ctggtggaaaagagcttcgagacagacaccaacctgaacttccagaacctgagcgtgatcggcttcagaatcctgctgctgaaagtggccggctttaacctgctgatgaccctgcggctgtggtccagcaaacggggcagaaagaaactcctgtatatattcaaacaaccatttatgagaccagtacaaactactcaagaggaagatggctgtagctgccgatttccagaagaagaagaaggaggatgtgaactgagagtgaagttcagcagaagcgccgacgcccctgcctaccagcagggacagaaccaactgtacaacgagctgaacctgggcagacgggaagagtacgacgtgctggacaagcggagaggcagggaccctgagatgggcggaaagccccagcggagaaagaacccccaggaaggactgtataacgaactccagaaagacaagatggccgaagcctacagcgagatcggcatgaagggcgagcggagaagaggcaagggccacgatggcctgtaccagggcctgagcaccgccaccaaggacacctatgacgccctgcacatgcaggccctgcctccaaga

SEQ ID NO: 26959 - DNA, 591 bp, synthetic construct
  source 1..591: mol_type = other DNA
gtggaaaagagcttcgagacagacaccaacctgaacttccagaacctgagcgtgatcggcttcagaatcctgctgctgaaagtggccggctttaacctgctgatgaccctgcggctgtggtccagcaaacggggcagaaagaaactcctgtatatattcaaacaaccatttatgagaccagtacaaactactcaagaggaagatggctgtagctgccgatttccagaagaagaagaaggaggatgtgaactgagagtgaagttcagcagaagcgccgacgcccctgcctaccagcagggacagaaccaactgtacaacgagctgaacctgggcagacgggaagagtacgacgtgctggacaagcggagaggcagggaccctgagatgggcggaaagccccagcggagaaagaacccccaggaaggactgtataacgaactccagaaagacaagatggccgaagcctacagcgagatcggcatgaagggcgagcggagaagaggcaagggccacgatggcctgtaccagggcctgagcaccgccaccaaggacacctatgacgccctgcacatgcaggccctgcctccaaga

SEQ ID NO: 26960 - DNA, 588 bp, synthetic construct
  source 1..588: mol_type = other DNA
gaaaagagcttcgagacagacaccaacctgaacttccagaacctgagcgtgatcggcttcagaatcctgctgctgaaagtggccggctttaacctgctgatgaccctgcggctgtggtccagcaaacggggcagaaagaaactcctgtatatattcaaacaaccatttatgagaccagtacaaactactcaagaggaagatggctgtagctgccgatttccagaagaagaagaaggaggatgtgaactgagagtgaagttcagcagaagcgccgacgcccctgcctaccagcagggacagaaccaactgtacaacgagctgaacctgggcagacgggaagagtacgacgtgctggacaagcggagaggcagggaccctgagatgggcggaaagccccagcggagaaagaacccccaggaaggactgtataacgaactccagaaagacaagatggccgaagcctacagcgagatcggcatgaagggcgagcggagaagaggcaagggccacgatggcctgtaccagggcctgagcaccgccaccaaggacacctatgacgccctgcacatgcaggccctgcctccaaga

SEQ ID NO: 26961 - DNA, 585 bp, synthetic construct
  source 1..585: mol_type = other DNA
aagagcttcgagacagacaccaacctgaacttccagaacctgagcgtgatcggcttcagaatcctgctgctgaaagtggccggctttaacctgctgatgaccctgcggctgtggtccagcaaacggggcagaaagaaactcctgtatatattcaaacaaccatttatgagaccagtacaaactactcaagaggaagatggctgtagctgccgatttccagaagaagaagaaggaggatgtgaactgagagtgaagttcagcagaagcgccgacgcccctgcctaccagcagggacagaaccaactgtacaacgagctgaacctgggcagacgggaagagtacgacgtgctggacaagcggagaggcagggaccctgagatgggcggaaagccccagcggagaaagaacccccaggaaggactgtataacgaactccagaaagacaagatggccgaagcctacagcgagatcggcatgaagggcgagcggagaagaggcaagggccacgatggcctgtaccagggcctgagcaccgccaccaaggacacctatgacgccctgcacatgcaggccctgcctccaaga

SEQ ID NO: 26962 - DNA, 582 bp, synthetic construct
  source 1..582: mol_type = other DNA
agcttcgagacagacaccaacctgaacttccagaacctgagcgtgatcggcttcagaatcctgctgctgaaagtggccggctttaacctgctgatgaccctgcggctgtggtccagcaaacggggcagaaagaaactcctgtatatattcaaacaaccatttatgagaccagtacaaactactcaagaggaagatggctgtagctgccgatttccagaagaagaagaaggaggatgtgaactgagagtgaagttcagcagaagcgccgacgcccctgcctaccagcagggacagaaccaactgtacaacgagctgaacctgggcagacgggaagagtacgacgtgctggacaagcggagaggcagggaccctgagatgggcggaaagccccagcggagaaagaacccccaggaaggactgtataacgaactccagaaagacaagatggccgaagcctacagcgagatcggcatgaagggcgagcggagaagaggcaagggccacgatggcctgtaccagggcctgagcaccgccaccaaggacacctatgacgccctgcacatgcaggccctgcctccaaga

SEQ ID NO: 26963 - DNA, 1002 bp, synthetic construct; identical to SEQ ID NO: 26598
  source 1..1002: mol_type = other DNA

SEQ ID NO: 26964 - DNA, 999 bp, synthetic construct
  source 1..999: mol_type = other DNA
gacctgaagaacgtgttcccacctgaggtggccgtgttcgagcctagcgaggccgagatcagccacacccagaaagccaccctcgtgtgcctggctaccggcttctaccccgaccatgtggaactgtcttggtgggtcaacggcaaagaggtgcacagcggcgtgtgtaccgacccccagccactgaaagaacagcccgccctgaacgacagccggtactgcctgagcagcagactgagagtgtccgccaccttctggcagaacccccggaaccacttcagatgccaggtgcagttctacggcctgagcgagaacgacgagtggacccaggacagagccaagcccgtgacccagatcgtgtctgccgaagcctggggcagagccgattgcggctttaccagcgagagctaccagcagggcgtgctgagcgccaccatcctgtacgagatcctgctgggcaaggccaccctgtacgccgtgctggtgtctgccctggtgctgatggctatggtcaagcggaaggacagccggggaaaacggggcagaaagaaactcctgtatatattcaaacaaccatttatgagaccagtacaaactactcaagaggaagatggctgtagctgccgatttccagaagaagaagaaggaggatgtgaactgagagtgaagttcagcagaagcgccgacgcccctgcctaccagcagggacagaaccaactgtacaacgagctgaacctgggcagacgggaagagtacgacgtgctggacaagcggagaggcagggaccctgagatgggcggaaagccccagcggagaaagaacccccaggaaggactgtataacgaactccagaaagacaagatggccgaagcctacagcgagatcggcatgaagggcgagcggagaagaggcaagggccacgatggcctgtaccagggcctgagcaccgccaccaaggacacctatgacgccctgcacatgcaggccctgcctccaaga

SEQ ID NO: 26965 - DNA, 996 bp, synthetic construct
  source 1..996: mol_type = other DNA
ctgaagaacgtgttcccacctgaggtggccgtgttcgagcctagcgaggccgagatcagccacacccagaaagccaccctcgtgtgcctggctaccggcttctaccccgaccatgtggaactgtcttggtgggtcaacggcaaagaggtgcacagcggcgtgtgtaccgacccccagccactgaaagaacagcccgccctgaacgacagccggtactgcctgagcagcagactgagagtgtccgccaccttctggcagaacccccggaaccacttcagatgccaggtgcagttctacggcctgagcgagaacgacgagtggacccaggacagagccaagcccgtgacccagatcgtgtctgccgaagcctggggcagagccgattgcggctttaccagcgagagctaccagcagggcgtgctgagcgccaccatcctgtacgagatcctgctgggcaaggccaccctgtacgccgtgctggtgtctgccctggtgctgatggctatggtcaagcggaaggacagccggggaaaacggggcagaaagaaactcctgtatatattcaaacaaccatttatgagaccagtacaaactactcaagaggaagatggctgtagctgccgatttccagaagaagaagaaggaggatgtgaactgagagtgaagttcagcagaagcgccgacgcccctgcctaccagcagggacagaaccaactgtacaacgagctgaacctgggcagacgggaagagtacgacgtgctggacaagcggagaggcagggaccctgagatgggcggaaagccccagcggagaaagaacccccaggaaggactgtataacgaactccagaaagacaagatggccgaagcctacagcgagatcggcatgaagggcgagcggagaagaggcaagggccacgatggcctgtaccagggcctgagcaccgccaccaaggacacctatgacgccctgcacatgcaggccctgcctccaaga

SEQ ID NO: 26966 - DNA, 993 bp, synthetic construct
  source 1..993: mol_type = other DNA
aagaacgtgttcccacctgaggtggccgtgttcgagcctagcgaggccgagatcagccacacccagaaagccaccctcgtgtgcctggctaccggcttctaccccgaccatgtggaactgtcttggtgggtcaacggcaaagaggtgcacagcggcgtgtgtaccgacccccagccactgaaagaacagcccgccctgaacgacagccggtactgcctgagcagcagactgagagtgtccgccaccttctggcagaacccccggaaccacttcagatgccaggtgcagttctacggcctgagcgagaacgacgagtggacccaggacagagccaagcccgtgacccagatcgtgtctgccgaagcctggggcagagccgattgcggctttaccagcgagagctaccagcagggcgtgctgagcgccaccatcctgtacgagatcctgctgggcaaggccaccctgtacgccgtgctggtgtctgccctggtgctgatggctatggtcaagcggaaggacagccggggaaaacggggcagaaagaaactcctgtatatattcaaacaaccatttatgagaccagtacaaactactcaagaggaagatggctgtagctgccgatttccagaagaagaagaaggaggatgtgaactgagagtgaagttcagcagaagcgccgacgcccctgcctaccagcagggacagaaccaactgtacaacgagctgaacctgggcagacgggaagagtacgacgtgctggacaagcggagaggcagggaccctgagatgggcggaaagccccagcggagaaagaacccccaggaaggactgtataacgaactccagaaagacaagatggccgaagcctacagcgagatcggcatgaagggcgagcggagaagaggcaagggccacgatggcctgtaccagggcctgagcaccgccaccaaggacacctatgacgccctgcacatgcaggccctgcctccaaga

SEQ ID NO: 26967 - DNA, 990 bp, synthetic construct
  source 1..990: mol_type = other DNA
aacgtgttcccacctgaggtggccgtgttcgagcctagcgaggccgagatcagccacacccagaaagccaccctcgtgtgcctggctaccggcttctaccccgaccatgtggaactgtcttggtgggtcaacggcaaagaggtgcacagcggcgtgtgtaccgacccccagccactgaaagaacagcccgccctgaacgacagccggtactgcctgagcagcagactgagagtgtccgccaccttctggcagaacccccggaaccacttcagatgccaggtgcagttctacggcctgagcgagaacgacgagtggacccaggacagagccaagcccgtgacccagatcgtgtctgccgaagcctggggcagagccgattgcggctttaccagcgagagctaccagcagggcgtgctgagcgccaccatcctgtacgagatcctgctgggcaaggccaccctgtacgccgtgctggtgtctgccctggtgctgatggctatggtcaagcggaaggacagccggggaaaacggggcagaaagaaactcctgtatatattcaaacaaccatttatgagaccagtacaaactactcaagaggaagatggctgtagctgccgatttccagaagaagaagaaggaggatgtgaactgagagtgaagttcagcagaagcgccgacgcccctgcctaccagcagggacagaaccaactgtacaacgagctgaacctgggcagacgggaagagtacgacgtgctggacaagcggagaggcagggaccctgagatgggcggaaagccccagcggagaaagaacccccaggaaggactgtataacgaactccagaaagacaagatggccgaagcctacagcgagatcggcatgaagggcgagcggagaagaggcaagggccacgatggcctgtaccagggcctgagcaccgccaccaaggacacctatgacgccctgcacatgcaggccctgcctccaaga

SEQ ID NO: 26968 - DNA, 987 bp, synthetic construct
  source 1..987: mol_type = other DNA
gtgttcccacctgaggtggccgtgttcgagcctagcgaggccgagatcagccacacccagaaagccaccctcgtgtgcctggctaccggcttctaccccgaccatgtggaactgtcttggtgggtcaacggcaaagaggtgcacagcggcgtgtgtaccgacccccagccactgaaagaacagcccgccctgaacgacagccggtactgcctgagcagcagactgagagtgtccgccaccttctggcagaacccccggaaccacttcagatgccaggtgcagttctacggcctgagcgagaacgacgagtggacccaggacagagccaagcccgtgacccagatcgtgtctgccgaagcctggggcagagccgattgcggctttaccagcgagagctaccagcagggcgtgctgagcgccaccatcctgtacgagatcctgctgggcaaggccaccctgtacgccgtgctggtgtctgccctggtgctgatggctatggtcaagcggaaggacagccggggaaaacggggcagaaagaaactcctgtatatattcaaacaaccatttatgagaccagtacaaactactcaagaggaagatggctgtagctgccgatttccagaagaagaagaaggaggatgtgaactgagagtgaagttcagcagaagcgccgacgcccctgcctaccagcagggacagaaccaactgtacaacgagctgaacctgggcagacgggaagagtacgacgtgctggacaagcggagaggcagggaccctgagatgggcggaaagccccagcggagaaagaacccccaggaaggactgtataacgaactccagaaagacaagatggccgaagcctacagcgagatcggcatgaagggcgagcggagaagaggcaagggccacgatggcctgtaccagggcctgagcaccgccaccaaggacacctatgacgccctgcacatgcaggccctgcctccaaga

SEQ ID NO: 26969 - DNA, 984 bp, synthetic construct
  source 1..984: mol_type = other DNA
ttcccacctgaggtggccgtgttcgagcctagcgaggccgagatcagccacacccagaaagccaccctcgtgtgcctggctaccggcttctaccccgaccatgtggaactgtcttggtgggtcaacggcaaagaggtgcacagcggcgtgtgtaccgacccccagccactgaaagaacagcccgccctgaacgacagccggtactgcctgagcagcagactgagagtgtccgccaccttctggcagaacccccggaaccacttcagatgccaggtgcagttctacggcctgagcgagaacgacgagtggacccaggacagagccaagcccgtgacccagatcgtgtctgccgaagcctggggcagagccgattgcggctttaccagcgagagctaccagcagggcgtgctgagcgccaccatcctgtacgagatcctgctgggcaaggccaccctgtacgccgtgctggtgtctgccctggtgctgatggctatggtcaagcggaaggacagccggggaaaacggggcagaaagaaactcctgtatatattcaaacaaccatttatgagaccagtacaaactactcaagaggaagatggctgtagctgccgatttccagaagaagaagaaggaggatgtgaactgagagtgaagttcagcagaagcgccgacgcccctgcctaccagcagggacagaaccaactgtacaacgagctgaacctgggcagacgggaagagtacgacgtgctggacaagcggagaggcagggaccctgagatgggcggaaagccccagcggagaaagaacccccaggaaggactgtataacgaactccagaaagacaagatggccgaagcctacagcgagatcggcatgaagggcgagcggagaagaggcaagggccacgatggcctgtaccagggcctgagcaccgccaccaaggacacctatgacgccctgcacatgcaggccctgcctccaaga

SEQ ID NO: 26970 - DNA, 981 bp, synthetic construct
  source 1..981: mol_type = other DNA
ccacctgaggtggccgtgttcgagcctagcgaggccgagatcagccacacccagaaagccaccctcgtgtgcctggctaccggcttctaccccgaccatgtggaactgtcttggtgggtcaacggcaaagaggtgcacagcggcgtgtgtaccgacccccagccactgaaagaacagcccgccctgaacgacagccggtactgcctgagcagcagactgagagtgtccgccaccttctggcagaacccccggaaccacttcagatgccaggtgcagttctacggcctgagcgagaacgacgagtggacccaggacagagccaagcccgtgacccagatcgtgtctgccgaagcctggggcagagccgattgcggctttaccagcgagagctaccagcagggcgtgctgagcgccaccatcctgtacgagatcctgctgggcaaggccaccctgtacgccgtgctggtgtctgccctggtgctgatggctatggtcaagcggaaggacagccggggaaaacggggcagaaagaaactcctgtatatattcaaacaaccatttatgagaccagtacaaactactcaagaggaagatggctgtagctgccgatttccagaagaagaagaaggaggatgtgaactgagagtgaagttcagcagaagcgccgacgcccctgcctaccagcagggacagaaccaactgtacaacgagctgaacctgggcagacgggaagagtacgacgtgctggacaagcggagaggcagggaccctgagatgggcggaaagccccagcggagaaagaacccccaggaaggactgtataacgaactccagaaagacaagatggccgaagcctacagcgagatcggcatgaagggcgagcggagaagaggcaagggccacgatggcctgtaccagggcctgagcaccgccaccaaggacacctatgacgccctgcacatgcaggccctgcctccaaga

SEQ ID NO: 26971 - DNA, 978 bp, synthetic construct
  source 1..978: mol_type = other DNA
cctgaggtggccgtgttcgagcctagcgaggccgagatcagccacacccagaaagccaccctcgtgtgcctggctaccggcttctaccccgaccatgtggaactgtcttggtgggtcaacggcaaagaggtgcacagcggcgtgtgtaccgacccccagccactgaaagaacagcccgccctgaacgacagccggtactgcctgagcagcagactgagagtgtccgccaccttctggcagaacccccggaaccacttcagatgccaggtgcagttctacggcctgagcgagaacgacgagtggacccaggacagagccaagcccgtgacccagatcgtgtctgccgaagcctggggcagagccgattgcggctttaccagcgagagctaccagcagggcgtgctgagcgccaccatcctgtacgagatcctgctgggcaaggccaccctgtacgccgtgctggtgtctgccctggtgctgatggctatggtcaagcggaaggacagccggggaaaacggggcagaaagaaactcctgtatatattcaaacaaccatttatgagaccagtacaaactactcaagaggaagatggctgtagctgccgatttccagaagaagaagaaggaggatgtgaactgagagtgaagttcagcagaagcgccgacgcccctgcctaccagcagggacagaaccaactgtacaacgagctgaacctgggcagacgggaagagtacgacgtgctggacaagcggagaggcagggaccctgagatgggcggaaagccccagcggagaaagaacccccaggaaggactgtataacgaactccagaaagacaagatggccgaagcctacagcgagatcggcatgaagggcgagcggagaagaggcaagggccacgatggcctgtaccagggcctgagcaccgccaccaaggacacctatgacgccctgcacatgcaggccctgcctccaaga

SEQ ID NO: 26972 - DNA, 975 bp, synthetic construct
  source 1..975: mol_type = other DNA
gaggtggccgtgttcgagcctagcgaggccgagatcagccacacccagaaagccaccctcgtgtgcctggctaccggcttctaccccgaccatgtggaactgtcttggtgggtcaacggcaaagaggtgcacagcggcgtgtgtaccgacccccagccactgaaagaacagcccgccctgaacgacagccggtactgcctgagcagcagactgagagtgtccgccaccttctggcagaacccccggaaccacttcagatgccaggtgcagttctacggcctgagcgagaacgacgagtggacccaggacagagccaagcccgtgacccagatcgtgtctgccgaagcctggggcagagccgattgcggctttaccagcgagagctaccagcagggcgtgctgagcgccaccatcctgtacgagatcctgctgggcaaggccaccctgtacgccgtgctggtgtctgccctggtgctgatggctatggtcaagcggaaggacagccggggaaaacggggcagaaagaaactcctgtatatattcaaacaaccatttatgagaccagtacaaactactcaagaggaagatggctgtagctgccgatttccagaagaagaagaaggaggatgtgaactgagagtgaagttcagcagaagcgccgacgcccctgcctaccagcagggacagaaccaactgtacaacgagctgaacctgggcagacgggaagagtacgacgtgctggacaagcggagaggcagggaccctgagatgggcggaaagccccagcggagaaagaacccccaggaaggactgtataacgaactccagaaagacaagatggccgaagcctacagcgagatcggcatgaagggcgagcggagaagaggcaagggccacgatggcctgtaccagggcctgagcaccgccaccaaggacacctatgacgccctgcacatgcaggccctgcctccaaga

SEQ ID NO: 26973 - DNA, 972 bp, synthetic construct
  source 1..972: mol_type = other DNA
gtggccgtgttcgagcctagcgaggccgagatcagccacacccagaaagccaccctcgtgtgcctggctaccggcttctaccccgaccatgtggaactgtcttggtgggtcaacggcaaagaggtgcacagcggcgtgtgtaccgacccccagccactgaaagaacagcccgccctgaacgacagccggtactgcctgagcagcagactgagagtgtccgccaccttctggcagaacccccggaaccacttcagatgccaggtgcagttctacggcctgagcgagaacgacgagtggacccaggacagagccaagcccgtgacccagatcgtgtctgccgaagcctggggcagagccgattgcggctttaccagcgagagctaccagcagggcgtgctgagcgccaccatcctgtacgagatcctgctgggcaaggccaccctgtacgccgtgctggtgtctgccctggtgctgatggctatggtcaagcggaaggacagccggggaaaacggggcagaaagaaactcctgtatatattcaaacaaccatttatgagaccagtacaaactactcaagaggaagatggctgtagctgccgatttccagaagaagaagaaggaggatgtgaactgagagtgaagttcagcagaagcgccgacgcccctgcctaccagcagggacagaaccaactgtacaacgagctgaacctgggcagacgggaagagtacgacgtgctggacaagcggagaggcagggaccctgagatgggcggaaagccccagcggagaaagaacccccaggaaggactgtataacgaactccagaaagacaagatggccgaagcctacagcgagatcggcatgaagggcgagcggagaagaggcaagggccacgatggcctgtaccagggcctgagcaccgccaccaaggacacctatgacgccctgcacatgcaggccctgcctccaaga

SEQ ID NO: 26974 - DNA, 969 bp, synthetic construct
  source 1..969: mol_type = other DNA
gccgtgttcgagcctagcgaggccgagatcagccacacccagaaagccaccctcgtgtgcctggctaccggcttctaccccgaccatgtggaactgtcttggtgggtcaacggcaaagaggtgcacagcggcgtgtgtaccgacccccagccactgaaagaacagcccgccctgaacgacagccggtactgcctgagcagcagactgagagtgtccgccaccttctggcagaacccccggaaccacttcagatgccaggtgcagttctacggcctgagcgagaacgacgagtggacccaggacagagccaagcccgtgacccagatcgtgtctgccgaagcctggggcagagccgattgcggctttaccagcgagagctaccagcagggcgtgctgagcgccaccatcctgtacgagatcctgctgggcaaggccaccctgtacgccgtgctggtgtctgccctggtgctgatggctatggtcaagcggaaggacagccggggaaaacggggcagaaagaaactcctgtatatattcaaacaaccatttatgagaccagtacaaactactcaagaggaagatggctgtagctgccgatttccagaagaagaagaaggaggatgtgaactgagagtgaagttcagcagaagcgccgacgcccctgcctaccagcagggacagaaccaactgtacaacgagctgaacctgggcagacgggaagagtacgacgtgctggacaagcggagaggcagggaccctgagatgggcggaaagccccagcggagaaagaacccccaggaaggactgtataacgaactccagaaagacaagatggccgaagcctacagcgagatcggcatgaagggcgagcggagaagaggcaagggccacgatggcctgtaccagggcctgagcaccgccaccaaggacacctatgacgccctgcacatgcaggccctgcctccaaga

SEQ ID NO: 26975 - DNA, 966 bp, synthetic construct
  source 1..966: mol_type = other DNA
gtgttcgagcctagcgaggccgagatcagccacacccagaaagccaccctcgtgtgcctggctaccggcttctaccccgaccatgtggaactgtcttggtgggtcaacggcaaagaggtgcacagcggcgtgtgtaccgacccccagccactgaaagaacagcccgccctgaacgacagccggtactgcctgagcagcagactgagagtgtccgccaccttctggcagaacccccggaaccacttcagatgccaggtgcagttctacggcctgagcgagaacgacgagtggacccaggacagagccaagcccgtgacccagatcgtgtctgccgaagcctggggcagagccgattgcggctttaccagcgagagctaccagcagggcgtgctgagcgccaccatcctgtacgagatcctgctgggcaaggccaccctgtacgccgtgctggtgtctgccctggtgctgatggctatggtcaagcggaaggacagccggggaaaacggggcagaaagaaactcctgtatatattcaaacaaccatttatgagaccagtacaaactactcaagaggaagatggctgtagctgccgatttccagaagaagaagaaggaggatgtgaactgagagtgaagttcagcagaagcgccgacgcccctgcctaccagcagggacagaaccaactgtacaacgagctgaacctgggcagacgggaagagtacgacgtgctggacaagcggagaggcagggaccctgagatgggcggaaagccccagcggagaaagaacccccaggaaggactgtataacgaactccagaaagacaagatggccgaagcctacagcgagatcggcatgaagggcgagcggagaagaggcaagggccacgatggcctgtaccagggcctgagcaccgccaccaaggacacctatgacgccctgcacatgcaggccctgcctccaaga

SEQ ID NO: 26976 - DNA, 963 bp, synthetic construct
  source 1..963: mol_type = other DNA
ttcgagcctagcgaggccgagatcagccacacccagaaagccaccctcgtgtgcctggctaccggcttctaccccgaccatgtggaactgtcttggtgggtcaacggcaaagaggtgcacagcggcgtgtgtaccgacccccagccactgaaagaacagcccgccctgaacgacagccggtactgcctgagcagcagactgagagtgtccgccaccttctggcagaacccccggaaccacttcagatgccaggtgcagttctacggcctgagcgagaacgacgagtggacccaggacagagccaagcccgtgacccagatcgtgtctgccgaagcctggggcagagccgattgcggctttaccagcgagagctaccagcagggcgtgctgagcgccaccatcctgtacgagatcctgctgggcaaggccaccctgtacgccgtgctggtgtctgccctggtgctgatggctatggtcaagcggaaggacagccggggaaaacggggcagaaagaaactcctgtatatattcaaacaaccatttatgagaccagtacaaactactcaagaggaagatggctgtagctgccgatttccagaagaagaagaaggaggatgtgaactgagagtgaagttcagcagaagcgccgacgcccctgcctaccagcagggacagaaccaactgtacaacgagctgaacctgggcagacgggaagagtacgacgtgctggacaagcggagaggcagggaccctgagatgggcggaaagccccagcggagaaagaacccccaggaaggactgtataacgaactccagaaagacaagatggccgaagcctacagcgagatcggcatgaagggcgagcggagaagaggcaagggccacgatggcctgtaccagggcctgagcaccgccaccaaggacacctatgacgccctgcacatgcaggccctgcctccaaga

SEQ ID NO: 26977 - DNA, 960 bp, synthetic construct
  source 1..960: mol_type = other DNA
gagcctagcgaggccgagatcagccacacccagaaagccaccctcgtgtgcctggctaccggcttctaccccgaccatgtggaactgtcttggtgggtcaacggcaaagaggtgcacagcggcgtgtgtaccgacccccagccactgaaagaacagcccgccctgaacgacagccggtactgcctgagcagcagactgagagtgtccgccaccttctggcagaacccccggaaccacttcagatgccaggtgcagttctacggcctgagcgagaacgacgagtggacccaggacagagccaagcccgtgacccagatcgtgtctgccgaagcctggggcagagccgattgcggctttaccagcgagagctaccagcagggcgtgctgagcgccaccatcctgtacgagatcctgctgggcaaggccaccctgtacgccgtgctggtgtctgccctggtgctgatggctatggtcaagcggaaggacagccggggaaaacggggcagaaagaaactcctgtatatattcaaacaaccatttatgagaccagtacaaactactcaagaggaagatggctgtagctgccgatttccagaagaagaagaaggaggatgtgaactgagagtgaagttcagcagaagcgccgacgcccctgcctaccagcagggacagaaccaactgtacaacgagctgaacctgggcagacgggaagagtacgacgtgctggacaagcggagaggcagggaccctgagatgggcggaaagccccagcggagaaagaacccccaggaaggactgtataacgaactccagaaagacaagatggccgaagcctacagcgagatcggcatgaagggcgagcggagaagaggcaagggccacgatggcctgtaccagggcctgagcaccgccaccaaggacacctatgacgccctgcacatgcaggccctgcctccaaga

SEQ ID NO: 26978 - DNA, 957 bp, synthetic construct
  source 1..957: mol_type = other DNA
cctagcgaggccgagatcagccacacccagaaagccaccctcgtgtgcctggctaccggcttctaccccgaccatgtggaactgtcttggtgggtcaacggcaaagaggtgcacagcggcgtgtgtaccgacccccagccactgaaagaacagcccgccctgaacgacagccggtactgcctgagcagcagactgagagtgtccgccaccttctggcagaacccccggaaccacttcagatgccaggtgcagttctacggcctgagcgagaacgacgagtggacccaggacagagccaagcccgtgacccagatcgtgtctgccgaagcctggggcagagccgattgcggctttaccagcgagagctaccagcagggcgtgctgagcgccaccatcctgtacgagatcctgctgggcaaggccaccctgtacgccgtgctggtgtctgccctggtgctgatggctatggtcaagcggaaggacagccggggaaaacggggcagaaagaaactcctgtatatattcaaacaaccatttatgagaccagtacaaactactcaagaggaagatggctgtagctgccgatttccagaagaagaagaaggaggatgtgaactgagagtgaagttcagcagaagcgccgacgcccctgcctaccagcagggacagaaccaactgtacaacgagctgaacctgggcagacgggaagagtacgacgtgctggacaagcggagaggcagggaccctgagatgggcggaaagccccagcggagaaagaacccccaggaaggactgtataacgaactccagaaagacaagatggccgaagcctacagcgagatcggcatgaagggcgagcggagaagaggcaagggccacgatggcctgtaccagggcctgagcaccgccaccaaggacacctatgacgccctgcacatgcaggccctgcctccaaga

SEQ ID NO: 26979 - DNA, 954 bp, synthetic construct
  source 1..954: mol_type = other DNA
agcgaggccgagatcagccacacccagaaagccaccctcgtgtgcctggctaccggcttctaccccgaccatgtggaactgtcttggtgggtcaacggcaaagaggtgcacagcggcgtgtgtaccgacccccagccactgaaagaacagcccgccctgaacgacagccggtactgcctgagcagcagactgagagtgtccgccaccttctggcagaacccccggaaccacttcagatgccaggtgcagttctacggcctgagcgagaacgacgagtggacccaggacagagccaagcccgtgacccagatcgtgtctgccgaagcctggggcagagccgattgcggctttaccagcgagagctaccagcagggcgtgctgagcgccaccatcctgtacgagatcctgctgggcaaggccaccctgtacgccgtgctggtgtctgccctggtgctgatggctatggtcaagcggaaggacagccggggaaaacggggcagaaagaaactcctgtatatattcaaacaaccatttatgagaccagtacaaactactcaagaggaagatggctgtagctgccgatttccagaagaagaagaaggaggatgtgaactgagagtgaagttcagcagaagcgccgacgcccctgcctaccagcagggacagaaccaactgtacaacgagctgaacctgggcagacgggaagagtacgacgtgctggacaagcggagaggcagggaccctgagatgggcggaaagccccagcggagaaagaacccccaggaaggactgtataacgaactccagaaagacaagatggccgaagcctacagcgagatcggcatgaagggcgagcggagaagaggcaagggccacgatggcctgtaccagggcctgagcaccgccaccaaggacacctatgacgccctgcacatgcaggccctgcctccaaga

SEQ ID NO: 26980 - DNA, 951 bp, synthetic construct
  source 1..951: mol_type = other DNA
gaggccgagatcagccacacccagaaagccaccctcgtgtgcctggctaccggcttctaccccgaccatgtggaactgtcttggtgggtcaacggcaaagaggtgcacagcggcgtgtgtaccgacccccagccactgaaagaacagcccgccctgaacgacagccggtactgcctgagcagcagactgagagtgtccgccaccttctggcagaacccccggaaccacttcagatgccaggtgcagttctacggcctgagcgagaacgacgagtggacccaggacagagccaagcccgtgacccagatcgtgtctgccgaagcctggggcagagccgattgcggctttaccagcgagagctaccagcagggcgtgctgagcgccaccatcctgtacgagatcctgctgggcaaggccaccctgtacgccgtgctggtgtctgccctggtgctgatggctatggtcaagcggaaggacagccggggaaaacggggcagaaagaaactcctgtatatattcaaacaaccatttatgagaccagtacaaactactcaagaggaagatggctgtagctgccgatttccagaagaagaagaaggaggatgtgaactgagagtgaagttcagcagaagcgccgacgcccctgcctaccagcagggacagaaccaactgtacaacgagctgaacctgggcagacgggaagagtacgacgtgctggacaagcggagaggcagggaccctgagatgggcggaaagccccagcggagaaagaacccccaggaaggactgtataacgaactccagaaagacaagatggccgaagcctacagcgagatcggcatgaagggcgagcggagaagaggcaagggccacgatggcctgtaccagggcctgagcaccgccaccaaggacacctatgacgccctgcacatgcaggccctgcctccaaga

SEQ ID NO: 26981 - DNA, 948 bp, synthetic construct
  source 1..948: mol_type = other DNA
gccgagatcagccacacccagaaagccaccctcgtgtgcctggctaccggcttctaccccgaccatgtggaactgtcttggtgggtcaacggcaaagaggtgcacagcggcgtgtgtaccgacccccagccactgaaagaacagcccgccctgaacgacagccggtactgcctgagcagcagactgagagtgtccgccaccttctggcagaacccccggaaccacttcagatgccaggtgcagttctacggcctgagcgagaacgacgagtggacccaggacagagccaagcccgtgacccagatcgtgtctgccgaagcctggggcagagccgattgcggctttaccagcgagagctaccagcagggcgtgctgagcgccaccatcctgtacgagatcctgctgggcaaggccaccctgtacgccgtgctggtgtctgccctggtgctgatggctatggtcaagcggaaggacagccggggaaaacggggcagaaagaaactcctgtatatattcaaacaaccatttatgagaccagtacaaactactcaagaggaagatggctgtagctgccgatttccagaagaagaagaaggaggatgtgaactgagagtgaagttcagcagaagcgccgacgcccctgcctaccagcagggacagaaccaactgtacaacgagctgaacctgggcagacgggaagagtacgacgtgctggacaagcggagaggcagggaccctgagatgggcggaaagccccagcggagaaagaacccccaggaaggactgtataacgaactccagaaagacaagatggccgaagcctacagcgagatcggcatgaagggcgagcggagaagaggcaagggccacgatggcctgtaccagggcctgagcaccgccaccaaggacacctatgacgccctgcacatgcaggccctgcctccaaga

SEQ ID NO: 26982 - DNA, 945 bp, synthetic construct
  source 1..945: mol_type = other DNA
gagatcagccacacccagaaagccaccctcgtgtgcctggctaccggcttctaccccgaccatgtggaactgtcttggtgggtcaacggcaaagaggtgcacagcggcgtgtgtaccgacccccagccactgaaagaacagcccgccctgaacgacagccggtactgcctgagcagcagactgagagtgtccgccaccttctggcagaacccccggaaccacttcagatgccaggtgcagttctacggcctgagcgagaacgacgagtggacccaggacagagccaagcccgtgacccagatcgtgtctgccgaagcctggggcagagccgattgcggctttaccagcgagagctaccagcagggcgtgctgagcgccaccatcctgtacgagatcctgctgggcaaggccaccctgtacgccgtgctggtgtctgccctggtgctgatggctatggtcaagcggaaggacagccggggaaaacggggcagaaagaaactcctgtatatattcaaacaaccatttatgagaccagtacaaactactcaagaggaagatggctgtagctgccgatttccagaagaagaagaaggaggatgtgaactgagagtgaagttcagcagaagcgccgacgcccctgcctaccagcagggacagaaccaactgtacaacgagctgaacctgggcagacgggaagagtacgacgtgctggacaagcggagaggcagggaccctgagatgggcggaaagccccagcggagaaagaacccccaggaaggactgtataacgaactccagaaagacaagatggccgaagcctacagcgagatcggcatgaagggcgagcggagaagaggcaagggccacgatggcctgtaccagggcctgagcaccgccaccaaggacacctatgacgccctgcacatgcaggccctgcctccaaga

SEQ ID NO: 26983 - DNA, 942 bp, synthetic construct
  source 1..942: mol_type = other DNA
atcagccacacccagaaagccaccctcgtgtgcctggctaccggcttctaccccgaccatgtggaactgtcttggtgggtcaacggcaaagaggtgcacagcggcgtgtgtaccgacccccagccactgaaagaacagcccgccctgaacgacagccggtactgcctgagcagcagactgagagtgtccgccaccttctggcagaacccccggaaccacttcagatgccaggtgcagttctacggcctgagcgagaacgacgagtggacccaggacagagccaagcccgtgacccagatcgtgtctgccgaagcctggggcagagccgattgcggctttaccagcgagagctaccagcagggcgtgctgagcgccaccatcctgtacgagatcctgctgggcaaggccaccctgtacgccgtgctggtgtctgccctggtgctgatggctatggtcaagcggaaggacagccggggaaaacggggcagaaagaaactcctgtatatattcaaacaaccatttatgagaccagtacaaactactcaagaggaagatggctgtagctgccgatttccagaagaagaagaaggaggatgtgaactgagagtgaagttcagcagaagcgccgacgcccctgcctaccagcagggacagaaccaactgtacaacgagctgaacctgggcagacgggaagagtacgacgtgctggacaagcggagaggcagggaccctgagatgggcggaaagccccagcggagaaagaacccccaggaaggactgtataacgaactccagaaagacaagatggccgaagcctacagcgagatcggcatgaagggcgagcggagaagaggcaagggccacgatggcctgtaccagggcctgagcaccgccaccaaggacacctatgacgccctgcacatgcaggccctgcctccaaga

SEQ ID NO: 26984 - DNA, 939 bp, synthetic construct
  source 1..939: mol_type = other DNA
agccacacccagaaagccaccctcgtgtgcctggctaccggcttctaccccgaccatgtggaactgtcttggtgggtcaacggcaaagaggtgcacagcggcgtgtgtaccgacccccagccactgaaagaacagcccgccctgaacgacagccggtactgcctgagcagcagactgagagtgtccgccaccttctggcagaacccccggaaccacttcagatgccaggtgcagttctacggcctgagcgagaacgacgagtggacccaggacagagccaagcccgtgacccagatcgtgtctgccgaagcctggggcagagccgattgcggctttaccagcgagagctaccagcagggcgtgctgagcgccaccatcctgtacgagatcctgctgggcaaggccaccctgtacgccgtgctggtgtctgccctggtgctgatggctatggtcaagcggaaggacagccggggaaaacggggcagaaagaaactcctgtatatattcaaacaaccatttatgagaccagtacaaactactcaagaggaagatggctgtagctgccgatttccagaagaagaagaaggaggatgtgaactgagagtgaagttcagcagaagcgccgacgcccctgcctaccagcagggacagaaccaactgtacaacgagctgaacctgggcagacgggaagagtacgacgtgctggacaagcggagaggcagggaccctgagatgggcggaaagccccagcggagaaagaacccccaggaaggactgtataacgaactccagaaagacaagatggccgaagcctacagcgagatcggcatgaagggcgagcggagaagaggcaagggccacgatggcctgtaccagggcctgagcaccgccaccaaggacacctatgacgccctgcacatgcaggccctgcctccaaga

SEQ ID NO: 26985 - DNA, 936 bp, synthetic construct
  source 1..936: mol_type = other DNA
cacacccagaaagccaccctcgtgtgcctggctaccggcttctaccccgaccatgtggaactgtcttggtgggtcaacggcaaagaggtgcacagcggcgtgtgtaccgacccccagccactgaaagaacagcccgccctgaacgacagccggtactgcctgagcagcagactgagagtgtccgccaccttctggcagaacccccggaaccacttcagatgccaggtgcagttctacggcctgagcgagaacgacgagtggacccaggacagagccaagcccgtgacccagatcgtgtctgccgaagcctggggcagagccgattgcggctttaccagcgagagctaccagcagggcgtgctgagcgccaccatcctgtacgagatcctgctgggcaaggccaccctgtacgccgtgctggtgtctgccctggtgctgatggctatggtcaagcggaaggacagccggggaaaacggggcagaaagaaactcctgtatatattcaaacaaccatttatgagaccagtacaaactactcaagaggaagatggctgtagctgccgatttccagaagaagaagaaggaggatgtgaactgagagtgaagttcagcagaagcgccgacgcccctgcctaccagcagggacagaaccaactgtacaacgagctgaacctgggcagacgggaagagtacgacgtgctggacaagcggagaggcagggaccctgagatgggcggaaagccccagcggagaaagaacccccaggaaggactgtataacgaactccagaaagacaagatggccgaagcctacagcgagatcggcatgaagggcgagcggagaagaggcaagggccacgatggcctgtaccagggcctgagcaccgccaccaaggacacctatgacgccctgcacatgcaggccctgcctccaaga

SEQ ID NO: 26986 - DNA, 933 bp, synthetic construct
  source 1..933: mol_type = other DNA
acccagaaagccaccctcgtgtgcctggctaccggcttctaccccgaccatgtggaactgtcttggtgggtcaacggcaaagaggtgcacagcggcgtgtgtaccgacccccagccactgaaagaacagcccgccctgaacgacagccggtactgcctgagcagcagactgagagtgtccgccaccttctggcagaacccccggaaccacttcagatgccaggtgcagttctacggcctgagcgagaacgacgagtggacccaggacagagccaagcccgtgacccagatcgtgtctgccgaagcctggggcagagccgattgcggctttaccagcgagagctaccagcagggcgtgctgagcgccaccatcctgtacgagatcctgctgggcaaggccaccctgtacgccgtgctggtgtctgccctggtgctgatggctatggtcaagcggaaggacagccggggaaaacggggcagaaagaaactcctgtatatattcaaacaaccatttatgagaccagtacaaactactcaagaggaagatggctgtagctgccgatttccagaagaagaagaaggaggatgtgaactgagagtgaagttcagcagaagcgccgacgcccctgcctaccagcagggacagaaccaactgtacaacgagctgaacctgggcagacgggaagagtacgacgtgctggacaagcggagaggcagggaccctgagatgggcggaaagccccagcggagaaagaacccccaggaaggactgtataacgaactccagaaagacaagatggccgaagcctacagcgagatcggcatgaagggcgagcggagaagaggcaagggccacgatggcctgtaccagggcctgagcaccgccaccaaggacacctatgacgccctgcacatgcaggccctgcctccaaga

SEQ ID NO: 26987 - DNA, 930 bp, synthetic construct
  source 1..930: mol_type = other DNA
cagaaagccaccctcgtgtgcctggctaccggcttctaccccgaccatgtggaactgtcttggtgggtcaacggcaaagaggtgcacagcggcgtgtgtaccgacccccagccactgaaagaacagcccgccctgaacgacagccggtactgcctgagcagcagactgagagtgtccgccaccttctggcagaacccccggaaccacttcagatgccaggtgcagttctacggcctgagcgagaacgacgagtggacccaggacagagccaagcccgtgacccagatcgtgtctgccgaagcctggggcagagccgattgcggctttaccagcgagagctaccagcagggcgtgctgagcgccaccatcctgtacgagatcctgctgggcaaggccaccctgtacgccgtgctggtgtctgccctggtgctgatggctatggtcaagcggaaggacagccggggaaaacggggcagaaagaaactcctgtatatattcaaacaaccatttatgagaccagtacaaactactcaagaggaagatggctgtagctgccgatttccagaagaagaagaaggaggatgtgaactgagagtgaagttcagcagaagcgccgacgcccctgcctaccagcagggacagaaccaactgtacaacgagctgaacctgggcagacgggaagagtacgacgtgctggacaagcggagaggcagggaccctgagatgggcggaaagccccagcggagaaagaacccccaggaaggactgtataacgaactccagaaagacaagatggccgaagcctacagcgagatcggcatgaagggcgagcggagaagaggcaagggccacgatggcctgtaccagggcctgagcaccgccaccaaggacacctatgacgccctgcacatgcaggccctgcctccaaga

SEQ ID NO: 26988 - DNA, 927 bp, synthetic construct
  source 1..927: mol_type = other DNA
aaagccaccctcgtgtgcctggctaccggcttctaccccgaccatgtggaactgtcttggtgggtcaacggcaaagaggtgcacagcggcgtgtgtaccgacccccagccactgaaagaacagcccgccctgaacgacagccggtactgcctgagcagcagactgagagtgtccgccaccttctggcagaacccccggaaccacttcagatgccaggtgcagttctacggcctgagcgagaacgacgagtggacccaggacagagccaagcccgtgacccagatcgtgtctgccgaagcctggggcagagccgattgcggctttaccagcgagagctaccagcagggcgtgctgagcgccaccatcctgtacgagatcctgctgggcaaggccaccctgtacgccgtgctggtgtctgccctggtgctgatggctatggtcaagcggaaggacagccggggaaaacggggcagaaagaaactcctgtatatattcaaacaaccatttatgagaccagtacaaactactcaagaggaagatggctgtagctgccgatttccagaagaagaagaaggaggatgtgaactgagagtgaagttcagcagaagcgccgacgcccctgcctaccagcagggacagaaccaactgtacaacgagctgaacctgggcagacgggaagagtacgacgtgctggacaagcggagaggcagggaccctgagatgggcggaaagccccagcggagaaagaacccccaggaaggactgtataacgaactccagaaagacaagatggccgaagcctacagcgagatcggcatgaagggcgagcggagaagaggcaagggccacgatggcctgtaccagggcctgagcaccgccaccaaggacacctatgacgccctgcacatgcaggccctgcctccaaga

SEQ ID NO: 26989 - DNA, 924 bp, synthetic construct
  source 1..924: mol_type = other DNA
gccaccctcgtgtgcctggctaccggcttctaccccgaccatgtggaactgtcttggtgggtcaacggcaaagaggtgcacagcggcgtgtgtaccgacccccagccactgaaagaacagcccgccctgaacgacagccggtactgcctgagcagcagactgagagtgtccgccaccttctggcagaacccccggaaccacttcagatgccaggtgcagttctacggcctgagcgagaacgacgagtggacccaggacagagccaagcccgtgacccagatcgtgtctgccgaagcctggggcagagccgattgcggctttaccagcgagagctaccagcagggcgtgctgagcgccaccatcctgtacgagatcctgctgggcaaggccaccctgtacgccgtgctggtgtctgccctggtgctgatggctatggtcaagcggaaggacagccggggaaaacggggcagaaagaaactcctgtatatattcaaacaaccatttatgagaccagtacaaactactcaagaggaagatggctgtagctgccgatttccagaagaagaagaaggaggatgtgaactgagagtgaagttcagcagaagcgccgacgcccctgcctaccagcagggacagaaccaactgtacaacgagctgaacctgggcagacgggaagagtacgacgtgctggacaagcggagaggcagggaccctgagatgggcggaaagccccagcggagaaagaacccccaggaaggactgtataacgaactccagaaagacaagatggccgaagcctacagcgagatcggcatgaagggcgagcggagaagaggcaagggccacgatggcctgtaccagggcctgagcaccgccaccaaggacacctatgacgccctgcacatgcaggccctgcctccaaga

SEQ ID NO: 26990 - DNA, 921 bp, synthetic construct
  source 1..921: mol_type = other DNA
accctcgtgtgcctggctaccggcttctaccccgaccatgtggaactgtcttggtgggtcaacggcaaagaggtgcacagcggcgtgtgtaccgacccccagccactgaaagaacagcccgccctgaacgacagccggtactgcctgagcagcagactgagagtgtccgccaccttctggcagaacccccggaaccacttcagatgccaggtgcagttctacggcctgagcgagaacgacgagtggacccaggacagagccaagcccgtgacccagatcgtgtctgccgaagcctggggcagagccgattgcggctttaccagcgagagctaccagcagggcgtgctgagcgccaccatcctgtacgagatcctgctgggcaaggccaccctgtacgccgtgctggtgtctgccctggtgctgatggctatggtcaagcggaaggacagccggggaaaacggggcagaaagaaactcctgtatatattcaaacaaccatttatgagaccagtacaaactactcaagaggaagatggctgtagctgccgatttccagaagaagaagaaggaggatgtgaactgagagtgaagttcagcagaagcgccgacgcccctgcctaccagcagggacagaaccaactgtacaacgagctgaacctgggcagacgggaagagtacgacgtgctggacaagcggagaggcagggaccctgagatgggcggaaagccccagcggagaaagaacccccaggaaggactgtataacgaactccagaaagacaagatggccgaagcctacagcgagatcggcatgaagggcgagcggagaagaggcaagggccacgatggcctgtaccagggcctgagcaccgccaccaaggacacctatgacgccctgcacatgcaggccctgcctccaaga

SEQ ID NO: 26991 - DNA, 918 bp, synthetic construct
  source 1..918: mol_type = other DNA
ctcgtgtgcctggctaccggcttctaccccgaccatgtggaactgtcttggtgggtcaacggcaaagaggtgcacagcggcgtgtgtaccgacccccagccactgaaagaacagcccgccctgaacgacagccggtactgcctgagcagcagactgagagtgtccgccaccttctggcagaacccccggaaccacttcagatgccaggtgcagttctacggcctgagcgagaacgacgagtggacccaggacagagccaagcccgtgacccagatcgtgtctgccgaagcctggggcagagccgattgcggctttaccagcgagagctaccagcagggcgtgctgagcgccaccatcctgtacgagatcctgctgggcaaggccaccctgtacgccgtgctggtgtctgccctggtgctgatggctatggtcaagcggaaggacagccggggaaaacggggcagaaagaaactcctgtatatattcaaacaaccatttatgagaccagtacaaactactcaagaggaagatggctgtagctgccgatttccagaagaagaagaaggaggatgtgaactgagagtgaagttcagcagaagcgccgacgcccctgcctaccagcagggacagaaccaactgtacaacgagctgaacctgggcagacgggaagagtacgacgtgctggacaagcggagaggcagggaccctgagatgggcggaaagccccagcggagaaagaacccccaggaaggactgtataacgaactccagaaagacaagatggccgaagcctacagcgagatcggcatgaagggcgagcggagaagaggcaagggccacgatggcctgtaccagggcctgagcaccgccaccaaggacacctatgacgccctgcacatgcaggccctgcctccaaga

SEQ ID NO: 26992 - DNA, 915 bp, synthetic construct
  source 1..915: mol_type = other DNA
gtgtgcctggctaccggcttctaccccgaccatgtggaactgtcttggtgggtcaacggcaaagaggtgcacagcggcgtgtgtaccgacccccagccactgaaagaacagcccgccctgaacgacagccggtactgcctgagcagcagactgagagtgtccgccaccttctggcagaacccccggaaccacttcagatgccaggtgcagttctacggcctgagcgagaacgacgagtggacccaggacagagccaagcccgtgacccagatcgtgtctgccgaagcctggggcagagccgattgcggctttaccagcgagagctaccagcagggcgtgctgagcgccaccatcctgtacgagatcctgctgggcaaggccaccctgtacgccgtgctggtgtctgccctggtgctgatggctatggtcaagcggaaggacagccggggaaaacggggcagaaagaaactcctgtatatattcaaacaaccatttatgagaccagtacaaactactcaagaggaagatggctgtagctgccgatttccagaagaagaagaaggaggatgtgaactgagagtgaagttcagcagaagcgccgacgcccctgcctaccagcagggacagaaccaactgtacaacgagctgaacctgggcagacgggaagagtacgacgtgctggacaagcggagaggcagggaccctgagatgggcggaaagccccagcggagaaagaacccccaggaaggactgtataacgaactccagaaagacaagatggccgaagcctacagcgagatcggcatgaagggcgagcggagaagaggcaagggccacgatggcctgtaccagggcctgagcaccgccaccaaggacacctatgacgccctgcacatgcaggccctgcctccaaga

SEQ ID NO: 26993 - DNA, 912 bp, synthetic construct
  source 1..912: mol_type = other DNA
tgcctggctaccggcttctaccccgaccatgtggaactgtcttggtgggtcaacggcaaagaggtgcacagcggcgtgtgtaccgacccccagccactgaaagaacagcccgccctgaacgacagccggtactgcctgagcagcagactgagagtgtccgccaccttctggcagaacccccggaaccacttcagatgccaggtgcagttctacggcctgagcgagaacgacgagtggacccaggacagagccaagcccgtgacccagatcgtgtctgccgaagcctggggcagagccgattgcggctttaccagcgagagctaccagcagggcgtgctgagcgccaccatcctgtacgagatcctgctgggcaaggccaccctgtacgccgtgctggtgtctgccctggtgctgatggctatggtcaagcggaaggacagccggggaaaacggggcagaaagaaactcctgtatatattcaaacaaccatttatgagaccagtacaaactactcaagaggaagatggctgtagctgccgatttccagaagaagaagaaggaggatgtgaactgagagtgaagttcagcagaagcgccgacgcccctgcctaccagcagggacagaaccaactgtacaacgagctgaacctgggcagacgggaagagtacgacgtgctggacaagcggagaggcagggaccctgagatgggcggaaagccccagcggagaaagaacccccaggaaggactgtataacgaactccagaaagacaagatggccgaagcctacagcgagatcggcatgaagggcgagcggagaagaggcaagggccacgatggcctgtaccagggcctgagcaccgccaccaaggacacctatgacgccctgcacatgcaggccctgcctccaaga

SEQ ID NO: 26994 - DNA, 909 bp, synthetic construct
  source 1..909: mol_type = other DNA
ctggctaccggcttctaccccgaccatgtggaactgtcttggtgggtcaacggcaaagaggtgcacagcggcgtgtgtaccgacccccagccactgaaagaacagcccgccctgaacgacagccggtactgcctgagcagcagactgagagtgtccgccaccttctggcagaacccccggaaccacttcagatgccaggtgcagttctacggcctgagcgagaacgacgagtggacccaggacagagccaagcccgtgacccagatcgtgtctgccgaagcctggggcagagccgattgcggctttaccagcgagagctaccagcagggcgtgctgagcgccaccatcctgtacgagatcctgctgggcaaggccaccctgtacgccgtgctggtgtctgccctggtgctgatggctatggtcaagcggaaggacagccggggaaaacggggcagaaagaaactcctgtatatattcaaacaaccatttatgagaccagtacaaactactcaagaggaagatggctgtagctgccgatttccagaagaagaagaaggaggatgtgaactgagagtgaagttcagcagaagcgccgacgcccctgcctaccagcagggacagaaccaactgtacaacgagctgaacctgggcagacgggaagagtacgacgtgctggacaagcggagaggcagggaccctgagatgggcggaaagccccagcggagaaagaacccccaggaaggactgtataacgaactccagaaagacaagatggccgaagcctacagcgagatcggcatgaagggcgagcggagaagaggcaagggccacgatggcctgtaccagggcctgagcaccgccaccaaggacacctatgacgccctgcacatgcaggccctgcctccaaga

SEQ ID NO: 26995 - DNA, 906 bp, synthetic construct
  source 1..906: mol_type = other DNA
gctaccggcttctaccccgaccatgtggaactgtcttggtgggtcaacggcaaagaggtgcacagcggcgtgtgtaccgacccccagccactgaaagaacagcccgccctgaacgacagccggtactgcctgagcagcagactgagagtgtccgccaccttctggcagaacccccggaaccacttcagatgccaggtgcagttctacggcctgagcgagaacgacgagtggacccaggacagagccaagcccgtgacccagatcgtgtctgccgaagcctggggcagagccgattgcggctttaccagcgagagctaccagcagggcgtgctgagcgccaccatcctgtacgagatcctgctgggcaaggccaccctgtacgccgtgctggtgtctgccctggtgctgatggctatggtcaagcggaaggacagccggggaaaacggggcagaaagaaactcctgtatatattcaaacaaccatttatgagaccagtacaaactactcaagaggaagatggctgtagctgccgatttccagaagaagaagaaggaggatgtgaactgagagtgaagttcagcagaagcgccgacgcccctgcctaccagcagggacagaaccaactgtacaacgagctgaacctgggcagacgggaagagtacgacgtgctggacaagcggagaggcagggaccctgagatgggcggaaagccccagcggagaaagaacccccaggaaggactgtataacgaactccagaaagacaagatggccgaagcctacagcgagatcggcatgaagggcgagcggagaagaggcaagggccacgatggcctgtaccagggcctgagcaccgccaccaaggacacctatgacgccctgcacatgcaggccctgcctccaaga

SEQ ID NO: 26996 - DNA, 903 bp, synthetic construct
  source 1..903: mol_type = other DNA
accggcttctaccccgaccatgtggaactgtcttggtgggtcaacggcaaagaggtgcacagcggcgtgtgtaccgacccccagccactgaaagaacagcccgccctgaacgacagccggtactgcctgagcagcagactgagagtgtccgccaccttctggcagaacccccggaaccacttcagatgccaggtgcagttctacggcctgagcgagaacgacgagtggacccaggacagagccaagcccgtgacccagatcgtgtctgccgaagcctggggcagagccgattgcggctttaccagcgagagctaccagcagggcgtgctgagcgccaccatcctgtacgagatcctgctgggcaaggccaccctgtacgccgtgctggtgtctgccctggtgctgatggctatggtcaagcggaaggacagccggggaaaacggggcagaaagaaactcctgtatatattcaaacaaccatttatgagaccagtacaaactactcaagaggaagatggctgtagctgccgatttccagaagaagaagaaggaggatgtgaactgagagtgaagttcagcagaagcgccgacgcccctgcctaccagcagggacagaaccaactgtacaacgagctgaacctgggcagacgggaagagtacgacgtgctggacaagcggagaggcagggaccctgagatgggcggaaagccccagcggagaaagaacccccaggaaggactgtataacgaactccagaaagacaagatggccgaagcctacagcgagatcggcatgaagggcgagcggagaagaggcaagggccacgatggcctgtaccagggcctgagcaccgccaccaaggacacctatgacgccctgcacatgcaggccctgcctccaaga

SEQ ID NO: 26997 - DNA, 900 bp, synthetic construct
  source 1..900: mol_type = other DNA
ggcttctaccccgaccatgtggaactgtcttggtgggtcaacggcaaagaggtgcacagcggcgtgtgtaccgacccccagccactgaaagaacagcccgccctgaacgacagccggtactgcctgagcagcagactgagagtgtccgccaccttctggcagaacccccggaaccacttcagatgccaggtgcagttctacggcctgagcgagaacgacgagtggacccaggacagagccaagcccgtgacccagatcgtgtctgccgaagcctggggcagagccgattgcggctttaccagcgagagctaccagcagggcgtgctgagcgccaccatcctgtacgagatcctgctgggcaaggccaccctgtacgccgtgctggtgtctgccctggtgctgatggctatggtcaagcggaaggacagccggggaaaacggggcagaaagaaactcctgtatatattcaaacaaccatttatgagaccagtacaaactactcaagaggaagatggctgtagctgccgatttccagaagaagaagaaggaggatgtgaactgagagtgaagttcagcagaagcgccgacgcccctgcctaccagcagggacagaaccaactgtacaacgagctgaacctgggcagacgggaagagtacgacgtgctggacaagcggagaggcagggaccctgagatgggcggaaagccccagcggagaaagaacccccaggaaggactgtataacgaactccagaaagacaagatggccgaagcctacagcgagatcggcatgaagggcgagcggagaagaggcaagggccacgatggcctgtaccagggcctgagcaccgccaccaaggacacctatgacgccctgcacatgcaggccctgcctccaaga

SEQ ID NO: 26998 - DNA, 897 bp, synthetic construct
  source 1..897: mol_type = other DNA
ttctaccccgaccatgtggaactgtcttggtgggtcaacggcaaagaggtgcacagcggcgtgtgtaccgacccccagccactgaaagaacagcccgccctgaacgacagccggtactgcctgagcagcagactgagagtgtccgccaccttctggcagaacccccggaaccacttcagatgccaggtgcagttctacggcctgagcgagaacgacgagtggacccaggacagagccaagcccgtgacccagatcgtgtctgccgaagcctggggcagagccgattgcggctttaccagcgagagctaccagcagggcgtgctgagcgccaccatcctgtacgagatcctgctgggcaaggccaccctgtacgccgtgctggtgtctgccctggtgctgatggctatggtcaagcggaaggacagccggggaaaacggggcagaaagaaactcctgtatatattcaaacaaccatttatgagaccagtacaaactactcaagaggaagatggctgtagctgccgatttccagaagaagaagaaggaggatgtgaactgagagtgaagttcagcagaagcgccgacgcccctgcctaccagcagggacagaaccaactgtacaacgagctgaacctgggcagacgggaagagtacgacgtgctggacaagcggagaggcagggaccctgagatgggcggaaagccccagcggagaaagaacccccaggaaggactgtataacgaactccagaaagacaagatggccgaagcctacagcgagatcggcatgaagggcgagcggagaagaggcaagggccacgatggcctgtaccagggcctgagcaccgccaccaaggacacctatgacgccctgcacatgcaggccctgcctccaaga

SEQ ID NO: 26999 - DNA, 894 bp, synthetic construct
  source 1..894: mol_type = other DNA
taccccgaccatgtggaactgtcttggtgggtcaacggcaaagaggtgcacagcggcgtgtgtaccgacccccagccactgaaagaacagcccgccctgaacgacagccggtactgcctgagcagcagactgagagtgtccgccaccttctggcagaacccccggaaccacttcagatgccaggtgcagttctacggcctgagcgagaacgacgagtggacccaggacagagccaagcccgtgacccagatcgtgtctgccgaagcctggggcagagccgattgcggctttaccagcgagagctaccagcagggcgtgctgagcgccaccatcctgtacgagatcctgctgggcaaggccaccctgtacgccgtgctggtgtctgccctggtgctgatggctatggtcaagcggaaggacagccggggaaaacggggcagaaagaaactcctgtatatattcaaacaaccatttatgagaccagtacaaactactcaagaggaagatggctgtagctgccgatttccagaagaagaagaaggaggatgtgaactgagagtgaagttcagcagaagcgccgacgcccctgcctaccagcagggacagaaccaactgtacaacgagctgaacctgggcagacgggaagagtacgacgtgctggacaagcggagaggcagggaccctgagatgggcggaaagccccagcggagaaagaacccccaggaaggactgtataacgaactccagaaagacaagatggccgaagcctacagcgagatcggcatgaagggcgagcggagaagaggcaagggccacgatggcctgtaccagggcctgagcaccgccaccaaggacacctatgacgccctgcacatgcaggccctgcctccaaga

SEQ ID NO: 27000 - DNA, 891 bp, synthetic construct
  source 1..891: mol_type = other DNA
cccgaccatgtggaactgtcttggtgggtcaacggcaaagaggtgcacagcggcgtgtgtaccgacccccagccactgaaagaacagcccgccctgaacgacagccggtactgcctgagcagcagactgagagtgtccgccaccttctggcagaacccccggaaccacttcagatgccaggtgcagttctacggcctgagcgagaacgacgagtggacccaggacagagccaagcccgtgacccagatcgtgtctgccgaagcctggggcagagccgattgcggctttaccagcgagagctaccagcagggcgtgctgagcgccaccatcctgtacgagatcctgctgggcaaggccaccctgtacgccgtgctggtgtctgccctggtgctgatggctatggtcaagcggaaggacagccggggaaaacggggcagaaagaaactcctgtatatattcaaacaaccatttatgagaccagtacaaactactcaagaggaagatggctgtagctgccgatttccagaagaagaagaaggaggatgtgaactgagagtgaagttcagcagaagcgccgacgcccctgcctaccagcagggacagaaccaactgtacaacgagctgaacctgggcagacgggaagagtacgacgtgctggacaagcggagaggcagggaccctgagatgggcggaaagccccagcggagaaagaacccccaggaaggactgtataacgaactccagaaagacaagatggccgaagcctacagcgagatcggcatgaagggcgagcggagaagaggcaagggccacgatggcctgtaccagggcctgagcaccgccaccaaggacacctatgacgccctgcacatgcaggccctgcctccaaga

SEQ ID NO: 27001 - DNA, 888 bp, synthetic construct
  source 1..888: mol_type = other DNA
gaccatgtggaactgtcttggtgggtcaacggcaaagaggtgcacagcggcgtgtgtaccgacccccagccactgaaagaacagcccgccctgaacgacagccggtactgcctgagcagcagactgagagtgtccgccaccttctggcagaacccccggaaccacttcagatgccaggtgcagttctacggcctgagcgagaacgacgagtggacccaggacagagccaagcccgtgacccagatcgtgtctgccgaagcctggggcagagccgattgcggctttaccagcgagagctaccagcagggcgtgctgagcgccaccatcctgtacgagatcctgctgggcaaggccaccctgtacgccgtgctggtgtctgccctggtgctgatggctatggtcaagcggaaggacagccggggaaaacggggcagaaagaaactcctgtatatattcaaacaaccatttatgagaccagtacaaactactcaagaggaagatggctgtagctgccgatttccagaagaagaagaaggaggatgtgaactgagagtgaagttcagcagaagcgccgacgcccctgcctaccagcagggacagaaccaactgtacaacgagctgaacctgggcagacgggaagagtacgacgtgctggacaagcggagaggcagggaccctgagatgggcggaaagccccagcggagaaagaacccccaggaaggactgtataacgaactccagaaagacaagatggccgaagcctacagcgagatcggcatgaagggcgagcggagaagaggcaagggccacgatggcctgtaccagggcctgagcaccgccaccaaggacacctatgacgccctgcacatgcaggccctgcctccaaga

SEQ ID NO: 27002 - DNA, 885 bp, synthetic construct
  source 1..885: mol_type = other DNA
catgtggaactgtcttggtgggtcaacggcaaagaggtgcacagcggcgtgtgtaccgacccccagccactgaaagaacagcccgccctgaacgacagccggtactgcctgagcagcagactgagagtgtccgccaccttctggcagaacccccggaaccacttcagatgccaggtgcagttctacggcctgagcgagaacgacgagtggacccaggacagagccaagcccgtgacccagatcgtgtctgccgaagcctggggcagagccgattgcggctttaccagcgagagctaccagcagggcgtgctgagcgccaccatcctgtacgagatcctgctgggcaaggccaccctgtacgccgtgctggtgtctgccctggtgctgatggctatggtcaagcggaaggacagccggggaaaacggggcagaaagaaactcctgtatatattcaaacaaccatttatgagaccagtacaaactactcaagaggaagatggctgtagctgccgatttccagaagaagaagaaggaggatgtgaactgagagtgaagttcagcagaagcgccgacgcccctgcctaccagcagggacagaaccaactgtacaacgagctgaacctgggcagacgggaagagtacgacgtgctggacaagcggagaggcagggaccctgagatgggcggaaagccccagcggagaaagaacccccaggaaggactgtataacgaactccagaaagacaagatggccgaagcctacagcgagatcggcatgaagggcgagcggagaagaggcaagggccacgatggcctgtaccagggcctgagcaccgccaccaaggacacctatgacgccctgcacatgcaggccctgcctccaaga

SEQ ID NO: 27003 - DNA, 882 bp, synthetic construct
  source 1..882: mol_type = other DNA
gtggaactgtcttggtgggtcaacggcaaagaggtgcacagcggcgtgtgtaccgacccccagccactgaaagaacagcccgccctgaacgacagccggtactgcctgagcagcagactgagagtgtccgccaccttctggcagaacccccggaaccacttcagatgccaggtgcagttctacggcctgagcgagaacgacgagtggacccaggacagagccaagcccgtgacccagatcgtgtctgccgaagcctggggcagagccgattgcggctttaccagcgagagctaccagcagggcgtgctgagcgccaccatcctgtacgagatcctgctgggcaaggccaccctgtacgccgtgctggtgtctgccctggtgctgatggctatggtcaagcggaaggacagccggggaaaacggggcagaaagaaactcctgtatatattcaaacaaccatttatgagaccagtacaaactactcaagaggaagatggctgtagctgccgatttccagaagaagaagaaggaggatgtgaactgagagtgaagttcagcagaagcgccgacgcccctgcctaccagcagggacagaaccaactgtacaacgagctgaacctgggcagacgggaagagtacgacgtgctggacaagcggagaggcagggaccctgagatgggcggaaagccccagcggagaaagaacccccaggaaggactgtataacgaactccagaaagacaagatggccgaagcctacagcgagatcggcatgaagggcgagcggagaagaggcaagggccacgatggcctgtaccagggcctgagcaccgccaccaaggacacctatgacgccctgcacatgcaggccctgcctccaaga

SEQ ID NO: 27004 - DNA, 879 bp, synthetic construct
  source 1..879: mol_type = other DNA
gaactgtcttggtgggtcaacggcaaagaggtgcacagcggcgtgtgtaccgacccccagccactgaaagaacagcccgccctgaacgacagccggtactgcctgagcagcagactgagagtgtccgccaccttctggcagaacccccggaaccacttcagatgccaggtgcagttctacggcctgagcgagaacgacgagtggacccaggacagagccaagcccgtgacccagatcgtgtctgccgaagcctggggcagagccgattgcggctttaccagcgagagctaccagcagggcgtgctgagcgccaccatcctgtacgagatcctgctgggcaaggccaccctgtacgccgtgctggtgtctgccctggtgctgatggctatggtcaagcggaaggacagccggggaaaacggggcagaaagaaactcctgtatatattcaaacaaccatttatgagaccagtacaaactactcaagaggaagatggctgtagctgccgatttccagaagaagaagaaggaggatgtgaactgagagtgaagttcagcagaagcgccgacgcccctgcctaccagcagggacagaaccaactgtacaacgagctgaacctgggcagacgggaagagtacgacgtgctggacaagcggagaggcagggaccctgagatgggcggaaagccccagcggagaaagaacccccaggaaggactgtataacgaactccagaaagacaagatggccgaagcctacagcgagatcggcatgaagggcgagcggagaagaggcaagggccacgatggcctgtaccagggcctgagcaccgccaccaaggacacctatgacgccctgcacatgcaggccctgcctccaaga

SEQ ID NO: 27005 - DNA, 876 bp, synthetic construct
  source 1..876: mol_type = other DNA
ctgtcttggtgggtcaacggcaaagaggtgcacagcggcgtgtgtaccgacccccagccactgaaagaacagcccgccctgaacgacagccggtactgcctgagcagcagactgagagtgtccgccaccttctggcagaacccccggaaccacttcagatgccaggtgcagttctacggcctgagcgagaacgacgagtggacccaggacagagccaagcccgtgacccagatcgtgtctgccgaagcctggggcagagccgattgcggctttaccagcgagagctaccagcagggcgtgctgagcgccaccatcctgtacgagatcctgctgggcaaggccaccctgtacgccgtgctggtgtctgccctggtgctgatggctatggtcaagcggaaggacagccggggaaaacggggcagaaagaaactcctgtatatattcaaacaaccatttatgagaccagtacaaactactcaagaggaagatggctgtagctgccgatttccagaagaagaagaaggaggatgtgaactgagagtgaagttcagcagaagcgccgacgcccctgcctaccagcagggacagaaccaactgtacaacgagctgaacctgggcagacgggaagagtacgacgtgctggacaagcggagaggcagggaccctgagatgggcggaaagccccagcggagaaagaacccccaggaaggactgtataacgaactccagaaagacaagatggccgaagcctacagcgagatcggcatgaagggcgagcggagaagaggcaagggccacgatggcctgtaccagggcctgagcaccgccaccaaggacacctatgacgccctgcacatgcaggccctgcctccaaga

SEQ ID NO: 27006 - DNA, 873 bp, synthetic construct
  source 1..873: mol_type = other DNA
tcttggtgggtcaacggcaaagaggtgcacagcggcgtgtgtaccgacccccagccactgaaagaacagcccgccctgaacgacagccggtactgcctgagcagcagactgagagtgtccgccaccttctggcagaacccccggaaccacttcagatgccaggtgcagttctacggcctgagcgagaacgacgagtggacccaggacagagccaagcccgtgacccagatcgtgtctgccgaagcctggggcagagccgattgcggctttaccagcgagagctaccagcagggcgtgctgagcgccaccatcctgtacgagatcctgctgggcaaggccaccctgtacgccgtgctggtgtctgccctggtgctgatggctatggtcaagcggaaggacagccggggaaaacggggcagaaagaaactcctgtatatattcaaacaaccatttatgagaccagtacaaactactcaagaggaagatggctgtagctgccgatttccagaagaagaagaaggaggatgtgaactgagagtgaagttcagcagaagcgccgacgcccctgcctaccagcagggacagaaccaactgtacaacgagctgaacctgggcagacgggaagagtacgacgtgctggacaagcggagaggcagggaccctgagatgggcggaaagccccagcggagaaagaacccccaggaaggactgtataacgaactccagaaagacaagatggccgaagcctacagcgagatcggcatgaagggcgagcggagaagaggcaagggccacgatggcctgtaccagggcctgagcaccgccaccaaggacacctatgacgccctgcacatgcaggccctgcctccaaga

SEQ ID NO: 27007 - DNA, 870 bp, synthetic construct
  source 1..870: mol_type = other DNA
tggtgggtcaacggcaaagaggtgcacagcggcgtgtgtaccgacccccagccactgaaagaacagcccgccctgaacgacagccggtactgcctgagcagcagactgagagtgtccgccaccttctggcagaacccccggaaccacttcagatgccaggtgcagttctacggcctgagcgagaacgacgagtggacccaggacagagccaagcccgtgacccagatcgtgtctgccgaagcctggggcagagccgattgcggctttaccagcgagagctaccagcagggcgtgctgagcgccaccatcctgtacgagatcctgctgggcaaggccaccctgtacgccgtgctggtgtctgccctggtgctgatggctatggtcaagcggaaggacagccggggaaaacggggcagaaagaaactcctgtatatattcaaacaaccatttatgagaccagtacaaactactcaagaggaagatggctgtagctgccgatttccagaagaagaagaaggaggatgtgaactgagagtgaagttcagcagaagcgccgacgcccctgcctaccagcagggacagaaccaactgtacaacgagctgaacctgggcagacgggaagagtacgacgtgctggacaagcggagaggcagggaccctgagatgggcggaaagccccagcggagaaagaacccccaggaaggactgtataacgaactccagaaagacaagatggccgaagcctacagcgagatcggcatgaagggcgagcggagaagaggcaagggccacgatggcctgtaccagggcctgagcaccgccaccaaggacacctatgacgccctgcacatgcaggccctgcctccaaga

SEQ ID NO: 27008 - DNA, 867 bp, synthetic construct
  source 1..867: mol_type = other DNA
tgggtcaacggcaaagaggtgcacagcggcgtgtgtaccgacccccagccactgaaagaacagcccgccctgaacgacagccggtactgcctgagcagcagactgagagtgtccgccaccttctggcagaacccccggaaccacttcagatgccaggtgcagttctacggcctgagcgagaacgacgagtggacccaggacagagccaagcccgtgacccagatcgtgtctgccgaagcctggggcagagccgattgcggctttaccagcgagagctaccagcagggcgtgctgagcgccaccatcctgtacgagatcctgctgggcaaggccaccctgtacgccgtgctggtgtctgccctggtgctgatggctatggtcaagcggaaggacagccggggaaaacggggcagaaagaaactcctgtatatattcaaacaaccatttatgagaccagtacaaactactcaagaggaagatggctgtagctgccgatttccagaagaagaagaaggaggatgtgaactgagagtgaagttcagcagaagcgccgacgcccctgcctaccagcagggacagaaccaactgtacaacgagctgaacctgggcagacgggaagagtacgacgtgctggacaagcggagaggcagggaccctgagatgggcggaaagccccagcggagaaagaacccccaggaaggactgtataacgaactccagaaagacaagatggccgaagcctacagcgagatcggcatgaagggcgagcggagaagaggcaagggccacgatggcctgtaccagggcctgagcaccgccaccaaggacacctatgacgccctgcacatgcaggccctgcctccaaga

SEQ ID NO: 27009 - DNA, 864 bp, synthetic construct
  source 1..864: mol_type = other DNA
gtcaacggcaaagaggtgcacagcggcgtgtgtaccgacccccagccactgaaagaacagcccgccctgaacgacagccggtactgcctgagcagcagactgagagtgtccgccaccttctggcagaacccccggaaccacttcagatgccaggtgcagttctacggcctgagcgagaacgacgagtggacccaggacagagccaagcccgtgacccagatcgtgtctgccgaagcctggggcagagccgattgcggctttaccagcgagagctaccagcagggcgtgctgagcgccaccatcctgtacgagatcctgctgggcaaggccaccctgtacgccgtgctggtgtctgccctggtgctgatggctatggtcaagcggaaggacagccggggaaaacggggcagaaagaaactcctgtatatattcaaacaaccatttatgagaccagtacaaactactcaagaggaagatggctgtagctgccgatttccagaagaagaagaaggaggatgtgaactgagagtgaagttcagcagaagcgccgacgcccctgcctaccagcagggacagaaccaactgtacaacgagctgaacctgggcagacgggaagagtacgacgtgctggacaagcggagaggcagggaccctgagatgggcggaaagccccagcggagaaagaacccccaggaaggactgtataacgaactccagaaagacaagatggccgaagcctacagcgagatcggcatgaagggcgagcggagaagaggcaagggccacgatggcctgtaccagggcctgagcaccgccaccaaggacacctatgacgccctgcacatgcaggccctgcctccaaga

SEQ ID NO: 27010 - DNA, 861 bp, synthetic construct
  source 1..861: mol_type = other DNA
aacggcaaagaggtgcacagcggcgtgtgtaccgacccccagccactgaaagaacagcccgccctgaacgacagccggtactgcctgagcagcagactgagagtgtccgccaccttctggcagaacccccggaaccacttcagatgccaggtgcagttctacggcctgagcgagaacgacgagtggacccaggacagagccaagcccgtgacccagatcgtgtctgccgaagcctggggcagagccgattgcggctttaccagcgagagctaccagcagggcgtgctgagcgccaccatcctgtacgagatcctgctgggcaaggccaccctgtacgccgtgctggtgtctgccctggtgctgatggctatggtcaagcggaaggacagccggggaaaacggggcagaaagaaactcctgtatatattcaaacaaccatttatgagaccagtacaaactactcaagaggaagatggctgtagctgccgatttccagaagaagaagaaggaggatgtgaactgagagtgaagttcagcagaagcgccgacgcccctgcctaccagcagggacagaaccaactgtacaacgagctgaacctgggcagacgggaagagtacgacgtgctggacaagcggagaggcagggaccctgagatgggcggaaagccccagcggagaaagaacccccaggaaggactgtataacgaactccagaaagacaagatggccgaagcctacagcgagatcggcatgaagggcgagcggagaagaggcaagggccacgatggcctgtaccagggcctgagcaccgccaccaaggacacctatgacgccctgcacatgcaggccctgcctccaaga

SEQ ID NO: 27011 - DNA, 858 bp, synthetic construct
  source 1..858: mol_type = other DNA
ggcaaagaggtgcacagcggcgtgtgtaccgacccccagccactgaaagaacagcccgccctgaacgacagccggtactgcctgagcagcagactgagagtgtccgccaccttctggcagaacccccggaaccacttcagatgccaggtgcagttctacggcctgagcgagaacgacgagtggacccaggacagagccaagcccgtgacccagatcgtgtctgccgaagcctggggcagagccgattgcggctttaccagcgagagctaccagcagggcgtgctgagcgccaccatcctgtacgagatcctgctgggcaaggccaccctgtacgccgtgctggtgtctgccctggtgctgatggctatggtcaagcggaaggacagccggggaaaacggggcagaaagaaactcctgtatatattcaaacaaccatttatgagaccagtacaaactactcaagaggaagatggctgtagctgccgatttccagaagaagaagaaggaggatgtgaactgagagtgaagttcagcagaagcgccgacgcccctgcctaccagcagggacagaaccaactgtacaacgagctgaacctgggcagacgggaagagtacgacgtgctggacaagcggagaggcagggaccctgagatgggcggaaagccccagcggagaaagaacccccaggaaggactgtataacgaactccagaaagacaagatggccgaagcctacagcgagatcggcatgaagggcgagcggagaagaggcaagggccacgatggcctgtaccagggcctgagcaccgccaccaaggacacctatgacgccctgcacatgcaggccctgcctccaaga

SEQ ID NO: 27012 - DNA, 855 bp, synthetic construct
  source 1..855: mol_type = other DNA
aaagaggtgcacagcggcgtgtgtaccgacccccagccactgaaagaacagcccgccctgaacgacagccggtactgcctgagcagcagactgagagtgtccgccaccttctggcagaacccccggaaccacttcagatgccaggtgcagttctacggcctgagcgagaacgacgagtggacccaggacagagccaagcccgtgacccagatcgtgtctgccgaagcctggggcagagccgattgcggctttaccagcgagagctaccagcagggcgtgctgagcgccaccatcctgtacgagatcctgctgggcaaggccaccctgtacgccgtgctggtgtctgccctggtgctgatggctatggtcaagcggaaggacagccggggaaaacggggcagaaagaaactcctgtatatattcaaacaaccatttatgagaccagtacaaactactcaagaggaagatggctgtagctgccgatttccagaagaagaagaaggaggatgtgaactgagagtgaagttcagcagaagcgccgacgcccctgcctaccagcagggacagaaccaactgtacaacgagctgaacctgggcagacgggaagagtacgacgtgctggacaagcggagaggcagggaccctgagatgggcggaaagccccagcggagaaagaacccccaggaaggactgtataacgaactccagaaagacaagatggccgaagcctacagcgagatcggcatgaagggcgagcggagaagaggcaagggccacgatggcctgtaccagggcctgagcaccgccaccaaggacacctatgacgccctgcacatgcaggccctgcctccaaga

SEQ ID NO: 27013 - DNA, 852 bp, synthetic construct
  source 1..852: mol_type = other DNA
gaggtgcacagcggcgtgtgtaccgacccccagccactgaaagaacagcccgccctgaacgacagccggtactgcctgagcagcagactgagagtgtccgccaccttctggcagaacccccggaaccacttcagatgccaggtgcagttctacggcctgagcgagaacgacgagtggacccaggacagagccaagcccgtgacccagatcgtgtctgccgaagcctggggcagagccgattgcggctttaccagcgagagctaccagcagggcgtgctgagcgccaccatcctgtacgagatcctgctgggcaaggccaccctgtacgccgtgctggtgtctgccctggtgctgatggctatggtcaagcggaaggacagccggggaaaacggggcagaaagaaactcctgtatatattcaaacaaccatttatgagaccagtacaaactactcaagaggaagatggctgtagctgccgatttccagaagaagaagaaggaggatgtgaactgagagtgaagttcagcagaagcgccgacgcccctgcctaccagcagggacagaaccaactgtacaacgagctgaacctgggcagacgggaagagtacgacgtgctggacaagcggagaggcagggaccctgagatgggcggaaagccccagcggagaaagaacccccaggaaggactgtataacgaactccagaaagacaagatggccgaagcctacagcgagatcggcatgaagggcgagcggagaagaggcaagggccacgatggcctgtaccagggcctgagcaccgccaccaaggacacctatgacgccctgcacatgcaggccctgcctccaaga

SEQ ID NO: 27014 - DNA, 849 bp, synthetic construct
  source 1..849: mol_type = other DNA
gtgcacagcggcgtgtgtaccgacccccagccactgaaagaacagcccgccctgaacgacagccggtactgcctgagcagcagactgagagtgtccgccaccttctggcagaacccccggaaccacttcagatgccaggtgcagttctacggcctgagcgagaacgacgagtggacccaggacagagccaagcccgtgacccagatcgtgtctgccgaagcctggggcagagccgattgcggctttaccagcgagagctaccagcagggcgtgctgagcgccaccatcctgtacgagatcctgctgggcaaggccaccctgtacgccgtgctggtgtctgccctggtgctgatggctatggtcaagcggaaggacagccggggaaaacggggcagaaagaaactcctgtatatattcaaacaaccatttatgagaccagtacaaactactcaagaggaagatggctgtagctgccgatttccagaagaagaagaaggaggatgtgaactgagagtgaagttcagcagaagcgccgacgcccctgcctaccagcagggacagaaccaactgtacaacgagctgaacctgggcagacgggaagagtacgacgtgctggacaagcggagaggcagggaccctgagatgggcggaaagccccagcggagaaagaacccccaggaaggactgtataacgaactccagaaagacaagatggccgaagcctacagcgagatcggcatgaagggcgagcggagaagaggcaagggccacgatggcctgtaccagggcctgagcaccgccaccaaggacacctatgacgccctgcacatgcaggccctgcctccaaga

SEQ ID NO: 27015 - DNA, 846 bp, synthetic construct
  source 1..846: mol_type = other DNA
cacagcggcgtgtgtaccgacccccagccactgaaagaacagcccgccctgaacgacagccggtactgcctgagcagcagactgagagtgtccgccaccttctggcagaacccccggaaccacttcagatgccaggtgcagttctacggcctgagcgagaacgacgagtggacccaggacagagccaagcccgtgacccagatcgtgtctgccgaagcctggggcagagccgattgcggctttaccagcgagagctaccagcagggcgtgctgagcgccaccatcctgtacgagatcctgctgggcaaggccaccctgtacgccgtgctggtgtctgccctggtgctgatggctatggtcaagcggaaggacagccggggaaaacggggcagaaagaaactcctgtatatattcaaacaaccatttatgagaccagtacaaactactcaagaggaagatggctgtagctgccgatttccagaagaagaagaaggaggatgtgaactgagagtgaagttcagcagaagcgccgacgcccctgcctaccagcagggacagaaccaactgtacaacgagctgaacctgggcagacgggaagagtacgacgtgctggacaagcggagaggcagggaccctgagatgggcggaaagccccagcggagaaagaacccccaggaaggactgtataacgaactccagaaagacaagatggccgaagcctacagcgagatcggcatgaagggcgagcggagaagaggcaagggccacgatggcctgtaccagggcctgagcaccgccaccaaggacacctatgacgccctgcacatgcaggccctgcctccaaga

SEQ ID NO: 27016 - DNA, 843 bp, synthetic construct
  source 1..843: mol_type = other DNA
agcggcgtgtgtaccgacccccagccactgaaagaacagcccgccctgaacgacagccggtactgcctgagcagcagactgagagtgtccgccaccttctggcagaacccccggaaccacttcagatgccaggtgcagttctacggcctgagcgagaacgacgagtggacccaggacagagccaagcccgtgacccagatcgtgtctgccgaagcctggggcagagccgattgcggctttaccagcgagagctaccagcagggcgtgctgagcgccaccatcctgtacgagatcctgctgggcaaggccaccctgtacgccgtgctggtgtctgccctggtgctgatggctatggtcaagcggaaggacagccggggaaaacggggcagaaagaaactcctgtatatattcaaacaaccatttatgagaccagtacaaactactcaagaggaagatggctgtagctgccgatttccagaagaagaagaaggaggatgtgaactgagagtgaagttcagcagaagcgccgacgcccctgcctaccagcagggacagaaccaactgtacaacgagctgaacctgggcagacgggaagagtacgacgtgctggacaagcggagaggcagggaccctgagatgggcggaaagccccagcggagaaagaacccccaggaaggactgtataacgaactccagaaagacaagatggccgaagcctacagcgagatcggcatgaagggcgagcggagaagaggcaagggccacgatggcctgtaccagggcctgagcaccgccaccaaggacacctatgacgccctgcacatgcaggccctgcctccaaga

SEQ ID NO: 27017 - DNA, 840 bp, synthetic construct
  source 1..840: mol_type = other DNA
ggcgtgtgtaccgacccccagccactgaaagaacagcccgccctgaacgacagccggtactgcctgagcagcagactgagagtgtccgccaccttctggcagaacccccggaaccacttcagatgccaggtgcagttctacggcctgagcgagaacgacgagtggacccaggacagagccaagcccgtgacccagatcgtgtctgccgaagcctggggcagagccgattgcggctttaccagcgagagctaccagcagggcgtgctgagcgccaccatcctgtacgagatcctgctgggcaaggccaccctgtacgccgtgctggtgtctgccctggtgctgatggctatggtcaagcggaaggacagccggggaaaacggggcagaaagaaactcctgtatatattcaaacaaccatttatgagaccagtacaaactactcaagaggaagatggctgtagctgccgatttccagaagaagaagaaggaggatgtgaactgagagtgaagttcagcagaagcgccgacgcccctgcctaccagcagggacagaaccaactgtacaacgagctgaacctgggcagacgggaagagtacgacgtgctggacaagcggagaggcagggaccctgagatgggcggaaagccccagcggagaaagaacccccaggaaggactgtataacgaactccagaaagacaagatggccgaagcctacagcgagatcggcatgaagggcgagcggagaagaggcaagggccacgatggcctgtaccagggcctgagcaccgccaccaaggacacctatgacgccctgcacatgcaggccctgcctccaaga

SEQ ID NO: 27018 - DNA, 837 bp, synthetic construct
  source 1..837: mol_type = other DNA
gtgtgtaccgacccccagccactgaaagaacagcccgccctgaacgacagccggtactgcctgagcagcagactgagagtgtccgccaccttctggcagaacccccggaaccacttcagatgccaggtgcagttctacggcctgagcgagaacgacgagtggacccaggacagagccaagcccgtgacccagatcgtgtctgccgaagcctggggcagagccgattgcggctttaccagcgagagctaccagcagggcgtgctgagcgccaccatcctgtacgagatcctgctgggcaaggccaccctgtacgccgtgctggtgtctgccctggtgctgatggctatggtcaagcggaaggacagccggggaaaacggggcagaaagaaactcctgtatatattcaaacaaccatttatgagaccagtacaaactactcaagaggaagatggctgtagctgccgatttccagaagaagaagaaggaggatgtgaactgagagtgaagttcagcagaagcgccgacgcccctgcctaccagcagggacagaaccaactgtacaacgagctgaacctgggcagacgggaagagtacgacgtgctggacaagcggagaggcagggaccctgagatgggcggaaagccccagcggagaaagaacccccaggaaggactgtataacgaactccagaaagacaagatggccgaagcctacagcgagatcggcatgaagggcgagcggagaagaggcaagggccacgatggcctgtaccagggcctgagcaccgccaccaaggacacctatgacgccctgcacatgcaggccctgcctccaaga

SEQ ID NO: 27019 - DNA, 834 bp, synthetic construct
  source 1..834: mol_type = other DNA
tgtaccgacccccagccactgaaagaacagcccgccctgaacgacagccggtactgcctgagcagcagactgagagtgtccgccaccttctggcagaacccccggaaccacttcagatgccaggtgcagttctacggcctgagcgagaacgacgagtggacccaggacagagccaagcccgtgacccagatcgtgtctgccgaagcctggggcagagccgattgcggctttaccagcgagagctaccagcagggcgtgctgagcgccaccatcctgtacgagatcctgctgggcaaggccaccctgtacgccgtgctggtgtctgccctggtgctgatggctatggtcaagcggaaggacagccggggaaaacggggcagaaagaaactcctgtatatattcaaacaaccatttatgagaccagtacaaactactcaagaggaagatggctgtagctgccgatttccagaagaagaagaaggaggatgtgaactgagagtgaagttcagcagaagcgccgacgcccctgcctaccagcagggacagaaccaactgtacaacgagctgaacctgggcagacgggaagagtacgacgtgctggacaagcggagaggcagggaccctgagatgggcggaaagccccagcggagaaagaacccccaggaaggactgtataacgaactccagaaagacaagatggccgaagcctacagcgagatcggcatgaagggcgagcggagaagaggcaagggccacgatggcctgtaccagggcctgagcaccgccaccaaggacacctatgacgccctgcacatgcaggccctgcctccaaga

SEQ ID NO: 27020 - DNA, 831 bp, synthetic construct
  source 1..831: mol_type = other DNA
accgacccccagccactgaaagaacagcccgccctgaacgacagccggtactgcctgagcagcagactgagagtgtccgccaccttctggcagaacccccggaaccacttcagatgccaggtgcagttctacggcctgagcgagaacgacgagtggacccaggacagagccaagcccgtgacccagatcgtgtctgccgaagcctggggcagagccgattgcggctttaccagcgagagctaccagcagggcgtgctgagcgccaccatcctgtacgagatcctgctgggcaaggccaccctgtacgccgtgctggtgtctgccctggtgctgatggctatggtcaagcggaaggacagccggggaaaacggggcagaaagaaactcctgtatatattcaaacaaccatttatgagaccagtacaaactactcaagaggaagatggctgtagctgccgatttccagaagaagaagaaggaggatgtgaactgagagtgaagttcagcagaagcgccgacgcccctgcctaccagcagggacagaaccaactgtacaacgagctgaacctgggcagacgggaagagtacgacgtgctggacaagcggagaggcagggaccctgagatgggcggaaagccccagcggagaaagaacccccaggaaggactgtataacgaactccagaaagacaagatggccgaagcctacagcgagatcggcatgaagggcgagcggagaagaggcaagggccacgatggcctgtaccagggcctgagcaccgccaccaaggacacctatgacgccctgcacatgcaggccctgcctccaaga

SEQ ID NO: 27021 - DNA, 828 bp, synthetic construct
  source 1..828: mol_type = other DNA
gacccccagccactgaaagaacagcccgccctgaacgacagccggtactgcctgagcagcagactgagagtgtccgccaccttctggcagaacccccggaaccacttcagatgccaggtgcagttctacggcctgagcgagaacgacgagtggacccaggacagagccaagcccgtgacccagatcgtgtctgccgaagcctggggcagagccgattgcggctttaccagcgagagctaccagcagggcgtgctgagcgccaccatcctgtacgagatcctgctgggcaaggccaccctgtacgccgtgctggtgtctgccctggtgctgatggctatggtcaagcggaaggacagccggggaaaacggggcagaaagaaactcctgtatatattcaaacaaccatttatgagaccagtacaaactactcaagaggaagatggctgtagctgccgatttccagaagaagaagaaggaggatgtgaactgagagtgaagttcagcagaagcgccgacgcccctgcctaccagcagggacagaaccaactgtacaacgagctgaacctgggcagacgggaagagtacgacgtgctggacaagcggagaggcagggaccctgagatgggcggaaagccccagcggagaaagaacccccaggaaggactgtataacgaactccagaaagacaagatggccgaagcctacagcgagatcggcatgaagggcgagcggagaagaggcaagggccacgatggcctgtaccagggcctgagcaccgccaccaaggacacctatgacgccctgcacatgcaggccctgcctccaaga

SEQ ID NO: 27022 - DNA, 825 bp, synthetic construct
  source 1..825: mol_type = other DNA
ccccagccactgaaagaacagcccgccctgaacgacagccggtactgcctgagcagcagactgagagtgtccgccaccttctggcagaacccccggaaccacttcagatgccaggtgcagttctacggcctgagcgagaacgacgagtggacccaggacagagccaagcccgtgacccagatcgtgtctgccgaagcctggggcagagccgattgcggctttaccagcgagagctaccagcagggcgtgctgagcgccaccatcctgtacgagatcctgctgggcaaggccaccctgtacgccgtgctggtgtctgccctggtgctgatggctatggtcaagcggaaggacagccggggaaaacggggcagaaagaaactcctgtatatattcaaacaaccatttatgagaccagtacaaactactcaagaggaagatggctgtagctgccgatttccagaagaagaagaaggaggatgtgaactgagagtgaagttcagcagaagcgccgacgcccctgcctaccagcagggacagaaccaactgtacaacgagctgaacctgggcagacgggaagagtacgacgtgctggacaagcggagaggcagggaccctgagatgggcggaaagccccagcggagaaagaacccccaggaaggactgtataacgaactccagaaagacaagatggccgaagcctacagcgagatcggcatgaagggcgagcggagaagaggcaagggccacgatggcctgtaccagggcctgagcaccgccaccaaggacacctatgacgccctgcacatgcaggccctgcctccaaga

SEQ ID NO: 27023 - DNA, 822 bp, synthetic construct
  source 1..822: mol_type = other DNA
cagccactgaaagaacagcccgccctgaacgacagccggtactgcctgagcagcagactgagagtgtccgccaccttctggcagaacccccggaaccacttcagatgccaggtgcagttctacggcctgagcgagaacgacgagtggacccaggacagagccaagcccgtgacccagatcgtgtctgccgaagcctggggcagagccgattgcggctttaccagcgagagctaccagcagggcgtgctgagcgccaccatcctgtacgagatcctgctgggcaaggccaccctgtacgccgtgctggtgtctgccctggtgctgatggctatggtcaagcggaaggacagccggggaaaacggggcagaaagaaactcctgtatatattcaaacaaccatttatgagaccagtacaaactactcaagaggaagatggctgtagctgccgatttccagaagaagaagaaggaggatgtgaactgagagtgaagttcagcagaagcgccgacgcccctgcctaccagcagggacagaaccaactgtacaacgagctgaacctgggcagacgggaagagtacgacgtgctggacaagcggagaggcagggaccctgagatgggcggaaagccccagcggagaaagaacccccaggaaggactgtataacgaactccagaaagacaagatggccgaagcctacagcgagatcggcatgaagggcgagcggagaagaggcaagggccacgatggcctgtaccagggcctgagcaccgccaccaaggacacctatgacgccctgcacatgcaggccctgcctccaaga

SEQ ID NO: 27024 - DNA, 819 bp, synthetic construct
  source 1..819: mol_type = other DNA
ccactgaaagaacagcccgccctgaacgacagccggtactgcctgagcagcagactgagagtgtccgccaccttctggcagaacccccggaaccacttcagatgccaggtgcagttctacggcctgagcgagaacgacgagtggacccaggacagagccaagcccgtgacccagatcgtgtctgccgaagcctggggcagagccgattgcggctttaccagcgagagctaccagcagggcgtgctgagcgccaccatcctgtacgagatcctgctgggcaaggccaccctgtacgccgtgctggtgtctgccctggtgctgatggctatggtcaagcggaaggacagccggggaaaacggggcagaaagaaactcctgtatatattcaaacaaccatttatgagaccagtacaaactactcaagaggaagatggctgtagctgccgatttccagaagaagaagaaggaggatgtgaactgagagtgaagttcagcagaagcgccgacgcccctgcctaccagcagggacagaaccaactgtacaacgagctgaacctgggcagacgggaagagtacgacgtgctggacaagcggagaggcagggaccctgagatgggcggaaagccccagcggagaaagaacccccaggaaggactgtataacgaactccagaaagacaagatggccgaagcctacagcgagatcggcatgaagggcgagcggagaagaggcaagggccacgatggcctgtaccagggcctgagcaccgccaccaaggacacctatgacgccctgcacatgcaggccctgcctccaaga

SEQ ID NO: 27025 - DNA, 816 bp, synthetic construct
  source 1..816: mol_type = other DNA
ctgaaagaacagcccgccctgaacgacagccggtactgcctgagcagcagactgagagtgtccgccaccttctggcagaacccccggaaccacttcagatgccaggtgcagttctacggcctgagcgagaacgacgagtggacccaggacagagccaagcccgtgacccagatcgtgtctgccgaagcctggggcagagccgattgcggctttaccagcgagagctaccagcagggcgtgctgagcgccaccatcctgtacgagatcctgctgggcaaggccaccctgtacgccgtgctggtgtctgccctggtgctgatggctatggtcaagcggaaggacagccggggaaaacggggcagaaagaaactcctgtatatattcaaacaaccatttatgagaccagtacaaactactcaagaggaagatggctgtagctgccgatttccagaagaagaagaaggaggatgtgaactgagagtgaagttcagcagaagcgccgacgcccctgcctaccagcagggacagaaccaactgtacaacgagctgaacctgggcagacgggaagagtacgacgtgctggacaagcggagaggcagggaccctgagatgggcggaaagccccagcggagaaagaacccccaggaaggactgtataacgaactccagaaagacaagatggccgaagcctacagcgagatcggcatgaagggcgagcggagaagaggcaagggccacgatggcctgtaccagggcctgagcaccgccaccaaggacacctatgacgccctgcacatgcaggccctgcctccaaga

SEQ ID NO: 27026 - DNA, 813 bp, synthetic construct
  source 1..813: mol_type = other DNA
aaagaacagcccgccctgaacgacagccggtactgcctgagcagcagactgagagtgtccgccaccttctggcagaacccccggaaccacttcagatgccaggtgcagttctacggcctgagcgagaacgacgagtggacccaggacagagccaagcccgtgacccagatcgtgtctgccgaagcctggggcagagccgattgcggctttaccagcgagagctaccagcagggcgtgctgagcgccaccatcctgtacgagatcctgctgggcaaggccaccctgtacgccgtgctggtgtctgccctggtgctgatggctatggtcaagcggaaggacagccggggaaaacggggcagaaagaaactcctgtatatattcaaacaaccatttatgagaccagtacaaactactcaagaggaagatggctgtagctgccgatttccagaagaagaagaaggaggatgtgaactgagagtgaagttcagcagaagcgccgacgcccctgcctaccagcagggacagaaccaactgtacaacgagctgaacctgggcagacgggaagagtacgacgtgctggacaagcggagaggcagggaccctgagatgggcggaaagccccagcggagaaagaacccccaggaaggactgtataacgaactccagaaagacaagatggccgaagcctacagcgagatcggcatgaagggcgagcggagaagaggcaagggccacgatggcctgtaccagggcctgagcaccgccaccaaggacacctatgacgccctgcacatgcaggccctgcctccaaga

SEQ ID NO: 27027 - DNA, 810 bp, synthetic construct; identical to SEQ ID NO: 26630
  source 1..810: mol_type = other DNA

SEQ ID NO: 27028 - DNA, 807 bp, synthetic construct
  source 1..807: mol_type = other DNA
cagcccgccctgaacgacagccggtactgcctgagcagcagactgagagtgtccgccaccttctggcagaacccccggaaccacttcagatgccaggtgcagttctacggcctgagcgagaacgacgagtggacccaggacagagccaagcccgtgacccagatcgtgtctgccgaagcctggggcagagccgattgcggctttaccagcgagagctaccagcagggcgtgctgagcgccaccatcctgtacgagatcctgctgggcaaggccaccctgtacgccgtgctggtgtctgccctggtgctgatggctatggtcaagcggaaggacagccggggaaaacggggcagaaagaaactcctgtatatattcaaacaaccatttatgagaccagtacaaactactcaagaggaagatggctgtagctgccgatttccagaagaagaagaaggaggatgtgaactgagagtgaagttcagcagaagcgccgacgcccctgcctaccagcagggacagaaccaactgtacaacgagctgaacctgggcagacgggaagagtacgacgtgctggacaagcggagaggcagggaccctgagatgggcggaaagccccagcggagaaagaacccccaggaaggactgtataacgaactccagaaagacaagatggccgaagcctacagcgagatcggcatgaagggcgagcggagaagaggcaagggccacgatggcctgtaccagggcctgagcaccgccaccaaggacacctatgacgccctgcacatgcaggccctgcctccaaga

SEQ ID NO: 27029 - DNA, 804 bp, synthetic construct
  source 1..804: mol_type = other DNA
cccgccctgaacgacagccggtactgcctgagcagcagactgagagtgtccgccaccttctggcagaacccccggaaccacttcagatgccaggtgcagttctacggcctgagcgagaacgacgagtggacccaggacagagccaagcccgtgacccagatcgtgtctgccgaagcctggggcagagccgattgcggctttaccagcgagagctaccagcagggcgtgctgagcgccaccatcctgtacgagatcctgctgggcaaggccaccctgtacgccgtgctggtgtctgccctggtgctgatggctatggtcaagcggaaggacagccggggaaaacggggcagaaagaaactcctgtatatattcaaacaaccatttatgagaccagtacaaactactcaagaggaagatggctgtagctgccgatttccagaagaagaagaaggaggatgtgaactgagagtgaagttcagcagaagcgccgacgcccctgcctaccagcagggacagaaccaactgtacaacgagctgaacctgggcagacgggaagagtacgacgtgctggacaagcggagaggcagggaccctgagatgggcggaaagccccagcggagaaagaacccccaggaaggactgtataacgaactccagaaagacaagatggccgaagcctacagcgagatcggcatgaagggcgagcggagaagaggcaagggccacgatggcctgtaccagggcctgagcaccgccaccaaggacacctatgacgccctgcacatgcaggccctgcctccaaga

SEQ ID NO: 27030 - DNA, 801 bp, synthetic construct
  source 1..801: mol_type = other DNA
gccctgaacgacagccggtactgcctgagcagcagactgagagtgtccgccaccttctggcagaacccccggaaccacttcagatgccaggtgcagttctacggcctgagcgagaacgacgagtggacccaggacagagccaagcccgtgacccagatcgtgtctgccgaagcctggggcagagccgattgcggctttaccagcgagagctaccagcagggcgtgctgagcgccaccatcctgtacgagatcctgctgggcaaggccaccctgtacgccgtgctggtgtctgccctggtgctgatggctatggtcaagcggaaggacagccggggaaaacggggcagaaagaaactcctgtatatattcaaacaaccatttatgagaccagtacaaactactcaagaggaagatggctgtagctgccgatttccagaagaagaagaaggaggatgtgaactgagagtgaagttcagcagaagcgccgacgcccctgcctaccagcagggacagaaccaactgtacaacgagctgaacctgggcagacgggaagagtacgacgtgctggacaagcggagaggcagggaccctgagatgggcggaaagccccagcggagaaagaacccccaggaaggactgtataacgaactccagaaagacaagatggccgaagcctacagcgagatcggcatgaagggcgagcggagaagaggcaagggccacgatggcctgtaccagggcctgagcaccgccaccaaggacacctatgacgccctgcacatgcaggccctgcctccaaga

SEQ ID NO: 27031 - DNA, 798 bp, synthetic construct
  source 1..798: mol_type = other DNA
ctgaacgacagccggtactgcctgagcagcagactgagagtgtccgccaccttctggcagaacccccggaaccacttcagatgccaggtgcagttctacggcctgagcgagaacgacgagtggacccaggacagagccaagcccgtgacccagatcgtgtctgccgaagcctggggcagagccgattgcggctttaccagcgagagctaccagcagggcgtgctgagcgccaccatcctgtacgagatcctgctgggcaaggccaccctgtacgccgtgctggtgtctgccctggtgctgatggctatggtcaagcggaaggacagccggggaaaacggggcagaaagaaactcctgtatatattcaaacaaccatttatgagaccagtacaaactactcaagaggaagatggctgtagctgccgatttccagaagaagaagaaggaggatgtgaactgagagtgaagttcagcagaagcgccgacgcccctgcctaccagcagggacagaaccaactgtacaacgagctgaacctgggcagacgggaagagtacgacgtgctggacaagcggagaggcagggaccctgagatgggcggaaagccccagcggagaaagaacccccaggaaggactgtataacgaactccagaaagacaagatggccgaagcctacagcgagatcggcatgaagggcgagcggagaagaggcaagggccacgatggcctgtaccagggcctgagcaccgccaccaaggacacctatgacgccctgcacatgcaggccctgcctccaaga

SEQ ID NO: 27032 - DNA, 795 bp, synthetic construct
  source 1..795: mol_type = other DNA
aacgacagccggtactgcctgagcagcagactgagagtgtccgccaccttctggcagaacccccggaaccacttcagatgccaggtgcagttctacggcctgagcgagaacgacgagtggacccaggacagagccaagcccgtgacccagatcgtgtctgccgaagcctggggcagagccgattgcggctttaccagcgagagctaccagcagggcgtgctgagcgccaccatcctgtacgagatcctgctgggcaaggccaccctgtacgccgtgctggtgtctgccctggtgctgatggctatggtcaagcggaaggacagccggggaaaacggggcagaaagaaactcctgtatatattcaaacaaccatttatgagaccagtacaaactactcaagaggaagatggctgtagctgccgatttccagaagaagaagaaggaggatgtgaactgagagtgaagttcagcagaagcgccgacgcccctgcctaccagcagggacagaaccaactgtacaacgagctgaacctgggcagacgggaagagtacgacgtgctggacaagcggagaggcagggaccctgagatgggcggaaagccccagcggagaaagaacccccaggaaggactgtataacgaactccagaaagacaagatggccgaagcctacagcgagatcggcatgaagggcgagcggagaagaggcaagggccacgatggcctgtaccagggcctgagcaccgccaccaaggacacctatgacgccctgcacatgcaggccctgcctccaaga

SEQ ID NO: 27033 - DNA, 792 bp, synthetic construct
  source 1..792: mol_type = other DNA
gacagccggtactgcctgagcagcagactgagagtgtccgccaccttctggcagaacccccggaaccacttcagatgccaggtgcagttctacggcctgagcgagaacgacgagtggacccaggacagagccaagcccgtgacccagatcgtgtctgccgaagcctggggcagagccgattgcggctttaccagcgagagctaccagcagggcgtgctgagcgccaccatcctgtacgagatcctgctgggcaaggccaccctgtacgccgtgctggtgtctgccctggtgctgatggctatggtcaagcggaaggacagccggggaaaacggggcagaaagaaactcctgtatatattcaaacaaccatttatgagaccagtacaaactactcaagaggaagatggctgtagctgccgatttccagaagaagaagaaggaggatgtgaactgagagtgaagttcagcagaagcgccgacgcccctgcctaccagcagggacagaaccaactgtacaacgagctgaacctgggcagacgggaagagtacgacgtgctggacaagcggagaggcagggaccctgagatgggcggaaagccccagcggagaaagaacccccaggaaggactgtataacgaactccagaaagacaagatggccgaagcctacagcgagatcggcatgaagggcgagcggagaagaggcaagggccacgatggcctgtaccagggcctgagcaccgccaccaaggacacctatgacgccctgcacatgcaggccctgcctccaaga

SEQ ID NO: 27034 - DNA, 789 bp, synthetic construct
  source 1..789: mol_type = other DNA
agccggtactgcctgagcagcagactgagagtgtccgccaccttctggcagaacccccggaaccacttcagatgccaggtgcagttctacggcctgagcgagaacgacgagtggacccaggacagagccaagcccgtgacccagatcgtgtctgccgaagcctggggcagagccgattgcggctttaccagcgagagctaccagcagggcgtgctgagcgccaccatcctgtacgagatcctgctgggcaaggccaccctgtacgccgtgctggtgtctgccctggtgctgatggctatggtcaagcggaaggacagccggggaaaacggggcagaaagaaactcctgtatatattcaaacaaccatttatgagaccagtacaaactactcaagaggaagatggctgtagctgccgatttccagaagaagaagaaggaggatgtgaactgagagtgaagttcagcagaagcgccgacgcccctgcctaccagcagggacagaaccaactgtacaacgagctgaacctgggcagacgggaagagtacgacgtgctggacaagcggagaggcagggaccctgagatgggcggaaagccccagcggagaaagaacccccaggaaggactgtataacgaactccagaaagacaagatggccgaagcctacagcgagatcggcatgaagggcgagcggagaagaggcaagggccacgatggcctgtaccagggcctgagcaccgccaccaaggacacctatgacgccctgcacatgcaggccctgcctccaaga

SEQ ID NO: 27035 - DNA, 786 bp, synthetic construct
  source 1..786: mol_type = other DNA
cggtactgcctgagcagcagactgagagtgtccgccaccttctggcagaacccccggaaccacttcagatgccaggtgcagttctacggcctgagcgagaacgacgagtggacccaggacagagccaagcccgtgacccagatcgtgtctgccgaagcctggggcagagccgattgcggctttaccagcgagagctaccagcagggcgtgctgagcgccaccatcctgtacgagatcctgctgggcaaggccaccctgtacgccgtgctggtgtctgccctggtgctgatggctatggtcaagcggaaggacagccggggaaaacggggcagaaagaaactcctgtatatattcaaacaaccatttatgagaccagtacaaactactcaagaggaagatggctgtagctgccgatttccagaagaagaagaaggaggatgtgaactgagagtgaagttcagcagaagcgccgacgcccctgcctaccagcagggacagaaccaactgtacaacgagctgaacctgggcagacgggaagagtacgacgtgctggacaagcggagaggcagggaccctgagatgggcggaaagccccagcggagaaagaacccccaggaaggactgtataacgaactccagaaagacaagatggccgaagcctacagcgagatcggcatgaagggcgagcggagaagaggcaagggccacgatggcctgtaccagggcctgagcaccgccaccaaggacacctatgacgccctgcacatgcaggccctgcctccaaga

SEQ ID NO: 27036 - DNA, 783 bp, synthetic construct
  source 1..783: mol_type = other DNA
tactgcctgagcagcagactgagagtgtccgccaccttctggcagaacccccggaaccacttcagatgccaggtgcagttctacggcctgagcgagaacgacgagtggacccaggacagagccaagcccgtgacccagatcgtgtctgccgaagcctggggcagagccgattgcggctttaccagcgagagctaccagcagggcgtgctgagcgccaccatcctgtacgagatcctgctgggcaaggccaccctgtacgccgtgctggtgtctgccctggtgctgatggctatggtcaagcggaaggacagccggggaaaacggggcagaaagaaactcctgtatatattcaaacaaccatttatgagaccagtacaaactactcaagaggaagatggctgtagctgccgatttccagaagaagaagaaggaggatgtgaactgagagtgaagttcagcagaagcgccgacgcccctgcctaccagcagggacagaaccaactgtacaacgagctgaacctgggcagacgggaagagtacgacgtgctggacaagcggagaggcagggaccctgagatgggcggaaagccccagcggagaaagaacccccaggaaggactgtataacgaactccagaaagacaagatggccgaagcctacagcgagatcggcatgaagggcgagcggagaagaggcaagggccacgatggcctgtaccagggcctgagcaccgccaccaaggacacctatgacgccctgcacatgcaggccctgcctccaaga

SEQ ID NO: 27037 - DNA, 780 bp, synthetic construct
  source 1..780: mol_type = other DNA
tgcctgagcagcagactgagagtgtccgccaccttctggcagaacccccggaaccacttcagatgccaggtgcagttctacggcctgagcgagaacgacgagtggacccaggacagagccaagcccgtgacccagatcgtgtctgccgaagcctggggcagagccgattgcggctttaccagcgagagctaccagcagggcgtgctgagcgccaccatcctgtacgagatcctgctgggcaaggccaccctgtacgccgtgctggtgtctgccctggtgctgatggctatggtcaagcggaaggacagccggggaaaacggggcagaaagaaactcctgtatatattcaaacaaccatttatgagaccagtacaaactactcaagaggaagatggctgtagctgccgatttccagaagaagaagaaggaggatgtgaactgagagtgaagttcagcagaagcgccgacgcccctgcctaccagcagggacagaaccaactgtacaacgagctgaacctgggcagacgggaagagtacgacgtgctggacaagcggagaggcagggaccctgagatgggcggaaagccccagcggagaaagaacccccaggaaggactgtataacgaactccagaaagacaagatggccgaagcctacagcgagatcggcatgaagggcgagcggagaagaggcaagggccacgatggcctgtaccagggcctgagcaccgccaccaaggacacctatgacgccctgcacatgcaggccctgcctccaaga

SEQ ID NO: 27038 - DNA, 777 bp, synthetic construct
  source 1..777: mol_type = other DNA
ctgagcagcagactgagagtgtccgccaccttctggcagaacccccggaaccacttcagatgccaggtgcagttctacggcctgagcgagaacgacgagtggacccaggacagagccaagcccgtgacccagatcgtgtctgccgaagcctggggcagagccgattgcggctttaccagcgagagctaccagcagggcgtgctgagcgccaccatcctgtacgagatcctgctgggcaaggccaccctgtacgccgtgctggtgtctgccctggtgctgatggctatggtcaagcggaaggacagccggggaaaacggggcagaaagaaactcctgtatatattcaaacaaccatttatgagaccagtacaaactactcaagaggaagatggctgtagctgccgatttccagaagaagaagaaggaggatgtgaactgagagtgaagttcagcagaagcgccgacgcccctgcctaccagcagggacagaaccaactgtacaacgagctgaacctgggcagacgggaagagtacgacgtgctggacaagcggagaggcagggaccctgagatgggcggaaagccccagcggagaaagaacccccaggaaggactgtataacgaactccagaaagacaagatggccgaagcctacagcgagatcggcatgaagggcgagcggagaagaggcaagggccacgatggcctgtaccagggcctgagcaccgccaccaaggacacctatgacgccctgcacatgcaggccctgcctccaaga

SEQ ID NO: 27039 - DNA, 774 bp, synthetic construct
  source 1..774: mol_type = other DNA
agcagcagactgagagtgtccgccaccttctggcagaacccccggaaccacttcagatgccaggtgcagttctacggcctgagcgagaacgacgagtggacccaggacagagccaagcccgtgacccagatcgtgtctgccgaagcctggggcagagccgattgcggctttaccagcgagagctaccagcagggcgtgctgagcgccaccatcctgtacgagatcctgctgggcaaggccaccctgtacgccgtgctggtgtctgccctggtgctgatggctatggtcaagcggaaggacagccggggaaaacggggcagaaagaaactcctgtatatattcaaacaaccatttatgagaccagtacaaactactcaagaggaagatggctgtagctgccgatttccagaagaagaagaaggaggatgtgaactgagagtgaagttcagcagaagcgccgacgcccctgcctaccagcagggacagaaccaactgtacaacgagctgaacctgggcagacgggaagagtacgacgtgctggacaagcggagaggcagggaccctgagatgggcggaaagccccagcggagaaagaacccccaggaaggactgtataacgaactccagaaagacaagatggccgaagcctacagcgagatcggcatgaagggcgagcggagaagaggcaagggccacgatggcctgtaccagggcctgagcaccgccaccaaggacacctatgacgccctgcacatgcaggccctgcctccaaga

SEQ ID NO: 27040 - DNA, 771 bp, synthetic construct
  source 1..771: mol_type = other DNA
agcagactgagagtgtccgccaccttctggcagaacccccggaaccacttcagatgccaggtgcagttctacggcctgagcgagaacgacgagtggacccaggacagagccaagcccgtgacccagatcgtgtctgccgaagcctggggcagagccgattgcggctttaccagcgagagctaccagcagggcgtgctgagcgccaccatcctgtacgagatcctgctgggcaaggccaccctgtacgccgtgctggtgtctgccctggtgctgatggctatggtcaagcggaaggacagccggggaaaacggggcagaaagaaactcctgtatatattcaaacaaccatttatgagaccagtacaaactactcaagaggaagatggctgtagctgccgatttccagaagaagaagaaggaggatgtgaactgagagtgaagttcagcagaagcgccgacgcccctgcctaccagcagggacagaaccaactgtacaacgagctgaacctgggcagacgggaagagtacgacgtgctggacaagcggagaggcagggaccctgagatgggcggaaagccccagcggagaaagaacccccaggaaggactgtataacgaactccagaaagacaagatggccgaagcctacagcgagatcggcatgaagggcgagcggagaagaggcaagggccacgatggcctgtaccagggcctgagcaccgccaccaaggacacctatgacgccctgcacatgcaggccctgcctccaaga

SEQ ID NO: 27041 - DNA, 768 bp, synthetic construct
  source 1..768: mol_type = other DNA
agactgagagtgtccgccaccttctggcagaacccccggaaccacttcagatgccaggtgcagttctacggcctgagcgagaacgacgagtggacccaggacagagccaagcccgtgacccagatcgtgtctgccgaagcctggggcagagccgattgcggctttaccagcgagagctaccagcagggcgtgctgagcgccaccatcctgtacgagatcctgctgggcaaggccaccctgtacgccgtgctggtgtctgccctggtgctgatggctatggtcaagcggaaggacagccggggaaaacggggcagaaagaaactcctgtatatattcaaacaaccatttatgagaccagtacaaactactcaagaggaagatggctgtagctgccgatttccagaagaagaagaaggaggatgtgaactgagagtgaagttcagcagaagcgccgacgcccctgcctaccagcagggacagaaccaactgtacaacgagctgaacctgggcagacgggaagagtacgacgtgctggacaagcggagaggcagggaccctgagatgggcggaaagccccagcggagaaagaacccccaggaaggactgtataacgaactccagaaagacaagatggccgaagcctacagcgagatcggcatgaagggcgagcggagaagaggcaagggccacgatggcctgtaccagggcctgagcaccgccaccaaggacacctatgacgccctgcacatgcaggccctgcctccaaga

SEQ ID NO: 27042 - DNA, 765 bp, synthetic construct
  source 1..765: mol_type = other DNA
ctgagagtgtccgccaccttctggcagaacccccggaaccacttcagatgccaggtgcagttctacggcctgagcgagaacgacgagtggacccaggacagagccaagcccgtgacccagatcgtgtctgccgaagcctggggcagagccgattgcggctttaccagcgagagctaccagcagggcgtgctgagcgccaccatcctgtacgagatcctgctgggcaaggccaccctgtacgccgtgctggtgtctgccctggtgctgatggctatggtcaagcggaaggacagccggggaaaacggggcagaaagaaactcctgtatatattcaaacaaccatttatgagaccagtacaaactactcaagaggaagatggctgtagctgccgatttccagaagaagaagaaggaggatgtgaactgagagtgaagttcagcagaagcgccgacgcccctgcctaccagcagggacagaaccaactgtacaacgagctgaacctgggcagacgggaagagtacgacgtgctggacaagcggagaggcagggaccctgagatgggcggaaagccccagcggagaaagaacccccaggaaggactgtataacgaactccagaaagacaagatggccgaagcctacagcgagatcggcatgaagggcgagcggagaagaggcaagggccacgatggcctgtaccagggcctgagcaccgccaccaaggacacctatgacgccctgcacatgcaggccctgcctccaaga

SEQ ID NO: 27043 - DNA, 762 bp, synthetic construct
  source 1..762: mol_type = other DNA
agagtgtccgccaccttctggcagaacccccggaaccacttcagatgccaggtgcagttctacggcctgagcgagaacgacgagtggacccaggacagagccaagcccgtgacccagatcgtgtctgccgaagcctggggcagagccgattgcggctttaccagcgagagctaccagcagggcgtgctgagcgccaccatcctgtacgagatcctgctgggcaaggccaccctgtacgccgtgctggtgtctgccctggtgctgatggctatggtcaagcggaaggacagccggggaaaacggggcagaaagaaactcctgtatatattcaaacaaccatttatgagaccagtacaaactactcaagaggaagatggctgtagctgccgatttccagaagaagaagaaggaggatgtgaactgagagtgaagttcagcagaagcgccgacgcccctgcctaccagcagggacagaaccaactgtacaacgagctgaacctgggcagacgggaagagtacgacgtgctggacaagcggagaggcagggaccctgagatgggcggaaagccccagcggagaaagaacccccaggaaggactgtataacgaactccagaaagacaagatggccgaagcctacagcgagatcggcatgaagggcgagcggagaagaggcaagggccacgatggcctgtaccagggcctgagcaccgccaccaaggacacctatgacgccctgcacatgcaggccctgcctccaaga

SEQ ID NO: 27044 - DNA, 759 bp, synthetic construct
  source 1..759: mol_type = other DNA
gtgtccgccaccttctggcagaacccccggaaccacttcagatgccaggtgcagttctacggcctgagcgagaacgacgagtggacccaggacagagccaagcccgtgacccagatcgtgtctgccgaagcctggggcagagccgattgcggctttaccagcgagagctaccagcagggcgtgctgagcgccaccatcctgtacgagatcctgctgggcaaggccaccctgtacgccgtgctggtgtctgccctggtgctgatggctatggtcaagcggaaggacagccggggaaaacggggcagaaagaaactcctgtatatattcaaacaaccatttatgagaccagtacaaactactcaagaggaagatggctgtagctgccgatttccagaagaagaagaaggaggatgtgaactgagagtgaagttcagcagaagcgccgacgcccctgcctaccagcagggacagaaccaactgtacaacgagctgaacctgggcagacgggaagagtacgacgtgctggacaagcggagaggcagggaccctgagatgggcggaaagccccagcggagaaagaacccccaggaaggactgtataacgaactccagaaagacaagatggccgaagcctacagcgagatcggcatgaagggcgagcggagaagaggcaagggccacgatggcctgtaccagggcctgagcaccgccaccaaggacacctatgacgccctgcacatgcaggccctgcctccaaga

SEQ ID NO: 27045 - DNA, 756 bp, synthetic construct
  source 1..756: mol_type = other DNA
tccgccaccttctggcagaacccccggaaccacttcagatgccaggtgcagttctacggcctgagcgagaacgacgagtggacccaggacagagccaagcccgtgacccagatcgtgtctgccgaagcctggggcagagccgattgcggctttaccagcgagagctaccagcagggcgtgctgagcgccaccatcctgtacgagatcctgctgggcaaggccaccctgtacgccgtgctggtgtctgccctggtgctgatggctatggtcaagcggaaggacagccggggaaaacggggcagaaagaaactcctgtatatattcaaacaaccatttatgagaccagtacaaactactcaagaggaagatggctgtagctgccgatttccagaagaagaagaaggaggatgtgaactgagagtgaagttcagcagaagcgccgacgcccctgcctaccagcagggacagaaccaactgtacaacgagctgaacctgggcagacgggaagagtacgacgtgctggacaagcggagaggcagggaccctgagatgggcggaaagccccagcggagaaagaacccccaggaaggactgtataacgaactccagaaagacaagatggccgaagcctacagcgagatcggcatgaagggcgagcggagaagaggcaagggccacgatggcctgtaccagggcctgagcaccgccaccaaggacacctatgacgccctgcacatgcaggccctgcctccaaga

SEQ ID NO: 27046 - DNA, 753 bp, synthetic construct
  source 1..753: mol_type = other DNA
gccaccttctggcagaacccccggaaccacttcagatgccaggtgcagttctacggcctgagcgagaacgacgagtggacccaggacagagccaagcccgtgacccagatcgtgtctgccgaagcctggggcagagccgattgcggctttaccagcgagagctaccagcagggcgtgctgagcgccaccatcctgtacgagatcctgctgggcaaggccaccctgtacgccgtgctggtgtctgccctggtgctgatggctatggtcaagcggaaggacagccggggaaaacggggcagaaagaaactcctgtatatattcaaacaaccatttatgagaccagtacaaactactcaagaggaagatggctgtagctgccgatttccagaagaagaagaaggaggatgtgaactgagagtgaagttcagcagaagcgccgacgcccctgcctaccagcagggacagaaccaactgtacaacgagctgaacctgggcagacgggaagagtacgacgtgctggacaagcggagaggcagggaccctgagatgggcggaaagccccagcggagaaagaacccccaggaaggactgtataacgaactccagaaagacaagatggccgaagcctacagcgagatcggcatgaagggcgagcggagaagaggcaagggccacgatggcctgtaccagggcctgagcaccgccaccaaggacacctatgacgccctgcacatgcaggccctgcctccaaga

SEQ ID NO: 27047 - DNA, 750 bp, synthetic construct
  source 1..750: mol_type = other DNA
accttctggcagaacccccggaaccacttcagatgccaggtgcagttctacggcctgagcgagaacgacgagtggacccaggacagagccaagcccgtgacccagatcgtgtctgccgaagcctggggcagagccgattgcggctttaccagcgagagctaccagcagggcgtgctgagcgccaccatcctgtacgagatcctgctgggcaaggccaccctgtacgccgtgctggtgtctgccctggtgctgatggctatggtcaagcggaaggacagccggggaaaacggggcagaaagaaactcctgtatatattcaaacaaccatttatgagaccagtacaaactactcaagaggaagatggctgtagctgccgatttccagaagaagaagaaggaggatgtgaactgagagtgaagttcagcagaagcgccgacgcccctgcctaccagcagggacagaaccaactgtacaacgagctgaacctgggcagacgggaagagtacgacgtgctggacaagcggagaggcagggaccctgagatgggcggaaagccccagcggagaaagaacccccaggaaggactgtataacgaactccagaaagacaagatggccgaagcctacagcgagatcggcatgaagggcgagcggagaagaggcaagggccacgatggcctgtaccagggcctgagcaccgccaccaaggacacctatgacgccctgcacatgcaggccctgcctccaaga

SEQ ID NO: 27048 - DNA, 747 bp, synthetic construct
  source 1..747: mol_type = other DNA
ttctggcagaacccccggaaccacttcagatgccaggtgcagttctacggcctgagcgagaacgacgagtggacccaggacagagccaagcccgtgacccagatcgtgtctgccgaagcctggggcagagccgattgcggctttaccagcgagagctaccagcagggcgtgctgagcgccaccatcctgtacgagatcctgctgggcaaggccaccctgtacgccgtgctggtgtctgccctggtgctgatggctatggtcaagcggaaggacagccggggaaaacggggcagaaagaaactcctgtatatattcaaacaaccatttatgagaccagtacaaactactcaagaggaagatggctgtagctgccgatttccagaagaagaagaaggaggatgtgaactgagagtgaagttcagcagaagcgccgacgcccctgcctaccagcagggacagaaccaactgtacaacgagctgaacctgggcagacgggaagagtacgacgtgctggacaagcggagaggcagggaccctgagatgggcggaaagccccagcggagaaagaacccccaggaaggactgtataacgaactccagaaagacaagatggccgaagcctacagcgagatcggcatgaagggcgagcggagaagaggcaagggccacgatggcctgtaccagggcctgagcaccgccaccaaggacacctatgacgccctgcacatgcaggccctgcctccaaga

SEQ ID NO: 27049 - DNA, 744 bp, synthetic construct
  source 1..744: mol_type = other DNA
tggcagaacccccggaaccacttcagatgccaggtgcagttctacggcctgagcgagaacgacgagtggacccaggacagagccaagcccgtgacccagatcgtgtctgccgaagcctggggcagagccgattgcggctttaccagcgagagctaccagcagggcgtgctgagcgccaccatcctgtacgagatcctgctgggcaaggccaccctgtacgccgtgctggtgtctgccctggtgctgatggctatggtcaagcggaaggacagccggggaaaacggggcagaaagaaactcctgtatatattcaaacaaccatttatgagaccagtacaaactactcaagaggaagatggctgtagctgccgatttccagaagaagaagaaggaggatgtgaactgagagtgaagttcagcagaagcgccgacgcccctgcctaccagcagggacagaaccaactgtacaacgagctgaacctgggcagacgggaagagtacgacgtgctggacaagcggagaggcagggaccctgagatgggcggaaagccccagcggagaaagaacccccaggaaggactgtataacgaactccagaaagacaagatggccgaagcctacagcgagatcggcatgaagggcgagcggagaagaggcaagggccacgatggcctgtaccagggcctgagcaccgccaccaaggacacctatgacgccctgcacatgcaggccctgcctccaaga

SEQ ID NO: 27050 - DNA, 741 bp, synthetic construct
  source 1..741: mol_type = other DNA
cagaacccccggaaccacttcagatgccaggtgcagttctacggcctgagcgagaacgacgagtggacccaggacagagccaagcccgtgacccagatcgtgtctgccgaagcctggggcagagccgattgcggctttaccagcgagagctaccagcagggcgtgctgagcgccaccatcctgtacgagatcctgctgggcaaggccaccctgtacgccgtgctggtgtctgccctggtgctgatggctatggtcaagcggaaggacagccggggaaaacggggcagaaagaaactcctgtatatattcaaacaaccatttatgagaccagtacaaactactcaagaggaagatggctgtagctgccgatttccagaagaagaagaaggaggatgtgaactgagagtgaagttcagcagaagcgccgacgcccctgcctaccagcagggacagaaccaactgtacaacgagctgaacctgggcagacgggaagagtacgacgtgctggacaagcggagaggcagggaccctgagatgggcggaaagccccagcggagaaagaacccccaggaaggactgtataacgaactccagaaagacaagatggccgaagcctacagcgagatcggcatgaagggcgagcggagaagaggcaagggccacgatggcctgtaccagggcctgagcaccgccaccaaggacacctatgacgccctgcacatgcaggccctgcctccaaga

SEQ ID NO: 27051 - DNA, 738 bp, synthetic construct
  source 1..738: mol_type = other DNA
aacccccggaaccacttcagatgccaggtgcagttctacggcctgagcgagaacgacgagtggacccaggacagagccaagcccgtgacccagatcgtgtctgccgaagcctggggcagagccgattgcggctttaccagcgagagctaccagcagggcgtgctgagcgccaccatcctgtacgagatcctgctgggcaaggccaccctgtacgccgtgctggtgtctgccctggtgctgatggctatggtcaagcggaaggacagccggggaaaacggggcagaaagaaactcctgtatatattcaaacaaccatttatgagaccagtacaaactactcaagaggaagatggctgtagctgccgatttccagaagaagaagaaggaggatgtgaactgagagtgaagttcagcagaagcgccgacgcccctgcctaccagcagggacagaaccaactgtacaacgagctgaacctgggcagacgggaagagtacgacgtgctggacaagcggagaggcagggaccctgagatgggcggaaagccccagcggagaaagaacccccaggaaggactgtataacgaactccagaaagacaagatggccgaagcctacagcgagatcggcatgaagggcgagcggagaagaggcaagggccacgatggcctgtaccagggcctgagcaccgccaccaaggacacctatgacgccctgcacatgcaggccctgcctccaaga

SEQ ID NO: 27052 - DNA, 735 bp, synthetic construct
  source 1..735: mol_type = other DNA
ccccggaaccacttcagatgccaggtgcagttctacggcctgagcgagaacgacgagtggacccaggacagagccaagcccgtgacccagatcgtgtctgccgaagcctggggcagagccgattgcggctttaccagcgagagctaccagcagggcgtgctgagcgccaccatcctgtacgagatcctgctgggcaaggccaccctgtacgccgtgctggtgtctgccctggtgctgatggctatggtcaagcggaaggacagccggggaaaacggggcagaaagaaactcctgtatatattcaaacaaccatttatgagaccagtacaaactactcaagaggaagatggctgtagctgccgatttccagaagaagaagaaggaggatgtgaactgagagtgaagttcagcagaagcgccgacgcccctgcctaccagcagggacagaaccaactgtacaacgagctgaacctgggcagacgggaagagtacgacgtgctggacaagcggagaggcagggaccctgagatgggcggaaagccccagcggagaaagaacccccaggaaggactgtataacgaactccagaaagacaagatggccgaagcctacagcgagatcggcatgaagggcgagcggagaagaggcaagggccacgatggcctgtaccagggcctgagcaccgccaccaaggacacctatgacgccctgcacatgcaggccctgcctccaaga

SEQ ID NO: 27053 - DNA, 732 bp, synthetic construct
  source 1..732: mol_type = other DNA
cggaaccacttcagatgccaggtgcagttctacggcctgagcgagaacgacgagtggacccaggacagagccaagcccgtgacccagatcgtgtctgccgaagcctggggcagagccgattgcggctttaccagcgagagctaccagcagggcgtgctgagcgccaccatcctgtacgagatcctgctgggcaaggccaccctgtacgccgtgctggtgtctgccctggtgctgatggctatggtcaagcggaaggacagccggggaaaacggggcagaaagaaactcctgtatatattcaaacaaccatttatgagaccagtacaaactactcaagaggaagatggctgtagctgccgatttccagaagaagaagaaggaggatgtgaactgagagtgaagttcagcagaagcgccgacgcccctgcctaccagcagggacagaaccaactgtacaacgagctgaacctgggcagacgggaagagtacgacgtgctggacaagcggagaggcagggaccctgagatgggcggaaagccccagcggagaaagaacccccaggaaggactgtataacgaactccagaaagacaagatggccgaagcctacagcgagatcggcatgaagggcgagcggagaagaggcaagggccacgatggcctgtaccagggcctgagcaccgccaccaaggacacctatgacgccctgcacatgcaggccctgcctccaaga

SEQ ID NO: 27054 - DNA, 729 bp, synthetic construct
  source 1..729: mol_type = other DNA
aaccacttcagatgccaggtgcagttctacggcctgagcgagaacgacgagtggacccaggacagagccaagcccgtgacccagatcgtgtctgccgaagcctggggcagagccgattgcggctttaccagcgagagctaccagcagggcgtgctgagcgccaccatcctgtacgagatcctgctgggcaaggccaccctgtacgccgtgctggtgtctgccctggtgctgatggctatggtcaagcggaaggacagccggggaaaacggggcagaaagaaactcctgtatatattcaaacaaccatttatgagaccagtacaaactactcaagaggaagatggctgtagctgccgatttccagaagaagaagaaggaggatgtgaactgagagtgaagttcagcagaagcgccgacgcccctgcctaccagcagggacagaaccaactgtacaacgagctgaacctgggcagacgggaagagtacgacgtgctggacaagcggagaggcagggaccctgagatgggcggaaagccccagcggagaaagaacccccaggaaggactgtataacgaactccagaaagacaagatggccgaagcctacagcgagatcggcatgaagggcgagcggagaagaggcaagggccacgatggcctgtaccagggcctgagcaccgccaccaaggacacctatgacgccctgcacatgcaggccctgcctccaaga

SEQ ID NO: 27055 - DNA, 726 bp, synthetic construct
  source 1..726: mol_type = other DNA
cacttcagatgccaggtgcagttctacggcctgagcgagaacgacgagtggacccaggacagagccaagcccgtgacccagatcgtgtctgccgaagcctggggcagagccgattgcggctttaccagcgagagctaccagcagggcgtgctgagcgccaccatcctgtacgagatcctgctgggcaaggccaccctgtacgccgtgctggtgtctgccctggtgctgatggctatggtcaagcggaaggacagccggggaaaacggggcagaaagaaactcctgtatatattcaaacaaccatttatgagaccagtacaaactactcaagaggaagatggctgtagctgccgatttccagaagaagaagaaggaggatgtgaactgagagtgaagttcagcagaagcgccgacgcccctgcctaccagcagggacagaaccaactgtacaacgagctgaacctgggcagacgggaagagtacgacgtgctggacaagcggagaggcagggaccctgagatgggcggaaagccccagcggagaaagaacccccaggaaggactgtataacgaactccagaaagacaagatggccgaagcctacagcgagatcggcatgaagggcgagcggagaagaggcaagggccacgatggcctgtaccagggcctgagcaccgccaccaaggacacctatgacgccctgcacatgcaggccctgcctccaaga

SEQ ID NO: 27056 - DNA, 723 bp, synthetic construct
  source 1..723: mol_type = other DNA
ttcagatgccaggtgcagttctacggcctgagcgagaacgacgagtggacccaggacagagccaagcccgtgacccagatcgtgtctgccgaagcctggggcagagccgattgcggctttaccagcgagagctaccagcagggcgtgctgagcgccaccatcctgtacgagatcctgctgggcaaggccaccctgtacgccgtgctggtgtctgccctggtgctgatggctatggtcaagcggaaggacagccggggaaaacggggcagaaagaaactcctgtatatattcaaacaaccatttatgagaccagtacaaactactcaagaggaagatggctgtagctgccgatttccagaagaagaagaaggaggatgtgaactgagagtgaagttcagcagaagcgccgacgcccctgcctaccagcagggacagaaccaactgtacaacgagctgaacctgggcagacgggaagagtacgacgtgctggacaagcggagaggcagggaccctgagatgggcggaaagccccagcggagaaagaacccccaggaaggactgtataacgaactccagaaagacaagatggccgaagcctacagcgagatcggcatgaagggcgagcggagaagaggcaagggccacgatggcctgtaccagggcctgagcaccgccaccaaggacacctatgacgccctgcacatgcaggccctgcctccaaga

SEQ ID NO: 27057 - DNA, 720 bp, synthetic construct
  source 1..720: mol_type = other DNA
agatgccaggtgcagttctacggcctgagcgagaacgacgagtggacccaggacagagccaagcccgtgacccagatcgtgtctgccgaagcctggggcagagccgattgcggctttaccagcgagagctaccagcagggcgtgctgagcgccaccatcctgtacgagatcctgctgggcaaggccaccctgtacgccgtgctggtgtctgccctggtgctgatggctatggtcaagcggaaggacagccggggaaaacggggcagaaagaaactcctgtatatattcaaacaaccatttatgagaccagtacaaactactcaagaggaagatggctgtagctgccgatttccagaagaagaagaaggaggatgtgaactgagagtgaagttcagcagaagcgccgacgcccctgcctaccagcagggacagaaccaactgtacaacgagctgaacctgggcagacgggaagagtacgacgtgctggacaagcggagaggcagggaccctgagatgggcggaaagccccagcggagaaagaacccccaggaaggactgtataacgaactccagaaagacaagatggccgaagcctacagcgagatcggcatgaagggcgagcggagaagaggcaagggccacgatggcctgtaccagggcctgagcaccgccaccaaggacacctatgacgccctgcacatgcaggccctgcctccaaga

SEQ ID NO: 27058 - DNA, 717 bp, synthetic construct
  source 1..717: mol_type = other DNA
tgccaggtgcagttctacggcctgagcgagaacgacgagtggacccaggacagagccaagcccgtgacccagatcgtgtctgccgaagcctggggcagagccgattgcggctttaccagcgagagctaccagcagggcgtgctgagcgccaccatcctgtacgagatcctgctgggcaaggccaccctgtacgccgtgctggtgtctgccctggtgctgatggctatggtcaagcggaaggacagccggggaaaacggggcagaaagaaactcctgtatatattcaaacaaccatttatgagaccagtacaaactactcaagaggaagatggctgtagctgccgatttccagaagaagaagaaggaggatgtgaactgagagtgaagttcagcagaagcgccgacgcccctgcctaccagcagggacagaaccaactgtacaacgagctgaacctgggcagacgggaagagtacgacgtgctggacaagcggagaggcagggaccctgagatgggcggaaagccccagcggagaaagaacccccaggaaggactgtataacgaactccagaaagacaagatggccgaagcctacagcgagatcggcatgaagggcgagcggagaagaggcaagggccacgatggcctgtaccagggcctgagcaccgccaccaaggacacctatgacgccctgcacatgcaggccctgcctccaaga

SEQ ID NO: 27059 - DNA, 714 bp, synthetic construct
  source 1..714: mol_type = other DNA
caggtgcagttctacggcctgagcgagaacgacgagtggacccaggacagagccaagcccgtgacccagatcgtgtctgccgaagcctggggcagagccgattgcggctttaccagcgagagctaccagcagggcgtgctgagcgccaccatcctgtacgagatcctgctgggcaaggccaccctgtacgccgtgctggtgtctgccctggtgctgatggctatggtcaagcggaaggacagccggggaaaacggggcagaaagaaactcctgtatatattcaaacaaccatttatgagaccagtacaaactactcaagaggaagatggctgtagctgccgatttccagaagaagaagaaggaggatgtgaactgagagtgaagttcagcagaagcgccgacgcccctgcctaccagcagggacagaaccaactgtacaacgagctgaacctgggcagacgggaagagtacgacgtgctggacaagcggagaggcagggaccctgagatgggcggaaagccccagcggagaaagaacccccaggaaggactgtataacgaactccagaaagacaagatggccgaagcctacagcgagatcggcatgaagggcgagcggagaagaggcaagggccacgatggcctgtaccagggcctgagcaccgccaccaaggacacctatgacgccctgcacatgcaggccctgcctccaaga

SEQ ID NO: 27060 - DNA, 711 bp, synthetic construct
  source 1..711: mol_type = other DNA
gtgcagttctacggcctgagcgagaacgacgagtggacccaggacagagccaagcccgtgacccagatcgtgtctgccgaagcctggggcagagccgattgcggctttaccagcgagagctaccagcagggcgtgctgagcgccaccatcctgtacgagatcctgctgggcaaggccaccctgtacgccgtgctggtgtctgccctggtgctgatggctatggtcaagcggaaggacagccggggaaaacggggcagaaagaaactcctgtatatattcaaacaaccatttatgagaccagtacaaactactcaagaggaagatggctgtagctgccgatttccagaagaagaagaaggaggatgtgaactgagagtgaagttcagcagaagcgccgacgcccctgcctaccagcagggacagaaccaactgtacaacgagctgaacctgggcagacgggaagagtacgacgtgctggacaagcggagaggcagggaccctgagatgggcggaaagccccagcggagaaagaacccccaggaaggactgtataacgaactccagaaagacaagatggccgaagcctacagcgagatcggcatgaagggcgagcggagaagaggcaagggccacgatggcctgtaccagggcctgagcaccgccaccaaggacacctatgacgccctgcacatgcaggccctgcctccaaga

SEQ ID NO: 27061 - DNA, 708 bp, synthetic construct
  source 1..708: mol_type = other DNA
cagttctacggcctgagcgagaacgacgagtggacccaggacagagccaagcccgtgacccagatcgtgtctgccgaagcctggggcagagccgattgcggctttaccagcgagagctaccagcagggcgtgctgagcgccaccatcctgtacgagatcctgctgggcaaggccaccctgtacgccgtgctggtgtctgccctggtgctgatggctatggtcaagcggaaggacagccggggaaaacggggcagaaagaaactcctgtatatattcaaacaaccatttatgagaccagtacaaactactcaagaggaagatggctgtagctgccgatttccagaagaagaagaaggaggatgtgaactgagagtgaagttcagcagaagcgccgacgcccctgcctaccagcagggacagaaccaactgtacaacgagctgaacctgggcagacgggaagagtacgacgtgctggacaagcggagaggcagggaccctgagatgggcggaaagccccagcggagaaagaacccccaggaaggactgtataacgaactccagaaagacaagatggccgaagcctacagcgagatcggcatgaagggcgagcggagaagaggcaagggccacgatggcctgtaccagggcctgagcaccgccaccaaggacacctatgacgccctgcacatgcaggccctgcctccaaga

SEQ ID NO: 27062 - DNA, 705 bp, synthetic construct
  source 1..705: mol_type = other DNA
ttctacggcctgagcgagaacgacgagtggacccaggacagagccaagcccgtgacccagatcgtgtctgccgaagcctggggcagagccgattgcggctttaccagcgagagctaccagcagggcgtgctgagcgccaccatcctgtacgagatcctgctgggcaaggccaccctgtacgccgtgctggtgtctgccctggtgctgatggctatggtcaagcggaaggacagccggggaaaacggggcagaaagaaactcctgtatatattcaaacaaccatttatgagaccagtacaaactactcaagaggaagatggctgtagctgccgatttccagaagaagaagaaggaggatgtgaactgagagtgaagttcagcagaagcgccgacgcccctgcctaccagcagggacagaaccaactgtacaacgagctgaacctgggcagacgggaagagtacgacgtgctggacaagcggagaggcagggaccctgagatgggcggaaagccccagcggagaaagaacccccaggaaggactgtataacgaactccagaaagacaagatggccgaagcctacagcgagatcggcatgaagggcgagcggagaagaggcaagggccacgatggcctgtaccagggcctgagcaccgccaccaaggacacctatgacgccctgcacatgcaggccctgcctccaaga

SEQ ID NO: 27063 - DNA, 702 bp, synthetic construct
  source 1..702: mol_type = other DNA
tacggcctgagcgagaacgacgagtggacccaggacagagccaagcccgtgacccagatcgtgtctgccgaagcctggggcagagccgattgcggctttaccagcgagagctaccagcagggcgtgctgagcgccaccatcctgtacgagatcctgctgggcaaggccaccctgtacgccgtgctggtgtctgccctggtgctgatggctatggtcaagcggaaggacagccggggaaaacggggcagaaagaaactcctgtatatattcaaacaaccatttatgagaccagtacaaactactcaagaggaagatggctgtagctgccgatttccagaagaagaagaaggaggatgtgaactgagagtgaagttcagcagaagcgccgacgcccctgcctaccagcagggacagaaccaactgtacaacgagctgaacctgggcagacgggaagagtacgacgtgctggacaagcggagaggcagggaccctgagatgggcggaaagccccagcggagaaagaacccccaggaaggactgtataacgaactccagaaagacaagatggccgaagcctacagcgagatcggcatgaagggcgagcggagaagaggcaagggccacgatggcctgtaccagggcctgagcaccgccaccaaggacacctatgacgccctgcacatgcaggccctgcctccaaga

SEQ ID NO: 27064 - DNA, 699 bp, synthetic construct
  source 1..699: mol_type = other DNA
ggcctgagcgagaacgacgagtggacccaggacagagccaagcccgtgacccagatcgtgtctgccgaagcctggggcagagccgattgcggctttaccagcgagagctaccagcagggcgtgctgagcgccaccatcctgtacgagatcctgctgggcaaggccaccctgtacgccgtgctggtgtctgccctggtgctgatggctatggtcaagcggaaggacagccggggaaaacggggcagaaagaaactcctgtatatattcaaacaaccatttatgagaccagtacaaactactcaagaggaagatggctgtagctgccgatttccagaagaagaagaaggaggatgtgaactgagagtgaagttcagcagaagcgccgacgcccctgcctaccagcagggacagaaccaactgtacaacgagctgaacctgggcagacgggaagagtacgacgtgctggacaagcggagaggcagggaccctgagatgggcggaaagccccagcggagaaagaacccccaggaaggactgtataacgaactccagaaagacaagatggccgaagcctacagcgagatcggcatgaagggcgagcggagaagaggcaagggccacgatggcctgtaccagggcctgagcaccgccaccaaggacacctatgacgccctgcacatgcaggccctgcctccaaga

SEQ ID NO: 27065 - DNA, 696 bp, synthetic construct
  source 1..696: mol_type = other DNA
ctgagcgagaacgacgagtggacccaggacagagccaagcccgtgacccagatcgtgtctgccgaagcctggggcagagccgattgcggctttaccagcgagagctaccagcagggcgtgctgagcgccaccatcctgtacgagatcctgctgggcaaggccaccctgtacgccgtgctggtgtctgccctggtgctgatggctatggtcaagcggaaggacagccggggaaaacggggcagaaagaaactcctgtatatattcaaacaaccatttatgagaccagtacaaactactcaagaggaagatggctgtagctgccgatttccagaagaagaagaaggaggatgtgaactgagagtgaagttcagcagaagcgccgacgcccctgcctaccagcagggacagaaccaactgtacaacgagctgaacctgggcagacgggaagagtacgacgtgctggacaagcggagaggcagggaccctgagatgggcggaaagccccagcggagaaagaacccccaggaaggactgtataacgaactccagaaagacaagatggccgaagcctacagcgagatcggcatgaagggcgagcggagaagaggcaagggccacgatggcctgtaccagggcctgagcaccgccaccaaggacacctatgacgccctgcacatgcaggccctgcctccaaga

SEQ ID NO: 27066 - DNA, 693 bp, synthetic construct
  source 1..693: mol_type = other DNA
agcgagaacgacgagtggacccaggacagagccaagcccgtgacccagatcgtgtctgccgaagcctggggcagagccgattgcggctttaccagcgagagctaccagcagggcgtgctgagcgccaccatcctgtacgagatcctgctgggcaaggccaccctgtacgccgtgctggtgtctgccctggtgctgatggctatggtcaagcggaaggacagccggggaaaacggggcagaaagaaactcctgtatatattcaaacaaccatttatgagaccagtacaaactactcaagaggaagatggctgtagctgccgatttccagaagaagaagaaggaggatgtgaactgagagtgaagttcagcagaagcgccgacgcccctgcctaccagcagggacagaaccaactgtacaacgagctgaacctgggcagacgggaagagtacgacgtgctggacaagcggagaggcagggaccctgagatgggcggaaagccccagcggagaaagaacccccaggaaggactgtataacgaactccagaaagacaagatggccgaagcctacagcgagatcggcatgaagggcgagcggagaagaggcaagggccacgatggcctgtaccagggcctgagcaccgccaccaaggacacctatgacgccctgcacatgcaggccctgcctccaaga

SEQ ID NO: 27067 - DNA, 690 bp, synthetic construct
  source 1..690: mol_type = other DNA
gagaacgacgagtggacccaggacagagccaagcccgtgacccagatcgtgtctgccgaagcctggggcagagccgattgcggctttaccagcgagagctaccagcagggcgtgctgagcgccaccatcctgtacgagatcctgctgggcaaggccaccctgtacgccgtgctggtgtctgccctggtgctgatggctatggtcaagcggaaggacagccggggaaaacggggcagaaagaaactcctgtatatattcaaacaaccatttatgagaccagtacaaactactcaagaggaagatggctgtagctgccgatttccagaagaagaagaaggaggatgtgaactgagagtgaagttcagcagaagcgccgacgcccctgcctaccagcagggacagaaccaactgtacaacgagctgaacctgggcagacgggaagagtacgacgtgctggacaagcggagaggcagggaccctgagatgggcggaaagccccagcggagaaagaacccccaggaaggactgtataacgaactccagaaagacaagatggccgaagcctacagcgagatcggcatgaagggcgagcggagaagaggcaagggccacgatggcctgtaccagggcctgagcaccgccaccaaggacacctatgacgccctgcacatgcaggccctgcctccaaga

SEQ ID NO: 27068 - DNA, 687 bp, synthetic construct
  source 1..687: mol_type = other DNA
aacgacgagtggacccaggacagagccaagcccgtgacccagatcgtgtctgccgaagcctggggcagagccgattgcggctttaccagcgagagctaccagcagggcgtgctgagcgccaccatcctgtacgagatcctgctgggcaaggccaccctgtacgccgtgctggtgtctgccctggtgctgatggctatggtcaagcggaaggacagccggggaaaacggggcagaaagaaactcctgtatatattcaaacaaccatttatgagaccagtacaaactactcaagaggaagatggctgtagctgccgatttccagaagaagaagaaggaggatgtgaactgagagtgaagttcagcagaagcgccgacgcccctgcctaccagcagggacagaaccaactgtacaacgagctgaacctgggcagacgggaagagtacgacgtgctggacaagcggagaggcagggaccctgagatgggcggaaagccccagcggagaaagaacccccaggaaggactgtataacgaactccagaaagacaagatggccgaagcctacagcgagatcggcatgaagggcgagcggagaagaggcaagggccacgatggcctgtaccagggcctgagcaccgccaccaaggacacctatgacgccctgcacatgcaggccctgcctccaaga

SEQ ID NO: 27069 - DNA, 684 bp, synthetic construct
  source 1..684: mol_type = other DNA
gacgagtggacccaggacagagccaagcccgtgacccagatcgtgtctgccgaagcctggggcagagccgattgcggctttaccagcgagagctaccagcagggcgtgctgagcgccaccatcctgtacgagatcctgctgggcaaggccaccctgtacgccgtgctggtgtctgccctggtgctgatggctatggtcaagcggaaggacagccggggaaaacggggcagaaagaaactcctgtatatattcaaacaaccatttatgagaccagtacaaactactcaagaggaagatggctgtagctgccgatttccagaagaagaagaaggaggatgtgaactgagagtgaagttcagcagaagcgccgacgcccctgcctaccagcagggacagaaccaactgtacaacgagctgaacctgggcagacgggaagagtacgacgtgctggacaagcggagaggcagggaccctgagatgggcggaaagccccagcggagaaagaacccccaggaaggactgtataacgaactccagaaagacaagatggccgaagcctacagcgagatcggcatgaagggcgagcggagaagaggcaagggccacgatggcctgtaccagggcctgagcaccgccaccaaggacacctatgacgccctgcacatgcaggccctgcctccaaga

SEQ ID NO: 27070 - DNA, 681 bp, synthetic construct
  source 1..681: mol_type = other DNA
gagtggacccaggacagagccaagcccgtgacccagatcgtgtctgccgaagcctggggcagagccgattgcggctttaccagcgagagctaccagcagggcgtgctgagcgccaccatcctgtacgagatcctgctgggcaaggccaccctgtacgccgtgctggtgtctgccctggtgctgatggctatggtcaagcggaaggacagccggggaaaacggggcagaaagaaactcctgtatatattcaaacaaccatttatgagaccagtacaaactactcaagaggaagatggctgtagctgccgatttccagaagaagaagaaggaggatgtgaactgagagtgaagttcagcagaagcgccgacgcccctgcctaccagcagggacagaaccaactgtacaacgagctgaacctgggcagacgggaagagtacgacgtgctggacaagcggagaggcagggaccctgagatgggcggaaagccccagcggagaaagaacccccaggaaggactgtataacgaactccagaaagacaagatggccgaagcctacagcgagatcggcatgaagggcgagcggagaagaggcaagggccacgatggcctgtaccagggcctgagcaccgccaccaaggacacctatgacgccctgcacatgcaggccctgcctccaaga

SEQ ID NO: 27071 - DNA, 678 bp, synthetic construct
  source 1..678: mol_type = other DNA
tggacccaggacagagccaagcccgtgacccagatcgtgtctgccgaagcctggggcagagccgattgcggctttaccagcgagagctaccagcagggcgtgctgagcgccaccatcctgtacgagatcctgctgggcaaggccaccctgtacgccgtgctggtgtctgccctggtgctgatggctatggtcaagcggaaggacagccggggaaaacggggcagaaagaaactcctgtatatattcaaacaaccatttatgagaccagtacaaactactcaagaggaagatggctgtagctgccgatttccagaagaagaagaaggaggatgtgaactgagagtgaagttcagcagaagcgccgacgcccctgcctaccagcagggacagaaccaactgtacaacgagctgaacctgggcagacgggaagagtacgacgtgctggacaagcggagaggcagggaccctgagatgggcggaaagccccagcggagaaagaacccccaggaaggactgtataacgaactccagaaagacaagatggccgaagcctacagcgagatcggcatgaagggcgagcggagaagaggcaagggccacgatggcctgtaccagggcctgagcaccgccaccaaggacacctatgacgccctgcacatgcaggccctgcctccaaga

SEQ ID NO: 27072 - DNA, 675 bp, synthetic construct
  source 1..675: mol_type = other DNA
acccaggacagagccaagcccgtgacccagatcgtgtctgccgaagcctggggcagagccgattgcggctttaccagcgagagctaccagcagggcgtgctgagcgccaccatcctgtacgagatcctgctgggcaaggccaccctgtacgccgtgctggtgtctgccctggtgctgatggctatggtcaagcggaaggacagccggggaaaacggggcagaaagaaactcctgtatatattcaaacaaccatttatgagaccagtacaaactactcaagaggaagatggctgtagctgccgatttccagaagaagaagaaggaggatgtgaactgagagtgaagttcagcagaagcgccgacgcccctgcctaccagcagggacagaaccaactgtacaacgagctgaacctgggcagacgggaagagtacgacgtgctggacaagcggagaggcagggaccctgagatgggcggaaagccccagcggagaaagaacccccaggaaggactgtataacgaactccagaaagacaagatggccgaagcctacagcgagatcggcatgaagggcgagcggagaagaggcaagggccacgatggcctgtaccagggcctgagcaccgccaccaaggacacctatgacgccctgcacatgcaggccctgcctccaaga

SEQ ID NO: 27073 - DNA, 672 bp, synthetic construct
  source 1..672: mol_type = other DNA
caggacagagccaagcccgtgacccagatcgtgtctgccgaagcctggggcagagccgattgcggctttaccagcgagagctaccagcagggcgtgctgagcgccaccatcctgtacgagatcctgctgggcaaggccaccctgtacgccgtgctggtgtctgccctggtgctgatggctatggtcaagcggaaggacagccggggaaaacggggcagaaagaaactcctgtatatattcaaacaaccatttatgagaccagtacaaactactcaagaggaagatggctgtagctgccgatttccagaagaagaagaaggaggatgtgaactgagagtgaagttcagcagaagcgccgacgcccctgcctaccagcagggacagaaccaactgtacaacgagctgaacctgggcagacgggaagagtacgacgtgctggacaagcggagaggcagggaccctgagatgggcggaaagccccagcggagaaagaacccccaggaaggactgtataacgaactccagaaagacaagatggccgaagcctacagcgagatcggcatgaagggcgagcggagaagaggcaagggccacgatggcctgtaccagggcctgagcaccgccaccaaggacacctatgacgccctgcacatgcaggccctgcctccaaga

SEQ ID NO: 27074 - DNA, 669 bp, synthetic construct
  source 1..669: mol_type = other DNA
gacagagccaagcccgtgacccagatcgtgtctgccgaagcctggggcagagccgattgcggctttaccagcgagagctaccagcagggcgtgctgagcgccaccatcctgtacgagatcctgctgggcaaggccaccctgtacgccgtgctggtgtctgccctggtgctgatggctatggtcaagcggaaggacagccggggaaaacggggcagaaagaaactcctgtatatattcaaacaaccatttatgagaccagtacaaactactcaagaggaagatggctgtagctgccgatttccagaagaagaagaaggaggatgtgaactgagagtgaagttcagcagaagcgccgacgcccctgcctaccagcagggacagaaccaactgtacaacgagctgaacctgggcagacgggaagagtacgacgtgctggacaagcggagaggcagggaccctgagatgggcggaaagccccagcggagaaagaacccccaggaaggactgtataacgaactccagaaagacaagatggccgaagcctacagcgagatcggcatgaagggcgagcggagaagaggcaagggccacgatggcctgtaccagggcctgagcaccgccaccaaggacacctatgacgccctgcacatgcaggccctgcctccaaga

SEQ ID NO: 27075 - DNA, 666 bp, synthetic construct
  source 1..666: mol_type = other DNA
agagccaagcccgtgacccagatcgtgtctgccgaagcctggggcagagccgattgcggctttaccagcgagagctaccagcagggcgtgctgagcgccaccatcctgtacgagatcctgctgggcaaggccaccctgtacgccgtgctggtgtctgccctggtgctgatggctatggtcaagcggaaggacagccggggaaaacggggcagaaagaaactcctgtatatattcaaacaaccatttatgagaccagtacaaactactcaagaggaagatggctgtagctgccgatttccagaagaagaagaaggaggatgtgaactgagagtgaagttcagcagaagcgccgacgcccctgcctaccagcagggacagaaccaactgtacaacgagctgaacctgggcagacgggaagagtacgacgtgctggacaagcggagaggcagggaccctgagatgggcggaaagccccagcggagaaagaacccccaggaaggactgtataacgaactccagaaagacaagatggccgaagcctacagcgagatcggcatgaagggcgagcggagaagaggcaagggccacgatggcctgtaccagggcctgagcaccgccaccaaggacacctatgacgccctgcacatgcaggccctgcctccaaga

SEQ ID NO: 27076 - DNA, 663 bp, synthetic construct
  source 1..663: mol_type = other DNA
gccaagcccgtgacccagatcgtgtctgccgaagcctggggcagagccgattgcggctttaccagcgagagctaccagcagggcgtgctgagcgccaccatcctgtacgagatcctgctgggcaaggccaccctgtacgccgtgctggtgtctgccctggtgctgatggctatggtcaagcggaaggacagccggggaaaacggggcagaaagaaactcctgtatatattcaaacaaccatttatgagaccagtacaaactactcaagaggaagatggctgtagctgccgatttccagaagaagaagaaggaggatgtgaactgagagtgaagttcagcagaagcgccgacgcccctgcctaccagcagggacagaaccaactgtacaacgagctgaacctgggcagacgggaagagtacgacgtgctggacaagcggagaggcagggaccctgagatgggcggaaagccccagcggagaaagaacccccaggaaggactgtataacgaactccagaaagacaagatggccgaagcctacagcgagatcggcatgaagggcgagcggagaagaggcaagggccacgatggcctgtaccagggcctgagcaccgccaccaaggacacctatgacgccctgcacatgcaggccctgcctccaaga

SEQ ID NO: 27077 - DNA, 660 bp, synthetic construct
  source 1..660: mol_type = other DNA
aagcccgtgacccagatcgtgtctgccgaagcctggggcagagccgattgcggctttaccagcgagagctaccagcagggcgtgctgagcgccaccatcctgtacgagatcctgctgggcaaggccaccctgtacgccgtgctggtgtctgccctggtgctgatggctatggtcaagcggaaggacagccggggaaaacggggcagaaagaaactcctgtatatattcaaacaaccatttatgagaccagtacaaactactcaagaggaagatggctgtagctgccgatttccagaagaagaagaaggaggatgtgaactgagagtgaagttcagcagaagcgccgacgcccctgcctaccagcagggacagaaccaactgtacaacgagctgaacctgggcagacgggaagagtacgacgtgctggacaagcggagaggcagggaccctgagatgggcggaaagccccagcggagaaagaacccccaggaaggactgtataacgaactccagaaagacaagatggccgaagcctacagcgagatcggcatgaagggcgagcggagaagaggcaagggccacgatggcctgtaccagggcctgagcaccgccaccaaggacacctatgacgccctgcacatgcaggccctgcctccaaga

SEQ ID NO: 27078 - DNA, 657 bp, synthetic construct
  source 1..657: mol_type = other DNA
cccgtgacccagatcgtgtctgccgaagcctggggcagagccgattgcggctttaccagcgagagctaccagcagggcgtgctgagcgccaccatcctgtacgagatcctgctgggcaaggccaccctgtacgccgtgctggtgtctgccctggtgctgatggctatggtcaagcggaaggacagccggggaaaacggggcagaaagaaactcctgtatatattcaaacaaccatttatgagaccagtacaaactactcaagaggaagatggctgtagctgccgatttccagaagaagaagaaggaggatgtgaactgagagtgaagttcagcagaagcgccgacgcccctgcctaccagcagggacagaaccaactgtacaacgagctgaacctgggcagacgggaagagtacgacgtgctggacaagcggagaggcagggaccctgagatgggcggaaagccccagcggagaaagaacccccaggaaggactgtataacgaactccagaaagacaagatggccgaagcctacagcgagatcggcatgaagggcgagcggagaagaggcaagggccacgatggcctgtaccagggcctgagcaccgccaccaaggacacctatgacgccctgcacatgcaggccctgcctccaaga

SEQ ID NO: 27079 - DNA, 654 bp, synthetic construct
  source 1..654: mol_type = other DNA
gtgacccagatcgtgtctgccgaagcctggggcagagccgattgcggctttaccagcgagagctaccagcagggcgtgctgagcgccaccatcctgtacgagatcctgctgggcaaggccaccctgtacgccgtgctggtgtctgccctggtgctgatggctatggtcaagcggaaggacagccggggaaaacggggcagaaagaaactcctgtatatattcaaacaaccatttatgagaccagtacaaactactcaagaggaagatggctgtagctgccgatttccagaagaagaagaaggaggatgtgaactgagagtgaagttcagcagaagcgccgacgcccctgcctaccagcagggacagaaccaactgtacaacgagctgaacctgggcagacgggaagagtacgacgtgctggacaagcggagaggcagggaccctgagatgggcggaaagccccagcggagaaagaacccccaggaaggactgtataacgaactccagaaagacaagatggccgaagcctacagcgagatcggcatgaagggcgagcggagaagaggcaagggccacgatggcctgtaccagggcctgagcaccgccaccaaggacacctatgacgccctgcacatgcaggccctgcctccaaga

SEQ ID NO: 27080 - DNA, 651 bp, synthetic construct
  source 1..651: mol_type = other DNA
acccagatcgtgtctgccgaagcctggggcagagccgattgcggctttaccagcgagagctaccagcagggcgtgctgagcgccaccatcctgtacgagatcctgctgggcaaggccaccctgtacgccgtgctggtgtctgccctggtgctgatggctatggtcaagcggaaggacagccggggaaaacggggcagaaagaaactcctgtatatattcaaacaaccatttatgagaccagtacaaactactcaagaggaagatggctgtagctgccgatttccagaagaagaagaaggaggatgtgaactgagagtgaagttcagcagaagcgccgacgcccctgcctaccagcagggacagaaccaactgtacaacgagctgaacctgggcagacgggaagagtacgacgtgctggacaagcggagaggcagggaccctgagatgggcggaaagccccagcggagaaagaacccccaggaaggactgtataacgaactccagaaagacaagatggccgaagcctacagcgagatcggcatgaagggcgagcggagaagaggcaagggccacgatggcctgtaccagggcctgagcaccgccaccaaggacacctatgacgccctgcacatgcaggccctgcctccaaga

SEQ ID NO: 27081 - DNA, 648 bp, synthetic construct
  source 1..648: mol_type = other DNA
cagatcgtgtctgccgaagcctggggcagagccgattgcggctttaccagcgagagctaccagcagggcgtgctgagcgccaccatcctgtacgagatcctgctgggcaaggccaccctgtacgccgtgctggtgtctgccctggtgctgatggctatggtcaagcggaaggacagccggggaaaacggggcagaaagaaactcctgtatatattcaaacaaccatttatgagaccagtacaaactactcaagaggaagatggctgtagctgccgatttccagaagaagaagaaggaggatgtgaactgagagtgaagttcagcagaagcgccgacgcccctgcctaccagcagggacagaaccaactgtacaacgagctgaacctgggcagacgggaagagtacgacgtgctggacaagcggagaggcagggaccctgagatgggcggaaagccccagcggagaaagaacccccaggaaggactgtataacgaactccagaaagacaagatggccgaagcctacagcgagatcggcatgaagggcgagcggagaagaggcaagggccacgatggcctgtaccagggcctgagcaccgccaccaaggacacctatgacgccctgcacatgcaggccctgcctccaaga

SEQ ID NO: 27082 - DNA, 645 bp, synthetic construct
  source 1..645: mol_type = other DNA
atcgtgtctgccgaagcctggggcagagccgattgcggctttaccagcgagagctaccagcagggcgtgctgagcgccaccatcctgtacgagatcctgctgggcaaggccaccctgtacgccgtgctggtgtctgccctggtgctgatggctatggtcaagcggaaggacagccggggaaaacggggcagaaagaaactcctgtatatattcaaacaaccatttatgagaccagtacaaactactcaagaggaagatggctgtagctgccgatttccagaagaagaagaaggaggatgtgaactgagagtgaagttcagcagaagcgccgacgcccctgcctaccagcagggacagaaccaactgtacaacgagctgaacctgggcagacgggaagagtacgacgtgctggacaagcggagaggcagggaccctgagatgggcggaaagccccagcggagaaagaacccccaggaaggactgtataacgaactccagaaagacaagatggccgaagcctacagcgagatcggcatgaagggcgagcggagaagaggcaagggccacgatggcctgtaccagggcctgagcaccgccaccaaggacacctatgacgccctgcacatgcaggccctgcctccaaga

SEQ ID NO: 27083 - DNA, 642 bp, synthetic construct
  source 1..642: mol_type = other DNA
gtgtctgccgaagcctggggcagagccgattgcggctttaccagcgagagctaccagcagggcgtgctgagcgccaccatcctgtacgagatcctgctgggcaaggccaccctgtacgccgtgctggtgtctgccctggtgctgatggctatggtcaagcggaaggacagccggggaaaacggggcagaaagaaactcctgtatatattcaaacaaccatttatgagaccagtacaaactactcaagaggaagatggctgtagctgccgatttccagaagaagaagaaggaggatgtgaactgagagtgaagttcagcagaagcgccgacgcccctgcctaccagcagggacagaaccaactgtacaacgagctgaacctgggcagacgggaagagtacgacgtgctggacaagcggagaggcagggaccctgagatgggcggaaagccccagcggagaaagaacccccaggaaggactgtataacgaactccagaaagacaagatggccgaagcctacagcgagatcggcatgaagggcgagcggagaagaggcaagggccacgatggcctgtaccagggcctgagcaccgccaccaaggacacctatgacgccctgcacatgcaggccctgcctccaaga

SEQ ID NO: 27084 - DNA, 639 bp, synthetic construct
  source 1..639: mol_type = other DNA
tctgccgaagcctggggcagagccgattgcggctttaccagcgagagctaccagcagggcgtgctgagcgccaccatcctgtacgagatcctgctgggcaaggccaccctgtacgccgtgctggtgtctgccctggtgctgatggctatggtcaagcggaaggacagccggggaaaacggggcagaaagaaactcctgtatatattcaaacaaccatttatgagaccagtacaaactactcaagaggaagatggctgtagctgccgatttccagaagaagaagaaggaggatgtgaactgagagtgaagttcagcagaagcgccgacgcccctgcctaccagcagggacagaaccaactgtacaacgagctgaacctgggcagacgggaagagtacgacgtgctggacaagcggagaggcagggaccctgagatgggcggaaagccccagcggagaaagaacccccaggaaggactgtataacgaactccagaaagacaagatggccgaagcctacagcgagatcggcatgaagggcgagcggagaagaggcaagggccacgatggcctgtaccagggcctgagcaccgccaccaaggacacctatgacgccctgcacatgcaggccctgcctccaaga

SEQ ID NO: 27085 - DNA, 636 bp, synthetic construct
  source 1..636: mol_type = other DNA
gccgaagcctggggcagagccgattgcggctttaccagcgagagctaccagcagggcgtgctgagcgccaccatcctgtacgagatcctgctgggcaaggccaccctgtacgccgtgctggtgtctgccctggtgctgatggctatggtcaagcggaaggacagccggggaaaacggggcagaaagaaactcctgtatatattcaaacaaccatttatgagaccagtacaaactactcaagaggaagatggctgtagctgccgatttccagaagaagaagaaggaggatgtgaactgagagtgaagttcagcagaagcgccgacgcccctgcctaccagcagggacagaaccaactgtacaacgagctgaacctgggcagacgggaagagtacgacgtgctggacaagcggagaggcagggaccctgagatgggcggaaagccccagcggagaaagaacccccaggaaggactgtataacgaactccagaaagacaagatggccgaagcctacagcgagatcggcatgaagggcgagcggagaagaggcaagggccacgatggcctgtaccagggcctgagcaccgccaccaaggacacctatgacgccctgcacatgcaggccctgcctccaaga

SEQ ID NO: 27086 - DNA, 633 bp, synthetic construct
  source 1..633: mol_type = other DNA
gaagcctggggcagagccgattgcggctttaccagcgagagctaccagcagggcgtgctgagcgccaccatcctgtacgagatcctgctgggcaaggccaccctgtacgccgtgctggtgtctgccctggtgctgatggctatggtcaagcggaaggacagccggggaaaacggggcagaaagaaactcctgtatatattcaaacaaccatttatgagaccagtacaaactactcaagaggaagatggctgtagctgccgatttccagaagaagaagaaggaggatgtgaactgagagtgaagttcagcagaagcgccgacgcccctgcctaccagcagggacagaaccaactgtacaacgagctgaacctgggcagacgggaagagtacgacgtgctggacaagcggagaggcagggaccctgagatgggcggaaagccccagcggagaaagaacccccaggaaggactgtataacgaactccagaaagacaagatggccgaagcctacagcgagatcggcatgaagggcgagcggagaagaggcaagggccacgatggcctgtaccagggcctgagcaccgccaccaaggacacctatgacgccctgcacatgcaggccctgcctccaaga

SEQ ID NO: 27087 - DNA, 630 bp, synthetic construct
  source 1..630: mol_type = other DNA
gcctggggcagagccgattgcggctttaccagcgagagctaccagcagggcgtgctgagcgccaccatcctgtacgagatcctgctgggcaaggccaccctgtacgccgtgctggtgtctgccctggtgctgatggctatggtcaagcggaaggacagccggggaaaacggggcagaaagaaactcctgtatatattcaaacaaccatttatgagaccagtacaaactactcaagaggaagatggctgtagctgccgatttccagaagaagaagaaggaggatgtgaactgagagtgaagttcagcagaagcgccgacgcccctgcctaccagcagggacagaaccaactgtacaacgagctgaacctgggcagacgggaagagtacgacgtgctggacaagcggagaggcagggaccctgagatgggcggaaagccccagcggagaaagaacccccaggaaggactgtataacgaactccagaaagacaagatggccgaagcctacagcgagatcggcatgaagggcgagcggagaagaggcaagggccacgatggcctgtaccagggcctgagcaccgccaccaaggacacctatgacgccctgcacatgcaggccctgcctccaaga

SEQ ID NO: 27088 - DNA, 627 bp, synthetic construct
  source 1..627: mol_type = other DNA
tggggcagagccgattgcggctttaccagcgagagctaccagcagggcgtgctgagcgccaccatcctgtacgagatcctgctgggcaaggccaccctgtacgccgtgctggtgtctgccctggtgctgatggctatggtcaagcggaaggacagccggggaaaacggggcagaaagaaactcctgtatatattcaaacaaccatttatgagaccagtacaaactactcaagaggaagatggctgtagctgccgatttccagaagaagaagaaggaggatgtgaactgagagtgaagttcagcagaagcgccgacgcccctgcctaccagcagggacagaaccaactgtacaacgagctgaacctgggcagacgggaagagtacgacgtgctggacaagcggagaggcagggaccctgagatgggcggaaagccccagcggagaaagaacccccaggaaggactgtataacgaactccagaaagacaagatggccgaagcctacagcgagatcggcatgaagggcgagcggagaagaggcaagggccacgatggcctgtaccagggcctgagcaccgccaccaaggacacctatgacgccctgcacatgcaggccctgcctccaaga

SEQ ID NO: 27089 - DNA, 624 bp, synthetic construct; identical to SEQ ID NO: 26631
  source 1..624: mol_type = other DNA

SEQ ID NO: 27090 - DNA, 984 bp, synthetic construct; identical to SEQ ID NO: 26621
  source 1..984: mol_type = other DNA

SEQ ID NO: 27091 - DNA, 981 bp, synthetic construct
  source 1..981: mol_type = other DNA
aagcagctggacgccgacgtgtcccccaagcctaccatcttcctgccctctatcgccgagacaaagctccagaaggccggcacctacctgtgcctgctggaaaagttcttcccagatgtgattaagatccactggcaggaaaagaagtccaacaccatcctgggcagccaggaaggcaacaccatgaagaccaacgacacctacatgaagttcagctggctgaccgtgcccgagaagtccctggacaaagaacacagatgcatcgtgcggcacgaaaacaacaagaacggcgtggaccaggaaatcatcttcccacccatcaagaccgatgtgattacaatggaccccaaggacaactgctccaaggacgccaacgataccctgctgctccagctgaccaacaccagcgcctactacatgtacttgttgctgctgctgaagtccgtggtgtacttcgccatcatcacatgctgcctgctgcggagaaccgccttctgctgcaacggcgagaagtctaaacggggcagaaagaaactcctgtatatattcaaacaaccatttatgagaccagtacaaactactcaagaggaagatggctgtagctgccgatttccagaagaagaagaaggaggatgtgaactgagagtgaagttcagcagaagcgccgacgcccctgcctaccagcagggacagaaccaactgtacaacgagctgaacctgggcagacgggaagagtacgacgtgctggacaagcggagaggcagggaccctgagatgggcggaaagccccagcggagaaagaacccccaggaaggactgtataacgaactccagaaagacaagatggccgaagcctacagcgagatcggcatgaagggcgagcggagaagaggcaagggccacgatggcctgtaccagggcctgagcaccgccaccaaggacacctatgacgccctgcacatgcaggccctgcctccaaga

SEQ ID NO: 27092 - DNA, 978 bp, synthetic construct
  source 1..978: mol_type = other DNA
cagctggacgccgacgtgtcccccaagcctaccatcttcctgccctctatcgccgagacaaagctccagaaggccggcacctacctgtgcctgctggaaaagttcttcccagatgtgattaagatccactggcaggaaaagaagtccaacaccatcctgggcagccaggaaggcaacaccatgaagaccaacgacacctacatgaagttcagctggctgaccgtgcccgagaagtccctggacaaagaacacagatgcatcgtgcggcacgaaaacaacaagaacggcgtggaccaggaaatcatcttcccacccatcaagaccgatgtgattacaatggaccccaaggacaactgctccaaggacgccaacgataccctgctgctccagctgaccaacaccagcgcctactacatgtacttgttgctgctgctgaagtccgtggtgtacttcgccatcatcacatgctgcctgctgcggagaaccgccttctgctgcaacggcgagaagtctaaacggggcagaaagaaactcctgtatatattcaaacaaccatttatgagaccagtacaaactactcaagaggaagatggctgtagctgccgatttccagaagaagaagaaggaggatgtgaactgagagtgaagttcagcagaagcgccgacgcccctgcctaccagcagggacagaaccaactgtacaacgagctgaacctgggcagacgggaagagtacgacgtgctggacaagcggagaggcagggaccctgagatgggcggaaagccccagcggagaaagaacccccaggaaggactgtataacgaactccagaaagacaagatggccgaagcctacagcgagatcggcatgaagggcgagcggagaagaggcaagggccacgatggcctgtaccagggcctgagcaccgccaccaaggacacctatgacgccctgcacatgcaggccctgcctccaaga

SEQ ID NO: 27093 - DNA, 975 bp, synthetic construct
  source 1..975: mol_type = other DNA
ctggacgccgacgtgtcccccaagcctaccatcttcctgccctctatcgccgagacaaagctccagaaggccggcacctacctgtgcctgctggaaaagttcttcccagatgtgattaagatccactggcaggaaaagaagtccaacaccatcctgggcagccaggaaggcaacaccatgaagaccaacgacacctacatgaagttcagctggctgaccgtgcccgagaagtccctggacaaagaacacagatgcatcgtgcggcacgaaaacaacaagaacggcgtggaccaggaaatcatcttcccacccatcaagaccgatgtgattacaatggaccccaaggacaactgctccaaggacgccaacgataccctgctgctccagctgaccaacaccagcgcctactacatgtacttgttgctgctgctgaagtccgtggtgtacttcgccatcatcacatgctgcctgctgcggagaaccgccttctgctgcaacggcgagaagtctaaacggggcagaaagaaactcctgtatatattcaaacaaccatttatgagaccagtacaaactactcaagaggaagatggctgtagctgccgatttccagaagaagaagaaggaggatgtgaactgagagtgaagttcagcagaagcgccgacgcccctgcctaccagcagggacagaaccaactgtacaacgagctgaacctgggcagacgggaagagtacgacgtgctggacaagcggagaggcagggaccctgagatgggcggaaagccccagcggagaaagaacccccaggaaggactgtataacgaactccagaaagacaagatggccgaagcctacagcgagatcggcatgaagggcgagcggagaagaggcaagggccacgatggcctgtaccagggcctgagcaccgccaccaaggacacctatgacgccctgcacatgcaggccctgcctccaaga

SEQ ID NO: 27094 - DNA, 972 bp, synthetic construct
  source 1..972: mol_type = other DNA
gacgccgacgtgtcccccaagcctaccatcttcctgccctctatcgccgagacaaagctccagaaggccggcacctacctgtgcctgctggaaaagttcttcccagatgtgattaagatccactggcaggaaaagaagtccaacaccatcctgggcagccaggaaggcaacaccatgaagaccaacgacacctacatgaagttcagctggctgaccgtgcccgagaagtccctggacaaagaacacagatgcatcgtgcggcacgaaaacaacaagaacggcgtggaccaggaaatcatcttcccacccatcaagaccgatgtgattacaatggaccccaaggacaactgctccaaggacgccaacgataccctgctgctccagctgaccaacaccagcgcctactacatgtacttgttgctgctgctgaagtccgtggtgtacttcgccatcatcacatgctgcctgctgcggagaaccgccttctgctgcaacggcgagaagtctaaacggggcagaaagaaactcctgtatatattcaaacaaccatttatgagaccagtacaaactactcaagaggaagatggctgtagctgccgatttccagaagaagaagaaggaggatgtgaactgagagtgaagttcagcagaagcgccgacgcccctgcctaccagcagggacagaaccaactgtacaacgagctgaacctgggcagacgggaagagtacgacgtgctggacaagcggagaggcagggaccctgagatgggcggaaagccccagcggagaaagaacccccaggaaggactgtataacgaactccagaaagacaagatggccgaagcctacagcgagatcggcatgaagggcgagcggagaagaggcaagggccacgatggcctgtaccagggcctgagcaccgccaccaaggacacctatgacgccctgcacatgcaggccctgcctccaaga

SEQ ID NO: 27095 - DNA, 969 bp, synthetic construct; identical to SEQ ID NO: 26634
  source 1..969: mol_type = other DNA

SEQ ID NO: 27096 - DNA, 966 bp, synthetic construct
  source 1..966: mol_type = other DNA
gacgtgtcccccaagcctaccatcttcctgccctctatcgccgagacaaagctccagaaggccggcacctacctgtgcctgctggaaaagttcttcccagatgtgattaagatccactggcaggaaaagaagtccaacaccatcctgggcagccaggaaggcaacaccatgaagaccaacgacacctacatgaagttcagctggctgaccgtgcccgagaagtccctggacaaagaacacagatgcatcgtgcggcacgaaaacaacaagaacggcgtggaccaggaaatcatcttcccacccatcaagaccgatgtgattacaatggaccccaaggacaactgctccaaggacgccaacgataccctgctgctccagctgaccaacaccagcgcctactacatgtacttgttgctgctgctgaagtccgtggtgtacttcgccatcatcacatgctgcctgctgcggagaaccgccttctgctgcaacggcgagaagtctaaacggggcagaaagaaactcctgtatatattcaaacaaccatttatgagaccagtacaaactactcaagaggaagatggctgtagctgccgatttccagaagaagaagaaggaggatgtgaactgagagtgaagttcagcagaagcgccgacgcccctgcctaccagcagggacagaaccaactgtacaacgagctgaacctgggcagacgggaagagtacgacgtgctggacaagcggagaggcagggaccctgagatgggcggaaagccccagcggagaaagaacccccaggaaggactgtataacgaactccagaaagacaagatggccgaagcctacagcgagatcggcatgaagggcgagcggagaagaggcaagggccacgatggcctgtaccagggcctgagcaccgccaccaaggacacctatgacgccctgcacatgcaggccctgcctccaaga

SEQ ID NO: 27097 - DNA, 963 bp, synthetic construct; identical to SEQ ID NO: 26635
  source 1..963: mol_type = other DNA

SEQ ID NO: 27098 - DNA, 960 bp, synthetic construct
  source 1..960: mol_type = other DNA
tcccccaagcctaccatcttcctgccctctatcgccgagacaaagctccagaaggccggcacctacctgtgcctgctggaaaagttcttcccagatgtgattaagatccactggcaggaaaagaagtccaacaccatcctgggcagccaggaaggcaacaccatgaagaccaacgacacctacatgaagttcagctggctgaccgtgcccgagaagtccctggacaaagaacacagatgcatcgtgcggcacgaaaacaacaagaacggcgtggaccaggaaatcatcttcccacccatcaagaccgatgtgattacaatggaccccaaggacaactgctccaaggacgccaacgataccctgctgctccagctgaccaacaccagcgcctactacatgtacttgttgctgctgctgaagtccgtggtgtacttcgccatcatcacatgctgcctgctgcggagaaccgccttctgctgcaacggcgagaagtctaaacggggcagaaagaaactcctgtatatattcaaacaaccatttatgagaccagtacaaactactcaagaggaagatggctgtagctgccgatttccagaagaagaagaaggaggatgtgaactgagagtgaagttcagcagaagcgccgacgcccctgcctaccagcagggacagaaccaactgtacaacgagctgaacctgggcagacgggaagagtacgacgtgctggacaagcggagaggcagggaccctgagatgggcggaaagccccagcggagaaagaacccccaggaaggactgtataacgaactccagaaagacaagatggccgaagcctacagcgagatcggcatgaagggcgagcggagaagaggcaagggccacgatggcctgtaccagggcctgagcaccgccaccaaggacacctatgacgccctgcacatgcaggccctgcctccaaga

SEQ ID NO: 27099 - DNA, 957 bp, synthetic construct
  source 1..957: mol_type = other DNA
cccaagcctaccatcttcctgccctctatcgccgagacaaagctccagaaggccggcacctacctgtgcctgctggaaaagttcttcccagatgtgattaagatccactggcaggaaaagaagtccaacaccatcctgggcagccaggaaggcaacaccatgaagaccaacgacacctacatgaagttcagctggctgaccgtgcccgagaagtccctggacaaagaacacagatgcatcgtgcggcacgaaaacaacaagaacggcgtggaccaggaaatcatcttcccacccatcaagaccgatgtgattacaatggaccccaaggacaactgctccaaggacgccaacgataccctgctgctccagctgaccaacaccagcgcctactacatgtacttgttgctgctgctgaagtccgtggtgtacttcgccatcatcacatgctgcctgctgcggagaaccgccttctgctgcaacggcgagaagtctaaacggggcagaaagaaactcctgtatatattcaaacaaccatttatgagaccagtacaaactactcaagaggaagatggctgtagctgccgatttccagaagaagaagaaggaggatgtgaactgagagtgaagttcagcagaagcgccgacgcccctgcctaccagcagggacagaaccaactgtacaacgagctgaacctgggcagacgggaagagtacgacgtgctggacaagcggagaggcagggaccctgagatgggcggaaagccccagcggagaaagaacccccaggaaggactgtataacgaactccagaaagacaagatggccgaagcctacagcgagatcggcatgaagggcgagcggagaagaggcaagggccacgatggcctgtaccagggcctgagcaccgccaccaaggacacctatgacgccctgcacatgcaggccctgcctccaaga

SEQ ID NO: 27100 - DNA, 954 bp, synthetic construct
  source 1..954: mol_type = other DNA
aagcctaccatcttcctgccctctatcgccgagacaaagctccagaaggccggcacctacctgtgcctgctggaaaagttcttcccagatgtgattaagatccactggcaggaaaagaagtccaacaccatcctgggcagccaggaaggcaacaccatgaagaccaacgacacctacatgaagttcagctggctgaccgtgcccgagaagtccctggacaaagaacacagatgcatcgtgcggcacgaaaacaacaagaacggcgtggaccaggaaatcatcttcccacccatcaagaccgatgtgattacaatggaccccaaggacaactgctccaaggacgccaacgataccctgctgctccagctgaccaacaccagcgcctactacatgtacttgttgctgctgctgaagtccgtggtgtacttcgccatcatcacatgctgcctgctgcggagaaccgccttctgctgcaacggcgagaagtctaaacggggcagaaagaaactcctgtatatattcaaacaaccatttatgagaccagtacaaactactcaagaggaagatggctgtagctgccgatttccagaagaagaagaaggaggatgtgaactgagagtgaagttcagcagaagcgccgacgcccctgcctaccagcagggacagaaccaactgtacaacgagctgaacctgggcagacgggaagagtacgacgtgctggacaagcggagaggcagggaccctgagatgggcggaaagccccagcggagaaagaacccccaggaaggactgtataacgaactccagaaagacaagatggccgaagcctacagcgagatcggcatgaagggcgagcggagaagaggcaagggccacgatggcctgtaccagggcctgagcaccgccaccaaggacacctatgacgccctgcacatgcaggccctgcctccaaga

SEQ ID NO: 27101 - DNA, 951 bp, synthetic construct
  source 1..951: mol_type = other DNA
cctaccatcttcctgccctctatcgccgagacaaagctccagaaggccggcacctacctgtgcctgctggaaaagttcttcccagatgtgattaagatccactggcaggaaaagaagtccaacaccatcctgggcagccaggaaggcaacaccatgaagaccaacgacacctacatgaagttcagctggctgaccgtgcccgagaagtccctggacaaagaacacagatgcatcgtgcggcacgaaaacaacaagaacggcgtggaccaggaaatcatcttcccacccatcaagaccgatgtgattacaatggaccccaaggacaactgctccaaggacgccaacgataccctgctgctccagctgaccaacaccagcgcctactacatgtacttgttgctgctgctgaagtccgtggtgtacttcgccatcatcacatgctgcctgctgcggagaaccgccttctgctgcaacggcgagaagtctaaacggggcagaaagaaactcctgtatatattcaaacaaccatttatgagaccagtacaaactactcaagaggaagatggctgtagctgccgatttccagaagaagaagaaggaggatgtgaactgagagtgaagttcagcagaagcgccgacgcccctgcctaccagcagggacagaaccaactgtacaacgagctgaacctgggcagacgggaagagtacgacgtgctggacaagcggagaggcagggaccctgagatgggcggaaagccccagcggagaaagaacccccaggaaggactgtataacgaactccagaaagacaagatggccgaagcctacagcgagatcggcatgaagggcgagcggagaagaggcaagggccacgatggcctgtaccagggcctgagcaccgccaccaaggacacctatgacgccctgcacatgcaggccctgcctccaaga

SEQ ID NO: 27102 - DNA, 948 bp, synthetic construct; identical to SEQ ID NO: 26636
  source 1..948: mol_type = other DNA

SEQ ID NO: 27103 - DNA, 945 bp, synthetic construct
  source 1..945: mol_type = other DNA
atcttcctgccctctatcgccgagacaaagctccagaaggccggcacctacctgtgcctgctggaaaagttcttcccagatgtgattaagatccactggcaggaaaagaagtccaacaccatcctgggcagccaggaaggcaacaccatgaagaccaacgacacctacatgaagttcagctggctgaccgtgcccgagaagtccctggacaaagaacacagatgcatcgtgcggcacgaaaacaacaagaacggcgtggaccaggaaatcatcttcccacccatcaagaccgatgtgattacaatggaccccaaggacaactgctccaaggacgccaacgataccctgctgctccagctgaccaacaccagcgcctactacatgtacttgttgctgctgctgaagtccgtggtgtacttcgccatcatcacatgctgcctgctgcggagaaccgccttctgctgcaacggcgagaagtctaaacggggcagaaagaaactcctgtatatattcaaacaaccatttatgagaccagtacaaactactcaagaggaagatggctgtagctgccgatttccagaagaagaagaaggaggatgtgaactgagagtgaagttcagcagaagcgccgacgcccctgcctaccagcagggacagaaccaactgtacaacgagctgaacctgggcagacgggaagagtacgacgtgctggacaagcggagaggcagggaccctgagatgggcggaaagccccagcggagaaagaacccccaggaaggactgtataacgaactccagaaagacaagatggccgaagcctacagcgagatcggcatgaagggcgagcggagaagaggcaagggccacgatggcctgtaccagggcctgagcaccgccaccaaggacacctatgacgccctgcacatgcaggccctgcctccaaga

SEQ ID NO: 27104 - DNA, 942 bp, synthetic construct
  source 1..942: mol_type = other DNA
ttcctgccctctatcgccgagacaaagctccagaaggccggcacctacctgtgcctgctggaaaagttcttcccagatgtgattaagatccactggcaggaaaagaagtccaacaccatcctgggcagccaggaaggcaacaccatgaagaccaacgacacctacatgaagttcagctggctgaccgtgcccgagaagtccctggacaaagaacacagatgcatcgtgcggcacgaaaacaacaagaacggcgtggaccaggaaatcatcttcccacccatcaagaccgatgtgattacaatggaccccaaggacaactgctccaaggacgccaacgataccctgctgctccagctgaccaacaccagcgcctactacatgtacttgttgctgctgctgaagtccgtggtgtacttcgccatcatcacatgctgcctgctgcggagaaccgccttctgctgcaacggcgagaagtctaaacggggcagaaagaaactcctgtatatattcaaacaaccatttatgagaccagtacaaactactcaagaggaagatggctgtagctgccgatttccagaagaagaagaaggaggatgtgaactgagagtgaagttcagcagaagcgccgacgcccctgcctaccagcagggacagaaccaactgtacaacgagctgaacctgggcagacgggaagagtacgacgtgctggacaagcggagaggcagggaccctgagatgggcggaaagccccagcggagaaagaacccccaggaaggactgtataacgaactccagaaagacaagatggccgaagcctacagcgagatcggcatgaagggcgagcggagaagaggcaagggccacgatggcctgtaccagggcctgagcaccgccaccaaggacacctatgacgccctgcacatgcaggccctgcctccaaga

SEQ ID NO: 27105 - DNA, 939 bp, synthetic construct
  source 1..939: mol_type = other DNA
ctgccctctatcgccgagacaaagctccagaaggccggcacctacctgtgcctgctggaaaagttcttcccagatgtgattaagatccactggcaggaaaagaagtccaacaccatcctgggcagccaggaaggcaacaccatgaagaccaacgacacctacatgaagttcagctggctgaccgtgcccgagaagtccctggacaaagaacacagatgcatcgtgcggcacgaaaacaacaagaacggcgtggaccaggaaatcatcttcccacccatcaagaccgatgtgattacaatggaccccaaggacaactgctccaaggacgccaacgataccctgctgctccagctgaccaacaccagcgcctactacatgtacttgttgctgctgctgaagtccgtggtgtacttcgccatcatcacatgctgcctgctgcggagaaccgccttctgctgcaacggcgagaagtctaaacggggcagaaagaaactcctgtatatattcaaacaaccatttatgagaccagtacaaactactcaagaggaagatggctgtagctgccgatttccagaagaagaagaaggaggatgtgaactgagagtgaagttcagcagaagcgccgacgcccctgcctaccagcagggacagaaccaactgtacaacgagctgaacctgggcagacgggaagagtacgacgtgctggacaagcggagaggcagggaccctgagatgggcggaaagccccagcggagaaagaacccccaggaaggactgtataacgaactccagaaagacaagatggccgaagcctacagcgagatcggcatgaagggcgagcggagaagaggcaagggccacgatggcctgtaccagggcctgagcaccgccaccaaggacacctatgacgccctgcacatgcaggccctgcctccaaga

SEQ ID NO: 27106 - DNA, 936 bp, synthetic construct
  source 1..936: mol_type = other DNA
ccctctatcgccgagacaaagctccagaaggccggcacctacctgtgcctgctggaaaagttcttcccagatgtgattaagatccactggcaggaaaagaagtccaacaccatcctgggcagccaggaaggcaacaccatgaagaccaacgacacctacatgaagttcagctggctgaccgtgcccgagaagtccctggacaaagaacacagatgcatcgtgcggcacgaaaacaacaagaacggcgtggaccaggaaatcatcttcccacccatcaagaccgatgtgattacaatggaccccaaggacaactgctccaaggacgccaacgataccctgctgctccagctgaccaacaccagcgcctactacatgtacttgttgctgctgctgaagtccgtggtgtacttcgccatcatcacatgctgcctgctgcggagaaccgccttctgctgcaacggcgagaagtctaaacggggcagaaagaaactcctgtatatattcaaacaaccatttatgagaccagtacaaactactcaagaggaagatggctgtagctgccgatttccagaagaagaagaaggaggatgtgaactgagagtgaagttcagcagaagcgccgacgcccctgcctaccagcagggacagaaccaactgtacaacgagctgaacctgggcagacgggaagagtacgacgtgctggacaagcggagaggcagggaccctgagatgggcggaaagccccagcggagaaagaacccccaggaaggactgtataacgaactccagaaagacaagatggccgaagcctacagcgagatcggcatgaagggcgagcggagaagaggcaagggccacgatggcctgtaccagggcctgagcaccgccaccaaggacacctatgacgccctgcacatgcaggccctgcctccaaga

SEQ ID NO: 27107 - DNA, 933 bp, synthetic construct
  source 1..933: mol_type = other DNA
tctatcgccgagacaaagctccagaaggccggcacctacctgtgcctgctggaaaagttcttcccagatgtgattaagatccactggcaggaaaagaagtccaacaccatcctgggcagccaggaaggcaacaccatgaagaccaacgacacctacatgaagttcagctggctgaccgtgcccgagaagtccctggacaaagaacacagatgcatcgtgcggcacgaaaacaacaagaacggcgtggaccaggaaatcatcttcccacccatcaagaccgatgtgattacaatggaccccaaggacaactgctccaaggacgccaacgataccctgctgctccagctgaccaacaccagcgcctactacatgtacttgttgctgctgctgaagtccgtggtgtacttcgccatcatcacatgctgcctgctgcggagaaccgccttctgctgcaacggcgagaagtctaaacggggcagaaagaaactcctgtatatattcaaacaaccatttatgagaccagtacaaactactcaagaggaagatggctgtagctgccgatttccagaagaagaagaaggaggatgtgaactgagagtgaagttcagcagaagcgccgacgcccctgcctaccagcagggacagaaccaactgtacaacgagctgaacctgggcagacgggaagagtacgacgtgctggacaagcggagaggcagggaccctgagatgggcggaaagccccagcggagaaagaacccccaggaaggactgtataacgaactccagaaagacaagatggccgaagcctacagcgagatcggcatgaagggcgagcggagaagaggcaagggccacgatggcctgtaccagggcctgagcaccgccaccaaggacacctatgacgccctgcacatgcaggccctgcctccaaga

SEQ ID NO: 27108 - DNA, 930 bp, synthetic construct
  source 1..930: mol_type = other DNA
atcgccgagacaaagctccagaaggccggcacctacctgtgcctgctggaaaagttcttcccagatgtgattaagatccactggcaggaaaagaagtccaacaccatcctgggcagccaggaaggcaacaccatgaagaccaacgacacctacatgaagttcagctggctgaccgtgcccgagaagtccctggacaaagaacacagatgcatcgtgcggcacgaaaacaacaagaacggcgtggaccaggaaatcatcttcccacccatcaagaccgatgtgattacaatggaccccaaggacaactgctccaaggacgccaacgataccctgctgctccagctgaccaacaccagcgcctactacatgtacttgttgctgctgctgaagtccgtggtgtacttcgccatcatcacatgctgcctgctgcggagaaccgccttctgctgcaacggcgagaagtctaaacggggcagaaagaaactcctgtatatattcaaacaaccatttatgagaccagtacaaactactcaagaggaagatggctgtagctgccgatttccagaagaagaagaaggaggatgtgaactgagagtgaagttcagcagaagcgccgacgcccctgcctaccagcagggacagaaccaactgtacaacgagctgaacctgggcagacgggaagagtacgacgtgctggacaagcggagaggcagggaccctgagatgggcggaaagccccagcggagaaagaacccccaggaaggactgtataacgaactccagaaagacaagatggccgaagcctacagcgagatcggcatgaagggcgagcggagaagaggcaagggccacgatggcctgtaccagggcctgagcaccgccaccaaggacacctatgacgccctgcacatgcaggccctgcctccaaga

SEQ ID NO: 27109 - DNA, 927 bp, synthetic construct
  source 1..927: mol_type = other DNA
gccgagacaaagctccagaaggccggcacctacctgtgcctgctggaaaagttcttcccagatgtgattaagatccactggcaggaaaagaagtccaacaccatcctgggcagccaggaaggcaacaccatgaagaccaacgacacctacatgaagttcagctggctgaccgtgcccgagaagtccctggacaaagaacacagatgcatcgtgcggcacgaaaacaacaagaacggcgtggaccaggaaatcatcttcccacccatcaagaccgatgtgattacaatggaccccaaggacaactgctccaaggacgccaacgataccctgctgctccagctgaccaacaccagcgcctactacatgtacttgttgctgctgctgaagtccgtggtgtacttcgccatcatcacatgctgcctgctgcggagaaccgccttctgctgcaacggcgagaagtctaaacggggcagaaagaaactcctgtatatattcaaacaaccatttatgagaccagtacaaactactcaagaggaagatggctgtagctgccgatttccagaagaagaagaaggaggatgtgaactgagagtgaagttcagcagaagcgccgacgcccctgcctaccagcagggacagaaccaactgtacaacgagctgaacctgggcagacgggaagagtacgacgtgctggacaagcggagaggcagggaccctgagatgggcggaaagccccagcggagaaagaacccccaggaaggactgtataacgaactccagaaagacaagatggccgaagcctacagcgagatcggcatgaagggcgagcggagaagaggcaagggccacgatggcctgtaccagggcctgagcaccgccaccaaggacacctatgacgccctgcacatgcaggccctgcctccaaga

SEQ ID NO: 27110 - DNA, 924 bp, synthetic construct
  source 1..924: mol_type = other DNA
gagacaaagctccagaaggccggcacctacctgtgcctgctggaaaagttcttcccagatgtgattaagatccactggcaggaaaagaagtccaacaccatcctgggcagccaggaaggcaacaccatgaagaccaacgacacctacatgaagttcagctggctgaccgtgcccgagaagtccctggacaaagaacacagatgcatcgtgcggcacgaaaacaacaagaacggcgtggaccaggaaatcatcttcccacccatcaagaccgatgtgattacaatggaccccaaggacaactgctccaaggacgccaacgataccctgctgctccagctgaccaacaccagcgcctactacatgtacttgttgctgctgctgaagtccgtggtgtacttcgccatcatcacatgctgcctgctgcggagaaccgccttctgctgcaacggcgagaagtctaaacggggcagaaagaaactcctgtatatattcaaacaaccatttatgagaccagtacaaactactcaagaggaagatggctgtagctgccgatttccagaagaagaagaaggaggatgtgaactgagagtgaagttcagcagaagcgccgacgcccctgcctaccagcagggacagaaccaactgtacaacgagctgaacctgggcagacgggaagagtacgacgtgctggacaagcggagaggcagggaccctgagatgggcggaaagccccagcggagaaagaacccccaggaaggactgtataacgaactccagaaagacaagatggccgaagcctacagcgagatcggcatgaagggcgagcggagaagaggcaagggccacgatggcctgtaccagggcctgagcaccgccaccaaggacacctatgacgccctgcacatgcaggccctgcctccaaga

SEQ ID NO: 27111 - DNA, 921 bp, synthetic construct
  source 1..921: mol_type = other DNA
acaaagctccagaaggccggcacctacctgtgcctgctggaaaagttcttcccagatgtgattaagatccactggcaggaaaagaagtccaacaccatcctgggcagccaggaaggcaacaccatgaagaccaacgacacctacatgaagttcagctggctgaccgtgcccgagaagtccctggacaaagaacacagatgcatcgtgcggcacgaaaacaacaagaacggcgtggaccaggaaatcatcttcccacccatcaagaccgatgtgattacaatggaccccaaggacaactgctccaaggacgccaacgataccctgctgctccagctgaccaacaccagcgcctactacatgtacttgttgctgctgctgaagtccgtggtgtacttcgccatcatcacatgctgcctgctgcggagaaccgccttctgctgcaacggcgagaagtctaaacggggcagaaagaaactcctgtatatattcaaacaaccatttatgagaccagtacaaactactcaagaggaagatggctgtagctgccgatttccagaagaagaagaaggaggatgtgaactgagagtgaagttcagcagaagcgccgacgcccctgcctaccagcagggacagaaccaactgtacaacgagctgaacctgggcagacgggaagagtacgacgtgctggacaagcggagaggcagggaccctgagatgggcggaaagccccagcggagaaagaacccccaggaaggactgtataacgaactccagaaagacaagatggccgaagcctacagcgagatcggcatgaagggcgagcggagaagaggcaagggccacgatggcctgtaccagggcctgagcaccgccaccaaggacacctatgacgccctgcacatgcaggccctgcctccaaga

SEQ ID NO: 27112 - DNA, 918 bp, synthetic construct
  source 1..918: mol_type = other DNA
aagctccagaaggccggcacctacctgtgcctgctggaaaagttcttcccagatgtgattaagatccactggcaggaaaagaagtccaacaccatcctgggcagccaggaaggcaacaccatgaagaccaacgacacctacatgaagttcagctggctgaccgtgcccgagaagtccctggacaaagaacacagatgcatcgtgcggcacgaaaacaacaagaacggcgtggaccaggaaatcatcttcccacccatcaagaccgatgtgattacaatggaccccaaggacaactgctccaaggacgccaacgataccctgctgctccagctgaccaacaccagcgcctactacatgtacttgttgctgctgctgaagtccgtggtgtacttcgccatcatcacatgctgcctgctgcggagaaccgccttctgctgcaacggcgagaagtctaaacggggcagaaagaaactcctgtatatattcaaacaaccatttatgagaccagtacaaactactcaagaggaagatggctgtagctgccgatttccagaagaagaagaaggaggatgtgaactgagagtgaagttcagcagaagcgccgacgcccctgcctaccagcagggacagaaccaactgtacaacgagctgaacctgggcagacgggaagagtacgacgtgctggacaagcggagaggcagggaccctgagatgggcggaaagccccagcggagaaagaacccccaggaaggactgtataacgaactccagaaagacaagatggccgaagcctacagcgagatcggcatgaagggcgagcggagaagaggcaagggccacgatggcctgtaccagggcctgagcaccgccaccaaggacacctatgacgccctgcacatgcaggccctgcctccaaga

SEQ ID NO: 27113 - DNA, 915 bp, synthetic construct
  source 1..915: mol_type = other DNA
ctccagaaggccggcacctacctgtgcctgctggaaaagttcttcccagatgtgattaagatccactggcaggaaaagaagtccaacaccatcctgggcagccaggaaggcaacaccatgaagaccaacgacacctacatgaagttcagctggctgaccgtgcccgagaagtccctggacaaagaacacagatgcatcgtgcggcacgaaaacaacaagaacggcgtggaccaggaaatcatcttcccacccatcaagaccgatgtgattacaatggaccccaaggacaactgctccaaggacgccaacgataccctgctgctccagctgaccaacaccagcgcctactacatgtacttgttgctgctgctgaagtccgtggtgtacttcgccatcatcacatgctgcctgctgcggagaaccgccttctgctgcaacggcgagaagtctaaacggggcagaaagaaactcctgtatatattcaaacaaccatttatgagaccagtacaaactactcaagaggaagatggctgtagctgccgatttccagaagaagaagaaggaggatgtgaactgagagtgaagttcagcagaagcgccgacgcccctgcctaccagcagggacagaaccaactgtacaacgagctgaacctgggcagacgggaagagtacgacgtgctggacaagcggagaggcagggaccctgagatgggcggaaagccccagcggagaaagaacccccaggaaggactgtataacgaactccagaaagacaagatggccgaagcctacagcgagatcggcatgaagggcgagcggagaagaggcaagggccacgatggcctgtaccagggcctgagcaccgccaccaaggacacctatgacgccctgcacatgcaggccctgcctccaaga

SEQ ID NO: 27114 - DNA, 912 bp, synthetic construct
  source 1..912: mol_type = other DNA
cagaaggccggcacctacctgtgcctgctggaaaagttcttcccagatgtgattaagatccactggcaggaaaagaagtccaacaccatcctgggcagccaggaaggcaacaccatgaagaccaacgacacctacatgaagttcagctggctgaccgtgcccgagaagtccctggacaaagaacacagatgcatcgtgcggcacgaaaacaacaagaacggcgtggaccaggaaatcatcttcccacccatcaagaccgatgtgattacaatggaccccaaggacaactgctccaaggacgccaacgataccctgctgctccagctgaccaacaccagcgcctactacatgtacttgttgctgctgctgaagtccgtggtgtacttcgccatcatcacatgctgcctgctgcggagaaccgccttctgctgcaacggcgagaagtctaaacggggcagaaagaaactcctgtatatattcaaacaaccatttatgagaccagtacaaactactcaagaggaagatggctgtagctgccgatttccagaagaagaagaaggaggatgtgaactgagagtgaagttcagcagaagcgccgacgcccctgcctaccagcagggacagaaccaactgtacaacgagctgaacctgggcagacgggaagagtacgacgtgctggacaagcggagaggcagggaccctgagatgggcggaaagccccagcggagaaagaacccccaggaaggactgtataacgaactccagaaagacaagatggccgaagcctacagcgagatcggcatgaagggcgagcggagaagaggcaagggccacgatggcctgtaccagggcctgagcaccgccaccaaggacacctatgacgccctgcacatgcaggccctgcctccaaga

SEQ ID NO: 27115 - DNA, 909 bp, synthetic construct
  source 1..909: mol_type = other DNA
aaggccggcacctacctgtgcctgctggaaaagttcttcccagatgtgattaagatccactggcaggaaaagaagtccaacaccatcctgggcagccaggaaggcaacaccatgaagaccaacgacacctacatgaagttcagctggctgaccgtgcccgagaagtccctggacaaagaacacagatgcatcgtgcggcacgaaaacaacaagaacggcgtggaccaggaaatcatcttcccacccatcaagaccgatgtgattacaatggaccccaaggacaactgctccaaggacgccaacgataccctgctgctccagctgaccaacaccagcgcctactacatgtacttgttgctgctgctgaagtccgtggtgtacttcgccatcatcacatgctgcctgctgcggagaaccgccttctgctgcaacggcgagaagtctaaacggggcagaaagaaactcctgtatatattcaaacaaccatttatgagaccagtacaaactactcaagaggaagatggctgtagctgccgatttccagaagaagaagaaggaggatgtgaactgagagtgaagttcagcagaagcgccgacgcccctgcctaccagcagggacagaaccaactgtacaacgagctgaacctgggcagacgggaagagtacgacgtgctggacaagcggagaggcagggaccctgagatgggcggaaagccccagcggagaaagaacccccaggaaggactgtataacgaactccagaaagacaagatggccgaagcctacagcgagatcggcatgaagggcgagcggagaagaggcaagggccacgatggcctgtaccagggcctgagcaccgccaccaaggacacctatgacgccctgcacatgcaggccctgcctccaaga

SEQ ID NO: 27116 - DNA, 906 bp, synthetic construct
  source 1..906: mol_type = other DNA
gccggcacctacctgtgcctgctggaaaagttcttcccagatgtgattaagatccactggcaggaaaagaagtccaacaccatcctgggcagccaggaaggcaacaccatgaagaccaacgacacctacatgaagttcagctggctgaccgtgcccgagaagtccctggacaaagaacacagatgcatcgtgcggcacgaaaacaacaagaacggcgtggaccaggaaatcatcttcccacccatcaagaccgatgtgattacaatggaccccaaggacaactgctccaaggacgccaacgataccctgctgctccagctgaccaacaccagcgcctactacatgtacttgttgctgctgctgaagtccgtggtgtacttcgccatcatcacatgctgcctgctgcggagaaccgccttctgctgcaacggcgagaagtctaaacggggcagaaagaaactcctgtatatattcaaacaaccatttatgagaccagtacaaactactcaagaggaagatggctgtagctgccgatttccagaagaagaagaaggaggatgtgaactgagagtgaagttcagcagaagcgccgacgcccctgcctaccagcagggacagaaccaactgtacaacgagctgaacctgggcagacgggaagagtacgacgtgctggacaagcggagaggcagggaccctgagatgggcggaaagccccagcggagaaagaacccccaggaaggactgtataacgaactccagaaagacaagatggccgaagcctacagcgagatcggcatgaagggcgagcggagaagaggcaagggccacgatggcctgtaccagggcctgagcaccgccaccaaggacacctatgacgccctgcacatgcaggccctgcctccaaga

SEQ ID NO: 27117 - DNA, 903 bp, synthetic construct
  source 1..903: mol_type = other DNA
ggcacctacctgtgcctgctggaaaagttcttcccagatgtgattaagatccactggcaggaaaagaagtccaacaccatcctgggcagccaggaaggcaacaccatgaagaccaacgacacctacatgaagttcagctggctgaccgtgcccgagaagtccctggacaaagaacacagatgcatcgtgcggcacgaaaacaacaagaacggcgtggaccaggaaatcatcttcccacccatcaagaccgatgtgattacaatggaccccaaggacaactgctccaaggacgccaacgataccctgctgctccagctgaccaacaccagcgcctactacatgtacttgttgctgctgctgaagtccgtggtgtacttcgccatcatcacatgctgcctgctgcggagaaccgccttctgctgcaacggcgagaagtctaaacggggcagaaagaaactcctgtatatattcaaacaaccatttatgagaccagtacaaactactcaagaggaagatggctgtagctgccgatttccagaagaagaagaaggaggatgtgaactgagagtgaagttcagcagaagcgccgacgcccctgcctaccagcagggacagaaccaactgtacaacgagctgaacctgggcagacgggaagagtacgacgtgctggacaagcggagaggcagggaccctgagatgggcggaaagccccagcggagaaagaacccccaggaaggactgtataacgaactccagaaagacaagatggccgaagcctacagcgagatcggcatgaagggcgagcggagaagaggcaagggccacgatggcctgtaccagggcctgagcaccgccaccaaggacacctatgacgccctgcacatgcaggccctgcctccaaga

SEQ ID NO: 27118 - DNA, 900 bp, synthetic construct
  source 1..900: mol_type = other DNA
acctacctgtgcctgctggaaaagttcttcccagatgtgattaagatccactggcaggaaaagaagtccaacaccatcctgggcagccaggaaggcaacaccatgaagaccaacgacacctacatgaagttcagctggctgaccgtgcccgagaagtccctggacaaagaacacagatgcatcgtgcggcacgaaaacaacaagaacggcgtggaccaggaaatcatcttcccacccatcaagaccgatgtgattacaatggaccccaaggacaactgctccaaggacgccaacgataccctgctgctccagctgaccaacaccagcgcctactacatgtacttgttgctgctgctgaagtccgtggtgtacttcgccatcatcacatgctgcctgctgcggagaaccgccttctgctgcaacggcgagaagtctaaacggggcagaaagaaactcctgtatatattcaaacaaccatttatgagaccagtacaaactactcaagaggaagatggctgtagctgccgatttccagaagaagaagaaggaggatgtgaactgagagtgaagttcagcagaagcgccgacgcccctgcctaccagcagggacagaaccaactgtacaacgagctgaacctgggcagacgggaagagtacgacgtgctggacaagcggagaggcagggaccctgagatgggcggaaagccccagcggagaaagaacccccaggaaggactgtataacgaactccagaaagacaagatggccgaagcctacagcgagatcggcatgaagggcgagcggagaagaggcaagggccacgatggcctgtaccagggcctgagcaccgccaccaaggacacctatgacgccctgcacatgcaggccctgcctccaaga

SEQ ID NO: 27119 - DNA, 897 bp, synthetic construct
  source 1..897: mol_type = other DNA
tacctgtgcctgctggaaaagttcttcccagatgtgattaagatccactggcaggaaaagaagtccaacaccatcctgggcagccaggaaggcaacaccatgaagaccaacgacacctacatgaagttcagctggctgaccgtgcccgagaagtccctggacaaagaacacagatgcatcgtgcggcacgaaaacaacaagaacggcgtggaccaggaaatcatcttcccacccatcaagaccgatgtgattacaatggaccccaaggacaactgctccaaggacgccaacgataccctgctgctccagctgaccaacaccagcgcctactacatgtacttgttgctgctgctgaagtccgtggtgtacttcgccatcatcacatgctgcctgctgcggagaaccgccttctgctgcaacggcgagaagtctaaacggggcagaaagaaactcctgtatatattcaaacaaccatttatgagaccagtacaaactactcaagaggaagatggctgtagctgccgatttccagaagaagaagaaggaggatgtgaactgagagtgaagttcagcagaagcgccgacgcccctgcctaccagcagggacagaaccaactgtacaacgagctgaacctgggcagacgggaagagtacgacgtgctggacaagcggagaggcagggaccctgagatgggcggaaagccccagcggagaaagaacccccaggaaggactgtataacgaactccagaaagacaagatggccgaagcctacagcgagatcggcatgaagggcgagcggagaagaggcaagggccacgatggcctgtaccagggcctgagcaccgccaccaaggacacctatgacgccctgcacatgcaggccctgcctccaaga

SEQ ID NO: 27120 - DNA, 894 bp, synthetic construct
  source 1..894: mol_type = other DNA
ctgtgcctgctggaaaagttcttcccagatgtgattaagatccactggcaggaaaagaagtccaacaccatcctgggcagccaggaaggcaacaccatgaagaccaacgacacctacatgaagttcagctggctgaccgtgcccgagaagtccctggacaaagaacacagatgcatcgtgcggcacgaaaacaacaagaacggcgtggaccaggaaatcatcttcccacccatcaagaccgatgtgattacaatggaccccaaggacaactgctccaaggacgccaacgataccctgctgctccagctgaccaacaccagcgcctactacatgtacttgttgctgctgctgaagtccgtggtgtacttcgccatcatcacatgctgcctgctgcggagaaccgccttctgctgcaacggcgagaagtctaaacggggcagaaagaaactcctgtatatattcaaacaaccatttatgagaccagtacaaactactcaagaggaagatggctgtagctgccgatttccagaagaagaagaaggaggatgtgaactgagagtgaagttcagcagaagcgccgacgcccctgcctaccagcagggacagaaccaactgtacaacgagctgaacctgggcagacgggaagagtacgacgtgctggacaagcggagaggcagggaccctgagatgggcggaaagccccagcggagaaagaacccccaggaaggactgtataacgaactccagaaagacaagatggccgaagcctacagcgagatcggcatgaagggcgagcggagaagaggcaagggccacgatggcctgtaccagggcctgagcaccgccaccaaggacacctatgacgccctgcacatgcaggccctgcctccaaga

SEQ ID NO: 27121 - DNA, 891 bp, synthetic construct
  source 1..891: mol_type = other DNA
tgcctgctggaaaagttcttcccagatgtgattaagatccactggcaggaaaagaagtccaacaccatcctgggcagccaggaaggcaacaccatgaagaccaacgacacctacatgaagttcagctggctgaccgtgcccgagaagtccctggacaaagaacacagatgcatcgtgcggcacgaaaacaacaagaacggcgtggaccaggaaatcatcttcccacccatcaagaccgatgtgattacaatggaccccaaggacaactgctccaaggacgccaacgataccctgctgctccagctgaccaacaccagcgcctactacatgtacttgttgctgctgctgaagtccgtggtgtacttcgccatcatcacatgctgcctgctgcggagaaccgccttctgctgcaacggcgagaagtctaaacggggcagaaagaaactcctgtatatattcaaacaaccatttatgagaccagtacaaactactcaagaggaagatggctgtagctgccgatttccagaagaagaagaaggaggatgtgaactgagagtgaagttcagcagaagcgccgacgcccctgcctaccagcagggacagaaccaactgtacaacgagctgaacctgggcagacgggaagagtacgacgtgctggacaagcggagaggcagggaccctgagatgggcggaaagccccagcggagaaagaacccccaggaaggactgtataacgaactccagaaagacaagatggccgaagcctacagcgagatcggcatgaagggcgagcggagaagaggcaagggccacgatggcctgtaccagggcctgagcaccgccaccaaggacacctatgacgccctgcacatgcaggccctgcctccaaga

SEQ ID NO: 27122 - DNA, 888 bp, synthetic construct
  source 1..888: mol_type = other DNA
ctgctggaaaagttcttcccagatgtgattaagatccactggcaggaaaagaagtccaacaccatcctgggcagccaggaaggcaacaccatgaagaccaacgacacctacatgaagttcagctggctgaccgtgcccgagaagtccctggacaaagaacacagatgcatcgtgcggcacgaaaacaacaagaacggcgtggaccaggaaatcatcttcccacccatcaagaccgatgtgattacaatggaccccaaggacaactgctccaaggacgccaacgataccctgctgctccagctgaccaacaccagcgcctactacatgtacttgttgctgctgctgaagtccgtggtgtacttcgccatcatcacatgctgcctgctgcggagaaccgccttctgctgcaacggcgagaagtctaaacggggcagaaagaaactcctgtatatattcaaacaaccatttatgagaccagtacaaactactcaagaggaagatggctgtagctgccgatttccagaagaagaagaaggaggatgtgaactgagagtgaagttcagcagaagcgccgacgcccctgcctaccagcagggacagaaccaactgtacaacgagctgaacctgggcagacgggaagagtacgacgtgctggacaagcggagaggcagggaccctgagatgggcggaaagccccagcggagaaagaacccccaggaaggactgtataacgaactccagaaagacaagatggccgaagcctacagcgagatcggcatgaagggcgagcggagaagaggcaagggccacgatggcctgtaccagggcctgagcaccgccaccaaggacacctatgacgccctgcacatgcaggccctgcctccaaga

SEQ ID NO: 27123 - DNA, 885 bp, synthetic construct
  source 1..885: mol_type = other DNA
ctggaaaagttcttcccagatgtgattaagatccactggcaggaaaagaagtccaacaccatcctgggcagccaggaaggcaacaccatgaagaccaacgacacctacatgaagttcagctggctgaccgtgcccgagaagtccctggacaaagaacacagatgcatcgtgcggcacgaaaacaacaagaacggcgtggaccaggaaatcatcttcccacccatcaagaccgatgtgattacaatggaccccaaggacaactgctccaaggacgccaacgataccctgctgctccagctgaccaacaccagcgcctactacatgtacttgttgctgctgctgaagtccgtggtgtacttcgccatcatcacatgctgcctgctgcggagaaccgccttctgctgcaacggcgagaagtctaaacggggcagaaagaaactcctgtatatattcaaacaaccatttatgagaccagtacaaactactcaagaggaagatggctgtagctgccgatttccagaagaagaagaaggaggatgtgaactgagagtgaagttcagcagaagcgccgacgcccctgcctaccagcagggacagaaccaactgtacaacgagctgaacctgggcagacgggaagagtacgacgtgctggacaagcggagaggcagggaccctgagatgggcggaaagccccagcggagaaagaacccccaggaaggactgtataacgaactccagaaagacaagatggccgaagcctacagcgagatcggcatgaagggcgagcggagaagaggcaagggccacgatggcctgtaccagggcctgagcaccgccaccaaggacacctatgacgccctgcacatgcaggccctgcctccaaga

SEQ ID NO: 27124 - DNA, 882 bp, synthetic construct
  source 1..882: mol_type = other DNA
gaaaagttcttcccagatgtgattaagatccactggcaggaaaagaagtccaacaccatcctgggcagccaggaaggcaacaccatgaagaccaacgacacctacatgaagttcagctggctgaccgtgcccgagaagtccctggacaaagaacacagatgcatcgtgcggcacgaaaacaacaagaacggcgtggaccaggaaatcatcttcccacccatcaagaccgatgtgattacaatggaccccaaggacaactgctccaaggacgccaacgataccctgctgctccagctgaccaacaccagcgcctactacatgtacttgttgctgctgctgaagtccgtggtgtacttcgccatcatcacatgctgcctgctgcggagaaccgccttctgctgcaacggcgagaagtctaaacggggcagaaagaaactcctgtatatattcaaacaaccatttatgagaccagtacaaactactcaagaggaagatggctgtagctgccgatttccagaagaagaagaaggaggatgtgaactgagagtgaagttcagcagaagcgccgacgcccctgcctaccagcagggacagaaccaactgtacaacgagctgaacctgggcagacgggaagagtacgacgtgctggacaagcggagaggcagggaccctgagatgggcggaaagccccagcggagaaagaacccccaggaaggactgtataacgaactccagaaagacaagatggccgaagcctacagcgagatcggcatgaagggcgagcggagaagaggcaagggccacgatggcctgtaccagggcctgagcaccgccaccaaggacacctatgacgccctgcacatgcaggccctgcctccaaga

SEQ ID NO: 27125 - DNA, 879 bp, synthetic construct
  source 1..879: mol_type = other DNA
aagttcttcccagatgtgattaagatccactggcaggaaaagaagtccaacaccatcctgggcagccaggaaggcaacaccatgaagaccaacgacacctacatgaagttcagctggctgaccgtgcccgagaagtccctggacaaagaacacagatgcatcgtgcggcacgaaaacaacaagaacggcgtggaccaggaaatcatcttcccacccatcaagaccgatgtgattacaatggaccccaaggacaactgctccaaggacgccaacgataccctgctgctccagctgaccaacaccagcgcctactacatgtacttgttgctgctgctgaagtccgtggtgtacttcgccatcatcacatgctgcctgctgcggagaaccgccttctgctgcaacggcgagaagtctaaacggggcagaaagaaactcctgtatatattcaaacaaccatttatgagaccagtacaaactactcaagaggaagatggctgtagctgccgatttccagaagaagaagaaggaggatgtgaactgagagtgaagttcagcagaagcgccgacgcccctgcctaccagcagggacagaaccaactgtacaacgagctgaacctgggcagacgggaagagtacgacgtgctggacaagcggagaggcagggaccctgagatgggcggaaagccccagcggagaaagaacccccaggaaggactgtataacgaactccagaaagacaagatggccgaagcctacagcgagatcggcatgaagggcgagcggagaagaggcaagggccacgatggcctgtaccagggcctgagcaccgccaccaaggacacctatgacgccctgcacatgcaggccctgcctccaaga

SEQ ID NO: 27126 - DNA, 876 bp, synthetic construct
  source 1..876: mol_type = other DNA
ttcttcccagatgtgattaagatccactggcaggaaaagaagtccaacaccatcctgggcagccaggaaggcaacaccatgaagaccaacgacacctacatgaagttcagctggctgaccgtgcccgagaagtccctggacaaagaacacagatgcatcgtgcggcacgaaaacaacaagaacggcgtggaccaggaaatcatcttcccacccatcaagaccgatgtgattacaatggaccccaaggacaactgctccaaggacgccaacgataccctgctgctccagctgaccaacaccagcgcctactacatgtacttgttgctgctgctgaagtccgtggtgtacttcgccatcatcacatgctgcctgctgcggagaaccgccttctgctgcaacggcgagaagtctaaacggggcagaaagaaactcctgtatatattcaaacaaccatttatgagaccagtacaaactactcaagaggaagatggctgtagctgccgatttccagaagaagaagaaggaggatgtgaactgagagtgaagttcagcagaagcgccgacgcccctgcctaccagcagggacagaaccaactgtacaacgagctgaacctgggcagacgggaagagtacgacgtgctggacaagcggagaggcagggaccctgagatgggcggaaagccccagcggagaaagaacccccaggaaggactgtataacgaactccagaaagacaagatggccgaagcctacagcgagatcggcatgaagggcgagcggagaagaggcaagggccacgatggcctgtaccagggcctgagcaccgccaccaaggacacctatgacgccctgcacatgcaggccctgcctccaaga

SEQ ID NO: 27127 - DNA, 873 bp, synthetic construct
  source 1..873: mol_type = other DNA
ttcccagatgtgattaagatccactggcaggaaaagaagtccaacaccatcctgggcagccaggaaggcaacaccatgaagaccaacgacacctacatgaagttcagctggctgaccgtgcccgagaagtccctggacaaagaacacagatgcatcgtgcggcacgaaaacaacaagaacggcgtggaccaggaaatcatcttcccacccatcaagaccgatgtgattacaatggaccccaaggacaactgctccaaggacgccaacgataccctgctgctccagctgaccaacaccagcgcctactacatgtacttgttgctgctgctgaagtccgtggtgtacttcgccatcatcacatgctgcctgctgcggagaaccgccttctgctgcaacggcgagaagtctaaacggggcagaaagaaactcctgtatatattcaaacaaccatttatgagaccagtacaaactactcaagaggaagatggctgtagctgccgatttccagaagaagaagaaggaggatgtgaactgagagtgaagttcagcagaagcgccgacgcccctgcctaccagcagggacagaaccaactgtacaacgagctgaacctgggcagacgggaagagtacgacgtgctggacaagcggagaggcagggaccctgagatgggcggaaagccccagcggagaaagaacccccaggaaggactgtataacgaactccagaaagacaagatggccgaagcctacagcgagatcggcatgaagggcgagcggagaagaggcaagggccacgatggcctgtaccagggcctgagcaccgccaccaaggacacctatgacgccctgcacatgcaggccctgcctccaaga

SEQ ID NO: 27128 - DNA, 870 bp, synthetic construct
  source 1..870: mol_type = other DNA
ccagatgtgattaagatccactggcaggaaaagaagtccaacaccatcctgggcagccaggaaggcaacaccatgaagaccaacgacacctacatgaagttcagctggctgaccgtgcccgagaagtccctggacaaagaacacagatgcatcgtgcggcacgaaaacaacaagaacggcgtggaccaggaaatcatcttcccacccatcaagaccgatgtgattacaatggaccccaaggacaactgctccaaggacgccaacgataccctgctgctccagctgaccaacaccagcgcctactacatgtacttgttgctgctgctgaagtccgtggtgtacttcgccatcatcacatgctgcctgctgcggagaaccgccttctgctgcaacggcgagaagtctaaacggggcagaaagaaactcctgtatatattcaaacaaccatttatgagaccagtacaaactactcaagaggaagatggctgtagctgccgatttccagaagaagaagaaggaggatgtgaactgagagtgaagttcagcagaagcgccgacgcccctgcctaccagcagggacagaaccaactgtacaacgagctgaacctgggcagacgggaagagtacgacgtgctggacaagcggagaggcagggaccctgagatgggcggaaagccccagcggagaaagaacccccaggaaggactgtataacgaactccagaaagacaagatggccgaagcctacagcgagatcggcatgaagggcgagcggagaagaggcaagggccacgatggcctgtaccagggcctgagcaccgccaccaaggacacctatgacgccctgcacatgcaggccctgcctccaaga

SEQ ID NO: 27129 - DNA, 867 bp, synthetic construct
  source 1..867: mol_type = other DNA
gatgtgattaagatccactggcaggaaaagaagtccaacaccatcctgggcagccaggaaggcaacaccatgaagaccaacgacacctacatgaagttcagctggctgaccgtgcccgagaagtccctggacaaagaacacagatgcatcgtgcggcacgaaaacaacaagaacggcgtggaccaggaaatcatcttcccacccatcaagaccgatgtgattacaatggaccccaaggacaactgctccaaggacgccaacgataccctgctgctccagctgaccaacaccagcgcctactacatgtacttgttgctgctgctgaagtccgtggtgtacttcgccatcatcacatgctgcctgctgcggagaaccgccttctgctgcaacggcgagaagtctaaacggggcagaaagaaactcctgtatatattcaaacaaccatttatgagaccagtacaaactactcaagaggaagatggctgtagctgccgatttccagaagaagaagaaggaggatgtgaactgagagtgaagttcagcagaagcgccgacgcccctgcctaccagcagggacagaaccaactgtacaacgagctgaacctgggcagacgggaagagtacgacgtgctggacaagcggagaggcagggaccctgagatgggcggaaagccccagcggagaaagaacccccaggaaggactgtataacgaactccagaaagacaagatggccgaagcctacagcgagatcggcatgaagggcgagcggagaagaggcaagggccacgatggcctgtaccagggcctgagcaccgccaccaaggacacctatgacgccctgcacatgcaggccctgcctccaaga

SEQ ID NO: 27130 - DNA, 864 bp, synthetic construct
  source 1..864: mol_type = other DNA
gtgattaagatccactggcaggaaaagaagtccaacaccatcctgggcagccaggaaggcaacaccatgaagaccaacgacacctacatgaagttcagctggctgaccgtgcccgagaagtccctggacaaagaacacagatgcatcgtgcggcacgaaaacaacaagaacggcgtggaccaggaaatcatcttcccacccatcaagaccgatgtgattacaatggaccccaaggacaactgctccaaggacgccaacgataccctgctgctccagctgaccaacaccagcgcctactacatgtacttgttgctgctgctgaagtccgtggtgtacttcgccatcatcacatgctgcctgctgcggagaaccgccttctgctgcaacggcgagaagtctaaacggggcagaaagaaactcctgtatatattcaaacaaccatttatgagaccagtacaaactactcaagaggaagatggctgtagctgccgatttccagaagaagaagaaggaggatgtgaactgagagtgaagttcagcagaagcgccgacgcccctgcctaccagcagggacagaaccaactgtacaacgagctgaacctgggcagacgggaagagtacgacgtgctggacaagcggagaggcagggaccctgagatgggcggaaagccccagcggagaaagaacccccaggaaggactgtataacgaactccagaaagacaagatggccgaagcctacagcgagatcggcatgaagggcgagcggagaagaggcaagggccacgatggcctgtaccagggcctgagcaccgccaccaaggacacctatgacgccctgcacatgcaggccctgcctccaaga

SEQ ID NO: 27131 - DNA, 861 bp, synthetic construct
  source 1..861: mol_type = other DNA
attaagatccactggcaggaaaagaagtccaacaccatcctgggcagccaggaaggcaacaccatgaagaccaacgacacctacatgaagttcagctggctgaccgtgcccgagaagtccctggacaaagaacacagatgcatcgtgcggcacgaaaacaacaagaacggcgtggaccaggaaatcatcttcccacccatcaagaccgatgtgattacaatggaccccaaggacaactgctccaaggacgccaacgataccctgctgctccagctgaccaacaccagcgcctactacatgtacttgttgctgctgctgaagtccgtggtgtacttcgccatcatcacatgctgcctgctgcggagaaccgccttctgctgcaacggcgagaagtctaaacggggcagaaagaaactcctgtatatattcaaacaaccatttatgagaccagtacaaactactcaagaggaagatggctgtagctgccgatttccagaagaagaagaaggaggatgtgaactgagagtgaagttcagcagaagcgccgacgcccctgcctaccagcagggacagaaccaactgtacaacgagctgaacctgggcagacgggaagagtacgacgtgctggacaagcggagaggcagggaccctgagatgggcggaaagccccagcggagaaagaacccccaggaaggactgtataacgaactccagaaagacaagatggccgaagcctacagcgagatcggcatgaagggcgagcggagaagaggcaagggccacgatggcctgtaccagggcctgagcaccgccaccaaggacacctatgacgccctgcacatgcaggccctgcctccaaga

SEQ ID NO: 27132 - DNA, 858 bp, synthetic construct
  source 1..858: mol_type = other DNA
aagatccactggcaggaaaagaagtccaacaccatcctgggcagccaggaaggcaacaccatgaagaccaacgacacctacatgaagttcagctggctgaccgtgcccgagaagtccctggacaaagaacacagatgcatcgtgcggcacgaaaacaacaagaacggcgtggaccaggaaatcatcttcccacccatcaagaccgatgtgattacaatggaccccaaggacaactgctccaaggacgccaacgataccctgctgctccagctgaccaacaccagcgcctactacatgtacttgttgctgctgctgaagtccgtggtgtacttcgccatcatcacatgctgcctgctgcggagaaccgccttctgctgcaacggcgagaagtctaaacggggcagaaagaaactcctgtatatattcaaacaaccatttatgagaccagtacaaactactcaagaggaagatggctgtagctgccgatttccagaagaagaagaaggaggatgtgaactgagagtgaagttcagcagaagcgccgacgcccctgcctaccagcagggacagaaccaactgtacaacgagctgaacctgggcagacgggaagagtacgacgtgctggacaagcggagaggcagggaccctgagatgggcggaaagccccagcggagaaagaacccccaggaaggactgtataacgaactccagaaagacaagatggccgaagcctacagcgagatcggcatgaagggcgagcggagaagaggcaagggccacgatggcctgtaccagggcctgagcaccgccaccaaggacacctatgacgccctgcacatgcaggccctgcctccaaga

SEQ ID NO: 27133 - DNA, 855 bp, synthetic construct
  source 1..855: mol_type = other DNA
atccactggcaggaaaagaagtccaacaccatcctgggcagccaggaaggcaacaccatgaagaccaacgacacctacatgaagttcagctggctgaccgtgcccgagaagtccctggacaaagaacacagatgcatcgtgcggcacgaaaacaacaagaacggcgtggaccaggaaatcatcttcccacccatcaagaccgatgtgattacaatggaccccaaggacaactgctccaaggacgccaacgataccctgctgctccagctgaccaacaccagcgcctactacatgtacttgttgctgctgctgaagtccgtggtgtacttcgccatcatcacatgctgcctgctgcggagaaccgccttctgctgcaacggcgagaagtctaaacggggcagaaagaaactcctgtatatattcaaacaaccatttatgagaccagtacaaactactcaagaggaagatggctgtagctgccgatttccagaagaagaagaaggaggatgtgaactgagagtgaagttcagcagaagcgccgacgcccctgcctaccagcagggacagaaccaactgtacaacgagctgaacctgggcagacgggaagagtacgacgtgctggacaagcggagaggcagggaccctgagatgggcggaaagccccagcggagaaagaacccccaggaaggactgtataacgaactccagaaagacaagatggccgaagcctacagcgagatcggcatgaagggcgagcggagaagaggcaagggccacgatggcctgtaccagggcctgagcaccgccaccaaggacacctatgacgccctgcacatgcaggccctgcctccaaga

SEQ ID NO: 27134 - DNA, 852 bp, synthetic construct
  source 1..852: mol_type = other DNA
cactggcaggaaaagaagtccaacaccatcctgggcagccaggaaggcaacaccatgaagaccaacgacacctacatgaagttcagctggctgaccgtgcccgagaagtccctggacaaagaacacagatgcatcgtgcggcacgaaaacaacaagaacggcgtggaccaggaaatcatcttcccacccatcaagaccgatgtgattacaatggaccccaaggacaactgctccaaggacgccaacgataccctgctgctccagctgaccaacaccagcgcctactacatgtacttgttgctgctgctgaagtccgtggtgtacttcgccatcatcacatgctgcctgctgcggagaaccgccttctgctgcaacggcgagaagtctaaacggggcagaaagaaactcctgtatatattcaaacaaccatttatgagaccagtacaaactactcaagaggaagatggctgtagctgccgatttccagaagaagaagaaggaggatgtgaactgagagtgaagttcagcagaagcgccgacgcccctgcctaccagcagggacagaaccaactgtacaacgagctgaacctgggcagacgggaagagtacgacgtgctggacaagcggagaggcagggaccctgagatgggcggaaagccccagcggagaaagaacccccaggaaggactgtataacgaactccagaaagacaagatggccgaagcctacagcgagatcggcatgaagggcgagcggagaagaggcaagggccacgatggcctgtaccagggcctgagcaccgccaccaaggacacctatgacgccctgcacatgcaggccctgcctccaaga

SEQ ID NO: 27135 - DNA, 849 bp, synthetic construct
  source 1..849: mol_type = other DNA
tggcaggaaaagaagtccaacaccatcctgggcagccaggaaggcaacaccatgaagaccaacgacacctacatgaagttcagctggctgaccgtgcccgagaagtccctggacaaagaacacagatgcatcgtgcggcacgaaaacaacaagaacggcgtggaccaggaaatcatcttcccacccatcaagaccgatgtgattacaatggaccccaaggacaactgctccaaggacgccaacgataccctgctgctccagctgaccaacaccagcgcctactacatgtacttgttgctgctgctgaagtccgtggtgtacttcgccatcatcacatgctgcctgctgcggagaaccgccttctgctgcaacggcgagaagtctaaacggggcagaaagaaactcctgtatatattcaaacaaccatttatgagaccagtacaaactactcaagaggaagatggctgtagctgccgatttccagaagaagaagaaggaggatgtgaactgagagtgaagttcagcagaagcgccgacgcccctgcctaccagcagggacagaaccaactgtacaacgagctgaacctgggcagacgggaagagtacgacgtgctggacaagcggagaggcagggaccctgagatgggcggaaagccccagcggagaaagaacccccaggaaggactgtataacgaactccagaaagacaagatggccgaagcctacagcgagatcggcatgaagggcgagcggagaagaggcaagggccacgatggcctgtaccagggcctgagcaccgccaccaaggacacctatgacgccctgcacatgcaggccctgcctccaaga

SEQ ID NO: 27136 - DNA, 846 bp, synthetic construct
  source 1..846: mol_type = other DNA
caggaaaagaagtccaacaccatcctgggcagccaggaaggcaacaccatgaagaccaacgacacctacatgaagttcagctggctgaccgtgcccgagaagtccctggacaaagaacacagatgcatcgtgcggcacgaaaacaacaagaacggcgtggaccaggaaatcatcttcccacccatcaagaccgatgtgattacaatggaccccaaggacaactgctccaaggacgccaacgataccctgctgctccagctgaccaacaccagcgcctactacatgtacttgttgctgctgctgaagtccgtggtgtacttcgccatcatcacatgctgcctgctgcggagaaccgccttctgctgcaacggcgagaagtctaaacggggcagaaagaaactcctgtatatattcaaacaaccatttatgagaccagtacaaactactcaagaggaagatggctgtagctgccgatttccagaagaagaagaaggaggatgtgaactgagagtgaagttcagcagaagcgccgacgcccctgcctaccagcagggacagaaccaactgtacaacgagctgaacctgggcagacgggaagagtacgacgtgctggacaagcggagaggcagggaccctgagatgggcggaaagccccagcggagaaagaacccccaggaaggactgtataacgaactccagaaagacaagatggccgaagcctacagcgagatcggcatgaagggcgagcggagaagaggcaagggccacgatggcctgtaccagggcctgagcaccgccaccaaggacacctatgacgccctgcacatgcaggccctgcctccaaga

SEQ ID NO: 27137 - DNA, 843 bp, synthetic construct
  source 1..843: mol_type = other DNA
gaaaagaagtccaacaccatcctgggcagccaggaaggcaacaccatgaagaccaacgacacctacatgaagttcagctggctgaccgtgcccgagaagtccctggacaaagaacacagatgcatcgtgcggcacgaaaacaacaagaacggcgtggaccaggaaatcatcttcccacccatcaagaccgatgtgattacaatggaccccaaggacaactgctccaaggacgccaacgataccctgctgctccagctgaccaacaccagcgcctactacatgtacttgttgctgctgctgaagtccgtggtgtacttcgccatcatcacatgctgcctgctgcggagaaccgccttctgctgcaacggcgagaagtctaaacggggcagaaagaaactcctgtatatattcaaacaaccatttatgagaccagtacaaactactcaagaggaagatggctgtagctgccgatttccagaagaagaagaaggaggatgtgaactgagagtgaagttcagcagaagcgccgacgcccctgcctaccagcagggacagaaccaactgtacaacgagctgaacctgggcagacgggaagagtacgacgtgctggacaagcggagaggcagggaccctgagatgggcggaaagccccagcggagaaagaacccccaggaaggactgtataacgaactccagaaagacaagatggccgaagcctacagcgagatcggcatgaagggcgagcggagaagaggcaagggccacgatggcctgtaccagggcctgagcaccgccaccaaggacacctatgacgccctgcacatgcaggccctgcctccaaga

SEQ ID NO: 27138 - DNA, 840 bp, synthetic construct
  source 1..840: mol_type = other DNA
aagaagtccaacaccatcctgggcagccaggaaggcaacaccatgaagaccaacgacacctacatgaagttcagctggctgaccgtgcccgagaagtccctggacaaagaacacagatgcatcgtgcggcacgaaaacaacaagaacggcgtggaccaggaaatcatcttcccacccatcaagaccgatgtgattacaatggaccccaaggacaactgctccaaggacgccaacgataccctgctgctccagctgaccaacaccagcgcctactacatgtacttgttgctgctgctgaagtccgtggtgtacttcgccatcatcacatgctgcctgctgcggagaaccgccttctgctgcaacggcgagaagtctaaacggggcagaaagaaactcctgtatatattcaaacaaccatttatgagaccagtacaaactactcaagaggaagatggctgtagctgccgatttccagaagaagaagaaggaggatgtgaactgagagtgaagttcagcagaagcgccgacgcccctgcctaccagcagggacagaaccaactgtacaacgagctgaacctgggcagacgggaagagtacgacgtgctggacaagcggagaggcagggaccctgagatgggcggaaagccccagcggagaaagaacccccaggaaggactgtataacgaactccagaaagacaagatggccgaagcctacagcgagatcggcatgaagggcgagcggagaagaggcaagggccacgatggcctgtaccagggcctgagcaccgccaccaaggacacctatgacgccctgcacatgcaggccctgcctccaaga

SEQ ID NO: 27139 - DNA, 837 bp, synthetic construct
  source 1..837: mol_type = other DNA
aagtccaacaccatcctgggcagccaggaaggcaacaccatgaagaccaacgacacctacatgaagttcagctggctgaccgtgcccgagaagtccctggacaaagaacacagatgcatcgtgcggcacgaaaacaacaagaacggcgtggaccaggaaatcatcttcccacccatcaagaccgatgtgattacaatggaccccaaggacaactgctccaaggacgccaacgataccctgctgctccagctgaccaacaccagcgcctactacatgtacttgttgctgctgctgaagtccgtggtgtacttcgccatcatcacatgctgcctgctgcggagaaccgccttctgctgcaacggcgagaagtctaaacggggcagaaagaaactcctgtatatattcaaacaaccatttatgagaccagtacaaactactcaagaggaagatggctgtagctgccgatttccagaagaagaagaaggaggatgtgaactgagagtgaagttcagcagaagcgccgacgcccctgcctaccagcagggacagaaccaactgtacaacgagctgaacctgggcagacgggaagagtacgacgtgctggacaagcggagaggcagggaccctgagatgggcggaaagccccagcggagaaagaacccccaggaaggactgtataacgaactccagaaagacaagatggccgaagcctacagcgagatcggcatgaagggcgagcggagaagaggcaagggccacgatggcctgtaccagggcctgagcaccgccaccaaggacacctatgacgccctgcacatgcaggccctgcctccaaga

SEQ ID NO: 27140 - DNA, 834 bp, synthetic construct
  source 1..834: mol_type = other DNA
tccaacaccatcctgggcagccaggaaggcaacaccatgaagaccaacgacacctacatgaagttcagctggctgaccgtgcccgagaagtccctggacaaagaacacagatgcatcgtgcggcacgaaaacaacaagaacggcgtggaccaggaaatcatcttcccacccatcaagaccgatgtgattacaatggaccccaaggacaactgctccaaggacgccaacgataccctgctgctccagctgaccaacaccagcgcctactacatgtacttgttgctgctgctgaagtccgtggtgtacttcgccatcatcacatgctgcctgctgcggagaaccgccttctgctgcaacggcgagaagtctaaacggggcagaaagaaactcctgtatatattcaaacaaccatttatgagaccagtacaaactactcaagaggaagatggctgtagctgccgatttccagaagaagaagaaggaggatgtgaactgagagtgaagttcagcagaagcgccgacgcccctgcctaccagcagggacagaaccaactgtacaacgagctgaacctgggcagacgggaagagtacgacgtgctggacaagcggagaggcagggaccctgagatgggcggaaagccccagcggagaaagaacccccaggaaggactgtataacgaactccagaaagacaagatggccgaagcctacagcgagatcggcatgaagggcgagcggagaagaggcaagggccacgatggcctgtaccagggcctgagcaccgccaccaaggacacctatgacgccctgcacatgcaggccctgcctccaaga

SEQ ID NO: 27141 - DNA, 831 bp, synthetic construct
  source 1..831: mol_type = other DNA
aacaccatcctgggcagccaggaaggcaacaccatgaagaccaacgacacctacatgaagttcagctggctgaccgtgcccgagaagtccctggacaaagaacacagatgcatcgtgcggcacgaaaacaacaagaacggcgtggaccaggaaatcatcttcccacccatcaagaccgatgtgattacaatggaccccaaggacaactgctccaaggacgccaacgataccctgctgctccagctgaccaacaccagcgcctactacatgtacttgttgctgctgctgaagtccgtggtgtacttcgccatcatcacatgctgcctgctgcggagaaccgccttctgctgcaacggcgagaagtctaaacggggcagaaagaaactcctgtatatattcaaacaaccatttatgagaccagtacaaactactcaagaggaagatggctgtagctgccgatttccagaagaagaagaaggaggatgtgaactgagagtgaagttcagcagaagcgccgacgcccctgcctaccagcagggacagaaccaactgtacaacgagctgaacctgggcagacgggaagagtacgacgtgctggacaagcggagaggcagggaccctgagatgggcggaaagccccagcggagaaagaacccccaggaaggactgtataacgaactccagaaagacaagatggccgaagcctacagcgagatcggcatgaagggcgagcggagaagaggcaagggccacgatggcctgtaccagggcctgagcaccgccaccaaggacacctatgacgccctgcacatgcaggccctgcctccaaga

SEQ ID NO: 27142 - DNA, 828 bp, synthetic construct
  source 1..828: mol_type = other DNA
accatcctgggcagccaggaaggcaacaccatgaagaccaacgacacctacatgaagttcagctggctgaccgtgcccgagaagtccctggacaaagaacacagatgcatcgtgcggcacgaaaacaacaagaacggcgtggaccaggaaatcatcttcccacccatcaagaccgatgtgattacaatggaccccaaggacaactgctccaaggacgccaacgataccctgctgctccagctgaccaacaccagcgcctactacatgtacttgttgctgctgctgaagtccgtggtgtacttcgccatcatcacatgctgcctgctgcggagaaccgccttctgctgcaacggcgagaagtctaaacggggcagaaagaaactcctgtatatattcaaacaaccatttatgagaccagtacaaactactcaagaggaagatggctgtagctgccgatttccagaagaagaagaaggaggatgtgaactgagagtgaagttcagcagaagcgccgacgcccctgcctaccagcagggacagaaccaactgtacaacgagctgaacctgggcagacgggaagagtacgacgtgctggacaagcggagaggcagggaccctgagatgggcggaaagccccagcggagaaagaacccccaggaaggactgtataacgaactccagaaagacaagatggccgaagcctacagcgagatcggcatgaagggcgagcggagaagaggcaagggccacgatggcctgtaccagggcctgagcaccgccaccaaggacacctatgacgccctgcacatgcaggccctgcctccaaga

SEQ ID NO: 27143 - DNA, 825 bp, synthetic construct
  source 1..825: mol_type = other DNA
atcctgggcagccaggaaggcaacaccatgaagaccaacgacacctacatgaagttcagctggctgaccgtgcccgagaagtccctggacaaagaacacagatgcatcgtgcggcacgaaaacaacaagaacggcgtggaccaggaaatcatcttcccacccatcaagaccgatgtgattacaatggaccccaaggacaactgctccaaggacgccaacgataccctgctgctccagctgaccaacaccagcgcctactacatgtacttgttgctgctgctgaagtccgtggtgtacttcgccatcatcacatgctgcctgctgcggagaaccgccttctgctgcaacggcgagaagtctaaacggggcagaaagaaactcctgtatatattcaaacaaccatttatgagaccagtacaaactactcaagaggaagatggctgtagctgccgatttccagaagaagaagaaggaggatgtgaactgagagtgaagttcagcagaagcgccgacgcccctgcctaccagcagggacagaaccaactgtacaacgagctgaacctgggcagacgggaagagtacgacgtgctggacaagcggagaggcagggaccctgagatgggcggaaagccccagcggagaaagaacccccaggaaggactgtataacgaactccagaaagacaagatggccgaagcctacagcgagatcggcatgaagggcgagcggagaagaggcaagggccacgatggcctgtaccagggcctgagcaccgccaccaaggacacctatgacgccctgcacatgcaggccctgcctccaaga

SEQ ID NO: 27144 - DNA, 822 bp, synthetic construct
  source 1..822: mol_type = other DNA
ctgggcagccaggaaggcaacaccatgaagaccaacgacacctacatgaagttcagctggctgaccgtgcccgagaagtccctggacaaagaacacagatgcatcgtgcggcacgaaaacaacaagaacggcgtggaccaggaaatcatcttcccacccatcaagaccgatgtgattacaatggaccccaaggacaactgctccaaggacgccaacgataccctgctgctccagctgaccaacaccagcgcctactacatgtacttgttgctgctgctgaagtccgtggtgtacttcgccatcatcacatgctgcctgctgcggagaaccgccttctgctgcaacggcgagaagtctaaacggggcagaaagaaactcctgtatatattcaaacaaccatttatgagaccagtacaaactactcaagaggaagatggctgtagctgccgatttccagaagaagaagaaggaggatgtgaactgagagtgaagttcagcagaagcgccgacgcccctgcctaccagcagggacagaaccaactgtacaacgagctgaacctgggcagacgggaagagtacgacgtgctggacaagcggagaggcagggaccctgagatgggcggaaagccccagcggagaaagaacccccaggaaggactgtataacgaactccagaaagacaagatggccgaagcctacagcgagatcggcatgaagggcgagcggagaagaggcaagggccacgatggcctgtaccagggcctgagcaccgccaccaaggacacctatgacgccctgcacatgcaggccctgcctccaaga

SEQ ID NO: 27145 - DNA, 819 bp, synthetic construct
  source 1..819: mol_type = other DNA
ggcagccaggaaggcaacaccatgaagaccaacgacacctacatgaagttcagctggctgaccgtgcccgagaagtccctggacaaagaacacagatgcatcgtgcggcacgaaaacaacaagaacggcgtggaccaggaaatcatcttcccacccatcaagaccgatgtgattacaatggaccccaaggacaactgctccaaggacgccaacgataccctgctgctccagctgaccaacaccagcgcctactacatgtacttgttgctgctgctgaagtccgtggtgtacttcgccatcatcacatgctgcctgctgcggagaaccgccttctgctgcaacggcgagaagtctaaacggggcagaaagaaactcctgtatatattcaaacaaccatttatgagaccagtacaaactactcaagaggaagatggctgtagctgccgatttccagaagaagaagaaggaggatgtgaactgagagtgaagttcagcagaagcgccgacgcccctgcctaccagcagggacagaaccaactgtacaacgagctgaacctgggcagacgggaagagtacgacgtgctggacaagcggagaggcagggaccctgagatgggcggaaagccccagcggagaaagaacccccaggaaggactgtataacgaactccagaaagacaagatggccgaagcctacagcgagatcggcatgaagggcgagcggagaagaggcaagggccacgatggcctgtaccagggcctgagcaccgccaccaaggacacctatgacgccctgcacatgcaggccctgcctccaaga

SEQ ID NO: 27146 - DNA, 816 bp, synthetic construct
  source 1..816: mol_type = other DNA
agccaggaaggcaacaccatgaagaccaacgacacctacatgaagttcagctggctgaccgtgcccgagaagtccctggacaaagaacacagatgcatcgtgcggcacgaaaacaacaagaacggcgtggaccaggaaatcatcttcccacccatcaagaccgatgtgattacaatggaccccaaggacaactgctccaaggacgccaacgataccctgctgctccagctgaccaacaccagcgcctactacatgtacttgttgctgctgctgaagtccgtggtgtacttcgccatcatcacatgctgcctgctgcggagaaccgccttctgctgcaacggcgagaagtctaaacggggcagaaagaaactcctgtatatattcaaacaaccatttatgagaccagtacaaactactcaagaggaagatggctgtagctgccgatttccagaagaagaagaaggaggatgtgaactgagagtgaagttcagcagaagcgccgacgcccctgcctaccagcagggacagaaccaactgtacaacgagctgaacctgggcagacgggaagagtacgacgtgctggacaagcggagaggcagggaccctgagatgggcggaaagccccagcggagaaagaacccccaggaaggactgtataacgaactccagaaagacaagatggccgaagcctacagcgagatcggcatgaagggcgagcggagaagaggcaagggccacgatggcctgtaccagggcctgagcaccgccaccaaggacacctatgacgccctgcacatgcaggccctgcctccaaga

SEQ ID NO: 27147 - DNA, 813 bp, synthetic construct
  source 1..813: mol_type = other DNA
caggaaggcaacaccatgaagaccaacgacacctacatgaagttcagctggctgaccgtgcccgagaagtccctggacaaagaacacagatgcatcgtgcggcacgaaaacaacaagaacggcgtggaccaggaaatcatcttcccacccatcaagaccgatgtgattacaatggaccccaaggacaactgctccaaggacgccaacgataccctgctgctccagctgaccaacaccagcgcctactacatgtacttgttgctgctgctgaagtccgtggtgtacttcgccatcatcacatgctgcctgctgcggagaaccgccttctgctgcaacggcgagaagtctaaacggggcagaaagaaactcctgtatatattcaaacaaccatttatgagaccagtacaaactactcaagaggaagatggctgtagctgccgatttccagaagaagaagaaggaggatgtgaactgagagtgaagttcagcagaagcgccgacgcccctgcctaccagcagggacagaaccaactgtacaacgagctgaacctgggcagacgggaagagtacgacgtgctggacaagcggagaggcagggaccctgagatgggcggaaagccccagcggagaaagaacccccaggaaggactgtataacgaactccagaaagacaagatggccgaagcctacagcgagatcggcatgaagggcgagcggagaagaggcaagggccacgatggcctgtaccagggcctgagcaccgccaccaaggacacctatgacgccctgcacatgcaggccctgcctccaaga

SEQ ID NO: 27148 - DNA, 810 bp, synthetic construct
  source 1..810: mol_type = other DNA
gaaggcaacaccatgaagaccaacgacacctacatgaagttcagctggctgaccgtgcccgagaagtccctggacaaagaacacagatgcatcgtgcggcacgaaaacaacaagaacggcgtggaccaggaaatcatcttcccacccatcaagaccgatgtgattacaatggaccccaaggacaactgctccaaggacgccaacgataccctgctgctccagctgaccaacaccagcgcctactacatgtacttgttgctgctgctgaagtccgtggtgtacttcgccatcatcacatgctgcctgctgcggagaaccgccttctgctgcaacggcgagaagtctaaacggggcagaaagaaactcctgtatatattcaaacaaccatttatgagaccagtacaaactactcaagaggaagatggctgtagctgccgatttccagaagaagaagaaggaggatgtgaactgagagtgaagttcagcagaagcgccgacgcccctgcctaccagcagggacagaaccaactgtacaacgagctgaacctgggcagacgggaagagtacgacgtgctggacaagcggagaggcagggaccctgagatgggcggaaagccccagcggagaaagaacccccaggaaggactgtataacgaactccagaaagacaagatggccgaagcctacagcgagatcggcatgaagggcgagcggagaagaggcaagggccacgatggcctgtaccagggcctgagcaccgccaccaaggacacctatgacgccctgcacatgcaggccctgcctccaaga

SEQ ID NO: 27149 - DNA, 807 bp, synthetic construct
  source 1..807: mol_type = other DNA
ggcaacaccatgaagaccaacgacacctacatgaagttcagctggctgaccgtgcccgagaagtccctggacaaagaacacagatgcatcgtgcggcacgaaaacaacaagaacggcgtggaccaggaaatcatcttcccacccatcaagaccgatgtgattacaatggaccccaaggacaactgctccaaggacgccaacgataccctgctgctccagctgaccaacaccagcgcctactacatgtacttgttgctgctgctgaagtccgtggtgtacttcgccatcatcacatgctgcctgctgcggagaaccgccttctgctgcaacggcgagaagtctaaacggggcagaaagaaactcctgtatatattcaaacaaccatttatgagaccagtacaaactactcaagaggaagatggctgtagctgccgatttccagaagaagaagaaggaggatgtgaactgagagtgaagttcagcagaagcgccgacgcccctgcctaccagcagggacagaaccaactgtacaacgagctgaacctgggcagacgggaagagtacgacgtgctggacaagcggagaggcagggaccctgagatgggcggaaagccccagcggagaaagaacccccaggaaggactgtataacgaactccagaaagacaagatggccgaagcctacagcgagatcggcatgaagggcgagcggagaagaggcaagggccacgatggcctgtaccagggcctgagcaccgccaccaaggacacctatgacgccctgcacatgcaggccctgcctccaaga

SEQ ID NO: 27150 - DNA, 804 bp, synthetic construct
  source 1..804: mol_type = other DNA
aacaccatgaagaccaacgacacctacatgaagttcagctggctgaccgtgcccgagaagtccctggacaaagaacacagatgcatcgtgcggcacgaaaacaacaagaacggcgtggaccaggaaatcatcttcccacccatcaagaccgatgtgattacaatggaccccaaggacaactgctccaaggacgccaacgataccctgctgctccagctgaccaacaccagcgcctactacatgtacttgttgctgctgctgaagtccgtggtgtacttcgccatcatcacatgctgcctgctgcggagaaccgccttctgctgcaacggcgagaagtctaaacggggcagaaagaaactcctgtatatattcaaacaaccatttatgagaccagtacaaactactcaagaggaagatggctgtagctgccgatttccagaagaagaagaaggaggatgtgaactgagagtgaagttcagcagaagcgccgacgcccctgcctaccagcagggacagaaccaactgtacaacgagctgaacctgggcagacgggaagagtacgacgtgctggacaagcggagaggcagggaccctgagatgggcggaaagccccagcggagaaagaacccccaggaaggactgtataacgaactccagaaagacaagatggccgaagcctacagcgagatcggcatgaagggcgagcggagaagaggcaagggccacgatggcctgtaccagggcctgagcaccgccaccaaggacacctatgacgccctgcacatgcaggccctgcctccaaga

SEQ ID NO: 27151 - DNA, 801 bp, synthetic construct
  source 1..801: mol_type = other DNA
accatgaagaccaacgacacctacatgaagttcagctggctgaccgtgcccgagaagtccctggacaaagaacacagatgcatcgtgcggcacgaaaacaacaagaacggcgtggaccaggaaatcatcttcccacccatcaagaccgatgtgattacaatggaccccaaggacaactgctccaaggacgccaacgataccctgctgctccagctgaccaacaccagcgcctactacatgtacttgttgctgctgctgaagtccgtggtgtacttcgccatcatcacatgctgcctgctgcggagaaccgccttctgctgcaacggcgagaagtctaaacggggcagaaagaaactcctgtatatattcaaacaaccatttatgagaccagtacaaactactcaagaggaagatggctgtagctgccgatttccagaagaagaagaaggaggatgtgaactgagagtgaagttcagcagaagcgccgacgcccctgcctaccagcagggacagaaccaactgtacaacgagctgaacctgggcagacgggaagagtacgacgtgctggacaagcggagaggcagggaccctgagatgggcggaaagccccagcggagaaagaacccccaggaaggactgtataacgaactccagaaagacaagatggccgaagcctacagcgagatcggcatgaagggcgagcggagaagaggcaagggccacgatggcctgtaccagggcctgagcaccgccaccaaggacacctatgacgccctgcacatgcaggccctgcctccaaga

SEQ ID NO: 27152 - DNA, 798 bp, synthetic construct
  source 1..798: mol_type = other DNA
atgaagaccaacgacacctacatgaagttcagctggctgaccgtgcccgagaagtccctggacaaagaacacagatgcatcgtgcggcacgaaaacaacaagaacggcgtggaccaggaaatcatcttcccacccatcaagaccgatgtgattacaatggaccccaaggacaactgctccaaggacgccaacgataccctgctgctccagctgaccaacaccagcgcctactacatgtacttgttgctgctgctgaagtccgtggtgtacttcgccatcatcacatgctgcctgctgcggagaaccgccttctgctgcaacggcgagaagtctaaacggggcagaaagaaactcctgtatatattcaaacaaccatttatgagaccagtacaaactactcaagaggaagatggctgtagctgccgatttccagaagaagaagaaggaggatgtgaactgagagtgaagttcagcagaagcgccgacgcccctgcctaccagcagggacagaaccaactgtacaacgagctgaacctgggcagacgggaagagtacgacgtgctggacaagcggagaggcagggaccctgagatgggcggaaagccccagcggagaaagaacccccaggaaggactgtataacgaactccagaaagacaagatggccgaagcctacagcgagatcggcatgaagggcgagcggagaagaggcaagggccacgatggcctgtaccagggcctgagcaccgccaccaaggacacctatgacgccctgcacatgcaggccctgcctccaaga

SEQ ID NO: 27153 - DNA, 795 bp, synthetic construct
  source 1..795: mol_type = other DNA
aagaccaacgacacctacatgaagttcagctggctgaccgtgcccgagaagtccctggacaaagaacacagatgcatcgtgcggcacgaaaacaacaagaacggcgtggaccaggaaatcatcttcccacccatcaagaccgatgtgattacaatggaccccaaggacaactgctccaaggacgccaacgataccctgctgctccagctgaccaacaccagcgcctactacatgtacttgttgctgctgctgaagtccgtggtgtacttcgccatcatcacatgctgcctgctgcggagaaccgccttctgctgcaacggcgagaagtctaaacggggcagaaagaaactcctgtatatattcaaacaaccatttatgagaccagtacaaactactcaagaggaagatggctgtagctgccgatttccagaagaagaagaaggaggatgtgaactgagagtgaagttcagcagaagcgccgacgcccctgcctaccagcagggacagaaccaactgtacaacgagctgaacctgggcagacgggaagagtacgacgtgctggacaagcggagaggcagggaccctgagatgggcggaaagccccagcggagaaagaacccccaggaaggactgtataacgaactccagaaagacaagatggccgaagcctacagcgagatcggcatgaagggcgagcggagaagaggcaagggccacgatggcctgtaccagggcctgagcaccgccaccaaggacacctatgacgccctgcacatgcaggccctgcctccaaga

SEQ ID NO: 27154 - DNA, 792 bp, synthetic construct
  source 1..792: mol_type = other DNA
accaacgacacctacatgaagttcagctggctgaccgtgcccgagaagtccctggacaaagaacacagatgcatcgtgcggcacgaaaacaacaagaacggcgtggaccaggaaatcatcttcccacccatcaagaccgatgtgattacaatggaccccaaggacaactgctccaaggacgccaacgataccctgctgctccagctgaccaacaccagcgcctactacatgtacttgttgctgctgctgaagtccgtggtgtacttcgccatcatcacatgctgcctgctgcggagaaccgccttctgctgcaacggcgagaagtctaaacggggcagaaagaaactcctgtatatattcaaacaaccatttatgagaccagtacaaactactcaagaggaagatggctgtagctgccgatttccagaagaagaagaaggaggatgtgaactgagagtgaagttcagcagaagcgccgacgcccctgcctaccagcagggacagaaccaactgtacaacgagctgaacctgggcagacgggaagagtacgacgtgctggacaagcggagaggcagggaccctgagatgggcggaaagccccagcggagaaagaacccccaggaaggactgtataacgaactccagaaagacaagatggccgaagcctacagcgagatcggcatgaagggcgagcggagaagaggcaagggccacgatggcctgtaccagggcctgagcaccgccaccaaggacacctatgacgccctgcacatgcaggccctgcctccaaga

SEQ ID NO: 27155 - DNA, 789 bp, synthetic construct
  source 1..789: mol_type = other DNA
aacgacacctacatgaagttcagctggctgaccgtgcccgagaagtccctggacaaagaacacagatgcatcgtgcggcacgaaaacaacaagaacggcgtggaccaggaaatcatcttcccacccatcaagaccgatgtgattacaatggaccccaaggacaactgctccaaggacgccaacgataccctgctgctccagctgaccaacaccagcgcctactacatgtacttgttgctgctgctgaagtccgtggtgtacttcgccatcatcacatgctgcctgctgcggagaaccgccttctgctgcaacggcgagaagtctaaacggggcagaaagaaactcctgtatatattcaaacaaccatttatgagaccagtacaaactactcaagaggaagatggctgtagctgccgatttccagaagaagaagaaggaggatgtgaactgagagtgaagttcagcagaagcgccgacgcccctgcctaccagcagggacagaaccaactgtacaacgagctgaacctgggcagacgggaagagtacgacgtgctggacaagcggagaggcagggaccctgagatgggcggaaagccccagcggagaaagaacccccaggaaggactgtataacgaactccagaaagacaagatggccgaagcctacagcgagatcggcatgaagggcgagcggagaagaggcaagggccacgatggcctgtaccagggcctgagcaccgccaccaaggacacctatgacgccctgcacatgcaggccctgcctccaaga

SEQ ID NO: 27156 - DNA, 786 bp, synthetic construct
  source 1..786: mol_type = other DNA
gacacctacatgaagttcagctggctgaccgtgcccgagaagtccctggacaaagaacacagatgcatcgtgcggcacgaaaacaacaagaacggcgtggaccaggaaatcatcttcccacccatcaagaccgatgtgattacaatggaccccaaggacaactgctccaaggacgccaacgataccctgctgctccagctgaccaacaccagcgcctactacatgtacttgttgctgctgctgaagtccgtggtgtacttcgccatcatcacatgctgcctgctgcggagaaccgccttctgctgcaacggcgagaagtctaaacggggcagaaagaaactcctgtatatattcaaacaaccatttatgagaccagtacaaactactcaagaggaagatggctgtagctgccgatttccagaagaagaagaaggaggatgtgaactgagagtgaagttcagcagaagcgccgacgcccctgcctaccagcagggacagaaccaactgtacaacgagctgaacctgggcagacgggaagagtacgacgtgctggacaagcggagaggcagggaccctgagatgggcggaaagccccagcggagaaagaacccccaggaaggactgtataacgaactccagaaagacaagatggccgaagcctacagcgagatcggcatgaagggcgagcggagaagaggcaagggccacgatggcctgtaccagggcctgagcaccgccaccaaggacacctatgacgccctgcacatgcaggccctgcctccaaga

SEQ ID NO: 27157 - DNA, 783 bp, synthetic construct
  source 1..783: mol_type = other DNA
acctacatgaagttcagctggctgaccgtgcccgagaagtccctggacaaagaacacagatgcatcgtgcggcacgaaaacaacaagaacggcgtggaccaggaaatcatcttcccacccatcaagaccgatgtgattacaatggaccccaaggacaactgctccaaggacgccaacgataccctgctgctccagctgaccaacaccagcgcctactacatgtacttgttgctgctgctgaagtccgtggtgtacttcgccatcatcacatgctgcctgctgcggagaaccgccttctgctgcaacggcgagaagtctaaacggggcagaaagaaactcctgtatatattcaaacaaccatttatgagaccagtacaaactactcaagaggaagatggctgtagctgccgatttccagaagaagaagaaggaggatgtgaactgagagtgaagttcagcagaagcgccgacgcccctgcctaccagcagggacagaaccaactgtacaacgagctgaacctgggcagacgggaagagtacgacgtgctggacaagcggagaggcagggaccctgagatgggcggaaagccccagcggagaaagaacccccaggaaggactgtataacgaactccagaaagacaagatggccgaagcctacagcgagatcggcatgaagggcgagcggagaagaggcaagggccacgatggcctgtaccagggcctgagcaccgccaccaaggacacctatgacgccctgcacatgcaggccctgcctccaaga

SEQ ID NO: 27158 - DNA, 780 bp, synthetic construct
  source 1..780: mol_type = other DNA
tacatgaagttcagctggctgaccgtgcccgagaagtccctggacaaagaacacagatgcatcgtgcggcacgaaaacaacaagaacggcgtggaccaggaaatcatcttcccacccatcaagaccgatgtgattacaatggaccccaaggacaactgctccaaggacgccaacgataccctgctgctccagctgaccaacaccagcgcctactacatgtacttgttgctgctgctgaagtccgtggtgtacttcgccatcatcacatgctgcctgctgcggagaaccgccttctgctgcaacggcgagaagtctaaacggggcagaaagaaactcctgtatatattcaaacaaccatttatgagaccagtacaaactactcaagaggaagatggctgtagctgccgatttccagaagaagaagaaggaggatgtgaactgagagtgaagttcagcagaagcgccgacgcccctgcctaccagcagggacagaaccaactgtacaacgagctgaacctgggcagacgggaagagtacgacgtgctggacaagcggagaggcagggaccctgagatgggcggaaagccccagcggagaaagaacccccaggaaggactgtataacgaactccagaaagacaagatggccgaagcctacagcgagatcggcatgaagggcgagcggagaagaggcaagggccacgatggcctgtaccagggcctgagcaccgccaccaaggacacctatgacgccctgcacatgcaggccctgcctccaaga

SEQ ID NO: 27159 - DNA, 777 bp, synthetic construct
  source 1..777: mol_type = other DNA
atgaagttcagctggctgaccgtgcccgagaagtccctggacaaagaacacagatgcatcgtgcggcacgaaaacaacaagaacggcgtggaccaggaaatcatcttcccacccatcaagaccgatgtgattacaatggaccccaaggacaactgctccaaggacgccaacgataccctgctgctccagctgaccaacaccagcgcctactacatgtacttgttgctgctgctgaagtccgtggtgtacttcgccatcatcacatgctgcctgctgcggagaaccgccttctgctgcaacggcgagaagtctaaacggggcagaaagaaactcctgtatatattcaaacaaccatttatgagaccagtacaaactactcaagaggaagatggctgtagctgccgatttccagaagaagaagaaggaggatgtgaactgagagtgaagttcagcagaagcgccgacgcccctgcctaccagcagggacagaaccaactgtacaacgagctgaacctgggcagacgggaagagtacgacgtgctggacaagcggagaggcagggaccctgagatgggcggaaagccccagcggagaaagaacccccaggaaggactgtataacgaactccagaaagacaagatggccgaagcctacagcgagatcggcatgaagggcgagcggagaagaggcaagggccacgatggcctgtaccagggcctgagcaccgccaccaaggacacctatgacgccctgcacatgcaggccctgcctccaaga

SEQ ID NO: 27160 - DNA, 774 bp, synthetic construct
  source 1..774: mol_type = other DNA
aagttcagctggctgaccgtgcccgagaagtccctggacaaagaacacagatgcatcgtgcggcacgaaaacaacaagaacggcgtggaccaggaaatcatcttcccacccatcaagaccgatgtgattacaatggaccccaaggacaactgctccaaggacgccaacgataccctgctgctccagctgaccaacaccagcgcctactacatgtacttgttgctgctgctgaagtccgtggtgtacttcgccatcatcacatgctgcctgctgcggagaaccgccttctgctgcaacggcgagaagtctaaacggggcagaaagaaactcctgtatatattcaaacaaccatttatgagaccagtacaaactactcaagaggaagatggctgtagctgccgatttccagaagaagaagaaggaggatgtgaactgagagtgaagttcagcagaagcgccgacgcccctgcctaccagcagggacagaaccaactgtacaacgagctgaacctgggcagacgggaagagtacgacgtgctggacaagcggagaggcagggaccctgagatgggcggaaagccccagcggagaaagaacccccaggaaggactgtataacgaactccagaaagacaagatggccgaagcctacagcgagatcggcatgaagggcgagcggagaagaggcaagggccacgatggcctgtaccagggcctgagcaccgccaccaaggacacctatgacgccctgcacatgcaggccctgcctccaaga

SEQ ID NO: 27161 - DNA, 771 bp, synthetic construct
  source 1..771: mol_type = other DNA
ttcagctggctgaccgtgcccgagaagtccctggacaaagaacacagatgcatcgtgcggcacgaaaacaacaagaacggcgtggaccaggaaatcatcttcccacccatcaagaccgatgtgattacaatggaccccaaggacaactgctccaaggacgccaacgataccctgctgctccagctgaccaacaccagcgcctactacatgtacttgttgctgctgctgaagtccgtggtgtacttcgccatcatcacatgctgcctgctgcggagaaccgccttctgctgcaacggcgagaagtctaaacggggcagaaagaaactcctgtatatattcaaacaaccatttatgagaccagtacaaactactcaagaggaagatggctgtagctgccgatttccagaagaagaagaaggaggatgtgaactgagagtgaagttcagcagaagcgccgacgcccctgcctaccagcagggacagaaccaactgtacaacgagctgaacctgggcagacgggaagagtacgacgtgctggacaagcggagaggcagggaccctgagatgggcggaaagccccagcggagaaagaacccccaggaaggactgtataacgaactccagaaagacaagatggccgaagcctacagcgagatcggcatgaagggcgagcggagaagaggcaagggccacgatggcctgtaccagggcctgagcaccgccaccaaggacacctatgacgccctgcacatgcaggccctgcctccaaga

SEQ ID NO: 27162 - DNA, 768 bp, synthetic construct
  source 1..768: mol_type = other DNA
agctggctgaccgtgcccgagaagtccctggacaaagaacacagatgcatcgtgcggcacgaaaacaacaagaacggcgtggaccaggaaatcatcttcccacccatcaagaccgatgtgattacaatggaccccaaggacaactgctccaaggacgccaacgataccctgctgctccagctgaccaacaccagcgcctactacatgtacttgttgctgctgctgaagtccgtggtgtacttcgccatcatcacatgctgcctgctgcggagaaccgccttctgctgcaacggcgagaagtctaaacggggcagaaagaaactcctgtatatattcaaacaaccatttatgagaccagtacaaactactcaagaggaagatggctgtagctgccgatttccagaagaagaagaaggaggatgtgaactgagagtgaagttcagcagaagcgccgacgcccctgcctaccagcagggacagaaccaactgtacaacgagctgaacctgggcagacgggaagagtacgacgtgctggacaagcggagaggcagggaccctgagatgggcggaaagccccagcggagaaagaacccccaggaaggactgtataacgaactccagaaagacaagatggccgaagcctacagcgagatcggcatgaagggcgagcggagaagaggcaagggccacgatggcctgtaccagggcctgagcaccgccaccaaggacacctatgacgccctgcacatgcaggccctgcctccaaga

SEQ ID NO: 27163 - DNA, 765 bp, synthetic construct
  source 1..765: mol_type = other DNA
tggctgaccgtgcccgagaagtccctggacaaagaacacagatgcatcgtgcggcacgaaaacaacaagaacggcgtggaccaggaaatcatcttcccacccatcaagaccgatgtgattacaatggaccccaaggacaactgctccaaggacgccaacgataccctgctgctccagctgaccaacaccagcgcctactacatgtacttgttgctgctgctgaagtccgtggtgtacttcgccatcatcacatgctgcctgctgcggagaaccgccttctgctgcaacggcgagaagtctaaacggggcagaaagaaactcctgtatatattcaaacaaccatttatgagaccagtacaaactactcaagaggaagatggctgtagctgccgatttccagaagaagaagaaggaggatgtgaactgagagtgaagttcagcagaagcgccgacgcccctgcctaccagcagggacagaaccaactgtacaacgagctgaacctgggcagacgggaagagtacgacgtgctggacaagcggagaggcagggaccctgagatgggcggaaagccccagcggagaaagaacccccaggaaggactgtataacgaactccagaaagacaagatggccgaagcctacagcgagatcggcatgaagggcgagcggagaagaggcaagggccacgatggcctgtaccagggcctgagcaccgccaccaaggacacctatgacgccctgcacatgcaggccctgcctccaaga

SEQ ID NO: 27164 - DNA, 762 bp, synthetic construct
  source 1..762: mol_type = other DNA
ctgaccgtgcccgagaagtccctggacaaagaacacagatgcatcgtgcggcacgaaaacaacaagaacggcgtggaccaggaaatcatcttcccacccatcaagaccgatgtgattacaatggaccccaaggacaactgctccaaggacgccaacgataccctgctgctccagctgaccaacaccagcgcctactacatgtacttgttgctgctgctgaagtccgtggtgtacttcgccatcatcacatgctgcctgctgcggagaaccgccttctgctgcaacggcgagaagtctaaacggggcagaaagaaactcctgtatatattcaaacaaccatttatgagaccagtacaaactactcaagaggaagatggctgtagctgccgatttccagaagaagaagaaggaggatgtgaactgagagtgaagttcagcagaagcgccgacgcccctgcctaccagcagggacagaaccaactgtacaacgagctgaacctgggcagacgggaagagtacgacgtgctggacaagcggagaggcagggaccctgagatgggcggaaagccccagcggagaaagaacccccaggaaggactgtataacgaactccagaaagacaagatggccgaagcctacagcgagatcggcatgaagggcgagcggagaagaggcaagggccacgatggcctgtaccagggcctgagcaccgccaccaaggacacctatgacgccctgcacatgcaggccctgcctccaaga

SEQ ID NO: 27165 - DNA, 759 bp, synthetic construct
  source 1..759: mol_type = other DNA
accgtgcccgagaagtccctggacaaagaacacagatgcatcgtgcggcacgaaaacaacaagaacggcgtggaccaggaaatcatcttcccacccatcaagaccgatgtgattacaatggaccccaaggacaactgctccaaggacgccaacgataccctgctgctccagctgaccaacaccagcgcctactacatgtacttgttgctgctgctgaagtccgtggtgtacttcgccatcatcacatgctgcctgctgcggagaaccgccttctgctgcaacggcgagaagtctaaacggggcagaaagaaactcctgtatatattcaaacaaccatttatgagaccagtacaaactactcaagaggaagatggctgtagctgccgatttccagaagaagaagaaggaggatgtgaactgagagtgaagttcagcagaagcgccgacgcccctgcctaccagcagggacagaaccaactgtacaacgagctgaacctgggcagacgggaagagtacgacgtgctggacaagcggagaggcagggaccctgagatgggcggaaagccccagcggagaaagaacccccaggaaggactgtataacgaactccagaaagacaagatggccgaagcctacagcgagatcggcatgaagggcgagcggagaagaggcaagggccacgatggcctgtaccagggcctgagcaccgccaccaaggacacctatgacgccctgcacatgcaggccctgcctccaaga

SEQ ID NO: 27166 - DNA, 756 bp, synthetic construct
  source 1..756: mol_type = other DNA
gtgcccgagaagtccctggacaaagaacacagatgcatcgtgcggcacgaaaacaacaagaacggcgtggaccaggaaatcatcttcccacccatcaagaccgatgtgattacaatggaccccaaggacaactgctccaaggacgccaacgataccctgctgctccagctgaccaacaccagcgcctactacatgtacttgttgctgctgctgaagtccgtggtgtacttcgccatcatcacatgctgcctgctgcggagaaccgccttctgctgcaacggcgagaagtctaaacggggcagaaagaaactcctgtatatattcaaacaaccatttatgagaccagtacaaactactcaagaggaagatggctgtagctgccgatttccagaagaagaagaaggaggatgtgaactgagagtgaagttcagcagaagcgccgacgcccctgcctaccagcagggacagaaccaactgtacaacgagctgaacctgggcagacgggaagagtacgacgtgctggacaagcggagaggcagggaccctgagatgggcggaaagccccagcggagaaagaacccccaggaaggactgtataacgaactccagaaagacaagatggccgaagcctacagcgagatcggcatgaagggcgagcggagaagaggcaagggccacgatggcctgtaccagggcctgagcaccgccaccaaggacacctatgacgccctgcacatgcaggccctgcctccaaga

SEQ ID NO: 27167 - DNA, 753 bp, synthetic construct
  source 1..753: mol_type = other DNA
cccgagaagtccctggacaaagaacacagatgcatcgtgcggcacgaaaacaacaagaacggcgtggaccaggaaatcatcttcccacccatcaagaccgatgtgattacaatggaccccaaggacaactgctccaaggacgccaacgataccctgctgctccagctgaccaacaccagcgcctactacatgtacttgttgctgctgctgaagtccgtggtgtacttcgccatcatcacatgctgcctgctgcggagaaccgccttctgctgcaacggcgagaagtctaaacggggcagaaagaaactcctgtatatattcaaacaaccatttatgagaccagtacaaactactcaagaggaagatggctgtagctgccgatttccagaagaagaagaaggaggatgtgaactgagagtgaagttcagcagaagcgccgacgcccctgcctaccagcagggacagaaccaactgtacaacgagctgaacctgggcagacgggaagagtacgacgtgctggacaagcggagaggcagggaccctgagatgggcggaaagccccagcggagaaagaacccccaggaaggactgtataacgaactccagaaagacaagatggccgaagcctacagcgagatcggcatgaagggcgagcggagaagaggcaagggccacgatggcctgtaccagggcctgagcaccgccaccaaggacacctatgacgccctgcacatgcaggccctgcctccaaga

SEQ ID NO: 27168 - DNA, 750 bp, synthetic construct
  source 1..750: mol_type = other DNA
gagaagtccctggacaaagaacacagatgcatcgtgcggcacgaaaacaacaagaacggcgtggaccaggaaatcatcttcccacccatcaagaccgatgtgattacaatggaccccaaggacaactgctccaaggacgccaacgataccctgctgctccagctgaccaacaccagcgcctactacatgtacttgttgctgctgctgaagtccgtggtgtacttcgccatcatcacatgctgcctgctgcggagaaccgccttctgctgcaacggcgagaagtctaaacggggcagaaagaaactcctgtatatattcaaacaaccatttatgagaccagtacaaactactcaagaggaagatggctgtagctgccgatttccagaagaagaagaaggaggatgtgaactgagagtgaagttcagcagaagcgccgacgcccctgcctaccagcagggacagaaccaactgtacaacgagctgaacctgggcagacgggaagagtacgacgtgctggacaagcggagaggcagggaccctgagatgggcggaaagccccagcggagaaagaacccccaggaaggactgtataacgaactccagaaagacaagatggccgaagcctacagcgagatcggcatgaagggcgagcggagaagaggcaagggccacgatggcctgtaccagggcctgagcaccgccaccaaggacacctatgacgccctgcacatgcaggccctgcctccaaga

SEQ ID NO: 27169 - DNA, 747 bp, synthetic construct
  source 1..747: mol_type = other DNA
aagtccctggacaaagaacacagatgcatcgtgcggcacgaaaacaacaagaacggcgtggaccaggaaatcatcttcccacccatcaagaccgatgtgattacaatggaccccaaggacaactgctccaaggacgccaacgataccctgctgctccagctgaccaacaccagcgcctactacatgtacttgttgctgctgctgaagtccgtggtgtacttcgccatcatcacatgctgcctgctgcggagaaccgccttctgctgcaacggcgagaagtctaaacggggcagaaagaaactcctgtatatattcaaacaaccatttatgagaccagtacaaactactcaagaggaagatggctgtagctgccgatttccagaagaagaagaaggaggatgtgaactgagagtgaagttcagcagaagcgccgacgcccctgcctaccagcagggacagaaccaactgtacaacgagctgaacctgggcagacgggaagagtacgacgtgctggacaagcggagaggcagggaccctgagatgggcggaaagccccagcggagaaagaacccccaggaaggactgtataacgaactccagaaagacaagatggccgaagcctacagcgagatcggcatgaagggcgagcggagaagaggcaagggccacgatggcctgtaccagggcctgagcaccgccaccaaggacacctatgacgccctgcacatgcaggccctgcctccaaga

SEQ ID NO: 27170 - DNA, 744 bp, synthetic construct
  source 1..744: mol_type = other DNA
tccctggacaaagaacacagatgcatcgtgcggcacgaaaacaacaagaacggcgtggaccaggaaatcatcttcccacccatcaagaccgatgtgattacaatggaccccaaggacaactgctccaaggacgccaacgataccctgctgctccagctgaccaacaccagcgcctactacatgtacttgttgctgctgctgaagtccgtggtgtacttcgccatcatcacatgctgcctgctgcggagaaccgccttctgctgcaacggcgagaagtctaaacggggcagaaagaaactcctgtatatattcaaacaaccatttatgagaccagtacaaactactcaagaggaagatggctgtagctgccgatttccagaagaagaagaaggaggatgtgaactgagagtgaagttcagcagaagcgccgacgcccctgcctaccagcagggacagaaccaactgtacaacgagctgaacctgggcagacgggaagagtacgacgtgctggacaagcggagaggcagggaccctgagatgggcggaaagccccagcggagaaagaacccccaggaaggactgtataacgaactccagaaagacaagatggccgaagcctacagcgagatcggcatgaagggcgagcggagaagaggcaagggccacgatggcctgtaccagggcctgagcaccgccaccaaggacacctatgacgccctgcacatgcaggccctgcctccaaga

SEQ ID NO: 27171 - DNA, 741 bp, synthetic construct
  source 1..741: mol_type = other DNA
ctggacaaagaacacagatgcatcgtgcggcacgaaaacaacaagaacggcgtggaccaggaaatcatcttcccacccatcaagaccgatgtgattacaatggaccccaaggacaactgctccaaggacgccaacgataccctgctgctccagctgaccaacaccagcgcctactacatgtacttgttgctgctgctgaagtccgtggtgtacttcgccatcatcacatgctgcctgctgcggagaaccgccttctgctgcaacggcgagaagtctaaacggggcagaaagaaactcctgtatatattcaaacaaccatttatgagaccagtacaaactactcaagaggaagatggctgtagctgccgatttccagaagaagaagaaggaggatgtgaactgagagtgaagttcagcagaagcgccgacgcccctgcctaccagcagggacagaaccaactgtacaacgagctgaacctgggcagacgggaagagtacgacgtgctggacaagcggagaggcagggaccctgagatgggcggaaagccccagcggagaaagaacccccaggaaggactgtataacgaactccagaaagacaagatggccgaagcctacagcgagatcggcatgaagggcgagcggagaagaggcaagggccacgatggcctgtaccagggcctgagcaccgccaccaaggacacctatgacgccctgcacatgcaggccctgcctccaaga

SEQ ID NO: 27172 - DNA, 738 bp, synthetic construct
  source 1..738: mol_type = other DNA
gacaaagaacacagatgcatcgtgcggcacgaaaacaacaagaacggcgtggaccaggaaatcatcttcccacccatcaagaccgatgtgattacaatggaccccaaggacaactgctccaaggacgccaacgataccctgctgctccagctgaccaacaccagcgcctactacatgtacttgttgctgctgctgaagtccgtggtgtacttcgccatcatcacatgctgcctgctgcggagaaccgccttctgctgcaacggcgagaagtctaaacggggcagaaagaaactcctgtatatattcaaacaaccatttatgagaccagtacaaactactcaagaggaagatggctgtagctgccgatttccagaagaagaagaaggaggatgtgaactgagagtgaagttcagcagaagcgccgacgcccctgcctaccagcagggacagaaccaactgtacaacgagctgaacctgggcagacgggaagagtacgacgtgctggacaagcggagaggcagggaccctgagatgggcggaaagccccagcggagaaagaacccccaggaaggactgtataacgaactccagaaagacaagatggccgaagcctacagcgagatcggcatgaagggcgagcggagaagaggcaagggccacgatggcctgtaccagggcctgagcaccgccaccaaggacacctatgacgccctgcacatgcaggccctgcctccaaga

SEQ ID NO: 27173 - DNA, 735 bp, synthetic construct
  source 1..735: mol_type = other DNA
aaagaacacagatgcatcgtgcggcacgaaaacaacaagaacggcgtggaccaggaaatcatcttcccacccatcaagaccgatgtgattacaatggaccccaaggacaactgctccaaggacgccaacgataccctgctgctccagctgaccaacaccagcgcctactacatgtacttgttgctgctgctgaagtccgtggtgtacttcgccatcatcacatgctgcctgctgcggagaaccgccttctgctgcaacggcgagaagtctaaacggggcagaaagaaactcctgtatatattcaaacaaccatttatgagaccagtacaaactactcaagaggaagatggctgtagctgccgatttccagaagaagaagaaggaggatgtgaactgagagtgaagttcagcagaagcgccgacgcccctgcctaccagcagggacagaaccaactgtacaacgagctgaacctgggcagacgggaagagtacgacgtgctggacaagcggagaggcagggaccctgagatgggcggaaagccccagcggagaaagaacccccaggaaggactgtataacgaactccagaaagacaagatggccgaagcctacagcgagatcggcatgaagggcgagcggagaagaggcaagggccacgatggcctgtaccagggcctgagcaccgccaccaaggacacctatgacgccctgcacatgcaggccctgcctccaaga

SEQ ID NO: 27174 - DNA, 732 bp, synthetic construct
  source 1..732: mol_type = other DNA
gaacacagatgcatcgtgcggcacgaaaacaacaagaacggcgtggaccaggaaatcatcttcccacccatcaagaccgatgtgattacaatggaccccaaggacaactgctccaaggacgccaacgataccctgctgctccagctgaccaacaccagcgcctactacatgtacttgttgctgctgctgaagtccgtggtgtacttcgccatcatcacatgctgcctgctgcggagaaccgccttctgctgcaacggcgagaagtctaaacggggcagaaagaaactcctgtatatattcaaacaaccatttatgagaccagtacaaactactcaagaggaagatggctgtagctgccgatttccagaagaagaagaaggaggatgtgaactgagagtgaagttcagcagaagcgccgacgcccctgcctaccagcagggacagaaccaactgtacaacgagctgaacctgggcagacgggaagagtacgacgtgctggacaagcggagaggcagggaccctgagatgggcggaaagccccagcggagaaagaacccccaggaaggactgtataacgaactccagaaagacaagatggccgaagcctacagcgagatcggcatgaagggcgagcggagaagaggcaagggccacgatggcctgtaccagggcctgagcaccgccaccaaggacacctatgacgccctgcacatgcaggccctgcctccaaga

SEQ ID NO: 27175 - DNA, 729 bp, synthetic construct
  source 1..729: mol_type = other DNA
cacagatgcatcgtgcggcacgaaaacaacaagaacggcgtggaccaggaaatcatcttcccacccatcaagaccgatgtgattacaatggaccccaaggacaactgctccaaggacgccaacgataccctgctgctccagctgaccaacaccagcgcctactacatgtacttgttgctgctgctgaagtccgtggtgtacttcgccatcatcacatgctgcctgctgcggagaaccgccttctgctgcaacggcgagaagtctaaacggggcagaaagaaactcctgtatatattcaaacaaccatttatgagaccagtacaaactactcaagaggaagatggctgtagctgccgatttccagaagaagaagaaggaggatgtgaactgagagtgaagttcagcagaagcgccgacgcccctgcctaccagcagggacagaaccaactgtacaacgagctgaacctgggcagacgggaagagtacgacgtgctggacaagcggagaggcagggaccctgagatgggcggaaagccccagcggagaaagaacccccaggaaggactgtataacgaactccagaaagacaagatggccgaagcctacagcgagatcggcatgaagggcgagcggagaagaggcaagggccacgatggcctgtaccagggcctgagcaccgccaccaaggacacctatgacgccctgcacatgcaggccctgcctccaaga

SEQ ID NO: 27176 - DNA, 726 bp, synthetic construct
  source 1..726: mol_type = other DNA
agatgcatcgtgcggcacgaaaacaacaagaacggcgtggaccaggaaatcatcttcccacccatcaagaccgatgtgattacaatggaccccaaggacaactgctccaaggacgccaacgataccctgctgctccagctgaccaacaccagcgcctactacatgtacttgttgctgctgctgaagtccgtggtgtacttcgccatcatcacatgctgcctgctgcggagaaccgccttctgctgcaacggcgagaagtctaaacggggcagaaagaaactcctgtatatattcaaacaaccatttatgagaccagtacaaactactcaagaggaagatggctgtagctgccgatttccagaagaagaagaaggaggatgtgaactgagagtgaagttcagcagaagcgccgacgcccctgcctaccagcagggacagaaccaactgtacaacgagctgaacctgggcagacgggaagagtacgacgtgctggacaagcggagaggcagggaccctgagatgggcggaaagccccagcggagaaagaacccccaggaaggactgtataacgaactccagaaagacaagatggccgaagcctacagcgagatcggcatgaagggcgagcggagaagaggcaagggccacgatggcctgtaccagggcctgagcaccgccaccaaggacacctatgacgccctgcacatgcaggccctgcctccaaga

SEQ ID NO: 27177 - DNA, 723 bp, synthetic construct
  source 1..723: mol_type = other DNA
tgcatcgtgcggcacgaaaacaacaagaacggcgtggaccaggaaatcatcttcccacccatcaagaccgatgtgattacaatggaccccaaggacaactgctccaaggacgccaacgataccctgctgctccagctgaccaacaccagcgcctactacatgtacttgttgctgctgctgaagtccgtggtgtacttcgccatcatcacatgctgcctgctgcggagaaccgccttctgctgcaacggcgagaagtctaaacggggcagaaagaaactcctgtatatattcaaacaaccatttatgagaccagtacaaactactcaagaggaagatggctgtagctgccgatttccagaagaagaagaaggaggatgtgaactgagagtgaagttcagcagaagcgccgacgcccctgcctaccagcagggacagaaccaactgtacaacgagctgaacctgggcagacgggaagagtacgacgtgctggacaagcggagaggcagggaccctgagatgggcggaaagccccagcggagaaagaacccccaggaaggactgtataacgaactccagaaagacaagatggccgaagcctacagcgagatcggcatgaagggcgagcggagaagaggcaagggccacgatggcctgtaccagggcctgagcaccgccaccaaggacacctatgacgccctgcacatgcaggccctgcctccaaga

SEQ ID NO: 27178 - DNA, 720 bp, synthetic construct
  source 1..720: mol_type = other DNA
atcgtgcggcacgaaaacaacaagaacggcgtggaccaggaaatcatcttcccacccatcaagaccgatgtgattacaatggaccccaaggacaactgctccaaggacgccaacgataccctgctgctccagctgaccaacaccagcgcctactacatgtacttgttgctgctgctgaagtccgtggtgtacttcgccatcatcacatgctgcctgctgcggagaaccgccttctgctgcaacggcgagaagtctaaacggggcagaaagaaactcctgtatatattcaaacaaccatttatgagaccagtacaaactactcaagaggaagatggctgtagctgccgatttccagaagaagaagaaggaggatgtgaactgagagtgaagttcagcagaagcgccgacgcccctgcctaccagcagggacagaaccaactgtacaacgagctgaacctgggcagacgggaagagtacgacgtgctggacaagcggagaggcagggaccctgagatgggcggaaagccccagcggagaaagaacccccaggaaggactgtataacgaactccagaaagacaagatggccgaagcctacagcgagatcggcatgaagggcgagcggagaagaggcaagggccacgatggcctgtaccagggcctgagcaccgccaccaaggacacctatgacgccctgcacatgcaggccctgcctccaaga

SEQ ID NO: 27179 - DNA, 717 bp, synthetic construct
  source 1..717: mol_type = other DNA
gtgcggcacgaaaacaacaagaacggcgtggaccaggaaatcatcttcccacccatcaagaccgatgtgattacaatggaccccaaggacaactgctccaaggacgccaacgataccctgctgctccagctgaccaacaccagcgcctactacatgtacttgttgctgctgctgaagtccgtggtgtacttcgccatcatcacatgctgcctgctgcggagaaccgccttctgctgcaacggcgagaagtctaaacggggcagaaagaaactcctgtatatattcaaacaaccatttatgagaccagtacaaactactcaagaggaagatggctgtagctgccgatttccagaagaagaagaaggaggatgtgaactgagagtgaagttcagcagaagcgccgacgcccctgcctaccagcagggacagaaccaactgtacaacgagctgaacctgggcagacgggaagagtacgacgtgctggacaagcggagaggcagggaccctgagatgggcggaaagccccagcggagaaagaacccccaggaaggactgtataacgaactccagaaagacaagatggccgaagcctacagcgagatcggcatgaagggcgagcggagaagaggcaagggccacgatggcctgtaccagggcctgagcaccgccaccaaggacacctatgacgccctgcacatgcaggccctgcctccaaga

SEQ ID NO: 27180 - DNA, 714 bp, synthetic construct
  source 1..714: mol_type = other DNA
cggcacgaaaacaacaagaacggcgtggaccaggaaatcatcttcccacccatcaagaccgatgtgattacaatggaccccaaggacaactgctccaaggacgccaacgataccctgctgctccagctgaccaacaccagcgcctactacatgtacttgttgctgctgctgaagtccgtggtgtacttcgccatcatcacatgctgcctgctgcggagaaccgccttctgctgcaacggcgagaagtctaaacggggcagaaagaaactcctgtatatattcaaacaaccatttatgagaccagtacaaactactcaagaggaagatggctgtagctgccgatttccagaagaagaagaaggaggatgtgaactgagagtgaagttcagcagaagcgccgacgcccctgcctaccagcagggacagaaccaactgtacaacgagctgaacctgggcagacgggaagagtacgacgtgctggacaagcggagaggcagggaccctgagatgggcggaaagccccagcggagaaagaacccccaggaaggactgtataacgaactccagaaagacaagatggccgaagcctacagcgagatcggcatgaagggcgagcggagaagaggcaagggccacgatggcctgtaccagggcctgagcaccgccaccaaggacacctatgacgccctgcacatgcaggccctgcctccaaga

SEQ ID NO: 27181 - DNA, 711 bp, synthetic construct
  source 1..711: mol_type = other DNA
cacgaaaacaacaagaacggcgtggaccaggaaatcatcttcccacccatcaagaccgatgtgattacaatggaccccaaggacaactgctccaaggacgccaacgataccctgctgctccagctgaccaacaccagcgcctactacatgtacttgttgctgctgctgaagtccgtggtgtacttcgccatcatcacatgctgcctgctgcggagaaccgccttctgctgcaacggcgagaagtctaaacggggcagaaagaaactcctgtatatattcaaacaaccatttatgagaccagtacaaactactcaagaggaagatggctgtagctgccgatttccagaagaagaagaaggaggatgtgaactgagagtgaagttcagcagaagcgccgacgcccctgcctaccagcagggacagaaccaactgtacaacgagctgaacctgggcagacgggaagagtacgacgtgctggacaagcggagaggcagggaccctgagatgggcggaaagccccagcggagaaagaacccccaggaaggactgtataacgaactccagaaagacaagatggccgaagcctacagcgagatcggcatgaagggcgagcggagaagaggcaagggccacgatggcctgtaccagggcctgagcaccgccaccaaggacacctatgacgccctgcacatgcaggccctgcctccaaga

SEQ ID NO: 27182 - DNA, 708 bp, synthetic construct
  source 1..708: mol_type = other DNA
gaaaacaacaagaacggcgtggaccaggaaatcatcttcccacccatcaagaccgatgtgattacaatggaccccaaggacaactgctccaaggacgccaacgataccctgctgctccagctgaccaacaccagcgcctactacatgtacttgttgctgctgctgaagtccgtggtgtacttcgccatcatcacatgctgcctgctgcggagaaccgccttctgctgcaacggcgagaagtctaaacggggcagaaagaaactcctgtatatattcaaacaaccatttatgagaccagtacaaactactcaagaggaagatggctgtagctgccgatttccagaagaagaagaaggaggatgtgaactgagagtgaagttcagcagaagcgccgacgcccctgcctaccagcagggacagaaccaactgtacaacgagctgaacctgggcagacgggaagagtacgacgtgctggacaagcggagaggcagggaccctgagatgggcggaaagccccagcggagaaagaacccccaggaaggactgtataacgaactccagaaagacaagatggccgaagcctacagcgagatcggcatgaagggcgagcggagaagaggcaagggccacgatggcctgtaccagggcctgagcaccgccaccaaggacacctatgacgccctgcacatgcaggccctgcctccaaga

SEQ ID NO: 27183 - DNA, 705 bp, synthetic construct
  source 1..705: mol_type = other DNA
aacaacaagaacggcgtggaccaggaaatcatcttcccacccatcaagaccgatgtgattacaatggaccccaaggacaactgctccaaggacgccaacgataccctgctgctccagctgaccaacaccagcgcctactacatgtacttgttgctgctgctgaagtccgtggtgtacttcgccatcatcacatgctgcctgctgcggagaaccgccttctgctgcaacggcgagaagtctaaacggggcagaaagaaactcctgtatatattcaaacaaccatttatgagaccagtacaaactactcaagaggaagatggctgtagctgccgatttccagaagaagaagaaggaggatgtgaactgagagtgaagttcagcagaagcgccgacgcccctgcctaccagcagggacagaaccaactgtacaacgagctgaacctgggcagacgggaagagtacgacgtgctggacaagcggagaggcagggaccctgagatgggcggaaagccccagcggagaaagaacccccaggaaggactgtataacgaactccagaaagacaagatggccgaagcctacagcgagatcggcatgaagggcgagcggagaagaggcaagggccacgatggcctgtaccagggcctgagcaccgccaccaaggacacctatgacgccctgcacatgcaggccctgcctccaaga

SEQ ID NO: 27184 - DNA, 702 bp, synthetic construct
  source 1..702: mol_type = other DNA
aacaagaacggcgtggaccaggaaatcatcttcccacccatcaagaccgatgtgattacaatggaccccaaggacaactgctccaaggacgccaacgataccctgctgctccagctgaccaacaccagcgcctactacatgtacttgttgctgctgctgaagtccgtggtgtacttcgccatcatcacatgctgcctgctgcggagaaccgccttctgctgcaacggcgagaagtctaaacggggcagaaagaaactcctgtatatattcaaacaaccatttatgagaccagtacaaactactcaagaggaagatggctgtagctgccgatttccagaagaagaagaaggaggatgtgaactgagagtgaagttcagcagaagcgccgacgcccctgcctaccagcagggacagaaccaactgtacaacgagctgaacctgggcagacgggaagagtacgacgtgctggacaagcggagaggcagggaccctgagatgggcggaaagccccagcggagaaagaacccccaggaaggactgtataacgaactccagaaagacaagatggccgaagcctacagcgagatcggcatgaagggcgagcggagaagaggcaagggccacgatggcctgtaccagggcctgagcaccgccaccaaggacacctatgacgccctgcacatgcaggccctgcctccaaga

SEQ ID NO: 27185 - DNA, 699 bp, synthetic construct
  source 1..699: mol_type = other DNA
aagaacggcgtggaccaggaaatcatcttcccacccatcaagaccgatgtgattacaatggaccccaaggacaactgctccaaggacgccaacgataccctgctgctccagctgaccaacaccagcgcctactacatgtacttgttgctgctgctgaagtccgtggtgtacttcgccatcatcacatgctgcctgctgcggagaaccgccttctgctgcaacggcgagaagtctaaacggggcagaaagaaactcctgtatatattcaaacaaccatttatgagaccagtacaaactactcaagaggaagatggctgtagctgccgatttccagaagaagaagaaggaggatgtgaactgagagtgaagttcagcagaagcgccgacgcccctgcctaccagcagggacagaaccaactgtacaacgagctgaacctgggcagacgggaagagtacgacgtgctggacaagcggagaggcagggaccctgagatgggcggaaagccccagcggagaaagaacccccaggaaggactgtataacgaactccagaaagacaagatggccgaagcctacagcgagatcggcatgaagggcgagcggagaagaggcaagggccacgatggcctgtaccagggcctgagcaccgccaccaaggacacctatgacgccctgcacatgcaggccctgcctccaaga

SEQ ID NO: 27186 - DNA, 696 bp, synthetic construct
  source 1..696: mol_type = other DNA
aacggcgtggaccaggaaatcatcttcccacccatcaagaccgatgtgattacaatggaccccaaggacaactgctccaaggacgccaacgataccctgctgctccagctgaccaacaccagcgcctactacatgtacttgttgctgctgctgaagtccgtggtgtacttcgccatcatcacatgctgcctgctgcggagaaccgccttctgctgcaacggcgagaagtctaaacggggcagaaagaaactcctgtatatattcaaacaaccatttatgagaccagtacaaactactcaagaggaagatggctgtagctgccgatttccagaagaagaagaaggaggatgtgaactgagagtgaagttcagcagaagcgccgacgcccctgcctaccagcagggacagaaccaactgtacaacgagctgaacctgggcagacgggaagagtacgacgtgctggacaagcggagaggcagggaccctgagatgggcggaaagccccagcggagaaagaacccccaggaaggactgtataacgaactccagaaagacaagatggccgaagcctacagcgagatcggcatgaagggcgagcggagaagaggcaagggccacgatggcctgtaccagggcctgagcaccgccaccaaggacacctatgacgccctgcacatgcaggccctgcctccaaga

SEQ ID NO: 27187 - DNA, 693 bp, synthetic construct
  source 1..693: mol_type = other DNA
ggcgtggaccaggaaatcatcttcccacccatcaagaccgatgtgattacaatggaccccaaggacaactgctccaaggacgccaacgataccctgctgctccagctgaccaacaccagcgcctactacatgtacttgttgctgctgctgaagtccgtggtgtacttcgccatcatcacatgctgcctgctgcggagaaccgccttctgctgcaacggcgagaagtctaaacggggcagaaagaaactcctgtatatattcaaacaaccatttatgagaccagtacaaactactcaagaggaagatggctgtagctgccgatttccagaagaagaagaaggaggatgtgaactgagagtgaagttcagcagaagcgccgacgcccctgcctaccagcagggacagaaccaactgtacaacgagctgaacctgggcagacgggaagagtacgacgtgctggacaagcggagaggcagggaccctgagatgggcggaaagccccagcggagaaagaacccccaggaaggactgtataacgaactccagaaagacaagatggccgaagcctacagcgagatcggcatgaagggcgagcggagaagaggcaagggccacgatggcctgtaccagggcctgagcaccgccaccaaggacacctatgacgccctgcacatgcaggccctgcctccaaga

SEQ ID NO: 27188 - DNA, 690 bp, synthetic construct
  source 1..690: mol_type = other DNA
gtggaccaggaaatcatcttcccacccatcaagaccgatgtgattacaatggaccccaaggacaactgctccaaggacgccaacgataccctgctgctccagctgaccaacaccagcgcctactacatgtacttgttgctgctgctgaagtccgtggtgtacttcgccatcatcacatgctgcctgctgcggagaaccgccttctgctgcaacggcgagaagtctaaacggggcagaaagaaactcctgtatatattcaaacaaccatttatgagaccagtacaaactactcaagaggaagatggctgtagctgccgatttccagaagaagaagaaggaggatgtgaactgagagtgaagttcagcagaagcgccgacgcccctgcctaccagcagggacagaaccaactgtacaacgagctgaacctgggcagacgggaagagtacgacgtgctggacaagcggagaggcagggaccctgagatgggcggaaagccccagcggagaaagaacccccaggaaggactgtataacgaactccagaaagacaagatggccgaagcctacagcgagatcggcatgaagggcgagcggagaagaggcaagggccacgatggcctgtaccagggcctgagcaccgccaccaaggacacctatgacgccctgcacatgcaggccctgcctccaaga

SEQ ID NO: 27189 - DNA, 687 bp, synthetic construct
  source 1..687: mol_type = other DNA
gaccaggaaatcatcttcccacccatcaagaccgatgtgattacaatggaccccaaggacaactgctccaaggacgccaacgataccctgctgctccagctgaccaacaccagcgcctactacatgtacttgttgctgctgctgaagtccgtggtgtacttcgccatcatcacatgctgcctgctgcggagaaccgccttctgctgcaacggcgagaagtctaaacggggcagaaagaaactcctgtatatattcaaacaaccatttatgagaccagtacaaactactcaagaggaagatggctgtagctgccgatttccagaagaagaagaaggaggatgtgaactgagagtgaagttcagcagaagcgccgacgcccctgcctaccagcagggacagaaccaactgtacaacgagctgaacctgggcagacgggaagagtacgacgtgctggacaagcggagaggcagggaccctgagatgggcggaaagccccagcggagaaagaacccccaggaaggactgtataacgaactccagaaagacaagatggccgaagcctacagcgagatcggcatgaagggcgagcggagaagaggcaagggccacgatggcctgtaccagggcctgagcaccgccaccaaggacacctatgacgccctgcacatgcaggccctgcctccaaga

SEQ ID NO: 27190 - DNA, 684 bp, synthetic construct
  source 1..684: mol_type = other DNA
caggaaatcatcttcccacccatcaagaccgatgtgattacaatggaccccaaggacaactgctccaaggacgccaacgataccctgctgctccagctgaccaacaccagcgcctactacatgtacttgttgctgctgctgaagtccgtggtgtacttcgccatcatcacatgctgcctgctgcggagaaccgccttctgctgcaacggcgagaagtctaaacggggcagaaagaaactcctgtatatattcaaacaaccatttatgagaccagtacaaactactcaagaggaagatggctgtagctgccgatttccagaagaagaagaaggaggatgtgaactgagagtgaagttcagcagaagcgccgacgcccctgcctaccagcagggacagaaccaactgtacaacgagctgaacctgggcagacgggaagagtacgacgtgctggacaagcggagaggcagggaccctgagatgggcggaaagccccagcggagaaagaacccccaggaaggactgtataacgaactccagaaagacaagatggccgaagcctacagcgagatcggcatgaagggcgagcggagaagaggcaagggccacgatggcctgtaccagggcctgagcaccgccaccaaggacacctatgacgccctgcacatgcaggccctgcctccaaga

SEQ ID NO: 27191 - DNA, 924 bp, synthetic construct; identical to SEQ ID NO: 26623
  source 1..924: mol_type = other DNA

SEQ ID NO: 27192 - DNA, 921 bp, synthetic construct
  source 1..921: mol_type = other DNA
cagcctcacaccaagcccagcgtgttcgtgatgaagaacggcaccaacgtggcctgcctcgtgaaagagttctaccccaaggacatcaggatcaacctggtgtccagcaagaagatcaccgagttcgaccccgccatcgtgatctcccccagcggcaagtacaacgccgtgaagctggggaagtacgaggacagcaacagcgtgacctgctccgtgcagcacgacaacaagaccgtgcacagcaccgactttgaagtgaaaaccgactccaccgaccacgtgaagcccaaagagacagagaacaccaagcagcccagcaagagctgccacaagcccaaggccatcgtgcacaccgagaaagtgaacatgatgagcctgaccgtgctgggcctgcggatgctgttcgccaaaaccgtggccgtgaacttcctgctgaccgccaagctgttcttcctcaaacggggcagaaagaaactcctgtatatattcaaacaaccatttatgagaccagtacaaactactcaagaggaagatggctgtagctgccgatttccagaagaagaagaaggaggatgtgaactgagagtgaagttcagcagaagcgccgacgcccctgcctaccagcagggacagaaccaactgtacaacgagctgaacctgggcagacgggaagagtacgacgtgctggacaagcggagaggcagggaccctgagatgggcggaaagccccagcggagaaagaacccccaggaaggactgtataacgaactccagaaagacaagatggccgaagcctacagcgagatcggcatgaagggcgagcggagaagaggcaagggccacgatggcctgtaccagggcctgagcaccgccaccaaggacacctatgacgccctgcacatgcaggccctgcctccaaga

SEQ ID NO: 27193 - DNA, 918 bp, synthetic construct
  source 1..918: mol_type = other DNA
cctcacaccaagcccagcgtgttcgtgatgaagaacggcaccaacgtggcctgcctcgtgaaagagttctaccccaaggacatcaggatcaacctggtgtccagcaagaagatcaccgagttcgaccccgccatcgtgatctcccccagcggcaagtacaacgccgtgaagctggggaagtacgaggacagcaacagcgtgacctgctccgtgcagcacgacaacaagaccgtgcacagcaccgactttgaagtgaaaaccgactccaccgaccacgtgaagcccaaagagacagagaacaccaagcagcccagcaagagctgccacaagcccaaggccatcgtgcacaccgagaaagtgaacatgatgagcctgaccgtgctgggcctgcggatgctgttcgccaaaaccgtggccgtgaacttcctgctgaccgccaagctgttcttcctcaaacggggcagaaagaaactcctgtatatattcaaacaaccatttatgagaccagtacaaactactcaagaggaagatggctgtagctgccgatttccagaagaagaagaaggaggatgtgaactgagagtgaagttcagcagaagcgccgacgcccctgcctaccagcagggacagaaccaactgtacaacgagctgaacctgggcagacgggaagagtacgacgtgctggacaagcggagaggcagggaccctgagatgggcggaaagccccagcggagaaagaacccccaggaaggactgtataacgaactccagaaagacaagatggccgaagcctacagcgagatcggcatgaagggcgagcggagaagaggcaagggccacgatggcctgtaccagggcctgagcaccgccaccaaggacacctatgacgccctgcacatgcaggccctgcctccaaga

SEQ ID NO: 27194 - DNA, 915 bp, synthetic construct
  source 1..915: mol_type = other DNA
cacaccaagcccagcgtgttcgtgatgaagaacggcaccaacgtggcctgcctcgtgaaagagttctaccccaaggacatcaggatcaacctggtgtccagcaagaagatcaccgagttcgaccccgccatcgtgatctcccccagcggcaagtacaacgccgtgaagctggggaagtacgaggacagcaacagcgtgacctgctccgtgcagcacgacaacaagaccgtgcacagcaccgactttgaagtgaaaaccgactccaccgaccacgtgaagcccaaagagacagagaacaccaagcagcccagcaagagctgccacaagcccaaggccatcgtgcacaccgagaaagtgaacatgatgagcctgaccgtgctgggcctgcggatgctgttcgccaaaaccgtggccgtgaacttcctgctgaccgccaagctgttcttcctcaaacggggcagaaagaaactcctgtatatattcaaacaaccatttatgagaccagtacaaactactcaagaggaagatggctgtagctgccgatttccagaagaagaagaaggaggatgtgaactgagagtgaagttcagcagaagcgccgacgcccctgcctaccagcagggacagaaccaactgtacaacgagctgaacctgggcagacgggaagagtacgacgtgctggacaagcggagaggcagggaccctgagatgggcggaaagccccagcggagaaagaacccccaggaaggactgtataacgaactccagaaagacaagatggccgaagcctacagcgagatcggcatgaagggcgagcggagaagaggcaagggccacgatggcctgtaccagggcctgagcaccgccaccaaggacacctatgacgccctgcacatgcaggccctgcctccaaga

SEQ ID NO: 27195 - DNA, 912 bp, synthetic construct
  source 1..912: mol_type = other DNA
accaagcccagcgtgttcgtgatgaagaacggcaccaacgtggcctgcctcgtgaaagagttctaccccaaggacatcaggatcaacctggtgtccagcaagaagatcaccgagttcgaccccgccatcgtgatctcccccagcggcaagtacaacgccgtgaagctggggaagtacgaggacagcaacagcgtgacctgctccgtgcagcacgacaacaagaccgtgcacagcaccgactttgaagtgaaaaccgactccaccgaccacgtgaagcccaaagagacagagaacaccaagcagcccagcaagagctgccacaagcccaaggccatcgtgcacaccgagaaagtgaacatgatgagcctgaccgtgctgggcctgcggatgctgttcgccaaaaccgtggccgtgaacttcctgctgaccgccaagctgttcttcctcaaacggggcagaaagaaactcctgtatatattcaaacaaccatttatgagaccagtacaaactactcaagaggaagatggctgtagctgccgatttccagaagaagaagaaggaggatgtgaactgagagtgaagttcagcagaagcgccgacgcccctgcctaccagcagggacagaaccaactgtacaacgagctgaacctgggcagacgggaagagtacgacgtgctggacaagcggagaggcagggaccctgagatgggcggaaagccccagcggagaaagaacccccaggaaggactgtataacgaactccagaaagacaagatggccgaagcctacagcgagatcggcatgaagggcgagcggagaagaggcaagggccacgatggcctgtaccagggcctgagcaccgccaccaaggacacctatgacgccctgcacatgcaggccctgcctccaaga

SEQ ID NO: 27196 - DNA, 909 bp, synthetic construct
  source 1..909: mol_type = other DNA
aagcccagcgtgttcgtgatgaagaacggcaccaacgtggcctgcctcgtgaaagagttctaccccaaggacatcaggatcaacctggtgtccagcaagaagatcaccgagttcgaccccgccatcgtgatctcccccagcggcaagtacaacgccgtgaagctggggaagtacgaggacagcaacagcgtgacctgctccgtgcagcacgacaacaagaccgtgcacagcaccgactttgaagtgaaaaccgactccaccgaccacgtgaagcccaaagagacagagaacaccaagcagcccagcaagagctgccacaagcccaaggccatcgtgcacaccgagaaagtgaacatgatgagcctgaccgtgctgggcctgcggatgctgttcgccaaaaccgtggccgtgaacttcctgctgaccgccaagctgttcttcctcaaacggggcagaaagaaactcctgtatatattcaaacaaccatttatgagaccagtacaaactactcaagaggaagatggctgtagctgccgatttccagaagaagaagaaggaggatgtgaactgagagtgaagttcagcagaagcgccgacgcccctgcctaccagcagggacagaaccaactgtacaacgagctgaacctgggcagacgggaagagtacgacgtgctggacaagcggagaggcagggaccctgagatgggcggaaagccccagcggagaaagaacccccaggaaggactgtataacgaactccagaaagacaagatggccgaagcctacagcgagatcggcatgaagggcgagcggagaagaggcaagggccacgatggcctgtaccagggcctgagcaccgccaccaaggacacctatgacgccctgcacatgcaggccctgcctccaaga

SEQ ID NO: 27197 - DNA, 903 bp, synthetic construct
  source 1..903: mol_type = other DNA
agcgtgttcgtgatgaagaacggcaccaacgtggcctgcctcgtgaaagagttctaccccaaggacatcaggatcaacctggtgtccagcaagaagatcaccgagttcgaccccgccatcgtgatctcccccagcggcaagtacaacgccgtgaagctggggaagtacgaggacagcaacagcgtgacctgctccgtgcagcacgacaacaagaccgtgcacagcaccgactttgaagtgaaaaccgactccaccgaccacgtgaagcccaaagagacagagaacaccaagcagcccagcaagagctgccacaagcccaaggccatcgtgcacaccgagaaagtgaacatgatgagcctgaccgtgctgggcctgcggatgctgttcgccaaaaccgtggccgtgaacttcctgctgaccgccaagctgttcttcctcaaacggggcagaaagaaactcctgtatatattcaaacaaccatttatgagaccagtacaaactactcaagaggaagatggctgtagctgccgatttccagaagaagaagaaggaggatgtgaactgagagtgaagttcagcagaagcgccgacgcccctgcctaccagcagggacagaaccaactgtacaacgagctgaacctgggcagacgggaagagtacgacgtgctggacaagcggagaggcagggaccctgagatgggcggaaagccccagcggagaaagaacccccaggaaggactgtataacgaactccagaaagacaagatggccgaagcctacagcgagatcggcatgaagggcgagcggagaagaggcaagggccacgatggcctgtaccagggcctgagcaccgccaccaaggacacctatgacgccctgcacatgcaggccctgcctccaaga

SEQ ID NO: 27198 - DNA, 900 bp, synthetic construct
  source 1..900: mol_type = other DNA
gtgttcgtgatgaagaacggcaccaacgtggcctgcctcgtgaaagagttctaccccaaggacatcaggatcaacctggtgtccagcaagaagatcaccgagttcgaccccgccatcgtgatctcccccagcggcaagtacaacgccgtgaagctggggaagtacgaggacagcaacagcgtgacctgctccgtgcagcacgacaacaagaccgtgcacagcaccgactttgaagtgaaaaccgactccaccgaccacgtgaagcccaaagagacagagaacaccaagcagcccagcaagagctgccacaagcccaaggccatcgtgcacaccgagaaagtgaacatgatgagcctgaccgtgctgggcctgcggatgctgttcgccaaaaccgtggccgtgaacttcctgctgaccgccaagctgttcttcctcaaacggggcagaaagaaactcctgtatatattcaaacaaccatttatgagaccagtacaaactactcaagaggaagatggctgtagctgccgatttccagaagaagaagaaggaggatgtgaactgagagtgaagttcagcagaagcgccgacgcccctgcctaccagcagggacagaaccaactgtacaacgagctgaacctgggcagacgggaagagtacgacgtgctggacaagcggagaggcagggaccctgagatgggcggaaagccccagcggagaaagaacccccaggaaggactgtataacgaactccagaaagacaagatggccgaagcctacagcgagatcggcatgaagggcgagcggagaagaggcaagggccacgatggcctgtaccagggcctgagcaccgccaccaaggacacctatgacgccctgcacatgcaggccctgcctccaaga

SEQ ID NO: 27199 - DNA, 897 bp, synthetic construct
  source 1..897: mol_type = other DNA
ttcgtgatgaagaacggcaccaacgtggcctgcctcgtgaaagagttctaccccaaggacatcaggatcaacctggtgtccagcaagaagatcaccgagttcgaccccgccatcgtgatctcccccagcggcaagtacaacgccgtgaagctggggaagtacgaggacagcaacagcgtgacctgctccgtgcagcacgacaacaagaccgtgcacagcaccgactttgaagtgaaaaccgactccaccgaccacgtgaagcccaaagagacagagaacaccaagcagcccagcaagagctgccacaagcccaaggccatcgtgcacaccgagaaagtgaacatgatgagcctgaccgtgctgggcctgcggatgctgttcgccaaaaccgtggccgtgaacttcctgctgaccgccaagctgttcttcctcaaacggggcagaaagaaactcctgtatatattcaaacaaccatttatgagaccagtacaaactactcaagaggaagatggctgtagctgccgatttccagaagaagaagaaggaggatgtgaactgagagtgaagttcagcagaagcgccgacgcccctgcctaccagcagggacagaaccaactgtacaacgagctgaacctgggcagacgggaagagtacgacgtgctggacaagcggagaggcagggaccctgagatgggcggaaagccccagcggagaaagaacccccaggaaggactgtataacgaactccagaaagacaagatggccgaagcctacagcgagatcggcatgaagggcgagcggagaagaggcaagggccacgatggcctgtaccagggcctgagcaccgccaccaaggacacctatgacgccctgcacatgcaggccctgcctccaaga

SEQ ID NO: 27200 - DNA, 894 bp, synthetic construct
  source 1..894: mol_type = other DNA
gtgatgaagaacggcaccaacgtggcctgcctcgtgaaagagttctaccccaaggacatcaggatcaacctggtgtccagcaagaagatcaccgagttcgaccccgccatcgtgatctcccccagcggcaagtacaacgccgtgaagctggggaagtacgaggacagcaacagcgtgacctgctccgtgcagcacgacaacaagaccgtgcacagcaccgactttgaagtgaaaaccgactccaccgaccacgtgaagcccaaagagacagagaacaccaagcagcccagcaagagctgccacaagcccaaggccatcgtgcacaccgagaaagtgaacatgatgagcctgaccgtgctgggcctgcggatgctgttcgccaaaaccgtggccgtgaacttcctgctgaccgccaagctgttcttcctcaaacggggcagaaagaaactcctgtatatattcaaacaaccatttatgagaccagtacaaactactcaagaggaagatggctgtagctgccgatttccagaagaagaagaaggaggatgtgaactgagagtgaagttcagcagaagcgccgacgcccctgcctaccagcagggacagaaccaactgtacaacgagctgaacctgggcagacgggaagagtacgacgtgctggacaagcggagaggcagggaccctgagatgggcggaaagccccagcggagaaagaacccccaggaaggactgtataacgaactccagaaagacaagatggccgaagcctacagcgagatcggcatgaagggcgagcggagaagaggcaagggccacgatggcctgtaccagggcctgagcaccgccaccaaggacacctatgacgccctgcacatgcaggccctgcctccaaga

SEQ ID NO: 27201 - DNA, 891 bp, synthetic construct
  source 1..891: mol_type = other DNA
atgaagaacggcaccaacgtggcctgcctcgtgaaagagttctaccccaaggacatcaggatcaacctggtgtccagcaagaagatcaccgagttcgaccccgccatcgtgatctcccccagcggcaagtacaacgccgtgaagctggggaagtacgaggacagcaacagcgtgacctgctccgtgcagcacgacaacaagaccgtgcacagcaccgactttgaagtgaaaaccgactccaccgaccacgtgaagcccaaagagacagagaacaccaagcagcccagcaagagctgccacaagcccaaggccatcgtgcacaccgagaaagtgaacatgatgagcctgaccgtgctgggcctgcggatgctgttcgccaaaaccgtggccgtgaacttcctgctgaccgccaagctgttcttcctcaaacggggcagaaagaaactcctgtatatattcaaacaaccatttatgagaccagtacaaactactcaagaggaagatggctgtagctgccgatttccagaagaagaagaaggaggatgtgaactgagagtgaagttcagcagaagcgccgacgcccctgcctaccagcagggacagaaccaactgtacaacgagctgaacctgggcagacgggaagagtacgacgtgctggacaagcggagaggcagggaccctgagatgggcggaaagccccagcggagaaagaacccccaggaaggactgtataacgaactccagaaagacaagatggccgaagcctacagcgagatcggcatgaagggcgagcggagaagaggcaagggccacgatggcctgtaccagggcctgagcaccgccaccaaggacacctatgacgccctgcacatgcaggccctgcctccaaga

SEQ ID NO: 27202 - DNA, 888 bp, synthetic construct
  source 1..888: mol_type = other DNA
aagaacggcaccaacgtggcctgcctcgtgaaagagttctaccccaaggacatcaggatcaacctggtgtccagcaagaagatcaccgagttcgaccccgccatcgtgatctcccccagcggcaagtacaacgccgtgaagctggggaagtacgaggacagcaacagcgtgacctgctccgtgcagcacgacaacaagaccgtgcacagcaccgactttgaagtgaaaaccgactccaccgaccacgtgaagcccaaagagacagagaacaccaagcagcccagcaagagctgccacaagcccaaggccatcgtgcacaccgagaaagtgaacatgatgagcctgaccgtgctgggcctgcggatgctgttcgccaaaaccgtggccgtgaacttcctgctgaccgccaagctgttcttcctcaaacggggcagaaagaaactcctgtatatattcaaacaaccatttatgagaccagtacaaactactcaagaggaagatggctgtagctgccgatttccagaagaagaagaaggaggatgtgaactgagagtgaagttcagcagaagcgccgacgcccctgcctaccagcagggacagaaccaactgtacaacgagctgaacctgggcagacgggaagagtacgacgtgctggacaagcggagaggcagggaccctgagatgggcggaaagccccagcggagaaagaacccccaggaaggactgtataacgaactccagaaagacaagatggccgaagcctacagcgagatcggcatgaagggcgagcggagaagaggcaagggccacgatggcctgtaccagggcctgagcaccgccaccaaggacacctatgacgccctgcacatgcaggccctgcctccaaga

SEQ ID NO: 27203 - DNA, 885 bp, synthetic construct
  source 1..885: mol_type = other DNA
aacggcaccaacgtggcctgcctcgtgaaagagttctaccccaaggacatcaggatcaacctggtgtccagcaagaagatcaccgagttcgaccccgccatcgtgatctcccccagcggcaagtacaacgccgtgaagctggggaagtacgaggacagcaacagcgtgacctgctccgtgcagcacgacaacaagaccgtgcacagcaccgactttgaagtgaaaaccgactccaccgaccacgtgaagcccaaagagacagagaacaccaagcagcccagcaagagctgccacaagcccaaggccatcgtgcacaccgagaaagtgaacatgatgagcctgaccgtgctgggcctgcggatgctgttcgccaaaaccgtggccgtgaacttcctgctgaccgccaagctgttcttcctcaaacggggcagaaagaaactcctgtatatattcaaacaaccatttatgagaccagtacaaactactcaagaggaagatggctgtagctgccgatttccagaagaagaagaaggaggatgtgaactgagagtgaagttcagcagaagcgccgacgcccctgcctaccagcagggacagaaccaactgtacaacgagctgaacctgggcagacgggaagagtacgacgtgctggacaagcggagaggcagggaccctgagatgggcggaaagccccagcggagaaagaacccccaggaaggactgtataacgaactccagaaagacaagatggccgaagcctacagcgagatcggcatgaagggcgagcggagaagaggcaagggccacgatggcctgtaccagggcctgagcaccgccaccaaggacacctatgacgccctgcacatgcaggccctgcctccaaga

SEQ ID NO: 27204 - DNA, 882 bp, synthetic construct
  source 1..882: mol_type = other DNA
ggcaccaacgtggcctgcctcgtgaaagagttctaccccaaggacatcaggatcaacctggtgtccagcaagaagatcaccgagttcgaccccgccatcgtgatctcccccagcggcaagtacaacgccgtgaagctggggaagtacgaggacagcaacagcgtgacctgctccgtgcagcacgacaacaagaccgtgcacagcaccgactttgaagtgaaaaccgactccaccgaccacgtgaagcccaaagagacagagaacaccaagcagcccagcaagagctgccacaagcccaaggccatcgtgcacaccgagaaagtgaacatgatgagcctgaccgtgctgggcctgcggatgctgttcgccaaaaccgtggccgtgaacttcctgctgaccgccaagctgttcttcctcaaacggggcagaaagaaactcctgtatatattcaaacaaccatttatgagaccagtacaaactactcaagaggaagatggctgtagctgccgatttccagaagaagaagaaggaggatgtgaactgagagtgaagttcagcagaagcgccgacgcccctgcctaccagcagggacagaaccaactgtacaacgagctgaacctgggcagacgggaagagtacgacgtgctggacaagcggagaggcagggaccctgagatgggcggaaagccccagcggagaaagaacccccaggaaggactgtataacgaactccagaaagacaagatggccgaagcctacagcgagatcggcatgaagggcgagcggagaagaggcaagggccacgatggcctgtaccagggcctgagcaccgccaccaaggacacctatgacgccctgcacatgcaggccctgcctccaaga

SEQ ID NO: 27205 - DNA, 879 bp, synthetic construct
  source 1..879: mol_type = other DNA
accaacgtggcctgcctcgtgaaagagttctaccccaaggacatcaggatcaacctggtgtccagcaagaagatcaccgagttcgaccccgccatcgtgatctcccccagcggcaagtacaacgccgtgaagctggggaagtacgaggacagcaacagcgtgacctgctccgtgcagcacgacaacaagaccgtgcacagcaccgactttgaagtgaaaaccgactccaccgaccacgtgaagcccaaagagacagagaacaccaagcagcccagcaagagctgccacaagcccaaggccatcgtgcacaccgagaaagtgaacatgatgagcctgaccgtgctgggcctgcggatgctgttcgccaaaaccgtggccgtgaacttcctgctgaccgccaagctgttcttcctcaaacggggcagaaagaaactcctgtatatattcaaacaaccatttatgagaccagtacaaactactcaagaggaagatggctgtagctgccgatttccagaagaagaagaaggaggatgtgaactgagagtgaagttcagcagaagcgccgacgcccctgcctaccagcagggacagaaccaactgtacaacgagctgaacctgggcagacgggaagagtacgacgtgctggacaagcggagaggcagggaccctgagatgggcggaaagccccagcggagaaagaacccccaggaaggactgtataacgaactccagaaagacaagatggccgaagcctacagcgagatcggcatgaagggcgagcggagaagaggcaagggccacgatggcctgtaccagggcctgagcaccgccaccaaggacacctatgacgccctgcacatgcaggccctgcctccaaga

SEQ ID NO: 27206 - DNA, 876 bp, synthetic construct
  source 1..876: mol_type = other DNA
aacgtggcctgcctcgtgaaagagttctaccccaaggacatcaggatcaacctggtgtccagcaagaagatcaccgagttcgaccccgccatcgtgatctcccccagcggcaagtacaacgccgtgaagctggggaagtacgaggacagcaacagcgtgacctgctccgtgcagcacgacaacaagaccgtgcacagcaccgactttgaagtgaaaaccgactccaccgaccacgtgaagcccaaagagacagagaacaccaagcagcccagcaagagctgccacaagcccaaggccatcgtgcacaccgagaaagtgaacatgatgagcctgaccgtgctgggcctgcggatgctgttcgccaaaaccgtggccgtgaacttcctgctgaccgccaagctgttcttcctcaaacggggcagaaagaaactcctgtatatattcaaacaaccatttatgagaccagtacaaactactcaagaggaagatggctgtagctgccgatttccagaagaagaagaaggaggatgtgaactgagagtgaagttcagcagaagcgccgacgcccctgcctaccagcagggacagaaccaactgtacaacgagctgaacctgggcagacgggaagagtacgacgtgctggacaagcggagaggcagggaccctgagatgggcggaaagccccagcggagaaagaacccccaggaaggactgtataacgaactccagaaagacaagatggccgaagcctacagcgagatcggcatgaagggcgagcggagaagaggcaagggccacgatggcctgtaccagggcctgagcaccgccaccaaggacacctatgacgccctgcacatgcaggccctgcctccaaga

SEQ ID NO: 27207 - DNA, 873 bp, synthetic construct
  source 1..873: mol_type = other DNA
gtggcctgcctcgtgaaagagttctaccccaaggacatcaggatcaacctggtgtccagcaagaagatcaccgagttcgaccccgccatcgtgatctcccccagcggcaagtacaacgccgtgaagctggggaagtacgaggacagcaacagcgtgacctgctccgtgcagcacgacaacaagaccgtgcacagcaccgactttgaagtgaaaaccgactccaccgaccacgtgaagcccaaagagacagagaacaccaagcagcccagcaagagctgccacaagcccaaggccatcgtgcacaccgagaaagtgaacatgatgagcctgaccgtgctgggcctgcggatgctgttcgccaaaaccgtggccgtgaacttcctgctgaccgccaagctgttcttcctcaaacggggcagaaagaaactcctgtatatattcaaacaaccatttatgagaccagtacaaactactcaagaggaagatggctgtagctgccgatttccagaagaagaagaaggaggatgtgaactgagagtgaagttcagcagaagcgccgacgcccctgcctaccagcagggacagaaccaactgtacaacgagctgaacctgggcagacgggaagagtacgacgtgctggacaagcggagaggcagggaccctgagatgggcggaaagccccagcggagaaagaacccccaggaaggactgtataacgaactccagaaagacaagatggccgaagcctacagcgagatcggcatgaagggcgagcggagaagaggcaagggccacgatggcctgtaccagggcctgagcaccgccaccaaggacacctatgacgccctgcacatgcaggccctgcctccaaga

SEQ ID NO: 27208 - DNA, 870 bp, synthetic construct
  source 1..870: mol_type = other DNA
gcctgcctcgtgaaagagttctaccccaaggacatcaggatcaacctggtgtccagcaagaagatcaccgagttcgaccccgccatcgtgatctcccccagcggcaagtacaacgccgtgaagctggggaagtacgaggacagcaacagcgtgacctgctccgtgcagcacgacaacaagaccgtgcacagcaccgactttgaagtgaaaaccgactccaccgaccacgtgaagcccaaagagacagagaacaccaagcagcccagcaagagctgccacaagcccaaggccatcgtgcacaccgagaaagtgaacatgatgagcctgaccgtgctgggcctgcggatgctgttcgccaaaaccgtggccgtgaacttcctgctgaccgccaagctgttcttcctcaaacggggcagaaagaaactcctgtatatattcaaacaaccatttatgagaccagtacaaactactcaagaggaagatggctgtagctgccgatttccagaagaagaagaaggaggatgtgaactgagagtgaagttcagcagaagcgccgacgcccctgcctaccagcagggacagaaccaactgtacaacgagctgaacctgggcagacgggaagagtacgacgtgctggacaagcggagaggcagggaccctgagatgggcggaaagccccagcggagaaagaacccccaggaaggactgtataacgaactccagaaagacaagatggccgaagcctacagcgagatcggcatgaagggcgagcggagaagaggcaagggccacgatggcctgtaccagggcctgagcaccgccaccaaggacacctatgacgccctgcacatgcaggccctgcctccaaga

SEQ ID NO: 27209 - DNA, 867 bp, synthetic construct
  source 1..867: mol_type = other DNA
tgcctcgtgaaagagttctaccccaaggacatcaggatcaacctggtgtccagcaagaagatcaccgagttcgaccccgccatcgtgatctcccccagcggcaagtacaacgccgtgaagctggggaagtacgaggacagcaacagcgtgacctgctccgtgcagcacgacaacaagaccgtgcacagcaccgactttgaagtgaaaaccgactccaccgaccacgtgaagcccaaagagacagagaacaccaagcagcccagcaagagctgccacaagcccaaggccatcgtgcacaccgagaaagtgaacatgatgagcctgaccgtgctgggcctgcggatgctgttcgccaaaaccgtggccgtgaacttcctgctgaccgccaagctgttcttcctcaaacggggcagaaagaaactcctgtatatattcaaacaaccatttatgagaccagtacaaactactcaagaggaagatggctgtagctgccgatttccagaagaagaagaaggaggatgtgaactgagagtgaagttcagcagaagcgccgacgcccctgcctaccagcagggacagaaccaactgtacaacgagctgaacctgggcagacgggaagagtacgacgtgctggacaagcggagaggcagggaccctgagatgggcggaaagccccagcggagaaagaacccccaggaaggactgtataacgaactccagaaagacaagatggccgaagcctacagcgagatcggcatgaagggcgagcggagaagaggcaagggccacgatggcctgtaccagggcctgagcaccgccaccaaggacacctatgacgccctgcacatgcaggccctgcctccaaga

SEQ ID NO: 27210 - DNA, 864 bp, synthetic construct
  source 1..864: mol_type = other DNA
ctcgtgaaagagttctaccccaaggacatcaggatcaacctggtgtccagcaagaagatcaccgagttcgaccccgccatcgtgatctcccccagcggcaagtacaacgccgtgaagctggggaagtacgaggacagcaacagcgtgacctgctccgtgcagcacgacaacaagaccgtgcacagcaccgactttgaagtgaaaaccgactccaccgaccacgtgaagcccaaagagacagagaacaccaagcagcccagcaagagctgccacaagcccaaggccatcgtgcacaccgagaaagtgaacatgatgagcctgaccgtgctgggcctgcggatgctgttcgccaaaaccgtggccgtgaacttcctgctgaccgccaagctgttcttcctcaaacggggcagaaagaaactcctgtatatattcaaacaaccatttatgagaccagtacaaactactcaagaggaagatggctgtagctgccgatttccagaagaagaagaaggaggatgtgaactgagagtgaagttcagcagaagcgccgacgcccctgcctaccagcagggacagaaccaactgtacaacgagctgaacctgggcagacgggaagagtacgacgtgctggacaagcggagaggcagggaccctgagatgggcggaaagccccagcggagaaagaacccccaggaaggactgtataacgaactccagaaagacaagatggccgaagcctacagcgagatcggcatgaagggcgagcggagaagaggcaagggccacgatggcctgtaccagggcctgagcaccgccaccaaggacacctatgacgccctgcacatgcaggccctgcctccaaga

SEQ ID NO: 27211 - DNA, 861 bp, synthetic construct
  source 1..861: mol_type = other DNA
gtgaaagagttctaccccaaggacatcaggatcaacctggtgtccagcaagaagatcaccgagttcgaccccgccatcgtgatctcccccagcggcaagtacaacgccgtgaagctggggaagtacgaggacagcaacagcgtgacctgctccgtgcagcacgacaacaagaccgtgcacagcaccgactttgaagtgaaaaccgactccaccgaccacgtgaagcccaaagagacagagaacaccaagcagcccagcaagagctgccacaagcccaaggccatcgtgcacaccgagaaagtgaacatgatgagcctgaccgtgctgggcctgcggatgctgttcgccaaaaccgtggccgtgaacttcctgctgaccgccaagctgttcttcctcaaacggggcagaaagaaactcctgtatatattcaaacaaccatttatgagaccagtacaaactactcaagaggaagatggctgtagctgccgatttccagaagaagaagaaggaggatgtgaactgagagtgaagttcagcagaagcgccgacgcccctgcctaccagcagggacagaaccaactgtacaacgagctgaacctgggcagacgggaagagtacgacgtgctggacaagcggagaggcagggaccctgagatgggcggaaagccccagcggagaaagaacccccaggaaggactgtataacgaactccagaaagacaagatggccgaagcctacagcgagatcggcatgaagggcgagcggagaagaggcaagggccacgatggcctgtaccagggcctgagcaccgccaccaaggacacctatgacgccctgcacatgcaggccctgcctccaaga

SEQ ID NO: 27212 - DNA, 858 bp, synthetic construct
  source 1..858: mol_type = other DNA
aaagagttctaccccaaggacatcaggatcaacctggtgtccagcaagaagatcaccgagttcgaccccgccatcgtgatctcccccagcggcaagtacaacgccgtgaagctggggaagtacgaggacagcaacagcgtgacctgctccgtgcagcacgacaacaagaccgtgcacagcaccgactttgaagtgaaaaccgactccaccgaccacgtgaagcccaaagagacagagaacaccaagcagcccagcaagagctgccacaagcccaaggccatcgtgcacaccgagaaagtgaacatgatgagcctgaccgtgctgggcctgcggatgctgttcgccaaaaccgtggccgtgaacttcctgctgaccgccaagctgttcttcctcaaacggggcagaaagaaactcctgtatatattcaaacaaccatttatgagaccagtacaaactactcaagaggaagatggctgtagctgccgatttccagaagaagaagaaggaggatgtgaactgagagtgaagttcagcagaagcgccgacgcccctgcctaccagcagggacagaaccaactgtacaacgagctgaacctgggcagacgggaagagtacgacgtgctggacaagcggagaggcagggaccctgagatgggcggaaagccccagcggagaaagaacccccaggaaggactgtataacgaactccagaaagacaagatggccgaagcctacagcgagatcggcatgaagggcgagcggagaagaggcaagggccacgatggcctgtaccagggcctgagcaccgccaccaaggacacctatgacgccctgcacatgcaggccctgcctccaaga

SEQ ID NO: 27213 - DNA, 855 bp, synthetic construct
  source 1..855: mol_type = other DNA
gagttctaccccaaggacatcaggatcaacctggtgtccagcaagaagatcaccgagttcgaccccgccatcgtgatctcccccagcggcaagtacaacgccgtgaagctggggaagtacgaggacagcaacagcgtgacctgctccgtgcagcacgacaacaagaccgtgcacagcaccgactttgaagtgaaaaccgactccaccgaccacgtgaagcccaaagagacagagaacaccaagcagcccagcaagagctgccacaagcccaaggccatcgtgcacaccgagaaagtgaacatgatgagcctgaccgtgctgggcctgcggatgctgttcgccaaaaccgtggccgtgaacttcctgctgaccgccaagctgttcttcctcaaacggggcagaaagaaactcctgtatatattcaaacaaccatttatgagaccagtacaaactactcaagaggaagatggctgtagctgccgatttccagaagaagaagaaggaggatgtgaactgagagtgaagttcagcagaagcgccgacgcccctgcctaccagcagggacagaaccaactgtacaacgagctgaacctgggcagacgggaagagtacgacgtgctggacaagcggagaggcagggaccctgagatgggcggaaagccccagcggagaaagaacccccaggaaggactgtataacgaactccagaaagacaagatggccgaagcctacagcgagatcggcatgaagggcgagcggagaagaggcaagggccacgatggcctgtaccagggcctgagcaccgccaccaaggacacctatgacgccctgcacatgcaggccctgcctccaaga

SEQ ID NO: 27214 - DNA, 852 bp, synthetic construct
  source 1..852: mol_type = other DNA
ttctaccccaaggacatcaggatcaacctggtgtccagcaagaagatcaccgagttcgaccccgccatcgtgatctcccccagcggcaagtacaacgccgtgaagctggggaagtacgaggacagcaacagcgtgacctgctccgtgcagcacgacaacaagaccgtgcacagcaccgactttgaagtgaaaaccgactccaccgaccacgtgaagcccaaagagacagagaacaccaagcagcccagcaagagctgccacaagcccaaggccatcgtgcacaccgagaaagtgaacatgatgagcctgaccgtgctgggcctgcggatgctgttcgccaaaaccgtggccgtgaacttcctgctgaccgccaagctgttcttcctcaaacggggcagaaagaaactcctgtatatattcaaacaaccatttatgagaccagtacaaactactcaagaggaagatggctgtagctgccgatttccagaagaagaagaaggaggatgtgaactgagagtgaagttcagcagaagcgccgacgcccctgcctaccagcagggacagaaccaactgtacaacgagctgaacctgggcagacgggaagagtacgacgtgctggacaagcggagaggcagggaccctgagatgggcggaaagccccagcggagaaagaacccccaggaaggactgtataacgaactccagaaagacaagatggccgaagcctacagcgagatcggcatgaagggcgagcggagaagaggcaagggccacgatggcctgtaccagggcctgagcaccgccaccaaggacacctatgacgccctgcacatgcaggccctgcctccaaga

SEQ ID NO: 27215 - DNA, 849 bp, synthetic construct
  source 1..849: mol_type = other DNA
taccccaaggacatcaggatcaacctggtgtccagcaagaagatcaccgagttcgaccccgccatcgtgatctcccccagcggcaagtacaacgccgtgaagctggggaagtacgaggacagcaacagcgtgacctgctccgtgcagcacgacaacaagaccgtgcacagcaccgactttgaagtgaaaaccgactccaccgaccacgtgaagcccaaagagacagagaacaccaagcagcccagcaagagctgccacaagcccaaggccatcgtgcacaccgagaaagtgaacatgatgagcctgaccgtgctgggcctgcggatgctgttcgccaaaaccgtggccgtgaacttcctgctgaccgccaagctgttcttcctcaaacggggcagaaagaaactcctgtatatattcaaacaaccatttatgagaccagtacaaactactcaagaggaagatggctgtagctgccgatttccagaagaagaagaaggaggatgtgaactgagagtgaagttcagcagaagcgccgacgcccctgcctaccagcagggacagaaccaactgtacaacgagctgaacctgggcagacgggaagagtacgacgtgctggacaagcggagaggcagggaccctgagatgggcggaaagccccagcggagaaagaacccccaggaaggactgtataacgaactccagaaagacaagatggccgaagcctacagcgagatcggcatgaagggcgagcggagaagaggcaagggccacgatggcctgtaccagggcctgagcaccgccaccaaggacacctatgacgccctgcacatgcaggccctgcctccaaga

SEQ ID NO: 27216 - DNA, 846 bp, synthetic construct
  source 1..846: mol_type = other DNA
cccaaggacatcaggatcaacctggtgtccagcaagaagatcaccgagttcgaccccgccatcgtgatctcccccagcggcaagtacaacgccgtgaagctggggaagtacgaggacagcaacagcgtgacctgctccgtgcagcacgacaacaagaccgtgcacagcaccgactttgaagtgaaaaccgactccaccgaccacgtgaagcccaaagagacagagaacaccaagcagcccagcaagagctgccacaagcccaaggccatcgtgcacaccgagaaagtgaacatgatgagcctgaccgtgctgggcctgcggatgctgttcgccaaaaccgtggccgtgaacttcctgctgaccgccaagctgttcttcctcaaacggggcagaaagaaactcctgtatatattcaaacaaccatttatgagaccagtacaaactactcaagaggaagatggctgtagctgccgatttccagaagaagaagaaggaggatgtgaactgagagtgaagttcagcagaagcgccgacgcccctgcctaccagcagggacagaaccaactgtacaacgagctgaacctgggcagacgggaagagtacgacgtgctggacaagcggagaggcagggaccctgagatgggcggaaagccccagcggagaaagaacccccaggaaggactgtataacgaactccagaaagacaagatggccgaagcctacagcgagatcggcatgaagggcgagcggagaagaggcaagggccacgatggcctgtaccagggcctgagcaccgccaccaaggacacctatgacgccctgcacatgcaggccctgcctccaaga

SEQ ID NO: 27217 - DNA, 843 bp, synthetic construct
  source 1..843: mol_type = other DNA
aaggacatcaggatcaacctggtgtccagcaagaagatcaccgagttcgaccccgccatcgtgatctcccccagcggcaagtacaacgccgtgaagctggggaagtacgaggacagcaacagcgtgacctgctccgtgcagcacgacaacaagaccgtgcacagcaccgactttgaagtgaaaaccgactccaccgaccacgtgaagcccaaagagacagagaacaccaagcagcccagcaagagctgccacaagcccaaggccatcgtgcacaccgagaaagtgaacatgatgagcctgaccgtgctgggcctgcggatgctgttcgccaaaaccgtggccgtgaacttcctgctgaccgccaagctgttcttcctcaaacggggcagaaagaaactcctgtatatattcaaacaaccatttatgagaccagtacaaactactcaagaggaagatggctgtagctgccgatttccagaagaagaagaaggaggatgtgaactgagagtgaagttcagcagaagcgccgacgcccctgcctaccagcagggacagaaccaactgtacaacgagctgaacctgggcagacgggaagagtacgacgtgctggacaagcggagaggcagggaccctgagatgggcggaaagccccagcggagaaagaacccccaggaaggactgtataacgaactccagaaagacaagatggccgaagcctacagcgagatcggcatgaagggcgagcggagaagaggcaagggccacgatggcctgtaccagggcctgagcaccgccaccaaggacacctatgacgccctgcacatgcaggccctgcctccaaga

SEQ ID NO: 27218 - DNA, 840 bp, synthetic construct
  source 1..840: mol_type = other DNA
gacatcaggatcaacctggtgtccagcaagaagatcaccgagttcgaccccgccatcgtgatctcccccagcggcaagtacaacgccgtgaagctggggaagtacgaggacagcaacagcgtgacctgctccgtgcagcacgacaacaagaccgtgcacagcaccgactttgaagtgaaaaccgactccaccgaccacgtgaagcccaaagagacagagaacaccaagcagcccagcaagagctgccacaagcccaaggccatcgtgcacaccgagaaagtgaacatgatgagcctgaccgtgctgggcctgcggatgctgttcgccaaaaccgtggccgtgaacttcctgctgaccgccaagctgttcttcctcaaacggggcagaaagaaactcctgtatatattcaaacaaccatttatgagaccagtacaaactactcaagaggaagatggctgtagctgccgatttccagaagaagaagaaggaggatgtgaactgagagtgaagttcagcagaagcgccgacgcccctgcctaccagcagggacagaaccaactgtacaacgagctgaacctgggcagacgggaagagtacgacgtgctggacaagcggagaggcagggaccctgagatgggcggaaagccccagcggagaaagaacccccaggaaggactgtataacgaactccagaaagacaagatggccgaagcctacagcgagatcggcatgaagggcgagcggagaagaggcaagggccacgatggcctgtaccagggcctgagcaccgccaccaaggacacctatgacgccctgcacatgcaggccctgcctccaaga

SEQ ID NO: 27219 - DNA, 837 bp, synthetic construct
  source 1..837: mol_type = other DNA
atcaggatcaacctggtgtccagcaagaagatcaccgagttcgaccccgccatcgtgatctcccccagcggcaagtacaacgccgtgaagctggggaagtacgaggacagcaacagcgtgacctgctccgtgcagcacgacaacaagaccgtgcacagcaccgactttgaagtgaaaaccgactccaccgaccacgtgaagcccaaagagacagagaacaccaagcagcccagcaagagctgccacaagcccaaggccatcgtgcacaccgagaaagtgaacatgatgagcctgaccgtgctgggcctgcggatgctgttcgccaaaaccgtggccgtgaacttcctgctgaccgccaagctgttcttcctcaaacggggcagaaagaaactcctgtatatattcaaacaaccatttatgagaccagtacaaactactcaagaggaagatggctgtagctgccgatttccagaagaagaagaaggaggatgtgaactgagagtgaagttcagcagaagcgccgacgcccctgcctaccagcagggacagaaccaactgtacaacgagctgaacctgggcagacgggaagagtacgacgtgctggacaagcggagaggcagggaccctgagatgggcggaaagccccagcggagaaagaacccccaggaaggactgtataacgaactccagaaagacaagatggccgaagcctacagcgagatcggcatgaagggcgagcggagaagaggcaagggccacgatggcctgtaccagggcctgagcaccgccaccaaggacacctatgacgccctgcacatgcaggccctgcctccaaga

SEQ ID NO: 27220 - DNA, 834 bp, synthetic construct
  source 1..834: mol_type = other DNA
aggatcaacctggtgtccagcaagaagatcaccgagttcgaccccgccatcgtgatctcccccagcggcaagtacaacgccgtgaagctggggaagtacgaggacagcaacagcgtgacctgctccgtgcagcacgacaacaagaccgtgcacagcaccgactttgaagtgaaaaccgactccaccgaccacgtgaagcccaaagagacagagaacaccaagcagcccagcaagagctgccacaagcccaaggccatcgtgcacaccgagaaagtgaacatgatgagcctgaccgtgctgggcctgcggatgctgttcgccaaaaccgtggccgtgaacttcctgctgaccgccaagctgttcttcctcaaacggggcagaaagaaactcctgtatatattcaaacaaccatttatgagaccagtacaaactactcaagaggaagatggctgtagctgccgatttccagaagaagaagaaggaggatgtgaactgagagtgaagttcagcagaagcgccgacgcccctgcctaccagcagggacagaaccaactgtacaacgagctgaacctgggcagacgggaagagtacgacgtgctggacaagcggagaggcagggaccctgagatgggcggaaagccccagcggagaaagaacccccaggaaggactgtataacgaactccagaaagacaagatggccgaagcctacagcgagatcggcatgaagggcgagcggagaagaggcaagggccacgatggcctgtaccagggcctgagcaccgccaccaaggacacctatgacgccctgcacatgcaggccctgcctccaaga

SEQ ID NO: 27221 - DNA, 831 bp, synthetic construct
  source 1..831: mol_type = other DNA
atcaacctggtgtccagcaagaagatcaccgagttcgaccccgccatcgtgatctcccccagcggcaagtacaacgccgtgaagctggggaagtacgaggacagcaacagcgtgacctgctccgtgcagcacgacaacaagaccgtgcacagcaccgactttgaagtgaaaaccgactccaccgaccacgtgaagcccaaagagacagagaacaccaagcagcccagcaagagctgccacaagcccaaggccatcgtgcacaccgagaaagtgaacatgatgagcctgaccgtgctgggcctgcggatgctgttcgccaaaaccgtggccgtgaacttcctgctgaccgccaagctgttcttcctcaaacggggcagaaagaaactcctgtatatattcaaacaaccatttatgagaccagtacaaactactcaagaggaagatggctgtagctgccgatttccagaagaagaagaaggaggatgtgaactgagagtgaagttcagcagaagcgccgacgcccctgcctaccagcagggacagaaccaactgtacaacgagctgaacctgggcagacgggaagagtacgacgtgctggacaagcggagaggcagggaccctgagatgggcggaaagccccagcggagaaagaacccccaggaaggactgtataacgaactccagaaagacaagatggccgaagcctacagcgagatcggcatgaagggcgagcggagaagaggcaagggccacgatggcctgtaccagggcctgagcaccgccaccaaggacacctatgacgccctgcacatgcaggccctgcctccaaga

SEQ ID NO: 27222 - DNA, 828 bp, synthetic construct
  source 1..828: mol_type = other DNA
aacctggtgtccagcaagaagatcaccgagttcgaccccgccatcgtgatctcccccagcggcaagtacaacgccgtgaagctggggaagtacgaggacagcaacagcgtgacctgctccgtgcagcacgacaacaagaccgtgcacagcaccgactttgaagtgaaaaccgactccaccgaccacgtgaagcccaaagagacagagaacaccaagcagcccagcaagagctgccacaagcccaaggccatcgtgcacaccgagaaagtgaacatgatgagcctgaccgtgctgggcctgcggatgctgttcgccaaaaccgtggccgtgaacttcctgctgaccgccaagctgttcttcctcaaacggggcagaaagaaactcctgtatatattcaaacaaccatttatgagaccagtacaaactactcaagaggaagatggctgtagctgccgatttccagaagaagaagaaggaggatgtgaactgagagtgaagttcagcagaagcgccgacgcccctgcctaccagcagggacagaaccaactgtacaacgagctgaacctgggcagacgggaagagtacgacgtgctggacaagcggagaggcagggaccctgagatgggcggaaagccccagcggagaaagaacccccaggaaggactgtataacgaactccagaaagacaagatggccgaagcctacagcgagatcggcatgaagggcgagcggagaagaggcaagggccacgatggcctgtaccagggcctgagcaccgccaccaaggacacctatgacgccctgcacatgcaggccctgcctccaaga

SEQ ID NO: 27223 - DNA, 825 bp, synthetic construct
  source 1..825: mol_type = other DNA
ctggtgtccagcaagaagatcaccgagttcgaccccgccatcgtgatctcccccagcggcaagtacaacgccgtgaagctggggaagtacgaggacagcaacagcgtgacctgctccgtgcagcacgacaacaagaccgtgcacagcaccgactttgaagtgaaaaccgactccaccgaccacgtgaagcccaaagagacagagaacaccaagcagcccagcaagagctgccacaagcccaaggccatcgtgcacaccgagaaagtgaacatgatgagcctgaccgtgctgggcctgcggatgctgttcgccaaaaccgtggccgtgaacttcctgctgaccgccaagctgttcttcctcaaacggggcagaaagaaactcctgtatatattcaaacaaccatttatgagaccagtacaaactactcaagaggaagatggctgtagctgccgatttccagaagaagaagaaggaggatgtgaactgagagtgaagttcagcagaagcgccgacgcccctgcctaccagcagggacagaaccaactgtacaacgagctgaacctgggcagacgggaagagtacgacgtgctggacaagcggagaggcagggaccctgagatgggcggaaagccccagcggagaaagaacccccaggaaggactgtataacgaactccagaaagacaagatggccgaagcctacagcgagatcggcatgaagggcgagcggagaagaggcaagggccacgatggcctgtaccagggcctgagcaccgccaccaaggacacctatgacgccctgcacatgcaggccctgcctccaaga

SEQ ID NO: 27224 - DNA, 822 bp, synthetic construct
  source 1..822: mol_type = other DNA
gtgtccagcaagaagatcaccgagttcgaccccgccatcgtgatctcccccagcggcaagtacaacgccgtgaagctggggaagtacgaggacagcaacagcgtgacctgctccgtgcagcacgacaacaagaccgtgcacagcaccgactttgaagtgaaaaccgactccaccgaccacgtgaagcccaaagagacagagaacaccaagcagcccagcaagagctgccacaagcccaaggccatcgtgcacaccgagaaagtgaacatgatgagcctgaccgtgctgggcctgcggatgctgttcgccaaaaccgtggccgtgaacttcctgctgaccgccaagctgttcttcctcaaacggggcagaaagaaactcctgtatatattcaaacaaccatttatgagaccagtacaaactactcaagaggaagatggctgtagctgccgatttccagaagaagaagaaggaggatgtgaactgagagtgaagttcagcagaagcgccgacgcccctgcctaccagcagggacagaaccaactgtacaacgagctgaacctgggcagacgggaagagtacgacgtgctggacaagcggagaggcagggaccctgagatgggcggaaagccccagcggagaaagaacccccaggaaggactgtataacgaactccagaaagacaagatggccgaagcctacagcgagatcggcatgaagggcgagcggagaagaggcaagggccacgatggcctgtaccagggcctgagcaccgccaccaaggacacctatgacgccctgcacatgcaggccctgcctccaaga

SEQ ID NO: 27225 - DNA, 819 bp, synthetic construct
  source 1..819: mol_type = other DNA
tccagcaagaagatcaccgagttcgaccccgccatcgtgatctcccccagcggcaagtacaacgccgtgaagctggggaagtacgaggacagcaacagcgtgacctgctccgtgcagcacgacaacaagaccgtgcacagcaccgactttgaagtgaaaaccgactccaccgaccacgtgaagcccaaagagacagagaacaccaagcagcccagcaagagctgccacaagcccaaggccatcgtgcacaccgagaaagtgaacatgatgagcctgaccgtgctgggcctgcggatgctgttcgccaaaaccgtggccgtgaacttcctgctgaccgccaagctgttcttcctcaaacggggcagaaagaaactcctgtatatattcaaacaaccatttatgagaccagtacaaactactcaagaggaagatggctgtagctgccgatttccagaagaagaagaaggaggatgtgaactgagagtgaagttcagcagaagcgccgacgcccctgcctaccagcagggacagaaccaactgtacaacgagctgaacctgggcagacgggaagagtacgacgtgctggacaagcggagaggcagggaccctgagatgggcggaaagccccagcggagaaagaacccccaggaaggactgtataacgaactccagaaagacaagatggccgaagcctacagcgagatcggcatgaagggcgagcggagaagaggcaagggccacgatggcctgtaccagggcctgagcaccgccaccaaggacacctatgacgccctgcacatgcaggccctgcctccaaga

SEQ ID NO: 27226 - DNA, 816 bp, synthetic construct
  source 1..816: mol_type = other DNA
agcaagaagatcaccgagttcgaccccgccatcgtgatctcccccagcggcaagtacaacgccgtgaagctggggaagtacgaggacagcaacagcgtgacctgctccgtgcagcacgacaacaagaccgtgcacagcaccgactttgaagtgaaaaccgactccaccgaccacgtgaagcccaaagagacagagaacaccaagcagcccagcaagagctgccacaagcccaaggccatcgtgcacaccgagaaagtgaacatgatgagcctgaccgtgctgggcctgcggatgctgttcgccaaaaccgtggccgtgaacttcctgctgaccgccaagctgttcttcctcaaacggggcagaaagaaactcctgtatatattcaaacaaccatttatgagaccagtacaaactactcaagaggaagatggctgtagctgccgatttccagaagaagaagaaggaggatgtgaactgagagtgaagttcagcagaagcgccgacgcccctgcctaccagcagggacagaaccaactgtacaacgagctgaacctgggcagacgggaagagtacgacgtgctggacaagcggagaggcagggaccctgagatgggcggaaagccccagcggagaaagaacccccaggaaggactgtataacgaactccagaaagacaagatggccgaagcctacagcgagatcggcatgaagggcgagcggagaagaggcaagggccacgatggcctgtaccagggcctgagcaccgccaccaaggacacctatgacgccctgcacatgcaggccctgcctccaaga

SEQ ID NO: 27227 - DNA, 813 bp, synthetic construct
  source 1..813: mol_type = other DNA
aagaagatcaccgagttcgaccccgccatcgtgatctcccccagcggcaagtacaacgccgtgaagctggggaagtacgaggacagcaacagcgtgacctgctccgtgcagcacgacaacaagaccgtgcacagcaccgactttgaagtgaaaaccgactccaccgaccacgtgaagcccaaagagacagagaacaccaagcagcccagcaagagctgccacaagcccaaggccatcgtgcacaccgagaaagtgaacatgatgagcctgaccgtgctgggcctgcggatgctgttcgccaaaaccgtggccgtgaacttcctgctgaccgccaagctgttcttcctcaaacggggcagaaagaaactcctgtatatattcaaacaaccatttatgagaccagtacaaactactcaagaggaagatggctgtagctgccgatttccagaagaagaagaaggaggatgtgaactgagagtgaagttcagcagaagcgccgacgcccctgcctaccagcagggacagaaccaactgtacaacgagctgaacctgggcagacgggaagagtacgacgtgctggacaagcggagaggcagggaccctgagatgggcggaaagccccagcggagaaagaacccccaggaaggactgtataacgaactccagaaagacaagatggccgaagcctacagcgagatcggcatgaagggcgagcggagaagaggcaagggccacgatggcctgtaccagggcctgagcaccgccaccaaggacacctatgacgccctgcacatgcaggccctgcctccaaga

SEQ ID NO: 27228 - DNA, 810 bp, synthetic construct
  source 1..810: mol_type = other DNA
aagatcaccgagttcgaccccgccatcgtgatctcccccagcggcaagtacaacgccgtgaagctggggaagtacgaggacagcaacagcgtgacctgctccgtgcagcacgacaacaagaccgtgcacagcaccgactttgaagtgaaaaccgactccaccgaccacgtgaagcccaaagagacagagaacaccaagcagcccagcaagagctgccacaagcccaaggccatcgtgcacaccgagaaagtgaacatgatgagcctgaccgtgctgggcctgcggatgctgttcgccaaaaccgtggccgtgaacttcctgctgaccgccaagctgttcttcctcaaacggggcagaaagaaactcctgtatatattcaaacaaccatttatgagaccagtacaaactactcaagaggaagatggctgtagctgccgatttccagaagaagaagaaggaggatgtgaactgagagtgaagttcagcagaagcgccgacgcccctgcctaccagcagggacagaaccaactgtacaacgagctgaacctgggcagacgggaagagtacgacgtgctggacaagcggagaggcagggaccctgagatgggcggaaagccccagcggagaaagaacccccaggaaggactgtataacgaactccagaaagacaagatggccgaagcctacagcgagatcggcatgaagggcgagcggagaagaggcaagggccacgatggcctgtaccagggcctgagcaccgccaccaaggacacctatgacgccctgcacatgcaggccctgcctccaaga

SEQ ID NO: 27229 - DNA, 807 bp, synthetic construct
  source 1..807: mol_type = other DNA
atcaccgagttcgaccccgccatcgtgatctcccccagcggcaagtacaacgccgtgaagctggggaagtacgaggacagcaacagcgtgacctgctccgtgcagcacgacaacaagaccgtgcacagcaccgactttgaagtgaaaaccgactccaccgaccacgtgaagcccaaagagacagagaacaccaagcagcccagcaagagctgccacaagcccaaggccatcgtgcacaccgagaaagtgaacatgatgagcctgaccgtgctgggcctgcggatgctgttcgccaaaaccgtggccgtgaacttcctgctgaccgccaagctgttcttcctcaaacggggcagaaagaaactcctgtatatattcaaacaaccatttatgagaccagtacaaactactcaagaggaagatggctgtagctgccgatttccagaagaagaagaaggaggatgtgaactgagagtgaagttcagcagaagcgccgacgcccctgcctaccagcagggacagaaccaactgtacaacgagctgaacctgggcagacgggaagagtacgacgtgctggacaagcggagaggcagggaccctgagatgggcggaaagccccagcggagaaagaacccccaggaaggactgtataacgaactccagaaagacaagatggccgaagcctacagcgagatcggcatgaagggcgagcggagaagaggcaagggccacgatggcctgtaccagggcctgagcaccgccaccaaggacacctatgacgccctgcacatgcaggccctgcctccaaga

SEQ ID NO: 27230 - DNA, 804 bp, synthetic construct
  source 1..804: mol_type = other DNA
accgagttcgaccccgccatcgtgatctcccccagcggcaagtacaacgccgtgaagctggggaagtacgaggacagcaacagcgtgacctgctccgtgcagcacgacaacaagaccgtgcacagcaccgactttgaagtgaaaaccgactccaccgaccacgtgaagcccaaagagacagagaacaccaagcagcccagcaagagctgccacaagcccaaggccatcgtgcacaccgagaaagtgaacatgatgagcctgaccgtgctgggcctgcggatgctgttcgccaaaaccgtggccgtgaacttcctgctgaccgccaagctgttcttcctcaaacggggcagaaagaaactcctgtatatattcaaacaaccatttatgagaccagtacaaactactcaagaggaagatggctgtagctgccgatttccagaagaagaagaaggaggatgtgaactgagagtgaagttcagcagaagcgccgacgcccctgcctaccagcagggacagaaccaactgtacaacgagctgaacctgggcagacgggaagagtacgacgtgctggacaagcggagaggcagggaccctgagatgggcggaaagccccagcggagaaagaacccccaggaaggactgtataacgaactccagaaagacaagatggccgaagcctacagcgagatcggcatgaagggcgagcggagaagaggcaagggccacgatggcctgtaccagggcctgagcaccgccaccaaggacacctatgacgccctgcacatgcaggccctgcctccaaga

SEQ ID NO: 27231 - DNA, 801 bp, synthetic construct
  source 1..801: mol_type = other DNA
gagttcgaccccgccatcgtgatctcccccagcggcaagtacaacgccgtgaagctggggaagtacgaggacagcaacagcgtgacctgctccgtgcagcacgacaacaagaccgtgcacagcaccgactttgaagtgaaaaccgactccaccgaccacgtgaagcccaaagagacagagaacaccaagcagcccagcaagagctgccacaagcccaaggccatcgtgcacaccgagaaagtgaacatgatgagcctgaccgtgctgggcctgcggatgctgttcgccaaaaccgtggccgtgaacttcctgctgaccgccaagctgttcttcctcaaacggggcagaaagaaactcctgtatatattcaaacaaccatttatgagaccagtacaaactactcaagaggaagatggctgtagctgccgatttccagaagaagaagaaggaggatgtgaactgagagtgaagttcagcagaagcgccgacgcccctgcctaccagcagggacagaaccaactgtacaacgagctgaacctgggcagacgggaagagtacgacgtgctggacaagcggagaggcagggaccctgagatgggcggaaagccccagcggagaaagaacccccaggaaggactgtataacgaactccagaaagacaagatggccgaagcctacagcgagatcggcatgaagggcgagcggagaagaggcaagggccacgatggcctgtaccagggcctgagcaccgccaccaaggacacctatgacgccctgcacatgcaggccctgcctccaaga

SEQ ID NO: 27232 - DNA, 798 bp, synthetic construct
  source 1..798: mol_type = other DNA
ttcgaccccgccatcgtgatctcccccagcggcaagtacaacgccgtgaagctggggaagtacgaggacagcaacagcgtgacctgctccgtgcagcacgacaacaagaccgtgcacagcaccgactttgaagtgaaaaccgactccaccgaccacgtgaagcccaaagagacagagaacaccaagcagcccagcaagagctgccacaagcccaaggccatcgtgcacaccgagaaagtgaacatgatgagcctgaccgtgctgggcctgcggatgctgttcgccaaaaccgtggccgtgaacttcctgctgaccgccaagctgttcttcctcaaacggggcagaaagaaactcctgtatatattcaaacaaccatttatgagaccagtacaaactactcaagaggaagatggctgtagctgccgatttccagaagaagaagaaggaggatgtgaactgagagtgaagttcagcagaagcgccgacgcccctgcctaccagcagggacagaaccaactgtacaacgagctgaacctgggcagacgggaagagtacgacgtgctggacaagcggagaggcagggaccctgagatgggcggaaagccccagcggagaaagaacccccaggaaggactgtataacgaactccagaaagacaagatggccgaagcctacagcgagatcggcatgaagggcgagcggagaagaggcaagggccacgatggcctgtaccagggcctgagcaccgccaccaaggacacctatgacgccctgcacatgcaggccctgcctccaaga

SEQ ID NO: 27233 - DNA, 795 bp, synthetic construct
  source 1..795: mol_type = other DNA
gaccccgccatcgtgatctcccccagcggcaagtacaacgccgtgaagctggggaagtacgaggacagcaacagcgtgacctgctccgtgcagcacgacaacaagaccgtgcacagcaccgactttgaagtgaaaaccgactccaccgaccacgtgaagcccaaagagacagagaacaccaagcagcccagcaagagctgccacaagcccaaggccatcgtgcacaccgagaaagtgaacatgatgagcctgaccgtgctgggcctgcggatgctgttcgccaaaaccgtggccgtgaacttcctgctgaccgccaagctgttcttcctcaaacggggcagaaagaaactcctgtatatattcaaacaaccatttatgagaccagtacaaactactcaagaggaagatggctgtagctgccgatttccagaagaagaagaaggaggatgtgaactgagagtgaagttcagcagaagcgccgacgcccctgcctaccagcagggacagaaccaactgtacaacgagctgaacctgggcagacgggaagagtacgacgtgctggacaagcggagaggcagggaccctgagatgggcggaaagccccagcggagaaagaacccccaggaaggactgtataacgaactccagaaagacaagatggccgaagcctacagcgagatcggcatgaagggcgagcggagaagaggcaagggccacgatggcctgtaccagggcctgagcaccgccaccaaggacacctatgacgccctgcacatgcaggccctgcctccaaga

SEQ ID NO: 27234 - DNA, 792 bp, synthetic construct
  source 1..792: mol_type = other DNA
cccgccatcgtgatctcccccagcggcaagtacaacgccgtgaagctggggaagtacgaggacagcaacagcgtgacctgctccgtgcagcacgacaacaagaccgtgcacagcaccgactttgaagtgaaaaccgactccaccgaccacgtgaagcccaaagagacagagaacaccaagcagcccagcaagagctgccacaagcccaaggccatcgtgcacaccgagaaagtgaacatgatgagcctgaccgtgctgggcctgcggatgctgttcgccaaaaccgtggccgtgaacttcctgctgaccgccaagctgttcttcctcaaacggggcagaaagaaactcctgtatatattcaaacaaccatttatgagaccagtacaaactactcaagaggaagatggctgtagctgccgatttccagaagaagaagaaggaggatgtgaactgagagtgaagttcagcagaagcgccgacgcccctgcctaccagcagggacagaaccaactgtacaacgagctgaacctgggcagacgggaagagtacgacgtgctggacaagcggagaggcagggaccctgagatgggcggaaagccccagcggagaaagaacccccaggaaggactgtataacgaactccagaaagacaagatggccgaagcctacagcgagatcggcatgaagggcgagcggagaagaggcaagggccacgatggcctgtaccagggcctgagcaccgccaccaaggacacctatgacgccctgcacatgcaggccctgcctccaaga

SEQ ID NO: 27235 - DNA, 789 bp, synthetic construct
  source 1..789: mol_type = other DNA
gccatcgtgatctcccccagcggcaagtacaacgccgtgaagctggggaagtacgaggacagcaacagcgtgacctgctccgtgcagcacgacaacaagaccgtgcacagcaccgactttgaagtgaaaaccgactccaccgaccacgtgaagcccaaagagacagagaacaccaagcagcccagcaagagctgccacaagcccaaggccatcgtgcacaccgagaaagtgaacatgatgagcctgaccgtgctgggcctgcggatgctgttcgccaaaaccgtggccgtgaacttcctgctgaccgccaagctgttcttcctcaaacggggcagaaagaaactcctgtatatattcaaacaaccatttatgagaccagtacaaactactcaagaggaagatggctgtagctgccgatttccagaagaagaagaaggaggatgtgaactgagagtgaagttcagcagaagcgccgacgcccctgcctaccagcagggacagaaccaactgtacaacgagctgaacctgggcagacgggaagagtacgacgtgctggacaagcggagaggcagggaccctgagatgggcggaaagccccagcggagaaagaacccccaggaaggactgtataacgaactccagaaagacaagatggccgaagcctacagcgagatcggcatgaagggcgagcggagaagaggcaagggccacgatggcctgtaccagggcctgagcaccgccaccaaggacacctatgacgccctgcacatgcaggccctgcctccaaga

SEQ ID NO: 27236 - DNA, 786 bp, synthetic construct
  source 1..786: mol_type = other DNA
atcgtgatctcccccagcggcaagtacaacgccgtgaagctggggaagtacgaggacagcaacagcgtgacctgctccgtgcagcacgacaacaagaccgtgcacagcaccgactttgaagtgaaaaccgactccaccgaccacgtgaagcccaaagagacagagaacaccaagcagcccagcaagagctgccacaagcccaaggccatcgtgcacaccgagaaagtgaacatgatgagcctgaccgtgctgggcctgcggatgctgttcgccaaaaccgtggccgtgaacttcctgctgaccgccaagctgttcttcctcaaacggggcagaaagaaactcctgtatatattcaaacaaccatttatgagaccagtacaaactactcaagaggaagatggctgtagctgccgatttccagaagaagaagaaggaggatgtgaactgagagtgaagttcagcagaagcgccgacgcccctgcctaccagcagggacagaaccaactgtacaacgagctgaacctgggcagacgggaagagtacgacgtgctggacaagcggagaggcagggaccctgagatgggcggaaagccccagcggagaaagaacccccaggaaggactgtataacgaactccagaaagacaagatggccgaagcctacagcgagatcggcatgaagggcgagcggagaagaggcaagggccacgatggcctgtaccagggcctgagcaccgccaccaaggacacctatgacgccctgcacatgcaggccctgcctccaaga

SEQ ID NO: 27237 - DNA, 783 bp, synthetic construct
  source 1..783: mol_type = other DNA
gtgatctcccccagcggcaagtacaacgccgtgaagctggggaagtacgaggacagcaacagcgtgacctgctccgtgcagcacgacaacaagaccgtgcacagcaccgactttgaagtgaaaaccgactccaccgaccacgtgaagcccaaagagacagagaacaccaagcagcccagcaagagctgccacaagcccaaggccatcgtgcacaccgagaaagtgaacatgatgagcctgaccgtgctgggcctgcggatgctgttcgccaaaaccgtggccgtgaacttcctgctgaccgccaagctgttcttcctcaaacggggcagaaagaaactcctgtatatattcaaacaaccatttatgagaccagtacaaactactcaagaggaagatggctgtagctgccgatttccagaagaagaagaaggaggatgtgaactgagagtgaagttcagcagaagcgccgacgcccctgcctaccagcagggacagaaccaactgtacaacgagctgaacctgggcagacgggaagagtacgacgtgctggacaagcggagaggcagggaccctgagatgggcggaaagccccagcggagaaagaacccccaggaaggactgtataacgaactccagaaagacaagatggccgaagcctacagcgagatcggcatgaagggcgagcggagaagaggcaagggccacgatggcctgtaccagggcctgagcaccgccaccaaggacacctatgacgccctgcacatgcaggccctgcctccaaga

SEQ ID NO: 27238 - DNA, 780 bp, synthetic construct
  source 1..780: mol_type = other DNA
atctcccccagcggcaagtacaacgccgtgaagctggggaagtacgaggacagcaacagcgtgacctgctccgtgcagcacgacaacaagaccgtgcacagcaccgactttgaagtgaaaaccgactccaccgaccacgtgaagcccaaagagacagagaacaccaagcagcccagcaagagctgccacaagcccaaggccatcgtgcacaccgagaaagtgaacatgatgagcctgaccgtgctgggcctgcggatgctgttcgccaaaaccgtggccgtgaacttcctgctgaccgccaagctgttcttcctcaaacggggcagaaagaaactcctgtatatattcaaacaaccatttatgagaccagtacaaactactcaagaggaagatggctgtagctgccgatttccagaagaagaagaaggaggatgtgaactgagagtgaagttcagcagaagcgccgacgcccctgcctaccagcagggacagaaccaactgtacaacgagctgaacctgggcagacgggaagagtacgacgtgctggacaagcggagaggcagggaccctgagatgggcggaaagccccagcggagaaagaacccccaggaaggactgtataacgaactccagaaagacaagatggccgaagcctacagcgagatcggcatgaagggcgagcggagaagaggcaagggccacgatggcctgtaccagggcctgagcaccgccaccaaggacacctatgacgccctgcacatgcaggccctgcctccaaga

SEQ ID NO: 27239 - DNA, 777 bp, synthetic construct
  source 1..777: mol_type = other DNA
tcccccagcggcaagtacaacgccgtgaagctggggaagtacgaggacagcaacagcgtgacctgctccgtgcagcacgacaacaagaccgtgcacagcaccgactttgaagtgaaaaccgactccaccgaccacgtgaagcccaaagagacagagaacaccaagcagcccagcaagagctgccacaagcccaaggccatcgtgcacaccgagaaagtgaacatgatgagcctgaccgtgctgggcctgcggatgctgttcgccaaaaccgtggccgtgaacttcctgctgaccgccaagctgttcttcctcaaacggggcagaaagaaactcctgtatatattcaaacaaccatttatgagaccagtacaaactactcaagaggaagatggctgtagctgccgatttccagaagaagaagaaggaggatgtgaactgagagtgaagttcagcagaagcgccgacgcccctgcctaccagcagggacagaaccaactgtacaacgagctgaacctgggcagacgggaagagtacgacgtgctggacaagcggagaggcagggaccctgagatgggcggaaagccccagcggagaaagaacccccaggaaggactgtataacgaactccagaaagacaagatggccgaagcctacagcgagatcggcatgaagggcgagcggagaagaggcaagggccacgatggcctgtaccagggcctgagcaccgccaccaaggacacctatgacgccctgcacatgcaggccctgcctccaaga

SEQ ID NO: 27240 - DNA, 774 bp, synthetic construct
  source 1..774: mol_type = other DNA
cccagcggcaagtacaacgccgtgaagctggggaagtacgaggacagcaacagcgtgacctgctccgtgcagcacgacaacaagaccgtgcacagcaccgactttgaagtgaaaaccgactccaccgaccacgtgaagcccaaagagacagagaacaccaagcagcccagcaagagctgccacaagcccaaggccatcgtgcacaccgagaaagtgaacatgatgagcctgaccgtgctgggcctgcggatgctgttcgccaaaaccgtggccgtgaacttcctgctgaccgccaagctgttcttcctcaaacggggcagaaagaaactcctgtatatattcaaacaaccatttatgagaccagtacaaactactcaagaggaagatggctgtagctgccgatttccagaagaagaagaaggaggatgtgaactgagagtgaagttcagcagaagcgccgacgcccctgcctaccagcagggacagaaccaactgtacaacgagctgaacctgggcagacgggaagagtacgacgtgctggacaagcggagaggcagggaccctgagatgggcggaaagccccagcggagaaagaacccccaggaaggactgtataacgaactccagaaagacaagatggccgaagcctacagcgagatcggcatgaagggcgagcggagaagaggcaagggccacgatggcctgtaccagggcctgagcaccgccaccaaggacacctatgacgccctgcacatgcaggccctgcctccaaga

SEQ ID NO: 27241 - DNA, 771 bp, synthetic construct
  source 1..771: mol_type = other DNA
agcggcaagtacaacgccgtgaagctggggaagtacgaggacagcaacagcgtgacctgctccgtgcagcacgacaacaagaccgtgcacagcaccgactttgaagtgaaaaccgactccaccgaccacgtgaagcccaaagagacagagaacaccaagcagcccagcaagagctgccacaagcccaaggccatcgtgcacaccgagaaagtgaacatgatgagcctgaccgtgctgggcctgcggatgctgttcgccaaaaccgtggccgtgaacttcctgctgaccgccaagctgttcttcctcaaacggggcagaaagaaactcctgtatatattcaaacaaccatttatgagaccagtacaaactactcaagaggaagatggctgtagctgccgatttccagaagaagaagaaggaggatgtgaactgagagtgaagttcagcagaagcgccgacgcccctgcctaccagcagggacagaaccaactgtacaacgagctgaacctgggcagacgggaagagtacgacgtgctggacaagcggagaggcagggaccctgagatgggcggaaagccccagcggagaaagaacccccaggaaggactgtataacgaactccagaaagacaagatggccgaagcctacagcgagatcggcatgaagggcgagcggagaagaggcaagggccacgatggcctgtaccagggcctgagcaccgccaccaaggacacctatgacgccctgcacatgcaggccctgcctccaaga

SEQ ID NO: 27242 - DNA, 768 bp, synthetic construct
  source 1..768: mol_type = other DNA
ggcaagtacaacgccgtgaagctggggaagtacgaggacagcaacagcgtgacctgctccgtgcagcacgacaacaagaccgtgcacagcaccgactttgaagtgaaaaccgactccaccgaccacgtgaagcccaaagagacagagaacaccaagcagcccagcaagagctgccacaagcccaaggccatcgtgcacaccgagaaagtgaacatgatgagcctgaccgtgctgggcctgcggatgctgttcgccaaaaccgtggccgtgaacttcctgctgaccgccaagctgttcttcctcaaacggggcagaaagaaactcctgtatatattcaaacaaccatttatgagaccagtacaaactactcaagaggaagatggctgtagctgccgatttccagaagaagaagaaggaggatgtgaactgagagtgaagttcagcagaagcgccgacgcccctgcctaccagcagggacagaaccaactgtacaacgagctgaacctgggcagacgggaagagtacgacgtgctggacaagcggagaggcagggaccctgagatgggcggaaagccccagcggagaaagaacccccaggaaggactgtataacgaactccagaaagacaagatggccgaagcctacagcgagatcggcatgaagggcgagcggagaagaggcaagggccacgatggcctgtaccagggcctgagcaccgccaccaaggacacctatgacgccctgcacatgcaggccctgcctccaaga

SEQ ID NO: 27243 - DNA, 765 bp, synthetic construct
  source 1..765: mol_type = other DNA
aagtacaacgccgtgaagctggggaagtacgaggacagcaacagcgtgacctgctccgtgcagcacgacaacaagaccgtgcacagcaccgactttgaagtgaaaaccgactccaccgaccacgtgaagcccaaagagacagagaacaccaagcagcccagcaagagctgccacaagcccaaggccatcgtgcacaccgagaaagtgaacatgatgagcctgaccgtgctgggcctgcggatgctgttcgccaaaaccgtggccgtgaacttcctgctgaccgccaagctgttcttcctcaaacggggcagaaagaaactcctgtatatattcaaacaaccatttatgagaccagtacaaactactcaagaggaagatggctgtagctgccgatttccagaagaagaagaaggaggatgtgaactgagagtgaagttcagcagaagcgccgacgcccctgcctaccagcagggacagaaccaactgtacaacgagctgaacctgggcagacgggaagagtacgacgtgctggacaagcggagaggcagggaccctgagatgggcggaaagccccagcggagaaagaacccccaggaaggactgtataacgaactccagaaagacaagatggccgaagcctacagcgagatcggcatgaagggcgagcggagaagaggcaagggccacgatggcctgtaccagggcctgagcaccgccaccaaggacacctatgacgccctgcacatgcaggccctgcctccaaga

SEQ ID NO: 27244 - DNA, 762 bp, synthetic construct
  source 1..762: mol_type = other DNA
tacaacgccgtgaagctggggaagtacgaggacagcaacagcgtgacctgctccgtgcagcacgacaacaagaccgtgcacagcaccgactttgaagtgaaaaccgactccaccgaccacgtgaagcccaaagagacagagaacaccaagcagcccagcaagagctgccacaagcccaaggccatcgtgcacaccgagaaagtgaacatgatgagcctgaccgtgctgggcctgcggatgctgttcgccaaaaccgtggccgtgaacttcctgctgaccgccaagctgttcttcctcaaacggggcagaaagaaactcctgtatatattcaaacaaccatttatgagaccagtacaaactactcaagaggaagatggctgtagctgccgatttccagaagaagaagaaggaggatgtgaactgagagtgaagttcagcagaagcgccgacgcccctgcctaccagcagggacagaaccaactgtacaacgagctgaacctgggcagacgggaagagtacgacgtgctggacaagcggagaggcagggaccctgagatgggcggaaagccccagcggagaaagaacccccaggaaggactgtataacgaactccagaaagacaagatggccgaagcctacagcgagatcggcatgaagggcgagcggagaagaggcaagggccacgatggcctgtaccagggcctgagcaccgccaccaaggacacctatgacgccctgcacatgcaggccctgcctccaaga

SEQ ID NO: 27245 - DNA, 759 bp, synthetic construct
  source 1..759: mol_type = other DNA
aacgccgtgaagctggggaagtacgaggacagcaacagcgtgacctgctccgtgcagcacgacaacaagaccgtgcacagcaccgactttgaagtgaaaaccgactccaccgaccacgtgaagcccaaagagacagagaacaccaagcagcccagcaagagctgccacaagcccaaggccatcgtgcacaccgagaaagtgaacatgatgagcctgaccgtgctgggcctgcggatgctgttcgccaaaaccgtggccgtgaacttcctgctgaccgccaagctgttcttcctcaaacggggcagaaagaaactcctgtatatattcaaacaaccatttatgagaccagtacaaactactcaagaggaagatggctgtagctgccgatttccagaagaagaagaaggaggatgtgaactgagagtgaagttcagcagaagcgccgacgcccctgcctaccagcagggacagaaccaactgtacaacgagctgaacctgggcagacgggaagagtacgacgtgctggacaagcggagaggcagggaccctgagatgggcggaaagccccagcggagaaagaacccccaggaaggactgtataacgaactccagaaagacaagatggccgaagcctacagcgagatcggcatgaagggcgagcggagaagaggcaagggccacgatggcctgtaccagggcctgagcaccgccaccaaggacacctatgacgccctgcacatgcaggccctgcctccaaga

SEQ ID NO: 27246 - DNA, 756 bp, synthetic construct
  source 1..756: mol_type = other DNA
gccgtgaagctggggaagtacgaggacagcaacagcgtgacctgctccgtgcagcacgacaacaagaccgtgcacagcaccgactttgaagtgaaaaccgactccaccgaccacgtgaagcccaaagagacagagaacaccaagcagcccagcaagagctgccacaagcccaaggccatcgtgcacaccgagaaagtgaacatgatgagcctgaccgtgctgggcctgcggatgctgttcgccaaaaccgtggccgtgaacttcctgctgaccgccaagctgttcttcctcaaacggggcagaaagaaactcctgtatatattcaaacaaccatttatgagaccagtacaaactactcaagaggaagatggctgtagctgccgatttccagaagaagaagaaggaggatgtgaactgagagtgaagttcagcagaagcgccgacgcccctgcctaccagcagggacagaaccaactgtacaacgagctgaacctgggcagacgggaagagtacgacgtgctggacaagcggagaggcagggaccctgagatgggcggaaagccccagcggagaaagaacccccaggaaggactgtataacgaactccagaaagacaagatggccgaagcctacagcgagatcggcatgaagggcgagcggagaagaggcaagggccacgatggcctgtaccagggcctgagcaccgccaccaaggacacctatgacgccctgcacatgcaggccctgcctccaaga

SEQ ID NO: 27247 - DNA, 753 bp, synthetic construct
  source 1..753: mol_type = other DNA
gtgaagctggggaagtacgaggacagcaacagcgtgacctgctccgtgcagcacgacaacaagaccgtgcacagcaccgactttgaagtgaaaaccgactccaccgaccacgtgaagcccaaagagacagagaacaccaagcagcccagcaagagctgccacaagcccaaggccatcgtgcacaccgagaaagtgaacatgatgagcctgaccgtgctgggcctgcggatgctgttcgccaaaaccgtggccgtgaacttcctgctgaccgccaagctgttcttcctcaaacggggcagaaagaaactcctgtatatattcaaacaaccatttatgagaccagtacaaactactcaagaggaagatggctgtagctgccgatttccagaagaagaagaaggaggatgtgaactgagagtgaagttcagcagaagcgccgacgcccctgcctaccagcagggacagaaccaactgtacaacgagctgaacctgggcagacgggaagagtacgacgtgctggacaagcggagaggcagggaccctgagatgggcggaaagccccagcggagaaagaacccccaggaaggactgtataacgaactccagaaagacaagatggccgaagcctacagcgagatcggcatgaagggcgagcggagaagaggcaagggccacgatggcctgtaccagggcctgagcaccgccaccaaggacacctatgacgccctgcacatgcaggccctgcctccaaga

SEQ ID NO: 27248 - DNA, 750 bp, synthetic construct
  source 1..750: mol_type = other DNA
aagctggggaagtacgaggacagcaacagcgtgacctgctccgtgcagcacgacaacaagaccgtgcacagcaccgactttgaagtgaaaaccgactccaccgaccacgtgaagcccaaagagacagagaacaccaagcagcccagcaagagctgccacaagcccaaggccatcgtgcacaccgagaaagtgaacatgatgagcctgaccgtgctgggcctgcggatgctgttcgccaaaaccgtggccgtgaacttcctgctgaccgccaagctgttcttcctcaaacggggcagaaagaaactcctgtatatattcaaacaaccatttatgagaccagtacaaactactcaagaggaagatggctgtagctgccgatttccagaagaagaagaaggaggatgtgaactgagagtgaagttcagcagaagcgccgacgcccctgcctaccagcagggacagaaccaactgtacaacgagctgaacctgggcagacgggaagagtacgacgtgctggacaagcggagaggcagggaccctgagatgggcggaaagccccagcggagaaagaacccccaggaaggactgtataacgaactccagaaagacaagatggccgaagcctacagcgagatcggcatgaagggcgagcggagaagaggcaagggccacgatggcctgtaccagggcctgagcaccgccaccaaggacacctatgacgccctgcacatgcaggccctgcctccaaga

SEQ ID NO: 27249 - DNA, 747 bp, synthetic construct
  source 1..747: mol_type = other DNA
ctggggaagtacgaggacagcaacagcgtgacctgctccgtgcagcacgacaacaagaccgtgcacagcaccgactttgaagtgaaaaccgactccaccgaccacgtgaagcccaaagagacagagaacaccaagcagcccagcaagagctgccacaagcccaaggccatcgtgcacaccgagaaagtgaacatgatgagcctgaccgtgctgggcctgcggatgctgttcgccaaaaccgtggccgtgaacttcctgctgaccgccaagctgttcttcctcaaacggggcagaaagaaactcctgtatatattcaaacaaccatttatgagaccagtacaaactactcaagaggaagatggctgtagctgccgatttccagaagaagaagaaggaggatgtgaactgagagtgaagttcagcagaagcgccgacgcccctgcctaccagcagggacagaaccaactgtacaacgagctgaacctgggcagacgggaagagtacgacgtgctggacaagcggagaggcagggaccctgagatgggcggaaagccccagcggagaaagaacccccaggaaggactgtataacgaactccagaaagacaagatggccgaagcctacagcgagatcggcatgaagggcgagcggagaagaggcaagggccacgatggcctgtaccagggcctgagcaccgccaccaaggacacctatgacgccctgcacatgcaggccctgcctccaaga

SEQ ID NO: 27250 - DNA, 744 bp, synthetic construct
  source 1..744: mol_type = other DNA
gggaagtacgaggacagcaacagcgtgacctgctccgtgcagcacgacaacaagaccgtgcacagcaccgactttgaagtgaaaaccgactccaccgaccacgtgaagcccaaagagacagagaacaccaagcagcccagcaagagctgccacaagcccaaggccatcgtgcacaccgagaaagtgaacatgatgagcctgaccgtgctgggcctgcggatgctgttcgccaaaaccgtggccgtgaacttcctgctgaccgccaagctgttcttcctcaaacggggcagaaagaaactcctgtatatattcaaacaaccatttatgagaccagtacaaactactcaagaggaagatggctgtagctgccgatttccagaagaagaagaaggaggatgtgaactgagagtgaagttcagcagaagcgccgacgcccctgcctaccagcagggacagaaccaactgtacaacgagctgaacctgggcagacgggaagagtacgacgtgctggacaagcggagaggcagggaccctgagatgggcggaaagccccagcggagaaagaacccccaggaaggactgtataacgaactccagaaagacaagatggccgaagcctacagcgagatcggcatgaagggcgagcggagaagaggcaagggccacgatggcctgtaccagggcctgagcaccgccaccaaggacacctatgacgccctgcacatgcaggccctgcctccaaga

SEQ ID NO: 27251 - DNA, 741 bp, synthetic construct
  source 1..741: mol_type = other DNA
aagtacgaggacagcaacagcgtgacctgctccgtgcagcacgacaacaagaccgtgcacagcaccgactttgaagtgaaaaccgactccaccgaccacgtgaagcccaaagagacagagaacaccaagcagcccagcaagagctgccacaagcccaaggccatcgtgcacaccgagaaagtgaacatgatgagcctgaccgtgctgggcctgcggatgctgttcgccaaaaccgtggccgtgaacttcctgctgaccgccaagctgttcttcctcaaacggggcagaaagaaactcctgtatatattcaaacaaccatttatgagaccagtacaaactactcaagaggaagatggctgtagctgccgatttccagaagaagaagaaggaggatgtgaactgagagtgaagttcagcagaagcgccgacgcccctgcctaccagcagggacagaaccaactgtacaacgagctgaacctgggcagacgggaagagtacgacgtgctggacaagcggagaggcagggaccctgagatgggcggaaagccccagcggagaaagaacccccaggaaggactgtataacgaactccagaaagacaagatggccgaagcctacagcgagatcggcatgaagggcgagcggagaagaggcaagggccacgatggcctgtaccagggcctgagcaccgccaccaaggacacctatgacgccctgcacatgcaggccctgcctccaaga

SEQ ID NO: 27252 - DNA, 738 bp, synthetic construct
  source 1..738: mol_type = other DNA
tacgaggacagcaacagcgtgacctgctccgtgcagcacgacaacaagaccgtgcacagcaccgactttgaagtgaaaaccgactccaccgaccacgtgaagcccaaagagacagagaacaccaagcagcccagcaagagctgccacaagcccaaggccatcgtgcacaccgagaaagtgaacatgatgagcctgaccgtgctgggcctgcggatgctgttcgccaaaaccgtggccgtgaacttcctgctgaccgccaagctgttcttcctcaaacggggcagaaagaaactcctgtatatattcaaacaaccatttatgagaccagtacaaactactcaagaggaagatggctgtagctgccgatttccagaagaagaagaaggaggatgtgaactgagagtgaagttcagcagaagcgccgacgcccctgcctaccagcagggacagaaccaactgtacaacgagctgaacctgggcagacgggaagagtacgacgtgctggacaagcggagaggcagggaccctgagatgggcggaaagccccagcggagaaagaacccccaggaaggactgtataacgaactccagaaagacaagatggccgaagcctacagcgagatcggcatgaagggcgagcggagaagaggcaagggccacgatggcctgtaccagggcctgagcaccgccaccaaggacacctatgacgccctgcacatgcaggccctgcctccaaga

SEQ ID NO: 27253 - DNA, 735 bp, synthetic construct
  source 1..735: mol_type = other DNA
gaggacagcaacagcgtgacctgctccgtgcagcacgacaacaagaccgtgcacagcaccgactttgaagtgaaaaccgactccaccgaccacgtgaagcccaaagagacagagaacaccaagcagcccagcaagagctgccacaagcccaaggccatcgtgcacaccgagaaagtgaacatgatgagcctgaccgtgctgggcctgcggatgctgttcgccaaaaccgtggccgtgaacttcctgctgaccgccaagctgttcttcctcaaacggggcagaaagaaactcctgtatatattcaaacaaccatttatgagaccagtacaaactactcaagaggaagatggctgtagctgccgatttccagaagaagaagaaggaggatgtgaactgagagtgaagttcagcagaagcgccgacgcccctgcctaccagcagggacagaaccaactgtacaacgagctgaacctgggcagacgggaagagtacgacgtgctggacaagcggagaggcagggaccctgagatgggcggaaagccccagcggagaaagaacccccaggaaggactgtataacgaactccagaaagacaagatggccgaagcctacagcgagatcggcatgaagggcgagcggagaagaggcaagggccacgatggcctgtaccagggcctgagcaccgccaccaaggacacctatgacgccctgcacatgcaggccctgcctccaaga

SEQ ID NO: 27254 - DNA, 732 bp, synthetic construct
  source 1..732: mol_type = other DNA
gacagcaacagcgtgacctgctccgtgcagcacgacaacaagaccgtgcacagcaccgactttgaagtgaaaaccgactccaccgaccacgtgaagcccaaagagacagagaacaccaagcagcccagcaagagctgccacaagcccaaggccatcgtgcacaccgagaaagtgaacatgatgagcctgaccgtgctgggcctgcggatgctgttcgccaaaaccgtggccgtgaacttcctgctgaccgccaagctgttcttcctcaaacggggcagaaagaaactcctgtatatattcaaacaaccatttatgagaccagtacaaactactcaagaggaagatggctgtagctgccgatttccagaagaagaagaaggaggatgtgaactgagagtgaagttcagcagaagcgccgacgcccctgcctaccagcagggacagaaccaactgtacaacgagctgaacctgggcagacgggaagagtacgacgtgctggacaagcggagaggcagggaccctgagatgggcggaaagccccagcggagaaagaacccccaggaaggactgtataacgaactccagaaagacaagatggccgaagcctacagcgagatcggcatgaagggcgagcggagaagaggcaagggccacgatggcctgtaccagggcctgagcaccgccaccaaggacacctatgacgccctgcacatgcaggccctgcctccaaga

SEQ ID NO: 27255 - DNA, 729 bp, synthetic construct
  source 1..729: mol_type = other DNA
agcaacagcgtgacctgctccgtgcagcacgacaacaagaccgtgcacagcaccgactttgaagtgaaaaccgactccaccgaccacgtgaagcccaaagagacagagaacaccaagcagcccagcaagagctgccacaagcccaaggccatcgtgcacaccgagaaagtgaacatgatgagcctgaccgtgctgggcctgcggatgctgttcgccaaaaccgtggccgtgaacttcctgctgaccgccaagctgttcttcctcaaacggggcagaaagaaactcctgtatatattcaaacaaccatttatgagaccagtacaaactactcaagaggaagatggctgtagctgccgatttccagaagaagaagaaggaggatgtgaactgagagtgaagttcagcagaagcgccgacgcccctgcctaccagcagggacagaaccaactgtacaacgagctgaacctgggcagacgggaagagtacgacgtgctggacaagcggagaggcagggaccctgagatgggcggaaagccccagcggagaaagaacccccaggaaggactgtataacgaactccagaaagacaagatggccgaagcctacagcgagatcggcatgaagggcgagcggagaagaggcaagggccacgatggcctgtaccagggcctgagcaccgccaccaaggacacctatgacgccctgcacatgcaggccctgcctccaaga

SEQ ID NO: 27256 - DNA, 726 bp, synthetic construct
  source 1..726: mol_type = other DNA
aacagcgtgacctgctccgtgcagcacgacaacaagaccgtgcacagcaccgactttgaagtgaaaaccgactccaccgaccacgtgaagcccaaagagacagagaacaccaagcagcccagcaagagctgccacaagcccaaggccatcgtgcacaccgagaaagtgaacatgatgagcctgaccgtgctgggcctgcggatgctgttcgccaaaaccgtggccgtgaacttcctgctgaccgccaagctgttcttcctcaaacggggcagaaagaaactcctgtatatattcaaacaaccatttatgagaccagtacaaactactcaagaggaagatggctgtagctgccgatttccagaagaagaagaaggaggatgtgaactgagagtgaagttcagcagaagcgccgacgcccctgcctaccagcagggacagaaccaactgtacaacgagctgaacctgggcagacgggaagagtacgacgtgctggacaagcggagaggcagggaccctgagatgggcggaaagccccagcggagaaagaacccccaggaaggactgtataacgaactccagaaagacaagatggccgaagcctacagcgagatcggcatgaagggcgagcggagaagaggcaagggccacgatggcctgtaccagggcctgagcaccgccaccaaggacacctatgacgccctgcacatgcaggccctgcctccaaga

SEQ ID NO: 27257 - DNA, 723 bp, synthetic construct
  source 1..723: mol_type = other DNA
agcgtgacctgctccgtgcagcacgacaacaagaccgtgcacagcaccgactttgaagtgaaaaccgactccaccgaccacgtgaagcccaaagagacagagaacaccaagcagcccagcaagagctgccacaagcccaaggccatcgtgcacaccgagaaagtgaacatgatgagcctgaccgtgctgggcctgcggatgctgttcgccaaaaccgtggccgtgaacttcctgctgaccgccaagctgttcttcctcaaacggggcagaaagaaactcctgtatatattcaaacaaccatttatgagaccagtacaaactactcaagaggaagatggctgtagctgccgatttccagaagaagaagaaggaggatgtgaactgagagtgaagttcagcagaagcgccgacgcccctgcctaccagcagggacagaaccaactgtacaacgagctgaacctgggcagacgggaagagtacgacgtgctggacaagcggagaggcagggaccctgagatgggcggaaagccccagcggagaaagaacccccaggaaggactgtataacgaactccagaaagacaagatggccgaagcctacagcgagatcggcatgaagggcgagcggagaagaggcaagggccacgatggcctgtaccagggcctgagcaccgccaccaaggacacctatgacgccctgcacatgcaggccctgcctccaaga

SEQ ID NO: 27258 - DNA, 720 bp, synthetic construct
  source 1..720: mol_type = other DNA
gtgacctgctccgtgcagcacgacaacaagaccgtgcacagcaccgactttgaagtgaaaaccgactccaccgaccacgtgaagcccaaagagacagagaacaccaagcagcccagcaagagctgccacaagcccaaggccatcgtgcacaccgagaaagtgaacatgatgagcctgaccgtgctgggcctgcggatgctgttcgccaaaaccgtggccgtgaacttcctgctgaccgccaagctgttcttcctcaaacggggcagaaagaaactcctgtatatattcaaacaaccatttatgagaccagtacaaactactcaagaggaagatggctgtagctgccgatttccagaagaagaagaaggaggatgtgaactgagagtgaagttcagcagaagcgccgacgcccctgcctaccagcagggacagaaccaactgtacaacgagctgaacctgggcagacgggaagagtacgacgtgctggacaagcggagaggcagggaccctgagatgggcggaaagccccagcggagaaagaacccccaggaaggactgtataacgaactccagaaagacaagatggccgaagcctacagcgagatcggcatgaagggcgagcggagaagaggcaagggccacgatggcctgtaccagggcctgagcaccgccaccaaggacacctatgacgccctgcacatgcaggccctgcctccaaga

SEQ ID NO: 27259 - DNA, 717 bp, synthetic construct
  source 1..717: mol_type = other DNA
acctgctccgtgcagcacgacaacaagaccgtgcacagcaccgactttgaagtgaaaaccgactccaccgaccacgtgaagcccaaagagacagagaacaccaagcagcccagcaagagctgccacaagcccaaggccatcgtgcacaccgagaaagtgaacatgatgagcctgaccgtgctgggcctgcggatgctgttcgccaaaaccgtggccgtgaacttcctgctgaccgccaagctgttcttcctcaaacggggcagaaagaaactcctgtatatattcaaacaaccatttatgagaccagtacaaactactcaagaggaagatggctgtagctgccgatttccagaagaagaagaaggaggatgtgaactgagagtgaagttcagcagaagcgccgacgcccctgcctaccagcagggacagaaccaactgtacaacgagctgaacctgggcagacgggaagagtacgacgtgctggacaagcggagaggcagggaccctgagatgggcggaaagccccagcggagaaagaacccccaggaaggactgtataacgaactccagaaagacaagatggccgaagcctacagcgagatcggcatgaagggcgagcggagaagaggcaagggccacgatggcctgtaccagggcctgagcaccgccaccaaggacacctatgacgccctgcacatgcaggccctgcctccaaga

SEQ ID NO: 27260 - DNA, 714 bp, synthetic construct
  source 1..714: mol_type = other DNA
tgctccgtgcagcacgacaacaagaccgtgcacagcaccgactttgaagtgaaaaccgactccaccgaccacgtgaagcccaaagagacagagaacaccaagcagcccagcaagagctgccacaagcccaaggccatcgtgcacaccgagaaagtgaacatgatgagcctgaccgtgctgggcctgcggatgctgttcgccaaaaccgtggccgtgaacttcctgctgaccgccaagctgttcttcctcaaacggggcagaaagaaactcctgtatatattcaaacaaccatttatgagaccagtacaaactactcaagaggaagatggctgtagctgccgatttccagaagaagaagaaggaggatgtgaactgagagtgaagttcagcagaagcgccgacgcccctgcctaccagcagggacagaaccaactgtacaacgagctgaacctgggcagacgggaagagtacgacgtgctggacaagcggagaggcagggaccctgagatgggcggaaagccccagcggagaaagaacccccaggaaggactgtataacgaactccagaaagacaagatggccgaagcctacagcgagatcggcatgaagggcgagcggagaagaggcaagggccacgatggcctgtaccagggcctgagcaccgccaccaaggacacctatgacgccctgcacatgcaggccctgcctccaaga

SEQ ID NO: 27261 - DNA, 711 bp, synthetic construct
  source 1..711: mol_type = other DNA
tccgtgcagcacgacaacaagaccgtgcacagcaccgactttgaagtgaaaaccgactccaccgaccacgtgaagcccaaagagacagagaacaccaagcagcccagcaagagctgccacaagcccaaggccatcgtgcacaccgagaaagtgaacatgatgagcctgaccgtgctgggcctgcggatgctgttcgccaaaaccgtggccgtgaacttcctgctgaccgccaagctgttcttcctcaaacggggcagaaagaaactcctgtatatattcaaacaaccatttatgagaccagtacaaactactcaagaggaagatggctgtagctgccgatttccagaagaagaagaaggaggatgtgaactgagagtgaagttcagcagaagcgccgacgcccctgcctaccagcagggacagaaccaactgtacaacgagctgaacctgggcagacgggaagagtacgacgtgctggacaagcggagaggcagggaccctgagatgggcggaaagccccagcggagaaagaacccccaggaaggactgtataacgaactccagaaagacaagatggccgaagcctacagcgagatcggcatgaagggcgagcggagaagaggcaagggccacgatggcctgtaccagggcctgagcaccgccaccaaggacacctatgacgccctgcacatgcaggccctgcctccaaga

SEQ ID NO: 27262 - DNA, 708 bp, synthetic construct
  source 1..708: mol_type = other DNA
gtgcagcacgacaacaagaccgtgcacagcaccgactttgaagtgaaaaccgactccaccgaccacgtgaagcccaaagagacagagaacaccaagcagcccagcaagagctgccacaagcccaaggccatcgtgcacaccgagaaagtgaacatgatgagcctgaccgtgctgggcctgcggatgctgttcgccaaaaccgtggccgtgaacttcctgctgaccgccaagctgttcttcctcaaacggggcagaaagaaactcctgtatatattcaaacaaccatttatgagaccagtacaaactactcaagaggaagatggctgtagctgccgatttccagaagaagaagaaggaggatgtgaactgagagtgaagttcagcagaagcgccgacgcccctgcctaccagcagggacagaaccaactgtacaacgagctgaacctgggcagacgggaagagtacgacgtgctggacaagcggagaggcagggaccctgagatgggcggaaagccccagcggagaaagaacccccaggaaggactgtataacgaactccagaaagacaagatggccgaagcctacagcgagatcggcatgaagggcgagcggagaagaggcaagggccacgatggcctgtaccagggcctgagcaccgccaccaaggacacctatgacgccctgcacatgcaggccctgcctccaaga

SEQ ID NO: 27263 - DNA, 705 bp, synthetic construct
  source 1..705: mol_type = other DNA
cagcacgacaacaagaccgtgcacagcaccgactttgaagtgaaaaccgactccaccgaccacgtgaagcccaaagagacagagaacaccaagcagcccagcaagagctgccacaagcccaaggccatcgtgcacaccgagaaagtgaacatgatgagcctgaccgtgctgggcctgcggatgctgttcgccaaaaccgtggccgtgaacttcctgctgaccgccaagctgttcttcctcaaacggggcagaaagaaactcctgtatatattcaaacaaccatttatgagaccagtacaaactactcaagaggaagatggctgtagctgccgatttccagaagaagaagaaggaggatgtgaactgagagtgaagttcagcagaagcgccgacgcccctgcctaccagcagggacagaaccaactgtacaacgagctgaacctgggcagacgggaagagtacgacgtgctggacaagcggagaggcagggaccctgagatgggcggaaagccccagcggagaaagaacccccaggaaggactgtataacgaactccagaaagacaagatggccgaagcctacagcgagatcggcatgaagggcgagcggagaagaggcaagggccacgatggcctgtaccagggcctgagcaccgccaccaaggacacctatgacgccctgcacatgcaggccctgcctccaaga

SEQ ID NO: 27264 - DNA, 702 bp, synthetic construct
  source 1..702: mol_type = other DNA
cacgacaacaagaccgtgcacagcaccgactttgaagtgaaaaccgactccaccgaccacgtgaagcccaaagagacagagaacaccaagcagcccagcaagagctgccacaagcccaaggccatcgtgcacaccgagaaagtgaacatgatgagcctgaccgtgctgggcctgcggatgctgttcgccaaaaccgtggccgtgaacttcctgctgaccgccaagctgttcttcctcaaacggggcagaaagaaactcctgtatatattcaaacaaccatttatgagaccagtacaaactactcaagaggaagatggctgtagctgccgatttccagaagaagaagaaggaggatgtgaactgagagtgaagttcagcagaagcgccgacgcccctgcctaccagcagggacagaaccaactgtacaacgagctgaacctgggcagacgggaagagtacgacgtgctggacaagcggagaggcagggaccctgagatgggcggaaagccccagcggagaaagaacccccaggaaggactgtataacgaactccagaaagacaagatggccgaagcctacagcgagatcggcatgaagggcgagcggagaagaggcaagggccacgatggcctgtaccagggcctgagcaccgccaccaaggacacctatgacgccctgcacatgcaggccctgcctccaaga

SEQ ID NO: 27265 - DNA, 699 bp, synthetic construct
  source 1..699: mol_type = other DNA
gacaacaagaccgtgcacagcaccgactttgaagtgaaaaccgactccaccgaccacgtgaagcccaaagagacagagaacaccaagcagcccagcaagagctgccacaagcccaaggccatcgtgcacaccgagaaagtgaacatgatgagcctgaccgtgctgggcctgcggatgctgttcgccaaaaccgtggccgtgaacttcctgctgaccgccaagctgttcttcctcaaacggggcagaaagaaactcctgtatatattcaaacaaccatttatgagaccagtacaaactactcaagaggaagatggctgtagctgccgatttccagaagaagaagaaggaggatgtgaactgagagtgaagttcagcagaagcgccgacgcccctgcctaccagcagggacagaaccaactgtacaacgagctgaacctgggcagacgggaagagtacgacgtgctggacaagcggagaggcagggaccctgagatgggcggaaagccccagcggagaaagaacccccaggaaggactgtataacgaactccagaaagacaagatggccgaagcctacagcgagatcggcatgaagggcgagcggagaagaggcaagggccacgatggcctgtaccagggcctgagcaccgccaccaaggacacctatgacgccctgcacatgcaggccctgcctccaaga

SEQ ID NO: 27266 - DNA, 696 bp, synthetic construct
  source 1..696: mol_type = other DNA
aacaagaccgtgcacagcaccgactttgaagtgaaaaccgactccaccgaccacgtgaagcccaaagagacagagaacaccaagcagcccagcaagagctgccacaagcccaaggccatcgtgcacaccgagaaagtgaacatgatgagcctgaccgtgctgggcctgcggatgctgttcgccaaaaccgtggccgtgaacttcctgctgaccgccaagctgttcttcctcaaacggggcagaaagaaactcctgtatatattcaaacaaccatttatgagaccagtacaaactactcaagaggaagatggctgtagctgccgatttccagaagaagaagaaggaggatgtgaactgagagtgaagttcagcagaagcgccgacgcccctgcctaccagcagggacagaaccaactgtacaacgagctgaacctgggcagacgggaagagtacgacgtgctggacaagcggagaggcagggaccctgagatgggcggaaagccccagcggagaaagaacccccaggaaggactgtataacgaactccagaaagacaagatggccgaagcctacagcgagatcggcatgaagggcgagcggagaagaggcaagggccacgatggcctgtaccagggcctgagcaccgccaccaaggacacctatgacgccctgcacatgcaggccctgcctccaaga

SEQ ID NO: 27267 - DNA, 693 bp, synthetic construct
  source 1..693: mol_type = other DNA
aagaccgtgcacagcaccgactttgaagtgaaaaccgactccaccgaccacgtgaagcccaaagagacagagaacaccaagcagcccagcaagagctgccacaagcccaaggccatcgtgcacaccgagaaagtgaacatgatgagcctgaccgtgctgggcctgcggatgctgttcgccaaaaccgtggccgtgaacttcctgctgaccgccaagctgttcttcctcaaacggggcagaaagaaactcctgtatatattcaaacaaccatttatgagaccagtacaaactactcaagaggaagatggctgtagctgccgatttccagaagaagaagaaggaggatgtgaactgagagtgaagttcagcagaagcgccgacgcccctgcctaccagcagggacagaaccaactgtacaacgagctgaacctgggcagacgggaagagtacgacgtgctggacaagcggagaggcagggaccctgagatgggcggaaagccccagcggagaaagaacccccaggaaggactgtataacgaactccagaaagacaagatggccgaagcctacagcgagatcggcatgaagggcgagcggagaagaggcaagggccacgatggcctgtaccagggcctgagcaccgccaccaaggacacctatgacgccctgcacatgcaggccctgcctccaaga

SEQ ID NO: 27268 - DNA, 690 bp, synthetic construct
  source 1..690: mol_type = other DNA
accgtgcacagcaccgactttgaagtgaaaaccgactccaccgaccacgtgaagcccaaagagacagagaacaccaagcagcccagcaagagctgccacaagcccaaggccatcgtgcacaccgagaaagtgaacatgatgagcctgaccgtgctgggcctgcggatgctgttcgccaaaaccgtggccgtgaacttcctgctgaccgccaagctgttcttcctcaaacggggcagaaagaaactcctgtatatattcaaacaaccatttatgagaccagtacaaactactcaagaggaagatggctgtagctgccgatttccagaagaagaagaaggaggatgtgaactgagagtgaagttcagcagaagcgccgacgcccctgcctaccagcagggacagaaccaactgtacaacgagctgaacctgggcagacgggaagagtacgacgtgctggacaagcggagaggcagggaccctgagatgggcggaaagccccagcggagaaagaacccccaggaaggactgtataacgaactccagaaagacaagatggccgaagcctacagcgagatcggcatgaagggcgagcggagaagaggcaagggccacgatggcctgtaccagggcctgagcaccgccaccaaggacacctatgacgccctgcacatgcaggccctgcctccaaga

SEQ ID NO: 27269 - DNA, 687 bp, synthetic construct
  source 1..687: mol_type = other DNA
gtgcacagcaccgactttgaagtgaaaaccgactccaccgaccacgtgaagcccaaagagacagagaacaccaagcagcccagcaagagctgccacaagcccaaggccatcgtgcacaccgagaaagtgaacatgatgagcctgaccgtgctgggcctgcggatgctgttcgccaaaaccgtggccgtgaacttcctgctgaccgccaagctgttcttcctcaaacggggcagaaagaaactcctgtatatattcaaacaaccatttatgagaccagtacaaactactcaagaggaagatggctgtagctgccgatttccagaagaagaagaaggaggatgtgaactgagagtgaagttcagcagaagcgccgacgcccctgcctaccagcagggacagaaccaactgtacaacgagctgaacctgggcagacgggaagagtacgacgtgctggacaagcggagaggcagggaccctgagatgggcggaaagccccagcggagaaagaacccccaggaaggactgtataacgaactccagaaagacaagatggccgaagcctacagcgagatcggcatgaagggcgagcggagaagaggcaagggccacgatggcctgtaccagggcctgagcaccgccaccaaggacacctatgacgccctgcacatgcaggccctgcctccaaga

SEQ ID NO: 27270 - DNA, 684 bp, synthetic construct
  source 1..684: mol_type = other DNA
cacagcaccgactttgaagtgaaaaccgactccaccgaccacgtgaagcccaaagagacagagaacaccaagcagcccagcaagagctgccacaagcccaaggccatcgtgcacaccgagaaagtgaacatgatgagcctgaccgtgctgggcctgcggatgctgttcgccaaaaccgtggccgtgaacttcctgctgaccgccaagctgttcttcctcaaacggggcagaaagaaactcctgtatatattcaaacaaccatttatgagaccagtacaaactactcaagaggaagatggctgtagctgccgatttccagaagaagaagaaggaggatgtgaactgagagtgaagttcagcagaagcgccgacgcccctgcctaccagcagggacagaaccaactgtacaacgagctgaacctgggcagacgggaagagtacgacgtgctggacaagcggagaggcagggaccctgagatgggcggaaagccccagcggagaaagaacccccaggaaggactgtataacgaactccagaaagacaagatggccgaagcctacagcgagatcggcatgaagggcgagcggagaagaggcaagggccacgatggcctgtaccagggcctgagcaccgccaccaaggacacctatgacgccctgcacatgcaggccctgcctccaaga

SEQ ID NO: 27271 - DNA, 681 bp, synthetic construct
  source 1..681: mol_type = other DNA
agcaccgactttgaagtgaaaaccgactccaccgaccacgtgaagcccaaagagacagagaacaccaagcagcccagcaagagctgccacaagcccaaggccatcgtgcacaccgagaaagtgaacatgatgagcctgaccgtgctgggcctgcggatgctgttcgccaaaaccgtggccgtgaacttcctgctgaccgccaagctgttcttcctcaaacggggcagaaagaaactcctgtatatattcaaacaaccatttatgagaccagtacaaactactcaagaggaagatggctgtagctgccgatttccagaagaagaagaaggaggatgtgaactgagagtgaagttcagcagaagcgccgacgcccctgcctaccagcagggacagaaccaactgtacaacgagctgaacctgggcagacgggaagagtacgacgtgctggacaagcggagaggcagggaccctgagatgggcggaaagccccagcggagaaagaacccccaggaaggactgtataacgaactccagaaagacaagatggccgaagcctacagcgagatcggcatgaagggcgagcggagaagaggcaagggccacgatggcctgtaccagggcctgagcaccgccaccaaggacacctatgacgccctgcacatgcaggccctgcctccaaga

SEQ ID NO: 27272 - DNA, 678 bp, synthetic construct
  source 1..678: mol_type = other DNA
accgactttgaagtgaaaaccgactccaccgaccacgtgaagcccaaagagacagagaacaccaagcagcccagcaagagctgccacaagcccaaggccatcgtgcacaccgagaaagtgaacatgatgagcctgaccgtgctgggcctgcggatgctgttcgccaaaaccgtggccgtgaacttcctgctgaccgccaagctgttcttcctcaaacggggcagaaagaaactcctgtatatattcaaacaaccatttatgagaccagtacaaactactcaagaggaagatggctgtagctgccgatttccagaagaagaagaaggaggatgtgaactgagagtgaagttcagcagaagcgccgacgcccctgcctaccagcagggacagaaccaactgtacaacgagctgaacctgggcagacgggaagagtacgacgtgctggacaagcggagaggcagggaccctgagatgggcggaaagccccagcggagaaagaacccccaggaaggactgtataacgaactccagaaagacaagatggccgaagcctacagcgagatcggcatgaagggcgagcggagaagaggcaagggccacgatggcctgtaccagggcctgagcaccgccaccaaggacacctatgacgccctgcacatgcaggccctgcctccaaga

SEQ ID NO: 27273 - DNA, 675 bp, synthetic construct
  source 1..675: mol_type = other DNA
gactttgaagtgaaaaccgactccaccgaccacgtgaagcccaaagagacagagaacaccaagcagcccagcaagagctgccacaagcccaaggccatcgtgcacaccgagaaagtgaacatgatgagcctgaccgtgctgggcctgcggatgctgttcgccaaaaccgtggccgtgaacttcctgctgaccgccaagctgttcttcctcaaacggggcagaaagaaactcctgtatatattcaaacaaccatttatgagaccagtacaaactactcaagaggaagatggctgtagctgccgatttccagaagaagaagaaggaggatgtgaactgagagtgaagttcagcagaagcgccgacgcccctgcctaccagcagggacagaaccaactgtacaacgagctgaacctgggcagacgggaagagtacgacgtgctggacaagcggagaggcagggaccctgagatgggcggaaagccccagcggagaaagaacccccaggaaggactgtataacgaactccagaaagacaagatggccgaagcctacagcgagatcggcatgaagggcgagcggagaagaggcaagggccacgatggcctgtaccagggcctgagcaccgccaccaaggacacctatgacgccctgcacatgcaggccctgcctccaaga

SEQ ID NO: 27274 - DNA, 672 bp, synthetic construct
  source 1..672: mol_type = other DNA
tttgaagtgaaaaccgactccaccgaccacgtgaagcccaaagagacagagaacaccaagcagcccagcaagagctgccacaagcccaaggccatcgtgcacaccgagaaagtgaacatgatgagcctgaccgtgctgggcctgcggatgctgttcgccaaaaccgtggccgtgaacttcctgctgaccgccaagctgttcttcctcaaacggggcagaaagaaactcctgtatatattcaaacaaccatttatgagaccagtacaaactactcaagaggaagatggctgtagctgccgatttccagaagaagaagaaggaggatgtgaactgagagtgaagttcagcagaagcgccgacgcccctgcctaccagcagggacagaaccaactgtacaacgagctgaacctgggcagacgggaagagtacgacgtgctggacaagcggagaggcagggaccctgagatgggcggaaagccccagcggagaaagaacccccaggaaggactgtataacgaactccagaaagacaagatggccgaagcctacagcgagatcggcatgaagggcgagcggagaagaggcaagggccacgatggcctgtaccagggcctgagcaccgccaccaaggacacctatgacgccctgcacatgcaggccctgcctccaaga

SEQ ID NO: 27275 - DNA, 669 bp, synthetic construct; identical to SEQ ID NO: 26640
  source 1..669: mol_type = other DNA

SEQ ID NO: 27276 - DNA, 666 bp, synthetic construct
  source 1..666: mol_type = other DNA
gtgaaaaccgactccaccgaccacgtgaagcccaaagagacagagaacaccaagcagcccagcaagagctgccacaagcccaaggccatcgtgcacaccgagaaagtgaacatgatgagcctgaccgtgctgggcctgcggatgctgttcgccaaaaccgtggccgtgaacttcctgctgaccgccaagctgttcttcctcaaacggggcagaaagaaactcctgtatatattcaaacaaccatttatgagaccagtacaaactactcaagaggaagatggctgtagctgccgatttccagaagaagaagaaggaggatgtgaactgagagtgaagttcagcagaagcgccgacgcccctgcctaccagcagggacagaaccaactgtacaacgagctgaacctgggcagacgggaagagtacgacgtgctggacaagcggagaggcagggaccctgagatgggcggaaagccccagcggagaaagaacccccaggaaggactgtataacgaactccagaaagacaagatggccgaagcctacagcgagatcggcatgaagggcgagcggagaagaggcaagggccacgatggcctgtaccagggcctgagcaccgccaccaaggacacctatgacgccctgcacatgcaggccctgcctccaaga

SEQ ID NO: 27277 - DNA, 663 bp, synthetic construct
  source 1..663: mol_type = other DNA
aaaaccgactccaccgaccacgtgaagcccaaagagacagagaacaccaagcagcccagcaagagctgccacaagcccaaggccatcgtgcacaccgagaaagtgaacatgatgagcctgaccgtgctgggcctgcggatgctgttcgccaaaaccgtggccgtgaacttcctgctgaccgccaagctgttcttcctcaaacggggcagaaagaaactcctgtatatattcaaacaaccatttatgagaccagtacaaactactcaagaggaagatggctgtagctgccgatttccagaagaagaagaaggaggatgtgaactgagagtgaagttcagcagaagcgccgacgcccctgcctaccagcagggacagaaccaactgtacaacgagctgaacctgggcagacgggaagagtacgacgtgctggacaagcggagaggcagggaccctgagatgggcggaaagccccagcggagaaagaacccccaggaaggactgtataacgaactccagaaagacaagatggccgaagcctacagcgagatcggcatgaagggcgagcggagaagaggcaagggccacgatggcctgtaccagggcctgagcaccgccaccaaggacacctatgacgccctgcacatgcaggccctgcctccaaga

SEQ ID NO: 27278 - DNA, 660 bp, synthetic construct
  source 1..660: mol_type = other DNA
accgactccaccgaccacgtgaagcccaaagagacagagaacaccaagcagcccagcaagagctgccacaagcccaaggccatcgtgcacaccgagaaagtgaacatgatgagcctgaccgtgctgggcctgcggatgctgttcgccaaaaccgtggccgtgaacttcctgctgaccgccaagctgttcttcctcaaacggggcagaaagaaactcctgtatatattcaaacaaccatttatgagaccagtacaaactactcaagaggaagatggctgtagctgccgatttccagaagaagaagaaggaggatgtgaactgagagtgaagttcagcagaagcgccgacgcccctgcctaccagcagggacagaaccaactgtacaacgagctgaacctgggcagacgggaagagtacgacgtgctggacaagcggagaggcagggaccctgagatgggcggaaagccccagcggagaaagaacccccaggaaggactgtataacgaactccagaaagacaagatggccgaagcctacagcgagatcggcatgaagggcgagcggagaagaggcaagggccacgatggcctgtaccagggcctgagcaccgccaccaaggacacctatgacgccctgcacatgcaggccctgcctccaaga

SEQ ID NO: 27279 - DNA, 657 bp, synthetic construct
  source 1..657: mol_type = other DNA
gactccaccgaccacgtgaagcccaaagagacagagaacaccaagcagcccagcaagagctgccacaagcccaaggccatcgtgcacaccgagaaagtgaacatgatgagcctgaccgtgctgggcctgcggatgctgttcgccaaaaccgtggccgtgaacttcctgctgaccgccaagctgttcttcctcaaacggggcagaaagaaactcctgtatatattcaaacaaccatttatgagaccagtacaaactactcaagaggaagatggctgtagctgccgatttccagaagaagaagaaggaggatgtgaactgagagtgaagttcagcagaagcgccgacgcccctgcctaccagcagggacagaaccaactgtacaacgagctgaacctgggcagacgggaagagtacgacgtgctggacaagcggagaggcagggaccctgagatgggcggaaagccccagcggagaaagaacccccaggaaggactgtataacgaactccagaaagacaagatggccgaagcctacagcgagatcggcatgaagggcgagcggagaagaggcaagggccacgatggcctgtaccagggcctgagcaccgccaccaaggacacctatgacgccctgcacatgcaggccctgcctccaaga

SEQ ID NO: 27280 - DNA, 654 bp, synthetic construct
  source 1..654: mol_type = other DNA
tccaccgaccacgtgaagcccaaagagacagagaacaccaagcagcccagcaagagctgccacaagcccaaggccatcgtgcacaccgagaaagtgaacatgatgagcctgaccgtgctgggcctgcggatgctgttcgccaaaaccgtggccgtgaacttcctgctgaccgccaagctgttcttcctcaaacggggcagaaagaaactcctgtatatattcaaacaaccatttatgagaccagtacaaactactcaagaggaagatggctgtagctgccgatttccagaagaagaagaaggaggatgtgaactgagagtgaagttcagcagaagcgccgacgcccctgcctaccagcagggacagaaccaactgtacaacgagctgaacctgggcagacgggaagagtacgacgtgctggacaagcggagaggcagggaccctgagatgggcggaaagccccagcggagaaagaacccccaggaaggactgtataacgaactccagaaagacaagatggccgaagcctacagcgagatcggcatgaagggcgagcggagaagaggcaagggccacgatggcctgtaccagggcctgagcaccgccaccaaggacacctatgacgccctgcacatgcaggccctgcctccaaga

SEQ ID NO: 27281 - DNA, 651 bp, synthetic construct
  source 1..651: mol_type = other DNA
accgaccacgtgaagcccaaagagacagagaacaccaagcagcccagcaagagctgccacaagcccaaggccatcgtgcacaccgagaaagtgaacatgatgagcctgaccgtgctgggcctgcggatgctgttcgccaaaaccgtggccgtgaacttcctgctgaccgccaagctgttcttcctcaaacggggcagaaagaaactcctgtatatattcaaacaaccatttatgagaccagtacaaactactcaagaggaagatggctgtagctgccgatttccagaagaagaagaaggaggatgtgaactgagagtgaagttcagcagaagcgccgacgcccctgcctaccagcagggacagaaccaactgtacaacgagctgaacctgggcagacgggaagagtacgacgtgctggacaagcggagaggcagggaccctgagatgggcggaaagccccagcggagaaagaacccccaggaaggactgtataacgaactccagaaagacaagatggccgaagcctacagcgagatcggcatgaagggcgagcggagaagaggcaagggccacgatggcctgtaccagggcctgagcaccgccaccaaggacacctatgacgccctgcacatgcaggccctgcctccaaga

SEQ ID NO: 27282 - DNA, 648 bp, synthetic construct; identical to SEQ ID NO: 26641
  source 1..648: mol_type = other DNA

SEQ ID NO: 27283 - DNA, 645 bp, synthetic construct
  source 1..645: mol_type = other DNA
cacgtgaagcccaaagagacagagaacaccaagcagcccagcaagagctgccacaagcccaaggccatcgtgcacaccgagaaagtgaacatgatgagcctgaccgtgctgggcctgcggatgctgttcgccaaaaccgtggccgtgaacttcctgctgaccgccaagctgttcttcctcaaacggggcagaaagaaactcctgtatatattcaaacaaccatttatgagaccagtacaaactactcaagaggaagatggctgtagctgccgatttccagaagaagaagaaggaggatgtgaactgagagtgaagttcagcagaagcgccgacgcccctgcctaccagcagggacagaaccaactgtacaacgagctgaacctgggcagacgggaagagtacgacgtgctggacaagcggagaggcagggaccctgagatgggcggaaagccccagcggagaaagaacccccaggaaggactgtataacgaactccagaaagacaagatggccgaagcctacagcgagatcggcatgaagggcgagcggagaagaggcaagggccacgatggcctgtaccagggcctgagcaccgccaccaaggacacctatgacgccctgcacatgcaggccctgcctccaaga

SEQ ID NO: 27284 - DNA, 642 bp, synthetic construct
  source 1..642: mol_type = other DNA
gtgaagcccaaagagacagagaacaccaagcagcccagcaagagctgccacaagcccaaggccatcgtgcacaccgagaaagtgaacatgatgagcctgaccgtgctgggcctgcggatgctgttcgccaaaaccgtggccgtgaacttcctgctgaccgccaagctgttcttcctcaaacggggcagaaagaaactcctgtatatattcaaacaaccatttatgagaccagtacaaactactcaagaggaagatggctgtagctgccgatttccagaagaagaagaaggaggatgtgaactgagagtgaagttcagcagaagcgccgacgcccctgcctaccagcagggacagaaccaactgtacaacgagctgaacctgggcagacgggaagagtacgacgtgctggacaagcggagaggcagggaccctgagatgggcggaaagccccagcggagaaagaacccccaggaaggactgtataacgaactccagaaagacaagatggccgaagcctacagcgagatcggcatgaagggcgagcggagaagaggcaagggccacgatggcctgtaccagggcctgagcaccgccaccaaggacacctatgacgccctgcacatgcaggccctgcctccaaga

SEQ ID NO: 27285 - DNA, 639 bp, synthetic construct
  source 1..639: mol_type = other DNA
aagcccaaagagacagagaacaccaagcagcccagcaagagctgccacaagcccaaggccatcgtgcacaccgagaaagtgaacatgatgagcctgaccgtgctgggcctgcggatgctgttcgccaaaaccgtggccgtgaacttcctgctgaccgccaagctgttcttcctcaaacggggcagaaagaaactcctgtatatattcaaacaaccatttatgagaccagtacaaactactcaagaggaagatggctgtagctgccgatttccagaagaagaagaaggaggatgtgaactgagagtgaagttcagcagaagcgccgacgcccctgcctaccagcagggacagaaccaactgtacaacgagctgaacctgggcagacgggaagagtacgacgtgctggacaagcggagaggcagggaccctgagatgggcggaaagccccagcggagaaagaacccccaggaaggactgtataacgaactccagaaagacaagatggccgaagcctacagcgagatcggcatgaagggcgagcggagaagaggcaagggccacgatggcctgtaccagggcctgagcaccgccaccaaggacacctatgacgccctgcacatgcaggccctgcctccaaga

SEQ ID NO: 27286 - DNA, 636 bp, synthetic construct
  source 1..636: mol_type = other DNA
cccaaagagacagagaacaccaagcagcccagcaagagctgccacaagcccaaggccatcgtgcacaccgagaaagtgaacatgatgagcctgaccgtgctgggcctgcggatgctgttcgccaaaaccgtggccgtgaacttcctgctgaccgccaagctgttcttcctcaaacggggcagaaagaaactcctgtatatattcaaacaaccatttatgagaccagtacaaactactcaagaggaagatggctgtagctgccgatttccagaagaagaagaaggaggatgtgaactgagagtgaagttcagcagaagcgccgacgcccctgcctaccagcagggacagaaccaactgtacaacgagctgaacctgggcagacgggaagagtacgacgtgctggacaagcggagaggcagggaccctgagatgggcggaaagccccagcggagaaagaacccccaggaaggactgtataacgaactccagaaagacaagatggccgaagcctacagcgagatcggcatgaagggcgagcggagaagaggcaagggccacgatggcctgtaccagggcctgagcaccgccaccaaggacacctatgacgccctgcacatgcaggccctgcctccaaga

SEQ ID NO: 27287 - DNA, 633 bp, synthetic construct
  source 1..633: mol_type = other DNA
aaagagacagagaacaccaagcagcccagcaagagctgccacaagcccaaggccatcgtgcacaccgagaaagtgaacatgatgagcctgaccgtgctgggcctgcggatgctgttcgccaaaaccgtggccgtgaacttcctgctgaccgccaagctgttcttcctcaaacggggcagaaagaaactcctgtatatattcaaacaaccatttatgagaccagtacaaactactcaagaggaagatggctgtagctgccgatttccagaagaagaagaaggaggatgtgaactgagagtgaagttcagcagaagcgccgacgcccctgcctaccagcagggacagaaccaactgtacaacgagctgaacctgggcagacgggaagagtacgacgtgctggacaagcggagaggcagggaccctgagatgggcggaaagccccagcggagaaagaacccccaggaaggactgtataacgaactccagaaagacaagatggccgaagcctacagcgagatcggcatgaagggcgagcggagaagaggcaagggccacgatggcctgtaccagggcctgagcaccgccaccaaggacacctatgacgccctgcacatgcaggccctgcctccaaga

SEQ ID NO: 27288 - DNA, 630 bp, synthetic construct
  source 1..630: mol_type = other DNA
gagacagagaacaccaagcagcccagcaagagctgccacaagcccaaggccatcgtgcacaccgagaaagtgaacatgatgagcctgaccgtgctgggcctgcggatgctgttcgccaaaaccgtggccgtgaacttcctgctgaccgccaagctgttcttcctcaaacggggcagaaagaaactcctgtatatattcaaacaaccatttatgagaccagtacaaactactcaagaggaagatggctgtagctgccgatttccagaagaagaagaaggaggatgtgaactgagagtgaagttcagcagaagcgccgacgcccctgcctaccagcagggacagaaccaactgtacaacgagctgaacctgggcagacgggaagagtacgacgtgctggacaagcggagaggcagggaccctgagatgggcggaaagccccagcggagaaagaacccccaggaaggactgtataacgaactccagaaagacaagatggccgaagcctacagcgagatcggcatgaagggcgagcggagaagaggcaagggccacgatggcctgtaccagggcctgagcaccgccaccaaggacacctatgacgccctgcacatgcaggccctgcctccaaga

SEQ ID NO: 27289 - DNA, 627 bp, synthetic construct
  source 1..627: mol_type = other DNA
acagagaacaccaagcagcccagcaagagctgccacaagcccaaggccatcgtgcacaccgagaaagtgaacatgatgagcctgaccgtgctgggcctgcggatgctgttcgccaaaaccgtggccgtgaacttcctgctgaccgccaagctgttcttcctcaaacggggcagaaagaaactcctgtatatattcaaacaaccatttatgagaccagtacaaactactcaagaggaagatggctgtagctgccgatttccagaagaagaagaaggaggatgtgaactgagagtgaagttcagcagaagcgccgacgcccctgcctaccagcagggacagaaccaactgtacaacgagctgaacctgggcagacgggaagagtacgacgtgctggacaagcggagaggcagggaccctgagatgggcggaaagccccagcggagaaagaacccccaggaaggactgtataacgaactccagaaagacaagatggccgaagcctacagcgagatcggcatgaagggcgagcggagaagaggcaagggccacgatggcctgtaccagggcctgagcaccgccaccaaggacacctatgacgccctgcacatgcaggccctgcctccaaga

SEQ ID NO: 27290 - DNA, 624 bp, synthetic construct
  source 1..624: mol_type = other DNA
gagaacaccaagcagcccagcaagagctgccacaagcccaaggccatcgtgcacaccgagaaagtgaacatgatgagcctgaccgtgctgggcctgcggatgctgttcgccaaaaccgtggccgtgaacttcctgctgaccgccaagctgttcttcctcaaacggggcagaaagaaactcctgtatatattcaaacaaccatttatgagaccagtacaaactactcaagaggaagatggctgtagctgccgatttccagaagaagaagaaggaggatgtgaactgagagtgaagttcagcagaagcgccgacgcccctgcctaccagcagggacagaaccaactgtacaacgagctgaacctgggcagacgggaagagtacgacgtgctggacaagcggagaggcagggaccctgagatgggcggaaagccccagcggagaaagaacccccaggaaggactgtataacgaactccagaaagacaagatggccgaagcctacagcgagatcggcatgaagggcgagcggagaagaggcaagggccacgatggcctgtaccagggcctgagcaccgccaccaaggacacctatgacgccctgcacatgcaggccctgcctccaaga

SEQ ID NO: 27291 - DNA, 621 bp, synthetic construct
  source 1..621: mol_type = other DNA
aacaccaagcagcccagcaagagctgccacaagcccaaggccatcgtgcacaccgagaaagtgaacatgatgagcctgaccgtgctgggcctgcggatgctgttcgccaaaaccgtggccgtgaacttcctgctgaccgccaagctgttcttcctcaaacggggcagaaagaaactcctgtatatattcaaacaaccatttatgagaccagtacaaactactcaagaggaagatggctgtagctgccgatttccagaagaagaagaaggaggatgtgaactgagagtgaagttcagcagaagcgccgacgcccctgcctaccagcagggacagaaccaactgtacaacgagctgaacctgggcagacgggaagagtacgacgtgctggacaagcggagaggcagggaccctgagatgggcggaaagccccagcggagaaagaacccccaggaaggactgtataacgaactccagaaagacaagatggccgaagcctacagcgagatcggcatgaagggcgagcggagaagaggcaagggccacgatggcctgtaccagggcctgagcaccgccaccaaggacacctatgacgccctgcacatgcaggccctgcctccaaga

SEQ ID NO: 27292 - DNA, 873 bp, synthetic construct
  source 1..873: mol_type = other DNA
atccagaaccctgaacctgccgtgtaccagctgaaggaccccagaagccaggacagcaccctgtgcctgttcaccgacttcgacagccagatcaacgtgcccaagacaatggaaagcggcaccttcatcaccgacaagtgcgtgctggacatgaaggctatggacagcaagagcaacggcgccattgcctggtccaaccagaccagcttcacatgccaggacatcttcaaagagacaaacgccacctacccctccagcgacgtgccctgtgacgccaccctgaccgagaagtccttcgagacagacatgaacctcaacttccagaacctgagcgtgatgggcctgcgaatcctgctgctgaaagtggccggcttcaacctgctgatgaccctgcggctgtggtccagcaaacggggcagaaagaaactcctgtatatattcaaacaaccatttatgagaccagtacaaactactcaagaggaagatggctgtagctgccgatttccagaagaagaagaaggaggatgtgaactgagagtgaagttcagcagaagcgccgacgcccctgcctaccagcagggacagaaccaactgtacaacgagctgaacctgggcagacgggaagagtacgacgtgctggacaagcggagaggcagggaccctgagatgggcggaaagccccagcggagaaagaacccccaggaaggactgtataacgaactccagaaagacaagatggccgaagcctacagcgagatcggcatgaagggcgagcggagaagaggcaagggccacgatggcctgtaccagggcctgagcaccgccaccaaggacacctatgacgccctgcacatgcaggccctgcctccaaga

SEQ ID NO: 27293 - DNA, 870 bp, synthetic construct
  source 1..870: mol_type = other DNA
cagaaccctgaacctgccgtgtaccagctgaaggaccccagaagccaggacagcaccctgtgcctgttcaccgacttcgacagccagatcaacgtgcccaagacaatggaaagcggcaccttcatcaccgacaagtgcgtgctggacatgaaggctatggacagcaagagcaacggcgccattgcctggtccaaccagaccagcttcacatgccaggacatcttcaaagagacaaacgccacctacccctccagcgacgtgccctgtgacgccaccctgaccgagaagtccttcgagacagacatgaacctcaacttccagaacctgagcgtgatgggcctgcgaatcctgctgctgaaagtggccggcttcaacctgctgatgaccctgcggctgtggtccagcaaacggggcagaaagaaactcctgtatatattcaaacaaccatttatgagaccagtacaaactactcaagaggaagatggctgtagctgccgatttccagaagaagaagaaggaggatgtgaactgagagtgaagttcagcagaagcgccgacgcccctgcctaccagcagggacagaaccaactgtacaacgagctgaacctgggcagacgggaagagtacgacgtgctggacaagcggagaggcagggaccctgagatgggcggaaagccccagcggagaaagaacccccaggaaggactgtataacgaactccagaaagacaagatggccgaagcctacagcgagatcggcatgaagggcgagcggagaagaggcaagggccacgatggcctgtaccagggcctgagcaccgccaccaaggacacctatgacgccctgcacatgcaggccctgcctccaaga

SEQ ID NO: 27294 - DNA, 867 bp, synthetic construct
  source 1..867: mol_type = other DNA
aaccctgaacctgccgtgtaccagctgaaggaccccagaagccaggacagcaccctgtgcctgttcaccgacttcgacagccagatcaacgtgcccaagacaatggaaagcggcaccttcatcaccgacaagtgcgtgctggacatgaaggctatggacagcaagagcaacggcgccattgcctggtccaaccagaccagcttcacatgccaggacatcttcaaagagacaaacgccacctacccctccagcgacgtgccctgtgacgccaccctgaccgagaagtccttcgagacagacatgaacctcaacttccagaacctgagcgtgatgggcctgcgaatcctgctgctgaaagtggccggcttcaacctgctgatgaccctgcggctgtggtccagcaaacggggcagaaagaaactcctgtatatattcaaacaaccatttatgagaccagtacaaactactcaagaggaagatggctgtagctgccgatttccagaagaagaagaaggaggatgtgaactgagagtgaagttcagcagaagcgccgacgcccctgcctaccagcagggacagaaccaactgtacaacgagctgaacctgggcagacgggaagagtacgacgtgctggacaagcggagaggcagggaccctgagatgggcggaaagccccagcggagaaagaacccccaggaaggactgtataacgaactccagaaagacaagatggccgaagcctacagcgagatcggcatgaagggcgagcggagaagaggcaagggccacgatggcctgtaccagggcctgagcaccgccaccaaggacacctatgacgccctgcacatgcaggccctgcctccaaga

SEQ ID NO: 27295 - DNA, 864 bp, synthetic construct
  source 1..864: mol_type = other DNA
cctgaacctgccgtgtaccagctgaaggaccccagaagccaggacagcaccctgtgcctgttcaccgacttcgacagccagatcaacgtgcccaagacaatggaaagcggcaccttcatcaccgacaagtgcgtgctggacatgaaggctatggacagcaagagcaacggcgccattgcctggtccaaccagaccagcttcacatgccaggacatcttcaaagagacaaacgccacctacccctccagcgacgtgccctgtgacgccaccctgaccgagaagtccttcgagacagacatgaacctcaacttccagaacctgagcgtgatgggcctgcgaatcctgctgctgaaagtggccggcttcaacctgctgatgaccctgcggctgtggtccagcaaacggggcagaaagaaactcctgtatatattcaaacaaccatttatgagaccagtacaaactactcaagaggaagatggctgtagctgccgatttccagaagaagaagaaggaggatgtgaactgagagtgaagttcagcagaagcgccgacgcccctgcctaccagcagggacagaaccaactgtacaacgagctgaacctgggcagacgggaagagtacgacgtgctggacaagcggagaggcagggaccctgagatgggcggaaagccccagcggagaaagaacccccaggaaggactgtataacgaactccagaaagacaagatggccgaagcctacagcgagatcggcatgaagggcgagcggagaagaggcaagggccacgatggcctgtaccagggcctgagcaccgccaccaaggacacctatgacgccctgcacatgcaggccctgcctccaaga

SEQ ID NO: 27296 - DNA, 861 bp, synthetic construct
  source 1..861: mol_type = other DNA
gaacctgccgtgtaccagctgaaggaccccagaagccaggacagcaccctgtgcctgttcaccgacttcgacagccagatcaacgtgcccaagacaatggaaagcggcaccttcatcaccgacaagtgcgtgctggacatgaaggctatggacagcaagagcaacggcgccattgcctggtccaaccagaccagcttcacatgccaggacatcttcaaagagacaaacgccacctacccctccagcgacgtgccctgtgacgccaccctgaccgagaagtccttcgagacagacatgaacctcaacttccagaacctgagcgtgatgggcctgcgaatcctgctgctgaaagtggccggcttcaacctgctgatgaccctgcggctgtggtccagcaaacggggcagaaagaaactcctgtatatattcaaacaaccatttatgagaccagtacaaactactcaagaggaagatggctgtagctgccgatttccagaagaagaagaaggaggatgtgaactgagagtgaagttcagcagaagcgccgacgcccctgcctaccagcagggacagaaccaactgtacaacgagctgaacctgggcagacgggaagagtacgacgtgctggacaagcggagaggcagggaccctgagatgggcggaaagccccagcggagaaagaacccccaggaaggactgtataacgaactccagaaagacaagatggccgaagcctacagcgagatcggcatgaagggcgagcggagaagaggcaagggccacgatggcctgtaccagggcctgagcaccgccaccaaggacacctatgacgccctgcacatgcaggccctgcctccaaga

SEQ ID NO: 27297 - DNA, 858 bp, synthetic construct
  source 1..858: mol_type = other DNA
cctgccgtgtaccagctgaaggaccccagaagccaggacagcaccctgtgcctgttcaccgacttcgacagccagatcaacgtgcccaagacaatggaaagcggcaccttcatcaccgacaagtgcgtgctggacatgaaggctatggacagcaagagcaacggcgccattgcctggtccaaccagaccagcttcacatgccaggacatcttcaaagagacaaacgccacctacccctccagcgacgtgccctgtgacgccaccctgaccgagaagtccttcgagacagacatgaacctcaacttccagaacctgagcgtgatgggcctgcgaatcctgctgctgaaagtggccggcttcaacctgctgatgaccctgcggctgtggtccagcaaacggggcagaaagaaactcctgtatatattcaaacaaccatttatgagaccagtacaaactactcaagaggaagatggctgtagctgccgatttccagaagaagaagaaggaggatgtgaactgagagtgaagttcagcagaagcgccgacgcccctgcctaccagcagggacagaaccaactgtacaacgagctgaacctgggcagacgggaagagtacgacgtgctggacaagcggagaggcagggaccctgagatgggcggaaagccccagcggagaaagaacccccaggaaggactgtataacgaactccagaaagacaagatggccgaagcctacagcgagatcggcatgaagggcgagcggagaagaggcaagggccacgatggcctgtaccagggcctgagcaccgccaccaaggacacctatgacgccctgcacatgcaggccctgcctccaaga

SEQ ID NO: 27298 - DNA, 855 bp, synthetic construct
  source 1..855: mol_type = other DNA
gccgtgtaccagctgaaggaccccagaagccaggacagcaccctgtgcctgttcaccgacttcgacagccagatcaacgtgcccaagacaatggaaagcggcaccttcatcaccgacaagtgcgtgctggacatgaaggctatggacagcaagagcaacggcgccattgcctggtccaaccagaccagcttcacatgccaggacatcttcaaagagacaaacgccacctacccctccagcgacgtgccctgtgacgccaccctgaccgagaagtccttcgagacagacatgaacctcaacttccagaacctgagcgtgatgggcctgcgaatcctgctgctgaaagtggccggcttcaacctgctgatgaccctgcggctgtggtccagcaaacggggcagaaagaaactcctgtatatattcaaacaaccatttatgagaccagtacaaactactcaagaggaagatggctgtagctgccgatttccagaagaagaagaaggaggatgtgaactgagagtgaagttcagcagaagcgccgacgcccctgcctaccagcagggacagaaccaactgtacaacgagctgaacctgggcagacgggaagagtacgacgtgctggacaagcggagaggcagggaccctgagatgggcggaaagccccagcggagaaagaacccccaggaaggactgtataacgaactccagaaagacaagatggccgaagcctacagcgagatcggcatgaagggcgagcggagaagaggcaagggccacgatggcctgtaccagggcctgagcaccgccaccaaggacacctatgacgccctgcacatgcaggccctgcctccaaga

SEQ ID NO: 27299 - DNA, 852 bp, synthetic construct
  source 1..852: mol_type = other DNA
gtgtaccagctgaaggaccccagaagccaggacagcaccctgtgcctgttcaccgacttcgacagccagatcaacgtgcccaagacaatggaaagcggcaccttcatcaccgacaagtgcgtgctggacatgaaggctatggacagcaagagcaacggcgccattgcctggtccaaccagaccagcttcacatgccaggacatcttcaaagagacaaacgccacctacccctccagcgacgtgccctgtgacgccaccctgaccgagaagtccttcgagacagacatgaacctcaacttccagaacctgagcgtgatgggcctgcgaatcctgctgctgaaagtggccggcttcaacctgctgatgaccctgcggctgtggtccagcaaacggggcagaaagaaactcctgtatatattcaaacaaccatttatgagaccagtacaaactactcaagaggaagatggctgtagctgccgatttccagaagaagaagaaggaggatgtgaactgagagtgaagttcagcagaagcgccgacgcccctgcctaccagcagggacagaaccaactgtacaacgagctgaacctgggcagacgggaagagtacgacgtgctggacaagcggagaggcagggaccctgagatgggcggaaagccccagcggagaaagaacccccaggaaggactgtataacgaactccagaaagacaagatggccgaagcctacagcgagatcggcatgaagggcgagcggagaagaggcaagggccacgatggcctgtaccagggcctgagcaccgccaccaaggacacctatgacgccctgcacatgcaggccctgcctccaaga

SEQ ID NO: 27300 - DNA, 849 bp, synthetic construct
  source 1..849: mol_type = other DNA
taccagctgaaggaccccagaagccaggacagcaccctgtgcctgttcaccgacttcgacagccagatcaacgtgcccaagacaatggaaagcggcaccttcatcaccgacaagtgcgtgctggacatgaaggctatggacagcaagagcaacggcgccattgcctggtccaaccagaccagcttcacatgccaggacatcttcaaagagacaaacgccacctacccctccagcgacgtgccctgtgacgccaccctgaccgagaagtccttcgagacagacatgaacctcaacttccagaacctgagcgtgatgggcctgcgaatcctgctgctgaaagtggccggcttcaacctgctgatgaccctgcggctgtggtccagcaaacggggcagaaagaaactcctgtatatattcaaacaaccatttatgagaccagtacaaactactcaagaggaagatggctgtagctgccgatttccagaagaagaagaaggaggatgtgaactgagagtgaagttcagcagaagcgccgacgcccctgcctaccagcagggacagaaccaactgtacaacgagctgaacctgggcagacgggaagagtacgacgtgctggacaagcggagaggcagggaccctgagatgggcggaaagccccagcggagaaagaacccccaggaaggactgtataacgaactccagaaagacaagatggccgaagcctacagcgagatcggcatgaagggcgagcggagaagaggcaagggccacgatggcctgtaccagggcctgagcaccgccaccaaggacacctatgacgccctgcacatgcaggccctgcctccaaga

SEQ ID NO: 27301 - DNA, 846 bp, synthetic construct
  source 1..846: mol_type = other DNA
cagctgaaggaccccagaagccaggacagcaccctgtgcctgttcaccgacttcgacagccagatcaacgtgcccaagacaatggaaagcggcaccttcatcaccgacaagtgcgtgctggacatgaaggctatggacagcaagagcaacggcgccattgcctggtccaaccagaccagcttcacatgccaggacatcttcaaagagacaaacgccacctacccctccagcgacgtgccctgtgacgccaccctgaccgagaagtccttcgagacagacatgaacctcaacttccagaacctgagcgtgatgggcctgcgaatcctgctgctgaaagtggccggcttcaacctgctgatgaccctgcggctgtggtccagcaaacggggcagaaagaaactcctgtatatattcaaacaaccatttatgagaccagtacaaactactcaagaggaagatggctgtagctgccgatttccagaagaagaagaaggaggatgtgaactgagagtgaagttcagcagaagcgccgacgcccctgcctaccagcagggacagaaccaactgtacaacgagctgaacctgggcagacgggaagagtacgacgtgctggacaagcggagaggcagggaccctgagatgggcggaaagccccagcggagaaagaacccccaggaaggactgtataacgaactccagaaagacaagatggccgaagcctacagcgagatcggcatgaagggcgagcggagaagaggcaagggccacgatggcctgtaccagggcctgagcaccgccaccaaggacacctatgacgccctgcacatgcaggccctgcctccaaga

SEQ ID NO: 27302 - DNA, 843 bp, synthetic construct
  source 1..843: mol_type = other DNA
ctgaaggaccccagaagccaggacagcaccctgtgcctgttcaccgacttcgacagccagatcaacgtgcccaagacaatggaaagcggcaccttcatcaccgacaagtgcgtgctggacatgaaggctatggacagcaagagcaacggcgccattgcctggtccaaccagaccagcttcacatgccaggacatcttcaaagagacaaacgccacctacccctccagcgacgtgccctgtgacgccaccctgaccgagaagtccttcgagacagacatgaacctcaacttccagaacctgagcgtgatgggcctgcgaatcctgctgctgaaagtggccggcttcaacctgctgatgaccctgcggctgtggtccagcaaacggggcagaaagaaactcctgtatatattcaaacaaccatttatgagaccagtacaaactactcaagaggaagatggctgtagctgccgatttccagaagaagaagaaggaggatgtgaactgagagtgaagttcagcagaagcgccgacgcccctgcctaccagcagggacagaaccaactgtacaacgagctgaacctgggcagacgggaagagtacgacgtgctggacaagcggagaggcagggaccctgagatgggcggaaagccccagcggagaaagaacccccaggaaggactgtataacgaactccagaaagacaagatggccgaagcctacagcgagatcggcatgaagggcgagcggagaagaggcaagggccacgatggcctgtaccagggcctgagcaccgccaccaaggacacctatgacgccctgcacatgcaggccctgcctccaaga

SEQ ID NO: 27303 - DNA, 828 bp, synthetic construct
  source 1..828: mol_type = other DNA
agccaggacagcaccctgtgcctgttcaccgacttcgacagccagatcaacgtgcccaagacaatggaaagcggcaccttcatcaccgacaagtgcgtgctggacatgaaggctatggacagcaagagcaacggcgccattgcctggtccaaccagaccagcttcacatgccaggacatcttcaaagagacaaacgccacctacccctccagcgacgtgccctgtgacgccaccctgaccgagaagtccttcgagacagacatgaacctcaacttccagaacctgagcgtgatgggcctgcgaatcctgctgctgaaagtggccggcttcaacctgctgatgaccctgcggctgtggtccagcaaacggggcagaaagaaactcctgtatatattcaaacaaccatttatgagaccagtacaaactactcaagaggaagatggctgtagctgccgatttccagaagaagaagaaggaggatgtgaactgagagtgaagttcagcagaagcgccgacgcccctgcctaccagcagggacagaaccaactgtacaacgagctgaacctgggcagacgggaagagtacgacgtgctggacaagcggagaggcagggaccctgagatgggcggaaagccccagcggagaaagaacccccaggaaggactgtataacgaactccagaaagacaagatggccgaagcctacagcgagatcggcatgaagggcgagcggagaagaggcaagggccacgatggcctgtaccagggcctgagcaccgccaccaaggacacctatgacgccctgcacatgcaggccctgcctccaaga

SEQ ID NO: 27304 - DNA, 813 bp, synthetic construct
  source 1..813: mol_type = other DNA
ctgtgcctgttcaccgacttcgacagccagatcaacgtgcccaagacaatggaaagcggcaccttcatcaccgacaagtgcgtgctggacatgaaggctatggacagcaagagcaacggcgccattgcctggtccaaccagaccagcttcacatgccaggacatcttcaaagagacaaacgccacctacccctccagcgacgtgccctgtgacgccaccctgaccgagaagtccttcgagacagacatgaacctcaacttccagaacctgagcgtgatgggcctgcgaatcctgctgctgaaagtggccggcttcaacctgctgatgaccctgcggctgtggtccagcaaacggggcagaaagaaactcctgtatatattcaaacaaccatttatgagaccagtacaaactactcaagaggaagatggctgtagctgccgatttccagaagaagaagaaggaggatgtgaactgagagtgaagttcagcagaagcgccgacgcccctgcctaccagcagggacagaaccaactgtacaacgagctgaacctgggcagacgggaagagtacgacgtgctggacaagcggagaggcagggaccctgagatgggcggaaagccccagcggagaaagaacccccaggaaggactgtataacgaactccagaaagacaagatggccgaagcctacagcgagatcggcatgaagggcgagcggagaagaggcaagggccacgatggcctgtaccagggcctgagcaccgccaccaaggacacctatgacgccctgcacatgcaggccctgcctccaaga

SEQ ID NO: 27305 - DNA, 873 bp, synthetic construct
  source 1..873: mol_type = other DNA
atccagaaccctgaacctgccgtgtaccagctgaaggaccccagaagccaggacagcaccctgtgcctgttcaccgacttcgacagccagatcaacgtgcccaagacaatggaaagcggcaccttcatcaccgacaagtgcgtgctggacatgaaggctatggacagcaagagcaacggcgccattgcctggtccaaccagaccagcttcacatgccaggacatcttcaaagagacaaacgccacctacccctccagcgacgtgccctgtgacgccaccctgaccgagaagtccttcgagacagacatgaacctcaacttccagaacctgctggtggtgggcctgcgaatcctgctgctgaaagtggccggcttcaacctgctgatgaccctgcggctgtggtccagcaaacggggcagaaagaaactcctgtatatattcaaacaaccatttatgagaccagtacaaactactcaagaggaagatggctgtagctgccgatttccagaagaagaagaaggaggatgtgaactgagagtgaagttcagcagaagcgccgacgcccctgcctaccagcagggacagaaccaactgtacaacgagctgaacctgggcagacgggaagagtacgacgtgctggacaagcggagaggcagggaccctgagatgggcggaaagccccagcggagaaagaacccccaggaaggactgtataacgaactccagaaagacaagatggccgaagcctacagcgagatcggcatgaagggcgagcggagaagaggcaagggccacgatggcctgtaccagggcctgagcaccgccaccaaggacacctatgacgccctgcacatgcaggccctgcctccaaga

SEQ ID NO: 27306 - DNA, 870 bp, synthetic construct
  source 1..870: mol_type = other DNA
cagaaccctgaacctgccgtgtaccagctgaaggaccccagaagccaggacagcaccctgtgcctgttcaccgacttcgacagccagatcaacgtgcccaagacaatggaaagcggcaccttcatcaccgacaagtgcgtgctggacatgaaggctatggacagcaagagcaacggcgccattgcctggtccaaccagaccagcttcacatgccaggacatcttcaaagagacaaacgccacctacccctccagcgacgtgccctgtgacgccaccctgaccgagaagtccttcgagacagacatgaacctcaacttccagaacctgctggtggtgggcctgcgaatcctgctgctgaaagtggccggcttcaacctgctgatgaccctgcggctgtggtccagcaaacggggcagaaagaaactcctgtatatattcaaacaaccatttatgagaccagtacaaactactcaagaggaagatggctgtagctgccgatttccagaagaagaagaaggaggatgtgaactgagagtgaagttcagcagaagcgccgacgcccctgcctaccagcagggacagaaccaactgtacaacgagctgaacctgggcagacgggaagagtacgacgtgctggacaagcggagaggcagggaccctgagatgggcggaaagccccagcggagaaagaacccccaggaaggactgtataacgaactccagaaagacaagatggccgaagcctacagcgagatcggcatgaagggcgagcggagaagaggcaagggccacgatggcctgtaccagggcctgagcaccgccaccaaggacacctatgacgccctgcacatgcaggccctgcctccaaga

SEQ ID NO: 27307 - DNA, 867 bp, synthetic construct
  source 1..867: mol_type = other DNA
aaccctgaacctgccgtgtaccagctgaaggaccccagaagccaggacagcaccctgtgcctgttcaccgacttcgacagccagatcaacgtgcccaagacaatggaaagcggcaccttcatcaccgacaagtgcgtgctggacatgaaggctatggacagcaagagcaacggcgccattgcctggtccaaccagaccagcttcacatgccaggacatcttcaaagagacaaacgccacctacccctccagcgacgtgccctgtgacgccaccctgaccgagaagtccttcgagacagacatgaacctcaacttccagaacctgctggtggtgggcctgcgaatcctgctgctgaaagtggccggcttcaacctgctgatgaccctgcggctgtggtccagcaaacggggcagaaagaaactcctgtatatattcaaacaaccatttatgagaccagtacaaactactcaagaggaagatggctgtagctgccgatttccagaagaagaagaaggaggatgtgaactgagagtgaagttcagcagaagcgccgacgcccctgcctaccagcagggacagaaccaactgtacaacgagctgaacctgggcagacgggaagagtacgacgtgctggacaagcggagaggcagggaccctgagatgggcggaaagccccagcggagaaagaacccccaggaaggactgtataacgaactccagaaagacaagatggccgaagcctacagcgagatcggcatgaagggcgagcggagaagaggcaagggccacgatggcctgtaccagggcctgagcaccgccaccaaggacacctatgacgccctgcacatgcaggccctgcctccaaga

SEQ ID NO: 27308 - DNA, 864 bp, synthetic construct
  source 1..864: mol_type = other DNA
cctgaacctgccgtgtaccagctgaaggaccccagaagccaggacagcaccctgtgcctgttcaccgacttcgacagccagatcaacgtgcccaagacaatggaaagcggcaccttcatcaccgacaagtgcgtgctggacatgaaggctatggacagcaagagcaacggcgccattgcctggtccaaccagaccagcttcacatgccaggacatcttcaaagagacaaacgccacctacccctccagcgacgtgccctgtgacgccaccctgaccgagaagtccttcgagacagacatgaacctcaacttccagaacctgctggtggtgggcctgcgaatcctgctgctgaaagtggccggcttcaacctgctgatgaccctgcggctgtggtccagcaaacggggcagaaagaaactcctgtatatattcaaacaaccatttatgagaccagtacaaactactcaagaggaagatggctgtagctgccgatttccagaagaagaagaaggaggatgtgaactgagagtgaagttcagcagaagcgccgacgcccctgcctaccagcagggacagaaccaactgtacaacgagctgaacctgggcagacgggaagagtacgacgtgctggacaagcggagaggcagggaccctgagatgggcggaaagccccagcggagaaagaacccccaggaaggactgtataacgaactccagaaagacaagatggccgaagcctacagcgagatcggcatgaagggcgagcggagaagaggcaagggccacgatggcctgtaccagggcctgagcaccgccaccaaggacacctatgacgccctgcacatgcaggccctgcctccaaga

SEQ ID NO: 27309 - DNA, 861 bp, synthetic construct
  source 1..861: mol_type = other DNA
gaacctgccgtgtaccagctgaaggaccccagaagccaggacagcaccctgtgcctgttcaccgacttcgacagccagatcaacgtgcccaagacaatggaaagcggcaccttcatcaccgacaagtgcgtgctggacatgaaggctatggacagcaagagcaacggcgccattgcctggtccaaccagaccagcttcacatgccaggacatcttcaaagagacaaacgccacctacccctccagcgacgtgccctgtgacgccaccctgaccgagaagtccttcgagacagacatgaacctcaacttccagaacctgctggtggtgggcctgcgaatcctgctgctgaaagtggccggcttcaacctgctgatgaccctgcggctgtggtccagcaaacggggcagaaagaaactcctgtatatattcaaacaaccatttatgagaccagtacaaactactcaagaggaagatggctgtagctgccgatttccagaagaagaagaaggaggatgtgaactgagagtgaagttcagcagaagcgccgacgcccctgcctaccagcagggacagaaccaactgtacaacgagctgaacctgggcagacgggaagagtacgacgtgctggacaagcggagaggcagggaccctgagatgggcggaaagccccagcggagaaagaacccccaggaaggactgtataacgaactccagaaagacaagatggccgaagcctacagcgagatcggcatgaagggcgagcggagaagaggcaagggccacgatggcctgtaccagggcctgagcaccgccaccaaggacacctatgacgccctgcacatgcaggccctgcctccaaga

SEQ ID NO: 27310 - DNA, 858 bp, synthetic construct
  source 1..858: mol_type = other DNA
cctgccgtgtaccagctgaaggaccccagaagccaggacagcaccctgtgcctgttcaccgacttcgacagccagatcaacgtgcccaagacaatggaaagcggcaccttcatcaccgacaagtgcgtgctggacatgaaggctatggacagcaagagcaacggcgccattgcctggtccaaccagaccagcttcacatgccaggacatcttcaaagagacaaacgccacctacccctccagcgacgtgccctgtgacgccaccctgaccgagaagtccttcgagacagacatgaacctcaacttccagaacctgctggtggtgggcctgcgaatcctgctgctgaaagtggccggcttcaacctgctgatgaccctgcggctgtggtccagcaaacggggcagaaagaaactcctgtatatattcaaacaaccatttatgagaccagtacaaactactcaagaggaagatggctgtagctgccgatttccagaagaagaagaaggaggatgtgaactgagagtgaagttcagcagaagcgccgacgcccctgcctaccagcagggacagaaccaactgtacaacgagctgaacctgggcagacgggaagagtacgacgtgctggacaagcggagaggcagggaccctgagatgggcggaaagccccagcggagaaagaacccccaggaaggactgtataacgaactccagaaagacaagatggccgaagcctacagcgagatcggcatgaagggcgagcggagaagaggcaagggccacgatggcctgtaccagggcctgagcaccgccaccaaggacacctatgacgccctgcacatgcaggccctgcctccaaga

SEQ ID NO: 27311 - DNA, 855 bp, synthetic construct
  source 1..855: mol_type = other DNA
gccgtgtaccagctgaaggaccccagaagccaggacagcaccctgtgcctgttcaccgacttcgacagccagatcaacgtgcccaagacaatggaaagcggcaccttcatcaccgacaagtgcgtgctggacatgaaggctatggacagcaagagcaacggcgccattgcctggtccaaccagaccagcttcacatgccaggacatcttcaaagagacaaacgccacctacccctccagcgacgtgccctgtgacgccaccctgaccgagaagtccttcgagacagacatgaacctcaacttccagaacctgctggtggtgggcctgcgaatcctgctgctgaaagtggccggcttcaacctgctgatgaccctgcggctgtggtccagcaaacggggcagaaagaaactcctgtatatattcaaacaaccatttatgagaccagtacaaactactcaagaggaagatggctgtagctgccgatttccagaagaagaagaaggaggatgtgaactgagagtgaagttcagcagaagcgccgacgcccctgcctaccagcagggacagaaccaactgtacaacgagctgaacctgggcagacgggaagagtacgacgtgctggacaagcggagaggcagggaccctgagatgggcggaaagccccagcggagaaagaacccccaggaaggactgtataacgaactccagaaagacaagatggccgaagcctacagcgagatcggcatgaagggcgagcggagaagaggcaagggccacgatggcctgtaccagggcctgagcaccgccaccaaggacacctatgacgccctgcacatgcaggccctgcctccaaga

SEQ ID NO: 27312 - DNA, 852 bp, synthetic construct
  source 1..852: mol_type = other DNA
gtgtaccagctgaaggaccccagaagccaggacagcaccctgtgcctgttcaccgacttcgacagccagatcaacgtgcccaagacaatggaaagcggcaccttcatcaccgacaagtgcgtgctggacatgaaggctatggacagcaagagcaacggcgccattgcctggtccaaccagaccagcttcacatgccaggacatcttcaaagagacaaacgccacctacccctccagcgacgtgccctgtgacgccaccctgaccgagaagtccttcgagacagacatgaacctcaacttccagaacctgctggtggtgggcctgcgaatcctgctgctgaaagtggccggcttcaacctgctgatgaccctgcggctgtggtccagcaaacggggcagaaagaaactcctgtatatattcaaacaaccatttatgagaccagtacaaactactcaagaggaagatggctgtagctgccgatttccagaagaagaagaaggaggatgtgaactgagagtgaagttcagcagaagcgccgacgcccctgcctaccagcagggacagaaccaactgtacaacgagctgaacctgggcagacgggaagagtacgacgtgctggacaagcggagaggcagggaccctgagatgggcggaaagccccagcggagaaagaacccccaggaaggactgtataacgaactccagaaagacaagatggccgaagcctacagcgagatcggcatgaagggcgagcggagaagaggcaagggccacgatggcctgtaccagggcctgagcaccgccaccaaggacacctatgacgccctgcacatgcaggccctgcctccaaga

SEQ ID NO: 27313 - DNA, 849 bp, synthetic construct
  source 1..849: mol_type = other DNA
taccagctgaaggaccccagaagccaggacagcaccctgtgcctgttcaccgacttcgacagccagatcaacgtgcccaagacaatggaaagcggcaccttcatcaccgacaagtgcgtgctggacatgaaggctatggacagcaagagcaacggcgccattgcctggtccaaccagaccagcttcacatgccaggacatcttcaaagagacaaacgccacctacccctccagcgacgtgccctgtgacgccaccctgaccgagaagtccttcgagacagacatgaacctcaacttccagaacctgctggtggtgggcctgcgaatcctgctgctgaaagtggccggcttcaacctgctgatgaccctgcggctgtggtccagcaaacggggcagaaagaaactcctgtatatattcaaacaaccatttatgagaccagtacaaactactcaagaggaagatggctgtagctgccgatttccagaagaagaagaaggaggatgtgaactgagagtgaagttcagcagaagcgccgacgcccctgcctaccagcagggacagaaccaactgtacaacgagctgaacctgggcagacgggaagagtacgacgtgctggacaagcggagaggcagggaccctgagatgggcggaaagccccagcggagaaagaacccccaggaaggactgtataacgaactccagaaagacaagatggccgaagcctacagcgagatcggcatgaagggcgagcggagaagaggcaagggccacgatggcctgtaccagggcctgagcaccgccaccaaggacacctatgacgccctgcacatgcaggccctgcctccaaga

SEQ ID NO: 27314 - DNA, 846 bp, synthetic construct
  source 1..846: mol_type = other DNA
cagctgaaggaccccagaagccaggacagcaccctgtgcctgttcaccgacttcgacagccagatcaacgtgcccaagacaatggaaagcggcaccttcatcaccgacaagtgcgtgctggacatgaaggctatggacagcaagagcaacggcgccattgcctggtccaaccagaccagcttcacatgccaggacatcttcaaagagacaaacgccacctacccctccagcgacgtgccctgtgacgccaccctgaccgagaagtccttcgagacagacatgaacctcaacttccagaacctgctggtggtgggcctgcgaatcctgctgctgaaagtggccggcttcaacctgctgatgaccctgcggctgtggtccagcaaacggggcagaaagaaactcctgtatatattcaaacaaccatttatgagaccagtacaaactactcaagaggaagatggctgtagctgccgatttccagaagaagaagaaggaggatgtgaactgagagtgaagttcagcagaagcgccgacgcccctgcctaccagcagggacagaaccaactgtacaacgagctgaacctgggcagacgggaagagtacgacgtgctggacaagcggagaggcagggaccctgagatgggcggaaagccccagcggagaaagaacccccaggaaggactgtataacgaactccagaaagacaagatggccgaagcctacagcgagatcggcatgaagggcgagcggagaagaggcaagggccacgatggcctgtaccagggcctgagcaccgccaccaaggacacctatgacgccctgcacatgcaggccctgcctccaaga

SEQ ID NO: 27315 - DNA, 843 bp, synthetic construct
  source 1..843: mol_type = other DNA
ctgaaggaccccagaagccaggacagcaccctgtgcctgttcaccgacttcgacagccagatcaacgtgcccaagacaatggaaagcggcaccttcatcaccgacaagtgcgtgctggacatgaaggctatggacagcaagagcaacggcgccattgcctggtccaaccagaccagcttcacatgccaggacatcttcaaagagacaaacgccacctacccctccagcgacgtgccctgtgacgccaccctgaccgagaagtccttcgagacagacatgaacctcaacttccagaacctgctggtggtgggcctgcgaatcctgctgctgaaagtggccggcttcaacctgctgatgaccctgcggctgtggtccagcaaacggggcagaaagaaactcctgtatatattcaaacaaccatttatgagaccagtacaaactactcaagaggaagatggctgtagctgccgatttccagaagaagaagaaggaggatgtgaactgagagtgaagttcagcagaagcgccgacgcccctgcctaccagcagggacagaaccaactgtacaacgagctgaacctgggcagacgggaagagtacgacgtgctggacaagcggagaggcagggaccctgagatgggcggaaagccccagcggagaaagaacccccaggaaggactgtataacgaactccagaaagacaagatggccgaagcctacagcgagatcggcatgaagggcgagcggagaagaggcaagggccacgatggcctgtaccagggcctgagcaccgccaccaaggacacctatgacgccctgcacatgcaggccctgcctccaaga

SEQ ID NO: 27316 - DNA, 828 bp, synthetic construct
  source 1..828: mol_type = other DNA
agccaggacagcaccctgtgcctgttcaccgacttcgacagccagatcaacgtgcccaagacaatggaaagcggcaccttcatcaccgacaagtgcgtgctggacatgaaggctatggacagcaagagcaacggcgccattgcctggtccaaccagaccagcttcacatgccaggacatcttcaaagagacaaacgccacctacccctccagcgacgtgccctgtgacgccaccctgaccgagaagtccttcgagacagacatgaacctcaacttccagaacctgctggtggtgggcctgcgaatcctgctgctgaaagtggccggcttcaacctgctgatgaccctgcggctgtggtccagcaaacggggcagaaagaaactcctgtatatattcaaacaaccatttatgagaccagtacaaactactcaagaggaagatggctgtagctgccgatttccagaagaagaagaaggaggatgtgaactgagagtgaagttcagcagaagcgccgacgcccctgcctaccagcagggacagaaccaactgtacaacgagctgaacctgggcagacgggaagagtacgacgtgctggacaagcggagaggcagggaccctgagatgggcggaaagccccagcggagaaagaacccccaggaaggactgtataacgaactccagaaagacaagatggccgaagcctacagcgagatcggcatgaagggcgagcggagaagaggcaagggccacgatggcctgtaccagggcctgagcaccgccaccaaggacacctatgacgccctgcacatgcaggccctgcctccaaga

SEQ ID NO: 27317 - DNA, 813 bp, synthetic construct
  source 1..813: mol_type = other DNA
ctgtgcctgttcaccgacttcgacagccagatcaacgtgcccaagacaatggaaagcggcaccttcatcaccgacaagtgcgtgctggacatgaaggctatggacagcaagagcaacggcgccattgcctggtccaaccagaccagcttcacatgccaggacatcttcaaagagacaaacgccacctacccctccagcgacgtgccctgtgacgccaccctgaccgagaagtccttcgagacagacatgaacctcaacttccagaacctgctggtggtgggcctgcgaatcctgctgctgaaagtggccggcttcaacctgctgatgaccctgcggctgtggtccagcaaacggggcagaaagaaactcctgtatatattcaaacaaccatttatgagaccagtacaaactactcaagaggaagatggctgtagctgccgatttccagaagaagaagaaggaggatgtgaactgagagtgaagttcagcagaagcgccgacgcccctgcctaccagcagggacagaaccaactgtacaacgagctgaacctgggcagacgggaagagtacgacgtgctggacaagcggagaggcagggaccctgagatgggcggaaagccccagcggagaaagaacccccaggaaggactgtataacgaactccagaaagacaagatggccgaagcctacagcgagatcggcatgaagggcgagcggagaagaggcaagggccacgatggcctgtaccagggcctgagcaccgccaccaaggacacctatgacgccctgcacatgcaggccctgcctccaaga

SEQ ID NO: 27318 - DNA, 978 bp, synthetic construct
  source 1..978: mol_type = other DNA
gaggatctgcggaacgtgaccccacccaaggtgtccctgttcgagcccagcaaggccgagatcgccaataaacagaaggccaccctcgtgtgcctggccagaggcttcttccccgaccacgtggaactgtcttggtgggtcaacggcaaagaggtgcacagcggcgtctgcaccgaccctcaggcctacaaagagagcaactacagctactgcctgagcagtcggctgcgggtgtccgccaccttctggcacaacccccggaaccacttcagatgccaggtgcagttccacggcctgagcgaagaggacaagtggcccgaaggcagccctaagcctgtcacccagaacatcagcgccgaggcctggggcagagcctgtggcatcaccagcagctaccagcagggcgtgctgagcgccaccatcctgtacgagatcctgctgggcaaggccaccctgtacgccgtgctggtgtccaccctggtggtcatggctatggtcaagcggaagaacagcaaacggggcagaaagaaactcctgtatatattcaaacaaccatttatgagaccagtacaaactactcaagaggaagatggctgtagctgccgatttccagaagaagaagaaggaggatgtgaactgagagtgaagttcagcagaagcgccgacgcccctgcctaccagcagggacagaaccaactgtacaacgagctgaacctgggcagacgggaagagtacgacgtgctggacaagcggagaggcagggaccctgagatgggcggaaagccccagcggagaaagaacccccaggaaggactgtataacgaactccagaaagacaagatggccgaagcctacagcgagatcggcatgaagggcgagcggagaagaggcaagggccacgatggcctgtaccagggcctgagcaccgccaccaaggacacctatgacgccctgcacatgcaggccctgcctccaaga

SEQ ID NO: 27319 - DNA, 975 bp, synthetic construct
  source 1..975: mol_type = other DNA
gatctgcggaacgtgaccccacccaaggtgtccctgttcgagcccagcaaggccgagatcgccaataaacagaaggccaccctcgtgtgcctggccagaggcttcttccccgaccacgtggaactgtcttggtgggtcaacggcaaagaggtgcacagcggcgtctgcaccgaccctcaggcctacaaagagagcaactacagctactgcctgagcagtcggctgcgggtgtccgccaccttctggcacaacccccggaaccacttcagatgccaggtgcagttccacggcctgagcgaagaggacaagtggcccgaaggcagccctaagcctgtcacccagaacatcagcgccgaggcctggggcagagcctgtggcatcaccagcagctaccagcagggcgtgctgagcgccaccatcctgtacgagatcctgctgggcaaggccaccctgtacgccgtgctggtgtccaccctggtggtcatggctatggtcaagcggaagaacagcaaacggggcagaaagaaactcctgtatatattcaaacaaccatttatgagaccagtacaaactactcaagaggaagatggctgtagctgccgatttccagaagaagaagaaggaggatgtgaactgagagtgaagttcagcagaagcgccgacgcccctgcctaccagcagggacagaaccaactgtacaacgagctgaacctgggcagacgggaagagtacgacgtgctggacaagcggagaggcagggaccctgagatgggcggaaagccccagcggagaaagaacccccaggaaggactgtataacgaactccagaaagacaagatggccgaagcctacagcgagatcggcatgaagggcgagcggagaagaggcaagggccacgatggcctgtaccagggcctgagcaccgccaccaaggacacctatgacgccctgcacatgcaggccctgcctccaaga

SEQ ID NO: 27320 - DNA, 969 bp, synthetic construct
  source 1..969: mol_type = other DNA
cggaacgtgaccccacccaaggtgtccctgttcgagcccagcaaggccgagatcgccaataaacagaaggccaccctcgtgtgcctggccagaggcttcttccccgaccacgtggaactgtcttggtgggtcaacggcaaagaggtgcacagcggcgtctgcaccgaccctcaggcctacaaagagagcaactacagctactgcctgagcagtcggctgcgggtgtccgccaccttctggcacaacccccggaaccacttcagatgccaggtgcagttccacggcctgagcgaagaggacaagtggcccgaaggcagccctaagcctgtcacccagaacatcagcgccgaggcctggggcagagcctgtggcatcaccagcagctaccagcagggcgtgctgagcgccaccatcctgtacgagatcctgctgggcaaggccaccctgtacgccgtgctggtgtccaccctggtggtcatggctatggtcaagcggaagaacagcaaacggggcagaaagaaactcctgtatatattcaaacaaccatttatgagaccagtacaaactactcaagaggaagatggctgtagctgccgatttccagaagaagaagaaggaggatgtgaactgagagtgaagttcagcagaagcgccgacgcccctgcctaccagcagggacagaaccaactgtacaacgagctgaacctgggcagacgggaagagtacgacgtgctggacaagcggagaggcagggaccctgagatgggcggaaagccccagcggagaaagaacccccaggaaggactgtataacgaactccagaaagacaagatggccgaagcctacagcgagatcggcatgaagggcgagcggagaagaggcaagggccacgatggcctgtaccagggcctgagcaccgccaccaaggacacctatgacgccctgcacatgcaggccctgcctccaaga

SEQ ID NO: 27321 - DNA, 966 bp, synthetic construct
  source 1..966: mol_type = other DNA
aacgtgaccccacccaaggtgtccctgttcgagcccagcaaggccgagatcgccaataaacagaaggccaccctcgtgtgcctggccagaggcttcttccccgaccacgtggaactgtcttggtgggtcaacggcaaagaggtgcacagcggcgtctgcaccgaccctcaggcctacaaagagagcaactacagctactgcctgagcagtcggctgcgggtgtccgccaccttctggcacaacccccggaaccacttcagatgccaggtgcagttccacggcctgagcgaagaggacaagtggcccgaaggcagccctaagcctgtcacccagaacatcagcgccgaggcctggggcagagcctgtggcatcaccagcagctaccagcagggcgtgctgagcgccaccatcctgtacgagatcctgctgggcaaggccaccctgtacgccgtgctggtgtccaccctggtggtcatggctatggtcaagcggaagaacagcaaacggggcagaaagaaactcctgtatatattcaaacaaccatttatgagaccagtacaaactactcaagaggaagatggctgtagctgccgatttccagaagaagaagaaggaggatgtgaactgagagtgaagttcagcagaagcgccgacgcccctgcctaccagcagggacagaaccaactgtacaacgagctgaacctgggcagacgggaagagtacgacgtgctggacaagcggagaggcagggaccctgagatgggcggaaagccccagcggagaaagaacccccaggaaggactgtataacgaactccagaaagacaagatggccgaagcctacagcgagatcggcatgaagggcgagcggagaagaggcaagggccacgatggcctgtaccagggcctgagcaccgccaccaaggacacctatgacgccctgcacatgcaggccctgcctccaaga

SEQ ID NO: 27322 - DNA, 963 bp, synthetic construct
  source 1..963: mol_type = other DNA
gtgaccccacccaaggtgtccctgttcgagcccagcaaggccgagatcgccaataaacagaaggccaccctcgtgtgcctggccagaggcttcttccccgaccacgtggaactgtcttggtgggtcaacggcaaagaggtgcacagcggcgtctgcaccgaccctcaggcctacaaagagagcaactacagctactgcctgagcagtcggctgcgggtgtccgccaccttctggcacaacccccggaaccacttcagatgccaggtgcagttccacggcctgagcgaagaggacaagtggcccgaaggcagccctaagcctgtcacccagaacatcagcgccgaggcctggggcagagcctgtggcatcaccagcagctaccagcagggcgtgctgagcgccaccatcctgtacgagatcctgctgggcaaggccaccctgtacgccgtgctggtgtccaccctggtggtcatggctatggtcaagcggaagaacagcaaacggggcagaaagaaactcctgtatatattcaaacaaccatttatgagaccagtacaaactactcaagaggaagatggctgtagctgccgatttccagaagaagaagaaggaggatgtgaactgagagtgaagttcagcagaagcgccgacgcccctgcctaccagcagggacagaaccaactgtacaacgagctgaacctgggcagacgggaagagtacgacgtgctggacaagcggagaggcagggaccctgagatgggcggaaagccccagcggagaaagaacccccaggaaggactgtataacgaactccagaaagacaagatggccgaagcctacagcgagatcggcatgaagggcgagcggagaagaggcaagggccacgatggcctgtaccagggcctgagcaccgccaccaaggacacctatgacgccctgcacatgcaggccctgcctccaaga

SEQ ID NO: 27323 - DNA, 960 bp, synthetic construct
  source 1..960: mol_type = other DNA
accccacccaaggtgtccctgttcgagcccagcaaggccgagatcgccaataaacagaaggccaccctcgtgtgcctggccagaggcttcttccccgaccacgtggaactgtcttggtgggtcaacggcaaagaggtgcacagcggcgtctgcaccgaccctcaggcctacaaagagagcaactacagctactgcctgagcagtcggctgcgggtgtccgccaccttctggcacaacccccggaaccacttcagatgccaggtgcagttccacggcctgagcgaagaggacaagtggcccgaaggcagccctaagcctgtcacccagaacatcagcgccgaggcctggggcagagcctgtggcatcaccagcagctaccagcagggcgtgctgagcgccaccatcctgtacgagatcctgctgggcaaggccaccctgtacgccgtgctggtgtccaccctggtggtcatggctatggtcaagcggaagaacagcaaacggggcagaaagaaactcctgtatatattcaaacaaccatttatgagaccagtacaaactactcaagaggaagatggctgtagctgccgatttccagaagaagaagaaggaggatgtgaactgagagtgaagttcagcagaagcgccgacgcccctgcctaccagcagggacagaaccaactgtacaacgagctgaacctgggcagacgggaagagtacgacgtgctggacaagcggagaggcagggaccctgagatgggcggaaagccccagcggagaaagaacccccaggaaggactgtataacgaactccagaaagacaagatggccgaagcctacagcgagatcggcatgaagggcgagcggagaagaggcaagggccacgatggcctgtaccagggcctgagcaccgccaccaaggacacctatgacgccctgcacatgcaggccctgcctccaaga

SEQ ID NO: 27324 - DNA, 957 bp, synthetic construct
  source 1..957: mol_type = other DNA
ccacccaaggtgtccctgttcgagcccagcaaggccgagatcgccaataaacagaaggccaccctcgtgtgcctggccagaggcttcttccccgaccacgtggaactgtcttggtgggtcaacggcaaagaggtgcacagcggcgtctgcaccgaccctcaggcctacaaagagagcaactacagctactgcctgagcagtcggctgcgggtgtccgccaccttctggcacaacccccggaaccacttcagatgccaggtgcagttccacggcctgagcgaagaggacaagtggcccgaaggcagccctaagcctgtcacccagaacatcagcgccgaggcctggggcagagcctgtggcatcaccagcagctaccagcagggcgtgctgagcgccaccatcctgtacgagatcctgctgggcaaggccaccctgtacgccgtgctggtgtccaccctggtggtcatggctatggtcaagcggaagaacagcaaacggggcagaaagaaactcctgtatatattcaaacaaccatttatgagaccagtacaaactactcaagaggaagatggctgtagctgccgatttccagaagaagaagaaggaggatgtgaactgagagtgaagttcagcagaagcgccgacgcccctgcctaccagcagggacagaaccaactgtacaacgagctgaacctgggcagacgggaagagtacgacgtgctggacaagcggagaggcagggaccctgagatgggcggaaagccccagcggagaaagaacccccaggaaggactgtataacgaactccagaaagacaagatggccgaagcctacagcgagatcggcatgaagggcgagcggagaagaggcaagggccacgatggcctgtaccagggcctgagcaccgccaccaaggacacctatgacgccctgcacatgcaggccctgcctccaaga

SEQ ID NO: 27325 - DNA, 954 bp, synthetic construct
  source 1..954: mol_type = other DNA
cccaaggtgtccctgttcgagcccagcaaggccgagatcgccaataaacagaaggccaccctcgtgtgcctggccagaggcttcttccccgaccacgtggaactgtcttggtgggtcaacggcaaagaggtgcacagcggcgtctgcaccgaccctcaggcctacaaagagagcaactacagctactgcctgagcagtcggctgcgggtgtccgccaccttctggcacaacccccggaaccacttcagatgccaggtgcagttccacggcctgagcgaagaggacaagtggcccgaaggcagccctaagcctgtcacccagaacatcagcgccgaggcctggggcagagcctgtggcatcaccagcagctaccagcagggcgtgctgagcgccaccatcctgtacgagatcctgctgggcaaggccaccctgtacgccgtgctggtgtccaccctggtggtcatggctatggtcaagcggaagaacagcaaacggggcagaaagaaactcctgtatatattcaaacaaccatttatgagaccagtacaaactactcaagaggaagatggctgtagctgccgatttccagaagaagaagaaggaggatgtgaactgagagtgaagttcagcagaagcgccgacgcccctgcctaccagcagggacagaaccaactgtacaacgagctgaacctgggcagacgggaagagtacgacgtgctggacaagcggagaggcagggaccctgagatgggcggaaagccccagcggagaaagaacccccaggaaggactgtataacgaactccagaaagacaagatggccgaagcctacagcgagatcggcatgaagggcgagcggagaagaggcaagggccacgatggcctgtaccagggcctgagcaccgccaccaaggacacctatgacgccctgcacatgcaggccctgcctccaaga

SEQ ID NO: 27326 - DNA, 951 bp, synthetic construct
  source 1..951: mol_type = other DNA
aaggtgtccctgttcgagcccagcaaggccgagatcgccaataaacagaaggccaccctcgtgtgcctggccagaggcttcttccccgaccacgtggaactgtcttggtgggtcaacggcaaagaggtgcacagcggcgtctgcaccgaccctcaggcctacaaagagagcaactacagctactgcctgagcagtcggctgcgggtgtccgccaccttctggcacaacccccggaaccacttcagatgccaggtgcagttccacggcctgagcgaagaggacaagtggcccgaaggcagccctaagcctgtcacccagaacatcagcgccgaggcctggggcagagcctgtggcatcaccagcagctaccagcagggcgtgctgagcgccaccatcctgtacgagatcctgctgggcaaggccaccctgtacgccgtgctggtgtccaccctggtggtcatggctatggtcaagcggaagaacagcaaacggggcagaaagaaactcctgtatatattcaaacaaccatttatgagaccagtacaaactactcaagaggaagatggctgtagctgccgatttccagaagaagaagaaggaggatgtgaactgagagtgaagttcagcagaagcgccgacgcccctgcctaccagcagggacagaaccaactgtacaacgagctgaacctgggcagacgggaagagtacgacgtgctggacaagcggagaggcagggaccctgagatgggcggaaagccccagcggagaaagaacccccaggaaggactgtataacgaactccagaaagacaagatggccgaagcctacagcgagatcggcatgaagggcgagcggagaagaggcaagggccacgatggcctgtaccagggcctgagcaccgccaccaaggacacctatgacgccctgcacatgcaggccctgcctccaaga

SEQ ID NO: 27327 - DNA, 948 bp, synthetic construct
  source 1..948: mol_type = other DNA
gtgtccctgttcgagcccagcaaggccgagatcgccaataaacagaaggccaccctcgtgtgcctggccagaggcttcttccccgaccacgtggaactgtcttggtgggtcaacggcaaagaggtgcacagcggcgtctgcaccgaccctcaggcctacaaagagagcaactacagctactgcctgagcagtcggctgcgggtgtccgccaccttctggcacaacccccggaaccacttcagatgccaggtgcagttccacggcctgagcgaagaggacaagtggcccgaaggcagccctaagcctgtcacccagaacatcagcgccgaggcctggggcagagcctgtggcatcaccagcagctaccagcagggcgtgctgagcgccaccatcctgtacgagatcctgctgggcaaggccaccctgtacgccgtgctggtgtccaccctggtggtcatggctatggtcaagcggaagaacagcaaacggggcagaaagaaactcctgtatatattcaaacaaccatttatgagaccagtacaaactactcaagaggaagatggctgtagctgccgatttccagaagaagaagaaggaggatgtgaactgagagtgaagttcagcagaagcgccgacgcccctgcctaccagcagggacagaaccaactgtacaacgagctgaacctgggcagacgggaagagtacgacgtgctggacaagcggagaggcagggaccctgagatgggcggaaagccccagcggagaaagaacccccaggaaggactgtataacgaactccagaaagacaagatggccgaagcctacagcgagatcggcatgaagggcgagcggagaagaggcaagggccacgatggcctgtaccagggcctgagcaccgccaccaaggacacctatgacgccctgcacatgcaggccctgcctccaaga

SEQ ID NO: 27328 - DNA, 978 bp, synthetic construct; identical to SEQ ID NO: 27318
  source 1..978: mol_type = other DNA

SEQ ID NO: 27329 - DNA, 963 bp, synthetic construct; identical to SEQ ID NO: 27322
  source 1..963: mol_type = other DNA

SEQ ID NO: 27330 - DNA, 948 bp, synthetic construct; identical to SEQ ID NO: 27327
  source 1..948: mol_type = other DNA

SEQ ID NO: 27331 - DNA, 885 bp, synthetic construct
  source 1..885: mol_type = other DNA
atccagaaccctgatcctgccgtgtaccagctgcgggatagcaagagcagcgacaagagcgtgtgtctgttcaccgacttcgacagccagaccaacgtgtcccagagcaaggactccgacgtgtacatcaccgataagtgcgtgctggacatgcggagcatggacttcaagagcaactccgccgtggcctggtccaacaagtccgatttcgcctgcgccaacgccttcaacaacagcattatccccgaggacacattcttcccaagccccgagagcagctgcgacgtgaagctggtggaaaagagcttcgagacagacaccaacctgaacttccagaacctgctggtgatcgtgctgagaatcctgctgctgaaagtggccggctttaacctgctgatgaccctgcggctgtggtccagcaaacggggcagaaagaaactcctgtatatattcaaacaaccatttatgagaccagtacaaactactcaagaggaagatggctgtagctgccgatttccagaagaagaagaaggaggatgtgaactgagagtgaagttcagcagaagcgccgacgcccctgcctaccagcagggacagaaccaactgtacaacgagctgaacctgggcagacgggaagagtacgacgtgctggacaagcggagaggcagggaccctgagatgggcggaaagccccagcggagaaagaacccccaggaaggactgtataacgaactccagaaagacaagatggccgaagcctacagcgagatcggcatgaagggcgagcggagaagaggcaagggccacgatggcctgtaccagggcctgagcaccgccaccaaggacacctatgacgccctgcacatgcaggccctgcctccaaga

SEQ ID NO: 27332 - DNA, 882 bp, synthetic construct
  source 1..882: mol_type = other DNA
cagaaccctgatcctgccgtgtaccagctgcgggatagcaagagcagcgacaagagcgtgtgtctgttcaccgacttcgacagccagaccaacgtgtcccagagcaaggactccgacgtgtacatcaccgataagtgcgtgctggacatgcggagcatggacttcaagagcaactccgccgtggcctggtccaacaagtccgatttcgcctgcgccaacgccttcaacaacagcattatccccgaggacacattcttcccaagccccgagagcagctgcgacgtgaagctggtggaaaagagcttcgagacagacaccaacctgaacttccagaacctgctggtgatcgtgctgagaatcctgctgctgaaagtggccggctttaacctgctgatgaccctgcggctgtggtccagcaaacggggcagaaagaaactcctgtatatattcaaacaaccatttatgagaccagtacaaactactcaagaggaagatggctgtagctgccgatttccagaagaagaagaaggaggatgtgaactgagagtgaagttcagcagaagcgccgacgcccctgcctaccagcagggacagaaccaactgtacaacgagctgaacctgggcagacgggaagagtacgacgtgctggacaagcggagaggcagggaccctgagatgggcggaaagccccagcggagaaagaacccccaggaaggactgtataacgaactccagaaagacaagatggccgaagcctacagcgagatcggcatgaagggcgagcggagaagaggcaagggccacgatggcctgtaccagggcctgagcaccgccaccaaggacacctatgacgccctgcacatgcaggccctgcctccaaga

SEQ ID NO: 27333 - DNA, 879 bp, synthetic construct
  source 1..879: mol_type = other DNA
aaccctgatcctgccgtgtaccagctgcgggatagcaagagcagcgacaagagcgtgtgtctgttcaccgacttcgacagccagaccaacgtgtcccagagcaaggactccgacgtgtacatcaccgataagtgcgtgctggacatgcggagcatggacttcaagagcaactccgccgtggcctggtccaacaagtccgatttcgcctgcgccaacgccttcaacaacagcattatccccgaggacacattcttcccaagccccgagagcagctgcgacgtgaagctggtggaaaagagcttcgagacagacaccaacctgaacttccagaacctgctggtgatcgtgctgagaatcctgctgctgaaagtggccggctttaacctgctgatgaccctgcggctgtggtccagcaaacggggcagaaagaaactcctgtatatattcaaacaaccatttatgagaccagtacaaactactcaagaggaagatggctgtagctgccgatttccagaagaagaagaaggaggatgtgaactgagagtgaagttcagcagaagcgccgacgcccctgcctaccagcagggacagaaccaactgtacaacgagctgaacctgggcagacgggaagagtacgacgtgctggacaagcggagaggcagggaccctgagatgggcggaaagccccagcggagaaagaacccccaggaaggactgtataacgaactccagaaagacaagatggccgaagcctacagcgagatcggcatgaagggcgagcggagaagaggcaagggccacgatggcctgtaccagggcctgagcaccgccaccaaggacacctatgacgccctgcacatgcaggccctgcctccaaga

SEQ ID NO: 27334 - DNA, 876 bp, synthetic construct
  source 1..876: mol_type = other DNA
cctgatcctgccgtgtaccagctgcgggatagcaagagcagcgacaagagcgtgtgtctgttcaccgacttcgacagccagaccaacgtgtcccagagcaaggactccgacgtgtacatcaccgataagtgcgtgctggacatgcggagcatggacttcaagagcaactccgccgtggcctggtccaacaagtccgatttcgcctgcgccaacgccttcaacaacagcattatccccgaggacacattcttcccaagccccgagagcagctgcgacgtgaagctggtggaaaagagcttcgagacagacaccaacctgaacttccagaacctgctggtgatcgtgctgagaatcctgctgctgaaagtggccggctttaacctgctgatgaccctgcggctgtggtccagcaaacggggcagaaagaaactcctgtatatattcaaacaaccatttatgagaccagtacaaactactcaagaggaagatggctgtagctgccgatttccagaagaagaagaaggaggatgtgaactgagagtgaagttcagcagaagcgccgacgcccctgcctaccagcagggacagaaccaactgtacaacgagctgaacctgggcagacgggaagagtacgacgtgctggacaagcggagaggcagggaccctgagatgggcggaaagccccagcggagaaagaacccccaggaaggactgtataacgaactccagaaagacaagatggccgaagcctacagcgagatcggcatgaagggcgagcggagaagaggcaagggccacgatggcctgtaccagggcctgagcaccgccaccaaggacacctatgacgccctgcacatgcaggccctgcctccaaga

SEQ ID NO: 27335 - DNA, 873 bp, synthetic construct
  source 1..873: mol_type = other DNA
gatcctgccgtgtaccagctgcgggatagcaagagcagcgacaagagcgtgtgtctgttcaccgacttcgacagccagaccaacgtgtcccagagcaaggactccgacgtgtacatcaccgataagtgcgtgctggacatgcggagcatggacttcaagagcaactccgccgtggcctggtccaacaagtccgatttcgcctgcgccaacgccttcaacaacagcattatccccgaggacacattcttcccaagccccgagagcagctgcgacgtgaagctggtggaaaagagcttcgagacagacaccaacctgaacttccagaacctgctggtgatcgtgctgagaatcctgctgctgaaagtggccggctttaacctgctgatgaccctgcggctgtggtccagcaaacggggcagaaagaaactcctgtatatattcaaacaaccatttatgagaccagtacaaactactcaagaggaagatggctgtagctgccgatttccagaagaagaagaaggaggatgtgaactgagagtgaagttcagcagaagcgccgacgcccctgcctaccagcagggacagaaccaactgtacaacgagctgaacctgggcagacgggaagagtacgacgtgctggacaagcggagaggcagggaccctgagatgggcggaaagccccagcggagaaagaacccccaggaaggactgtataacgaactccagaaagacaagatggccgaagcctacagcgagatcggcatgaagggcgagcggagaagaggcaagggccacgatggcctgtaccagggcctgagcaccgccaccaaggacacctatgacgccctgcacatgcaggccctgcctccaaga

SEQ ID NO: 27336 - DNA, 870 bp, synthetic construct
  source 1..870: mol_type = other DNA
cctgccgtgtaccagctgcgggatagcaagagcagcgacaagagcgtgtgtctgttcaccgacttcgacagccagaccaacgtgtcccagagcaaggactccgacgtgtacatcaccgataagtgcgtgctggacatgcggagcatggacttcaagagcaactccgccgtggcctggtccaacaagtccgatttcgcctgcgccaacgccttcaacaacagcattatccccgaggacacattcttcccaagccccgagagcagctgcgacgtgaagctggtggaaaagagcttcgagacagacaccaacctgaacttccagaacctgctggtgatcgtgctgagaatcctgctgctgaaagtggccggctttaacctgctgatgaccctgcggctgtggtccagcaaacggggcagaaagaaactcctgtatatattcaaacaaccatttatgagaccagtacaaactactcaagaggaagatggctgtagctgccgatttccagaagaagaagaaggaggatgtgaactgagagtgaagttcagcagaagcgccgacgcccctgcctaccagcagggacagaaccaactgtacaacgagctgaacctgggcagacgggaagagtacgacgtgctggacaagcggagaggcagggaccctgagatgggcggaaagccccagcggagaaagaacccccaggaaggactgtataacgaactccagaaagacaagatggccgaagcctacagcgagatcggcatgaagggcgagcggagaagaggcaagggccacgatggcctgtaccagggcctgagcaccgccaccaaggacacctatgacgccctgcacatgcaggccctgcctccaaga

SEQ ID NO: 27337 - DNA, 867 bp, synthetic construct
  source 1..867: mol_type = other DNA
gccgtgtaccagctgcgggatagcaagagcagcgacaagagcgtgtgtctgttcaccgacttcgacagccagaccaacgtgtcccagagcaaggactccgacgtgtacatcaccgataagtgcgtgctggacatgcggagcatggacttcaagagcaactccgccgtggcctggtccaacaagtccgatttcgcctgcgccaacgccttcaacaacagcattatccccgaggacacattcttcccaagccccgagagcagctgcgacgtgaagctggtggaaaagagcttcgagacagacaccaacctgaacttccagaacctgctggtgatcgtgctgagaatcctgctgctgaaagtggccggctttaacctgctgatgaccctgcggctgtggtccagcaaacggggcagaaagaaactcctgtatatattcaaacaaccatttatgagaccagtacaaactactcaagaggaagatggctgtagctgccgatttccagaagaagaagaaggaggatgtgaactgagagtgaagttcagcagaagcgccgacgcccctgcctaccagcagggacagaaccaactgtacaacgagctgaacctgggcagacgggaagagtacgacgtgctggacaagcggagaggcagggaccctgagatgggcggaaagccccagcggagaaagaacccccaggaaggactgtataacgaactccagaaagacaagatggccgaagcctacagcgagatcggcatgaagggcgagcggagaagaggcaagggccacgatggcctgtaccagggcctgagcaccgccaccaaggacacctatgacgccctgcacatgcaggccctgcctccaaga

SEQ ID NO: 27338 - DNA, 864 bp, synthetic construct
  source 1..864: mol_type = other DNA
gtgtaccagctgcgggatagcaagagcagcgacaagagcgtgtgtctgttcaccgacttcgacagccagaccaacgtgtcccagagcaaggactccgacgtgtacatcaccgataagtgcgtgctggacatgcggagcatggacttcaagagcaactccgccgtggcctggtccaacaagtccgatttcgcctgcgccaacgccttcaacaacagcattatccccgaggacacattcttcccaagccccgagagcagctgcgacgtgaagctggtggaaaagagcttcgagacagacaccaacctgaacttccagaacctgctggtgatcgtgctgagaatcctgctgctgaaagtggccggctttaacctgctgatgaccctgcggctgtggtccagcaaacggggcagaaagaaactcctgtatatattcaaacaaccatttatgagaccagtacaaactactcaagaggaagatggctgtagctgccgatttccagaagaagaagaaggaggatgtgaactgagagtgaagttcagcagaagcgccgacgcccctgcctaccagcagggacagaaccaactgtacaacgagctgaacctgggcagacgggaagagtacgacgtgctggacaagcggagaggcagggaccctgagatgggcggaaagccccagcggagaaagaacccccaggaaggactgtataacgaactccagaaagacaagatggccgaagcctacagcgagatcggcatgaagggcgagcggagaagaggcaagggccacgatggcctgtaccagggcctgagcaccgccaccaaggacacctatgacgccctgcacatgcaggccctgcctccaaga

SEQ ID NO: 27339 - DNA, 861 bp, synthetic construct
  source 1..861: mol_type = other DNA
taccagctgcgggatagcaagagcagcgacaagagcgtgtgtctgttcaccgacttcgacagccagaccaacgtgtcccagagcaaggactccgacgtgtacatcaccgataagtgcgtgctggacatgcggagcatggacttcaagagcaactccgccgtggcctggtccaacaagtccgatttcgcctgcgccaacgccttcaacaacagcattatccccgaggacacattcttcccaagccccgagagcagctgcgacgtgaagctggtggaaaagagcttcgagacagacaccaacctgaacttccagaacctgctggtgatcgtgctgagaatcctgctgctgaaagtggccggctttaacctgctgatgaccctgcggctgtggtccagcaaacggggcagaaagaaactcctgtatatattcaaacaaccatttatgagaccagtacaaactactcaagaggaagatggctgtagctgccgatttccagaagaagaagaaggaggatgtgaactgagagtgaagttcagcagaagcgccgacgcccctgcctaccagcagggacagaaccaactgtacaacgagctgaacctgggcagacgggaagagtacgacgtgctggacaagcggagaggcagggaccctgagatgggcggaaagccccagcggagaaagaacccccaggaaggactgtataacgaactccagaaagacaagatggccgaagcctacagcgagatcggcatgaagggcgagcggagaagaggcaagggccacgatggcctgtaccagggcctgagcaccgccaccaaggacacctatgacgccctgcacatgcaggccctgcctccaaga

SEQ ID NO: 27340 - DNA, 858 bp, synthetic construct
  source 1..858: mol_type = other DNA
cagctgcgggatagcaagagcagcgacaagagcgtgtgtctgttcaccgacttcgacagccagaccaacgtgtcccagagcaaggactccgacgtgtacatcaccgataagtgcgtgctggacatgcggagcatggacttcaagagcaactccgccgtggcctggtccaacaagtccgatttcgcctgcgccaacgccttcaacaacagcattatccccgaggacacattcttcccaagccccgagagcagctgcgacgtgaagctggtggaaaagagcttcgagacagacaccaacctgaacttccagaacctgctggtgatcgtgctgagaatcctgctgctgaaagtggccggctttaacctgctgatgaccctgcggctgtggtccagcaaacggggcagaaagaaactcctgtatatattcaaacaaccatttatgagaccagtacaaactactcaagaggaagatggctgtagctgccgatttccagaagaagaagaaggaggatgtgaactgagagtgaagttcagcagaagcgccgacgcccctgcctaccagcagggacagaaccaactgtacaacgagctgaacctgggcagacgggaagagtacgacgtgctggacaagcggagaggcagggaccctgagatgggcggaaagccccagcggagaaagaacccccaggaaggactgtataacgaactccagaaagacaagatggccgaagcctacagcgagatcggcatgaagggcgagcggagaagaggcaagggccacgatggcctgtaccagggcctgagcaccgccaccaaggacacctatgacgccctgcacatgcaggccctgcctccaaga

SEQ ID NO: 27341 - DNA, 855 bp, synthetic construct
  source 1..855: mol_type = other DNA
ctgcgggatagcaagagcagcgacaagagcgtgtgtctgttcaccgacttcgacagccagaccaacgtgtcccagagcaaggactccgacgtgtacatcaccgataagtgcgtgctggacatgcggagcatggacttcaagagcaactccgccgtggcctggtccaacaagtccgatttcgcctgcgccaacgccttcaacaacagcattatccccgaggacacattcttcccaagccccgagagcagctgcgacgtgaagctggtggaaaagagcttcgagacagacaccaacctgaacttccagaacctgctggtgatcgtgctgagaatcctgctgctgaaagtggccggctttaacctgctgatgaccctgcggctgtggtccagcaaacggggcagaaagaaactcctgtatatattcaaacaaccatttatgagaccagtacaaactactcaagaggaagatggctgtagctgccgatttccagaagaagaagaaggaggatgtgaactgagagtgaagttcagcagaagcgccgacgcccctgcctaccagcagggacagaaccaactgtacaacgagctgaacctgggcagacgggaagagtacgacgtgctggacaagcggagaggcagggaccctgagatgggcggaaagccccagcggagaaagaacccccaggaaggactgtataacgaactccagaaagacaagatggccgaagcctacagcgagatcggcatgaagggcgagcggagaagaggcaagggccacgatggcctgtaccagggcctgagcaccgccaccaaggacacctatgacgccctgcacatgcaggccctgcctccaaga

SEQ ID NO: 27342 - DNA, 852 bp, synthetic construct
  source 1..852: mol_type = other DNA
cgggatagcaagagcagcgacaagagcgtgtgtctgttcaccgacttcgacagccagaccaacgtgtcccagagcaaggactccgacgtgtacatcaccgataagtgcgtgctggacatgcggagcatggacttcaagagcaactccgccgtggcctggtccaacaagtccgatttcgcctgcgccaacgccttcaacaacagcattatccccgaggacacattcttcccaagccccgagagcagctgcgacgtgaagctggtggaaaagagcttcgagacagacaccaacctgaacttccagaacctgctggtgatcgtgctgagaatcctgctgctgaaagtggccggctttaacctgctgatgaccctgcggctgtggtccagcaaacggggcagaaagaaactcctgtatatattcaaacaaccatttatgagaccagtacaaactactcaagaggaagatggctgtagctgccgatttccagaagaagaagaaggaggatgtgaactgagagtgaagttcagcagaagcgccgacgcccctgcctaccagcagggacagaaccaactgtacaacgagctgaacctgggcagacgggaagagtacgacgtgctggacaagcggagaggcagggaccctgagatgggcggaaagccccagcggagaaagaacccccaggaaggactgtataacgaactccagaaagacaagatggccgaagcctacagcgagatcggcatgaagggcgagcggagaagaggcaagggccacgatggcctgtaccagggcctgagcaccgccaccaaggacacctatgacgccctgcacatgcaggccctgcctccaaga

SEQ ID NO: 27343 - DNA, 849 bp, synthetic construct
  source 1..849: mol_type = other DNA
gatagcaagagcagcgacaagagcgtgtgtctgttcaccgacttcgacagccagaccaacgtgtcccagagcaaggactccgacgtgtacatcaccgataagtgcgtgctggacatgcggagcatggacttcaagagcaactccgccgtggcctggtccaacaagtccgatttcgcctgcgccaacgccttcaacaacagcattatccccgaggacacattcttcccaagccccgagagcagctgcgacgtgaagctggtggaaaagagcttcgagacagacaccaacctgaacttccagaacctgctggtgatcgtgctgagaatcctgctgctgaaagtggccggctttaacctgctgatgaccctgcggctgtggtccagcaaacggggcagaaagaaactcctgtatatattcaaacaaccatttatgagaccagtacaaactactcaagaggaagatggctgtagctgccgatttccagaagaagaagaaggaggatgtgaactgagagtgaagttcagcagaagcgccgacgcccctgcctaccagcagggacagaaccaactgtacaacgagctgaacctgggcagacgggaagagtacgacgtgctggacaagcggagaggcagggaccctgagatgggcggaaagccccagcggagaaagaacccccaggaaggactgtataacgaactccagaaagacaagatggccgaagcctacagcgagatcggcatgaagggcgagcggagaagaggcaagggccacgatggcctgtaccagggcctgagcaccgccaccaaggacacctatgacgccctgcacatgcaggccctgcctccaaga

SEQ ID NO: 27344 - DNA, 846 bp, synthetic construct
  source 1..846: mol_type = other DNA
agcaagagcagcgacaagagcgtgtgtctgttcaccgacttcgacagccagaccaacgtgtcccagagcaaggactccgacgtgtacatcaccgataagtgcgtgctggacatgcggagcatggacttcaagagcaactccgccgtggcctggtccaacaagtccgatttcgcctgcgccaacgccttcaacaacagcattatccccgaggacacattcttcccaagccccgagagcagctgcgacgtgaagctggtggaaaagagcttcgagacagacaccaacctgaacttccagaacctgctggtgatcgtgctgagaatcctgctgctgaaagtggccggctttaacctgctgatgaccctgcggctgtggtccagcaaacggggcagaaagaaactcctgtatatattcaaacaaccatttatgagaccagtacaaactactcaagaggaagatggctgtagctgccgatttccagaagaagaagaaggaggatgtgaactgagagtgaagttcagcagaagcgccgacgcccctgcctaccagcagggacagaaccaactgtacaacgagctgaacctgggcagacgggaagagtacgacgtgctggacaagcggagaggcagggaccctgagatgggcggaaagccccagcggagaaagaacccccaggaaggactgtataacgaactccagaaagacaagatggccgaagcctacagcgagatcggcatgaagggcgagcggagaagaggcaagggccacgatggcctgtaccagggcctgagcaccgccaccaaggacacctatgacgccctgcacatgcaggccctgcctccaaga

SEQ ID NO: 27345 - DNA, 843 bp, synthetic construct
  source 1..843: mol_type = other DNA
aagagcagcgacaagagcgtgtgtctgttcaccgacttcgacagccagaccaacgtgtcccagagcaaggactccgacgtgtacatcaccgataagtgcgtgctggacatgcggagcatggacttcaagagcaactccgccgtggcctggtccaacaagtccgatttcgcctgcgccaacgccttcaacaacagcattatccccgaggacacattcttcccaagccccgagagcagctgcgacgtgaagctggtggaaaagagcttcgagacagacaccaacctgaacttccagaacctgctggtgatcgtgctgagaatcctgctgctgaaagtggccggctttaacctgctgatgaccctgcggctgtggtccagcaaacggggcagaaagaaactcctgtatatattcaaacaaccatttatgagaccagtacaaactactcaagaggaagatggctgtagctgccgatttccagaagaagaagaaggaggatgtgaactgagagtgaagttcagcagaagcgccgacgcccctgcctaccagcagggacagaaccaactgtacaacgagctgaacctgggcagacgggaagagtacgacgtgctggacaagcggagaggcagggaccctgagatgggcggaaagccccagcggagaaagaacccccaggaaggactgtataacgaactccagaaagacaagatggccgaagcctacagcgagatcggcatgaagggcgagcggagaagaggcaagggccacgatggcctgtaccagggcctgagcaccgccaccaaggacacctatgacgccctgcacatgcaggccctgcctccaaga

SEQ ID NO: 27346 - DNA, 840 bp, synthetic construct
  source 1..840: mol_type = other DNA
agcagcgacaagagcgtgtgtctgttcaccgacttcgacagccagaccaacgtgtcccagagcaaggactccgacgtgtacatcaccgataagtgcgtgctggacatgcggagcatggacttcaagagcaactccgccgtggcctggtccaacaagtccgatttcgcctgcgccaacgccttcaacaacagcattatccccgaggacacattcttcccaagccccgagagcagctgcgacgtgaagctggtggaaaagagcttcgagacagacaccaacctgaacttccagaacctgctggtgatcgtgctgagaatcctgctgctgaaagtggccggctttaacctgctgatgaccctgcggctgtggtccagcaaacggggcagaaagaaactcctgtatatattcaaacaaccatttatgagaccagtacaaactactcaagaggaagatggctgtagctgccgatttccagaagaagaagaaggaggatgtgaactgagagtgaagttcagcagaagcgccgacgcccctgcctaccagcagggacagaaccaactgtacaacgagctgaacctgggcagacgggaagagtacgacgtgctggacaagcggagaggcagggaccctgagatgggcggaaagccccagcggagaaagaacccccaggaaggactgtataacgaactccagaaagacaagatggccgaagcctacagcgagatcggcatgaagggcgagcggagaagaggcaagggccacgatggcctgtaccagggcctgagcaccgccaccaaggacacctatgacgccctgcacatgcaggccctgcctccaaga

SEQ ID NO: 27347 - DNA, 837 bp, synthetic construct
  source 1..837: mol_type = other DNA
agcgacaagagcgtgtgtctgttcaccgacttcgacagccagaccaacgtgtcccagagcaaggactccgacgtgtacatcaccgataagtgcgtgctggacatgcggagcatggacttcaagagcaactccgccgtggcctggtccaacaagtccgatttcgcctgcgccaacgccttcaacaacagcattatccccgaggacacattcttcccaagccccgagagcagctgcgacgtgaagctggtggaaaagagcttcgagacagacaccaacctgaacttccagaacctgctggtgatcgtgctgagaatcctgctgctgaaagtggccggctttaacctgctgatgaccctgcggctgtggtccagcaaacggggcagaaagaaactcctgtatatattcaaacaaccatttatgagaccagtacaaactactcaagaggaagatggctgtagctgccgatttccagaagaagaagaaggaggatgtgaactgagagtgaagttcagcagaagcgccgacgcccctgcctaccagcagggacagaaccaactgtacaacgagctgaacctgggcagacgggaagagtacgacgtgctggacaagcggagaggcagggaccctgagatgggcggaaagccccagcggagaaagaacccccaggaaggactgtataacgaactccagaaagacaagatggccgaagcctacagcgagatcggcatgaagggcgagcggagaagaggcaagggccacgatggcctgtaccagggcctgagcaccgccaccaaggacacctatgacgccctgcacatgcaggccctgcctccaaga

SEQ ID NO: 27348 - DNA, 834 bp, synthetic construct
  source 1..834: mol_type = other DNA
gacaagagcgtgtgtctgttcaccgacttcgacagccagaccaacgtgtcccagagcaaggactccgacgtgtacatcaccgataagtgcgtgctggacatgcggagcatggacttcaagagcaactccgccgtggcctggtccaacaagtccgatttcgcctgcgccaacgccttcaacaacagcattatccccgaggacacattcttcccaagccccgagagcagctgcgacgtgaagctggtggaaaagagcttcgagacagacaccaacctgaacttccagaacctgctggtgatcgtgctgagaatcctgctgctgaaagtggccggctttaacctgctgatgaccctgcggctgtggtccagcaaacggggcagaaagaaactcctgtatatattcaaacaaccatttatgagaccagtacaaactactcaagaggaagatggctgtagctgccgatttccagaagaagaagaaggaggatgtgaactgagagtgaagttcagcagaagcgccgacgcccctgcctaccagcagggacagaaccaactgtacaacgagctgaacctgggcagacgggaagagtacgacgtgctggacaagcggagaggcagggaccctgagatgggcggaaagccccagcggagaaagaacccccaggaaggactgtataacgaactccagaaagacaagatggccgaagcctacagcgagatcggcatgaagggcgagcggagaagaggcaagggccacgatggcctgtaccagggcctgagcaccgccaccaaggacacctatgacgccctgcacatgcaggccctgcctccaaga

SEQ ID NO: 27349 - DNA, 831 bp, synthetic construct
  source 1..831: mol_type = other DNA
aagagcgtgtgtctgttcaccgacttcgacagccagaccaacgtgtcccagagcaaggactccgacgtgtacatcaccgataagtgcgtgctggacatgcggagcatggacttcaagagcaactccgccgtggcctggtccaacaagtccgatttcgcctgcgccaacgccttcaacaacagcattatccccgaggacacattcttcccaagccccgagagcagctgcgacgtgaagctggtggaaaagagcttcgagacagacaccaacctgaacttccagaacctgctggtgatcgtgctgagaatcctgctgctgaaagtggccggctttaacctgctgatgaccctgcggctgtggtccagcaaacggggcagaaagaaactcctgtatatattcaaacaaccatttatgagaccagtacaaactactcaagaggaagatggctgtagctgccgatttccagaagaagaagaaggaggatgtgaactgagagtgaagttcagcagaagcgccgacgcccctgcctaccagcagggacagaaccaactgtacaacgagctgaacctgggcagacgggaagagtacgacgtgctggacaagcggagaggcagggaccctgagatgggcggaaagccccagcggagaaagaacccccaggaaggactgtataacgaactccagaaagacaagatggccgaagcctacagcgagatcggcatgaagggcgagcggagaagaggcaagggccacgatggcctgtaccagggcctgagcaccgccaccaaggacacctatgacgccctgcacatgcaggccctgcctccaaga

SEQ ID NO: 27350 - DNA, 828 bp, synthetic construct
  source 1..828: mol_type = other DNA
agcgtgtgtctgttcaccgacttcgacagccagaccaacgtgtcccagagcaaggactccgacgtgtacatcaccgataagtgcgtgctggacatgcggagcatggacttcaagagcaactccgccgtggcctggtccaacaagtccgatttcgcctgcgccaacgccttcaacaacagcattatccccgaggacacattcttcccaagccccgagagcagctgcgacgtgaagctggtggaaaagagcttcgagacagacaccaacctgaacttccagaacctgctggtgatcgtgctgagaatcctgctgctgaaagtggccggctttaacctgctgatgaccctgcggctgtggtccagcaaacggggcagaaagaaactcctgtatatattcaaacaaccatttatgagaccagtacaaactactcaagaggaagatggctgtagctgccgatttccagaagaagaagaaggaggatgtgaactgagagtgaagttcagcagaagcgccgacgcccctgcctaccagcagggacagaaccaactgtacaacgagctgaacctgggcagacgggaagagtacgacgtgctggacaagcggagaggcagggaccctgagatgggcggaaagccccagcggagaaagaacccccaggaaggactgtataacgaactccagaaagacaagatggccgaagcctacagcgagatcggcatgaagggcgagcggagaagaggcaagggccacgatggcctgtaccagggcctgagcaccgccaccaaggacacctatgacgccctgcacatgcaggccctgcctccaaga

SEQ ID NO: 27351 - DNA, 825 bp, synthetic construct
  source 1..825: mol_type = other DNA
gtgtgtctgttcaccgacttcgacagccagaccaacgtgtcccagagcaaggactccgacgtgtacatcaccgataagtgcgtgctggacatgcggagcatggacttcaagagcaactccgccgtggcctggtccaacaagtccgatttcgcctgcgccaacgccttcaacaacagcattatccccgaggacacattcttcccaagccccgagagcagctgcgacgtgaagctggtggaaaagagcttcgagacagacaccaacctgaacttccagaacctgctggtgatcgtgctgagaatcctgctgctgaaagtggccggctttaacctgctgatgaccctgcggctgtggtccagcaaacggggcagaaagaaactcctgtatatattcaaacaaccatttatgagaccagtacaaactactcaagaggaagatggctgtagctgccgatttccagaagaagaagaaggaggatgtgaactgagagtgaagttcagcagaagcgccgacgcccctgcctaccagcagggacagaaccaactgtacaacgagctgaacctgggcagacgggaagagtacgacgtgctggacaagcggagaggcagggaccctgagatgggcggaaagccccagcggagaaagaacccccaggaaggactgtataacgaactccagaaagacaagatggccgaagcctacagcgagatcggcatgaagggcgagcggagaagaggcaagggccacgatggcctgtaccagggcctgagcaccgccaccaaggacacctatgacgccctgcacatgcaggccctgcctccaaga

SEQ ID NO: 27352 - DNA, 822 bp, synthetic construct
  source 1..822: mol_type = other DNA
tgtctgttcaccgacttcgacagccagaccaacgtgtcccagagcaaggactccgacgtgtacatcaccgataagtgcgtgctggacatgcggagcatggacttcaagagcaactccgccgtggcctggtccaacaagtccgatttcgcctgcgccaacgccttcaacaacagcattatccccgaggacacattcttcccaagccccgagagcagctgcgacgtgaagctggtggaaaagagcttcgagacagacaccaacctgaacttccagaacctgctggtgatcgtgctgagaatcctgctgctgaaagtggccggctttaacctgctgatgaccctgcggctgtggtccagcaaacggggcagaaagaaactcctgtatatattcaaacaaccatttatgagaccagtacaaactactcaagaggaagatggctgtagctgccgatttccagaagaagaagaaggaggatgtgaactgagagtgaagttcagcagaagcgccgacgcccctgcctaccagcagggacagaaccaactgtacaacgagctgaacctgggcagacgggaagagtacgacgtgctggacaagcggagaggcagggaccctgagatgggcggaaagccccagcggagaaagaacccccaggaaggactgtataacgaactccagaaagacaagatggccgaagcctacagcgagatcggcatgaagggcgagcggagaagaggcaagggccacgatggcctgtaccagggcctgagcaccgccaccaaggacacctatgacgccctgcacatgcaggccctgcctccaaga

SEQ ID NO: 27353 - DNA, 819 bp, synthetic construct
  source 1..819: mol_type = other DNA
ctgttcaccgacttcgacagccagaccaacgtgtcccagagcaaggactccgacgtgtacatcaccgataagtgcgtgctggacatgcggagcatggacttcaagagcaactccgccgtggcctggtccaacaagtccgatttcgcctgcgccaacgccttcaacaacagcattatccccgaggacacattcttcccaagccccgagagcagctgcgacgtgaagctggtggaaaagagcttcgagacagacaccaacctgaacttccagaacctgctggtgatcgtgctgagaatcctgctgctgaaagtggccggctttaacctgctgatgaccctgcggctgtggtccagcaaacggggcagaaagaaactcctgtatatattcaaacaaccatttatgagaccagtacaaactactcaagaggaagatggctgtagctgccgatttccagaagaagaagaaggaggatgtgaactgagagtgaagttcagcagaagcgccgacgcccctgcctaccagcagggacagaaccaactgtacaacgagctgaacctgggcagacgggaagagtacgacgtgctggacaagcggagaggcagggaccctgagatgggcggaaagccccagcggagaaagaacccccaggaaggactgtataacgaactccagaaagacaagatggccgaagcctacagcgagatcggcatgaagggcgagcggagaagaggcaagggccacgatggcctgtaccagggcctgagcaccgccaccaaggacacctatgacgccctgcacatgcaggccctgcctccaaga

SEQ ID NO: 27354 - DNA, 816 bp, synthetic construct
  source 1..816: mol_type = other DNA
ttcaccgacttcgacagccagaccaacgtgtcccagagcaaggactccgacgtgtacatcaccgataagtgcgtgctggacatgcggagcatggacttcaagagcaactccgccgtggcctggtccaacaagtccgatttcgcctgcgccaacgccttcaacaacagcattatccccgaggacacattcttcccaagccccgagagcagctgcgacgtgaagctggtggaaaagagcttcgagacagacaccaacctgaacttccagaacctgctggtgatcgtgctgagaatcctgctgctgaaagtggccggctttaacctgctgatgaccctgcggctgtggtccagcaaacggggcagaaagaaactcctgtatatattcaaacaaccatttatgagaccagtacaaactactcaagaggaagatggctgtagctgccgatttccagaagaagaagaaggaggatgtgaactgagagtgaagttcagcagaagcgccgacgcccctgcctaccagcagggacagaaccaactgtacaacgagctgaacctgggcagacgggaagagtacgacgtgctggacaagcggagaggcagggaccctgagatgggcggaaagccccagcggagaaagaacccccaggaaggactgtataacgaactccagaaagacaagatggccgaagcctacagcgagatcggcatgaagggcgagcggagaagaggcaagggccacgatggcctgtaccagggcctgagcaccgccaccaaggacacctatgacgccctgcacatgcaggccctgcctccaaga

SEQ ID NO: 27355 - DNA, 813 bp, synthetic construct
  source 1..813: mol_type = other DNA
accgacttcgacagccagaccaacgtgtcccagagcaaggactccgacgtgtacatcaccgataagtgcgtgctggacatgcggagcatggacttcaagagcaactccgccgtggcctggtccaacaagtccgatttcgcctgcgccaacgccttcaacaacagcattatccccgaggacacattcttcccaagccccgagagcagctgcgacgtgaagctggtggaaaagagcttcgagacagacaccaacctgaacttccagaacctgctggtgatcgtgctgagaatcctgctgctgaaagtggccggctttaacctgctgatgaccctgcggctgtggtccagcaaacggggcagaaagaaactcctgtatatattcaaacaaccatttatgagaccagtacaaactactcaagaggaagatggctgtagctgccgatttccagaagaagaagaaggaggatgtgaactgagagtgaagttcagcagaagcgccgacgcccctgcctaccagcagggacagaaccaactgtacaacgagctgaacctgggcagacgggaagagtacgacgtgctggacaagcggagaggcagggaccctgagatgggcggaaagccccagcggagaaagaacccccaggaaggactgtataacgaactccagaaagacaagatggccgaagcctacagcgagatcggcatgaagggcgagcggagaagaggcaagggccacgatggcctgtaccagggcctgagcaccgccaccaaggacacctatgacgccctgcacatgcaggccctgcctccaaga

SEQ ID NO: 27356 - DNA, 810 bp, synthetic construct
  source 1..810: mol_type = other DNA
gacttcgacagccagaccaacgtgtcccagagcaaggactccgacgtgtacatcaccgataagtgcgtgctggacatgcggagcatggacttcaagagcaactccgccgtggcctggtccaacaagtccgatttcgcctgcgccaacgccttcaacaacagcattatccccgaggacacattcttcccaagccccgagagcagctgcgacgtgaagctggtggaaaagagcttcgagacagacaccaacctgaacttccagaacctgctggtgatcgtgctgagaatcctgctgctgaaagtggccggctttaacctgctgatgaccctgcggctgtggtccagcaaacggggcagaaagaaactcctgtatatattcaaacaaccatttatgagaccagtacaaactactcaagaggaagatggctgtagctgccgatttccagaagaagaagaaggaggatgtgaactgagagtgaagttcagcagaagcgccgacgcccctgcctaccagcagggacagaaccaactgtacaacgagctgaacctgggcagacgggaagagtacgacgtgctggacaagcggagaggcagggaccctgagatgggcggaaagccccagcggagaaagaacccccaggaaggactgtataacgaactccagaaagacaagatggccgaagcctacagcgagatcggcatgaagggcgagcggagaagaggcaagggccacgatggcctgtaccagggcctgagcaccgccaccaaggacacctatgacgccctgcacatgcaggccctgcctccaaga

SEQ ID NO: 27357 - DNA, 807 bp, synthetic construct
  source 1..807: mol_type = other DNA
ttcgacagccagaccaacgtgtcccagagcaaggactccgacgtgtacatcaccgataagtgcgtgctggacatgcggagcatggacttcaagagcaactccgccgtggcctggtccaacaagtccgatttcgcctgcgccaacgccttcaacaacagcattatccccgaggacacattcttcccaagccccgagagcagctgcgacgtgaagctggtggaaaagagcttcgagacagacaccaacctgaacttccagaacctgctggtgatcgtgctgagaatcctgctgctgaaagtggccggctttaacctgctgatgaccctgcggctgtggtccagcaaacggggcagaaagaaactcctgtatatattcaaacaaccatttatgagaccagtacaaactactcaagaggaagatggctgtagctgccgatttccagaagaagaagaaggaggatgtgaactgagagtgaagttcagcagaagcgccgacgcccctgcctaccagcagggacagaaccaactgtacaacgagctgaacctgggcagacgggaagagtacgacgtgctggacaagcggagaggcagggaccctgagatgggcggaaagccccagcggagaaagaacccccaggaaggactgtataacgaactccagaaagacaagatggccgaagcctacagcgagatcggcatgaagggcgagcggagaagaggcaagggccacgatggcctgtaccagggcctgagcaccgccaccaaggacacctatgacgccctgcacatgcaggccctgcctccaaga

SEQ ID NO: 27358 - DNA, 804 bp, synthetic construct
  source 1..804: mol_type = other DNA
gacagccagaccaacgtgtcccagagcaaggactccgacgtgtacatcaccgataagtgcgtgctggacatgcggagcatggacttcaagagcaactccgccgtggcctggtccaacaagtccgatttcgcctgcgccaacgccttcaacaacagcattatccccgaggacacattcttcccaagccccgagagcagctgcgacgtgaagctggtggaaaagagcttcgagacagacaccaacctgaacttccagaacctgctggtgatcgtgctgagaatcctgctgctgaaagtggccggctttaacctgctgatgaccctgcggctgtggtccagcaaacggggcagaaagaaactcctgtatatattcaaacaaccatttatgagaccagtacaaactactcaagaggaagatggctgtagctgccgatttccagaagaagaagaaggaggatgtgaactgagagtgaagttcagcagaagcgccgacgcccctgcctaccagcagggacagaaccaactgtacaacgagctgaacctgggcagacgggaagagtacgacgtgctggacaagcggagaggcagggaccctgagatgggcggaaagccccagcggagaaagaacccccaggaaggactgtataacgaactccagaaagacaagatggccgaagcctacagcgagatcggcatgaagggcgagcggagaagaggcaagggccacgatggcctgtaccagggcctgagcaccgccaccaaggacacctatgacgccctgcacatgcaggccctgcctccaaga

SEQ ID NO: 27359 - DNA, 801 bp, synthetic construct
  source 1..801: mol_type = other DNA
agccagaccaacgtgtcccagagcaaggactccgacgtgtacatcaccgataagtgcgtgctggacatgcggagcatggacttcaagagcaactccgccgtggcctggtccaacaagtccgatttcgcctgcgccaacgccttcaacaacagcattatccccgaggacacattcttcccaagccccgagagcagctgcgacgtgaagctggtggaaaagagcttcgagacagacaccaacctgaacttccagaacctgctggtgatcgtgctgagaatcctgctgctgaaagtggccggctttaacctgctgatgaccctgcggctgtggtccagcaaacggggcagaaagaaactcctgtatatattcaaacaaccatttatgagaccagtacaaactactcaagaggaagatggctgtagctgccgatttccagaagaagaagaaggaggatgtgaactgagagtgaagttcagcagaagcgccgacgcccctgcctaccagcagggacagaaccaactgtacaacgagctgaacctgggcagacgggaagagtacgacgtgctggacaagcggagaggcagggaccctgagatgggcggaaagccccagcggagaaagaacccccaggaaggactgtataacgaactccagaaagacaagatggccgaagcctacagcgagatcggcatgaagggcgagcggagaagaggcaagggccacgatggcctgtaccagggcctgagcaccgccaccaaggacacctatgacgccctgcacatgcaggccctgcctccaaga

SEQ ID NO: 27360 - DNA, 798 bp, synthetic construct
  source 1..798: mol_type = other DNA
cagaccaacgtgtcccagagcaaggactccgacgtgtacatcaccgataagtgcgtgctggacatgcggagcatggacttcaagagcaactccgccgtggcctggtccaacaagtccgatttcgcctgcgccaacgccttcaacaacagcattatccccgaggacacattcttcccaagccccgagagcagctgcgacgtgaagctggtggaaaagagcttcgagacagacaccaacctgaacttccagaacctgctggtgatcgtgctgagaatcctgctgctgaaagtggccggctttaacctgctgatgaccctgcggctgtggtccagcaaacggggcagaaagaaactcctgtatatattcaaacaaccatttatgagaccagtacaaactactcaagaggaagatggctgtagctgccgatttccagaagaagaagaaggaggatgtgaactgagagtgaagttcagcagaagcgccgacgcccctgcctaccagcagggacagaaccaactgtacaacgagctgaacctgggcagacgggaagagtacgacgtgctggacaagcggagaggcagggaccctgagatgggcggaaagccccagcggagaaagaacccccaggaaggactgtataacgaactccagaaagacaagatggccgaagcctacagcgagatcggcatgaagggcgagcggagaagaggcaagggccacgatggcctgtaccagggcctgagcaccgccaccaaggacacctatgacgccctgcacatgcaggccctgcctccaaga

SEQ ID NO: 27361 - DNA, 795 bp, synthetic construct
  source 1..795: mol_type = other DNA
accaacgtgtcccagagcaaggactccgacgtgtacatcaccgataagtgcgtgctggacatgcggagcatggacttcaagagcaactccgccgtggcctggtccaacaagtccgatttcgcctgcgccaacgccttcaacaacagcattatccccgaggacacattcttcccaagccccgagagcagctgcgacgtgaagctggtggaaaagagcttcgagacagacaccaacctgaacttccagaacctgctggtgatcgtgctgagaatcctgctgctgaaagtggccggctttaacctgctgatgaccctgcggctgtggtccagcaaacggggcagaaagaaactcctgtatatattcaaacaaccatttatgagaccagtacaaactactcaagaggaagatggctgtagctgccgatttccagaagaagaagaaggaggatgtgaactgagagtgaagttcagcagaagcgccgacgcccctgcctaccagcagggacagaaccaactgtacaacgagctgaacctgggcagacgggaagagtacgacgtgctggacaagcggagaggcagggaccctgagatgggcggaaagccccagcggagaaagaacccccaggaaggactgtataacgaactccagaaagacaagatggccgaagcctacagcgagatcggcatgaagggcgagcggagaagaggcaagggccacgatggcctgtaccagggcctgagcaccgccaccaaggacacctatgacgccctgcacatgcaggccctgcctccaaga

SEQ ID NO: 27362 - DNA, 792 bp, synthetic construct
  source 1..792: mol_type = other DNA
aacgtgtcccagagcaaggactccgacgtgtacatcaccgataagtgcgtgctggacatgcggagcatggacttcaagagcaactccgccgtggcctggtccaacaagtccgatttcgcctgcgccaacgccttcaacaacagcattatccccgaggacacattcttcccaagccccgagagcagctgcgacgtgaagctggtggaaaagagcttcgagacagacaccaacctgaacttccagaacctgctggtgatcgtgctgagaatcctgctgctgaaagtggccggctttaacctgctgatgaccctgcggctgtggtccagcaaacggggcagaaagaaactcctgtatatattcaaacaaccatttatgagaccagtacaaactactcaagaggaagatggctgtagctgccgatttccagaagaagaagaaggaggatgtgaactgagagtgaagttcagcagaagcgccgacgcccctgcctaccagcagggacagaaccaactgtacaacgagctgaacctgggcagacgggaagagtacgacgtgctggacaagcggagaggcagggaccctgagatgggcggaaagccccagcggagaaagaacccccaggaaggactgtataacgaactccagaaagacaagatggccgaagcctacagcgagatcggcatgaagggcgagcggagaagaggcaagggccacgatggcctgtaccagggcctgagcaccgccaccaaggacacctatgacgccctgcacatgcaggccctgcctccaaga

SEQ ID NO: 27363 - DNA, 789 bp, synthetic construct
  source 1..789: mol_type = other DNA
gtgtcccagagcaaggactccgacgtgtacatcaccgataagtgcgtgctggacatgcggagcatggacttcaagagcaactccgccgtggcctggtccaacaagtccgatttcgcctgcgccaacgccttcaacaacagcattatccccgaggacacattcttcccaagccccgagagcagctgcgacgtgaagctggtggaaaagagcttcgagacagacaccaacctgaacttccagaacctgctggtgatcgtgctgagaatcctgctgctgaaagtggccggctttaacctgctgatgaccctgcggctgtggtccagcaaacggggcagaaagaaactcctgtatatattcaaacaaccatttatgagaccagtacaaactactcaagaggaagatggctgtagctgccgatttccagaagaagaagaaggaggatgtgaactgagagtgaagttcagcagaagcgccgacgcccctgcctaccagcagggacagaaccaactgtacaacgagctgaacctgggcagacgggaagagtacgacgtgctggacaagcggagaggcagggaccctgagatgggcggaaagccccagcggagaaagaacccccaggaaggactgtataacgaactccagaaagacaagatggccgaagcctacagcgagatcggcatgaagggcgagcggagaagaggcaagggccacgatggcctgtaccagggcctgagcaccgccaccaaggacacctatgacgccctgcacatgcaggccctgcctccaaga

SEQ ID NO: 27364 - DNA, 786 bp, synthetic construct
  source 1..786: mol_type = other DNA
tcccagagcaaggactccgacgtgtacatcaccgataagtgcgtgctggacatgcggagcatggacttcaagagcaactccgccgtggcctggtccaacaagtccgatttcgcctgcgccaacgccttcaacaacagcattatccccgaggacacattcttcccaagccccgagagcagctgcgacgtgaagctggtggaaaagagcttcgagacagacaccaacctgaacttccagaacctgctggtgatcgtgctgagaatcctgctgctgaaagtggccggctttaacctgctgatgaccctgcggctgtggtccagcaaacggggcagaaagaaactcctgtatatattcaaacaaccatttatgagaccagtacaaactactcaagaggaagatggctgtagctgccgatttccagaagaagaagaaggaggatgtgaactgagagtgaagttcagcagaagcgccgacgcccctgcctaccagcagggacagaaccaactgtacaacgagctgaacctgggcagacgggaagagtacgacgtgctggacaagcggagaggcagggaccctgagatgggcggaaagccccagcggagaaagaacccccaggaaggactgtataacgaactccagaaagacaagatggccgaagcctacagcgagatcggcatgaagggcgagcggagaagaggcaagggccacgatggcctgtaccagggcctgagcaccgccaccaaggacacctatgacgccctgcacatgcaggccctgcctccaaga

SEQ ID NO: 27365 - DNA, 783 bp, synthetic construct
  source 1..783: mol_type = other DNA
cagagcaaggactccgacgtgtacatcaccgataagtgcgtgctggacatgcggagcatggacttcaagagcaactccgccgtggcctggtccaacaagtccgatttcgcctgcgccaacgccttcaacaacagcattatccccgaggacacattcttcccaagccccgagagcagctgcgacgtgaagctggtggaaaagagcttcgagacagacaccaacctgaacttccagaacctgctggtgatcgtgctgagaatcctgctgctgaaagtggccggctttaacctgctgatgaccctgcggctgtggtccagcaaacggggcagaaagaaactcctgtatatattcaaacaaccatttatgagaccagtacaaactactcaagaggaagatggctgtagctgccgatttccagaagaagaagaaggaggatgtgaactgagagtgaagttcagcagaagcgccgacgcccctgcctaccagcagggacagaaccaactgtacaacgagctgaacctgggcagacgggaagagtacgacgtgctggacaagcggagaggcagggaccctgagatgggcggaaagccccagcggagaaagaacccccaggaaggactgtataacgaactccagaaagacaagatggccgaagcctacagcgagatcggcatgaagggcgagcggagaagaggcaagggccacgatggcctgtaccagggcctgagcaccgccaccaaggacacctatgacgccctgcacatgcaggccctgcctccaaga

SEQ ID NO: 27366 - DNA, 780 bp, synthetic construct
  source 1..780: mol_type = other DNA
agcaaggactccgacgtgtacatcaccgataagtgcgtgctggacatgcggagcatggacttcaagagcaactccgccgtggcctggtccaacaagtccgatttcgcctgcgccaacgccttcaacaacagcattatccccgaggacacattcttcccaagccccgagagcagctgcgacgtgaagctggtggaaaagagcttcgagacagacaccaacctgaacttccagaacctgctggtgatcgtgctgagaatcctgctgctgaaagtggccggctttaacctgctgatgaccctgcggctgtggtccagcaaacggggcagaaagaaactcctgtatatattcaaacaaccatttatgagaccagtacaaactactcaagaggaagatggctgtagctgccgatttccagaagaagaagaaggaggatgtgaactgagagtgaagttcagcagaagcgccgacgcccctgcctaccagcagggacagaaccaactgtacaacgagctgaacctgggcagacgggaagagtacgacgtgctggacaagcggagaggcagggaccctgagatgggcggaaagccccagcggagaaagaacccccaggaaggactgtataacgaactccagaaagacaagatggccgaagcctacagcgagatcggcatgaagggcgagcggagaagaggcaagggccacgatggcctgtaccagggcctgagcaccgccaccaaggacacctatgacgccctgcacatgcaggccctgcctccaaga

SEQ ID NO: 27367 - DNA, 777 bp, synthetic construct
  source 1..777: mol_type = other DNA
aaggactccgacgtgtacatcaccgataagtgcgtgctggacatgcggagcatggacttcaagagcaactccgccgtggcctggtccaacaagtccgatttcgcctgcgccaacgccttcaacaacagcattatccccgaggacacattcttcccaagccccgagagcagctgcgacgtgaagctggtggaaaagagcttcgagacagacaccaacctgaacttccagaacctgctggtgatcgtgctgagaatcctgctgctgaaagtggccggctttaacctgctgatgaccctgcggctgtggtccagcaaacggggcagaaagaaactcctgtatatattcaaacaaccatttatgagaccagtacaaactactcaagaggaagatggctgtagctgccgatttccagaagaagaagaaggaggatgtgaactgagagtgaagttcagcagaagcgccgacgcccctgcctaccagcagggacagaaccaactgtacaacgagctgaacctgggcagacgggaagagtacgacgtgctggacaagcggagaggcagggaccctgagatgggcggaaagccccagcggagaaagaacccccaggaaggactgtataacgaactccagaaagacaagatggccgaagcctacagcgagatcggcatgaagggcgagcggagaagaggcaagggccacgatggcctgtaccagggcctgagcaccgccaccaaggacacctatgacgccctgcacatgcaggccctgcctccaaga

SEQ ID NO: 27368 - DNA, 774 bp, synthetic construct
  source 1..774: mol_type = other DNA
gactccgacgtgtacatcaccgataagtgcgtgctggacatgcggagcatggacttcaagagcaactccgccgtggcctggtccaacaagtccgatttcgcctgcgccaacgccttcaacaacagcattatccccgaggacacattcttcccaagccccgagagcagctgcgacgtgaagctggtggaaaagagcttcgagacagacaccaacctgaacttccagaacctgctggtgatcgtgctgagaatcctgctgctgaaagtggccggctttaacctgctgatgaccctgcggctgtggtccagcaaacggggcagaaagaaactcctgtatatattcaaacaaccatttatgagaccagtacaaactactcaagaggaagatggctgtagctgccgatttccagaagaagaagaaggaggatgtgaactgagagtgaagttcagcagaagcgccgacgcccctgcctaccagcagggacagaaccaactgtacaacgagctgaacctgggcagacgggaagagtacgacgtgctggacaagcggagaggcagggaccctgagatgggcggaaagccccagcggagaaagaacccccaggaaggactgtataacgaactccagaaagacaagatggccgaagcctacagcgagatcggcatgaagggcgagcggagaagaggcaagggccacgatggcctgtaccagggcctgagcaccgccaccaaggacacctatgacgccctgcacatgcaggccctgcctccaaga

SEQ ID NO: 27369 - DNA, 771 bp, synthetic construct
  source 1..771: mol_type = other DNA
tccgacgtgtacatcaccgataagtgcgtgctggacatgcggagcatggacttcaagagcaactccgccgtggcctggtccaacaagtccgatttcgcctgcgccaacgccttcaacaacagcattatccccgaggacacattcttcccaagccccgagagcagctgcgacgtgaagctggtggaaaagagcttcgagacagacaccaacctgaacttccagaacctgctggtgatcgtgctgagaatcctgctgctgaaagtggccggctttaacctgctgatgaccctgcggctgtggtccagcaaacggggcagaaagaaactcctgtatatattcaaacaaccatttatgagaccagtacaaactactcaagaggaagatggctgtagctgccgatttccagaagaagaagaaggaggatgtgaactgagagtgaagttcagcagaagcgccgacgcccctgcctaccagcagggacagaaccaactgtacaacgagctgaacctgggcagacgggaagagtacgacgtgctggacaagcggagaggcagggaccctgagatgggcggaaagccccagcggagaaagaacccccaggaaggactgtataacgaactccagaaagacaagatggccgaagcctacagcgagatcggcatgaagggcgagcggagaagaggcaagggccacgatggcctgtaccagggcctgagcaccgccaccaaggacacctatgacgccctgcacatgcaggccctgcctccaaga

SEQ ID NO: 27370 - DNA, 768 bp, synthetic construct
  source 1..768: mol_type = other DNA
gacgtgtacatcaccgataagtgcgtgctggacatgcggagcatggacttcaagagcaactccgccgtggcctggtccaacaagtccgatttcgcctgcgccaacgccttcaacaacagcattatccccgaggacacattcttcccaagccccgagagcagctgcgacgtgaagctggtggaaaagagcttcgagacagacaccaacctgaacttccagaacctgctggtgatcgtgctgagaatcctgctgctgaaagtggccggctttaacctgctgatgaccctgcggctgtggtccagcaaacggggcagaaagaaactcctgtatatattcaaacaaccatttatgagaccagtacaaactactcaagaggaagatggctgtagctgccgatttccagaagaagaagaaggaggatgtgaactgagagtgaagttcagcagaagcgccgacgcccctgcctaccagcagggacagaaccaactgtacaacgagctgaacctgggcagacgggaagagtacgacgtgctggacaagcggagaggcagggaccctgagatgggcggaaagccccagcggagaaagaacccccaggaaggactgtataacgaactccagaaagacaagatggccgaagcctacagcgagatcggcatgaagggcgagcggagaagaggcaagggccacgatggcctgtaccagggcctgagcaccgccaccaaggacacctatgacgccctgcacatgcaggccctgcctccaaga

SEQ ID NO: 27371 - DNA, 765 bp, synthetic construct
  source 1..765: mol_type = other DNA
gtgtacatcaccgataagtgcgtgctggacatgcggagcatggacttcaagagcaactccgccgtggcctggtccaacaagtccgatttcgcctgcgccaacgccttcaacaacagcattatccccgaggacacattcttcccaagccccgagagcagctgcgacgtgaagctggtggaaaagagcttcgagacagacaccaacctgaacttccagaacctgctggtgatcgtgctgagaatcctgctgctgaaagtggccggctttaacctgctgatgaccctgcggctgtggtccagcaaacggggcagaaagaaactcctgtatatattcaaacaaccatttatgagaccagtacaaactactcaagaggaagatggctgtagctgccgatttccagaagaagaagaaggaggatgtgaactgagagtgaagttcagcagaagcgccgacgcccctgcctaccagcagggacagaaccaactgtacaacgagctgaacctgggcagacgggaagagtacgacgtgctggacaagcggagaggcagggaccctgagatgggcggaaagccccagcggagaaagaacccccaggaaggactgtataacgaactccagaaagacaagatggccgaagcctacagcgagatcggcatgaagggcgagcggagaagaggcaagggccacgatggcctgtaccagggcctgagcaccgccaccaaggacacctatgacgccctgcacatgcaggccctgcctccaaga

SEQ ID NO: 27372 - DNA, 762 bp, synthetic construct
  source 1..762: mol_type = other DNA
tacatcaccgataagtgcgtgctggacatgcggagcatggacttcaagagcaactccgccgtggcctggtccaacaagtccgatttcgcctgcgccaacgccttcaacaacagcattatccccgaggacacattcttcccaagccccgagagcagctgcgacgtgaagctggtggaaaagagcttcgagacagacaccaacctgaacttccagaacctgctggtgatcgtgctgagaatcctgctgctgaaagtggccggctttaacctgctgatgaccctgcggctgtggtccagcaaacggggcagaaagaaactcctgtatatattcaaacaaccatttatgagaccagtacaaactactcaagaggaagatggctgtagctgccgatttccagaagaagaagaaggaggatgtgaactgagagtgaagttcagcagaagcgccgacgcccctgcctaccagcagggacagaaccaactgtacaacgagctgaacctgggcagacgggaagagtacgacgtgctggacaagcggagaggcagggaccctgagatgggcggaaagccccagcggagaaagaacccccaggaaggactgtataacgaactccagaaagacaagatggccgaagcctacagcgagatcggcatgaagggcgagcggagaagaggcaagggccacgatggcctgtaccagggcctgagcaccgccaccaaggacacctatgacgccctgcacatgcaggccctgcctccaaga

SEQ ID NO: 27373 - DNA, 759 bp, synthetic construct
  source 1..759: mol_type = other DNA
atcaccgataagtgcgtgctggacatgcggagcatggacttcaagagcaactccgccgtggcctggtccaacaagtccgatttcgcctgcgccaacgccttcaacaacagcattatccccgaggacacattcttcccaagccccgagagcagctgcgacgtgaagctggtggaaaagagcttcgagacagacaccaacctgaacttccagaacctgctggtgatcgtgctgagaatcctgctgctgaaagtggccggctttaacctgctgatgaccctgcggctgtggtccagcaaacggggcagaaagaaactcctgtatatattcaaacaaccatttatgagaccagtacaaactactcaagaggaagatggctgtagctgccgatttccagaagaagaagaaggaggatgtgaactgagagtgaagttcagcagaagcgccgacgcccctgcctaccagcagggacagaaccaactgtacaacgagctgaacctgggcagacgggaagagtacgacgtgctggacaagcggagaggcagggaccctgagatgggcggaaagccccagcggagaaagaacccccaggaaggactgtataacgaactccagaaagacaagatggccgaagcctacagcgagatcggcatgaagggcgagcggagaagaggcaagggccacgatggcctgtaccagggcctgagcaccgccaccaaggacacctatgacgccctgcacatgcaggccctgcctccaaga

SEQ ID NO: 27374 - DNA, 756 bp, synthetic construct
  source 1..756: mol_type = other DNA
accgataagtgcgtgctggacatgcggagcatggacttcaagagcaactccgccgtggcctggtccaacaagtccgatttcgcctgcgccaacgccttcaacaacagcattatccccgaggacacattcttcccaagccccgagagcagctgcgacgtgaagctggtggaaaagagcttcgagacagacaccaacctgaacttccagaacctgctggtgatcgtgctgagaatcctgctgctgaaagtggccggctttaacctgctgatgaccctgcggctgtggtccagcaaacggggcagaaagaaactcctgtatatattcaaacaaccatttatgagaccagtacaaactactcaagaggaagatggctgtagctgccgatttccagaagaagaagaaggaggatgtgaactgagagtgaagttcagcagaagcgccgacgcccctgcctaccagcagggacagaaccaactgtacaacgagctgaacctgggcagacgggaagagtacgacgtgctggacaagcggagaggcagggaccctgagatgggcggaaagccccagcggagaaagaacccccaggaaggactgtataacgaactccagaaagacaagatggccgaagcctacagcgagatcggcatgaagggcgagcggagaagaggcaagggccacgatggcctgtaccagggcctgagcaccgccaccaaggacacctatgacgccctgcacatgcaggccctgcctccaaga

SEQ ID NO: 27375 - DNA, 753 bp, synthetic construct
  source 1..753: mol_type = other DNA
gataagtgcgtgctggacatgcggagcatggacttcaagagcaactccgccgtggcctggtccaacaagtccgatttcgcctgcgccaacgccttcaacaacagcattatccccgaggacacattcttcccaagccccgagagcagctgcgacgtgaagctggtggaaaagagcttcgagacagacaccaacctgaacttccagaacctgctggtgatcgtgctgagaatcctgctgctgaaagtggccggctttaacctgctgatgaccctgcggctgtggtccagcaaacggggcagaaagaaactcctgtatatattcaaacaaccatttatgagaccagtacaaactactcaagaggaagatggctgtagctgccgatttccagaagaagaagaaggaggatgtgaactgagagtgaagttcagcagaagcgccgacgcccctgcctaccagcagggacagaaccaactgtacaacgagctgaacctgggcagacgggaagagtacgacgtgctggacaagcggagaggcagggaccctgagatgggcggaaagccccagcggagaaagaacccccaggaaggactgtataacgaactccagaaagacaagatggccgaagcctacagcgagatcggcatgaagggcgagcggagaagaggcaagggccacgatggcctgtaccagggcctgagcaccgccaccaaggacacctatgacgccctgcacatgcaggccctgcctccaaga

SEQ ID NO: 27376 - DNA, 747 bp, synthetic construct
  source 1..747: mol_type = other DNA
tgcgtgctggacatgcggagcatggacttcaagagcaactccgccgtggcctggtccaacaagtccgatttcgcctgcgccaacgccttcaacaacagcattatccccgaggacacattcttcccaagccccgagagcagctgcgacgtgaagctggtggaaaagagcttcgagacagacaccaacctgaacttccagaacctgctggtgatcgtgctgagaatcctgctgctgaaagtggccggctttaacctgctgatgaccctgcggctgtggtccagcaaacggggcagaaagaaactcctgtatatattcaaacaaccatttatgagaccagtacaaactactcaagaggaagatggctgtagctgccgatttccagaagaagaagaaggaggatgtgaactgagagtgaagttcagcagaagcgccgacgcccctgcctaccagcagggacagaaccaactgtacaacgagctgaacctgggcagacgggaagagtacgacgtgctggacaagcggagaggcagggaccctgagatgggcggaaagccccagcggagaaagaacccccaggaaggactgtataacgaactccagaaagacaagatggccgaagcctacagcgagatcggcatgaagggcgagcggagaagaggcaagggccacgatggcctgtaccagggcctgagcaccgccaccaaggacacctatgacgccctgcacatgcaggccctgcctccaaga

SEQ ID NO: 27377 - DNA, 744 bp, synthetic construct
  source 1..744: mol_type = other DNA
gtgctggacatgcggagcatggacttcaagagcaactccgccgtggcctggtccaacaagtccgatttcgcctgcgccaacgccttcaacaacagcattatccccgaggacacattcttcccaagccccgagagcagctgcgacgtgaagctggtggaaaagagcttcgagacagacaccaacctgaacttccagaacctgctggtgatcgtgctgagaatcctgctgctgaaagtggccggctttaacctgctgatgaccctgcggctgtggtccagcaaacggggcagaaagaaactcctgtatatattcaaacaaccatttatgagaccagtacaaactactcaagaggaagatggctgtagctgccgatttccagaagaagaagaaggaggatgtgaactgagagtgaagttcagcagaagcgccgacgcccctgcctaccagcagggacagaaccaactgtacaacgagctgaacctgggcagacgggaagagtacgacgtgctggacaagcggagaggcagggaccctgagatgggcggaaagccccagcggagaaagaacccccaggaaggactgtataacgaactccagaaagacaagatggccgaagcctacagcgagatcggcatgaagggcgagcggagaagaggcaagggccacgatggcctgtaccagggcctgagcaccgccaccaaggacacctatgacgccctgcacatgcaggccctgcctccaaga

SEQ ID NO: 27378 - DNA, 741 bp, synthetic construct
  source 1..741: mol_type = other DNA
ctggacatgcggagcatggacttcaagagcaactccgccgtggcctggtccaacaagtccgatttcgcctgcgccaacgccttcaacaacagcattatccccgaggacacattcttcccaagccccgagagcagctgcgacgtgaagctggtggaaaagagcttcgagacagacaccaacctgaacttccagaacctgctggtgatcgtgctgagaatcctgctgctgaaagtggccggctttaacctgctgatgaccctgcggctgtggtccagcaaacggggcagaaagaaactcctgtatatattcaaacaaccatttatgagaccagtacaaactactcaagaggaagatggctgtagctgccgatttccagaagaagaagaaggaggatgtgaactgagagtgaagttcagcagaagcgccgacgcccctgcctaccagcagggacagaaccaactgtacaacgagctgaacctgggcagacgggaagagtacgacgtgctggacaagcggagaggcagggaccctgagatgggcggaaagccccagcggagaaagaacccccaggaaggactgtataacgaactccagaaagacaagatggccgaagcctacagcgagatcggcatgaagggcgagcggagaagaggcaagggccacgatggcctgtaccagggcctgagcaccgccaccaaggacacctatgacgccctgcacatgcaggccctgcctccaaga

SEQ ID NO: 27379 - DNA, 738 bp, synthetic construct
  source 1..738: mol_type = other DNA
gacatgcggagcatggacttcaagagcaactccgccgtggcctggtccaacaagtccgatttcgcctgcgccaacgccttcaacaacagcattatccccgaggacacattcttcccaagccccgagagcagctgcgacgtgaagctggtggaaaagagcttcgagacagacaccaacctgaacttccagaacctgctggtgatcgtgctgagaatcctgctgctgaaagtggccggctttaacctgctgatgaccctgcggctgtggtccagcaaacggggcagaaagaaactcctgtatatattcaaacaaccatttatgagaccagtacaaactactcaagaggaagatggctgtagctgccgatttccagaagaagaagaaggaggatgtgaactgagagtgaagttcagcagaagcgccgacgcccctgcctaccagcagggacagaaccaactgtacaacgagctgaacctgggcagacgggaagagtacgacgtgctggacaagcggagaggcagggaccctgagatgggcggaaagccccagcggagaaagaacccccaggaaggactgtataacgaactccagaaagacaagatggccgaagcctacagcgagatcggcatgaagggcgagcggagaagaggcaagggccacgatggcctgtaccagggcctgagcaccgccaccaaggacacctatgacgccctgcacatgcaggccctgcctccaaga

SEQ ID NO: 27380 - DNA, 735 bp, synthetic construct
  source 1..735: mol_type = other DNA
atgcggagcatggacttcaagagcaactccgccgtggcctggtccaacaagtccgatttcgcctgcgccaacgccttcaacaacagcattatccccgaggacacattcttcccaagccccgagagcagctgcgacgtgaagctggtggaaaagagcttcgagacagacaccaacctgaacttccagaacctgctggtgatcgtgctgagaatcctgctgctgaaagtggccggctttaacctgctgatgaccctgcggctgtggtccagcaaacggggcagaaagaaactcctgtatatattcaaacaaccatttatgagaccagtacaaactactcaagaggaagatggctgtagctgccgatttccagaagaagaagaaggaggatgtgaactgagagtgaagttcagcagaagcgccgacgcccctgcctaccagcagggacagaaccaactgtacaacgagctgaacctgggcagacgggaagagtacgacgtgctggacaagcggagaggcagggaccctgagatgggcggaaagccccagcggagaaagaacccccaggaaggactgtataacgaactccagaaagacaagatggccgaagcctacagcgagatcggcatgaagggcgagcggagaagaggcaagggccacgatggcctgtaccagggcctgagcaccgccaccaaggacacctatgacgccctgcacatgcaggccctgcctccaaga

SEQ ID NO: 27381 - DNA, 732 bp, synthetic construct
  source 1..732: mol_type = other DNA
cggagcatggacttcaagagcaactccgccgtggcctggtccaacaagtccgatttcgcctgcgccaacgccttcaacaacagcattatccccgaggacacattcttcccaagccccgagagcagctgcgacgtgaagctggtggaaaagagcttcgagacagacaccaacctgaacttccagaacctgctggtgatcgtgctgagaatcctgctgctgaaagtggccggctttaacctgctgatgaccctgcggctgtggtccagcaaacggggcagaaagaaactcctgtatatattcaaacaaccatttatgagaccagtacaaactactcaagaggaagatggctgtagctgccgatttccagaagaagaagaaggaggatgtgaactgagagtgaagttcagcagaagcgccgacgcccctgcctaccagcagggacagaaccaactgtacaacgagctgaacctgggcagacgggaagagtacgacgtgctggacaagcggagaggcagggaccctgagatgggcggaaagccccagcggagaaagaacccccaggaaggactgtataacgaactccagaaagacaagatggccgaagcctacagcgagatcggcatgaagggcgagcggagaagaggcaagggccacgatggcctgtaccagggcctgagcaccgccaccaaggacacctatgacgccctgcacatgcaggccctgcctccaaga

SEQ ID NO: 27382 - DNA, 729 bp, synthetic construct
  source 1..729: mol_type = other DNA
agcatggacttcaagagcaactccgccgtggcctggtccaacaagtccgatttcgcctgcgccaacgccttcaacaacagcattatccccgaggacacattcttcccaagccccgagagcagctgcgacgtgaagctggtggaaaagagcttcgagacagacaccaacctgaacttccagaacctgctggtgatcgtgctgagaatcctgctgctgaaagtggccggctttaacctgctgatgaccctgcggctgtggtccagcaaacggggcagaaagaaactcctgtatatattcaaacaaccatttatgagaccagtacaaactactcaagaggaagatggctgtagctgccgatttccagaagaagaagaaggaggatgtgaactgagagtgaagttcagcagaagcgccgacgcccctgcctaccagcagggacagaaccaactgtacaacgagctgaacctgggcagacgggaagagtacgacgtgctggacaagcggagaggcagggaccctgagatgggcggaaagccccagcggagaaagaacccccaggaaggactgtataacgaactccagaaagacaagatggccgaagcctacagcgagatcggcatgaagggcgagcggagaagaggcaagggccacgatggcctgtaccagggcctgagcaccgccaccaaggacacctatgacgccctgcacatgcaggccctgcctccaaga

SEQ ID NO: 27383 - DNA, 726 bp, synthetic construct
  source 1..726: mol_type = other DNA
atggacttcaagagcaactccgccgtggcctggtccaacaagtccgatttcgcctgcgccaacgccttcaacaacagcattatccccgaggacacattcttcccaagccccgagagcagctgcgacgtgaagctggtggaaaagagcttcgagacagacaccaacctgaacttccagaacctgctggtgatcgtgctgagaatcctgctgctgaaagtggccggctttaacctgctgatgaccctgcggctgtggtccagcaaacggggcagaaagaaactcctgtatatattcaaacaaccatttatgagaccagtacaaactactcaagaggaagatggctgtagctgccgatttccagaagaagaagaaggaggatgtgaactgagagtgaagttcagcagaagcgccgacgcccctgcctaccagcagggacagaaccaactgtacaacgagctgaacctgggcagacgggaagagtacgacgtgctggacaagcggagaggcagggaccctgagatgggcggaaagccccagcggagaaagaacccccaggaaggactgtataacgaactccagaaagacaagatggccgaagcctacagcgagatcggcatgaagggcgagcggagaagaggcaagggccacgatggcctgtaccagggcctgagcaccgccaccaaggacacctatgacgccctgcacatgcaggccctgcctccaaga

SEQ ID NO: 27384 - DNA, 723 bp, synthetic construct
  source 1..723: mol_type = other DNA
gacttcaagagcaactccgccgtggcctggtccaacaagtccgatttcgcctgcgccaacgccttcaacaacagcattatccccgaggacacattcttcccaagccccgagagcagctgcgacgtgaagctggtggaaaagagcttcgagacagacaccaacctgaacttccagaacctgctggtgatcgtgctgagaatcctgctgctgaaagtggccggctttaacctgctgatgaccctgcggctgtggtccagcaaacggggcagaaagaaactcctgtatatattcaaacaaccatttatgagaccagtacaaactactcaagaggaagatggctgtagctgccgatttccagaagaagaagaaggaggatgtgaactgagagtgaagttcagcagaagcgccgacgcccctgcctaccagcagggacagaaccaactgtacaacgagctgaacctgggcagacgggaagagtacgacgtgctggacaagcggagaggcagggaccctgagatgggcggaaagccccagcggagaaagaacccccaggaaggactgtataacgaactccagaaagacaagatggccgaagcctacagcgagatcggcatgaagggcgagcggagaagaggcaagggccacgatggcctgtaccagggcctgagcaccgccaccaaggacacctatgacgccctgcacatgcaggccctgcctccaaga

SEQ ID NO: 27385 - DNA, 720 bp, synthetic construct
  source 1..720: mol_type = other DNA
ttcaagagcaactccgccgtggcctggtccaacaagtccgatttcgcctgcgccaacgccttcaacaacagcattatccccgaggacacattcttcccaagccccgagagcagctgcgacgtgaagctggtggaaaagagcttcgagacagacaccaacctgaacttccagaacctgctggtgatcgtgctgagaatcctgctgctgaaagtggccggctttaacctgctgatgaccctgcggctgtggtccagcaaacggggcagaaagaaactcctgtatatattcaaacaaccatttatgagaccagtacaaactactcaagaggaagatggctgtagctgccgatttccagaagaagaagaaggaggatgtgaactgagagtgaagttcagcagaagcgccgacgcccctgcctaccagcagggacagaaccaactgtacaacgagctgaacctgggcagacgggaagagtacgacgtgctggacaagcggagaggcagggaccctgagatgggcggaaagccccagcggagaaagaacccccaggaaggactgtataacgaactccagaaagacaagatggccgaagcctacagcgagatcggcatgaagggcgagcggagaagaggcaagggccacgatggcctgtaccagggcctgagcaccgccaccaaggacacctatgacgccctgcacatgcaggccctgcctccaaga

SEQ ID NO: 27386 - DNA, 717 bp, synthetic construct
  source 1..717: mol_type = other DNA
aagagcaactccgccgtggcctggtccaacaagtccgatttcgcctgcgccaacgccttcaacaacagcattatccccgaggacacattcttcccaagccccgagagcagctgcgacgtgaagctggtggaaaagagcttcgagacagacaccaacctgaacttccagaacctgctggtgatcgtgctgagaatcctgctgctgaaagtggccggctttaacctgctgatgaccctgcggctgtggtccagcaaacggggcagaaagaaactcctgtatatattcaaacaaccatttatgagaccagtacaaactactcaagaggaagatggctgtagctgccgatttccagaagaagaagaaggaggatgtgaactgagagtgaagttcagcagaagcgccgacgcccctgcctaccagcagggacagaaccaactgtacaacgagctgaacctgggcagacgggaagagtacgacgtgctggacaagcggagaggcagggaccctgagatgggcggaaagccccagcggagaaagaacccccaggaaggactgtataacgaactccagaaagacaagatggccgaagcctacagcgagatcggcatgaagggcgagcggagaagaggcaagggccacgatggcctgtaccagggcctgagcaccgccaccaaggacacctatgacgccctgcacatgcaggccctgcctccaaga

SEQ ID NO: 27387 - DNA, 714 bp, synthetic construct
  source 1..714: mol_type = other DNA
agcaactccgccgtggcctggtccaacaagtccgatttcgcctgcgccaacgccttcaacaacagcattatccccgaggacacattcttcccaagccccgagagcagctgcgacgtgaagctggtggaaaagagcttcgagacagacaccaacctgaacttccagaacctgctggtgatcgtgctgagaatcctgctgctgaaagtggccggctttaacctgctgatgaccctgcggctgtggtccagcaaacggggcagaaagaaactcctgtatatattcaaacaaccatttatgagaccagtacaaactactcaagaggaagatggctgtagctgccgatttccagaagaagaagaaggaggatgtgaactgagagtgaagttcagcagaagcgccgacgcccctgcctaccagcagggacagaaccaactgtacaacgagctgaacctgggcagacgggaagagtacgacgtgctggacaagcggagaggcagggaccctgagatgggcggaaagccccagcggagaaagaacccccaggaaggactgtataacgaactccagaaagacaagatggccgaagcctacagcgagatcggcatgaagggcgagcggagaagaggcaagggccacgatggcctgtaccagggcctgagcaccgccaccaaggacacctatgacgccctgcacatgcaggccctgcctccaaga

SEQ ID NO: 27388 - DNA, 711 bp, synthetic construct
  source 1..711: mol_type = other DNA
aactccgccgtggcctggtccaacaagtccgatttcgcctgcgccaacgccttcaacaacagcattatccccgaggacacattcttcccaagccccgagagcagctgcgacgtgaagctggtggaaaagagcttcgagacagacaccaacctgaacttccagaacctgctggtgatcgtgctgagaatcctgctgctgaaagtggccggctttaacctgctgatgaccctgcggctgtggtccagcaaacggggcagaaagaaactcctgtatatattcaaacaaccatttatgagaccagtacaaactactcaagaggaagatggctgtagctgccgatttccagaagaagaagaaggaggatgtgaactgagagtgaagttcagcagaagcgccgacgcccctgcctaccagcagggacagaaccaactgtacaacgagctgaacctgggcagacgggaagagtacgacgtgctggacaagcggagaggcagggaccctgagatgggcggaaagccccagcggagaaagaacccccaggaaggactgtataacgaactccagaaagacaagatggccgaagcctacagcgagatcggcatgaagggcgagcggagaagaggcaagggccacgatggcctgtaccagggcctgagcaccgccaccaaggacacctatgacgccctgcacatgcaggccctgcctccaaga

SEQ ID NO: 27389 - DNA, 708 bp, synthetic construct
  source 1..708: mol_type = other DNA
tccgccgtggcctggtccaacaagtccgatttcgcctgcgccaacgccttcaacaacagcattatccccgaggacacattcttcccaagccccgagagcagctgcgacgtgaagctggtggaaaagagcttcgagacagacaccaacctgaacttccagaacctgctggtgatcgtgctgagaatcctgctgctgaaagtggccggctttaacctgctgatgaccctgcggctgtggtccagcaaacggggcagaaagaaactcctgtatatattcaaacaaccatttatgagaccagtacaaactactcaagaggaagatggctgtagctgccgatttccagaagaagaagaaggaggatgtgaactgagagtgaagttcagcagaagcgccgacgcccctgcctaccagcagggacagaaccaactgtacaacgagctgaacctgggcagacgggaagagtacgacgtgctggacaagcggagaggcagggaccctgagatgggcggaaagccccagcggagaaagaacccccaggaaggactgtataacgaactccagaaagacaagatggccgaagcctacagcgagatcggcatgaagggcgagcggagaagaggcaagggccacgatggcctgtaccagggcctgagcaccgccaccaaggacacctatgacgccctgcacatgcaggccctgcctccaaga

SEQ ID NO: 27390 - DNA, 705 bp, synthetic construct
  source 1..705: mol_type = other DNA
gccgtggcctggtccaacaagtccgatttcgcctgcgccaacgccttcaacaacagcattatccccgaggacacattcttcccaagccccgagagcagctgcgacgtgaagctggtggaaaagagcttcgagacagacaccaacctgaacttccagaacctgctggtgatcgtgctgagaatcctgctgctgaaagtggccggctttaacctgctgatgaccctgcggctgtggtccagcaaacggggcagaaagaaactcctgtatatattcaaacaaccatttatgagaccagtacaaactactcaagaggaagatggctgtagctgccgatttccagaagaagaagaaggaggatgtgaactgagagtgaagttcagcagaagcgccgacgcccctgcctaccagcagggacagaaccaactgtacaacgagctgaacctgggcagacgggaagagtacgacgtgctggacaagcggagaggcagggaccctgagatgggcggaaagccccagcggagaaagaacccccaggaaggactgtataacgaactccagaaagacaagatggccgaagcctacagcgagatcggcatgaagggcgagcggagaagaggcaagggccacgatggcctgtaccagggcctgagcaccgccaccaaggacacctatgacgccctgcacatgcaggccctgcctccaaga

SEQ ID NO: 27391 - DNA, 702 bp, synthetic construct
  source 1..702: mol_type = other DNA
gtggcctggtccaacaagtccgatttcgcctgcgccaacgccttcaacaacagcattatccccgaggacacattcttcccaagccccgagagcagctgcgacgtgaagctggtggaaaagagcttcgagacagacaccaacctgaacttccagaacctgctggtgatcgtgctgagaatcctgctgctgaaagtggccggctttaacctgctgatgaccctgcggctgtggtccagcaaacggggcagaaagaaactcctgtatatattcaaacaaccatttatgagaccagtacaaactactcaagaggaagatggctgtagctgccgatttccagaagaagaagaaggaggatgtgaactgagagtgaagttcagcagaagcgccgacgcccctgcctaccagcagggacagaaccaactgtacaacgagctgaacctgggcagacgggaagagtacgacgtgctggacaagcggagaggcagggaccctgagatgggcggaaagccccagcggagaaagaacccccaggaaggactgtataacgaactccagaaagacaagatggccgaagcctacagcgagatcggcatgaagggcgagcggagaagaggcaagggccacgatggcctgtaccagggcctgagcaccgccaccaaggacacctatgacgccctgcacatgcaggccctgcctccaaga

SEQ ID NO: 27392 - DNA, 699 bp, synthetic construct
  source 1..699: mol_type = other DNA
gcctggtccaacaagtccgatttcgcctgcgccaacgccttcaacaacagcattatccccgaggacacattcttcccaagccccgagagcagctgcgacgtgaagctggtggaaaagagcttcgagacagacaccaacctgaacttccagaacctgctggtgatcgtgctgagaatcctgctgctgaaagtggccggctttaacctgctgatgaccctgcggctgtggtccagcaaacggggcagaaagaaactcctgtatatattcaaacaaccatttatgagaccagtacaaactactcaagaggaagatggctgtagctgccgatttccagaagaagaagaaggaggatgtgaactgagagtgaagttcagcagaagcgccgacgcccctgcctaccagcagggacagaaccaactgtacaacgagctgaacctgggcagacgggaagagtacgacgtgctggacaagcggagaggcagggaccctgagatgggcggaaagccccagcggagaaagaacccccaggaaggactgtataacgaactccagaaagacaagatggccgaagcctacagcgagatcggcatgaagggcgagcggagaagaggcaagggccacgatggcctgtaccagggcctgagcaccgccaccaaggacacctatgacgccctgcacatgcaggccctgcctccaaga

SEQ ID NO: 27393 - DNA, 696 bp, synthetic construct
  source 1..696: mol_type = other DNA
tggtccaacaagtccgatttcgcctgcgccaacgccttcaacaacagcattatccccgaggacacattcttcccaagccccgagagcagctgcgacgtgaagctggtggaaaagagcttcgagacagacaccaacctgaacttccagaacctgctggtgatcgtgctgagaatcctgctgctgaaagtggccggctttaacctgctgatgaccctgcggctgtggtccagcaaacggggcagaaagaaactcctgtatatattcaaacaaccatttatgagaccagtacaaactactcaagaggaagatggctgtagctgccgatttccagaagaagaagaaggaggatgtgaactgagagtgaagttcagcagaagcgccgacgcccctgcctaccagcagggacagaaccaactgtacaacgagctgaacctgggcagacgggaagagtacgacgtgctggacaagcggagaggcagggaccctgagatgggcggaaagccccagcggagaaagaacccccaggaaggactgtataacgaactccagaaagacaagatggccgaagcctacagcgagatcggcatgaagggcgagcggagaagaggcaagggccacgatggcctgtaccagggcctgagcaccgccaccaaggacacctatgacgccctgcacatgcaggccctgcctccaaga

SEQ ID NO: 27394 - DNA, 693 bp, synthetic construct
  source 1..693: mol_type = other DNA
tccaacaagtccgatttcgcctgcgccaacgccttcaacaacagcattatccccgaggacacattcttcccaagccccgagagcagctgcgacgtgaagctggtggaaaagagcttcgagacagacaccaacctgaacttccagaacctgctggtgatcgtgctgagaatcctgctgctgaaagtggccggctttaacctgctgatgaccctgcggctgtggtccagcaaacggggcagaaagaaactcctgtatatattcaaacaaccatttatgagaccagtacaaactactcaagaggaagatggctgtagctgccgatttccagaagaagaagaaggaggatgtgaactgagagtgaagttcagcagaagcgccgacgcccctgcctaccagcagggacagaaccaactgtacaacgagctgaacctgggcagacgggaagagtacgacgtgctggacaagcggagaggcagggaccctgagatgggcggaaagccccagcggagaaagaacccccaggaaggactgtataacgaactccagaaagacaagatggccgaagcctacagcgagatcggcatgaagggcgagcggagaagaggcaagggccacgatggcctgtaccagggcctgagcaccgccaccaaggacacctatgacgccctgcacatgcaggccctgcctccaaga

SEQ ID NO: 27395 - DNA, 690 bp, synthetic construct
  source 1..690: mol_type = other DNA
aacaagtccgatttcgcctgcgccaacgccttcaacaacagcattatccccgaggacacattcttcccaagccccgagagcagctgcgacgtgaagctggtggaaaagagcttcgagacagacaccaacctgaacttccagaacctgctggtgatcgtgctgagaatcctgctgctgaaagtggccggctttaacctgctgatgaccctgcggctgtggtccagcaaacggggcagaaagaaactcctgtatatattcaaacaaccatttatgagaccagtacaaactactcaagaggaagatggctgtagctgccgatttccagaagaagaagaaggaggatgtgaactgagagtgaagttcagcagaagcgccgacgcccctgcctaccagcagggacagaaccaactgtacaacgagctgaacctgggcagacgggaagagtacgacgtgctggacaagcggagaggcagggaccctgagatgggcggaaagccccagcggagaaagaacccccaggaaggactgtataacgaactccagaaagacaagatggccgaagcctacagcgagatcggcatgaagggcgagcggagaagaggcaagggccacgatggcctgtaccagggcctgagcaccgccaccaaggacacctatgacgccctgcacatgcaggccctgcctccaaga

SEQ ID NO: 27396 - DNA, 687 bp, synthetic construct
  source 1..687: mol_type = other DNA
aagtccgatttcgcctgcgccaacgccttcaacaacagcattatccccgaggacacattcttcccaagccccgagagcagctgcgacgtgaagctggtggaaaagagcttcgagacagacaccaacctgaacttccagaacctgctggtgatcgtgctgagaatcctgctgctgaaagtggccggctttaacctgctgatgaccctgcggctgtggtccagcaaacggggcagaaagaaactcctgtatatattcaaacaaccatttatgagaccagtacaaactactcaagaggaagatggctgtagctgccgatttccagaagaagaagaaggaggatgtgaactgagagtgaagttcagcagaagcgccgacgcccctgcctaccagcagggacagaaccaactgtacaacgagctgaacctgggcagacgggaagagtacgacgtgctggacaagcggagaggcagggaccctgagatgggcggaaagccccagcggagaaagaacccccaggaaggactgtataacgaactccagaaagacaagatggccgaagcctacagcgagatcggcatgaagggcgagcggagaagaggcaagggccacgatggcctgtaccagggcctgagcaccgccaccaaggacacctatgacgccctgcacatgcaggccctgcctccaaga

SEQ ID NO: 27397 - DNA, 684 bp, synthetic construct
  source 1..684: mol_type = other DNA
tccgatttcgcctgcgccaacgccttcaacaacagcattatccccgaggacacattcttcccaagccccgagagcagctgcgacgtgaagctggtggaaaagagcttcgagacagacaccaacctgaacttccagaacctgctggtgatcgtgctgagaatcctgctgctgaaagtggccggctttaacctgctgatgaccctgcggctgtggtccagcaaacggggcagaaagaaactcctgtatatattcaaacaaccatttatgagaccagtacaaactactcaagaggaagatggctgtagctgccgatttccagaagaagaagaaggaggatgtgaactgagagtgaagttcagcagaagcgccgacgcccctgcctaccagcagggacagaaccaactgtacaacgagctgaacctgggcagacgggaagagtacgacgtgctggacaagcggagaggcagggaccctgagatgggcggaaagccccagcggagaaagaacccccaggaaggactgtataacgaactccagaaagacaagatggccgaagcctacagcgagatcggcatgaagggcgagcggagaagaggcaagggccacgatggcctgtaccagggcctgagcaccgccaccaaggacacctatgacgccctgcacatgcaggccctgcctccaaga

SEQ ID NO: 27398 - DNA, 681 bp, synthetic construct
  source 1..681: mol_type = other DNA
gatttcgcctgcgccaacgccttcaacaacagcattatccccgaggacacattcttcccaagccccgagagcagctgcgacgtgaagctggtggaaaagagcttcgagacagacaccaacctgaacttccagaacctgctggtgatcgtgctgagaatcctgctgctgaaagtggccggctttaacctgctgatgaccctgcggctgtggtccagcaaacggggcagaaagaaactcctgtatatattcaaacaaccatttatgagaccagtacaaactactcaagaggaagatggctgtagctgccgatttccagaagaagaagaaggaggatgtgaactgagagtgaagttcagcagaagcgccgacgcccctgcctaccagcagggacagaaccaactgtacaacgagctgaacctgggcagacgggaagagtacgacgtgctggacaagcggagaggcagggaccctgagatgggcggaaagccccagcggagaaagaacccccaggaaggactgtataacgaactccagaaagacaagatggccgaagcctacagcgagatcggcatgaagggcgagcggagaagaggcaagggccacgatggcctgtaccagggcctgagcaccgccaccaaggacacctatgacgccctgcacatgcaggccctgcctccaaga

SEQ ID NO: 27399 - DNA, 678 bp, synthetic construct
  source 1..678: mol_type = other DNA
ttcgcctgcgccaacgccttcaacaacagcattatccccgaggacacattcttcccaagccccgagagcagctgcgacgtgaagctggtggaaaagagcttcgagacagacaccaacctgaacttccagaacctgctggtgatcgtgctgagaatcctgctgctgaaagtggccggctttaacctgctgatgaccctgcggctgtggtccagcaaacggggcagaaagaaactcctgtatatattcaaacaaccatttatgagaccagtacaaactactcaagaggaagatggctgtagctgccgatttccagaagaagaagaaggaggatgtgaactgagagtgaagttcagcagaagcgccgacgcccctgcctaccagcagggacagaaccaactgtacaacgagctgaacctgggcagacgggaagagtacgacgtgctggacaagcggagaggcagggaccctgagatgggcggaaagccccagcggagaaagaacccccaggaaggactgtataacgaactccagaaagacaagatggccgaagcctacagcgagatcggcatgaagggcgagcggagaagaggcaagggccacgatggcctgtaccagggcctgagcaccgccaccaaggacacctatgacgccctgcacatgcaggccctgcctccaaga

SEQ ID NO: 27400 - DNA, 675 bp, synthetic construct
  source 1..675: mol_type = other DNA
gcctgcgccaacgccttcaacaacagcattatccccgaggacacattcttcccaagccccgagagcagctgcgacgtgaagctggtggaaaagagcttcgagacagacaccaacctgaacttccagaacctgctggtgatcgtgctgagaatcctgctgctgaaagtggccggctttaacctgctgatgaccctgcggctgtggtccagcaaacggggcagaaagaaactcctgtatatattcaaacaaccatttatgagaccagtacaaactactcaagaggaagatggctgtagctgccgatttccagaagaagaagaaggaggatgtgaactgagagtgaagttcagcagaagcgccgacgcccctgcctaccagcagggacagaaccaactgtacaacgagctgaacctgggcagacgggaagagtacgacgtgctggacaagcggagaggcagggaccctgagatgggcggaaagccccagcggagaaagaacccccaggaaggactgtataacgaactccagaaagacaagatggccgaagcctacagcgagatcggcatgaagggcgagcggagaagaggcaagggccacgatggcctgtaccagggcctgagcaccgccaccaaggacacctatgacgccctgcacatgcaggccctgcctccaaga

SEQ ID NO: 27401 - DNA, 672 bp, synthetic construct
  source 1..672: mol_type = other DNA
tgcgccaacgccttcaacaacagcattatccccgaggacacattcttcccaagccccgagagcagctgcgacgtgaagctggtggaaaagagcttcgagacagacaccaacctgaacttccagaacctgctggtgatcgtgctgagaatcctgctgctgaaagtggccggctttaacctgctgatgaccctgcggctgtggtccagcaaacggggcagaaagaaactcctgtatatattcaaacaaccatttatgagaccagtacaaactactcaagaggaagatggctgtagctgccgatttccagaagaagaagaaggaggatgtgaactgagagtgaagttcagcagaagcgccgacgcccctgcctaccagcagggacagaaccaactgtacaacgagctgaacctgggcagacgggaagagtacgacgtgctggacaagcggagaggcagggaccctgagatgggcggaaagccccagcggagaaagaacccccaggaaggactgtataacgaactccagaaagacaagatggccgaagcctacagcgagatcggcatgaagggcgagcggagaagaggcaagggccacgatggcctgtaccagggcctgagcaccgccaccaaggacacctatgacgccctgcacatgcaggccctgcctccaaga

SEQ ID NO: 27402 - DNA, 669 bp, synthetic construct
  source 1..669: mol_type = other DNA
gccaacgccttcaacaacagcattatccccgaggacacattcttcccaagccccgagagcagctgcgacgtgaagctggtggaaaagagcttcgagacagacaccaacctgaacttccagaacctgctggtgatcgtgctgagaatcctgctgctgaaagtggccggctttaacctgctgatgaccctgcggctgtggtccagcaaacggggcagaaagaaactcctgtatatattcaaacaaccatttatgagaccagtacaaactactcaagaggaagatggctgtagctgccgatttccagaagaagaagaaggaggatgtgaactgagagtgaagttcagcagaagcgccgacgcccctgcctaccagcagggacagaaccaactgtacaacgagctgaacctgggcagacgggaagagtacgacgtgctggacaagcggagaggcagggaccctgagatgggcggaaagccccagcggagaaagaacccccaggaaggactgtataacgaactccagaaagacaagatggccgaagcctacagcgagatcggcatgaagggcgagcggagaagaggcaagggccacgatggcctgtaccagggcctgagcaccgccaccaaggacacctatgacgccctgcacatgcaggccctgcctccaaga

SEQ ID NO: 27403 - DNA, 666 bp, synthetic construct
  source 1..666: mol_type = other DNA
aacgccttcaacaacagcattatccccgaggacacattcttcccaagccccgagagcagctgcgacgtgaagctggtggaaaagagcttcgagacagacaccaacctgaacttccagaacctgctggtgatcgtgctgagaatcctgctgctgaaagtggccggctttaacctgctgatgaccctgcggctgtggtccagcaaacggggcagaaagaaactcctgtatatattcaaacaaccatttatgagaccagtacaaactactcaagaggaagatggctgtagctgccgatttccagaagaagaagaaggaggatgtgaactgagagtgaagttcagcagaagcgccgacgcccctgcctaccagcagggacagaaccaactgtacaacgagctgaacctgggcagacgggaagagtacgacgtgctggacaagcggagaggcagggaccctgagatgggcggaaagccccagcggagaaagaacccccaggaaggactgtataacgaactccagaaagacaagatggccgaagcctacagcgagatcggcatgaagggcgagcggagaagaggcaagggccacgatggcctgtaccagggcctgagcaccgccaccaaggacacctatgacgccctgcacatgcaggccctgcctccaaga

SEQ ID NO: 27404 - DNA, 663 bp, synthetic construct
  source 1..663: mol_type = other DNA
gccttcaacaacagcattatccccgaggacacattcttcccaagccccgagagcagctgcgacgtgaagctggtggaaaagagcttcgagacagacaccaacctgaacttccagaacctgctggtgatcgtgctgagaatcctgctgctgaaagtggccggctttaacctgctgatgaccctgcggctgtggtccagcaaacggggcagaaagaaactcctgtatatattcaaacaaccatttatgagaccagtacaaactactcaagaggaagatggctgtagctgccgatttccagaagaagaagaaggaggatgtgaactgagagtgaagttcagcagaagcgccgacgcccctgcctaccagcagggacagaaccaactgtacaacgagctgaacctgggcagacgggaagagtacgacgtgctggacaagcggagaggcagggaccctgagatgggcggaaagccccagcggagaaagaacccccaggaaggactgtataacgaactccagaaagacaagatggccgaagcctacagcgagatcggcatgaagggcgagcggagaagaggcaagggccacgatggcctgtaccagggcctgagcaccgccaccaaggacacctatgacgccctgcacatgcaggccctgcctccaaga

SEQ ID NO: 27405 - DNA, 660 bp, synthetic construct
  source 1..660: mol_type = other DNA
ttcaacaacagcattatccccgaggacacattcttcccaagccccgagagcagctgcgacgtgaagctggtggaaaagagcttcgagacagacaccaacctgaacttccagaacctgctggtgatcgtgctgagaatcctgctgctgaaagtggccggctttaacctgctgatgaccctgcggctgtggtccagcaaacggggcagaaagaaactcctgtatatattcaaacaaccatttatgagaccagtacaaactactcaagaggaagatggctgtagctgccgatttccagaagaagaagaaggaggatgtgaactgagagtgaagttcagcagaagcgccgacgcccctgcctaccagcagggacagaaccaactgtacaacgagctgaacctgggcagacgggaagagtacgacgtgctggacaagcggagaggcagggaccctgagatgggcggaaagccccagcggagaaagaacccccaggaaggactgtataacgaactccagaaagacaagatggccgaagcctacagcgagatcggcatgaagggcgagcggagaagaggcaagggccacgatggcctgtaccagggcctgagcaccgccaccaaggacacctatgacgccctgcacatgcaggccctgcctccaaga

SEQ ID NO: 27406 - DNA, 657 bp, synthetic construct
  source 1..657: mol_type = other DNA
aacaacagcattatccccgaggacacattcttcccaagccccgagagcagctgcgacgtgaagctggtggaaaagagcttcgagacagacaccaacctgaacttccagaacctgctggtgatcgtgctgagaatcctgctgctgaaagtggccggctttaacctgctgatgaccctgcggctgtggtccagcaaacggggcagaaagaaactcctgtatatattcaaacaaccatttatgagaccagtacaaactactcaagaggaagatggctgtagctgccgatttccagaagaagaagaaggaggatgtgaactgagagtgaagttcagcagaagcgccgacgcccctgcctaccagcagggacagaaccaactgtacaacgagctgaacctgggcagacgggaagagtacgacgtgctggacaagcggagaggcagggaccctgagatgggcggaaagccccagcggagaaagaacccccaggaaggactgtataacgaactccagaaagacaagatggccgaagcctacagcgagatcggcatgaagggcgagcggagaagaggcaagggccacgatggcctgtaccagggcctgagcaccgccaccaaggacacctatgacgccctgcacatgcaggccctgcctccaaga

SEQ ID NO: 27407 - DNA, 654 bp, synthetic construct
  source 1..654: mol_type = other DNA
aacagcattatccccgaggacacattcttcccaagccccgagagcagctgcgacgtgaagctggtggaaaagagcttcgagacagacaccaacctgaacttccagaacctgctggtgatcgtgctgagaatcctgctgctgaaagtggccggctttaacctgctgatgaccctgcggctgtggtccagcaaacggggcagaaagaaactcctgtatatattcaaacaaccatttatgagaccagtacaaactactcaagaggaagatggctgtagctgccgatttccagaagaagaagaaggaggatgtgaactgagagtgaagttcagcagaagcgccgacgcccctgcctaccagcagggacagaaccaactgtacaacgagctgaacctgggcagacgggaagagtacgacgtgctggacaagcggagaggcagggaccctgagatgggcggaaagccccagcggagaaagaacccccaggaaggactgtataacgaactccagaaagacaagatggccgaagcctacagcgagatcggcatgaagggcgagcggagaagaggcaagggccacgatggcctgtaccagggcctgagcaccgccaccaaggacacctatgacgccctgcacatgcaggccctgcctccaaga

SEQ ID NO: 27408 - DNA, 651 bp, synthetic construct
  source 1..651: mol_type = other DNA
agcattatccccgaggacacattcttcccaagccccgagagcagctgcgacgtgaagctggtggaaaagagcttcgagacagacaccaacctgaacttccagaacctgctggtgatcgtgctgagaatcctgctgctgaaagtggccggctttaacctgctgatgaccctgcggctgtggtccagcaaacggggcagaaagaaactcctgtatatattcaaacaaccatttatgagaccagtacaaactactcaagaggaagatggctgtagctgccgatttccagaagaagaagaaggaggatgtgaactgagagtgaagttcagcagaagcgccgacgcccctgcctaccagcagggacagaaccaactgtacaacgagctgaacctgggcagacgggaagagtacgacgtgctggacaagcggagaggcagggaccctgagatgggcggaaagccccagcggagaaagaacccccaggaaggactgtataacgaactccagaaagacaagatggccgaagcctacagcgagatcggcatgaagggcgagcggagaagaggcaagggccacgatggcctgtaccagggcctgagcaccgccaccaaggacacctatgacgccctgcacatgcaggccctgcctccaaga

SEQ ID NO: 27409 - DNA, 648 bp, synthetic construct
  source 1..648: mol_type = other DNA
attatccccgaggacacattcttcccaagccccgagagcagctgcgacgtgaagctggtggaaaagagcttcgagacagacaccaacctgaacttccagaacctgctggtgatcgtgctgagaatcctgctgctgaaagtggccggctttaacctgctgatgaccctgcggctgtggtccagcaaacggggcagaaagaaactcctgtatatattcaaacaaccatttatgagaccagtacaaactactcaagaggaagatggctgtagctgccgatttccagaagaagaagaaggaggatgtgaactgagagtgaagttcagcagaagcgccgacgcccctgcctaccagcagggacagaaccaactgtacaacgagctgaacctgggcagacgggaagagtacgacgtgctggacaagcggagaggcagggaccctgagatgggcggaaagccccagcggagaaagaacccccaggaaggactgtataacgaactccagaaagacaagatggccgaagcctacagcgagatcggcatgaagggcgagcggagaagaggcaagggccacgatggcctgtaccagggcctgagcaccgccaccaaggacacctatgacgccctgcacatgcaggccctgcctccaaga

SEQ ID NO: 27410 - DNA, 645 bp, synthetic construct
  source 1..645: mol_type = other DNA
atccccgaggacacattcttcccaagccccgagagcagctgcgacgtgaagctggtggaaaagagcttcgagacagacaccaacctgaacttccagaacctgctggtgatcgtgctgagaatcctgctgctgaaagtggccggctttaacctgctgatgaccctgcggctgtggtccagcaaacggggcagaaagaaactcctgtatatattcaaacaaccatttatgagaccagtacaaactactcaagaggaagatggctgtagctgccgatttccagaagaagaagaaggaggatgtgaactgagagtgaagttcagcagaagcgccgacgcccctgcctaccagcagggacagaaccaactgtacaacgagctgaacctgggcagacgggaagagtacgacgtgctggacaagcggagaggcagggaccctgagatgggcggaaagccccagcggagaaagaacccccaggaaggactgtataacgaactccagaaagacaagatggccgaagcctacagcgagatcggcatgaagggcgagcggagaagaggcaagggccacgatggcctgtaccagggcctgagcaccgccaccaaggacacctatgacgccctgcacatgcaggccctgcctccaaga

SEQ ID NO: 27411 - DNA, 642 bp, synthetic construct
  source 1..642: mol_type = other DNA
cccgaggacacattcttcccaagccccgagagcagctgcgacgtgaagctggtggaaaagagcttcgagacagacaccaacctgaacttccagaacctgctggtgatcgtgctgagaatcctgctgctgaaagtggccggctttaacctgctgatgaccctgcggctgtggtccagcaaacggggcagaaagaaactcctgtatatattcaaacaaccatttatgagaccagtacaaactactcaagaggaagatggctgtagctgccgatttccagaagaagaagaaggaggatgtgaactgagagtgaagttcagcagaagcgccgacgcccctgcctaccagcagggacagaaccaactgtacaacgagctgaacctgggcagacgggaagagtacgacgtgctggacaagcggagaggcagggaccctgagatgggcggaaagccccagcggagaaagaacccccaggaaggactgtataacgaactccagaaagacaagatggccgaagcctacagcgagatcggcatgaagggcgagcggagaagaggcaagggccacgatggcctgtaccagggcctgagcaccgccaccaaggacacctatgacgccctgcacatgcaggccctgcctccaaga

SEQ ID NO: 27412 - DNA, 639 bp, synthetic construct
  source 1..639: mol_type = other DNA
gaggacacattcttcccaagccccgagagcagctgcgacgtgaagctggtggaaaagagcttcgagacagacaccaacctgaacttccagaacctgctggtgatcgtgctgagaatcctgctgctgaaagtggccggctttaacctgctgatgaccctgcggctgtggtccagcaaacggggcagaaagaaactcctgtatatattcaaacaaccatttatgagaccagtacaaactactcaagaggaagatggctgtagctgccgatttccagaagaagaagaaggaggatgtgaactgagagtgaagttcagcagaagcgccgacgcccctgcctaccagcagggacagaaccaactgtacaacgagctgaacctgggcagacgggaagagtacgacgtgctggacaagcggagaggcagggaccctgagatgggcggaaagccccagcggagaaagaacccccaggaaggactgtataacgaactccagaaagacaagatggccgaagcctacagcgagatcggcatgaagggcgagcggagaagaggcaagggccacgatggcctgtaccagggcctgagcaccgccaccaaggacacctatgacgccctgcacatgcaggccctgcctccaaga

SEQ ID NO: 27413 - DNA, 636 bp, synthetic construct
  source 1..636: mol_type = other DNA
gacacattcttcccaagccccgagagcagctgcgacgtgaagctggtggaaaagagcttcgagacagacaccaacctgaacttccagaacctgctggtgatcgtgctgagaatcctgctgctgaaagtggccggctttaacctgctgatgaccctgcggctgtggtccagcaaacggggcagaaagaaactcctgtatatattcaaacaaccatttatgagaccagtacaaactactcaagaggaagatggctgtagctgccgatttccagaagaagaagaaggaggatgtgaactgagagtgaagttcagcagaagcgccgacgcccctgcctaccagcagggacagaaccaactgtacaacgagctgaacctgggcagacgggaagagtacgacgtgctggacaagcggagaggcagggaccctgagatgggcggaaagccccagcggagaaagaacccccaggaaggactgtataacgaactccagaaagacaagatggccgaagcctacagcgagatcggcatgaagggcgagcggagaagaggcaagggccacgatggcctgtaccagggcctgagcaccgccaccaaggacacctatgacgccctgcacatgcaggccctgcctccaaga

SEQ ID NO: 27414 - DNA, 633 bp, synthetic construct
  source 1..633: mol_type = other DNA
acattcttcccaagccccgagagcagctgcgacgtgaagctggtggaaaagagcttcgagacagacaccaacctgaacttccagaacctgctggtgatcgtgctgagaatcctgctgctgaaagtggccggctttaacctgctgatgaccctgcggctgtggtccagcaaacggggcagaaagaaactcctgtatatattcaaacaaccatttatgagaccagtacaaactactcaagaggaagatggctgtagctgccgatttccagaagaagaagaaggaggatgtgaactgagagtgaagttcagcagaagcgccgacgcccctgcctaccagcagggacagaaccaactgtacaacgagctgaacctgggcagacgggaagagtacgacgtgctggacaagcggagaggcagggaccctgagatgggcggaaagccccagcggagaaagaacccccaggaaggactgtataacgaactccagaaagacaagatggccgaagcctacagcgagatcggcatgaagggcgagcggagaagaggcaagggccacgatggcctgtaccagggcctgagcaccgccaccaaggacacctatgacgccctgcacatgcaggccctgcctccaaga

SEQ ID NO: 27415 - DNA, 630 bp, synthetic construct
  source 1..630: mol_type = other DNA
ttcttcccaagccccgagagcagctgcgacgtgaagctggtggaaaagagcttcgagacagacaccaacctgaacttccagaacctgctggtgatcgtgctgagaatcctgctgctgaaagtggccggctttaacctgctgatgaccctgcggctgtggtccagcaaacggggcagaaagaaactcctgtatatattcaaacaaccatttatgagaccagtacaaactactcaagaggaagatggctgtagctgccgatttccagaagaagaagaaggaggatgtgaactgagagtgaagttcagcagaagcgccgacgcccctgcctaccagcagggacagaaccaactgtacaacgagctgaacctgggcagacgggaagagtacgacgtgctggacaagcggagaggcagggaccctgagatgggcggaaagccccagcggagaaagaacccccaggaaggactgtataacgaactccagaaagacaagatggccgaagcctacagcgagatcggcatgaagggcgagcggagaagaggcaagggccacgatggcctgtaccagggcctgagcaccgccaccaaggacacctatgacgccctgcacatgcaggccctgcctccaaga

SEQ ID NO: 27416 - DNA, 627 bp, synthetic construct
  source 1..627: mol_type = other DNA
ttcccaagccccgagagcagctgcgacgtgaagctggtggaaaagagcttcgagacagacaccaacctgaacttccagaacctgctggtgatcgtgctgagaatcctgctgctgaaagtggccggctttaacctgctgatgaccctgcggctgtggtccagcaaacggggcagaaagaaactcctgtatatattcaaacaaccatttatgagaccagtacaaactactcaagaggaagatggctgtagctgccgatttccagaagaagaagaaggaggatgtgaactgagagtgaagttcagcagaagcgccgacgcccctgcctaccagcagggacagaaccaactgtacaacgagctgaacctgggcagacgggaagagtacgacgtgctggacaagcggagaggcagggaccctgagatgggcggaaagccccagcggagaaagaacccccaggaaggactgtataacgaactccagaaagacaagatggccgaagcctacagcgagatcggcatgaagggcgagcggagaagaggcaagggccacgatggcctgtaccagggcctgagcaccgccaccaaggacacctatgacgccctgcacatgcaggccctgcctccaaga

SEQ ID NO: 27417 - DNA, 624 bp, synthetic construct
  source 1..624: mol_type = other DNA
ccaagccccgagagcagctgcgacgtgaagctggtggaaaagagcttcgagacagacaccaacctgaacttccagaacctgctggtgatcgtgctgagaatcctgctgctgaaagtggccggctttaacctgctgatgaccctgcggctgtggtccagcaaacggggcagaaagaaactcctgtatatattcaaacaaccatttatgagaccagtacaaactactcaagaggaagatggctgtagctgccgatttccagaagaagaagaaggaggatgtgaactgagagtgaagttcagcagaagcgccgacgcccctgcctaccagcagggacagaaccaactgtacaacgagctgaacctgggcagacgggaagagtacgacgtgctggacaagcggagaggcagggaccctgagatgggcggaaagccccagcggagaaagaacccccaggaaggactgtataacgaactccagaaagacaagatggccgaagcctacagcgagatcggcatgaagggcgagcggagaagaggcaagggccacgatggcctgtaccagggcctgagcaccgccaccaaggacacctatgacgccctgcacatgcaggccctgcctccaaga

SEQ ID NO: 27418 - DNA, 621 bp, synthetic construct
  source 1..621: mol_type = other DNA
agccccgagagcagctgcgacgtgaagctggtggaaaagagcttcgagacagacaccaacctgaacttccagaacctgctggtgatcgtgctgagaatcctgctgctgaaagtggccggctttaacctgctgatgaccctgcggctgtggtccagcaaacggggcagaaagaaactcctgtatatattcaaacaaccatttatgagaccagtacaaactactcaagaggaagatggctgtagctgccgatttccagaagaagaagaaggaggatgtgaactgagagtgaagttcagcagaagcgccgacgcccctgcctaccagcagggacagaaccaactgtacaacgagctgaacctgggcagacgggaagagtacgacgtgctggacaagcggagaggcagggaccctgagatgggcggaaagccccagcggagaaagaacccccaggaaggactgtataacgaactccagaaagacaagatggccgaagcctacagcgagatcggcatgaagggcgagcggagaagaggcaagggccacgatggcctgtaccagggcctgagcaccgccaccaaggacacctatgacgccctgcacatgcaggccctgcctccaaga

SEQ ID NO: 27419 - DNA, 618 bp, synthetic construct
  source 1..618: mol_type = other DNA
cccgagagcagctgcgacgtgaagctggtggaaaagagcttcgagacagacaccaacctgaacttccagaacctgctggtgatcgtgctgagaatcctgctgctgaaagtggccggctttaacctgctgatgaccctgcggctgtggtccagcaaacggggcagaaagaaactcctgtatatattcaaacaaccatttatgagaccagtacaaactactcaagaggaagatggctgtagctgccgatttccagaagaagaagaaggaggatgtgaactgagagtgaagttcagcagaagcgccgacgcccctgcctaccagcagggacagaaccaactgtacaacgagctgaacctgggcagacgggaagagtacgacgtgctggacaagcggagaggcagggaccctgagatgggcggaaagccccagcggagaaagaacccccaggaaggactgtataacgaactccagaaagacaagatggccgaagcctacagcgagatcggcatgaagggcgagcggagaagaggcaagggccacgatggcctgtaccagggcctgagcaccgccaccaaggacacctatgacgccctgcacatgcaggccctgcctccaaga

SEQ ID NO: 27420 - DNA, 615 bp, synthetic construct
  source 1..615: mol_type = other DNA
gagagcagctgcgacgtgaagctggtggaaaagagcttcgagacagacaccaacctgaacttccagaacctgctggtgatcgtgctgagaatcctgctgctgaaagtggccggctttaacctgctgatgaccctgcggctgtggtccagcaaacggggcagaaagaaactcctgtatatattcaaacaaccatttatgagaccagtacaaactactcaagaggaagatggctgtagctgccgatttccagaagaagaagaaggaggatgtgaactgagagtgaagttcagcagaagcgccgacgcccctgcctaccagcagggacagaaccaactgtacaacgagctgaacctgggcagacgggaagagtacgacgtgctggacaagcggagaggcagggaccctgagatgggcggaaagccccagcggagaaagaacccccaggaaggactgtataacgaactccagaaagacaagatggccgaagcctacagcgagatcggcatgaagggcgagcggagaagaggcaagggccacgatggcctgtaccagggcctgagcaccgccaccaaggacacctatgacgccctgcacatgcaggccctgcctccaaga

SEQ ID NO: 27421 - DNA, 612 bp, synthetic construct
  source 1..612: mol_type = other DNA
agcagctgcgacgtgaagctggtggaaaagagcttcgagacagacaccaacctgaacttccagaacctgctggtgatcgtgctgagaatcctgctgctgaaagtggccggctttaacctgctgatgaccctgcggctgtggtccagcaaacggggcagaaagaaactcctgtatatattcaaacaaccatttatgagaccagtacaaactactcaagaggaagatggctgtagctgccgatttccagaagaagaagaaggaggatgtgaactgagagtgaagttcagcagaagcgccgacgcccctgcctaccagcagggacagaaccaactgtacaacgagctgaacctgggcagacgggaagagtacgacgtgctggacaagcggagaggcagggaccctgagatgggcggaaagccccagcggagaaagaacccccaggaaggactgtataacgaactccagaaagacaagatggccgaagcctacagcgagatcggcatgaagggcgagcggagaagaggcaagggccacgatggcctgtaccagggcctgagcaccgccaccaaggacacctatgacgccctgcacatgcaggccctgcctccaaga

SEQ ID NO: 27422 - DNA, 609 bp, synthetic construct
  source 1..609: mol_type = other DNA
agctgcgacgtgaagctggtggaaaagagcttcgagacagacaccaacctgaacttccagaacctgctggtgatcgtgctgagaatcctgctgctgaaagtggccggctttaacctgctgatgaccctgcggctgtggtccagcaaacggggcagaaagaaactcctgtatatattcaaacaaccatttatgagaccagtacaaactactcaagaggaagatggctgtagctgccgatttccagaagaagaagaaggaggatgtgaactgagagtgaagttcagcagaagcgccgacgcccctgcctaccagcagggacagaaccaactgtacaacgagctgaacctgggcagacgggaagagtacgacgtgctggacaagcggagaggcagggaccctgagatgggcggaaagccccagcggagaaagaacccccaggaaggactgtataacgaactccagaaagacaagatggccgaagcctacagcgagatcggcatgaagggcgagcggagaagaggcaagggccacgatggcctgtaccagggcctgagcaccgccaccaaggacacctatgacgccctgcacatgcaggccctgcctccaaga

SEQ ID NO: 27423 - DNA, 606 bp, synthetic construct
  source 1..606: mol_type = other DNA
tgcgacgtgaagctggtggaaaagagcttcgagacagacaccaacctgaacttccagaacctgctggtgatcgtgctgagaatcctgctgctgaaagtggccggctttaacctgctgatgaccctgcggctgtggtccagcaaacggggcagaaagaaactcctgtatatattcaaacaaccatttatgagaccagtacaaactactcaagaggaagatggctgtagctgccgatttccagaagaagaagaaggaggatgtgaactgagagtgaagttcagcagaagcgccgacgcccctgcctaccagcagggacagaaccaactgtacaacgagctgaacctgggcagacgggaagagtacgacgtgctggacaagcggagaggcagggaccctgagatgggcggaaagccccagcggagaaagaacccccaggaaggactgtataacgaactccagaaagacaagatggccgaagcctacagcgagatcggcatgaagggcgagcggagaagaggcaagggccacgatggcctgtaccagggcctgagcaccgccaccaaggacacctatgacgccctgcacatgcaggccctgcctccaaga

SEQ ID NO: 27424 - DNA, 603 bp, synthetic construct
  source 1..603: mol_type = other DNA
gacgtgaagctggtggaaaagagcttcgagacagacaccaacctgaacttccagaacctgctggtgatcgtgctgagaatcctgctgctgaaagtggccggctttaacctgctgatgaccctgcggctgtggtccagcaaacggggcagaaagaaactcctgtatatattcaaacaaccatttatgagaccagtacaaactactcaagaggaagatggctgtagctgccgatttccagaagaagaagaaggaggatgtgaactgagagtgaagttcagcagaagcgccgacgcccctgcctaccagcagggacagaaccaactgtacaacgagctgaacctgggcagacgggaagagtacgacgtgctggacaagcggagaggcagggaccctgagatgggcggaaagccccagcggagaaagaacccccaggaaggactgtataacgaactccagaaagacaagatggccgaagcctacagcgagatcggcatgaagggcgagcggagaagaggcaagggccacgatggcctgtaccagggcctgagcaccgccaccaaggacacctatgacgccctgcacatgcaggccctgcctccaaga

SEQ ID NO: 27425 - DNA, 600 bp, synthetic construct
  source 1..600: mol_type = other DNA
gtgaagctggtggaaaagagcttcgagacagacaccaacctgaacttccagaacctgctggtgatcgtgctgagaatcctgctgctgaaagtggccggctttaacctgctgatgaccctgcggctgtggtccagcaaacggggcagaaagaaactcctgtatatattcaaacaaccatttatgagaccagtacaaactactcaagaggaagatggctgtagctgccgatttccagaagaagaagaaggaggatgtgaactgagagtgaagttcagcagaagcgccgacgcccctgcctaccagcagggacagaaccaactgtacaacgagctgaacctgggcagacgggaagagtacgacgtgctggacaagcggagaggcagggaccctgagatgggcggaaagccccagcggagaaagaacccccaggaaggactgtataacgaactccagaaagacaagatggccgaagcctacagcgagatcggcatgaagggcgagcggagaagaggcaagggccacgatggcctgtaccagggcctgagcaccgccaccaaggacacctatgacgccctgcacatgcaggccctgcctccaaga

SEQ ID NO: 27426 - DNA, 597 bp, synthetic construct
  source 1..597: mol_type = other DNA
aagctggtggaaaagagcttcgagacagacaccaacctgaacttccagaacctgctggtgatcgtgctgagaatcctgctgctgaaagtggccggctttaacctgctgatgaccctgcggctgtggtccagcaaacggggcagaaagaaactcctgtatatattcaaacaaccatttatgagaccagtacaaactactcaagaggaagatggctgtagctgccgatttccagaagaagaagaaggaggatgtgaactgagagtgaagttcagcagaagcgccgacgcccctgcctaccagcagggacagaaccaactgtacaacgagctgaacctgggcagacgggaagagtacgacgtgctggacaagcggagaggcagggaccctgagatgggcggaaagccccagcggagaaagaacccccaggaaggactgtataacgaactccagaaagacaagatggccgaagcctacagcgagatcggcatgaagggcgagcggagaagaggcaagggccacgatggcctgtaccagggcctgagcaccgccaccaaggacacctatgacgccctgcacatgcaggccctgcctccaaga

SEQ ID NO: 27427 - DNA, 594 bp, synthetic construct
  source 1..594: mol_type = other DNA
ctggtggaaaagagcttcgagacagacaccaacctgaacttccagaacctgctggtgatcgtgctgagaatcctgctgctgaaagtggccggctttaacctgctgatgaccctgcggctgtggtccagcaaacggggcagaaagaaactcctgtatatattcaaacaaccatttatgagaccagtacaaactactcaagaggaagatggctgtagctgccgatttccagaagaagaagaaggaggatgtgaactgagagtgaagttcagcagaagcgccgacgcccctgcctaccagcagggacagaaccaactgtacaacgagctgaacctgggcagacgggaagagtacgacgtgctggacaagcggagaggcagggaccctgagatgggcggaaagccccagcggagaaagaacccccaggaaggactgtataacgaactccagaaagacaagatggccgaagcctacagcgagatcggcatgaagggcgagcggagaagaggcaagggccacgatggcctgtaccagggcctgagcaccgccaccaaggacacctatgacgccctgcacatgcaggccctgcctccaaga

SEQ ID NO: 27428 - DNA, 591 bp, synthetic construct
  source 1..591: mol_type = other DNA
gtggaaaagagcttcgagacagacaccaacctgaacttccagaacctgctggtgatcgtgctgagaatcctgctgctgaaagtggccggctttaacctgctgatgaccctgcggctgtggtccagcaaacggggcagaaagaaactcctgtatatattcaaacaaccatttatgagaccagtacaaactactcaagaggaagatggctgtagctgccgatttccagaagaagaagaaggaggatgtgaactgagagtgaagttcagcagaagcgccgacgcccctgcctaccagcagggacagaaccaactgtacaacgagctgaacctgggcagacgggaagagtacgacgtgctggacaagcggagaggcagggaccctgagatgggcggaaagccccagcggagaaagaacccccaggaaggactgtataacgaactccagaaagacaagatggccgaagcctacagcgagatcggcatgaagggcgagcggagaagaggcaagggccacgatggcctgtaccagggcctgagcaccgccaccaaggacacctatgacgccctgcacatgcaggccctgcctccaaga

SEQ ID NO: 27429 - DNA, 588 bp, synthetic construct
  source 1..588: mol_type = other DNA
gaaaagagcttcgagacagacaccaacctgaacttccagaacctgctggtgatcgtgctgagaatcctgctgctgaaagtggccggctttaacctgctgatgaccctgcggctgtggtccagcaaacggggcagaaagaaactcctgtatatattcaaacaaccatttatgagaccagtacaaactactcaagaggaagatggctgtagctgccgatttccagaagaagaagaaggaggatgtgaactgagagtgaagttcagcagaagcgccgacgcccctgcctaccagcagggacagaaccaactgtacaacgagctgaacctgggcagacgggaagagtacgacgtgctggacaagcggagaggcagggaccctgagatgggcggaaagccccagcggagaaagaacccccaggaaggactgtataacgaactccagaaagacaagatggccgaagcctacagcgagatcggcatgaagggcgagcggagaagaggcaagggccacgatggcctgtaccagggcctgagcaccgccaccaaggacacctatgacgccctgcacatgcaggccctgcctccaaga

SEQ ID NO: 27430 - DNA, 585 bp, synthetic construct
  source 1..585: mol_type = other DNA
aagagcttcgagacagacaccaacctgaacttccagaacctgctggtgatcgtgctgagaatcctgctgctgaaagtggccggctttaacctgctgatgaccctgcggctgtggtccagcaaacggggcagaaagaaactcctgtatatattcaaacaaccatttatgagaccagtacaaactactcaagaggaagatggctgtagctgccgatttccagaagaagaagaaggaggatgtgaactgagagtgaagttcagcagaagcgccgacgcccctgcctaccagcagggacagaaccaactgtacaacgagctgaacctgggcagacgggaagagtacgacgtgctggacaagcggagaggcagggaccctgagatgggcggaaagccccagcggagaaagaacccccaggaaggactgtataacgaactccagaaagacaagatggccgaagcctacagcgagatcggcatgaagggcgagcggagaagaggcaagggccacgatggcctgtaccagggcctgagcaccgccaccaaggacacctatgacgccctgcacatgcaggccctgcctccaaga

SEQ ID NO: 27431 - DNA, 582 bp, synthetic construct
  source 1..582: mol_type = other DNA
agcttcgagacagacaccaacctgaacttccagaacctgctggtgatcgtgctgagaatcctgctgctgaaagtggccggctttaacctgctgatgaccctgcggctgtggtccagcaaacggggcagaaagaaactcctgtatatattcaaacaaccatttatgagaccagtacaaactactcaagaggaagatggctgtagctgccgatttccagaagaagaagaaggaggatgtgaactgagagtgaagttcagcagaagcgccgacgcccctgcctaccagcagggacagaaccaactgtacaacgagctgaacctgggcagacgggaagagtacgacgtgctggacaagcggagaggcagggaccctgagatgggcggaaagccccagcggagaaagaacccccaggaaggactgtataacgaactccagaaagacaagatggccgaagcctacagcgagatcggcatgaagggcgagcggagaagaggcaagggccacgatggcctgtaccagggcctgagcaccgccaccaaggacacctatgacgccctgcacatgcaggccctgcctccaaga

SEQ ID NO: 27432 - DNA, 963 bp, synthetic construct
  source 1..963: mol_type = other DNA
ggacagcctaaggccaatcctaccgtgacactgttccctccaagcagcgaagaactccaggccaacaaggccacacttgtgtgcctgatctccgacttctaccctggggctgtgacagtggcttggaaggccgatggatctcctgtgaaagccggcgtggaaaccaccaagccatccaagcagagcaacaacaaatacgccgccagctcctacctgagcctgacacctgagcagtggaagtcccacagatcctacagctgccaagtgacccacgaaggcagcaccgtggaaaagacagtggcccctacagagtgcagcatccccgaggacacattcttcccaagccccgagagcagctgcgacgtgaagctggtggaaaagagcttcgagacagacaccaacctgaacttccagaacctgctggtgatcgtgctgagaatcctgctgctgaaagtggccggctttaacctgctgatgaccctgcggctgtggtccagcaaacggggcagaaagaaactcctgtatatattcaaacaaccatttatgagaccagtacaaactactcaagaggaagatggctgtagctgccgatttccagaagaagaagaaggaggatgtgaactgagagtgaagttcagcagaagcgccgacgcccctgcctaccagcagggacagaaccaactgtacaacgagctgaacctgggcagacgggaagagtacgacgtgctggacaagcggagaggcagggaccctgagatgggcggaaagccccagcggagaaagaacccccaggaaggactgtataacgaactccagaaagacaagatggccgaagcctacagcgagatcggcatgaagggcgagcggagaagaggcaagggccacgatggcctgtaccagggcctgagcaccgccaccaaggacacctatgacgccctgcacatgcaggccctgcctccaaga

SEQ ID NO: 27433 - DNA, 960 bp, synthetic construct
  source 1..960: mol_type = other DNA
cagcctaaggccaatcctaccgtgacactgttccctccaagcagcgaagaactccaggccaacaaggccacacttgtgtgcctgatctccgacttctaccctggggctgtgacagtggcttggaaggccgatggatctcctgtgaaagccggcgtggaaaccaccaagccatccaagcagagcaacaacaaatacgccgccagctcctacctgagcctgacacctgagcagtggaagtcccacagatcctacagctgccaagtgacccacgaaggcagcaccgtggaaaagacagtggcccctacagagtgcagcatccccgaggacacattcttcccaagccccgagagcagctgcgacgtgaagctggtggaaaagagcttcgagacagacaccaacctgaacttccagaacctgctggtgatcgtgctgagaatcctgctgctgaaagtggccggctttaacctgctgatgaccctgcggctgtggtccagcaaacggggcagaaagaaactcctgtatatattcaaacaaccatttatgagaccagtacaaactactcaagaggaagatggctgtagctgccgatttccagaagaagaagaaggaggatgtgaactgagagtgaagttcagcagaagcgccgacgcccctgcctaccagcagggacagaaccaactgtacaacgagctgaacctgggcagacgggaagagtacgacgtgctggacaagcggagaggcagggaccctgagatgggcggaaagccccagcggagaaagaacccccaggaaggactgtataacgaactccagaaagacaagatggccgaagcctacagcgagatcggcatgaagggcgagcggagaagaggcaagggccacgatggcctgtaccagggcctgagcaccgccaccaaggacacctatgacgccctgcacatgcaggccctgcctccaaga

SEQ ID NO: 27434 - DNA, 957 bp, synthetic construct
  source 1..957: mol_type = other DNA
cctaaggccaatcctaccgtgacactgttccctccaagcagcgaagaactccaggccaacaaggccacacttgtgtgcctgatctccgacttctaccctggggctgtgacagtggcttggaaggccgatggatctcctgtgaaagccggcgtggaaaccaccaagccatccaagcagagcaacaacaaatacgccgccagctcctacctgagcctgacacctgagcagtggaagtcccacagatcctacagctgccaagtgacccacgaaggcagcaccgtggaaaagacagtggcccctacagagtgcagcatccccgaggacacattcttcccaagccccgagagcagctgcgacgtgaagctggtggaaaagagcttcgagacagacaccaacctgaacttccagaacctgctggtgatcgtgctgagaatcctgctgctgaaagtggccggctttaacctgctgatgaccctgcggctgtggtccagcaaacggggcagaaagaaactcctgtatatattcaaacaaccatttatgagaccagtacaaactactcaagaggaagatggctgtagctgccgatttccagaagaagaagaaggaggatgtgaactgagagtgaagttcagcagaagcgccgacgcccctgcctaccagcagggacagaaccaactgtacaacgagctgaacctgggcagacgggaagagtacgacgtgctggacaagcggagaggcagggaccctgagatgggcggaaagccccagcggagaaagaacccccaggaaggactgtataacgaactccagaaagacaagatggccgaagcctacagcgagatcggcatgaagggcgagcggagaagaggcaagggccacgatggcctgtaccagggcctgagcaccgccaccaaggacacctatgacgccctgcacatgcaggccctgcctccaaga

SEQ ID NO: 27435 - DNA, 954 bp, synthetic construct
  source 1..954: mol_type = other DNA
aaggccaatcctaccgtgacactgttccctccaagcagcgaagaactccaggccaacaaggccacacttgtgtgcctgatctccgacttctaccctggggctgtgacagtggcttggaaggccgatggatctcctgtgaaagccggcgtggaaaccaccaagccatccaagcagagcaacaacaaatacgccgccagctcctacctgagcctgacacctgagcagtggaagtcccacagatcctacagctgccaagtgacccacgaaggcagcaccgtggaaaagacagtggcccctacagagtgcagcatccccgaggacacattcttcccaagccccgagagcagctgcgacgtgaagctggtggaaaagagcttcgagacagacaccaacctgaacttccagaacctgctggtgatcgtgctgagaatcctgctgctgaaagtggccggctttaacctgctgatgaccctgcggctgtggtccagcaaacggggcagaaagaaactcctgtatatattcaaacaaccatttatgagaccagtacaaactactcaagaggaagatggctgtagctgccgatttccagaagaagaagaaggaggatgtgaactgagagtgaagttcagcagaagcgccgacgcccctgcctaccagcagggacagaaccaactgtacaacgagctgaacctgggcagacgggaagagtacgacgtgctggacaagcggagaggcagggaccctgagatgggcggaaagccccagcggagaaagaacccccaggaaggactgtataacgaactccagaaagacaagatggccgaagcctacagcgagatcggcatgaagggcgagcggagaagaggcaagggccacgatggcctgtaccagggcctgagcaccgccaccaaggacacctatgacgccctgcacatgcaggccctgcctccaaga

SEQ ID NO: 27436 - DNA, 951 bp, synthetic construct
  source 1..951: mol_type = other DNA
gccaatcctaccgtgacactgttccctccaagcagcgaagaactccaggccaacaaggccacacttgtgtgcctgatctccgacttctaccctggggctgtgacagtggcttggaaggccgatggatctcctgtgaaagccggcgtggaaaccaccaagccatccaagcagagcaacaacaaatacgccgccagctcctacctgagcctgacacctgagcagtggaagtcccacagatcctacagctgccaagtgacccacgaaggcagcaccgtggaaaagacagtggcccctacagagtgcagcatccccgaggacacattcttcccaagccccgagagcagctgcgacgtgaagctggtggaaaagagcttcgagacagacaccaacctgaacttccagaacctgctggtgatcgtgctgagaatcctgctgctgaaagtggccggctttaacctgctgatgaccctgcggctgtggtccagcaaacggggcagaaagaaactcctgtatatattcaaacaaccatttatgagaccagtacaaactactcaagaggaagatggctgtagctgccgatttccagaagaagaagaaggaggatgtgaactgagagtgaagttcagcagaagcgccgacgcccctgcctaccagcagggacagaaccaactgtacaacgagctgaacctgggcagacgggaagagtacgacgtgctggacaagcggagaggcagggaccctgagatgggcggaaagccccagcggagaaagaacccccaggaaggactgtataacgaactccagaaagacaagatggccgaagcctacagcgagatcggcatgaagggcgagcggagaagaggcaagggccacgatggcctgtaccagggcctgagcaccgccaccaaggacacctatgacgccctgcacatgcaggccctgcctccaaga

SEQ ID NO: 27437 - DNA, 948 bp, synthetic construct
  source 1..948: mol_type = other DNA
aatcctaccgtgacactgttccctccaagcagcgaagaactccaggccaacaaggccacacttgtgtgcctgatctccgacttctaccctggggctgtgacagtggcttggaaggccgatggatctcctgtgaaagccggcgtggaaaccaccaagccatccaagcagagcaacaacaaatacgccgccagctcctacctgagcctgacacctgagcagtggaagtcccacagatcctacagctgccaagtgacccacgaaggcagcaccgtggaaaagacagtggcccctacagagtgcagcatccccgaggacacattcttcccaagccccgagagcagctgcgacgtgaagctggtggaaaagagcttcgagacagacaccaacctgaacttccagaacctgctggtgatcgtgctgagaatcctgctgctgaaagtggccggctttaacctgctgatgaccctgcggctgtggtccagcaaacggggcagaaagaaactcctgtatatattcaaacaaccatttatgagaccagtacaaactactcaagaggaagatggctgtagctgccgatttccagaagaagaagaaggaggatgtgaactgagagtgaagttcagcagaagcgccgacgcccctgcctaccagcagggacagaaccaactgtacaacgagctgaacctgggcagacgggaagagtacgacgtgctggacaagcggagaggcagggaccctgagatgggcggaaagccccagcggagaaagaacccccaggaaggactgtataacgaactccagaaagacaagatggccgaagcctacagcgagatcggcatgaagggcgagcggagaagaggcaagggccacgatggcctgtaccagggcctgagcaccgccaccaaggacacctatgacgccctgcacatgcaggccctgcctccaaga

SEQ ID NO: 27438 - DNA, 945 bp, synthetic construct
  source 1..945: mol_type = other DNA
cctaccgtgacactgttccctccaagcagcgaagaactccaggccaacaaggccacacttgtgtgcctgatctccgacttctaccctggggctgtgacagtggcttggaaggccgatggatctcctgtgaaagccggcgtggaaaccaccaagccatccaagcagagcaacaacaaatacgccgccagctcctacctgagcctgacacctgagcagtggaagtcccacagatcctacagctgccaagtgacccacgaaggcagcaccgtggaaaagacagtggcccctacagagtgcagcatccccgaggacacattcttcccaagccccgagagcagctgcgacgtgaagctggtggaaaagagcttcgagacagacaccaacctgaacttccagaacctgctggtgatcgtgctgagaatcctgctgctgaaagtggccggctttaacctgctgatgaccctgcggctgtggtccagcaaacggggcagaaagaaactcctgtatatattcaaacaaccatttatgagaccagtacaaactactcaagaggaagatggctgtagctgccgatttccagaagaagaagaaggaggatgtgaactgagagtgaagttcagcagaagcgccgacgcccctgcctaccagcagggacagaaccaactgtacaacgagctgaacctgggcagacgggaagagtacgacgtgctggacaagcggagaggcagggaccctgagatgggcggaaagccccagcggagaaagaacccccaggaaggactgtataacgaactccagaaagacaagatggccgaagcctacagcgagatcggcatgaagggcgagcggagaagaggcaagggccacgatggcctgtaccagggcctgagcaccgccaccaaggacacctatgacgccctgcacatgcaggccctgcctccaaga

SEQ ID NO: 27439 - DNA, 942 bp, synthetic construct
  source 1..942: mol_type = other DNA
accgtgacactgttccctccaagcagcgaagaactccaggccaacaaggccacacttgtgtgcctgatctccgacttctaccctggggctgtgacagtggcttggaaggccgatggatctcctgtgaaagccggcgtggaaaccaccaagccatccaagcagagcaacaacaaatacgccgccagctcctacctgagcctgacacctgagcagtggaagtcccacagatcctacagctgccaagtgacccacgaaggcagcaccgtggaaaagacagtggcccctacagagtgcagcatccccgaggacacattcttcccaagccccgagagcagctgcgacgtgaagctggtggaaaagagcttcgagacagacaccaacctgaacttccagaacctgctggtgatcgtgctgagaatcctgctgctgaaagtggccggctttaacctgctgatgaccctgcggctgtggtccagcaaacggggcagaaagaaactcctgtatatattcaaacaaccatttatgagaccagtacaaactactcaagaggaagatggctgtagctgccgatttccagaagaagaagaaggaggatgtgaactgagagtgaagttcagcagaagcgccgacgcccctgcctaccagcagggacagaaccaactgtacaacgagctgaacctgggcagacgggaagagtacgacgtgctggacaagcggagaggcagggaccctgagatgggcggaaagccccagcggagaaagaacccccaggaaggactgtataacgaactccagaaagacaagatggccgaagcctacagcgagatcggcatgaagggcgagcggagaagaggcaagggccacgatggcctgtaccagggcctgagcaccgccaccaaggacacctatgacgccctgcacatgcaggccctgcctccaaga

SEQ ID NO: 27440 - DNA, 939 bp, synthetic construct
  source 1..939: mol_type = other DNA
gtgacactgttccctccaagcagcgaagaactccaggccaacaaggccacacttgtgtgcctgatctccgacttctaccctggggctgtgacagtggcttggaaggccgatggatctcctgtgaaagccggcgtggaaaccaccaagccatccaagcagagcaacaacaaatacgccgccagctcctacctgagcctgacacctgagcagtggaagtcccacagatcctacagctgccaagtgacccacgaaggcagcaccgtggaaaagacagtggcccctacagagtgcagcatccccgaggacacattcttcccaagccccgagagcagctgcgacgtgaagctggtggaaaagagcttcgagacagacaccaacctgaacttccagaacctgctggtgatcgtgctgagaatcctgctgctgaaagtggccggctttaacctgctgatgaccctgcggctgtggtccagcaaacggggcagaaagaaactcctgtatatattcaaacaaccatttatgagaccagtacaaactactcaagaggaagatggctgtagctgccgatttccagaagaagaagaaggaggatgtgaactgagagtgaagttcagcagaagcgccgacgcccctgcctaccagcagggacagaaccaactgtacaacgagctgaacctgggcagacgggaagagtacgacgtgctggacaagcggagaggcagggaccctgagatgggcggaaagccccagcggagaaagaacccccaggaaggactgtataacgaactccagaaagacaagatggccgaagcctacagcgagatcggcatgaagggcgagcggagaagaggcaagggccacgatggcctgtaccagggcctgagcaccgccaccaaggacacctatgacgccctgcacatgcaggccctgcctccaaga

SEQ ID NO: 27441 - DNA, 936 bp, synthetic construct
  source 1..936: mol_type = other DNA
acactgttccctccaagcagcgaagaactccaggccaacaaggccacacttgtgtgcctgatctccgacttctaccctggggctgtgacagtggcttggaaggccgatggatctcctgtgaaagccggcgtggaaaccaccaagccatccaagcagagcaacaacaaatacgccgccagctcctacctgagcctgacacctgagcagtggaagtcccacagatcctacagctgccaagtgacccacgaaggcagcaccgtggaaaagacagtggcccctacagagtgcagcatccccgaggacacattcttcccaagccccgagagcagctgcgacgtgaagctggtggaaaagagcttcgagacagacaccaacctgaacttccagaacctgctggtgatcgtgctgagaatcctgctgctgaaagtggccggctttaacctgctgatgaccctgcggctgtggtccagcaaacggggcagaaagaaactcctgtatatattcaaacaaccatttatgagaccagtacaaactactcaagaggaagatggctgtagctgccgatttccagaagaagaagaaggaggatgtgaactgagagtgaagttcagcagaagcgccgacgcccctgcctaccagcagggacagaaccaactgtacaacgagctgaacctgggcagacgggaagagtacgacgtgctggacaagcggagaggcagggaccctgagatgggcggaaagccccagcggagaaagaacccccaggaaggactgtataacgaactccagaaagacaagatggccgaagcctacagcgagatcggcatgaagggcgagcggagaagaggcaagggccacgatggcctgtaccagggcctgagcaccgccaccaaggacacctatgacgccctgcacatgcaggccctgcctccaaga

SEQ ID NO: 27442 - DNA, 933 bp, synthetic construct
  source 1..933: mol_type = other DNA
ctgttccctccaagcagcgaagaactccaggccaacaaggccacacttgtgtgcctgatctccgacttctaccctggggctgtgacagtggcttggaaggccgatggatctcctgtgaaagccggcgtggaaaccaccaagccatccaagcagagcaacaacaaatacgccgccagctcctacctgagcctgacacctgagcagtggaagtcccacagatcctacagctgccaagtgacccacgaaggcagcaccgtggaaaagacagtggcccctacagagtgcagcatccccgaggacacattcttcccaagccccgagagcagctgcgacgtgaagctggtggaaaagagcttcgagacagacaccaacctgaacttccagaacctgctggtgatcgtgctgagaatcctgctgctgaaagtggccggctttaacctgctgatgaccctgcggctgtggtccagcaaacggggcagaaagaaactcctgtatatattcaaacaaccatttatgagaccagtacaaactactcaagaggaagatggctgtagctgccgatttccagaagaagaagaaggaggatgtgaactgagagtgaagttcagcagaagcgccgacgcccctgcctaccagcagggacagaaccaactgtacaacgagctgaacctgggcagacgggaagagtacgacgtgctggacaagcggagaggcagggaccctgagatgggcggaaagccccagcggagaaagaacccccaggaaggactgtataacgaactccagaaagacaagatggccgaagcctacagcgagatcggcatgaagggcgagcggagaagaggcaagggccacgatggcctgtaccagggcctgagcaccgccaccaaggacacctatgacgccctgcacatgcaggccctgcctccaaga

SEQ ID NO: 27443 - DNA, 993 bp, synthetic construct
  source 1..993: mol_type = other DNA
gacctgaagaacgtgttcccacctgaggtggccgtgttcgagcctagcgaggccgagatcagccacacccagaaagccaccctcgtgtgcctggctaccggcttctaccccgaccatgtggaactgtcttggtgggtcaacggcaaagaggtgcacagcggcgtgtgtaccgacccccagccactgaaagaacagcccgccctgaacgacagccggtactgcctgagcagcagactgagagtgtccgccaccttctggcagaacccccggaaccacttcagatgccaggtgcagttctacggcctgagcgagaacgacgagtggacccaggacagagccaagcccgtgacccagatcgtgtctgccgaagcctggggcagagccgattgcgacgtgaagctggtggaaaagagcttcgagacagacaccaacctgaacttccagaacctgctggtgatcgtgctgagaatcctgctgctgaaagtggccggctttaacctgctgatgaccctgcggctgtggtccagcaaacggggcagaaagaaactcctgtatatattcaaacaaccatttatgagaccagtacaaactactcaagaggaagatggctgtagctgccgatttccagaagaagaagaaggaggatgtgaactgagagtgaagttcagcagaagcgccgacgcccctgcctaccagcagggacagaaccaactgtacaacgagctgaacctgggcagacgggaagagtacgacgtgctggacaagcggagaggcagggaccctgagatgggcggaaagccccagcggagaaagaacccccaggaaggactgtataacgaactccagaaagacaagatggccgaagcctacagcgagatcggcatgaagggcgagcggagaagaggcaagggccacgatggcctgtaccagggcctgagcaccgccaccaaggacacctatgacgccctgcacatgcaggccctgcctccaaga

SEQ ID NO: 27444 - DNA, 990 bp, synthetic construct
  source 1..990: mol_type = other DNA
ctgaagaacgtgttcccacctgaggtggccgtgttcgagcctagcgaggccgagatcagccacacccagaaagccaccctcgtgtgcctggctaccggcttctaccccgaccatgtggaactgtcttggtgggtcaacggcaaagaggtgcacagcggcgtgtgtaccgacccccagccactgaaagaacagcccgccctgaacgacagccggtactgcctgagcagcagactgagagtgtccgccaccttctggcagaacccccggaaccacttcagatgccaggtgcagttctacggcctgagcgagaacgacgagtggacccaggacagagccaagcccgtgacccagatcgtgtctgccgaagcctggggcagagccgattgcgacgtgaagctggtggaaaagagcttcgagacagacaccaacctgaacttccagaacctgctggtgatcgtgctgagaatcctgctgctgaaagtggccggctttaacctgctgatgaccctgcggctgtggtccagcaaacggggcagaaagaaactcctgtatatattcaaacaaccatttatgagaccagtacaaactactcaagaggaagatggctgtagctgccgatttccagaagaagaagaaggaggatgtgaactgagagtgaagttcagcagaagcgccgacgcccctgcctaccagcagggacagaaccaactgtacaacgagctgaacctgggcagacgggaagagtacgacgtgctggacaagcggagaggcagggaccctgagatgggcggaaagccccagcggagaaagaacccccaggaaggactgtataacgaactccagaaagacaagatggccgaagcctacagcgagatcggcatgaagggcgagcggagaagaggcaagggccacgatggcctgtaccagggcctgagcaccgccaccaaggacacctatgacgccctgcacatgcaggccctgcctccaaga

SEQ ID NO: 27445 - DNA, 987 bp, synthetic construct
  source 1..987: mol_type = other DNA
aagaacgtgttcccacctgaggtggccgtgttcgagcctagcgaggccgagatcagccacacccagaaagccaccctcgtgtgcctggctaccggcttctaccccgaccatgtggaactgtcttggtgggtcaacggcaaagaggtgcacagcggcgtgtgtaccgacccccagccactgaaagaacagcccgccctgaacgacagccggtactgcctgagcagcagactgagagtgtccgccaccttctggcagaacccccggaaccacttcagatgccaggtgcagttctacggcctgagcgagaacgacgagtggacccaggacagagccaagcccgtgacccagatcgtgtctgccgaagcctggggcagagccgattgcgacgtgaagctggtggaaaagagcttcgagacagacaccaacctgaacttccagaacctgctggtgatcgtgctgagaatcctgctgctgaaagtggccggctttaacctgctgatgaccctgcggctgtggtccagcaaacggggcagaaagaaactcctgtatatattcaaacaaccatttatgagaccagtacaaactactcaagaggaagatggctgtagctgccgatttccagaagaagaagaaggaggatgtgaactgagagtgaagttcagcagaagcgccgacgcccctgcctaccagcagggacagaaccaactgtacaacgagctgaacctgggcagacgggaagagtacgacgtgctggacaagcggagaggcagggaccctgagatgggcggaaagccccagcggagaaagaacccccaggaaggactgtataacgaactccagaaagacaagatggccgaagcctacagcgagatcggcatgaagggcgagcggagaagaggcaagggccacgatggcctgtaccagggcctgagcaccgccaccaaggacacctatgacgccctgcacatgcaggccctgcctccaaga

SEQ ID NO: 27446 - DNA, 984 bp, synthetic construct
  source 1..984: mol_type = other DNA
aacgtgttcccacctgaggtggccgtgttcgagcctagcgaggccgagatcagccacacccagaaagccaccctcgtgtgcctggctaccggcttctaccccgaccatgtggaactgtcttggtgggtcaacggcaaagaggtgcacagcggcgtgtgtaccgacccccagccactgaaagaacagcccgccctgaacgacagccggtactgcctgagcagcagactgagagtgtccgccaccttctggcagaacccccggaaccacttcagatgccaggtgcagttctacggcctgagcgagaacgacgagtggacccaggacagagccaagcccgtgacccagatcgtgtctgccgaagcctggggcagagccgattgcgacgtgaagctggtggaaaagagcttcgagacagacaccaacctgaacttccagaacctgctggtgatcgtgctgagaatcctgctgctgaaagtggccggctttaacctgctgatgaccctgcggctgtggtccagcaaacggggcagaaagaaactcctgtatatattcaaacaaccatttatgagaccagtacaaactactcaagaggaagatggctgtagctgccgatttccagaagaagaagaaggaggatgtgaactgagagtgaagttcagcagaagcgccgacgcccctgcctaccagcagggacagaaccaactgtacaacgagctgaacctgggcagacgggaagagtacgacgtgctggacaagcggagaggcagggaccctgagatgggcggaaagccccagcggagaaagaacccccaggaaggactgtataacgaactccagaaagacaagatggccgaagcctacagcgagatcggcatgaagggcgagcggagaagaggcaagggccacgatggcctgtaccagggcctgagcaccgccaccaaggacacctatgacgccctgcacatgcaggccctgcctccaaga

SEQ ID NO: 27447 - DNA, 981 bp, synthetic construct
  source 1..981: mol_type = other DNA
gtgttcccacctgaggtggccgtgttcgagcctagcgaggccgagatcagccacacccagaaagccaccctcgtgtgcctggctaccggcttctaccccgaccatgtggaactgtcttggtgggtcaacggcaaagaggtgcacagcggcgtgtgtaccgacccccagccactgaaagaacagcccgccctgaacgacagccggtactgcctgagcagcagactgagagtgtccgccaccttctggcagaacccccggaaccacttcagatgccaggtgcagttctacggcctgagcgagaacgacgagtggacccaggacagagccaagcccgtgacccagatcgtgtctgccgaagcctggggcagagccgattgcgacgtgaagctggtggaaaagagcttcgagacagacaccaacctgaacttccagaacctgctggtgatcgtgctgagaatcctgctgctgaaagtggccggctttaacctgctgatgaccctgcggctgtggtccagcaaacggggcagaaagaaactcctgtatatattcaaacaaccatttatgagaccagtacaaactactcaagaggaagatggctgtagctgccgatttccagaagaagaagaaggaggatgtgaactgagagtgaagttcagcagaagcgccgacgcccctgcctaccagcagggacagaaccaactgtacaacgagctgaacctgggcagacgggaagagtacgacgtgctggacaagcggagaggcagggaccctgagatgggcggaaagccccagcggagaaagaacccccaggaaggactgtataacgaactccagaaagacaagatggccgaagcctacagcgagatcggcatgaagggcgagcggagaagaggcaagggccacgatggcctgtaccagggcctgagcaccgccaccaaggacacctatgacgccctgcacatgcaggccctgcctccaaga

SEQ ID NO: 27448 - DNA, 978 bp, synthetic construct
  source 1..978: mol_type = other DNA
ttcccacctgaggtggccgtgttcgagcctagcgaggccgagatcagccacacccagaaagccaccctcgtgtgcctggctaccggcttctaccccgaccatgtggaactgtcttggtgggtcaacggcaaagaggtgcacagcggcgtgtgtaccgacccccagccactgaaagaacagcccgccctgaacgacagccggtactgcctgagcagcagactgagagtgtccgccaccttctggcagaacccccggaaccacttcagatgccaggtgcagttctacggcctgagcgagaacgacgagtggacccaggacagagccaagcccgtgacccagatcgtgtctgccgaagcctggggcagagccgattgcgacgtgaagctggtggaaaagagcttcgagacagacaccaacctgaacttccagaacctgctggtgatcgtgctgagaatcctgctgctgaaagtggccggctttaacctgctgatgaccctgcggctgtggtccagcaaacggggcagaaagaaactcctgtatatattcaaacaaccatttatgagaccagtacaaactactcaagaggaagatggctgtagctgccgatttccagaagaagaagaaggaggatgtgaactgagagtgaagttcagcagaagcgccgacgcccctgcctaccagcagggacagaaccaactgtacaacgagctgaacctgggcagacgggaagagtacgacgtgctggacaagcggagaggcagggaccctgagatgggcggaaagccccagcggagaaagaacccccaggaaggactgtataacgaactccagaaagacaagatggccgaagcctacagcgagatcggcatgaagggcgagcggagaagaggcaagggccacgatggcctgtaccagggcctgagcaccgccaccaaggacacctatgacgccctgcacatgcaggccctgcctccaaga

SEQ ID NO: 27449 - DNA, 975 bp, synthetic construct
  source 1..975: mol_type = other DNA
ccacctgaggtggccgtgttcgagcctagcgaggccgagatcagccacacccagaaagccaccctcgtgtgcctggctaccggcttctaccccgaccatgtggaactgtcttggtgggtcaacggcaaagaggtgcacagcggcgtgtgtaccgacccccagccactgaaagaacagcccgccctgaacgacagccggtactgcctgagcagcagactgagagtgtccgccaccttctggcagaacccccggaaccacttcagatgccaggtgcagttctacggcctgagcgagaacgacgagtggacccaggacagagccaagcccgtgacccagatcgtgtctgccgaagcctggggcagagccgattgcgacgtgaagctggtggaaaagagcttcgagacagacaccaacctgaacttccagaacctgctggtgatcgtgctgagaatcctgctgctgaaagtggccggctttaacctgctgatgaccctgcggctgtggtccagcaaacggggcagaaagaaactcctgtatatattcaaacaaccatttatgagaccagtacaaactactcaagaggaagatggctgtagctgccgatttccagaagaagaagaaggaggatgtgaactgagagtgaagttcagcagaagcgccgacgcccctgcctaccagcagggacagaaccaactgtacaacgagctgaacctgggcagacgggaagagtacgacgtgctggacaagcggagaggcagggaccctgagatgggcggaaagccccagcggagaaagaacccccaggaaggactgtataacgaactccagaaagacaagatggccgaagcctacagcgagatcggcatgaagggcgagcggagaagaggcaagggccacgatggcctgtaccagggcctgagcaccgccaccaaggacacctatgacgccctgcacatgcaggccctgcctccaaga

SEQ ID NO: 27450 - DNA, 972 bp, synthetic construct
  source 1..972: mol_type = other DNA
cctgaggtggccgtgttcgagcctagcgaggccgagatcagccacacccagaaagccaccctcgtgtgcctggctaccggcttctaccccgaccatgtggaactgtcttggtgggtcaacggcaaagaggtgcacagcggcgtgtgtaccgacccccagccactgaaagaacagcccgccctgaacgacagccggtactgcctgagcagcagactgagagtgtccgccaccttctggcagaacccccggaaccacttcagatgccaggtgcagttctacggcctgagcgagaacgacgagtggacccaggacagagccaagcccgtgacccagatcgtgtctgccgaagcctggggcagagccgattgcgacgtgaagctggtggaaaagagcttcgagacagacaccaacctgaacttccagaacctgctggtgatcgtgctgagaatcctgctgctgaaagtggccggctttaacctgctgatgaccctgcggctgtggtccagcaaacggggcagaaagaaactcctgtatatattcaaacaaccatttatgagaccagtacaaactactcaagaggaagatggctgtagctgccgatttccagaagaagaagaaggaggatgtgaactgagagtgaagttcagcagaagcgccgacgcccctgcctaccagcagggacagaaccaactgtacaacgagctgaacctgggcagacgggaagagtacgacgtgctggacaagcggagaggcagggaccctgagatgggcggaaagccccagcggagaaagaacccccaggaaggactgtataacgaactccagaaagacaagatggccgaagcctacagcgagatcggcatgaagggcgagcggagaagaggcaagggccacgatggcctgtaccagggcctgagcaccgccaccaaggacacctatgacgccctgcacatgcaggccctgcctccaaga

SEQ ID NO: 27451 - DNA, 969 bp, synthetic construct
  source 1..969: mol_type = other DNA
gaggtggccgtgttcgagcctagcgaggccgagatcagccacacccagaaagccaccctcgtgtgcctggctaccggcttctaccccgaccatgtggaactgtcttggtgggtcaacggcaaagaggtgcacagcggcgtgtgtaccgacccccagccactgaaagaacagcccgccctgaacgacagccggtactgcctgagcagcagactgagagtgtccgccaccttctggcagaacccccggaaccacttcagatgccaggtgcagttctacggcctgagcgagaacgacgagtggacccaggacagagccaagcccgtgacccagatcgtgtctgccgaagcctggggcagagccgattgcgacgtgaagctggtggaaaagagcttcgagacagacaccaacctgaacttccagaacctgctggtgatcgtgctgagaatcctgctgctgaaagtggccggctttaacctgctgatgaccctgcggctgtggtccagcaaacggggcagaaagaaactcctgtatatattcaaacaaccatttatgagaccagtacaaactactcaagaggaagatggctgtagctgccgatttccagaagaagaagaaggaggatgtgaactgagagtgaagttcagcagaagcgccgacgcccctgcctaccagcagggacagaaccaactgtacaacgagctgaacctgggcagacgggaagagtacgacgtgctggacaagcggagaggcagggaccctgagatgggcggaaagccccagcggagaaagaacccccaggaaggactgtataacgaactccagaaagacaagatggccgaagcctacagcgagatcggcatgaagggcgagcggagaagaggcaagggccacgatggcctgtaccagggcctgagcaccgccaccaaggacacctatgacgccctgcacatgcaggccctgcctccaaga

SEQ ID NO: 27452 - DNA, 966 bp, synthetic construct
  source 1..966: mol_type = other DNA
gtggccgtgttcgagcctagcgaggccgagatcagccacacccagaaagccaccctcgtgtgcctggctaccggcttctaccccgaccatgtggaactgtcttggtgggtcaacggcaaagaggtgcacagcggcgtgtgtaccgacccccagccactgaaagaacagcccgccctgaacgacagccggtactgcctgagcagcagactgagagtgtccgccaccttctggcagaacccccggaaccacttcagatgccaggtgcagttctacggcctgagcgagaacgacgagtggacccaggacagagccaagcccgtgacccagatcgtgtctgccgaagcctggggcagagccgattgcgacgtgaagctggtggaaaagagcttcgagacagacaccaacctgaacttccagaacctgctggtgatcgtgctgagaatcctgctgctgaaagtggccggctttaacctgctgatgaccctgcggctgtggtccagcaaacggggcagaaagaaactcctgtatatattcaaacaaccatttatgagaccagtacaaactactcaagaggaagatggctgtagctgccgatttccagaagaagaagaaggaggatgtgaactgagagtgaagttcagcagaagcgccgacgcccctgcctaccagcagggacagaaccaactgtacaacgagctgaacctgggcagacgggaagagtacgacgtgctggacaagcggagaggcagggaccctgagatgggcggaaagccccagcggagaaagaacccccaggaaggactgtataacgaactccagaaagacaagatggccgaagcctacagcgagatcggcatgaagggcgagcggagaagaggcaagggccacgatggcctgtaccagggcctgagcaccgccaccaaggacacctatgacgccctgcacatgcaggccctgcctccaaga

SEQ ID NO: 27453 - DNA, 963 bp, synthetic construct
  source 1..963: mol_type = other DNA
gccgtgttcgagcctagcgaggccgagatcagccacacccagaaagccaccctcgtgtgcctggctaccggcttctaccccgaccatgtggaactgtcttggtgggtcaacggcaaagaggtgcacagcggcgtgtgtaccgacccccagccactgaaagaacagcccgccctgaacgacagccggtactgcctgagcagcagactgagagtgtccgccaccttctggcagaacccccggaaccacttcagatgccaggtgcagttctacggcctgagcgagaacgacgagtggacccaggacagagccaagcccgtgacccagatcgtgtctgccgaagcctggggcagagccgattgcgacgtgaagctggtggaaaagagcttcgagacagacaccaacctgaacttccagaacctgctggtgatcgtgctgagaatcctgctgctgaaagtggccggctttaacctgctgatgaccctgcggctgtggtccagcaaacggggcagaaagaaactcctgtatatattcaaacaaccatttatgagaccagtacaaactactcaagaggaagatggctgtagctgccgatttccagaagaagaagaaggaggatgtgaactgagagtgaagttcagcagaagcgccgacgcccctgcctaccagcagggacagaaccaactgtacaacgagctgaacctgggcagacgggaagagtacgacgtgctggacaagcggagaggcagggaccctgagatgggcggaaagccccagcggagaaagaacccccaggaaggactgtataacgaactccagaaagacaagatggccgaagcctacagcgagatcggcatgaagggcgagcggagaagaggcaagggccacgatggcctgtaccagggcctgagcaccgccaccaaggacacctatgacgccctgcacatgcaggccctgcctccaaga

SEQ ID NO: 27454 - DNA, 960 bp, synthetic construct
  source 1..960: mol_type = other DNA
gtgttcgagcctagcgaggccgagatcagccacacccagaaagccaccctcgtgtgcctggctaccggcttctaccccgaccatgtggaactgtcttggtgggtcaacggcaaagaggtgcacagcggcgtgtgtaccgacccccagccactgaaagaacagcccgccctgaacgacagccggtactgcctgagcagcagactgagagtgtccgccaccttctggcagaacccccggaaccacttcagatgccaggtgcagttctacggcctgagcgagaacgacgagtggacccaggacagagccaagcccgtgacccagatcgtgtctgccgaagcctggggcagagccgattgcgacgtgaagctggtggaaaagagcttcgagacagacaccaacctgaacttccagaacctgctggtgatcgtgctgagaatcctgctgctgaaagtggccggctttaacctgctgatgaccctgcggctgtggtccagcaaacggggcagaaagaaactcctgtatatattcaaacaaccatttatgagaccagtacaaactactcaagaggaagatggctgtagctgccgatttccagaagaagaagaaggaggatgtgaactgagagtgaagttcagcagaagcgccgacgcccctgcctaccagcagggacagaaccaactgtacaacgagctgaacctgggcagacgggaagagtacgacgtgctggacaagcggagaggcagggaccctgagatgggcggaaagccccagcggagaaagaacccccaggaaggactgtataacgaactccagaaagacaagatggccgaagcctacagcgagatcggcatgaagggcgagcggagaagaggcaagggccacgatggcctgtaccagggcctgagcaccgccaccaaggacacctatgacgccctgcacatgcaggccctgcctccaaga

SEQ ID NO: 27455 - DNA, 957 bp, synthetic construct
  source 1..957: mol_type = other DNA
ttcgagcctagcgaggccgagatcagccacacccagaaagccaccctcgtgtgcctggctaccggcttctaccccgaccatgtggaactgtcttggtgggtcaacggcaaagaggtgcacagcggcgtgtgtaccgacccccagccactgaaagaacagcccgccctgaacgacagccggtactgcctgagcagcagactgagagtgtccgccaccttctggcagaacccccggaaccacttcagatgccaggtgcagttctacggcctgagcgagaacgacgagtggacccaggacagagccaagcccgtgacccagatcgtgtctgccgaagcctggggcagagccgattgcgacgtgaagctggtggaaaagagcttcgagacagacaccaacctgaacttccagaacctgctggtgatcgtgctgagaatcctgctgctgaaagtggccggctttaacctgctgatgaccctgcggctgtggtccagcaaacggggcagaaagaaactcctgtatatattcaaacaaccatttatgagaccagtacaaactactcaagaggaagatggctgtagctgccgatttccagaagaagaagaaggaggatgtgaactgagagtgaagttcagcagaagcgccgacgcccctgcctaccagcagggacagaaccaactgtacaacgagctgaacctgggcagacgggaagagtacgacgtgctggacaagcggagaggcagggaccctgagatgggcggaaagccccagcggagaaagaacccccaggaaggactgtataacgaactccagaaagacaagatggccgaagcctacagcgagatcggcatgaagggcgagcggagaagaggcaagggccacgatggcctgtaccagggcctgagcaccgccaccaaggacacctatgacgccctgcacatgcaggccctgcctccaaga

SEQ ID NO: 27456 - DNA, 954 bp, synthetic construct
  source 1..954: mol_type = other DNA
gagcctagcgaggccgagatcagccacacccagaaagccaccctcgtgtgcctggctaccggcttctaccccgaccatgtggaactgtcttggtgggtcaacggcaaagaggtgcacagcggcgtgtgtaccgacccccagccactgaaagaacagcccgccctgaacgacagccggtactgcctgagcagcagactgagagtgtccgccaccttctggcagaacccccggaaccacttcagatgccaggtgcagttctacggcctgagcgagaacgacgagtggacccaggacagagccaagcccgtgacccagatcgtgtctgccgaagcctggggcagagccgattgcgacgtgaagctggtggaaaagagcttcgagacagacaccaacctgaacttccagaacctgctggtgatcgtgctgagaatcctgctgctgaaagtggccggctttaacctgctgatgaccctgcggctgtggtccagcaaacggggcagaaagaaactcctgtatatattcaaacaaccatttatgagaccagtacaaactactcaagaggaagatggctgtagctgccgatttccagaagaagaagaaggaggatgtgaactgagagtgaagttcagcagaagcgccgacgcccctgcctaccagcagggacagaaccaactgtacaacgagctgaacctgggcagacgggaagagtacgacgtgctggacaagcggagaggcagggaccctgagatgggcggaaagccccagcggagaaagaacccccaggaaggactgtataacgaactccagaaagacaagatggccgaagcctacagcgagatcggcatgaagggcgagcggagaagaggcaagggccacgatggcctgtaccagggcctgagcaccgccaccaaggacacctatgacgccctgcacatgcaggccctgcctccaaga

SEQ ID NO: 27457 - DNA, 951 bp, synthetic construct
  source 1..951: mol_type = other DNA
cctagcgaggccgagatcagccacacccagaaagccaccctcgtgtgcctggctaccggcttctaccccgaccatgtggaactgtcttggtgggtcaacggcaaagaggtgcacagcggcgtgtgtaccgacccccagccactgaaagaacagcccgccctgaacgacagccggtactgcctgagcagcagactgagagtgtccgccaccttctggcagaacccccggaaccacttcagatgccaggtgcagttctacggcctgagcgagaacgacgagtggacccaggacagagccaagcccgtgacccagatcgtgtctgccgaagcctggggcagagccgattgcgacgtgaagctggtggaaaagagcttcgagacagacaccaacctgaacttccagaacctgctggtgatcgtgctgagaatcctgctgctgaaagtggccggctttaacctgctgatgaccctgcggctgtggtccagcaaacggggcagaaagaaactcctgtatatattcaaacaaccatttatgagaccagtacaaactactcaagaggaagatggctgtagctgccgatttccagaagaagaagaaggaggatgtgaactgagagtgaagttcagcagaagcgccgacgcccctgcctaccagcagggacagaaccaactgtacaacgagctgaacctgggcagacgggaagagtacgacgtgctggacaagcggagaggcagggaccctgagatgggcggaaagccccagcggagaaagaacccccaggaaggactgtataacgaactccagaaagacaagatggccgaagcctacagcgagatcggcatgaagggcgagcggagaagaggcaagggccacgatggcctgtaccagggcctgagcaccgccaccaaggacacctatgacgccctgcacatgcaggccctgcctccaaga

SEQ ID NO: 27458 - DNA, 948 bp, synthetic construct
  source 1..948: mol_type = other DNA
agcgaggccgagatcagccacacccagaaagccaccctcgtgtgcctggctaccggcttctaccccgaccatgtggaactgtcttggtgggtcaacggcaaagaggtgcacagcggcgtgtgtaccgacccccagccactgaaagaacagcccgccctgaacgacagccggtactgcctgagcagcagactgagagtgtccgccaccttctggcagaacccccggaaccacttcagatgccaggtgcagttctacggcctgagcgagaacgacgagtggacccaggacagagccaagcccgtgacccagatcgtgtctgccgaagcctggggcagagccgattgcgacgtgaagctggtggaaaagagcttcgagacagacaccaacctgaacttccagaacctgctggtgatcgtgctgagaatcctgctgctgaaagtggccggctttaacctgctgatgaccctgcggctgtggtccagcaaacggggcagaaagaaactcctgtatatattcaaacaaccatttatgagaccagtacaaactactcaagaggaagatggctgtagctgccgatttccagaagaagaagaaggaggatgtgaactgagagtgaagttcagcagaagcgccgacgcccctgcctaccagcagggacagaaccaactgtacaacgagctgaacctgggcagacgggaagagtacgacgtgctggacaagcggagaggcagggaccctgagatgggcggaaagccccagcggagaaagaacccccaggaaggactgtataacgaactccagaaagacaagatggccgaagcctacagcgagatcggcatgaagggcgagcggagaagaggcaagggccacgatggcctgtaccagggcctgagcaccgccaccaaggacacctatgacgccctgcacatgcaggccctgcctccaaga

SEQ ID NO: 27459 - DNA, 945 bp, synthetic construct
  source 1..945: mol_type = other DNA
gaggccgagatcagccacacccagaaagccaccctcgtgtgcctggctaccggcttctaccccgaccatgtggaactgtcttggtgggtcaacggcaaagaggtgcacagcggcgtgtgtaccgacccccagccactgaaagaacagcccgccctgaacgacagccggtactgcctgagcagcagactgagagtgtccgccaccttctggcagaacccccggaaccacttcagatgccaggtgcagttctacggcctgagcgagaacgacgagtggacccaggacagagccaagcccgtgacccagatcgtgtctgccgaagcctggggcagagccgattgcgacgtgaagctggtggaaaagagcttcgagacagacaccaacctgaacttccagaacctgctggtgatcgtgctgagaatcctgctgctgaaagtggccggctttaacctgctgatgaccctgcggctgtggtccagcaaacggggcagaaagaaactcctgtatatattcaaacaaccatttatgagaccagtacaaactactcaagaggaagatggctgtagctgccgatttccagaagaagaagaaggaggatgtgaactgagagtgaagttcagcagaagcgccgacgcccctgcctaccagcagggacagaaccaactgtacaacgagctgaacctgggcagacgggaagagtacgacgtgctggacaagcggagaggcagggaccctgagatgggcggaaagccccagcggagaaagaacccccaggaaggactgtataacgaactccagaaagacaagatggccgaagcctacagcgagatcggcatgaagggcgagcggagaagaggcaagggccacgatggcctgtaccagggcctgagcaccgccaccaaggacacctatgacgccctgcacatgcaggccctgcctccaaga

SEQ ID NO: 27460 - DNA, 942 bp, synthetic construct
  source 1..942: mol_type = other DNA
gccgagatcagccacacccagaaagccaccctcgtgtgcctggctaccggcttctaccccgaccatgtggaactgtcttggtgggtcaacggcaaagaggtgcacagcggcgtgtgtaccgacccccagccactgaaagaacagcccgccctgaacgacagccggtactgcctgagcagcagactgagagtgtccgccaccttctggcagaacccccggaaccacttcagatgccaggtgcagttctacggcctgagcgagaacgacgagtggacccaggacagagccaagcccgtgacccagatcgtgtctgccgaagcctggggcagagccgattgcgacgtgaagctggtggaaaagagcttcgagacagacaccaacctgaacttccagaacctgctggtgatcgtgctgagaatcctgctgctgaaagtggccggctttaacctgctgatgaccctgcggctgtggtccagcaaacggggcagaaagaaactcctgtatatattcaaacaaccatttatgagaccagtacaaactactcaagaggaagatggctgtagctgccgatttccagaagaagaagaaggaggatgtgaactgagagtgaagttcagcagaagcgccgacgcccctgcctaccagcagggacagaaccaactgtacaacgagctgaacctgggcagacgggaagagtacgacgtgctggacaagcggagaggcagggaccctgagatgggcggaaagccccagcggagaaagaacccccaggaaggactgtataacgaactccagaaagacaagatggccgaagcctacagcgagatcggcatgaagggcgagcggagaagaggcaagggccacgatggcctgtaccagggcctgagcaccgccaccaaggacacctatgacgccctgcacatgcaggccctgcctccaaga

SEQ ID NO: 27461 - DNA, 939 bp, synthetic construct
  source 1..939: mol_type = other DNA
gagatcagccacacccagaaagccaccctcgtgtgcctggctaccggcttctaccccgaccatgtggaactgtcttggtgggtcaacggcaaagaggtgcacagcggcgtgtgtaccgacccccagccactgaaagaacagcccgccctgaacgacagccggtactgcctgagcagcagactgagagtgtccgccaccttctggcagaacccccggaaccacttcagatgccaggtgcagttctacggcctgagcgagaacgacgagtggacccaggacagagccaagcccgtgacccagatcgtgtctgccgaagcctggggcagagccgattgcgacgtgaagctggtggaaaagagcttcgagacagacaccaacctgaacttccagaacctgctggtgatcgtgctgagaatcctgctgctgaaagtggccggctttaacctgctgatgaccctgcggctgtggtccagcaaacggggcagaaagaaactcctgtatatattcaaacaaccatttatgagaccagtacaaactactcaagaggaagatggctgtagctgccgatttccagaagaagaagaaggaggatgtgaactgagagtgaagttcagcagaagcgccgacgcccctgcctaccagcagggacagaaccaactgtacaacgagctgaacctgggcagacgggaagagtacgacgtgctggacaagcggagaggcagggaccctgagatgggcggaaagccccagcggagaaagaacccccaggaaggactgtataacgaactccagaaagacaagatggccgaagcctacagcgagatcggcatgaagggcgagcggagaagaggcaagggccacgatggcctgtaccagggcctgagcaccgccaccaaggacacctatgacgccctgcacatgcaggccctgcctccaaga

SEQ ID NO: 27462 - DNA, 936 bp, synthetic construct
  source 1..936: mol_type = other DNA
atcagccacacccagaaagccaccctcgtgtgcctggctaccggcttctaccccgaccatgtggaactgtcttggtgggtcaacggcaaagaggtgcacagcggcgtgtgtaccgacccccagccactgaaagaacagcccgccctgaacgacagccggtactgcctgagcagcagactgagagtgtccgccaccttctggcagaacccccggaaccacttcagatgccaggtgcagttctacggcctgagcgagaacgacgagtggacccaggacagagccaagcccgtgacccagatcgtgtctgccgaagcctggggcagagccgattgcgacgtgaagctggtggaaaagagcttcgagacagacaccaacctgaacttccagaacctgctggtgatcgtgctgagaatcctgctgctgaaagtggccggctttaacctgctgatgaccctgcggctgtggtccagcaaacggggcagaaagaaactcctgtatatattcaaacaaccatttatgagaccagtacaaactactcaagaggaagatggctgtagctgccgatttccagaagaagaagaaggaggatgtgaactgagagtgaagttcagcagaagcgccgacgcccctgcctaccagcagggacagaaccaactgtacaacgagctgaacctgggcagacgggaagagtacgacgtgctggacaagcggagaggcagggaccctgagatgggcggaaagccccagcggagaaagaacccccaggaaggactgtataacgaactccagaaagacaagatggccgaagcctacagcgagatcggcatgaagggcgagcggagaagaggcaagggccacgatggcctgtaccagggcctgagcaccgccaccaaggacacctatgacgccctgcacatgcaggccctgcctccaaga

SEQ ID NO: 27463 - DNA, 933 bp, synthetic construct
  source 1..933: mol_type = other DNA
agccacacccagaaagccaccctcgtgtgcctggctaccggcttctaccccgaccatgtggaactgtcttggtgggtcaacggcaaagaggtgcacagcggcgtgtgtaccgacccccagccactgaaagaacagcccgccctgaacgacagccggtactgcctgagcagcagactgagagtgtccgccaccttctggcagaacccccggaaccacttcagatgccaggtgcagttctacggcctgagcgagaacgacgagtggacccaggacagagccaagcccgtgacccagatcgtgtctgccgaagcctggggcagagccgattgcgacgtgaagctggtggaaaagagcttcgagacagacaccaacctgaacttccagaacctgctggtgatcgtgctgagaatcctgctgctgaaagtggccggctttaacctgctgatgaccctgcggctgtggtccagcaaacggggcagaaagaaactcctgtatatattcaaacaaccatttatgagaccagtacaaactactcaagaggaagatggctgtagctgccgatttccagaagaagaagaaggaggatgtgaactgagagtgaagttcagcagaagcgccgacgcccctgcctaccagcagggacagaaccaactgtacaacgagctgaacctgggcagacgggaagagtacgacgtgctggacaagcggagaggcagggaccctgagatgggcggaaagccccagcggagaaagaacccccaggaaggactgtataacgaactccagaaagacaagatggccgaagcctacagcgagatcggcatgaagggcgagcggagaagaggcaagggccacgatggcctgtaccagggcctgagcaccgccaccaaggacacctatgacgccctgcacatgcaggccctgcctccaaga

SEQ ID NO: 27464 - DNA, 918 bp, synthetic construct
  source 1..918: mol_type = other DNA
gccaccctcgtgtgcctggctaccggcttctaccccgaccatgtggaactgtcttggtgggtcaacggcaaagaggtgcacagcggcgtgtgtaccgacccccagccactgaaagaacagcccgccctgaacgacagccggtactgcctgagcagcagactgagagtgtccgccaccttctggcagaacccccggaaccacttcagatgccaggtgcagttctacggcctgagcgagaacgacgagtggacccaggacagagccaagcccgtgacccagatcgtgtctgccgaagcctggggcagagccgattgcgacgtgaagctggtggaaaagagcttcgagacagacaccaacctgaacttccagaacctgctggtgatcgtgctgagaatcctgctgctgaaagtggccggctttaacctgctgatgaccctgcggctgtggtccagcaaacggggcagaaagaaactcctgtatatattcaaacaaccatttatgagaccagtacaaactactcaagaggaagatggctgtagctgccgatttccagaagaagaagaaggaggatgtgaactgagagtgaagttcagcagaagcgccgacgcccctgcctaccagcagggacagaaccaactgtacaacgagctgaacctgggcagacgggaagagtacgacgtgctggacaagcggagaggcagggaccctgagatgggcggaaagccccagcggagaaagaacccccaggaaggactgtataacgaactccagaaagacaagatggccgaagcctacagcgagatcggcatgaagggcgagcggagaagaggcaagggccacgatggcctgtaccagggcctgagcaccgccaccaaggacacctatgacgccctgcacatgcaggccctgcctccaaga

SEQ ID NO: 27465 - DNA, 903 bp, synthetic construct
  source 1..903: mol_type = other DNA
ctggctaccggcttctaccccgaccatgtggaactgtcttggtgggtcaacggcaaagaggtgcacagcggcgtgtgtaccgacccccagccactgaaagaacagcccgccctgaacgacagccggtactgcctgagcagcagactgagagtgtccgccaccttctggcagaacccccggaaccacttcagatgccaggtgcagttctacggcctgagcgagaacgacgagtggacccaggacagagccaagcccgtgacccagatcgtgtctgccgaagcctggggcagagccgattgcgacgtgaagctggtggaaaagagcttcgagacagacaccaacctgaacttccagaacctgctggtgatcgtgctgagaatcctgctgctgaaagtggccggctttaacctgctgatgaccctgcggctgtggtccagcaaacggggcagaaagaaactcctgtatatattcaaacaaccatttatgagaccagtacaaactactcaagaggaagatggctgtagctgccgatttccagaagaagaagaaggaggatgtgaactgagagtgaagttcagcagaagcgccgacgcccctgcctaccagcagggacagaaccaactgtacaacgagctgaacctgggcagacgggaagagtacgacgtgctggacaagcggagaggcagggaccctgagatgggcggaaagccccagcggagaaagaacccccaggaaggactgtataacgaactccagaaagacaagatggccgaagcctacagcgagatcggcatgaagggcgagcggagaagaggcaagggccacgatggcctgtaccagggcctgagcaccgccaccaaggacacctatgacgccctgcacatgcaggccctgcctccaaga

SEQ ID NO: 27466 - DNA, 984 bp, synthetic construct
  source 1..984: mol_type = other DNA
gacctgaagaacgtgttcccacctgaggtggccgtgttcgagcctagcgaggccgagatcagccacacccagaaagccaccctcgtgtgcctggctaccggcttctaccccgaccatgtggaactgtcttggtgggtcaacggcaaagaggtgcacagcggcgtgtgtaccgacccccagccactgaaagaacagcccgccctgaacgacagccggtactgcctgagcagcagactgagagtgtccgccaccttctggcagaacccccggaaccacttcagatgccaggtgcagttctacggcctgagcgagaacgacgagtggacccaggacagagccaagcccgtgacccagatcgtgtctgccgaagcctggggcagagccgattgcggctttaccagcgagagctaccagcagggcgtgctgagcgccaccaacctgctggtgatcgtgctgagaatcctgctgctgaaagtggccggctttaacctgctgatgaccctgcggctgtggtccagcaaacggggcagaaagaaactcctgtatatattcaaacaaccatttatgagaccagtacaaactactcaagaggaagatggctgtagctgccgatttccagaagaagaagaaggaggatgtgaactgagagtgaagttcagcagaagcgccgacgcccctgcctaccagcagggacagaaccaactgtacaacgagctgaacctgggcagacgggaagagtacgacgtgctggacaagcggagaggcagggaccctgagatgggcggaaagccccagcggagaaagaacccccaggaaggactgtataacgaactccagaaagacaagatggccgaagcctacagcgagatcggcatgaagggcgagcggagaagaggcaagggccacgatggcctgtaccagggcctgagcaccgccaccaaggacacctatgacgccctgcacatgcaggccctgcctccaaga

SEQ ID NO: 27467 - DNA, 981 bp, synthetic construct
  source 1..981: mol_type = other DNA
ctgaagaacgtgttcccacctgaggtggccgtgttcgagcctagcgaggccgagatcagccacacccagaaagccaccctcgtgtgcctggctaccggcttctaccccgaccatgtggaactgtcttggtgggtcaacggcaaagaggtgcacagcggcgtgtgtaccgacccccagccactgaaagaacagcccgccctgaacgacagccggtactgcctgagcagcagactgagagtgtccgccaccttctggcagaacccccggaaccacttcagatgccaggtgcagttctacggcctgagcgagaacgacgagtggacccaggacagagccaagcccgtgacccagatcgtgtctgccgaagcctggggcagagccgattgcggctttaccagcgagagctaccagcagggcgtgctgagcgccaccaacctgctggtgatcgtgctgagaatcctgctgctgaaagtggccggctttaacctgctgatgaccctgcggctgtggtccagcaaacggggcagaaagaaactcctgtatatattcaaacaaccatttatgagaccagtacaaactactcaagaggaagatggctgtagctgccgatttccagaagaagaagaaggaggatgtgaactgagagtgaagttcagcagaagcgccgacgcccctgcctaccagcagggacagaaccaactgtacaacgagctgaacctgggcagacgggaagagtacgacgtgctggacaagcggagaggcagggaccctgagatgggcggaaagccccagcggagaaagaacccccaggaaggactgtataacgaactccagaaagacaagatggccgaagcctacagcgagatcggcatgaagggcgagcggagaagaggcaagggccacgatggcctgtaccagggcctgagcaccgccaccaaggacacctatgacgccctgcacatgcaggccctgcctccaaga

SEQ ID NO: 27468 - DNA, 978 bp, synthetic construct
  source 1..978: mol_type = other DNA
aagaacgtgttcccacctgaggtggccgtgttcgagcctagcgaggccgagatcagccacacccagaaagccaccctcgtgtgcctggctaccggcttctaccccgaccatgtggaactgtcttggtgggtcaacggcaaagaggtgcacagcggcgtgtgtaccgacccccagccactgaaagaacagcccgccctgaacgacagccggtactgcctgagcagcagactgagagtgtccgccaccttctggcagaacccccggaaccacttcagatgccaggtgcagttctacggcctgagcgagaacgacgagtggacccaggacagagccaagcccgtgacccagatcgtgtctgccgaagcctggggcagagccgattgcggctttaccagcgagagctaccagcagggcgtgctgagcgccaccaacctgctggtgatcgtgctgagaatcctgctgctgaaagtggccggctttaacctgctgatgaccctgcggctgtggtccagcaaacggggcagaaagaaactcctgtatatattcaaacaaccatttatgagaccagtacaaactactcaagaggaagatggctgtagctgccgatttccagaagaagaagaaggaggatgtgaactgagagtgaagttcagcagaagcgccgacgcccctgcctaccagcagggacagaaccaactgtacaacgagctgaacctgggcagacgggaagagtacgacgtgctggacaagcggagaggcagggaccctgagatgggcggaaagccccagcggagaaagaacccccaggaaggactgtataacgaactccagaaagacaagatggccgaagcctacagcgagatcggcatgaagggcgagcggagaagaggcaagggccacgatggcctgtaccagggcctgagcaccgccaccaaggacacctatgacgccctgcacatgcaggccctgcctccaaga

SEQ ID NO: 27469 - DNA, 975 bp, synthetic construct
  source 1..975: mol_type = other DNA
aacgtgttcccacctgaggtggccgtgttcgagcctagcgaggccgagatcagccacacccagaaagccaccctcgtgtgcctggctaccggcttctaccccgaccatgtggaactgtcttggtgggtcaacggcaaagaggtgcacagcggcgtgtgtaccgacccccagccactgaaagaacagcccgccctgaacgacagccggtactgcctgagcagcagactgagagtgtccgccaccttctggcagaacccccggaaccacttcagatgccaggtgcagttctacggcctgagcgagaacgacgagtggacccaggacagagccaagcccgtgacccagatcgtgtctgccgaagcctggggcagagccgattgcggctttaccagcgagagctaccagcagggcgtgctgagcgccaccaacctgctggtgatcgtgctgagaatcctgctgctgaaagtggccggctttaacctgctgatgaccctgcggctgtggtccagcaaacggggcagaaagaaactcctgtatatattcaaacaaccatttatgagaccagtacaaactactcaagaggaagatggctgtagctgccgatttccagaagaagaagaaggaggatgtgaactgagagtgaagttcagcagaagcgccgacgcccctgcctaccagcagggacagaaccaactgtacaacgagctgaacctgggcagacgggaagagtacgacgtgctggacaagcggagaggcagggaccctgagatgggcggaaagccccagcggagaaagaacccccaggaaggactgtataacgaactccagaaagacaagatggccgaagcctacagcgagatcggcatgaagggcgagcggagaagaggcaagggccacgatggcctgtaccagggcctgagcaccgccaccaaggacacctatgacgccctgcacatgcaggccctgcctccaaga

SEQ ID NO: 27470 - DNA, 972 bp, synthetic construct
  source 1..972: mol_type = other DNA
gtgttcccacctgaggtggccgtgttcgagcctagcgaggccgagatcagccacacccagaaagccaccctcgtgtgcctggctaccggcttctaccccgaccatgtggaactgtcttggtgggtcaacggcaaagaggtgcacagcggcgtgtgtaccgacccccagccactgaaagaacagcccgccctgaacgacagccggtactgcctgagcagcagactgagagtgtccgccaccttctggcagaacccccggaaccacttcagatgccaggtgcagttctacggcctgagcgagaacgacgagtggacccaggacagagccaagcccgtgacccagatcgtgtctgccgaagcctggggcagagccgattgcggctttaccagcgagagctaccagcagggcgtgctgagcgccaccaacctgctggtgatcgtgctgagaatcctgctgctgaaagtggccggctttaacctgctgatgaccctgcggctgtggtccagcaaacggggcagaaagaaactcctgtatatattcaaacaaccatttatgagaccagtacaaactactcaagaggaagatggctgtagctgccgatttccagaagaagaagaaggaggatgtgaactgagagtgaagttcagcagaagcgccgacgcccctgcctaccagcagggacagaaccaactgtacaacgagctgaacctgggcagacgggaagagtacgacgtgctggacaagcggagaggcagggaccctgagatgggcggaaagccccagcggagaaagaacccccaggaaggactgtataacgaactccagaaagacaagatggccgaagcctacagcgagatcggcatgaagggcgagcggagaagaggcaagggccacgatggcctgtaccagggcctgagcaccgccaccaaggacacctatgacgccctgcacatgcaggccctgcctccaaga

SEQ ID NO: 27471 - DNA, 969 bp, synthetic construct
  source 1..969: mol_type = other DNA
ttcccacctgaggtggccgtgttcgagcctagcgaggccgagatcagccacacccagaaagccaccctcgtgtgcctggctaccggcttctaccccgaccatgtggaactgtcttggtgggtcaacggcaaagaggtgcacagcggcgtgtgtaccgacccccagccactgaaagaacagcccgccctgaacgacagccggtactgcctgagcagcagactgagagtgtccgccaccttctggcagaacccccggaaccacttcagatgccaggtgcagttctacggcctgagcgagaacgacgagtggacccaggacagagccaagcccgtgacccagatcgtgtctgccgaagcctggggcagagccgattgcggctttaccagcgagagctaccagcagggcgtgctgagcgccaccaacctgctggtgatcgtgctgagaatcctgctgctgaaagtggccggctttaacctgctgatgaccctgcggctgtggtccagcaaacggggcagaaagaaactcctgtatatattcaaacaaccatttatgagaccagtacaaactactcaagaggaagatggctgtagctgccgatttccagaagaagaagaaggaggatgtgaactgagagtgaagttcagcagaagcgccgacgcccctgcctaccagcagggacagaaccaactgtacaacgagctgaacctgggcagacgggaagagtacgacgtgctggacaagcggagaggcagggaccctgagatgggcggaaagccccagcggagaaagaacccccaggaaggactgtataacgaactccagaaagacaagatggccgaagcctacagcgagatcggcatgaagggcgagcggagaagaggcaagggccacgatggcctgtaccagggcctgagcaccgccaccaaggacacctatgacgccctgcacatgcaggccctgcctccaaga

SEQ ID NO: 27472 - DNA, 966 bp, synthetic construct
  source 1..966: mol_type = other DNA
ccacctgaggtggccgtgttcgagcctagcgaggccgagatcagccacacccagaaagccaccctcgtgtgcctggctaccggcttctaccccgaccatgtggaactgtcttggtgggtcaacggcaaagaggtgcacagcggcgtgtgtaccgacccccagccactgaaagaacagcccgccctgaacgacagccggtactgcctgagcagcagactgagagtgtccgccaccttctggcagaacccccggaaccacttcagatgccaggtgcagttctacggcctgagcgagaacgacgagtggacccaggacagagccaagcccgtgacccagatcgtgtctgccgaagcctggggcagagccgattgcggctttaccagcgagagctaccagcagggcgtgctgagcgccaccaacctgctggtgatcgtgctgagaatcctgctgctgaaagtggccggctttaacctgctgatgaccctgcggctgtggtccagcaaacggggcagaaagaaactcctgtatatattcaaacaaccatttatgagaccagtacaaactactcaagaggaagatggctgtagctgccgatttccagaagaagaagaaggaggatgtgaactgagagtgaagttcagcagaagcgccgacgcccctgcctaccagcagggacagaaccaactgtacaacgagctgaacctgggcagacgggaagagtacgacgtgctggacaagcggagaggcagggaccctgagatgggcggaaagccccagcggagaaagaacccccaggaaggactgtataacgaactccagaaagacaagatggccgaagcctacagcgagatcggcatgaagggcgagcggagaagaggcaagggccacgatggcctgtaccagggcctgagcaccgccaccaaggacacctatgacgccctgcacatgcaggccctgcctccaaga

SEQ ID NO: 27473 - DNA, 963 bp, synthetic construct
  source 1..963: mol_type = other DNA
cctgaggtggccgtgttcgagcctagcgaggccgagatcagccacacccagaaagccaccctcgtgtgcctggctaccggcttctaccccgaccatgtggaactgtcttggtgggtcaacggcaaagaggtgcacagcggcgtgtgtaccgacccccagccactgaaagaacagcccgccctgaacgacagccggtactgcctgagcagcagactgagagtgtccgccaccttctggcagaacccccggaaccacttcagatgccaggtgcagttctacggcctgagcgagaacgacgagtggacccaggacagagccaagcccgtgacccagatcgtgtctgccgaagcctggggcagagccgattgcggctttaccagcgagagctaccagcagggcgtgctgagcgccaccaacctgctggtgatcgtgctgagaatcctgctgctgaaagtggccggctttaacctgctgatgaccctgcggctgtggtccagcaaacggggcagaaagaaactcctgtatatattcaaacaaccatttatgagaccagtacaaactactcaagaggaagatggctgtagctgccgatttccagaagaagaagaaggaggatgtgaactgagagtgaagttcagcagaagcgccgacgcccctgcctaccagcagggacagaaccaactgtacaacgagctgaacctgggcagacgggaagagtacgacgtgctggacaagcggagaggcagggaccctgagatgggcggaaagccccagcggagaaagaacccccaggaaggactgtataacgaactccagaaagacaagatggccgaagcctacagcgagatcggcatgaagggcgagcggagaagaggcaagggccacgatggcctgtaccagggcctgagcaccgccaccaaggacacctatgacgccctgcacatgcaggccctgcctccaaga

SEQ ID NO: 27474 - DNA, 960 bp, synthetic construct
  source 1..960: mol_type = other DNA
gaggtggccgtgttcgagcctagcgaggccgagatcagccacacccagaaagccaccctcgtgtgcctggctaccggcttctaccccgaccatgtggaactgtcttggtgggtcaacggcaaagaggtgcacagcggcgtgtgtaccgacccccagccactgaaagaacagcccgccctgaacgacagccggtactgcctgagcagcagactgagagtgtccgccaccttctggcagaacccccggaaccacttcagatgccaggtgcagttctacggcctgagcgagaacgacgagtggacccaggacagagccaagcccgtgacccagatcgtgtctgccgaagcctggggcagagccgattgcggctttaccagcgagagctaccagcagggcgtgctgagcgccaccaacctgctggtgatcgtgctgagaatcctgctgctgaaagtggccggctttaacctgctgatgaccctgcggctgtggtccagcaaacggggcagaaagaaactcctgtatatattcaaacaaccatttatgagaccagtacaaactactcaagaggaagatggctgtagctgccgatttccagaagaagaagaaggaggatgtgaactgagagtgaagttcagcagaagcgccgacgcccctgcctaccagcagggacagaaccaactgtacaacgagctgaacctgggcagacgggaagagtacgacgtgctggacaagcggagaggcagggaccctgagatgggcggaaagccccagcggagaaagaacccccaggaaggactgtataacgaactccagaaagacaagatggccgaagcctacagcgagatcggcatgaagggcgagcggagaagaggcaagggccacgatggcctgtaccagggcctgagcaccgccaccaaggacacctatgacgccctgcacatgcaggccctgcctccaaga

SEQ ID NO: 27475 - DNA, 957 bp, synthetic construct
  source 1..957: mol_type = other DNA
gtggccgtgttcgagcctagcgaggccgagatcagccacacccagaaagccaccctcgtgtgcctggctaccggcttctaccccgaccatgtggaactgtcttggtgggtcaacggcaaagaggtgcacagcggcgtgtgtaccgacccccagccactgaaagaacagcccgccctgaacgacagccggtactgcctgagcagcagactgagagtgtccgccaccttctggcagaacccccggaaccacttcagatgccaggtgcagttctacggcctgagcgagaacgacgagtggacccaggacagagccaagcccgtgacccagatcgtgtctgccgaagcctggggcagagccgattgcggctttaccagcgagagctaccagcagggcgtgctgagcgccaccaacctgctggtgatcgtgctgagaatcctgctgctgaaagtggccggctttaacctgctgatgaccctgcggctgtggtccagcaaacggggcagaaagaaactcctgtatatattcaaacaaccatttatgagaccagtacaaactactcaagaggaagatggctgtagctgccgatttccagaagaagaagaaggaggatgtgaactgagagtgaagttcagcagaagcgccgacgcccctgcctaccagcagggacagaaccaactgtacaacgagctgaacctgggcagacgggaagagtacgacgtgctggacaagcggagaggcagggaccctgagatgggcggaaagccccagcggagaaagaacccccaggaaggactgtataacgaactccagaaagacaagatggccgaagcctacagcgagatcggcatgaagggcgagcggagaagaggcaagggccacgatggcctgtaccagggcctgagcaccgccaccaaggacacctatgacgccctgcacatgcaggccctgcctccaaga

SEQ ID NO: 27476 - DNA, 954 bp, synthetic construct
  source 1..954: mol_type = other DNA
gccgtgttcgagcctagcgaggccgagatcagccacacccagaaagccaccctcgtgtgcctggctaccggcttctaccccgaccatgtggaactgtcttggtgggtcaacggcaaagaggtgcacagcggcgtgtgtaccgacccccagccactgaaagaacagcccgccctgaacgacagccggtactgcctgagcagcagactgagagtgtccgccaccttctggcagaacccccggaaccacttcagatgccaggtgcagttctacggcctgagcgagaacgacgagtggacccaggacagagccaagcccgtgacccagatcgtgtctgccgaagcctggggcagagccgattgcggctttaccagcgagagctaccagcagggcgtgctgagcgccaccaacctgctggtgatcgtgctgagaatcctgctgctgaaagtggccggctttaacctgctgatgaccctgcggctgtggtccagcaaacggggcagaaagaaactcctgtatatattcaaacaaccatttatgagaccagtacaaactactcaagaggaagatggctgtagctgccgatttccagaagaagaagaaggaggatgtgaactgagagtgaagttcagcagaagcgccgacgcccctgcctaccagcagggacagaaccaactgtacaacgagctgaacctgggcagacgggaagagtacgacgtgctggacaagcggagaggcagggaccctgagatgggcggaaagccccagcggagaaagaacccccaggaaggactgtataacgaactccagaaagacaagatggccgaagcctacagcgagatcggcatgaagggcgagcggagaagaggcaagggccacgatggcctgtaccagggcctgagcaccgccaccaaggacacctatgacgccctgcacatgcaggccctgcctccaaga

SEQ ID NO: 27477 - DNA, 951 bp, synthetic construct
  source 1..951: mol_type = other DNA
gtgttcgagcctagcgaggccgagatcagccacacccagaaagccaccctcgtgtgcctggctaccggcttctaccccgaccatgtggaactgtcttggtgggtcaacggcaaagaggtgcacagcggcgtgtgtaccgacccccagccactgaaagaacagcccgccctgaacgacagccggtactgcctgagcagcagactgagagtgtccgccaccttctggcagaacccccggaaccacttcagatgccaggtgcagttctacggcctgagcgagaacgacgagtggacccaggacagagccaagcccgtgacccagatcgtgtctgccgaagcctggggcagagccgattgcggctttaccagcgagagctaccagcagggcgtgctgagcgccaccaacctgctggtgatcgtgctgagaatcctgctgctgaaagtggccggctttaacctgctgatgaccctgcggctgtggtccagcaaacggggcagaaagaaactcctgtatatattcaaacaaccatttatgagaccagtacaaactactcaagaggaagatggctgtagctgccgatttccagaagaagaagaaggaggatgtgaactgagagtgaagttcagcagaagcgccgacgcccctgcctaccagcagggacagaaccaactgtacaacgagctgaacctgggcagacgggaagagtacgacgtgctggacaagcggagaggcagggaccctgagatgggcggaaagccccagcggagaaagaacccccaggaaggactgtataacgaactccagaaagacaagatggccgaagcctacagcgagatcggcatgaagggcgagcggagaagaggcaagggccacgatggcctgtaccagggcctgagcaccgccaccaaggacacctatgacgccctgcacatgcaggccctgcctccaaga

SEQ ID NO: 27478 - DNA, 948 bp, synthetic construct
  source 1..948: mol_type = other DNA
ttcgagcctagcgaggccgagatcagccacacccagaaagccaccctcgtgtgcctggctaccggcttctaccccgaccatgtggaactgtcttggtgggtcaacggcaaagaggtgcacagcggcgtgtgtaccgacccccagccactgaaagaacagcccgccctgaacgacagccggtactgcctgagcagcagactgagagtgtccgccaccttctggcagaacccccggaaccacttcagatgccaggtgcagttctacggcctgagcgagaacgacgagtggacccaggacagagccaagcccgtgacccagatcgtgtctgccgaagcctggggcagagccgattgcggctttaccagcgagagctaccagcagggcgtgctgagcgccaccaacctgctggtgatcgtgctgagaatcctgctgctgaaagtggccggctttaacctgctgatgaccctgcggctgtggtccagcaaacggggcagaaagaaactcctgtatatattcaaacaaccatttatgagaccagtacaaactactcaagaggaagatggctgtagctgccgatttccagaagaagaagaaggaggatgtgaactgagagtgaagttcagcagaagcgccgacgcccctgcctaccagcagggacagaaccaactgtacaacgagctgaacctgggcagacgggaagagtacgacgtgctggacaagcggagaggcagggaccctgagatgggcggaaagccccagcggagaaagaacccccaggaaggactgtataacgaactccagaaagacaagatggccgaagcctacagcgagatcggcatgaagggcgagcggagaagaggcaagggccacgatggcctgtaccagggcctgagcaccgccaccaaggacacctatgacgccctgcacatgcaggccctgcctccaaga

SEQ ID NO: 27479 - DNA, 945 bp, synthetic construct
  source 1..945: mol_type = other DNA
gagcctagcgaggccgagatcagccacacccagaaagccaccctcgtgtgcctggctaccggcttctaccccgaccatgtggaactgtcttggtgggtcaacggcaaagaggtgcacagcggcgtgtgtaccgacccccagccactgaaagaacagcccgccctgaacgacagccggtactgcctgagcagcagactgagagtgtccgccaccttctggcagaacccccggaaccacttcagatgccaggtgcagttctacggcctgagcgagaacgacgagtggacccaggacagagccaagcccgtgacccagatcgtgtctgccgaagcctggggcagagccgattgcggctttaccagcgagagctaccagcagggcgtgctgagcgccaccaacctgctggtgatcgtgctgagaatcctgctgctgaaagtggccggctttaacctgctgatgaccctgcggctgtggtccagcaaacggggcagaaagaaactcctgtatatattcaaacaaccatttatgagaccagtacaaactactcaagaggaagatggctgtagctgccgatttccagaagaagaagaaggaggatgtgaactgagagtgaagttcagcagaagcgccgacgcccctgcctaccagcagggacagaaccaactgtacaacgagctgaacctgggcagacgggaagagtacgacgtgctggacaagcggagaggcagggaccctgagatgggcggaaagccccagcggagaaagaacccccaggaaggactgtataacgaactccagaaagacaagatggccgaagcctacagcgagatcggcatgaagggcgagcggagaagaggcaagggccacgatggcctgtaccagggcctgagcaccgccaccaaggacacctatgacgccctgcacatgcaggccctgcctccaaga

SEQ ID NO: 27480 - DNA, 942 bp, synthetic construct
  source 1..942: mol_type = other DNA
cctagcgaggccgagatcagccacacccagaaagccaccctcgtgtgcctggctaccggcttctaccccgaccatgtggaactgtcttggtgggtcaacggcaaagaggtgcacagcggcgtgtgtaccgacccccagccactgaaagaacagcccgccctgaacgacagccggtactgcctgagcagcagactgagagtgtccgccaccttctggcagaacccccggaaccacttcagatgccaggtgcagttctacggcctgagcgagaacgacgagtggacccaggacagagccaagcccgtgacccagatcgtgtctgccgaagcctggggcagagccgattgcggctttaccagcgagagctaccagcagggcgtgctgagcgccaccaacctgctggtgatcgtgctgagaatcctgctgctgaaagtggccggctttaacctgctgatgaccctgcggctgtggtccagcaaacggggcagaaagaaactcctgtatatattcaaacaaccatttatgagaccagtacaaactactcaagaggaagatggctgtagctgccgatttccagaagaagaagaaggaggatgtgaactgagagtgaagttcagcagaagcgccgacgcccctgcctaccagcagggacagaaccaactgtacaacgagctgaacctgggcagacgggaagagtacgacgtgctggacaagcggagaggcagggaccctgagatgggcggaaagccccagcggagaaagaacccccaggaaggactgtataacgaactccagaaagacaagatggccgaagcctacagcgagatcggcatgaagggcgagcggagaagaggcaagggccacgatggcctgtaccagggcctgagcaccgccaccaaggacacctatgacgccctgcacatgcaggccctgcctccaaga

SEQ ID NO: 27481 - DNA, 939 bp, synthetic construct
  source 1..939: mol_type = other DNA
agcgaggccgagatcagccacacccagaaagccaccctcgtgtgcctggctaccggcttctaccccgaccatgtggaactgtcttggtgggtcaacggcaaagaggtgcacagcggcgtgtgtaccgacccccagccactgaaagaacagcccgccctgaacgacagccggtactgcctgagcagcagactgagagtgtccgccaccttctggcagaacccccggaaccacttcagatgccaggtgcagttctacggcctgagcgagaacgacgagtggacccaggacagagccaagcccgtgacccagatcgtgtctgccgaagcctggggcagagccgattgcggctttaccagcgagagctaccagcagggcgtgctgagcgccaccaacctgctggtgatcgtgctgagaatcctgctgctgaaagtggccggctttaacctgctgatgaccctgcggctgtggtccagcaaacggggcagaaagaaactcctgtatatattcaaacaaccatttatgagaccagtacaaactactcaagaggaagatggctgtagctgccgatttccagaagaagaagaaggaggatgtgaactgagagtgaagttcagcagaagcgccgacgcccctgcctaccagcagggacagaaccaactgtacaacgagctgaacctgggcagacgggaagagtacgacgtgctggacaagcggagaggcagggaccctgagatgggcggaaagccccagcggagaaagaacccccaggaaggactgtataacgaactccagaaagacaagatggccgaagcctacagcgagatcggcatgaagggcgagcggagaagaggcaagggccacgatggcctgtaccagggcctgagcaccgccaccaaggacacctatgacgccctgcacatgcaggccctgcctccaaga

SEQ ID NO: 27482 - DNA, 936 bp, synthetic construct
  source 1..936: mol_type = other DNA
gaggccgagatcagccacacccagaaagccaccctcgtgtgcctggctaccggcttctaccccgaccatgtggaactgtcttggtgggtcaacggcaaagaggtgcacagcggcgtgtgtaccgacccccagccactgaaagaacagcccgccctgaacgacagccggtactgcctgagcagcagactgagagtgtccgccaccttctggcagaacccccggaaccacttcagatgccaggtgcagttctacggcctgagcgagaacgacgagtggacccaggacagagccaagcccgtgacccagatcgtgtctgccgaagcctggggcagagccgattgcggctttaccagcgagagctaccagcagggcgtgctgagcgccaccaacctgctggtgatcgtgctgagaatcctgctgctgaaagtggccggctttaacctgctgatgaccctgcggctgtggtccagcaaacggggcagaaagaaactcctgtatatattcaaacaaccatttatgagaccagtacaaactactcaagaggaagatggctgtagctgccgatttccagaagaagaagaaggaggatgtgaactgagagtgaagttcagcagaagcgccgacgcccctgcctaccagcagggacagaaccaactgtacaacgagctgaacctgggcagacgggaagagtacgacgtgctggacaagcggagaggcagggaccctgagatgggcggaaagccccagcggagaaagaacccccaggaaggactgtataacgaactccagaaagacaagatggccgaagcctacagcgagatcggcatgaagggcgagcggagaagaggcaagggccacgatggcctgtaccagggcctgagcaccgccaccaaggacacctatgacgccctgcacatgcaggccctgcctccaaga

SEQ ID NO: 27483 - DNA, 933 bp, synthetic construct
  source 1..933: mol_type = other DNA
gccgagatcagccacacccagaaagccaccctcgtgtgcctggctaccggcttctaccccgaccatgtggaactgtcttggtgggtcaacggcaaagaggtgcacagcggcgtgtgtaccgacccccagccactgaaagaacagcccgccctgaacgacagccggtactgcctgagcagcagactgagagtgtccgccaccttctggcagaacccccggaaccacttcagatgccaggtgcagttctacggcctgagcgagaacgacgagtggacccaggacagagccaagcccgtgacccagatcgtgtctgccgaagcctggggcagagccgattgcggctttaccagcgagagctaccagcagggcgtgctgagcgccaccaacctgctggtgatcgtgctgagaatcctgctgctgaaagtggccggctttaacctgctgatgaccctgcggctgtggtccagcaaacggggcagaaagaaactcctgtatatattcaaacaaccatttatgagaccagtacaaactactcaagaggaagatggctgtagctgccgatttccagaagaagaagaaggaggatgtgaactgagagtgaagttcagcagaagcgccgacgcccctgcctaccagcagggacagaaccaactgtacaacgagctgaacctgggcagacgggaagagtacgacgtgctggacaagcggagaggcagggaccctgagatgggcggaaagccccagcggagaaagaacccccaggaaggactgtataacgaactccagaaagacaagatggccgaagcctacagcgagatcggcatgaagggcgagcggagaagaggcaagggccacgatggcctgtaccagggcctgagcaccgccaccaaggacacctatgacgccctgcacatgcaggccctgcctccaaga

SEQ ID NO: 27484 - DNA, 930 bp, synthetic construct
  source 1..930: mol_type = other DNA
gagatcagccacacccagaaagccaccctcgtgtgcctggctaccggcttctaccccgaccatgtggaactgtcttggtgggtcaacggcaaagaggtgcacagcggcgtgtgtaccgacccccagccactgaaagaacagcccgccctgaacgacagccggtactgcctgagcagcagactgagagtgtccgccaccttctggcagaacccccggaaccacttcagatgccaggtgcagttctacggcctgagcgagaacgacgagtggacccaggacagagccaagcccgtgacccagatcgtgtctgccgaagcctggggcagagccgattgcggctttaccagcgagagctaccagcagggcgtgctgagcgccaccaacctgctggtgatcgtgctgagaatcctgctgctgaaagtggccggctttaacctgctgatgaccctgcggctgtggtccagcaaacggggcagaaagaaactcctgtatatattcaaacaaccatttatgagaccagtacaaactactcaagaggaagatggctgtagctgccgatttccagaagaagaagaaggaggatgtgaactgagagtgaagttcagcagaagcgccgacgcccctgcctaccagcagggacagaaccaactgtacaacgagctgaacctgggcagacgggaagagtacgacgtgctggacaagcggagaggcagggaccctgagatgggcggaaagccccagcggagaaagaacccccaggaaggactgtataacgaactccagaaagacaagatggccgaagcctacagcgagatcggcatgaagggcgagcggagaagaggcaagggccacgatggcctgtaccagggcctgagcaccgccaccaaggacacctatgacgccctgcacatgcaggccctgcctccaaga

SEQ ID NO: 27485 - DNA, 927 bp, synthetic construct
  source 1..927: mol_type = other DNA
atcagccacacccagaaagccaccctcgtgtgcctggctaccggcttctaccccgaccatgtggaactgtcttggtgggtcaacggcaaagaggtgcacagcggcgtgtgtaccgacccccagccactgaaagaacagcccgccctgaacgacagccggtactgcctgagcagcagactgagagtgtccgccaccttctggcagaacccccggaaccacttcagatgccaggtgcagttctacggcctgagcgagaacgacgagtggacccaggacagagccaagcccgtgacccagatcgtgtctgccgaagcctggggcagagccgattgcggctttaccagcgagagctaccagcagggcgtgctgagcgccaccaacctgctggtgatcgtgctgagaatcctgctgctgaaagtggccggctttaacctgctgatgaccctgcggctgtggtccagcaaacggggcagaaagaaactcctgtatatattcaaacaaccatttatgagaccagtacaaactactcaagaggaagatggctgtagctgccgatttccagaagaagaagaaggaggatgtgaactgagagtgaagttcagcagaagcgccgacgcccctgcctaccagcagggacagaaccaactgtacaacgagctgaacctgggcagacgggaagagtacgacgtgctggacaagcggagaggcagggaccctgagatgggcggaaagccccagcggagaaagaacccccaggaaggactgtataacgaactccagaaagacaagatggccgaagcctacagcgagatcggcatgaagggcgagcggagaagaggcaagggccacgatggcctgtaccagggcctgagcaccgccaccaaggacacctatgacgccctgcacatgcaggccctgcctccaaga

SEQ ID NO: 27486 - DNA, 924 bp, synthetic construct
  source 1..924: mol_type = other DNA
agccacacccagaaagccaccctcgtgtgcctggctaccggcttctaccccgaccatgtggaactgtcttggtgggtcaacggcaaagaggtgcacagcggcgtgtgtaccgacccccagccactgaaagaacagcccgccctgaacgacagccggtactgcctgagcagcagactgagagtgtccgccaccttctggcagaacccccggaaccacttcagatgccaggtgcagttctacggcctgagcgagaacgacgagtggacccaggacagagccaagcccgtgacccagatcgtgtctgccgaagcctggggcagagccgattgcggctttaccagcgagagctaccagcagggcgtgctgagcgccaccaacctgctggtgatcgtgctgagaatcctgctgctgaaagtggccggctttaacctgctgatgaccctgcggctgtggtccagcaaacggggcagaaagaaactcctgtatatattcaaacaaccatttatgagaccagtacaaactactcaagaggaagatggctgtagctgccgatttccagaagaagaagaaggaggatgtgaactgagagtgaagttcagcagaagcgccgacgcccctgcctaccagcagggacagaaccaactgtacaacgagctgaacctgggcagacgggaagagtacgacgtgctggacaagcggagaggcagggaccctgagatgggcggaaagccccagcggagaaagaacccccaggaaggactgtataacgaactccagaaagacaagatggccgaagcctacagcgagatcggcatgaagggcgagcggagaagaggcaagggccacgatggcctgtaccagggcctgagcaccgccaccaaggacacctatgacgccctgcacatgcaggccctgcctccaaga

SEQ ID NO: 27487 - DNA, 909 bp, synthetic construct
  source 1..909: mol_type = other DNA
gccaccctcgtgtgcctggctaccggcttctaccccgaccatgtggaactgtcttggtgggtcaacggcaaagaggtgcacagcggcgtgtgtaccgacccccagccactgaaagaacagcccgccctgaacgacagccggtactgcctgagcagcagactgagagtgtccgccaccttctggcagaacccccggaaccacttcagatgccaggtgcagttctacggcctgagcgagaacgacgagtggacccaggacagagccaagcccgtgacccagatcgtgtctgccgaagcctggggcagagccgattgcggctttaccagcgagagctaccagcagggcgtgctgagcgccaccaacctgctggtgatcgtgctgagaatcctgctgctgaaagtggccggctttaacctgctgatgaccctgcggctgtggtccagcaaacggggcagaaagaaactcctgtatatattcaaacaaccatttatgagaccagtacaaactactcaagaggaagatggctgtagctgccgatttccagaagaagaagaaggaggatgtgaactgagagtgaagttcagcagaagcgccgacgcccctgcctaccagcagggacagaaccaactgtacaacgagctgaacctgggcagacgggaagagtacgacgtgctggacaagcggagaggcagggaccctgagatgggcggaaagccccagcggagaaagaacccccaggaaggactgtataacgaactccagaaagacaagatggccgaagcctacagcgagatcggcatgaagggcgagcggagaagaggcaagggccacgatggcctgtaccagggcctgagcaccgccaccaaggacacctatgacgccctgcacatgcaggccctgcctccaaga

SEQ ID NO: 27488 - DNA, 894 bp, synthetic construct
  source 1..894: mol_type = other DNA
ctggctaccggcttctaccccgaccatgtggaactgtcttggtgggtcaacggcaaagaggtgcacagcggcgtgtgtaccgacccccagccactgaaagaacagcccgccctgaacgacagccggtactgcctgagcagcagactgagagtgtccgccaccttctggcagaacccccggaaccacttcagatgccaggtgcagttctacggcctgagcgagaacgacgagtggacccaggacagagccaagcccgtgacccagatcgtgtctgccgaagcctggggcagagccgattgcggctttaccagcgagagctaccagcagggcgtgctgagcgccaccaacctgctggtgatcgtgctgagaatcctgctgctgaaagtggccggctttaacctgctgatgaccctgcggctgtggtccagcaaacggggcagaaagaaactcctgtatatattcaaacaaccatttatgagaccagtacaaactactcaagaggaagatggctgtagctgccgatttccagaagaagaagaaggaggatgtgaactgagagtgaagttcagcagaagcgccgacgcccctgcctaccagcagggacagaaccaactgtacaacgagctgaacctgggcagacgggaagagtacgacgtgctggacaagcggagaggcagggaccctgagatgggcggaaagccccagcggagaaagaacccccaggaaggactgtataacgaactccagaaagacaagatggccgaagcctacagcgagatcggcatgaagggcgagcggagaagaggcaagggccacgatggcctgtaccagggcctgagcaccgccaccaaggacacctatgacgccctgcacatgcaggccctgcctccaaga

SEQ ID NO: 27489 - DNA, 864 bp, synthetic construct
  source 1..864: mol_type = other DNA
atccagaaccctgatcctgccgtgtaccagctgcgggatagcaagagcagcgacaagagcgtgtgtctgttcaccgacttcgacagccagaccaacgtgtcccagagcaaggactccgacgtgtacatcaccgataagaccgtgctggacatgcggagcatggacttcaagagcaactccgccgtggcctggtccaacaagtccgatttcgcctgcgccaacgccttcaacaacagcattggcagagccgattgcggctttaccagcgagagctaccagcagggcgtgctgagcgccaccatcctgtacgagatcctgctgggcaaggccaccctgtacgccgtgctggtgtctgccctggtgctgatggctatggtcaagcggaaggacagccggggaaaacggggcagaaagaaactcctgtatatattcaaacaaccatttatgagaccagtacaaactactcaagaggaagatggctgtagctgccgatttccagaagaagaagaaggaggatgtgaactgagagtgaagttcagcagaagcgccgacgcccctgcctaccagcagggacagaaccaactgtacaacgagctgaacctgggcagacgggaagagtacgacgtgctggacaagcggagaggcagggaccctgagatgggcggaaagccccagcggagaaagaacccccaggaaggactgtataacgaactccagaaagacaagatggccgaagcctacagcgagatcggcatgaagggcgagcggagaagaggcaagggccacgatggcctgtaccagggcctgagcaccgccaccaaggacacctatgacgccctgcacatgcaggccctgcctccaaga

SEQ ID NO: 27490 - DNA, 858 bp, synthetic construct
  source 1..858: mol_type = other DNA
atccagaaccctgatcctgccgtgtaccagctgcgggatagcaagagcagcgacaagagcgtgtgtctgttcaccgacttcgacagccagaccaacgtgtcccagagcaaggactccgacgtgtacatcaccgataagaccgtgctggacatgcggagcatggacttcaagagcaactccgccgtggcctggtccaacaagtccgatttcgcctgcgccaacgccttcaacaacagcattgccgattgcggctttaccagcgagagctaccagcagggcgtgctgagcgccaccatcctgtacgagatcctgctgggcaaggccaccctgtacgccgtgctggtgtctgccctggtgctgatggctatggtcaagcggaaggacagccggggaaaacggggcagaaagaaactcctgtatatattcaaacaaccatttatgagaccagtacaaactactcaagaggaagatggctgtagctgccgatttccagaagaagaagaaggaggatgtgaactgagagtgaagttcagcagaagcgccgacgcccctgcctaccagcagggacagaaccaactgtacaacgagctgaacctgggcagacgggaagagtacgacgtgctggacaagcggagaggcagggaccctgagatgggcggaaagccccagcggagaaagaacccccaggaaggactgtataacgaactccagaaagacaagatggccgaagcctacagcgagatcggcatgaagggcgagcggagaagaggcaagggccacgatggcctgtaccagggcctgagcaccgccaccaaggacacctatgacgccctgcacatgcaggccctgcctccaaga

SEQ ID NO: 27491 - DNA, 888 bp, synthetic construct
  source 1..888: mol_type = other DNA
atccagaaccctgatcctgccgtgtaccagctgcgggatagcaagagcagcgacaagagcgtgtgtctgttcaccgacttcgacagccagaccaacgtgtcccagagcaaggactccgacgtgtacatcaccgataagaccgtgctggacatgcggagcatggacttcaagagcaactccgccgtggcctggtccaacaagtccgatttcgcctgcgccaacgccttcaacaacagcattcagatcgtgtctgccgaagcctggggcagagccgattgcggctttaccagcgagagctaccagcagggcgtgctgagcgccaccatcctgtacgagatcctgctgggcaaggccaccctgtacgccgtgctggtgtctgccctggtgctgatggctatggtcaagcggaaggacagccggggaaaacggggcagaaagaaactcctgtatatattcaaacaaccatttatgagaccagtacaaactactcaagaggaagatggctgtagctgccgatttccagaagaagaagaaggaggatgtgaactgagagtgaagttcagcagaagcgccgacgcccctgcctaccagcagggacagaaccaactgtacaacgagctgaacctgggcagacgggaagagtacgacgtgctggacaagcggagaggcagggaccctgagatgggcggaaagccccagcggagaaagaacccccaggaaggactgtataacgaactccagaaagacaagatggccgaagcctacagcgagatcggcatgaagggcgagcggagaagaggcaagggccacgatggcctgtaccagggcctgagcaccgccaccaaggacacctatgacgccctgcacatgcaggccctgcctccaaga

SEQ ID NO: 27492 - DNA, 912 bp, synthetic construct
  source 1..912: mol_type = other DNA
atccagaaccctgatcctgccgtgtaccagctgcgggatagcaagagcagcgacaagagcgtgtgtctgttcaccgacttcgacagccagaccaacgtgtcccagagcaaggactccgacgtgtacatcaccgataagaccgtgctggacatgcggagcatggacttcaagagcaactccgccgtggcctggtccaacaagtccgatttcgcctgcgccaacgccttcaacaacagcattttcccacccatcaagaccgatgtgattacaatggaccccaaggacaactgctccaaggacgccaacgataccctgctgctccagctgaccaacaccagcgcctactacatgtacttgttgctgctgctgaagtccgtggtgtacttcgccatcatcacatgctgcctgctgcggagaaccgccttctgctgcaacggcgagaagtctaaacggggcagaaagaaactcctgtatatattcaaacaaccatttatgagaccagtacaaactactcaagaggaagatggctgtagctgccgatttccagaagaagaagaaggaggatgtgaactgagagtgaagttcagcagaagcgccgacgcccctgcctaccagcagggacagaaccaactgtacaacgagctgaacctgggcagacgggaagagtacgacgtgctggacaagcggagaggcagggaccctgagatgggcggaaagccccagcggagaaagaacccccaggaaggactgtataacgaactccagaaagacaagatggccgaagcctacagcgagatcggcatgaagggcgagcggagaagaggcaagggccacgatggcctgtaccagggcctgagcaccgccaccaaggacacctatgacgccctgcacatgcaggccctgcctccaaga

SEQ ID NO: 27493 - DNA, 906 bp, synthetic construct
  source 1..906: mol_type = other DNA
atccagaaccctgatcctgccgtgtaccagctgcgggatagcaagagcagcgacaagagcgtgtgtctgttcaccgacttcgacagccagaccaacgtgtcccagagcaaggactccgacgtgtacatcaccgataagaccgtgctggacatgcggagcatggacttcaagagcaactccgccgtggcctggtccaacaagtccgatttcgcctgcgccaacgccttcaacaacagcattcccatcaagaccgatgtgattacaatggaccccaaggacaactgctccaaggacgccaacgataccctgctgctccagctgaccaacaccagcgcctactacatgtacttgttgctgctgctgaagtccgtggtgtacttcgccatcatcacatgctgcctgctgcggagaaccgccttctgctgcaacggcgagaagtctaaacggggcagaaagaaactcctgtatatattcaaacaaccatttatgagaccagtacaaactactcaagaggaagatggctgtagctgccgatttccagaagaagaagaaggaggatgtgaactgagagtgaagttcagcagaagcgccgacgcccctgcctaccagcagggacagaaccaactgtacaacgagctgaacctgggcagacgggaagagtacgacgtgctggacaagcggagaggcagggaccctgagatgggcggaaagccccagcggagaaagaacccccaggaaggactgtataacgaactccagaaagacaagatggccgaagcctacagcgagatcggcatgaagggcgagcggagaagaggcaagggccacgatggcctgtaccagggcctgagcaccgccaccaaggacacctatgacgccctgcacatgcaggccctgcctccaaga

SEQ ID NO: 27494 - DNA, 882 bp, synthetic construct
  source 1..882: mol_type = other DNA
atccagaaccctgatcctgccgtgtaccagctgcgggatagcaagagcagcgacaagagcgtgtgtctgttcaccgacttcgacagccagaccaacgtgtcccagagcaaggactccgacgtgtacatcaccgataagaccgtgctggacatgcggagcatggacttcaagagcaactccgccgtggcctggtccaacaagtccgatttcgcctgcgccaacgccttcaacaacagcattatggaccccaaggacaactgctccaaggacgccaacgataccctgctgctccagctgaccaacaccagcgcctactacatgtacttgttgctgctgctgaagtccgtggtgtacttcgccatcatcacatgctgcctgctgcggagaaccgccttctgctgcaacggcgagaagtctaaacggggcagaaagaaactcctgtatatattcaaacaaccatttatgagaccagtacaaactactcaagaggaagatggctgtagctgccgatttccagaagaagaagaaggaggatgtgaactgagagtgaagttcagcagaagcgccgacgcccctgcctaccagcagggacagaaccaactgtacaacgagctgaacctgggcagacgggaagagtacgacgtgctggacaagcggagaggcagggaccctgagatgggcggaaagccccagcggagaaagaacccccaggaaggactgtataacgaactccagaaagacaagatggccgaagcctacagcgagatcggcatgaagggcgagcggagaagaggcaagggccacgatggcctgtaccagggcctgagcaccgccaccaaggacacctatgacgccctgcacatgcaggccctgcctccaaga

SEQ ID NO: 27495 - DNA, 906 bp, synthetic construct; identical to SEQ ID NO: 27493
  source 1..906: mol_type = other DNA

SEQ ID NO: 27496 - DNA, 864 bp, synthetic construct
  source 1..864: mol_type = other DNA
atccagaaccctgatcctgccgtgtaccagctgcgggatagcaagagcagcgacaagagcgtgtgtctgttcaccgacttcgacagccagaccaacgtgtcccagagcaaggactccgacgtgtacatcaccgataagaccgtgctggacatgcggagcatggacttcaagagcaactccgccgtggcctggtccaacaagtccgatttcgcctgcgccaacgccttcaacaacagcatttgctccaaggacgccaacgataccctgctgctccagctgaccaacaccagcgcctactacatgtacttgttgctgctgctgaagtccgtggtgtacttcgccatcatcacatgctgcctgctgcggagaaccgccttctgctgcaacggcgagaagtctaaacggggcagaaagaaactcctgtatatattcaaacaaccatttatgagaccagtacaaactactcaagaggaagatggctgtagctgccgatttccagaagaagaagaaggaggatgtgaactgagagtgaagttcagcagaagcgccgacgcccctgcctaccagcagggacagaaccaactgtacaacgagctgaacctgggcagacgggaagagtacgacgtgctggacaagcggagaggcagggaccctgagatgggcggaaagccccagcggagaaagaacccccaggaaggactgtataacgaactccagaaagacaagatggccgaagcctacagcgagatcggcatgaagggcgagcggagaagaggcaagggccacgatggcctgtaccagggcctgagcaccgccaccaaggacacctatgacgccctgcacatgcaggccctgcctccaaga

SEQ ID NO: 27497 - DNA, 909 bp, synthetic construct
  source 1..909: mol_type = other DNA
atccagaaccctgatcctgccgtgtaccagctgcgggatagcaagagcagcgacaagagcgtgtgtctgttcaccgacttcgacagccagaccaacgtgtcccagagcaaggactccgacgtgtacatcaccgataagaccgtgctggacatgcggagcatggacttcaagagcaactccgccgtggcctggtccaacaagtccgatttcgcctgcgccaacgccttcaacaacagcattgaagtgaaaaccgactccaccgaccacgtgaagcccaaagagacagagaacaccaagcagcccagcaagagctgccacaagcccaaggccatcgtgcacaccgagaaagtgaacatgatgagcctgaccgtgctgggcctgcggatgctgttcgccaaaaccgtggccgtgaacttcctgctgaccgccaagctgttcttcctcaaacggggcagaaagaaactcctgtatatattcaaacaaccatttatgagaccagtacaaactactcaagaggaagatggctgtagctgccgatttccagaagaagaagaaggaggatgtgaactgagagtgaagttcagcagaagcgccgacgcccctgcctaccagcagggacagaaccaactgtacaacgagctgaacctgggcagacgggaagagtacgacgtgctggacaagcggagaggcagggaccctgagatgggcggaaagccccagcggagaaagaacccccaggaaggactgtataacgaactccagaaagacaagatggccgaagcctacagcgagatcggcatgaagggcgagcggagaagaggcaagggccacgatggcctgtaccagggcctgagcaccgccaccaaggacacctatgacgccctgcacatgcaggccctgcctccaaga

SEQ ID NO: 27498 - DNA, 888 bp, synthetic construct
  source 1..888: mol_type = other DNA
atccagaaccctgatcctgccgtgtaccagctgcgggatagcaagagcagcgacaagagcgtgtgtctgttcaccgacttcgacagccagaccaacgtgtcccagagcaaggactccgacgtgtacatcaccgataagaccgtgctggacatgcggagcatggacttcaagagcaactccgccgtggcctggtccaacaagtccgatttcgcctgcgccaacgccttcaacaacagcattgaccacgtgaagcccaaagagacagagaacaccaagcagcccagcaagagctgccacaagcccaaggccatcgtgcacaccgagaaagtgaacatgatgagcctgaccgtgctgggcctgcggatgctgttcgccaaaaccgtggccgtgaacttcctgctgaccgccaagctgttcttcctcaaacggggcagaaagaaactcctgtatatattcaaacaaccatttatgagaccagtacaaactactcaagaggaagatggctgtagctgccgatttccagaagaagaagaaggaggatgtgaactgagagtgaagttcagcagaagcgccgacgcccctgcctaccagcagggacagaaccaactgtacaacgagctgaacctgggcagacgggaagagtacgacgtgctggacaagcggagaggcagggaccctgagatgggcggaaagccccagcggagaaagaacccccaggaaggactgtataacgaactccagaaagacaagatggccgaagcctacagcgagatcggcatgaagggcgagcggagaagaggcaagggccacgatggcctgtaccagggcctgagcaccgccaccaaggacacctatgacgccctgcacatgcaggccctgcctccaaga

SEQ ID NO: 27499 - DNA, 894 bp, synthetic construct
  source 1..894: mol_type = other DNA
atccagaaccctgatcctgccgtgtaccagctgcgggatagcaagagcagcgacaagagcgtgtgtctgttcaccgacttcgacagccagaccaacgtgtcccagagcaaggactccgacgtgtacatcaccgataagaccgtgctggacatgcggagcatggacttcaagagcaactccgccgtggcctggtccaacaagtccgatttcgcctgcgccaacgccttcaacaacagcattatccccgaggacacattcttcccaagccccggcagagccgattgcggctttaccagcgagagctaccagcagggcgtgctgagcgccaccatcctgtacgagatcctgctgggcaaggccaccctgtacgccgtgctggtgtctgccctggtgctgatggctatggtcaagcggaaggacagccggggaaaacggggcagaaagaaactcctgtatatattcaaacaaccatttatgagaccagtacaaactactcaagaggaagatggctgtagctgccgatttccagaagaagaagaaggaggatgtgaactgagagtgaagttcagcagaagcgccgacgcccctgcctaccagcagggacagaaccaactgtacaacgagctgaacctgggcagacgggaagagtacgacgtgctggacaagcggagaggcagggaccctgagatgggcggaaagccccagcggagaaagaacccccaggaaggactgtataacgaactccagaaagacaagatggccgaagcctacagcgagatcggcatgaagggcgagcggagaagaggcaagggccacgatggcctgtaccagggcctgagcaccgccaccaaggacacctatgacgccctgcacatgcaggccctgcctccaaga

SEQ ID NO: 27500 - DNA, 888 bp, synthetic construct
  source 1..888: mol_type = other DNA
atccagaaccctgatcctgccgtgtaccagctgcgggatagcaagagcagcgacaagagcgtgtgtctgttcaccgacttcgacagccagaccaacgtgtcccagagcaaggactccgacgtgtacatcaccgataagaccgtgctggacatgcggagcatggacttcaagagcaactccgccgtggcctggtccaacaagtccgatttcgcctgcgccaacgccttcaacaacagcattatccccgaggacacattcttcccaagccccgccgattgcggctttaccagcgagagctaccagcagggcgtgctgagcgccaccatcctgtacgagatcctgctgggcaaggccaccctgtacgccgtgctggtgtctgccctggtgctgatggctatggtcaagcggaaggacagccggggaaaacggggcagaaagaaactcctgtatatattcaaacaaccatttatgagaccagtacaaactactcaagaggaagatggctgtagctgccgatttccagaagaagaagaaggaggatgtgaactgagagtgaagttcagcagaagcgccgacgcccctgcctaccagcagggacagaaccaactgtacaacgagctgaacctgggcagacgggaagagtacgacgtgctggacaagcggagaggcagggaccctgagatgggcggaaagccccagcggagaaagaacccccaggaaggactgtataacgaactccagaaagacaagatggccgaagcctacagcgagatcggcatgaagggcgagcggagaagaggcaagggccacgatggcctgtaccagggcctgagcaccgccaccaaggacacctatgacgccctgcacatgcaggccctgcctccaaga

SEQ ID NO: 27501 - DNA, 918 bp, synthetic construct
  source 1..918: mol_type = other DNA
atccagaaccctgatcctgccgtgtaccagctgcgggatagcaagagcagcgacaagagcgtgtgtctgttcaccgacttcgacagccagaccaacgtgtcccagagcaaggactccgacgtgtacatcaccgataagaccgtgctggacatgcggagcatggacttcaagagcaactccgccgtggcctggtccaacaagtccgatttcgcctgcgccaacgccttcaacaacagcattatccccgaggacacattcttcccaagcccccagatcgtgtctgccgaagcctggggcagagccgattgcggctttaccagcgagagctaccagcagggcgtgctgagcgccaccatcctgtacgagatcctgctgggcaaggccaccctgtacgccgtgctggtgtctgccctggtgctgatggctatggtcaagcggaaggacagccggggaaaacggggcagaaagaaactcctgtatatattcaaacaaccatttatgagaccagtacaaactactcaagaggaagatggctgtagctgccgatttccagaagaagaagaaggaggatgtgaactgagagtgaagttcagcagaagcgccgacgcccctgcctaccagcagggacagaaccaactgtacaacgagctgaacctgggcagacgggaagagtacgacgtgctggacaagcggagaggcagggaccctgagatgggcggaaagccccagcggagaaagaacccccaggaaggactgtataacgaactccagaaagacaagatggccgaagcctacagcgagatcggcatgaagggcgagcggagaagaggcaagggccacgatggcctgtaccagggcctgagcaccgccaccaaggacacctatgacgccctgcacatgcaggccctgcctccaaga

SEQ ID NO: 27502 - DNA, 942 bp, synthetic construct
  source 1..942: mol_type = other DNA
atccagaaccctgatcctgccgtgtaccagctgcgggatagcaagagcagcgacaagagcgtgtgtctgttcaccgacttcgacagccagaccaacgtgtcccagagcaaggactccgacgtgtacatcaccgataagaccgtgctggacatgcggagcatggacttcaagagcaactccgccgtggcctggtccaacaagtccgatttcgcctgcgccaacgccttcaacaacagcattatccccgaggacacattcttcccaagccccttcccacccatcaagaccgatgtgattacaatggaccccaaggacaactgctccaaggacgccaacgataccctgctgctccagctgaccaacaccagcgcctactacatgtacttgttgctgctgctgaagtccgtggtgtacttcgccatcatcacatgctgcctgctgcggagaaccgccttctgctgcaacggcgagaagtctaaacggggcagaaagaaactcctgtatatattcaaacaaccatttatgagaccagtacaaactactcaagaggaagatggctgtagctgccgatttccagaagaagaagaaggaggatgtgaactgagagtgaagttcagcagaagcgccgacgcccctgcctaccagcagggacagaaccaactgtacaacgagctgaacctgggcagacgggaagagtacgacgtgctggacaagcggagaggcagggaccctgagatgggcggaaagccccagcggagaaagaacccccaggaaggactgtataacgaactccagaaagacaagatggccgaagcctacagcgagatcggcatgaagggcgagcggagaagaggcaagggccacgatggcctgtaccagggcctgagcaccgccaccaaggacacctatgacgccctgcacatgcaggccctgcctccaaga

SEQ ID NO: 27503 - DNA, 936 bp, synthetic construct
  source 1..936: mol_type = other DNA
atccagaaccctgatcctgccgtgtaccagctgcgggatagcaagagcagcgacaagagcgtgtgtctgttcaccgacttcgacagccagaccaacgtgtcccagagcaaggactccgacgtgtacatcaccgataagaccgtgctggacatgcggagcatggacttcaagagcaactccgccgtggcctggtccaacaagtccgatttcgcctgcgccaacgccttcaacaacagcattatccccgaggacacattcttcccaagcccccccatcaagaccgatgtgattacaatggaccccaaggacaactgctccaaggacgccaacgataccctgctgctccagctgaccaacaccagcgcctactacatgtacttgttgctgctgctgaagtccgtggtgtacttcgccatcatcacatgctgcctgctgcggagaaccgccttctgctgcaacggcgagaagtctaaacggggcagaaagaaactcctgtatatattcaaacaaccatttatgagaccagtacaaactactcaagaggaagatggctgtagctgccgatttccagaagaagaagaaggaggatgtgaactgagagtgaagttcagcagaagcgccgacgcccctgcctaccagcagggacagaaccaactgtacaacgagctgaacctgggcagacgggaagagtacgacgtgctggacaagcggagaggcagggaccctgagatgggcggaaagccccagcggagaaagaacccccaggaaggactgtataacgaactccagaaagacaagatggccgaagcctacagcgagatcggcatgaagggcgagcggagaagaggcaagggccacgatggcctgtaccagggcctgagcaccgccaccaaggacacctatgacgccctgcacatgcaggccctgcctccaaga

SEQ ID NO: 27504 - DNA, 912 bp, synthetic construct
  source 1..912: mol_type = other DNA
atccagaaccctgatcctgccgtgtaccagctgcgggatagcaagagcagcgacaagagcgtgtgtctgttcaccgacttcgacagccagaccaacgtgtcccagagcaaggactccgacgtgtacatcaccgataagaccgtgctggacatgcggagcatggacttcaagagcaactccgccgtggcctggtccaacaagtccgatttcgcctgcgccaacgccttcaacaacagcattatccccgaggacacattcttcccaagccccatggaccccaaggacaactgctccaaggacgccaacgataccctgctgctccagctgaccaacaccagcgcctactacatgtacttgttgctgctgctgaagtccgtggtgtacttcgccatcatcacatgctgcctgctgcggagaaccgccttctgctgcaacggcgagaagtctaaacggggcagaaagaaactcctgtatatattcaaacaaccatttatgagaccagtacaaactactcaagaggaagatggctgtagctgccgatttccagaagaagaagaaggaggatgtgaactgagagtgaagttcagcagaagcgccgacgcccctgcctaccagcagggacagaaccaactgtacaacgagctgaacctgggcagacgggaagagtacgacgtgctggacaagcggagaggcagggaccctgagatgggcggaaagccccagcggagaaagaacccccaggaaggactgtataacgaactccagaaagacaagatggccgaagcctacagcgagatcggcatgaagggcgagcggagaagaggcaagggccacgatggcctgtaccagggcctgagcaccgccaccaaggacacctatgacgccctgcacatgcaggccctgcctccaaga

SEQ ID NO: 27505 - DNA, 936 bp, synthetic construct; identical to SEQ ID NO: 27503
  source 1..936: mol_type = other DNA

SEQ ID NO: 27506 - DNA, 894 bp, synthetic construct
  source 1..894: mol_type = other DNA
atccagaaccctgatcctgccgtgtaccagctgcgggatagcaagagcagcgacaagagcgtgtgtctgttcaccgacttcgacagccagaccaacgtgtcccagagcaaggactccgacgtgtacatcaccgataagaccgtgctggacatgcggagcatggacttcaagagcaactccgccgtggcctggtccaacaagtccgatttcgcctgcgccaacgccttcaacaacagcattatccccgaggacacattcttcccaagcccctgctccaaggacgccaacgataccctgctgctccagctgaccaacaccagcgcctactacatgtacttgttgctgctgctgaagtccgtggtgtacttcgccatcatcacatgctgcctgctgcggagaaccgccttctgctgcaacggcgagaagtctaaacggggcagaaagaaactcctgtatatattcaaacaaccatttatgagaccagtacaaactactcaagaggaagatggctgtagctgccgatttccagaagaagaagaaggaggatgtgaactgagagtgaagttcagcagaagcgccgacgcccctgcctaccagcagggacagaaccaactgtacaacgagctgaacctgggcagacgggaagagtacgacgtgctggacaagcggagaggcagggaccctgagatgggcggaaagccccagcggagaaagaacccccaggaaggactgtataacgaactccagaaagacaagatggccgaagcctacagcgagatcggcatgaagggcgagcggagaagaggcaagggccacgatggcctgtaccagggcctgagcaccgccaccaaggacacctatgacgccctgcacatgcaggccctgcctccaaga

SEQ ID NO: 27507 - DNA, 939 bp, synthetic construct
  source 1..939: mol_type = other DNA
atccagaaccctgatcctgccgtgtaccagctgcgggatagcaagagcagcgacaagagcgtgtgtctgttcaccgacttcgacagccagaccaacgtgtcccagagcaaggactccgacgtgtacatcaccgataagaccgtgctggacatgcggagcatggacttcaagagcaactccgccgtggcctggtccaacaagtccgatttcgcctgcgccaacgccttcaacaacagcattatccccgaggacacattcttcccaagccccgaagtgaaaaccgactccaccgaccacgtgaagcccaaagagacagagaacaccaagcagcccagcaagagctgccacaagcccaaggccatcgtgcacaccgagaaagtgaacatgatgagcctgaccgtgctgggcctgcggatgctgttcgccaaaaccgtggccgtgaacttcctgctgaccgccaagctgttcttcctcaaacggggcagaaagaaactcctgtatatattcaaacaaccatttatgagaccagtacaaactactcaagaggaagatggctgtagctgccgatttccagaagaagaagaaggaggatgtgaactgagagtgaagttcagcagaagcgccgacgcccctgcctaccagcagggacagaaccaactgtacaacgagctgaacctgggcagacgggaagagtacgacgtgctggacaagcggagaggcagggaccctgagatgggcggaaagccccagcggagaaagaacccccaggaaggactgtataacgaactccagaaagacaagatggccgaagcctacagcgagatcggcatgaagggcgagcggagaagaggcaagggccacgatggcctgtaccagggcctgagcaccgccaccaaggacacctatgacgccctgcacatgcaggccctgcctccaaga

SEQ ID NO: 27508 - DNA, 918 bp, synthetic construct
  source 1..918: mol_type = other DNA
atccagaaccctgatcctgccgtgtaccagctgcgggatagcaagagcagcgacaagagcgtgtgtctgttcaccgacttcgacagccagaccaacgtgtcccagagcaaggactccgacgtgtacatcaccgataagaccgtgctggacatgcggagcatggacttcaagagcaactccgccgtggcctggtccaacaagtccgatttcgcctgcgccaacgccttcaacaacagcattatccccgaggacacattcttcccaagccccgaccacgtgaagcccaaagagacagagaacaccaagcagcccagcaagagctgccacaagcccaaggccatcgtgcacaccgagaaagtgaacatgatgagcctgaccgtgctgggcctgcggatgctgttcgccaaaaccgtggccgtgaacttcctgctgaccgccaagctgttcttcctcaaacggggcagaaagaaactcctgtatatattcaaacaaccatttatgagaccagtacaaactactcaagaggaagatggctgtagctgccgatttccagaagaagaagaaggaggatgtgaactgagagtgaagttcagcagaagcgccgacgcccctgcctaccagcagggacagaaccaactgtacaacgagctgaacctgggcagacgggaagagtacgacgtgctggacaagcggagaggcagggaccctgagatgggcggaaagccccagcggagaaagaacccccaggaaggactgtataacgaactccagaaagacaagatggccgaagcctacagcgagatcggcatgaagggcgagcggagaagaggcaagggccacgatggcctgtaccagggcctgagcaccgccaccaaggacacctatgacgccctgcacatgcaggccctgcctccaaga

SEQ ID NO: 27509 - DNA, 906 bp, synthetic construct
  source 1..906: mol_type = other DNA
atccagaaccctgatcctgccgtgtaccagctgcgggatagcaagagcagcgacaagagcgtgtgtctgttcaccgacttcgacagccagaccaacgtgtcccagagcaaggactccgacgtgtacatcaccgataagaccgtgctggacatgcggagcatggacttcaagagcaactccgccgtggcctggtccaacaagtccgatttcgcctgcgccaacgccttcaacaacagcattatccccgaggacacattcttcccaagccccgagagcagctgcggcagagccgattgcggctttaccagcgagagctaccagcagggcgtgctgagcgccaccatcctgtacgagatcctgctgggcaaggccaccctgtacgccgtgctggtgtctgccctggtgctgatggctatggtcaagcggaaggacagccggggaaaacggggcagaaagaaactcctgtatatattcaaacaaccatttatgagaccagtacaaactactcaagaggaagatggctgtagctgccgatttccagaagaagaagaaggaggatgtgaactgagagtgaagttcagcagaagcgccgacgcccctgcctaccagcagggacagaaccaactgtacaacgagctgaacctgggcagacgggaagagtacgacgtgctggacaagcggagaggcagggaccctgagatgggcggaaagccccagcggagaaagaacccccaggaaggactgtataacgaactccagaaagacaagatggccgaagcctacagcgagatcggcatgaagggcgagcggagaagaggcaagggccacgatggcctgtaccagggcctgagcaccgccaccaaggacacctatgacgccctgcacatgcaggccctgcctccaaga

SEQ ID NO: 27510 - DNA, 900 bp, synthetic construct
  source 1..900: mol_type = other DNA
atccagaaccctgatcctgccgtgtaccagctgcgggatagcaagagcagcgacaagagcgtgtgtctgttcaccgacttcgacagccagaccaacgtgtcccagagcaaggactccgacgtgtacatcaccgataagaccgtgctggacatgcggagcatggacttcaagagcaactccgccgtggcctggtccaacaagtccgatttcgcctgcgccaacgccttcaacaacagcattatccccgaggacacattcttcccaagccccgagagcagctgcgccgattgcggctttaccagcgagagctaccagcagggcgtgctgagcgccaccatcctgtacgagatcctgctgggcaaggccaccctgtacgccgtgctggtgtctgccctggtgctgatggctatggtcaagcggaaggacagccggggaaaacggggcagaaagaaactcctgtatatattcaaacaaccatttatgagaccagtacaaactactcaagaggaagatggctgtagctgccgatttccagaagaagaagaaggaggatgtgaactgagagtgaagttcagcagaagcgccgacgcccctgcctaccagcagggacagaaccaactgtacaacgagctgaacctgggcagacgggaagagtacgacgtgctggacaagcggagaggcagggaccctgagatgggcggaaagccccagcggagaaagaacccccaggaaggactgtataacgaactccagaaagacaagatggccgaagcctacagcgagatcggcatgaagggcgagcggagaagaggcaagggccacgatggcctgtaccagggcctgagcaccgccaccaaggacacctatgacgccctgcacatgcaggccctgcctccaaga

SEQ ID NO: 27511 - DNA, 930 bp, synthetic construct
  source 1..930: mol_type = other DNA
atccagaaccctgatcctgccgtgtaccagctgcgggatagcaagagcagcgacaagagcgtgtgtctgttcaccgacttcgacagccagaccaacgtgtcccagagcaaggactccgacgtgtacatcaccgataagaccgtgctggacatgcggagcatggacttcaagagcaactccgccgtggcctggtccaacaagtccgatttcgcctgcgccaacgccttcaacaacagcattatccccgaggacacattcttcccaagccccgagagcagctgccagatcgtgtctgccgaagcctggggcagagccgattgcggctttaccagcgagagctaccagcagggcgtgctgagcgccaccatcctgtacgagatcctgctgggcaaggccaccctgtacgccgtgctggtgtctgccctggtgctgatggctatggtcaagcggaaggacagccggggaaaacggggcagaaagaaactcctgtatatattcaaacaaccatttatgagaccagtacaaactactcaagaggaagatggctgtagctgccgatttccagaagaagaagaaggaggatgtgaactgagagtgaagttcagcagaagcgccgacgcccctgcctaccagcagggacagaaccaactgtacaacgagctgaacctgggcagacgggaagagtacgacgtgctggacaagcggagaggcagggaccctgagatgggcggaaagccccagcggagaaagaacccccaggaaggactgtataacgaactccagaaagacaagatggccgaagcctacagcgagatcggcatgaagggcgagcggagaagaggcaagggccacgatggcctgtaccagggcctgagcaccgccaccaaggacacctatgacgccctgcacatgcaggccctgcctccaaga

SEQ ID NO: 27512 - DNA, 954 bp, synthetic construct
  source 1..954: mol_type = other DNA
atccagaaccctgatcctgccgtgtaccagctgcgggatagcaagagcagcgacaagagcgtgtgtctgttcaccgacttcgacagccagaccaacgtgtcccagagcaaggactccgacgtgtacatcaccgataagaccgtgctggacatgcggagcatggacttcaagagcaactccgccgtggcctggtccaacaagtccgatttcgcctgcgccaacgccttcaacaacagcattatccccgaggacacattcttcccaagccccgagagcagctgcttcccacccatcaagaccgatgtgattacaatggaccccaaggacaactgctccaaggacgccaacgataccctgctgctccagctgaccaacaccagcgcctactacatgtacttgttgctgctgctgaagtccgtggtgtacttcgccatcatcacatgctgcctgctgcggagaaccgccttctgctgcaacggcgagaagtctaaacggggcagaaagaaactcctgtatatattcaaacaaccatttatgagaccagtacaaactactcaagaggaagatggctgtagctgccgatttccagaagaagaagaaggaggatgtgaactgagagtgaagttcagcagaagcgccgacgcccctgcctaccagcagggacagaaccaactgtacaacgagctgaacctgggcagacgggaagagtacgacgtgctggacaagcggagaggcagggaccctgagatgggcggaaagccccagcggagaaagaacccccaggaaggactgtataacgaactccagaaagacaagatggccgaagcctacagcgagatcggcatgaagggcgagcggagaagaggcaagggccacgatggcctgtaccagggcctgagcaccgccaccaaggacacctatgacgccctgcacatgcaggccctgcctccaaga

SEQ ID NO: 27513 - DNA, 948 bp, synthetic construct
  source 1..948: mol_type = other DNA
atccagaaccctgatcctgccgtgtaccagctgcgggatagcaagagcagcgacaagagcgtgtgtctgttcaccgacttcgacagccagaccaacgtgtcccagagcaaggactccgacgtgtacatcaccgataagaccgtgctggacatgcggagcatggacttcaagagcaactccgccgtggcctggtccaacaagtccgatttcgcctgcgccaacgccttcaacaacagcattatccccgaggacacattcttcccaagccccgagagcagctgccccatcaagaccgatgtgattacaatggaccccaaggacaactgctccaaggacgccaacgataccctgctgctccagctgaccaacaccagcgcctactacatgtacttgttgctgctgctgaagtccgtggtgtacttcgccatcatcacatgctgcctgctgcggagaaccgccttctgctgcaacggcgagaagtctaaacggggcagaaagaaactcctgtatatattcaaacaaccatttatgagaccagtacaaactactcaagaggaagatggctgtagctgccgatttccagaagaagaagaaggaggatgtgaactgagagtgaagttcagcagaagcgccgacgcccctgcctaccagcagggacagaaccaactgtacaacgagctgaacctgggcagacgggaagagtacgacgtgctggacaagcggagaggcagggaccctgagatgggcggaaagccccagcggagaaagaacccccaggaaggactgtataacgaactccagaaagacaagatggccgaagcctacagcgagatcggcatgaagggcgagcggagaagaggcaagggccacgatggcctgtaccagggcctgagcaccgccaccaaggacacctatgacgccctgcacatgcaggccctgcctccaaga

SEQ ID NO: 27514 - DNA, 924 bp, synthetic construct
  source 1..924: mol_type = other DNA
atccagaaccctgatcctgccgtgtaccagctgcgggatagcaagagcagcgacaagagcgtgtgtctgttcaccgacttcgacagccagaccaacgtgtcccagagcaaggactccgacgtgtacatcaccgataagaccgtgctggacatgcggagcatggacttcaagagcaactccgccgtggcctggtccaacaagtccgatttcgcctgcgccaacgccttcaacaacagcattatccccgaggacacattcttcccaagccccgagagcagctgcatggaccccaaggacaactgctccaaggacgccaacgataccctgctgctccagctgaccaacaccagcgcctactacatgtacttgttgctgctgctgaagtccgtggtgtacttcgccatcatcacatgctgcctgctgcggagaaccgccttctgctgcaacggcgagaagtctaaacggggcagaaagaaactcctgtatatattcaaacaaccatttatgagaccagtacaaactactcaagaggaagatggctgtagctgccgatttccagaagaagaagaaggaggatgtgaactgagagtgaagttcagcagaagcgccgacgcccctgcctaccagcagggacagaaccaactgtacaacgagctgaacctgggcagacgggaagagtacgacgtgctggacaagcggagaggcagggaccctgagatgggcggaaagccccagcggagaaagaacccccaggaaggactgtataacgaactccagaaagacaagatggccgaagcctacagcgagatcggcatgaagggcgagcggagaagaggcaagggccacgatggcctgtaccagggcctgagcaccgccaccaaggacacctatgacgccctgcacatgcaggccctgcctccaaga

SEQ ID NO: 27515 - DNA, 948 bp, synthetic construct; identical to SEQ ID NO: 27513
  source 1..948: mol_type = other DNA

SEQ ID NO: 27516 - DNA, 906 bp, synthetic construct
  source 1..906: mol_type = other DNA
atccagaaccctgatcctgccgtgtaccagctgcgggatagcaagagcagcgacaagagcgtgtgtctgttcaccgacttcgacagccagaccaacgtgtcccagagcaaggactccgacgtgtacatcaccgataagaccgtgctggacatgcggagcatggacttcaagagcaactccgccgtggcctggtccaacaagtccgatttcgcctgcgccaacgccttcaacaacagcattatccccgaggacacattcttcccaagccccgagagcagctgctgctccaaggacgccaacgataccctgctgctccagctgaccaacaccagcgcctactacatgtacttgttgctgctgctgaagtccgtggtgtacttcgccatcatcacatgctgcctgctgcggagaaccgccttctgctgcaacggcgagaagtctaaacggggcagaaagaaactcctgtatatattcaaacaaccatttatgagaccagtacaaactactcaagaggaagatggctgtagctgccgatttccagaagaagaagaaggaggatgtgaactgagagtgaagttcagcagaagcgccgacgcccctgcctaccagcagggacagaaccaactgtacaacgagctgaacctgggcagacgggaagagtacgacgtgctggacaagcggagaggcagggaccctgagatgggcggaaagccccagcggagaaagaacccccaggaaggactgtataacgaactccagaaagacaagatggccgaagcctacagcgagatcggcatgaagggcgagcggagaagaggcaagggccacgatggcctgtaccagggcctgagcaccgccaccaaggacacctatgacgccctgcacatgcaggccctgcctccaaga

SEQ ID NO: 27517 - DNA, 951 bp, synthetic construct
  source 1..951: mol_type = other DNA
atccagaaccctgatcctgccgtgtaccagctgcgggatagcaagagcagcgacaagagcgtgtgtctgttcaccgacttcgacagccagaccaacgtgtcccagagcaaggactccgacgtgtacatcaccgataagaccgtgctggacatgcggagcatggacttcaagagcaactccgccgtggcctggtccaacaagtccgatttcgcctgcgccaacgccttcaacaacagcattatccccgaggacacattcttcccaagccccgagagcagctgcgaagtgaaaaccgactccaccgaccacgtgaagcccaaagagacagagaacaccaagcagcccagcaagagctgccacaagcccaaggccatcgtgcacaccgagaaagtgaacatgatgagcctgaccgtgctgggcctgcggatgctgttcgccaaaaccgtggccgtgaacttcctgctgaccgccaagctgttcttcctcaaacggggcagaaagaaactcctgtatatattcaaacaaccatttatgagaccagtacaaactactcaagaggaagatggctgtagctgccgatttccagaagaagaagaaggaggatgtgaactgagagtgaagttcagcagaagcgccgacgcccctgcctaccagcagggacagaaccaactgtacaacgagctgaacctgggcagacgggaagagtacgacgtgctggacaagcggagaggcagggaccctgagatgggcggaaagccccagcggagaaagaacccccaggaaggactgtataacgaactccagaaagacaagatggccgaagcctacagcgagatcggcatgaagggcgagcggagaagaggcaagggccacgatggcctgtaccagggcctgagcaccgccaccaaggacacctatgacgccctgcacatgcaggccctgcctccaaga

SEQ ID NO: 27518 - DNA, 930 bp, synthetic construct
  source 1..930: mol_type = other DNA
atccagaaccctgatcctgccgtgtaccagctgcgggatagcaagagcagcgacaagagcgtgtgtctgttcaccgacttcgacagccagaccaacgtgtcccagagcaaggactccgacgtgtacatcaccgataagaccgtgctggacatgcggagcatggacttcaagagcaactccgccgtggcctggtccaacaagtccgatttcgcctgcgccaacgccttcaacaacagcattatccccgaggacacattcttcccaagccccgagagcagctgcgaccacgtgaagcccaaagagacagagaacaccaagcagcccagcaagagctgccacaagcccaaggccatcgtgcacaccgagaaagtgaacatgatgagcctgaccgtgctgggcctgcggatgctgttcgccaaaaccgtggccgtgaacttcctgctgaccgccaagctgttcttcctcaaacggggcagaaagaaactcctgtatatattcaaacaaccatttatgagaccagtacaaactactcaagaggaagatggctgtagctgccgatttccagaagaagaagaaggaggatgtgaactgagagtgaagttcagcagaagcgccgacgcccctgcctaccagcagggacagaaccaactgtacaacgagctgaacctgggcagacgggaagagtacgacgtgctggacaagcggagaggcagggaccctgagatgggcggaaagccccagcggagaaagaacccccaggaaggactgtataacgaactccagaaagacaagatggccgaagcctacagcgagatcggcatgaagggcgagcggagaagaggcaagggccacgatggcctgtaccagggcctgagcaccgccaccaaggacacctatgacgccctgcacatgcaggccctgcctccaaga

SEQ ID NO: 27519 - DNA, 867 bp, synthetic construct
  source 1..867: mol_type = other DNA
atccagaaccctgatcctgccgtgtaccagctgcgggatagcaagagcagcgacaagagcgtgtgtctgttcaccgacttcgacagccagaccaacgtgtcccagagcaaggactccgacgtgtacatcaccgataagaccgtgctggacatgcggagcatggacttcaagagcaactccgccgtggcctggtccaacaagtccgatttcgcctgcgccaacgccttcaacaacagcattatcggcagagccgattgcggctttaccagcgagagctaccagcagggcgtgctgagcgccaccatcctgtacgagatcctgctgggcaaggccaccctgtacgccgtgctggtgtctgccctggtgctgatggctatggtcaagcggaaggacagccggggaaaacggggcagaaagaaactcctgtatatattcaaacaaccatttatgagaccagtacaaactactcaagaggaagatggctgtagctgccgatttccagaagaagaagaaggaggatgtgaactgagagtgaagttcagcagaagcgccgacgcccctgcctaccagcagggacagaaccaactgtacaacgagctgaacctgggcagacgggaagagtacgacgtgctggacaagcggagaggcagggaccctgagatgggcggaaagccccagcggagaaagaacccccaggaaggactgtataacgaactccagaaagacaagatggccgaagcctacagcgagatcggcatgaagggcgagcggagaagaggcaagggccacgatggcctgtaccagggcctgagcaccgccaccaaggacacctatgacgccctgcacatgcaggccctgcctccaaga

SEQ ID NO: 27520 - DNA, 861 bp, synthetic construct
  source 1..861: mol_type = other DNA
atccagaaccctgatcctgccgtgtaccagctgcgggatagcaagagcagcgacaagagcgtgtgtctgttcaccgacttcgacagccagaccaacgtgtcccagagcaaggactccgacgtgtacatcaccgataagaccgtgctggacatgcggagcatggacttcaagagcaactccgccgtggcctggtccaacaagtccgatttcgcctgcgccaacgccttcaacaacagcattatcgccgattgcggctttaccagcgagagctaccagcagggcgtgctgagcgccaccatcctgtacgagatcctgctgggcaaggccaccctgtacgccgtgctggtgtctgccctggtgctgatggctatggtcaagcggaaggacagccggggaaaacggggcagaaagaaactcctgtatatattcaaacaaccatttatgagaccagtacaaactactcaagaggaagatggctgtagctgccgatttccagaagaagaagaaggaggatgtgaactgagagtgaagttcagcagaagcgccgacgcccctgcctaccagcagggacagaaccaactgtacaacgagctgaacctgggcagacgggaagagtacgacgtgctggacaagcggagaggcagggaccctgagatgggcggaaagccccagcggagaaagaacccccaggaaggactgtataacgaactccagaaagacaagatggccgaagcctacagcgagatcggcatgaagggcgagcggagaagaggcaagggccacgatggcctgtaccagggcctgagcaccgccaccaaggacacctatgacgccctgcacatgcaggccctgcctccaaga

SEQ ID NO: 27521 - DNA, 891 bp, synthetic construct
  source 1..891: mol_type = other DNA
atccagaaccctgatcctgccgtgtaccagctgcgggatagcaagagcagcgacaagagcgtgtgtctgttcaccgacttcgacagccagaccaacgtgtcccagagcaaggactccgacgtgtacatcaccgataagaccgtgctggacatgcggagcatggacttcaagagcaactccgccgtggcctggtccaacaagtccgatttcgcctgcgccaacgccttcaacaacagcattatccagatcgtgtctgccgaagcctggggcagagccgattgcggctttaccagcgagagctaccagcagggcgtgctgagcgccaccatcctgtacgagatcctgctgggcaaggccaccctgtacgccgtgctggtgtctgccctggtgctgatggctatggtcaagcggaaggacagccggggaaaacggggcagaaagaaactcctgtatatattcaaacaaccatttatgagaccagtacaaactactcaagaggaagatggctgtagctgccgatttccagaagaagaagaaggaggatgtgaactgagagtgaagttcagcagaagcgccgacgcccctgcctaccagcagggacagaaccaactgtacaacgagctgaacctgggcagacgggaagagtacgacgtgctggacaagcggagaggcagggaccctgagatgggcggaaagccccagcggagaaagaacccccaggaaggactgtataacgaactccagaaagacaagatggccgaagcctacagcgagatcggcatgaagggcgagcggagaagaggcaagggccacgatggcctgtaccagggcctgagcaccgccaccaaggacacctatgacgccctgcacatgcaggccctgcctccaaga

SEQ ID NO: 27522 - DNA, 915 bp, synthetic construct
  source 1..915: mol_type = other DNA
atccagaaccctgatcctgccgtgtaccagctgcgggatagcaagagcagcgacaagagcgtgtgtctgttcaccgacttcgacagccagaccaacgtgtcccagagcaaggactccgacgtgtacatcaccgataagaccgtgctggacatgcggagcatggacttcaagagcaactccgccgtggcctggtccaacaagtccgatttcgcctgcgccaacgccttcaacaacagcattatcttcccacccatcaagaccgatgtgattacaatggaccccaaggacaactgctccaaggacgccaacgataccctgctgctccagctgaccaacaccagcgcctactacatgtacttgttgctgctgctgaagtccgtggtgtacttcgccatcatcacatgctgcctgctgcggagaaccgccttctgctgcaacggcgagaagtctaaacggggcagaaagaaactcctgtatatattcaaacaaccatttatgagaccagtacaaactactcaagaggaagatggctgtagctgccgatttccagaagaagaagaaggaggatgtgaactgagagtgaagttcagcagaagcgccgacgcccctgcctaccagcagggacagaaccaactgtacaacgagctgaacctgggcagacgggaagagtacgacgtgctggacaagcggagaggcagggaccctgagatgggcggaaagccccagcggagaaagaacccccaggaaggactgtataacgaactccagaaagacaagatggccgaagcctacagcgagatcggcatgaagggcgagcggagaagaggcaagggccacgatggcctgtaccagggcctgagcaccgccaccaaggacacctatgacgccctgcacatgcaggccctgcctccaaga

SEQ ID NO: 27523 - DNA, 909 bp, synthetic construct
  source 1..909: mol_type = other DNA
atccagaaccctgatcctgccgtgtaccagctgcgggatagcaagagcagcgacaagagcgtgtgtctgttcaccgacttcgacagccagaccaacgtgtcccagagcaaggactccgacgtgtacatcaccgataagaccgtgctggacatgcggagcatggacttcaagagcaactccgccgtggcctggtccaacaagtccgatttcgcctgcgccaacgccttcaacaacagcattatccccatcaagaccgatgtgattacaatggaccccaaggacaactgctccaaggacgccaacgataccctgctgctccagctgaccaacaccagcgcctactacatgtacttgttgctgctgctgaagtccgtggtgtacttcgccatcatcacatgctgcctgctgcggagaaccgccttctgctgcaacggcgagaagtctaaacggggcagaaagaaactcctgtatatattcaaacaaccatttatgagaccagtacaaactactcaagaggaagatggctgtagctgccgatttccagaagaagaagaaggaggatgtgaactgagagtgaagttcagcagaagcgccgacgcccctgcctaccagcagggacagaaccaactgtacaacgagctgaacctgggcagacgggaagagtacgacgtgctggacaagcggagaggcagggaccctgagatgggcggaaagccccagcggagaaagaacccccaggaaggactgtataacgaactccagaaagacaagatggccgaagcctacagcgagatcggcatgaagggcgagcggagaagaggcaagggccacgatggcctgtaccagggcctgagcaccgccaccaaggacacctatgacgccctgcacatgcaggccctgcctccaaga

SEQ ID NO: 27524 - DNA, 885 bp, synthetic construct
  source 1..885: mol_type = other DNA
atccagaaccctgatcctgccgtgtaccagctgcgggatagcaagagcagcgacaagagcgtgtgtctgttcaccgacttcgacagccagaccaacgtgtcccagagcaaggactccgacgtgtacatcaccgataagaccgtgctggacatgcggagcatggacttcaagagcaactccgccgtggcctggtccaacaagtccgatttcgcctgcgccaacgccttcaacaacagcattatcatggaccccaaggacaactgctccaaggacgccaacgataccctgctgctccagctgaccaacaccagcgcctactacatgtacttgttgctgctgctgaagtccgtggtgtacttcgccatcatcacatgctgcctgctgcggagaaccgccttctgctgcaacggcgagaagtctaaacggggcagaaagaaactcctgtatatattcaaacaaccatttatgagaccagtacaaactactcaagaggaagatggctgtagctgccgatttccagaagaagaagaaggaggatgtgaactgagagtgaagttcagcagaagcgccgacgcccctgcctaccagcagggacagaaccaactgtacaacgagctgaacctgggcagacgggaagagtacgacgtgctggacaagcggagaggcagggaccctgagatgggcggaaagccccagcggagaaagaacccccaggaaggactgtataacgaactccagaaagacaagatggccgaagcctacagcgagatcggcatgaagggcgagcggagaagaggcaagggccacgatggcctgtaccagggcctgagcaccgccaccaaggacacctatgacgccctgcacatgcaggccctgcctccaaga

SEQ ID NO: 27525 - DNA, 909 bp, synthetic construct; identical to SEQ ID NO: 27523
  source 1..909: mol_type = other DNA

SEQ ID NO: 27526 - DNA, 867 bp, synthetic construct
  source 1..867: mol_type = other DNA
atccagaaccctgatcctgccgtgtaccagctgcgggatagcaagagcagcgacaagagcgtgtgtctgttcaccgacttcgacagccagaccaacgtgtcccagagcaaggactccgacgtgtacatcaccgataagaccgtgctggacatgcggagcatggacttcaagagcaactccgccgtggcctggtccaacaagtccgatttcgcctgcgccaacgccttcaacaacagcattatctgctccaaggacgccaacgataccctgctgctccagctgaccaacaccagcgcctactacatgtacttgttgctgctgctgaagtccgtggtgtacttcgccatcatcacatgctgcctgctgcggagaaccgccttctgctgcaacggcgagaagtctaaacggggcagaaagaaactcctgtatatattcaaacaaccatttatgagaccagtacaaactactcaagaggaagatggctgtagctgccgatttccagaagaagaagaaggaggatgtgaactgagagtgaagttcagcagaagcgccgacgcccctgcctaccagcagggacagaaccaactgtacaacgagctgaacctgggcagacgggaagagtacgacgtgctggacaagcggagaggcagggaccctgagatgggcggaaagccccagcggagaaagaacccccaggaaggactgtataacgaactccagaaagacaagatggccgaagcctacagcgagatcggcatgaagggcgagcggagaagaggcaagggccacgatggcctgtaccagggcctgagcaccgccaccaaggacacctatgacgccctgcacatgcaggccctgcctccaaga

SEQ ID NO: 27527 - DNA, 912 bp, synthetic construct
  source 1..912: mol_type = other DNA
atccagaaccctgatcctgccgtgtaccagctgcgggatagcaagagcagcgacaagagcgtgtgtctgttcaccgacttcgacagccagaccaacgtgtcccagagcaaggactccgacgtgtacatcaccgataagaccgtgctggacatgcggagcatggacttcaagagcaactccgccgtggcctggtccaacaagtccgatttcgcctgcgccaacgccttcaacaacagcattatcgaagtgaaaaccgactccaccgaccacgtgaagcccaaagagacagagaacaccaagcagcccagcaagagctgccacaagcccaaggccatcgtgcacaccgagaaagtgaacatgatgagcctgaccgtgctgggcctgcggatgctgttcgccaaaaccgtggccgtgaacttcctgctgaccgccaagctgttcttcctcaaacggggcagaaagaaactcctgtatatattcaaacaaccatttatgagaccagtacaaactactcaagaggaagatggctgtagctgccgatttccagaagaagaagaaggaggatgtgaactgagagtgaagttcagcagaagcgccgacgcccctgcctaccagcagggacagaaccaactgtacaacgagctgaacctgggcagacgggaagagtacgacgtgctggacaagcggagaggcagggaccctgagatgggcggaaagccccagcggagaaagaacccccaggaaggactgtataacgaactccagaaagacaagatggccgaagcctacagcgagatcggcatgaagggcgagcggagaagaggcaagggccacgatggcctgtaccagggcctgagcaccgccaccaaggacacctatgacgccctgcacatgcaggccctgcctccaaga

SEQ ID NO: 27528 - DNA, 891 bp, synthetic construct
  source 1..891: mol_type = other DNA
atccagaaccctgatcctgccgtgtaccagctgcgggatagcaagagcagcgacaagagcgtgtgtctgttcaccgacttcgacagccagaccaacgtgtcccagagcaaggactccgacgtgtacatcaccgataagaccgtgctggacatgcggagcatggacttcaagagcaactccgccgtggcctggtccaacaagtccgatttcgcctgcgccaacgccttcaacaacagcattatcgaccacgtgaagcccaaagagacagagaacaccaagcagcccagcaagagctgccacaagcccaaggccatcgtgcacaccgagaaagtgaacatgatgagcctgaccgtgctgggcctgcggatgctgttcgccaaaaccgtggccgtgaacttcctgctgaccgccaagctgttcttcctcaaacggggcagaaagaaactcctgtatatattcaaacaaccatttatgagaccagtacaaactactcaagaggaagatggctgtagctgccgatttccagaagaagaagaaggaggatgtgaactgagagtgaagttcagcagaagcgccgacgcccctgcctaccagcagggacagaaccaactgtacaacgagctgaacctgggcagacgggaagagtacgacgtgctggacaagcggagaggcagggaccctgagatgggcggaaagccccagcggagaaagaacccccaggaaggactgtataacgaactccagaaagacaagatggccgaagcctacagcgagatcggcatgaagggcgagcggagaagaggcaagggccacgatggcctgtaccagggcctgagcaccgccaccaaggacacctatgacgccctgcacatgcaggccctgcctccaaga

SEQ ID NO: 27529 - DNA, 906 bp, synthetic construct; identical to SEQ ID NO: 27509
  source 1..906: mol_type = other DNA

SEQ ID NO: 27530 - DNA, 900 bp, synthetic construct; identical to SEQ ID NO: 27510
  source 1..900: mol_type = other DNA

SEQ ID NO: 27531 - DNA, 930 bp, synthetic construct; identical to SEQ ID NO: 27511
  source 1..930: mol_type = other DNA

SEQ ID NO: 27532 - DNA, 954 bp, synthetic construct; identical to SEQ ID NO: 27512
  source 1..954: mol_type = other DNA

SEQ ID NO: 27533 - DNA, 948 bp, synthetic construct; identical to SEQ ID NO: 27513
  source 1..948: mol_type = other DNA

SEQ ID NO: 27534 - DNA, 924 bp, synthetic construct; identical to SEQ ID NO: 27514
  source 1..924: mol_type = other DNA

SEQ ID NO: 27535 - DNA, 948 bp, synthetic construct; identical to SEQ ID NO: 27513
  source 1..948: mol_type = other DNA

SEQ ID NO: 27536 - DNA, 906 bp, synthetic construct; identical to SEQ ID NO: 27516
  source 1..906: mol_type = other DNA

SEQ ID NO: 27537 - DNA, 951 bp, synthetic construct; identical to SEQ ID NO: 27517
  source 1..951: mol_type = other DNA

SEQ ID NO: 27538 - DNA, 930 bp, synthetic construct; identical to SEQ ID NO: 27518
  source 1..930: mol_type = other DNA

SEQ ID NO: 27539 - DNA, 861 bp, synthetic construct
  source 1..861: mol_type = other DNA
aagagcagcgacaagagcgtgtgtctgttcaccgacttcgacagccagaccaacgtgtcccagagcaaggactccgacgtgtacatcaccgataagaccgtgctggacatgcggagcatggacttcaagagcaactccgccgtggcctggtccaacaagtccgatttcgcctgcgccaacgccttcaacaacagcattatccccgaggacacattcttcccaagccccgagagcagcggcagagccgattgcggctttaccagcgagagctaccagcagggcgtgctgagcgccaccatcctgtacgagatcctgctgggcaaggccaccctgtacgccgtgctggtgtctgccctggtgctgatggctatggtcaagcggaaggacagccggggaaaacggggcagaaagaaactcctgtatatattcaaacaaccatttatgagaccagtacaaactactcaagaggaagatggctgtagctgccgatttccagaagaagaagaaggaggatgtgaactgagagtgaagttcagcagaagcgccgacgcccctgcctaccagcagggacagaaccaactgtacaacgagctgaacctgggcagacgggaagagtacgacgtgctggacaagcggagaggcagggaccctgagatgggcggaaagccccagcggagaaagaacccccaggaaggactgtataacgaactccagaaagacaagatggccgaagcctacagcgagatcggcatgaagggcgagcggagaagaggcaagggccacgatggcctgtaccagggcctgagcaccgccaccaaggacacctatgacgccctgcacatgcaggccctgcctccaaga

SEQ ID NO: 27540 - DNA, 855 bp, synthetic construct
  source 1..855: mol_type = other DNA
aagagcagcgacaagagcgtgtgtctgttcaccgacttcgacagccagaccaacgtgtcccagagcaaggactccgacgtgtacatcaccgataagaccgtgctggacatgcggagcatggacttcaagagcaactccgccgtggcctggtccaacaagtccgatttcgcctgcgccaacgccttcaacaacagcattatccccgaggacacattcttcccaagccccgagagcagcgccgattgcggctttaccagcgagagctaccagcagggcgtgctgagcgccaccatcctgtacgagatcctgctgggcaaggccaccctgtacgccgtgctggtgtctgccctggtgctgatggctatggtcaagcggaaggacagccggggaaaacggggcagaaagaaactcctgtatatattcaaacaaccatttatgagaccagtacaaactactcaagaggaagatggctgtagctgccgatttccagaagaagaagaaggaggatgtgaactgagagtgaagttcagcagaagcgccgacgcccctgcctaccagcagggacagaaccaactgtacaacgagctgaacctgggcagacgggaagagtacgacgtgctggacaagcggagaggcagggaccctgagatgggcggaaagccccagcggagaaagaacccccaggaaggactgtataacgaactccagaaagacaagatggccgaagcctacagcgagatcggcatgaagggcgagcggagaagaggcaagggccacgatggcctgtaccagggcctgagcaccgccaccaaggacacctatgacgccctgcacatgcaggccctgcctccaaga

SEQ ID NO: 27541 - DNA, 885 bp, synthetic construct
  source 1..885: mol_type = other DNA
aagagcagcgacaagagcgtgtgtctgttcaccgacttcgacagccagaccaacgtgtcccagagcaaggactccgacgtgtacatcaccgataagaccgtgctggacatgcggagcatggacttcaagagcaactccgccgtggcctggtccaacaagtccgatttcgcctgcgccaacgccttcaacaacagcattatccccgaggacacattcttcccaagccccgagagcagccagatcgtgtctgccgaagcctggggcagagccgattgcggctttaccagcgagagctaccagcagggcgtgctgagcgccaccatcctgtacgagatcctgctgggcaaggccaccctgtacgccgtgctggtgtctgccctggtgctgatggctatggtcaagcggaaggacagccggggaaaacggggcagaaagaaactcctgtatatattcaaacaaccatttatgagaccagtacaaactactcaagaggaagatggctgtagctgccgatttccagaagaagaagaaggaggatgtgaactgagagtgaagttcagcagaagcgccgacgcccctgcctaccagcagggacagaaccaactgtacaacgagctgaacctgggcagacgggaagagtacgacgtgctggacaagcggagaggcagggaccctgagatgggcggaaagccccagcggagaaagaacccccaggaaggactgtataacgaactccagaaagacaagatggccgaagcctacagcgagatcggcatgaagggcgagcggagaagaggcaagggccacgatggcctgtaccagggcctgagcaccgccaccaaggacacctatgacgccctgcacatgcaggccctgcctccaaga

SEQ ID NO: 27542 - DNA, 909 bp, synthetic construct
  source 1..909: mol_type = other DNA
aagagcagcgacaagagcgtgtgtctgttcaccgacttcgacagccagaccaacgtgtcccagagcaaggactccgacgtgtacatcaccgataagaccgtgctggacatgcggagcatggacttcaagagcaactccgccgtggcctggtccaacaagtccgatttcgcctgcgccaacgccttcaacaacagcattatccccgaggacacattcttcccaagccccgagagcagcttcccacccatcaagaccgatgtgattacaatggaccccaaggacaactgctccaaggacgccaacgataccctgctgctccagctgaccaacaccagcgcctactacatgtacttgttgctgctgctgaagtccgtggtgtacttcgccatcatcacatgctgcctgctgcggagaaccgccttctgctgcaacggcgagaagtctaaacggggcagaaagaaactcctgtatatattcaaacaaccatttatgagaccagtacaaactactcaagaggaagatggctgtagctgccgatttccagaagaagaagaaggaggatgtgaactgagagtgaagttcagcagaagcgccgacgcccctgcctaccagcagggacagaaccaactgtacaacgagctgaacctgggcagacgggaagagtacgacgtgctggacaagcggagaggcagggaccctgagatgggcggaaagccccagcggagaaagaacccccaggaaggactgtataacgaactccagaaagacaagatggccgaagcctacagcgagatcggcatgaagggcgagcggagaagaggcaagggccacgatggcctgtaccagggcctgagcaccgccaccaaggacacctatgacgccctgcacatgcaggccctgcctccaaga

SEQ ID NO: 27543 - DNA, 903 bp, synthetic construct
  source 1..903: mol_type = other DNA
aagagcagcgacaagagcgtgtgtctgttcaccgacttcgacagccagaccaacgtgtcccagagcaaggactccgacgtgtacatcaccgataagaccgtgctggacatgcggagcatggacttcaagagcaactccgccgtggcctggtccaacaagtccgatttcgcctgcgccaacgccttcaacaacagcattatccccgaggacacattcttcccaagccccgagagcagccccatcaagaccgatgtgattacaatggaccccaaggacaactgctccaaggacgccaacgataccctgctgctccagctgaccaacaccagcgcctactacatgtacttgttgctgctgctgaagtccgtggtgtacttcgccatcatcacatgctgcctgctgcggagaaccgccttctgctgcaacggcgagaagtctaaacggggcagaaagaaactcctgtatatattcaaacaaccatttatgagaccagtacaaactactcaagaggaagatggctgtagctgccgatttccagaagaagaagaaggaggatgtgaactgagagtgaagttcagcagaagcgccgacgcccctgcctaccagcagggacagaaccaactgtacaacgagctgaacctgggcagacgggaagagtacgacgtgctggacaagcggagaggcagggaccctgagatgggcggaaagccccagcggagaaagaacccccaggaaggactgtataacgaactccagaaagacaagatggccgaagcctacagcgagatcggcatgaagggcgagcggagaagaggcaagggccacgatggcctgtaccagggcctgagcaccgccaccaaggacacctatgacgccctgcacatgcaggccctgcctccaaga

SEQ ID NO: 27544 - DNA, 879 bp, synthetic construct
  source 1..879: mol_type = other DNA
aagagcagcgacaagagcgtgtgtctgttcaccgacttcgacagccagaccaacgtgtcccagagcaaggactccgacgtgtacatcaccgataagaccgtgctggacatgcggagcatggacttcaagagcaactccgccgtggcctggtccaacaagtccgatttcgcctgcgccaacgccttcaacaacagcattatccccgaggacacattcttcccaagccccgagagcagcatggaccccaaggacaactgctccaaggacgccaacgataccctgctgctccagctgaccaacaccagcgcctactacatgtacttgttgctgctgctgaagtccgtggtgtacttcgccatcatcacatgctgcctgctgcggagaaccgccttctgctgcaacggcgagaagtctaaacggggcagaaagaaactcctgtatatattcaaacaaccatttatgagaccagtacaaactactcaagaggaagatggctgtagctgccgatttccagaagaagaagaaggaggatgtgaactgagagtgaagttcagcagaagcgccgacgcccctgcctaccagcagggacagaaccaactgtacaacgagctgaacctgggcagacgggaagagtacgacgtgctggacaagcggagaggcagggaccctgagatgggcggaaagccccagcggagaaagaacccccaggaaggactgtataacgaactccagaaagacaagatggccgaagcctacagcgagatcggcatgaagggcgagcggagaagaggcaagggccacgatggcctgtaccagggcctgagcaccgccaccaaggacacctatgacgccctgcacatgcaggccctgcctccaaga

SEQ ID NO: 27545 - DNA, 903 bp, synthetic construct; identical to SEQ ID NO: 27543
  source 1..903: mol_type = other DNA

SEQ ID NO: 27546 - DNA, 861 bp, synthetic construct
  source 1..861: mol_type = other DNA
aagagcagcgacaagagcgtgtgtctgttcaccgacttcgacagccagaccaacgtgtcccagagcaaggactccgacgtgtacatcaccgataagaccgtgctggacatgcggagcatggacttcaagagcaactccgccgtggcctggtccaacaagtccgatttcgcctgcgccaacgccttcaacaacagcattatccccgaggacacattcttcccaagccccgagagcagctgctccaaggacgccaacgataccctgctgctccagctgaccaacaccagcgcctactacatgtacttgttgctgctgctgaagtccgtggtgtacttcgccatcatcacatgctgcctgctgcggagaaccgccttctgctgcaacggcgagaagtctaaacggggcagaaagaaactcctgtatatattcaaacaaccatttatgagaccagtacaaactactcaagaggaagatggctgtagctgccgatttccagaagaagaagaaggaggatgtgaactgagagtgaagttcagcagaagcgccgacgcccctgcctaccagcagggacagaaccaactgtacaacgagctgaacctgggcagacgggaagagtacgacgtgctggacaagcggagaggcagggaccctgagatgggcggaaagccccagcggagaaagaacccccaggaaggactgtataacgaactccagaaagacaagatggccgaagcctacagcgagatcggcatgaagggcgagcggagaagaggcaagggccacgatggcctgtaccagggcctgagcaccgccaccaaggacacctatgacgccctgcacatgcaggccctgcctccaaga

SEQ ID NO: 27547 - DNA, 906 bp, synthetic construct
  source 1..906: mol_type = other DNA
aagagcagcgacaagagcgtgtgtctgttcaccgacttcgacagccagaccaacgtgtcccagagcaaggactccgacgtgtacatcaccgataagaccgtgctggacatgcggagcatggacttcaagagcaactccgccgtggcctggtccaacaagtccgatttcgcctgcgccaacgccttcaacaacagcattatccccgaggacacattcttcccaagccccgagagcagcgaagtgaaaaccgactccaccgaccacgtgaagcccaaagagacagagaacaccaagcagcccagcaagagctgccacaagcccaaggccatcgtgcacaccgagaaagtgaacatgatgagcctgaccgtgctgggcctgcggatgctgttcgccaaaaccgtggccgtgaacttcctgctgaccgccaagctgttcttcctcaaacggggcagaaagaaactcctgtatatattcaaacaaccatttatgagaccagtacaaactactcaagaggaagatggctgtagctgccgatttccagaagaagaagaaggaggatgtgaactgagagtgaagttcagcagaagcgccgacgcccctgcctaccagcagggacagaaccaactgtacaacgagctgaacctgggcagacgggaagagtacgacgtgctggacaagcggagaggcagggaccctgagatgggcggaaagccccagcggagaaagaacccccaggaaggactgtataacgaactccagaaagacaagatggccgaagcctacagcgagatcggcatgaagggcgagcggagaagaggcaagggccacgatggcctgtaccagggcctgagcaccgccaccaaggacacctatgacgccctgcacatgcaggccctgcctccaaga

SEQ ID NO: 27548 - DNA, 885 bp, synthetic construct
  source 1..885: mol_type = other DNA
aagagcagcgacaagagcgtgtgtctgttcaccgacttcgacagccagaccaacgtgtcccagagcaaggactccgacgtgtacatcaccgataagaccgtgctggacatgcggagcatggacttcaagagcaactccgccgtggcctggtccaacaagtccgatttcgcctgcgccaacgccttcaacaacagcattatccccgaggacacattcttcccaagccccgagagcagcgaccacgtgaagcccaaagagacagagaacaccaagcagcccagcaagagctgccacaagcccaaggccatcgtgcacaccgagaaagtgaacatgatgagcctgaccgtgctgggcctgcggatgctgttcgccaaaaccgtggccgtgaacttcctgctgaccgccaagctgttcttcctcaaacggggcagaaagaaactcctgtatatattcaaacaaccatttatgagaccagtacaaactactcaagaggaagatggctgtagctgccgatttccagaagaagaagaaggaggatgtgaactgagagtgaagttcagcagaagcgccgacgcccctgcctaccagcagggacagaaccaactgtacaacgagctgaacctgggcagacgggaagagtacgacgtgctggacaagcggagaggcagggaccctgagatgggcggaaagccccagcggagaaagaacccccaggaaggactgtataacgaactccagaaagacaagatggccgaagcctacagcgagatcggcatgaagggcgagcggagaagaggcaagggccacgatggcctgtaccagggcctgagcaccgccaccaaggacacctatgacgccctgcacatgcaggccctgcctccaaga

SEQ ID NO: 27549 - DNA, 1023 bp, synthetic construct
  source 1..1023: mol_type = other DNA
gaggacctgaagaacgtgttcccacctgaggtggccgtgttcgagcctagcgaggccgagatcagccacacccagaaagccaccctcgtgtgcctggctaccggcttctaccccgaccatgtggaactgtcttggtgggtcaacggcaaagaggtgcacagcggcgtgtctaccgacccccagccactgaaagaacagcccgccctgaacgacagccggtactgcctgagcagcagactgagagtgtccgccaccttctggcagaacccccggaaccacttcagatgccaggtgcagttctacggcctgagcgagaacgacgagtggacccaggacagagccaagcccgtgacccagatcgtgtctgccgaagcctggatccccgaggacacattcttcccaagccccgagagcagctgcgacgtgaagctggtggaaaagagcttcgagacagacaccaacctgaacttccagaacctgagcgtgatcggcttcagaatcctgctgctgaaagtggccggctttaacctgctgatgaccctgcggctgtggtccagcaaacggggcagaaagaaactcctgtatatattcaaacaaccatttatgagaccagtacaaactactcaagaggaagatggctgtagctgccgatttccagaagaagaagaaggaggatgtgaactgagagtgaagttcagcagaagcgccgacgcccctgcctaccagcagggacagaaccaactgtacaacgagctgaacctgggcagacgggaagagtacgacgtgctggacaagcggagaggcagggaccctgagatgggcggaaagccccagcggagaaagaacccccaggaaggactgtataacgaactccagaaagacaagatggccgaagcctacagcgagatcggcatgaagggcgagcggagaagaggcaagggccacgatggcctgtaccagggcctgagcaccgccaccaaggacacctatgacgccctgcacatgcaggccctgcctccaaga

SEQ ID NO: 27550 - DNA, 993 bp, synthetic construct
  source 1..993: mol_type = other DNA
gaggacctgaagaacgtgttcccacctgaggtggccgtgttcgagcctagcgaggccgagatcagccacacccagaaagccaccctcgtgtgcctggctaccggcttctaccccgaccatgtggaactgtcttggtgggtcaacggcaaagaggtgcacagcggcgtgtctaccgacccccagccactgaaagaacagcccgccctgaacgacagccggtactgcctgagcagcagactgagagtgtccgccaccttctggcagaacccccggaaccacttcagatgccaggtgcagttctacggcctgagcgagaacgacgagtggacccaggacagagccaagcccgtgacccagatcgtgtctgccgaagcctgggagagcagctgcgacgtgaagctggtggaaaagagcttcgagacagacaccaacctgaacttccagaacctgagcgtgatcggcttcagaatcctgctgctgaaagtggccggctttaacctgctgatgaccctgcggctgtggtccagcaaacggggcagaaagaaactcctgtatatattcaaacaaccatttatgagaccagtacaaactactcaagaggaagatggctgtagctgccgatttccagaagaagaagaaggaggatgtgaactgagagtgaagttcagcagaagcgccgacgcccctgcctaccagcagggacagaaccaactgtacaacgagctgaacctgggcagacgggaagagtacgacgtgctggacaagcggagaggcagggaccctgagatgggcggaaagccccagcggagaaagaacccccaggaaggactgtataacgaactccagaaagacaagatggccgaagcctacagcgagatcggcatgaagggcgagcggagaagaggcaagggccacgatggcctgtaccagggcctgagcaccgccaccaaggacacctatgacgccctgcacatgcaggccctgcctccaaga

SEQ ID NO: 27551 - DNA, 1020 bp, synthetic construct
  source 1..1020: mol_type = other DNA
gaggacctgaagaacgtgttcccacctgaggtggccgtgttcgagcctagcgaggccgagatcagccacacccagaaagccaccctcgtgtgcctggctaccggcttctaccccgaccatgtggaactgtcttggtgggtcaacggcaaagaggtgcacagcggcgtgtctaccgacccccagccactgaaagaacagcccgccctgaacgacagccggtactgcctgagcagcagactgagagtgtccgccaccttctggcagaacccccggaaccacttcagatgccaggtgcagttctacggcctgagcgagaacgacgagtggacccaggacagagccaagcccgtgacccagatcgtgtctgccgaagcctggcccgaggacacattcttcccaagccccgagagcagctgcgacgtgaagctggtggaaaagagcttcgagacagacaccaacctgaacttccagaacctgagcgtgatcggcttcagaatcctgctgctgaaagtggccggctttaacctgctgatgaccctgcggctgtggtccagcaaacggggcagaaagaaactcctgtatatattcaaacaaccatttatgagaccagtacaaactactcaagaggaagatggctgtagctgccgatttccagaagaagaagaaggaggatgtgaactgagagtgaagttcagcagaagcgccgacgcccctgcctaccagcagggacagaaccaactgtacaacgagctgaacctgggcagacgggaagagtacgacgtgctggacaagcggagaggcagggaccctgagatgggcggaaagccccagcggagaaagaacccccaggaaggactgtataacgaactccagaaagacaagatggccgaagcctacagcgagatcggcatgaagggcgagcggagaagaggcaagggccacgatggcctgtaccagggcctgagcaccgccaccaaggacacctatgacgccctgcacatgcaggccctgcctccaaga

SEQ ID NO: 27552 - DNA, 1050 bp, synthetic construct
  source 1..1050: mol_type = other DNA
gaggacctgaagaacgtgttcccacctgaggtggccgtgttcgagcctagcgaggccgagatcagccacacccagaaagccaccctcgtgtgcctggctaccggcttctaccccgaccatgtggaactgtcttggtgggtcaacggcaaagaggtgcacagcggcgtgtctaccgacccccagccactgaaagaacagcccgccctgaacgacagccggtactgcctgagcagcagactgagagtgtccgccaccttctggcagaacccccggaaccacttcagatgccaggtgcagttctacggcctgagcgagaacgacgagtggacccaggacagagccaagcccgtgacccagatcgtgtctgccgaagcctggttcccacccatcaagaccgatgtgattacaatggaccccaaggacaactgctccaaggacgccaacgataccctgctgctccagctgaccaacaccagcgcctactacatgtacttgttgctgctgctgaagtccgtggtgtacttcgccatcatcacatgctgcctgctgcggagaaccgccttctgctgcaacggcgagaagtctaaacggggcagaaagaaactcctgtatatattcaaacaaccatttatgagaccagtacaaactactcaagaggaagatggctgtagctgccgatttccagaagaagaagaaggaggatgtgaactgagagtgaagttcagcagaagcgccgacgcccctgcctaccagcagggacagaaccaactgtacaacgagctgaacctgggcagacgggaagagtacgacgtgctggacaagcggagaggcagggaccctgagatgggcggaaagccccagcggagaaagaacccccaggaaggactgtataacgaactccagaaagacaagatggccgaagcctacagcgagatcggcatgaagggcgagcggagaagaggcaagggccacgatggcctgtaccagggcctgagcaccgccaccaaggacacctatgacgccctgcacatgcaggccctgcctccaaga

SEQ ID NO: 27553 - DNA, 1044 bp, synthetic construct
  source 1..1044: mol_type = other DNA
gaggacctgaagaacgtgttcccacctgaggtggccgtgttcgagcctagcgaggccgagatcagccacacccagaaagccaccctcgtgtgcctggctaccggcttctaccccgaccatgtggaactgtcttggtgggtcaacggcaaagaggtgcacagcggcgtgtctaccgacccccagccactgaaagaacagcccgccctgaacgacagccggtactgcctgagcagcagactgagagtgtccgccaccttctggcagaacccccggaaccacttcagatgccaggtgcagttctacggcctgagcgagaacgacgagtggacccaggacagagccaagcccgtgacccagatcgtgtctgccgaagcctggcccatcaagaccgatgtgattacaatggaccccaaggacaactgctccaaggacgccaacgataccctgctgctccagctgaccaacaccagcgcctactacatgtacttgttgctgctgctgaagtccgtggtgtacttcgccatcatcacatgctgcctgctgcggagaaccgccttctgctgcaacggcgagaagtctaaacggggcagaaagaaactcctgtatatattcaaacaaccatttatgagaccagtacaaactactcaagaggaagatggctgtagctgccgatttccagaagaagaagaaggaggatgtgaactgagagtgaagttcagcagaagcgccgacgcccctgcctaccagcagggacagaaccaactgtacaacgagctgaacctgggcagacgggaagagtacgacgtgctggacaagcggagaggcagggaccctgagatgggcggaaagccccagcggagaaagaacccccaggaaggactgtataacgaactccagaaagacaagatggccgaagcctacagcgagatcggcatgaagggcgagcggagaagaggcaagggccacgatggcctgtaccagggcctgagcaccgccaccaaggacacctatgacgccctgcacatgcaggccctgcctccaaga

SEQ ID NO: 27554 - DNA, 1020 bp, synthetic construct
  source 1..1020: mol_type = other DNA
gaggacctgaagaacgtgttcccacctgaggtggccgtgttcgagcctagcgaggccgagatcagccacacccagaaagccaccctcgtgtgcctggctaccggcttctaccccgaccatgtggaactgtcttggtgggtcaacggcaaagaggtgcacagcggcgtgtctaccgacccccagccactgaaagaacagcccgccctgaacgacagccggtactgcctgagcagcagactgagagtgtccgccaccttctggcagaacccccggaaccacttcagatgccaggtgcagttctacggcctgagcgagaacgacgagtggacccaggacagagccaagcccgtgacccagatcgtgtctgccgaagcctggatggaccccaaggacaactgctccaaggacgccaacgataccctgctgctccagctgaccaacaccagcgcctactacatgtacttgttgctgctgctgaagtccgtggtgtacttcgccatcatcacatgctgcctgctgcggagaaccgccttctgctgcaacggcgagaagtctaaacggggcagaaagaaactcctgtatatattcaaacaaccatttatgagaccagtacaaactactcaagaggaagatggctgtagctgccgatttccagaagaagaagaaggaggatgtgaactgagagtgaagttcagcagaagcgccgacgcccctgcctaccagcagggacagaaccaactgtacaacgagctgaacctgggcagacgggaagagtacgacgtgctggacaagcggagaggcagggaccctgagatgggcggaaagccccagcggagaaagaacccccaggaaggactgtataacgaactccagaaagacaagatggccgaagcctacagcgagatcggcatgaagggcgagcggagaagaggcaagggccacgatggcctgtaccagggcctgagcaccgccaccaaggacacctatgacgccctgcacatgcaggccctgcctccaaga

SEQ ID NO: 27555 - DNA, 1044 bp, synthetic construct; identical to SEQ ID NO: 27553
  source 1..1044: mol_type = other DNA

SEQ ID NO: 27556 - DNA, 1002 bp, synthetic construct
  source 1..1002: mol_type = other DNA
gaggacctgaagaacgtgttcccacctgaggtggccgtgttcgagcctagcgaggccgagatcagccacacccagaaagccaccctcgtgtgcctggctaccggcttctaccccgaccatgtggaactgtcttggtgggtcaacggcaaagaggtgcacagcggcgtgtctaccgacccccagccactgaaagaacagcccgccctgaacgacagccggtactgcctgagcagcagactgagagtgtccgccaccttctggcagaacccccggaaccacttcagatgccaggtgcagttctacggcctgagcgagaacgacgagtggacccaggacagagccaagcccgtgacccagatcgtgtctgccgaagcctggtgctccaaggacgccaacgataccctgctgctccagctgaccaacaccagcgcctactacatgtacttgttgctgctgctgaagtccgtggtgtacttcgccatcatcacatgctgcctgctgcggagaaccgccttctgctgcaacggcgagaagtctaaacggggcagaaagaaactcctgtatatattcaaacaaccatttatgagaccagtacaaactactcaagaggaagatggctgtagctgccgatttccagaagaagaagaaggaggatgtgaactgagagtgaagttcagcagaagcgccgacgcccctgcctaccagcagggacagaaccaactgtacaacgagctgaacctgggcagacgggaagagtacgacgtgctggacaagcggagaggcagggaccctgagatgggcggaaagccccagcggagaaagaacccccaggaaggactgtataacgaactccagaaagacaagatggccgaagcctacagcgagatcggcatgaagggcgagcggagaagaggcaagggccacgatggcctgtaccagggcctgagcaccgccaccaaggacacctatgacgccctgcacatgcaggccctgcctccaaga

SEQ ID NO: 27557 - DNA, 1047 bp, synthetic construct
  source 1..1047: mol_type = other DNA
gaggacctgaagaacgtgttcccacctgaggtggccgtgttcgagcctagcgaggccgagatcagccacacccagaaagccaccctcgtgtgcctggctaccggcttctaccccgaccatgtggaactgtcttggtgggtcaacggcaaagaggtgcacagcggcgtgtctaccgacccccagccactgaaagaacagcccgccctgaacgacagccggtactgcctgagcagcagactgagagtgtccgccaccttctggcagaacccccggaaccacttcagatgccaggtgcagttctacggcctgagcgagaacgacgagtggacccaggacagagccaagcccgtgacccagatcgtgtctgccgaagcctgggaagtgaaaaccgactccaccgaccacgtgaagcccaaagagacagagaacaccaagcagcccagcaagagctgccacaagcccaaggccatcgtgcacaccgagaaagtgaacatgatgagcctgaccgtgctgggcctgcggatgctgttcgccaaaaccgtggccgtgaacttcctgctgaccgccaagctgttcttcctcaaacggggcagaaagaaactcctgtatatattcaaacaaccatttatgagaccagtacaaactactcaagaggaagatggctgtagctgccgatttccagaagaagaagaaggaggatgtgaactgagagtgaagttcagcagaagcgccgacgcccctgcctaccagcagggacagaaccaactgtacaacgagctgaacctgggcagacgggaagagtacgacgtgctggacaagcggagaggcagggaccctgagatgggcggaaagccccagcggagaaagaacccccaggaaggactgtataacgaactccagaaagacaagatggccgaagcctacagcgagatcggcatgaagggcgagcggagaagaggcaagggccacgatggcctgtaccagggcctgagcaccgccaccaaggacacctatgacgccctgcacatgcaggccctgcctccaaga

SEQ ID NO: 27558 - DNA, 1026 bp, synthetic construct
  source 1..1026: mol_type = other DNA
gaggacctgaagaacgtgttcccacctgaggtggccgtgttcgagcctagcgaggccgagatcagccacacccagaaagccaccctcgtgtgcctggctaccggcttctaccccgaccatgtggaactgtcttggtgggtcaacggcaaagaggtgcacagcggcgtgtctaccgacccccagccactgaaagaacagcccgccctgaacgacagccggtactgcctgagcagcagactgagagtgtccgccaccttctggcagaacccccggaaccacttcagatgccaggtgcagttctacggcctgagcgagaacgacgagtggacccaggacagagccaagcccgtgacccagatcgtgtctgccgaagcctgggaccacgtgaagcccaaagagacagagaacaccaagcagcccagcaagagctgccacaagcccaaggccatcgtgcacaccgagaaagtgaacatgatgagcctgaccgtgctgggcctgcggatgctgttcgccaaaaccgtggccgtgaacttcctgctgaccgccaagctgttcttcctcaaacggggcagaaagaaactcctgtatatattcaaacaaccatttatgagaccagtacaaactactcaagaggaagatggctgtagctgccgatttccagaagaagaagaaggaggatgtgaactgagagtgaagttcagcagaagcgccgacgcccctgcctaccagcagggacagaaccaactgtacaacgagctgaacctgggcagacgggaagagtacgacgtgctggacaagcggagaggcagggaccctgagatgggcggaaagccccagcggagaaagaacccccaggaaggactgtataacgaactccagaaagacaagatggccgaagcctacagcgagatcggcatgaagggcgagcggagaagaggcaagggccacgatggcctgtaccagggcctgagcaccgccaccaaggacacctatgacgccctgcacatgcaggccctgcctccaaga

SEQ ID NO: 27559 - DNA, 1029 bp, synthetic construct
  source 1..1029: mol_type = other DNA
gaggacctgaagaacgtgttcccacctgaggtggccgtgttcgagcctagcgaggccgagatcagccacacccagaaagccaccctcgtgtgcctggctaccggcttctaccccgaccatgtggaactgtcttggtgggtcaacggcaaagaggtgcacagcggcgtgtctaccgacccccagccactgaaagaacagcccgccctgaacgacagccggtactgcctgagcagcagactgagagtgtccgccaccttctggcagaacccccggaaccacttcagatgccaggtgcagttctacggcctgagcgagaacgacgagtggacccaggacagagccaagcccgtgacccagatcgtgtctgccgaagcctggggcagaatccccgaggacacattcttcccaagccccgagagcagctgcgacgtgaagctggtggaaaagagcttcgagacagacaccaacctgaacttccagaacctgagcgtgatcggcttcagaatcctgctgctgaaagtggccggctttaacctgctgatgaccctgcggctgtggtccagcaaacggggcagaaagaaactcctgtatatattcaaacaaccatttatgagaccagtacaaactactcaagaggaagatggctgtagctgccgatttccagaagaagaagaaggaggatgtgaactgagagtgaagttcagcagaagcgccgacgcccctgcctaccagcagggacagaaccaactgtacaacgagctgaacctgggcagacgggaagagtacgacgtgctggacaagcggagaggcagggaccctgagatgggcggaaagccccagcggagaaagaacccccaggaaggactgtataacgaactccagaaagacaagatggccgaagcctacagcgagatcggcatgaagggcgagcggagaagaggcaagggccacgatggcctgtaccagggcctgagcaccgccaccaaggacacctatgacgccctgcacatgcaggccctgcctccaaga

SEQ ID NO: 27560 - DNA, 999 bp, synthetic construct
  source 1..999: mol_type = other DNA
gaggacctgaagaacgtgttcccacctgaggtggccgtgttcgagcctagcgaggccgagatcagccacacccagaaagccaccctcgtgtgcctggctaccggcttctaccccgaccatgtggaactgtcttggtgggtcaacggcaaagaggtgcacagcggcgtgtctaccgacccccagccactgaaagaacagcccgccctgaacgacagccggtactgcctgagcagcagactgagagtgtccgccaccttctggcagaacccccggaaccacttcagatgccaggtgcagttctacggcctgagcgagaacgacgagtggacccaggacagagccaagcccgtgacccagatcgtgtctgccgaagcctggggcagagagagcagctgcgacgtgaagctggtggaaaagagcttcgagacagacaccaacctgaacttccagaacctgagcgtgatcggcttcagaatcctgctgctgaaagtggccggctttaacctgctgatgaccctgcggctgtggtccagcaaacggggcagaaagaaactcctgtatatattcaaacaaccatttatgagaccagtacaaactactcaagaggaagatggctgtagctgccgatttccagaagaagaagaaggaggatgtgaactgagagtgaagttcagcagaagcgccgacgcccctgcctaccagcagggacagaaccaactgtacaacgagctgaacctgggcagacgggaagagtacgacgtgctggacaagcggagaggcagggaccctgagatgggcggaaagccccagcggagaaagaacccccaggaaggactgtataacgaactccagaaagacaagatggccgaagcctacagcgagatcggcatgaagggcgagcggagaagaggcaagggccacgatggcctgtaccagggcctgagcaccgccaccaaggacacctatgacgccctgcacatgcaggccctgcctccaaga

SEQ ID NO: 27561 - DNA, 1026 bp, synthetic construct
  source 1..1026: mol_type = other DNA
gaggacctgaagaacgtgttcccacctgaggtggccgtgttcgagcctagcgaggccgagatcagccacacccagaaagccaccctcgtgtgcctggctaccggcttctaccccgaccatgtggaactgtcttggtgggtcaacggcaaagaggtgcacagcggcgtgtctaccgacccccagccactgaaagaacagcccgccctgaacgacagccggtactgcctgagcagcagactgagagtgtccgccaccttctggcagaacccccggaaccacttcagatgccaggtgcagttctacggcctgagcgagaacgacgagtggacccaggacagagccaagcccgtgacccagatcgtgtctgccgaagcctggggcagacccgaggacacattcttcccaagccccgagagcagctgcgacgtgaagctggtggaaaagagcttcgagacagacaccaacctgaacttccagaacctgagcgtgatcggcttcagaatcctgctgctgaaagtggccggctttaacctgctgatgaccctgcggctgtggtccagcaaacggggcagaaagaaactcctgtatatattcaaacaaccatttatgagaccagtacaaactactcaagaggaagatggctgtagctgccgatttccagaagaagaagaaggaggatgtgaactgagagtgaagttcagcagaagcgccgacgcccctgcctaccagcagggacagaaccaactgtacaacgagctgaacctgggcagacgggaagagtacgacgtgctggacaagcggagaggcagggaccctgagatgggcggaaagccccagcggagaaagaacccccaggaaggactgtataacgaactccagaaagacaagatggccgaagcctacagcgagatcggcatgaagggcgagcggagaagaggcaagggccacgatggcctgtaccagggcctgagcaccgccaccaaggacacctatgacgccctgcacatgcaggccctgcctccaaga

SEQ ID NO: 27562 - DNA, 1056 bp, synthetic construct
  source 1..1056: mol_type = other DNA
gaggacctgaagaacgtgttcccacctgaggtggccgtgttcgagcctagcgaggccgagatcagccacacccagaaagccaccctcgtgtgcctggctaccggcttctaccccgaccatgtggaactgtcttggtgggtcaacggcaaagaggtgcacagcggcgtgtctaccgacccccagccactgaaagaacagcccgccctgaacgacagccggtactgcctgagcagcagactgagagtgtccgccaccttctggcagaacccccggaaccacttcagatgccaggtgcagttctacggcctgagcgagaacgacgagtggacccaggacagagccaagcccgtgacccagatcgtgtctgccgaagcctggggcagattcccacccatcaagaccgatgtgattacaatggaccccaaggacaactgctccaaggacgccaacgataccctgctgctccagctgaccaacaccagcgcctactacatgtacttgttgctgctgctgaagtccgtggtgtacttcgccatcatcacatgctgcctgctgcggagaaccgccttctgctgcaacggcgagaagtctaaacggggcagaaagaaactcctgtatatattcaaacaaccatttatgagaccagtacaaactactcaagaggaagatggctgtagctgccgatttccagaagaagaagaaggaggatgtgaactgagagtgaagttcagcagaagcgccgacgcccctgcctaccagcagggacagaaccaactgtacaacgagctgaacctgggcagacgggaagagtacgacgtgctggacaagcggagaggcagggaccctgagatgggcggaaagccccagcggagaaagaacccccaggaaggactgtataacgaactccagaaagacaagatggccgaagcctacagcgagatcggcatgaagggcgagcggagaagaggcaagggccacgatggcctgtaccagggcctgagcaccgccaccaaggacacctatgacgccctgcacatgcaggccctgcctccaaga

SEQ ID NO: 27563 - DNA, 1050 bp, synthetic construct
  source 1..1050: mol_type = other DNA
gaggacctgaagaacgtgttcccacctgaggtggccgtgttcgagcctagcgaggccgagatcagccacacccagaaagccaccctcgtgtgcctggctaccggcttctaccccgaccatgtggaactgtcttggtgggtcaacggcaaagaggtgcacagcggcgtgtctaccgacccccagccactgaaagaacagcccgccctgaacgacagccggtactgcctgagcagcagactgagagtgtccgccaccttctggcagaacccccggaaccacttcagatgccaggtgcagttctacggcctgagcgagaacgacgagtggacccaggacagagccaagcccgtgacccagatcgtgtctgccgaagcctggggcagacccatcaagaccgatgtgattacaatggaccccaaggacaactgctccaaggacgccaacgataccctgctgctccagctgaccaacaccagcgcctactacatgtacttgttgctgctgctgaagtccgtggtgtacttcgccatcatcacatgctgcctgctgcggagaaccgccttctgctgcaacggcgagaagtctaaacggggcagaaagaaactcctgtatatattcaaacaaccatttatgagaccagtacaaactactcaagaggaagatggctgtagctgccgatttccagaagaagaagaaggaggatgtgaactgagagtgaagttcagcagaagcgccgacgcccctgcctaccagcagggacagaaccaactgtacaacgagctgaacctgggcagacgggaagagtacgacgtgctggacaagcggagaggcagggaccctgagatgggcggaaagccccagcggagaaagaacccccaggaaggactgtataacgaactccagaaagacaagatggccgaagcctacagcgagatcggcatgaagggcgagcggagaagaggcaagggccacgatggcctgtaccagggcctgagcaccgccaccaaggacacctatgacgccctgcacatgcaggccctgcctccaaga

SEQ ID NO: 27564 - DNA, 1026 bp, synthetic construct
  source 1..1026: mol_type = other DNA
gaggacctgaagaacgtgttcccacctgaggtggccgtgttcgagcctagcgaggccgagatcagccacacccagaaagccaccctcgtgtgcctggctaccggcttctaccccgaccatgtggaactgtcttggtgggtcaacggcaaagaggtgcacagcggcgtgtctaccgacccccagccactgaaagaacagcccgccctgaacgacagccggtactgcctgagcagcagactgagagtgtccgccaccttctggcagaacccccggaaccacttcagatgccaggtgcagttctacggcctgagcgagaacgacgagtggacccaggacagagccaagcccgtgacccagatcgtgtctgccgaagcctggggcagaatggaccccaaggacaactgctccaaggacgccaacgataccctgctgctccagctgaccaacaccagcgcctactacatgtacttgttgctgctgctgaagtccgtggtgtacttcgccatcatcacatgctgcctgctgcggagaaccgccttctgctgcaacggcgagaagtctaaacggggcagaaagaaactcctgtatatattcaaacaaccatttatgagaccagtacaaactactcaagaggaagatggctgtagctgccgatttccagaagaagaagaaggaggatgtgaactgagagtgaagttcagcagaagcgccgacgcccctgcctaccagcagggacagaaccaactgtacaacgagctgaacctgggcagacgggaagagtacgacgtgctggacaagcggagaggcagggaccctgagatgggcggaaagccccagcggagaaagaacccccaggaaggactgtataacgaactccagaaagacaagatggccgaagcctacagcgagatcggcatgaagggcgagcggagaagaggcaagggccacgatggcctgtaccagggcctgagcaccgccaccaaggacacctatgacgccctgcacatgcaggccctgcctccaaga

SEQ ID NO: 27565 - DNA, 1050 bp, synthetic construct; identical to SEQ ID NO: 27563
  source 1..1050: mol_type = other DNA

SEQ ID NO: 27566 - DNA, 1008 bp, synthetic construct
  source 1..1008: mol_type = other DNA
gaggacctgaagaacgtgttcccacctgaggtggccgtgttcgagcctagcgaggccgagatcagccacacccagaaagccaccctcgtgtgcctggctaccggcttctaccccgaccatgtggaactgtcttggtgggtcaacggcaaagaggtgcacagcggcgtgtctaccgacccccagccactgaaagaacagcccgccctgaacgacagccggtactgcctgagcagcagactgagagtgtccgccaccttctggcagaacccccggaaccacttcagatgccaggtgcagttctacggcctgagcgagaacgacgagtggacccaggacagagccaagcccgtgacccagatcgtgtctgccgaagcctggggcagatgctccaaggacgccaacgataccctgctgctccagctgaccaacaccagcgcctactacatgtacttgttgctgctgctgaagtccgtggtgtacttcgccatcatcacatgctgcctgctgcggagaaccgccttctgctgcaacggcgagaagtctaaacggggcagaaagaaactcctgtatatattcaaacaaccatttatgagaccagtacaaactactcaagaggaagatggctgtagctgccgatttccagaagaagaagaaggaggatgtgaactgagagtgaagttcagcagaagcgccgacgcccctgcctaccagcagggacagaaccaactgtacaacgagctgaacctgggcagacgggaagagtacgacgtgctggacaagcggagaggcagggaccctgagatgggcggaaagccccagcggagaaagaacccccaggaaggactgtataacgaactccagaaagacaagatggccgaagcctacagcgagatcggcatgaagggcgagcggagaagaggcaagggccacgatggcctgtaccagggcctgagcaccgccaccaaggacacctatgacgccctgcacatgcaggccctgcctccaaga

SEQ ID NO: 27567 - DNA, 1053 bp, synthetic construct
  source 1..1053: mol_type = other DNA
gaggacctgaagaacgtgttcccacctgaggtggccgtgttcgagcctagcgaggccgagatcagccacacccagaaagccaccctcgtgtgcctggctaccggcttctaccccgaccatgtggaactgtcttggtgggtcaacggcaaagaggtgcacagcggcgtgtctaccgacccccagccactgaaagaacagcccgccctgaacgacagccggtactgcctgagcagcagactgagagtgtccgccaccttctggcagaacccccggaaccacttcagatgccaggtgcagttctacggcctgagcgagaacgacgagtggacccaggacagagccaagcccgtgacccagatcgtgtctgccgaagcctggggcagagaagtgaaaaccgactccaccgaccacgtgaagcccaaagagacagagaacaccaagcagcccagcaagagctgccacaagcccaaggccatcgtgcacaccgagaaagtgaacatgatgagcctgaccgtgctgggcctgcggatgctgttcgccaaaaccgtggccgtgaacttcctgctgaccgccaagctgttcttcctcaaacggggcagaaagaaactcctgtatatattcaaacaaccatttatgagaccagtacaaactactcaagaggaagatggctgtagctgccgatttccagaagaagaagaaggaggatgtgaactgagagtgaagttcagcagaagcgccgacgcccctgcctaccagcagggacagaaccaactgtacaacgagctgaacctgggcagacgggaagagtacgacgtgctggacaagcggagaggcagggaccctgagatgggcggaaagccccagcggagaaagaacccccaggaaggactgtataacgaactccagaaagacaagatggccgaagcctacagcgagatcggcatgaagggcgagcggagaagaggcaagggccacgatggcctgtaccagggcctgagcaccgccaccaaggacacctatgacgccctgcacatgcaggccctgcctccaaga

SEQ ID NO: 27568 - DNA, 1032 bp, synthetic construct
  source 1..1032: mol_type = other DNA
gaggacctgaagaacgtgttcccacctgaggtggccgtgttcgagcctagcgaggccgagatcagccacacccagaaagccaccctcgtgtgcctggctaccggcttctaccccgaccatgtggaactgtcttggtgggtcaacggcaaagaggtgcacagcggcgtgtctaccgacccccagccactgaaagaacagcccgccctgaacgacagccggtactgcctgagcagcagactgagagtgtccgccaccttctggcagaacccccggaaccacttcagatgccaggtgcagttctacggcctgagcgagaacgacgagtggacccaggacagagccaagcccgtgacccagatcgtgtctgccgaagcctggggcagagaccacgtgaagcccaaagagacagagaacaccaagcagcccagcaagagctgccacaagcccaaggccatcgtgcacaccgagaaagtgaacatgatgagcctgaccgtgctgggcctgcggatgctgttcgccaaaaccgtggccgtgaacttcctgctgaccgccaagctgttcttcctcaaacggggcagaaagaaactcctgtatatattcaaacaaccatttatgagaccagtacaaactactcaagaggaagatggctgtagctgccgatttccagaagaagaagaaggaggatgtgaactgagagtgaagttcagcagaagcgccgacgcccctgcctaccagcagggacagaaccaactgtacaacgagctgaacctgggcagacgggaagagtacgacgtgctggacaagcggagaggcagggaccctgagatgggcggaaagccccagcggagaaagaacccccaggaaggactgtataacgaactccagaaagacaagatggccgaagcctacagcgagatcggcatgaagggcgagcggagaagaggcaagggccacgatggcctgtaccagggcctgagcaccgccaccaaggacacctatgacgccctgcacatgcaggccctgcctccaaga

SEQ ID NO: 27569 - DNA, 1038 bp, synthetic construct
  source 1..1038: mol_type = other DNA
gaggacctgaagaacgtgttcccacctgaggtggccgtgttcgagcctagcgaggccgagatcagccacacccagaaagccaccctcgtgtgcctggctaccggcttctaccccgaccatgtggaactgtcttggtgggtcaacggcaaagaggtgcacagcggcgtgtctaccgacccccagccactgaaagaacagcccgccctgaacgacagccggtactgcctgagcagcagactgagagtgtccgccaccttctggcagaacccccggaaccacttcagatgccaggtgcagttctacggcctgagcgagaacgacgagtggacccaggacagagccaagcccgtgacccagatcgtgtctgccgaagcctggggcagagccgattgcatccccgaggacacattcttcccaagccccgagagcagctgcgacgtgaagctggtggaaaagagcttcgagacagacaccaacctgaacttccagaacctgagcgtgatcggcttcagaatcctgctgctgaaagtggccggctttaacctgctgatgaccctgcggctgtggtccagcaaacggggcagaaagaaactcctgtatatattcaaacaaccatttatgagaccagtacaaactactcaagaggaagatggctgtagctgccgatttccagaagaagaagaaggaggatgtgaactgagagtgaagttcagcagaagcgccgacgcccctgcctaccagcagggacagaaccaactgtacaacgagctgaacctgggcagacgggaagagtacgacgtgctggacaagcggagaggcagggaccctgagatgggcggaaagccccagcggagaaagaacccccaggaaggactgtataacgaactccagaaagacaagatggccgaagcctacagcgagatcggcatgaagggcgagcggagaagaggcaagggccacgatggcctgtaccagggcctgagcaccgccaccaaggacacctatgacgccctgcacatgcaggccctgcctccaaga

SEQ ID NO: 27570 - DNA, 1008 bp, synthetic construct
  source 1..1008: mol_type = other DNA
gaggacctgaagaacgtgttcccacctgaggtggccgtgttcgagcctagcgaggccgagatcagccacacccagaaagccaccctcgtgtgcctggctaccggcttctaccccgaccatgtggaactgtcttggtgggtcaacggcaaagaggtgcacagcggcgtgtctaccgacccccagccactgaaagaacagcccgccctgaacgacagccggtactgcctgagcagcagactgagagtgtccgccaccttctggcagaacccccggaaccacttcagatgccaggtgcagttctacggcctgagcgagaacgacgagtggacccaggacagagccaagcccgtgacccagatcgtgtctgccgaagcctggggcagagccgattgcgagagcagctgcgacgtgaagctggtggaaaagagcttcgagacagacaccaacctgaacttccagaacctgagcgtgatcggcttcagaatcctgctgctgaaagtggccggctttaacctgctgatgaccctgcggctgtggtccagcaaacggggcagaaagaaactcctgtatatattcaaacaaccatttatgagaccagtacaaactactcaagaggaagatggctgtagctgccgatttccagaagaagaagaaggaggatgtgaactgagagtgaagttcagcagaagcgccgacgcccctgcctaccagcagggacagaaccaactgtacaacgagctgaacctgggcagacgggaagagtacgacgtgctggacaagcggagaggcagggaccctgagatgggcggaaagccccagcggagaaagaacccccaggaaggactgtataacgaactccagaaagacaagatggccgaagcctacagcgagatcggcatgaagggcgagcggagaagaggcaagggccacgatggcctgtaccagggcctgagcaccgccaccaaggacacctatgacgccctgcacatgcaggccctgcctccaaga

SEQ ID NO: 27571 - DNA, 1035 bp, synthetic construct
  source 1..1035: mol_type = other DNA
gaggacctgaagaacgtgttcccacctgaggtggccgtgttcgagcctagcgaggccgagatcagccacacccagaaagccaccctcgtgtgcctggctaccggcttctaccccgaccatgtggaactgtcttggtgggtcaacggcaaagaggtgcacagcggcgtgtctaccgacccccagccactgaaagaacagcccgccctgaacgacagccggtactgcctgagcagcagactgagagtgtccgccaccttctggcagaacccccggaaccacttcagatgccaggtgcagttctacggcctgagcgagaacgacgagtggacccaggacagagccaagcccgtgacccagatcgtgtctgccgaagcctggggcagagccgattgccccgaggacacattcttcccaagccccgagagcagctgcgacgtgaagctggtggaaaagagcttcgagacagacaccaacctgaacttccagaacctgagcgtgatcggcttcagaatcctgctgctgaaagtggccggctttaacctgctgatgaccctgcggctgtggtccagcaaacggggcagaaagaaactcctgtatatattcaaacaaccatttatgagaccagtacaaactactcaagaggaagatggctgtagctgccgatttccagaagaagaagaaggaggatgtgaactgagagtgaagttcagcagaagcgccgacgcccctgcctaccagcagggacagaaccaactgtacaacgagctgaacctgggcagacgggaagagtacgacgtgctggacaagcggagaggcagggaccctgagatgggcggaaagccccagcggagaaagaacccccaggaaggactgtataacgaactccagaaagacaagatggccgaagcctacagcgagatcggcatgaagggcgagcggagaagaggcaagggccacgatggcctgtaccagggcctgagcaccgccaccaaggacacctatgacgccctgcacatgcaggccctgcctccaaga

SEQ ID NO: 27572 - DNA, 1065 bp, synthetic construct
  source 1..1065: mol_type = other DNA
gaggacctgaagaacgtgttcccacctgaggtggccgtgttcgagcctagcgaggccgagatcagccacacccagaaagccaccctcgtgtgcctggctaccggcttctaccccgaccatgtggaactgtcttggtgggtcaacggcaaagaggtgcacagcggcgtgtctaccgacccccagccactgaaagaacagcccgccctgaacgacagccggtactgcctgagcagcagactgagagtgtccgccaccttctggcagaacccccggaaccacttcagatgccaggtgcagttctacggcctgagcgagaacgacgagtggacccaggacagagccaagcccgtgacccagatcgtgtctgccgaagcctggggcagagccgattgcttcccacccatcaagaccgatgtgattacaatggaccccaaggacaactgctccaaggacgccaacgataccctgctgctccagctgaccaacaccagcgcctactacatgtacttgttgctgctgctgaagtccgtggtgtacttcgccatcatcacatgctgcctgctgcggagaaccgccttctgctgcaacggcgagaagtctaaacggggcagaaagaaactcctgtatatattcaaacaaccatttatgagaccagtacaaactactcaagaggaagatggctgtagctgccgatttccagaagaagaagaaggaggatgtgaactgagagtgaagttcagcagaagcgccgacgcccctgcctaccagcagggacagaaccaactgtacaacgagctgaacctgggcagacgggaagagtacgacgtgctggacaagcggagaggcagggaccctgagatgggcggaaagccccagcggagaaagaacccccaggaaggactgtataacgaactccagaaagacaagatggccgaagcctacagcgagatcggcatgaagggcgagcggagaagaggcaagggccacgatggcctgtaccagggcctgagcaccgccaccaaggacacctatgacgccctgcacatgcaggccctgcctccaaga

SEQ ID NO: 27573 - DNA, 1059 bp, synthetic construct
  source 1..1059: mol_type = other DNA
gaggacctgaagaacgtgttcccacctgaggtggccgtgttcgagcctagcgaggccgagatcagccacacccagaaagccaccctcgtgtgcctggctaccggcttctaccccgaccatgtggaactgtcttggtgggtcaacggcaaagaggtgcacagcggcgtgtctaccgacccccagccactgaaagaacagcccgccctgaacgacagccggtactgcctgagcagcagactgagagtgtccgccaccttctggcagaacccccggaaccacttcagatgccaggtgcagttctacggcctgagcgagaacgacgagtggacccaggacagagccaagcccgtgacccagatcgtgtctgccgaagcctggggcagagccgattgccccatcaagaccgatgtgattacaatggaccccaaggacaactgctccaaggacgccaacgataccctgctgctccagctgaccaacaccagcgcctactacatgtacttgttgctgctgctgaagtccgtggtgtacttcgccatcatcacatgctgcctgctgcggagaaccgccttctgctgcaacggcgagaagtctaaacggggcagaaagaaactcctgtatatattcaaacaaccatttatgagaccagtacaaactactcaagaggaagatggctgtagctgccgatttccagaagaagaagaaggaggatgtgaactgagagtgaagttcagcagaagcgccgacgcccctgcctaccagcagggacagaaccaactgtacaacgagctgaacctgggcagacgggaagagtacgacgtgctggacaagcggagaggcagggaccctgagatgggcggaaagccccagcggagaaagaacccccaggaaggactgtataacgaactccagaaagacaagatggccgaagcctacagcgagatcggcatgaagggcgagcggagaagaggcaagggccacgatggcctgtaccagggcctgagcaccgccaccaaggacacctatgacgccctgcacatgcaggccctgcctccaaga

SEQ ID NO: 27574 - DNA, 1035 bp, synthetic construct
  source 1..1035: mol_type = other DNA
gaggacctgaagaacgtgttcccacctgaggtggccgtgttcgagcctagcgaggccgagatcagccacacccagaaagccaccctcgtgtgcctggctaccggcttctaccccgaccatgtggaactgtcttggtgggtcaacggcaaagaggtgcacagcggcgtgtctaccgacccccagccactgaaagaacagcccgccctgaacgacagccggtactgcctgagcagcagactgagagtgtccgccaccttctggcagaacccccggaaccacttcagatgccaggtgcagttctacggcctgagcgagaacgacgagtggacccaggacagagccaagcccgtgacccagatcgtgtctgccgaagcctggggcagagccgattgcatggaccccaaggacaactgctccaaggacgccaacgataccctgctgctccagctgaccaacaccagcgcctactacatgtacttgttgctgctgctgaagtccgtggtgtacttcgccatcatcacatgctgcctgctgcggagaaccgccttctgctgcaacggcgagaagtctaaacggggcagaaagaaactcctgtatatattcaaacaaccatttatgagaccagtacaaactactcaagaggaagatggctgtagctgccgatttccagaagaagaagaaggaggatgtgaactgagagtgaagttcagcagaagcgccgacgcccctgcctaccagcagggacagaaccaactgtacaacgagctgaacctgggcagacgggaagagtacgacgtgctggacaagcggagaggcagggaccctgagatgggcggaaagccccagcggagaaagaacccccaggaaggactgtataacgaactccagaaagacaagatggccgaagcctacagcgagatcggcatgaagggcgagcggagaagaggcaagggccacgatggcctgtaccagggcctgagcaccgccaccaaggacacctatgacgccctgcacatgcaggccctgcctccaaga

SEQ ID NO: 27575 - DNA, 1059 bp, synthetic construct; identical to SEQ ID NO: 27573
  source 1..1059: mol_type = other DNA

SEQ ID NO: 27576 - DNA, 1017 bp, synthetic construct
  source 1..1017: mol_type = other DNA
gaggacctgaagaacgtgttcccacctgaggtggccgtgttcgagcctagcgaggccgagatcagccacacccagaaagccaccctcgtgtgcctggctaccggcttctaccccgaccatgtggaactgtcttggtgggtcaacggcaaagaggtgcacagcggcgtgtctaccgacccccagccactgaaagaacagcccgccctgaacgacagccggtactgcctgagcagcagactgagagtgtccgccaccttctggcagaacccccggaaccacttcagatgccaggtgcagttctacggcctgagcgagaacgacgagtggacccaggacagagccaagcccgtgacccagatcgtgtctgccgaagcctggggcagagccgattgctgctccaaggacgccaacgataccctgctgctccagctgaccaacaccagcgcctactacatgtacttgttgctgctgctgaagtccgtggtgtacttcgccatcatcacatgctgcctgctgcggagaaccgccttctgctgcaacggcgagaagtctaaacggggcagaaagaaactcctgtatatattcaaacaaccatttatgagaccagtacaaactactcaagaggaagatggctgtagctgccgatttccagaagaagaagaaggaggatgtgaactgagagtgaagttcagcagaagcgccgacgcccctgcctaccagcagggacagaaccaactgtacaacgagctgaacctgggcagacgggaagagtacgacgtgctggacaagcggagaggcagggaccctgagatgggcggaaagccccagcggagaaagaacccccaggaaggactgtataacgaactccagaaagacaagatggccgaagcctacagcgagatcggcatgaagggcgagcggagaagaggcaagggccacgatggcctgtaccagggcctgagcaccgccaccaaggacacctatgacgccctgcacatgcaggccctgcctccaaga

SEQ ID NO: 27577 - DNA, 1062 bp, synthetic construct
  source 1..1062: mol_type = other DNA
gaggacctgaagaacgtgttcccacctgaggtggccgtgttcgagcctagcgaggccgagatcagccacacccagaaagccaccctcgtgtgcctggctaccggcttctaccccgaccatgtggaactgtcttggtgggtcaacggcaaagaggtgcacagcggcgtgtctaccgacccccagccactgaaagaacagcccgccctgaacgacagccggtactgcctgagcagcagactgagagtgtccgccaccttctggcagaacccccggaaccacttcagatgccaggtgcagttctacggcctgagcgagaacgacgagtggacccaggacagagccaagcccgtgacccagatcgtgtctgccgaagcctggggcagagccgattgcgaagtgaaaaccgactccaccgaccacgtgaagcccaaagagacagagaacaccaagcagcccagcaagagctgccacaagcccaaggccatcgtgcacaccgagaaagtgaacatgatgagcctgaccgtgctgggcctgcggatgctgttcgccaaaaccgtggccgtgaacttcctgctgaccgccaagctgttcttcctcaaacggggcagaaagaaactcctgtatatattcaaacaaccatttatgagaccagtacaaactactcaagaggaagatggctgtagctgccgatttccagaagaagaagaaggaggatgtgaactgagagtgaagttcagcagaagcgccgacgcccctgcctaccagcagggacagaaccaactgtacaacgagctgaacctgggcagacgggaagagtacgacgtgctggacaagcggagaggcagggaccctgagatgggcggaaagccccagcggagaaagaacccccaggaaggactgtataacgaactccagaaagacaagatggccgaagcctacagcgagatcggcatgaagggcgagcggagaagaggcaagggccacgatggcctgtaccagggcctgagcaccgccaccaaggacacctatgacgccctgcacatgcaggccctgcctccaaga

SEQ ID NO: 27578 - DNA, 1041 bp, synthetic construct
  source 1..1041: mol_type = other DNA
gaggacctgaagaacgtgttcccacctgaggtggccgtgttcgagcctagcgaggccgagatcagccacacccagaaagccaccctcgtgtgcctggctaccggcttctaccccgaccatgtggaactgtcttggtgggtcaacggcaaagaggtgcacagcggcgtgtctaccgacccccagccactgaaagaacagcccgccctgaacgacagccggtactgcctgagcagcagactgagagtgtccgccaccttctggcagaacccccggaaccacttcagatgccaggtgcagttctacggcctgagcgagaacgacgagtggacccaggacagagccaagcccgtgacccagatcgtgtctgccgaagcctggggcagagccgattgcgaccacgtgaagcccaaagagacagagaacaccaagcagcccagcaagagctgccacaagcccaaggccatcgtgcacaccgagaaagtgaacatgatgagcctgaccgtgctgggcctgcggatgctgttcgccaaaaccgtggccgtgaacttcctgctgaccgccaagctgttcttcctcaaacggggcagaaagaaactcctgtatatattcaaacaaccatttatgagaccagtacaaactactcaagaggaagatggctgtagctgccgatttccagaagaagaagaaggaggatgtgaactgagagtgaagttcagcagaagcgccgacgcccctgcctaccagcagggacagaaccaactgtacaacgagctgaacctgggcagacgggaagagtacgacgtgctggacaagcggagaggcagggaccctgagatgggcggaaagccccagcggagaaagaacccccaggaaggactgtataacgaactccagaaagacaagatggccgaagcctacagcgagatcggcatgaagggcgagcggagaagaggcaagggccacgatggcctgtaccagggcctgagcaccgccaccaaggacacctatgacgccctgcacatgcaggccctgcctccaaga

SEQ ID NO: 27579 - DNA, 999 bp, synthetic construct
  source 1..999: mol_type = other DNA
gaggacctgaagaacgtgttcccacctgaggtggccgtgttcgagcctagcgaggccgagatcagccacacccagaaagccaccctcgtgtgcctggctaccggcttctaccccgaccatgtggaactgtcttggtgggtcaacggcaaagaggtgcacagcggcgtgtctaccgacccccagccactgaaagaacagcccgccctgaacgacagccggtactgcctgagcagcagactgagagtgtccgccaccttctggcagaacccccggaaccacttcagatgccaggtgcagttctacggcctgagcgagaacgacgagtggacccaggacagagccaagcccgtgaccatccccgaggacacattcttcccaagccccgagagcagctgcgacgtgaagctggtggaaaagagcttcgagacagacaccaacctgaacttccagaacctgagcgtgatcggcttcagaatcctgctgctgaaagtggccggctttaacctgctgatgaccctgcggctgtggtccagcaaacggggcagaaagaaactcctgtatatattcaaacaaccatttatgagaccagtacaaactactcaagaggaagatggctgtagctgccgatttccagaagaagaagaaggaggatgtgaactgagagtgaagttcagcagaagcgccgacgcccctgcctaccagcagggacagaaccaactgtacaacgagctgaacctgggcagacgggaagagtacgacgtgctggacaagcggagaggcagggaccctgagatgggcggaaagccccagcggagaaagaacccccaggaaggactgtataacgaactccagaaagacaagatggccgaagcctacagcgagatcggcatgaagggcgagcggagaagaggcaagggccacgatggcctgtaccagggcctgagcaccgccaccaaggacacctatgacgccctgcacatgcaggccctgcctccaaga

SEQ ID NO: 27580 - DNA, 969 bp, synthetic construct
  source 1..969: mol_type = other DNA
gaggacctgaagaacgtgttcccacctgaggtggccgtgttcgagcctagcgaggccgagatcagccacacccagaaagccaccctcgtgtgcctggctaccggcttctaccccgaccatgtggaactgtcttggtgggtcaacggcaaagaggtgcacagcggcgtgtctaccgacccccagccactgaaagaacagcccgccctgaacgacagccggtactgcctgagcagcagactgagagtgtccgccaccttctggcagaacccccggaaccacttcagatgccaggtgcagttctacggcctgagcgagaacgacgagtggacccaggacagagccaagcccgtgaccgagagcagctgcgacgtgaagctggtggaaaagagcttcgagacagacaccaacctgaacttccagaacctgagcgtgatcggcttcagaatcctgctgctgaaagtggccggctttaacctgctgatgaccctgcggctgtggtccagcaaacggggcagaaagaaactcctgtatatattcaaacaaccatttatgagaccagtacaaactactcaagaggaagatggctgtagctgccgatttccagaagaagaagaaggaggatgtgaactgagagtgaagttcagcagaagcgccgacgcccctgcctaccagcagggacagaaccaactgtacaacgagctgaacctgggcagacgggaagagtacgacgtgctggacaagcggagaggcagggaccctgagatgggcggaaagccccagcggagaaagaacccccaggaaggactgtataacgaactccagaaagacaagatggccgaagcctacagcgagatcggcatgaagggcgagcggagaagaggcaagggccacgatggcctgtaccagggcctgagcaccgccaccaaggacacctatgacgccctgcacatgcaggccctgcctccaaga

SEQ ID NO: 27581 - DNA, 996 bp, synthetic construct
  source 1..996: mol_type = other DNA
gaggacctgaagaacgtgttcccacctgaggtggccgtgttcgagcctagcgaggccgagatcagccacacccagaaagccaccctcgtgtgcctggctaccggcttctaccccgaccatgtggaactgtcttggtgggtcaacggcaaagaggtgcacagcggcgtgtctaccgacccccagccactgaaagaacagcccgccctgaacgacagccggtactgcctgagcagcagactgagagtgtccgccaccttctggcagaacccccggaaccacttcagatgccaggtgcagttctacggcctgagcgagaacgacgagtggacccaggacagagccaagcccgtgacccccgaggacacattcttcccaagccccgagagcagctgcgacgtgaagctggtggaaaagagcttcgagacagacaccaacctgaacttccagaacctgagcgtgatcggcttcagaatcctgctgctgaaagtggccggctttaacctgctgatgaccctgcggctgtggtccagcaaacggggcagaaagaaactcctgtatatattcaaacaaccatttatgagaccagtacaaactactcaagaggaagatggctgtagctgccgatttccagaagaagaagaaggaggatgtgaactgagagtgaagttcagcagaagcgccgacgcccctgcctaccagcagggacagaaccaactgtacaacgagctgaacctgggcagacgggaagagtacgacgtgctggacaagcggagaggcagggaccctgagatgggcggaaagccccagcggagaaagaacccccaggaaggactgtataacgaactccagaaagacaagatggccgaagcctacagcgagatcggcatgaagggcgagcggagaagaggcaagggccacgatggcctgtaccagggcctgagcaccgccaccaaggacacctatgacgccctgcacatgcaggccctgcctccaaga

SEQ ID NO: 27582 - DNA, 1026 bp, synthetic construct
  source 1..1026: mol_type = other DNA
gaggacctgaagaacgtgttcccacctgaggtggccgtgttcgagcctagcgaggccgagatcagccacacccagaaagccaccctcgtgtgcctggctaccggcttctaccccgaccatgtggaactgtcttggtgggtcaacggcaaagaggtgcacagcggcgtgtctaccgacccccagccactgaaagaacagcccgccctgaacgacagccggtactgcctgagcagcagactgagagtgtccgccaccttctggcagaacccccggaaccacttcagatgccaggtgcagttctacggcctgagcgagaacgacgagtggacccaggacagagccaagcccgtgaccttcccacccatcaagaccgatgtgattacaatggaccccaaggacaactgctccaaggacgccaacgataccctgctgctccagctgaccaacaccagcgcctactacatgtacttgttgctgctgctgaagtccgtggtgtacttcgccatcatcacatgctgcctgctgcggagaaccgccttctgctgcaacggcgagaagtctaaacggggcagaaagaaactcctgtatatattcaaacaaccatttatgagaccagtacaaactactcaagaggaagatggctgtagctgccgatttccagaagaagaagaaggaggatgtgaactgagagtgaagttcagcagaagcgccgacgcccctgcctaccagcagggacagaaccaactgtacaacgagctgaacctgggcagacgggaagagtacgacgtgctggacaagcggagaggcagggaccctgagatgggcggaaagccccagcggagaaagaacccccaggaaggactgtataacgaactccagaaagacaagatggccgaagcctacagcgagatcggcatgaagggcgagcggagaagaggcaagggccacgatggcctgtaccagggcctgagcaccgccaccaaggacacctatgacgccctgcacatgcaggccctgcctccaaga

SEQ ID NO: 27583 - DNA, 1020 bp, synthetic construct
  source 1..1020: mol_type = other DNA
gaggacctgaagaacgtgttcccacctgaggtggccgtgttcgagcctagcgaggccgagatcagccacacccagaaagccaccctcgtgtgcctggctaccggcttctaccccgaccatgtggaactgtcttggtgggtcaacggcaaagaggtgcacagcggcgtgtctaccgacccccagccactgaaagaacagcccgccctgaacgacagccggtactgcctgagcagcagactgagagtgtccgccaccttctggcagaacccccggaaccacttcagatgccaggtgcagttctacggcctgagcgagaacgacgagtggacccaggacagagccaagcccgtgacccccatcaagaccgatgtgattacaatggaccccaaggacaactgctccaaggacgccaacgataccctgctgctccagctgaccaacaccagcgcctactacatgtacttgttgctgctgctgaagtccgtggtgtacttcgccatcatcacatgctgcctgctgcggagaaccgccttctgctgcaacggcgagaagtctaaacggggcagaaagaaactcctgtatatattcaaacaaccatttatgagaccagtacaaactactcaagaggaagatggctgtagctgccgatttccagaagaagaagaaggaggatgtgaactgagagtgaagttcagcagaagcgccgacgcccctgcctaccagcagggacagaaccaactgtacaacgagctgaacctgggcagacgggaagagtacgacgtgctggacaagcggagaggcagggaccctgagatgggcggaaagccccagcggagaaagaacccccaggaaggactgtataacgaactccagaaagacaagatggccgaagcctacagcgagatcggcatgaagggcgagcggagaagaggcaagggccacgatggcctgtaccagggcctgagcaccgccaccaaggacacctatgacgccctgcacatgcaggccctgcctccaaga

SEQ ID NO: 27584 - DNA, 996 bp, synthetic construct
  source 1..996: mol_type = other DNA
gaggacctgaagaacgtgttcccacctgaggtggccgtgttcgagcctagcgaggccgagatcagccacacccagaaagccaccctcgtgtgcctggctaccggcttctaccccgaccatgtggaactgtcttggtgggtcaacggcaaagaggtgcacagcggcgtgtctaccgacccccagccactgaaagaacagcccgccctgaacgacagccggtactgcctgagcagcagactgagagtgtccgccaccttctggcagaacccccggaaccacttcagatgccaggtgcagttctacggcctgagcgagaacgacgagtggacccaggacagagccaagcccgtgaccatggaccccaaggacaactgctccaaggacgccaacgataccctgctgctccagctgaccaacaccagcgcctactacatgtacttgttgctgctgctgaagtccgtggtgtacttcgccatcatcacatgctgcctgctgcggagaaccgccttctgctgcaacggcgagaagtctaaacggggcagaaagaaactcctgtatatattcaaacaaccatttatgagaccagtacaaactactcaagaggaagatggctgtagctgccgatttccagaagaagaagaaggaggatgtgaactgagagtgaagttcagcagaagcgccgacgcccctgcctaccagcagggacagaaccaactgtacaacgagctgaacctgggcagacgggaagagtacgacgtgctggacaagcggagaggcagggaccctgagatgggcggaaagccccagcggagaaagaacccccaggaaggactgtataacgaactccagaaagacaagatggccgaagcctacagcgagatcggcatgaagggcgagcggagaagaggcaagggccacgatggcctgtaccagggcctgagcaccgccaccaaggacacctatgacgccctgcacatgcaggccctgcctccaaga

SEQ ID NO: 27585 - DNA, 1020 bp, synthetic construct; identical to SEQ ID NO: 27583
  source 1..1020: mol_type = other DNA

SEQ ID NO: 27586 - DNA, 978 bp, synthetic construct
  source 1..978: mol_type = other DNA
gaggacctgaagaacgtgttcccacctgaggtggccgtgttcgagcctagcgaggccgagatcagccacacccagaaagccaccctcgtgtgcctggctaccggcttctaccccgaccatgtggaactgtcttggtgggtcaacggcaaagaggtgcacagcggcgtgtctaccgacccccagccactgaaagaacagcccgccctgaacgacagccggtactgcctgagcagcagactgagagtgtccgccaccttctggcagaacccccggaaccacttcagatgccaggtgcagttctacggcctgagcgagaacgacgagtggacccaggacagagccaagcccgtgacctgctccaaggacgccaacgataccctgctgctccagctgaccaacaccagcgcctactacatgtacttgttgctgctgctgaagtccgtggtgtacttcgccatcatcacatgctgcctgctgcggagaaccgccttctgctgcaacggcgagaagtctaaacggggcagaaagaaactcctgtatatattcaaacaaccatttatgagaccagtacaaactactcaagaggaagatggctgtagctgccgatttccagaagaagaagaaggaggatgtgaactgagagtgaagttcagcagaagcgccgacgcccctgcctaccagcagggacagaaccaactgtacaacgagctgaacctgggcagacgggaagagtacgacgtgctggacaagcggagaggcagggaccctgagatgggcggaaagccccagcggagaaagaacccccaggaaggactgtataacgaactccagaaagacaagatggccgaagcctacagcgagatcggcatgaagggcgagcggagaagaggcaagggccacgatggcctgtaccagggcctgagcaccgccaccaaggacacctatgacgccctgcacatgcaggccctgcctccaaga

SEQ ID NO: 27587 - DNA, 1023 bp, synthetic construct
  source 1..1023: mol_type = other DNA
gaggacctgaagaacgtgttcccacctgaggtggccgtgttcgagcctagcgaggccgagatcagccacacccagaaagccaccctcgtgtgcctggctaccggcttctaccccgaccatgtggaactgtcttggtgggtcaacggcaaagaggtgcacagcggcgtgtctaccgacccccagccactgaaagaacagcccgccctgaacgacagccggtactgcctgagcagcagactgagagtgtccgccaccttctggcagaacccccggaaccacttcagatgccaggtgcagttctacggcctgagcgagaacgacgagtggacccaggacagagccaagcccgtgaccgaagtgaaaaccgactccaccgaccacgtgaagcccaaagagacagagaacaccaagcagcccagcaagagctgccacaagcccaaggccatcgtgcacaccgagaaagtgaacatgatgagcctgaccgtgctgggcctgcggatgctgttcgccaaaaccgtggccgtgaacttcctgctgaccgccaagctgttcttcctcaaacggggcagaaagaaactcctgtatatattcaaacaaccatttatgagaccagtacaaactactcaagaggaagatggctgtagctgccgatttccagaagaagaagaaggaggatgtgaactgagagtgaagttcagcagaagcgccgacgcccctgcctaccagcagggacagaaccaactgtacaacgagctgaacctgggcagacgggaagagtacgacgtgctggacaagcggagaggcagggaccctgagatgggcggaaagccccagcggagaaagaacccccaggaaggactgtataacgaactccagaaagacaagatggccgaagcctacagcgagatcggcatgaagggcgagcggagaagaggcaagggccacgatggcctgtaccagggcctgagcaccgccaccaaggacacctatgacgccctgcacatgcaggccctgcctccaaga

SEQ ID NO: 27588 - DNA, 1002 bp, synthetic construct
  source 1..1002: mol_type = other DNA
gaggacctgaagaacgtgttcccacctgaggtggccgtgttcgagcctagcgaggccgagatcagccacacccagaaagccaccctcgtgtgcctggctaccggcttctaccccgaccatgtggaactgtcttggtgggtcaacggcaaagaggtgcacagcggcgtgtctaccgacccccagccactgaaagaacagcccgccctgaacgacagccggtactgcctgagcagcagactgagagtgtccgccaccttctggcagaacccccggaaccacttcagatgccaggtgcagttctacggcctgagcgagaacgacgagtggacccaggacagagccaagcccgtgaccgaccacgtgaagcccaaagagacagagaacaccaagcagcccagcaagagctgccacaagcccaaggccatcgtgcacaccgagaaagtgaacatgatgagcctgaccgtgctgggcctgcggatgctgttcgccaaaaccgtggccgtgaacttcctgctgaccgccaagctgttcttcctcaaacggggcagaaagaaactcctgtatatattcaaacaaccatttatgagaccagtacaaactactcaagaggaagatggctgtagctgccgatttccagaagaagaagaaggaggatgtgaactgagagtgaagttcagcagaagcgccgacgcccctgcctaccagcagggacagaaccaactgtacaacgagctgaacctgggcagacgggaagagtacgacgtgctggacaagcggagaggcagggaccctgagatgggcggaaagccccagcggagaaagaacccccaggaaggactgtataacgaactccagaaagacaagatggccgaagcctacagcgagatcggcatgaagggcgagcggagaagaggcaagggccacgatggcctgtaccagggcctgagcaccgccaccaaggacacctatgacgccctgcacatgcaggccctgcctccaaga

SEQ ID NO: 27589 - DNA, 1023 bp, synthetic construct; identical to SEQ ID NO: 27549
  source 1..1023: mol_type = other DNA

SEQ ID NO: 27590 - DNA, 993 bp, synthetic construct; identical to SEQ ID NO: 27550
  source 1..993: mol_type = other DNA

SEQ ID NO: 27591 - DNA, 1020 bp, synthetic construct; identical to SEQ ID NO: 27551
  source 1..1020: mol_type = other DNA

SEQ ID NO: 27592 - DNA, 1050 bp, synthetic construct; identical to SEQ ID NO: 27552
  source 1..1050: mol_type = other DNA

SEQ ID NO: 27593 - DNA, 1044 bp, synthetic construct; identical to SEQ ID NO: 27553
  source 1..1044: mol_type = other DNA

SEQ ID NO: 27594 - DNA, 1020 bp, synthetic construct; identical to SEQ ID NO: 27554
  source 1..1020: mol_type = other DNA

SEQ ID NO: 27595 - DNA, 1044 bp, synthetic construct; identical to SEQ ID NO: 27553
  source 1..1044: mol_type = other DNA

SEQ ID NO: 27596 - DNA, 1002 bp, synthetic construct; identical to SEQ ID NO: 27556
  source 1..1002: mol_type = other DNA

SEQ ID NO: 27597 - DNA, 1047 bp, synthetic construct; identical to SEQ ID NO: 27557
  source 1..1047: mol_type = other DNA

SEQ ID NO: 27598 - DNA, 1026 bp, synthetic construct; identical to SEQ ID NO: 27558
  source 1..1026: mol_type = other DNA

SEQ ID NO: 27599 - DNA, 975 bp, synthetic construct
  source 1..975: mol_type = other DNA
cctgaggtggccgtgttcgagcctagcgaggccgagatcagccacacccagaaagccaccctcgtgtgcctggctaccggcttctaccccgaccatgtggaactgtcttggtgggtcaacggcaaagaggtgcacagcggcgtgtctaccgacccccagccactgaaagaacagcccgccctgaacgacagccggtactgcctgagcagcagactgagagtgtccgccaccttctggcagaacccccggaaccacttcagatgccaggtgcagttctacggcctgagcgagaacgacgagtggacccaggacagagccaagcccgtgaccatccccgaggacacattcttcccaagccccgagagcagctgcgacgtgaagctggtggaaaagagcttcgagacagacaccaacctgaacttccagaacctgagcgtgatcggcttcagaatcctgctgctgaaagtggccggctttaacctgctgatgaccctgcggctgtggtccagcaaacggggcagaaagaaactcctgtatatattcaaacaaccatttatgagaccagtacaaactactcaagaggaagatggctgtagctgccgatttccagaagaagaagaaggaggatgtgaactgagagtgaagttcagcagaagcgccgacgcccctgcctaccagcagggacagaaccaactgtacaacgagctgaacctgggcagacgggaagagtacgacgtgctggacaagcggagaggcagggaccctgagatgggcggaaagccccagcggagaaagaacccccaggaaggactgtataacgaactccagaaagacaagatggccgaagcctacagcgagatcggcatgaagggcgagcggagaagaggcaagggccacgatggcctgtaccagggcctgagcaccgccaccaaggacacctatgacgccctgcacatgcaggccctgcctccaaga

SEQ ID NO: 27600 - DNA, 945 bp, synthetic construct
  source 1..945: mol_type = other DNA
cctgaggtggccgtgttcgagcctagcgaggccgagatcagccacacccagaaagccaccctcgtgtgcctggctaccggcttctaccccgaccatgtggaactgtcttggtgggtcaacggcaaagaggtgcacagcggcgtgtctaccgacccccagccactgaaagaacagcccgccctgaacgacagccggtactgcctgagcagcagactgagagtgtccgccaccttctggcagaacccccggaaccacttcagatgccaggtgcagttctacggcctgagcgagaacgacgagtggacccaggacagagccaagcccgtgaccgagagcagctgcgacgtgaagctggtggaaaagagcttcgagacagacaccaacctgaacttccagaacctgagcgtgatcggcttcagaatcctgctgctgaaagtggccggctttaacctgctgatgaccctgcggctgtggtccagcaaacggggcagaaagaaactcctgtatatattcaaacaaccatttatgagaccagtacaaactactcaagaggaagatggctgtagctgccgatttccagaagaagaagaaggaggatgtgaactgagagtgaagttcagcagaagcgccgacgcccctgcctaccagcagggacagaaccaactgtacaacgagctgaacctgggcagacgggaagagtacgacgtgctggacaagcggagaggcagggaccctgagatgggcggaaagccccagcggagaaagaacccccaggaaggactgtataacgaactccagaaagacaagatggccgaagcctacagcgagatcggcatgaagggcgagcggagaagaggcaagggccacgatggcctgtaccagggcctgagcaccgccaccaaggacacctatgacgccctgcacatgcaggccctgcctccaaga

SEQ ID NO: 27601 - DNA, 972 bp, synthetic construct
  source 1..972: mol_type = other DNA
cctgaggtggccgtgttcgagcctagcgaggccgagatcagccacacccagaaagccaccctcgtgtgcctggctaccggcttctaccccgaccatgtggaactgtcttggtgggtcaacggcaaagaggtgcacagcggcgtgtctaccgacccccagccactgaaagaacagcccgccctgaacgacagccggtactgcctgagcagcagactgagagtgtccgccaccttctggcagaacccccggaaccacttcagatgccaggtgcagttctacggcctgagcgagaacgacgagtggacccaggacagagccaagcccgtgacccccgaggacacattcttcccaagccccgagagcagctgcgacgtgaagctggtggaaaagagcttcgagacagacaccaacctgaacttccagaacctgagcgtgatcggcttcagaatcctgctgctgaaagtggccggctttaacctgctgatgaccctgcggctgtggtccagcaaacggggcagaaagaaactcctgtatatattcaaacaaccatttatgagaccagtacaaactactcaagaggaagatggctgtagctgccgatttccagaagaagaagaaggaggatgtgaactgagagtgaagttcagcagaagcgccgacgcccctgcctaccagcagggacagaaccaactgtacaacgagctgaacctgggcagacgggaagagtacgacgtgctggacaagcggagaggcagggaccctgagatgggcggaaagccccagcggagaaagaacccccaggaaggactgtataacgaactccagaaagacaagatggccgaagcctacagcgagatcggcatgaagggcgagcggagaagaggcaagggccacgatggcctgtaccagggcctgagcaccgccaccaaggacacctatgacgccctgcacatgcaggccctgcctccaaga

SEQ ID NO: 27602 - DNA, 1002 bp, synthetic construct
  source 1..1002: mol_type = other DNA
cctgaggtggccgtgttcgagcctagcgaggccgagatcagccacacccagaaagccaccctcgtgtgcctggctaccggcttctaccccgaccatgtggaactgtcttggtgggtcaacggcaaagaggtgcacagcggcgtgtctaccgacccccagccactgaaagaacagcccgccctgaacgacagccggtactgcctgagcagcagactgagagtgtccgccaccttctggcagaacccccggaaccacttcagatgccaggtgcagttctacggcctgagcgagaacgacgagtggacccaggacagagccaagcccgtgaccttcccacccatcaagaccgatgtgattacaatggaccccaaggacaactgctccaaggacgccaacgataccctgctgctccagctgaccaacaccagcgcctactacatgtacttgttgctgctgctgaagtccgtggtgtacttcgccatcatcacatgctgcctgctgcggagaaccgccttctgctgcaacggcgagaagtctaaacggggcagaaagaaactcctgtatatattcaaacaaccatttatgagaccagtacaaactactcaagaggaagatggctgtagctgccgatttccagaagaagaagaaggaggatgtgaactgagagtgaagttcagcagaagcgccgacgcccctgcctaccagcagggacagaaccaactgtacaacgagctgaacctgggcagacgggaagagtacgacgtgctggacaagcggagaggcagggaccctgagatgggcggaaagccccagcggagaaagaacccccaggaaggactgtataacgaactccagaaagacaagatggccgaagcctacagcgagatcggcatgaagggcgagcggagaagaggcaagggccacgatggcctgtaccagggcctgagcaccgccaccaaggacacctatgacgccctgcacatgcaggccctgcctccaaga

SEQ ID NO: 27603 - DNA, 996 bp, synthetic construct
  source 1..996: mol_type = other DNA
cctgaggtggccgtgttcgagcctagcgaggccgagatcagccacacccagaaagccaccctcgtgtgcctggctaccggcttctaccccgaccatgtggaactgtcttggtgggtcaacggcaaagaggtgcacagcggcgtgtctaccgacccccagccactgaaagaacagcccgccctgaacgacagccggtactgcctgagcagcagactgagagtgtccgccaccttctggcagaacccccggaaccacttcagatgccaggtgcagttctacggcctgagcgagaacgacgagtggacccaggacagagccaagcccgtgacccccatcaagaccgatgtgattacaatggaccccaaggacaactgctccaaggacgccaacgataccctgctgctccagctgaccaacaccagcgcctactacatgtacttgttgctgctgctgaagtccgtggtgtacttcgccatcatcacatgctgcctgctgcggagaaccgccttctgctgcaacggcgagaagtctaaacggggcagaaagaaactcctgtatatattcaaacaaccatttatgagaccagtacaaactactcaagaggaagatggctgtagctgccgatttccagaagaagaagaaggaggatgtgaactgagagtgaagttcagcagaagcgccgacgcccctgcctaccagcagggacagaaccaactgtacaacgagctgaacctgggcagacgggaagagtacgacgtgctggacaagcggagaggcagggaccctgagatgggcggaaagccccagcggagaaagaacccccaggaaggactgtataacgaactccagaaagacaagatggccgaagcctacagcgagatcggcatgaagggcgagcggagaagaggcaagggccacgatggcctgtaccagggcctgagcaccgccaccaaggacacctatgacgccctgcacatgcaggccctgcctccaaga

SEQ ID NO: 27604 - DNA, 972 bp, synthetic construct
  source 1..972: mol_type = other DNA
cctgaggtggccgtgttcgagcctagcgaggccgagatcagccacacccagaaagccaccctcgtgtgcctggctaccggcttctaccccgaccatgtggaactgtcttggtgggtcaacggcaaagaggtgcacagcggcgtgtctaccgacccccagccactgaaagaacagcccgccctgaacgacagccggtactgcctgagcagcagactgagagtgtccgccaccttctggcagaacccccggaaccacttcagatgccaggtgcagttctacggcctgagcgagaacgacgagtggacccaggacagagccaagcccgtgaccatggaccccaaggacaactgctccaaggacgccaacgataccctgctgctccagctgaccaacaccagcgcctactacatgtacttgttgctgctgctgaagtccgtggtgtacttcgccatcatcacatgctgcctgctgcggagaaccgccttctgctgcaacggcgagaagtctaaacggggcagaaagaaactcctgtatatattcaaacaaccatttatgagaccagtacaaactactcaagaggaagatggctgtagctgccgatttccagaagaagaagaaggaggatgtgaactgagagtgaagttcagcagaagcgccgacgcccctgcctaccagcagggacagaaccaactgtacaacgagctgaacctgggcagacgggaagagtacgacgtgctggacaagcggagaggcagggaccctgagatgggcggaaagccccagcggagaaagaacccccaggaaggactgtataacgaactccagaaagacaagatggccgaagcctacagcgagatcggcatgaagggcgagcggagaagaggcaagggccacgatggcctgtaccagggcctgagcaccgccaccaaggacacctatgacgccctgcacatgcaggccctgcctccaaga

SEQ ID NO: 27605 - DNA, 996 bp, synthetic construct; identical to SEQ ID NO: 27603
  source 1..996: mol_type = other DNA

SEQ ID NO: 27606 - DNA, 954 bp, synthetic construct
  source 1..954: mol_type = other DNA
cctgaggtggccgtgttcgagcctagcgaggccgagatcagccacacccagaaagccaccctcgtgtgcctggctaccggcttctaccccgaccatgtggaactgtcttggtgggtcaacggcaaagaggtgcacagcggcgtgtctaccgacccccagccactgaaagaacagcccgccctgaacgacagccggtactgcctgagcagcagactgagagtgtccgccaccttctggcagaacccccggaaccacttcagatgccaggtgcagttctacggcctgagcgagaacgacgagtggacccaggacagagccaagcccgtgacctgctccaaggacgccaacgataccctgctgctccagctgaccaacaccagcgcctactacatgtacttgttgctgctgctgaagtccgtggtgtacttcgccatcatcacatgctgcctgctgcggagaaccgccttctgctgcaacggcgagaagtctaaacggggcagaaagaaactcctgtatatattcaaacaaccatttatgagaccagtacaaactactcaagaggaagatggctgtagctgccgatttccagaagaagaagaaggaggatgtgaactgagagtgaagttcagcagaagcgccgacgcccctgcctaccagcagggacagaaccaactgtacaacgagctgaacctgggcagacgggaagagtacgacgtgctggacaagcggagaggcagggaccctgagatgggcggaaagccccagcggagaaagaacccccaggaaggactgtataacgaactccagaaagacaagatggccgaagcctacagcgagatcggcatgaagggcgagcggagaagaggcaagggccacgatggcctgtaccagggcctgagcaccgccaccaaggacacctatgacgccctgcacatgcaggccctgcctccaaga

SEQ ID NO: 27607 - DNA, 999 bp, synthetic construct
  source 1..999: mol_type = other DNA
cctgaggtggccgtgttcgagcctagcgaggccgagatcagccacacccagaaagccaccctcgtgtgcctggctaccggcttctaccccgaccatgtggaactgtcttggtgggtcaacggcaaagaggtgcacagcggcgtgtctaccgacccccagccactgaaagaacagcccgccctgaacgacagccggtactgcctgagcagcagactgagagtgtccgccaccttctggcagaacccccggaaccacttcagatgccaggtgcagttctacggcctgagcgagaacgacgagtggacccaggacagagccaagcccgtgaccgaagtgaaaaccgactccaccgaccacgtgaagcccaaagagacagagaacaccaagcagcccagcaagagctgccacaagcccaaggccatcgtgcacaccgagaaagtgaacatgatgagcctgaccgtgctgggcctgcggatgctgttcgccaaaaccgtggccgtgaacttcctgctgaccgccaagctgttcttcctcaaacggggcagaaagaaactcctgtatatattcaaacaaccatttatgagaccagtacaaactactcaagaggaagatggctgtagctgccgatttccagaagaagaagaaggaggatgtgaactgagagtgaagttcagcagaagcgccgacgcccctgcctaccagcagggacagaaccaactgtacaacgagctgaacctgggcagacgggaagagtacgacgtgctggacaagcggagaggcagggaccctgagatgggcggaaagccccagcggagaaagaacccccaggaaggactgtataacgaactccagaaagacaagatggccgaagcctacagcgagatcggcatgaagggcgagcggagaagaggcaagggccacgatggcctgtaccagggcctgagcaccgccaccaaggacacctatgacgccctgcacatgcaggccctgcctccaaga

SEQ ID NO: 27608 - DNA, 978 bp, synthetic construct
  source 1..978: mol_type = other DNA
cctgaggtggccgtgttcgagcctagcgaggccgagatcagccacacccagaaagccaccctcgtgtgcctggctaccggcttctaccccgaccatgtggaactgtcttggtgggtcaacggcaaagaggtgcacagcggcgtgtctaccgacccccagccactgaaagaacagcccgccctgaacgacagccggtactgcctgagcagcagactgagagtgtccgccaccttctggcagaacccccggaaccacttcagatgccaggtgcagttctacggcctgagcgagaacgacgagtggacccaggacagagccaagcccgtgaccgaccacgtgaagcccaaagagacagagaacaccaagcagcccagcaagagctgccacaagcccaaggccatcgtgcacaccgagaaagtgaacatgatgagcctgaccgtgctgggcctgcggatgctgttcgccaaaaccgtggccgtgaacttcctgctgaccgccaagctgttcttcctcaaacggggcagaaagaaactcctgtatatattcaaacaaccatttatgagaccagtacaaactactcaagaggaagatggctgtagctgccgatttccagaagaagaagaaggaggatgtgaactgagagtgaagttcagcagaagcgccgacgcccctgcctaccagcagggacagaaccaactgtacaacgagctgaacctgggcagacgggaagagtacgacgtgctggacaagcggagaggcagggaccctgagatgggcggaaagccccagcggagaaagaacccccaggaaggactgtataacgaactccagaaagacaagatggccgaagcctacagcgagatcggcatgaagggcgagcggagaagaggcaagggccacgatggcctgtaccagggcctgagcaccgccaccaaggacacctatgacgccctgcacatgcaggccctgcctccaaga

SEQ ID NO: 27609 - DNA, 957 bp, synthetic construct
  source 1..957: mol_type = other DNA
gacaagcagctggacgccgacgtgtcccccaagcctaccatcttcctgccctctatcgccgagacaaagctccagaaggccggcacctacctgtgcctgctggaaaagttcttcccagatgtgattaagatccactggcaggaaaagaagtccaacaccatcctgggcagccaggaaggcaacaccatgaagaccaacgacacctacatgaagttcagctggctgaccgtgcccgagaagtccctggacaaagaacacagatgcatcgtgcggcacgaaaacaacaagaacggcgtggaccaggaaatcatcatccccgaggacacattcttcccaagccccgagagcagctgcgacgtgaagctggtggaaaagagcttcgagacagacaccaacctgaacttccagaacctgagcgtgatcggcttcagaatcctgctgctgaaagtggccggctttaacctgctgatgaccctgcggctgtggtccagcaaacggggcagaaagaaactcctgtatatattcaaacaaccatttatgagaccagtacaaactactcaagaggaagatggctgtagctgccgatttccagaagaagaagaaggaggatgtgaactgagagtgaagttcagcagaagcgccgacgcccctgcctaccagcagggacagaaccaactgtacaacgagctgaacctgggcagacgggaagagtacgacgtgctggacaagcggagaggcagggaccctgagatgggcggaaagccccagcggagaaagaacccccaggaaggactgtataacgaactccagaaagacaagatggccgaagcctacagcgagatcggcatgaagggcgagcggagaagaggcaagggccacgatggcctgtaccagggcctgagcaccgccaccaaggacacctatgacgccctgcacatgcaggccctgcctccaaga

SEQ ID NO: 27610 - DNA, 927 bp, synthetic construct
  source 1..927: mol_type = other DNA
gacaagcagctggacgccgacgtgtcccccaagcctaccatcttcctgccctctatcgccgagacaaagctccagaaggccggcacctacctgtgcctgctggaaaagttcttcccagatgtgattaagatccactggcaggaaaagaagtccaacaccatcctgggcagccaggaaggcaacaccatgaagaccaacgacacctacatgaagttcagctggctgaccgtgcccgagaagtccctggacaaagaacacagatgcatcgtgcggcacgaaaacaacaagaacggcgtggaccaggaaatcatcgagagcagctgcgacgtgaagctggtggaaaagagcttcgagacagacaccaacctgaacttccagaacctgagcgtgatcggcttcagaatcctgctgctgaaagtggccggctttaacctgctgatgaccctgcggctgtggtccagcaaacggggcagaaagaaactcctgtatatattcaaacaaccatttatgagaccagtacaaactactcaagaggaagatggctgtagctgccgatttccagaagaagaagaaggaggatgtgaactgagagtgaagttcagcagaagcgccgacgcccctgcctaccagcagggacagaaccaactgtacaacgagctgaacctgggcagacgggaagagtacgacgtgctggacaagcggagaggcagggaccctgagatgggcggaaagccccagcggagaaagaacccccaggaaggactgtataacgaactccagaaagacaagatggccgaagcctacagcgagatcggcatgaagggcgagcggagaagaggcaagggccacgatggcctgtaccagggcctgagcaccgccaccaaggacacctatgacgccctgcacatgcaggccctgcctccaaga

SEQ ID NO: 27611 - DNA, 954 bp, synthetic construct
  source 1..954: mol_type = other DNA
gacaagcagctggacgccgacgtgtcccccaagcctaccatcttcctgccctctatcgccgagacaaagctccagaaggccggcacctacctgtgcctgctggaaaagttcttcccagatgtgattaagatccactggcaggaaaagaagtccaacaccatcctgggcagccaggaaggcaacaccatgaagaccaacgacacctacatgaagttcagctggctgaccgtgcccgagaagtccctggacaaagaacacagatgcatcgtgcggcacgaaaacaacaagaacggcgtggaccaggaaatcatccccgaggacacattcttcccaagccccgagagcagctgcgacgtgaagctggtggaaaagagcttcgagacagacaccaacctgaacttccagaacctgagcgtgatcggcttcagaatcctgctgctgaaagtggccggctttaacctgctgatgaccctgcggctgtggtccagcaaacggggcagaaagaaactcctgtatatattcaaacaaccatttatgagaccagtacaaactactcaagaggaagatggctgtagctgccgatttccagaagaagaagaaggaggatgtgaactgagagtgaagttcagcagaagcgccgacgcccctgcctaccagcagggacagaaccaactgtacaacgagctgaacctgggcagacgggaagagtacgacgtgctggacaagcggagaggcagggaccctgagatgggcggaaagccccagcggagaaagaacccccaggaaggactgtataacgaactccagaaagacaagatggccgaagcctacagcgagatcggcatgaagggcgagcggagaagaggcaagggccacgatggcctgtaccagggcctgagcaccgccaccaaggacacctatgacgccctgcacatgcaggccctgcctccaaga

SEQ ID NO: 27612 - DNA, 936 bp, synthetic construct
  source 1..936: mol_type = other DNA
gacaagcagctggacgccgacgtgtcccccaagcctaccatcttcctgccctctatcgccgagacaaagctccagaaggccggcacctacctgtgcctgctggaaaagttcttcccagatgtgattaagatccactggcaggaaaagaagtccaacaccatcctgggcagccaggaaggcaacaccatgaagaccaacgacacctacatgaagttcagctggctgaccgtgcccgagaagtccctggacaaagaacacagatgcatcgtgcggcacgaaaacaacaagaacggcgtggaccaggaaatcatcggcagagccgattgcggctttaccagcgagagctaccagcagggcgtgctgagcgccaccatcctgtacgagatcctgctgggcaaggccaccctgtacgccgtgctggtgtctgccctggtgctgatggctatggtcaagcggaaggacagccggggaaaacggggcagaaagaaactcctgtatatattcaaacaaccatttatgagaccagtacaaactactcaagaggaagatggctgtagctgccgatttccagaagaagaagaaggaggatgtgaactgagagtgaagttcagcagaagcgccgacgcccctgcctaccagcagggacagaaccaactgtacaacgagctgaacctgggcagacgggaagagtacgacgtgctggacaagcggagaggcagggaccctgagatgggcggaaagccccagcggagaaagaacccccaggaaggactgtataacgaactccagaaagacaagatggccgaagcctacagcgagatcggcatgaagggcgagcggagaagaggcaagggccacgatggcctgtaccagggcctgagcaccgccaccaaggacacctatgacgccctgcacatgcaggccctgcctccaaga

SEQ ID NO: 27613 - DNA, 930 bp, synthetic construct
  source 1..930: mol_type = other DNA
gacaagcagctggacgccgacgtgtcccccaagcctaccatcttcctgccctctatcgccgagacaaagctccagaaggccggcacctacctgtgcctgctggaaaagttcttcccagatgtgattaagatccactggcaggaaaagaagtccaacaccatcctgggcagccaggaaggcaacaccatgaagaccaacgacacctacatgaagttcagctggctgaccgtgcccgagaagtccctggacaaagaacacagatgcatcgtgcggcacgaaaacaacaagaacggcgtggaccaggaaatcatcgccgattgcggctttaccagcgagagctaccagcagggcgtgctgagcgccaccatcctgtacgagatcctgctgggcaaggccaccctgtacgccgtgctggtgtctgccctggtgctgatggctatggtcaagcggaaggacagccggggaaaacggggcagaaagaaactcctgtatatattcaaacaaccatttatgagaccagtacaaactactcaagaggaagatggctgtagctgccgatttccagaagaagaagaaggaggatgtgaactgagagtgaagttcagcagaagcgccgacgcccctgcctaccagcagggacagaaccaactgtacaacgagctgaacctgggcagacgggaagagtacgacgtgctggacaagcggagaggcagggaccctgagatgggcggaaagccccagcggagaaagaacccccaggaaggactgtataacgaactccagaaagacaagatggccgaagcctacagcgagatcggcatgaagggcgagcggagaagaggcaagggccacgatggcctgtaccagggcctgagcaccgccaccaaggacacctatgacgccctgcacatgcaggccctgcctccaaga

SEQ ID NO: 27614 - DNA, 960 bp, synthetic construct
  source 1..960: mol_type = other DNA
gacaagcagctggacgccgacgtgtcccccaagcctaccatcttcctgccctctatcgccgagacaaagctccagaaggccggcacctacctgtgcctgctggaaaagttcttcccagatgtgattaagatccactggcaggaaaagaagtccaacaccatcctgggcagccaggaaggcaacaccatgaagaccaacgacacctacatgaagttcagctggctgaccgtgcccgagaagtccctggacaaagaacacagatgcatcgtgcggcacgaaaacaacaagaacggcgtggaccaggaaatcatccagatcgtgtctgccgaagcctggggcagagccgattgcggctttaccagcgagagctaccagcagggcgtgctgagcgccaccatcctgtacgagatcctgctgggcaaggccaccctgtacgccgtgctggtgtctgccctggtgctgatggctatggtcaagcggaaggacagccggggaaaacggggcagaaagaaactcctgtatatattcaaacaaccatttatgagaccagtacaaactactcaagaggaagatggctgtagctgccgatttccagaagaagaagaaggaggatgtgaactgagagtgaagttcagcagaagcgccgacgcccctgcctaccagcagggacagaaccaactgtacaacgagctgaacctgggcagacgggaagagtacgacgtgctggacaagcggagaggcagggaccctgagatgggcggaaagccccagcggagaaagaacccccaggaaggactgtataacgaactccagaaagacaagatggccgaagcctacagcgagatcggcatgaagggcgagcggagaagaggcaagggccacgatggcctgtaccagggcctgagcaccgccaccaaggacacctatgacgccctgcacatgcaggccctgcctccaaga

SEQ ID NO: 27615 - DNA, 981 bp, synthetic construct
  source 1..981: mol_type = other DNA
gacaagcagctggacgccgacgtgtcccccaagcctaccatcttcctgccctctatcgccgagacaaagctccagaaggccggcacctacctgtgcctgctggaaaagttcttcccagatgtgattaagatccactggcaggaaaagaagtccaacaccatcctgggcagccaggaaggcaacaccatgaagaccaacgacacctacatgaagttcagctggctgaccgtgcccgagaagtccctggacaaagaacacagatgcatcgtgcggcacgaaaacaacaagaacggcgtggaccaggaaatcatcgaagtgaaaaccgactccaccgaccacgtgaagcccaaagagacagagaacaccaagcagcccagcaagagctgccacaagcccaaggccatcgtgcacaccgagaaagtgaacatgatgagcctgaccgtgctgggcctgcggatgctgttcgccaaaaccgtggccgtgaacttcctgctgaccgccaagctgttcttcctcaaacggggcagaaagaaactcctgtatatattcaaacaaccatttatgagaccagtacaaactactcaagaggaagatggctgtagctgccgatttccagaagaagaagaaggaggatgtgaactgagagtgaagttcagcagaagcgccgacgcccctgcctaccagcagggacagaaccaactgtacaacgagctgaacctgggcagacgggaagagtacgacgtgctggacaagcggagaggcagggaccctgagatgggcggaaagccccagcggagaaagaacccccaggaaggactgtataacgaactccagaaagacaagatggccgaagcctacagcgagatcggcatgaagggcgagcggagaagaggcaagggccacgatggcctgtaccagggcctgagcaccgccaccaaggacacctatgacgccctgcacatgcaggccctgcctccaaga

SEQ ID NO: 27616 - DNA, 960 bp, synthetic construct
  source 1..960: mol_type = other DNA
gacaagcagctggacgccgacgtgtcccccaagcctaccatcttcctgccctctatcgccgagacaaagctccagaaggccggcacctacctgtgcctgctggaaaagttcttcccagatgtgattaagatccactggcaggaaaagaagtccaacaccatcctgggcagccaggaaggcaacaccatgaagaccaacgacacctacatgaagttcagctggctgaccgtgcccgagaagtccctggacaaagaacacagatgcatcgtgcggcacgaaaacaacaagaacggcgtggaccaggaaatcatcgaccacgtgaagcccaaagagacagagaacaccaagcagcccagcaagagctgccacaagcccaaggccatcgtgcacaccgagaaagtgaacatgatgagcctgaccgtgctgggcctgcggatgctgttcgccaaaaccgtggccgtgaacttcctgctgaccgccaagctgttcttcctcaaacggggcagaaagaaactcctgtatatattcaaacaaccatttatgagaccagtacaaactactcaagaggaagatggctgtagctgccgatttccagaagaagaagaaggaggatgtgaactgagagtgaagttcagcagaagcgccgacgcccctgcctaccagcagggacagaaccaactgtacaacgagctgaacctgggcagacgggaagagtacgacgtgctggacaagcggagaggcagggaccctgagatgggcggaaagccccagcggagaaagaacccccaggaaggactgtataacgaactccagaaagacaagatggccgaagcctacagcgagatcggcatgaagggcgagcggagaagaggcaagggccacgatggcctgtaccagggcctgagcaccgccaccaaggacacctatgacgccctgcacatgcaggccctgcctccaaga

SEQ ID NO: 27617 - DNA, 963 bp, synthetic construct
  source 1..963: mol_type = other DNA
gacaagcagctggacgccgacgtgtcccccaagcctaccatcttcctgccctctatcgccgagacaaagctccagaaggccggcacctacctgtgcctgctggaaaagttcttcccagatgtgattaagatccactggcaggaaaagaagtccaacaccatcctgggcagccaggaaggcaacaccatgaagaccaacgacacctacatgaagttcagctggctgaccgtgcccgagaagtccctggacaaagaacacagatgcatcgtgcggcacgaaaacaacaagaacggcgtggaccaggaaatcatcttcccaatccccgaggacacattcttcccaagccccgagagcagctgcgacgtgaagctggtggaaaagagcttcgagacagacaccaacctgaacttccagaacctgagcgtgatcggcttcagaatcctgctgctgaaagtggccggctttaacctgctgatgaccctgcggctgtggtccagcaaacggggcagaaagaaactcctgtatatattcaaacaaccatttatgagaccagtacaaactactcaagaggaagatggctgtagctgccgatttccagaagaagaagaaggaggatgtgaactgagagtgaagttcagcagaagcgccgacgcccctgcctaccagcagggacagaaccaactgtacaacgagctgaacctgggcagacgggaagagtacgacgtgctggacaagcggagaggcagggaccctgagatgggcggaaagccccagcggagaaagaacccccaggaaggactgtataacgaactccagaaagacaagatggccgaagcctacagcgagatcggcatgaagggcgagcggagaagaggcaagggccacgatggcctgtaccagggcctgagcaccgccaccaaggacacctatgacgccctgcacatgcaggccctgcctccaaga

SEQ ID NO: 27618 - DNA, 933 bp, synthetic construct
  source 1..933: mol_type = other DNA
gacaagcagctggacgccgacgtgtcccccaagcctaccatcttcctgccctctatcgccgagacaaagctccagaaggccggcacctacctgtgcctgctggaaaagttcttcccagatgtgattaagatccactggcaggaaaagaagtccaacaccatcctgggcagccaggaaggcaacaccatgaagaccaacgacacctacatgaagttcagctggctgaccgtgcccgagaagtccctggacaaagaacacagatgcatcgtgcggcacgaaaacaacaagaacggcgtggaccaggaaatcatcttcccagagagcagctgcgacgtgaagctggtggaaaagagcttcgagacagacaccaacctgaacttccagaacctgagcgtgatcggcttcagaatcctgctgctgaaagtggccggctttaacctgctgatgaccctgcggctgtggtccagcaaacggggcagaaagaaactcctgtatatattcaaacaaccatttatgagaccagtacaaactactcaagaggaagatggctgtagctgccgatttccagaagaagaagaaggaggatgtgaactgagagtgaagttcagcagaagcgccgacgcccctgcctaccagcagggacagaaccaactgtacaacgagctgaacctgggcagacgggaagagtacgacgtgctggacaagcggagaggcagggaccctgagatgggcggaaagccccagcggagaaagaacccccaggaaggactgtataacgaactccagaaagacaagatggccgaagcctacagcgagatcggcatgaagggcgagcggagaagaggcaagggccacgatggcctgtaccagggcctgagcaccgccaccaaggacacctatgacgccctgcacatgcaggccctgcctccaaga

SEQ ID NO: 27619 - DNA, 960 bp, synthetic construct
  source 1..960: mol_type = other DNA
gacaagcagctggacgccgacgtgtcccccaagcctaccatcttcctgccctctatcgccgagacaaagctccagaaggccggcacctacctgtgcctgctggaaaagttcttcccagatgtgattaagatccactggcaggaaaagaagtccaacaccatcctgggcagccaggaaggcaacaccatgaagaccaacgacacctacatgaagttcagctggctgaccgtgcccgagaagtccctggacaaagaacacagatgcatcgtgcggcacgaaaacaacaagaacggcgtggaccaggaaatcatcttcccacccgaggacacattcttcccaagccccgagagcagctgcgacgtgaagctggtggaaaagagcttcgagacagacaccaacctgaacttccagaacctgagcgtgatcggcttcagaatcctgctgctgaaagtggccggctttaacctgctgatgaccctgcggctgtggtccagcaaacggggcagaaagaaactcctgtatatattcaaacaaccatttatgagaccagtacaaactactcaagaggaagatggctgtagctgccgatttccagaagaagaagaaggaggatgtgaactgagagtgaagttcagcagaagcgccgacgcccctgcctaccagcagggacagaaccaactgtacaacgagctgaacctgggcagacgggaagagtacgacgtgctggacaagcggagaggcagggaccctgagatgggcggaaagccccagcggagaaagaacccccaggaaggactgtataacgaactccagaaagacaagatggccgaagcctacagcgagatcggcatgaagggcgagcggagaagaggcaagggccacgatggcctgtaccagggcctgagcaccgccaccaaggacacctatgacgccctgcacatgcaggccctgcctccaaga

SEQ ID NO: 27620 - DNA, 942 bp, synthetic construct
  source 1..942: mol_type = other DNA
gacaagcagctggacgccgacgtgtcccccaagcctaccatcttcctgccctctatcgccgagacaaagctccagaaggccggcacctacctgtgcctgctggaaaagttcttcccagatgtgattaagatccactggcaggaaaagaagtccaacaccatcctgggcagccaggaaggcaacaccatgaagaccaacgacacctacatgaagttcagctggctgaccgtgcccgagaagtccctggacaaagaacacagatgcatcgtgcggcacgaaaacaacaagaacggcgtggaccaggaaatcatcttcccaggcagagccgattgcggctttaccagcgagagctaccagcagggcgtgctgagcgccaccatcctgtacgagatcctgctgggcaaggccaccctgtacgccgtgctggtgtctgccctggtgctgatggctatggtcaagcggaaggacagccggggaaaacggggcagaaagaaactcctgtatatattcaaacaaccatttatgagaccagtacaaactactcaagaggaagatggctgtagctgccgatttccagaagaagaagaaggaggatgtgaactgagagtgaagttcagcagaagcgccgacgcccctgcctaccagcagggacagaaccaactgtacaacgagctgaacctgggcagacgggaagagtacgacgtgctggacaagcggagaggcagggaccctgagatgggcggaaagccccagcggagaaagaacccccaggaaggactgtataacgaactccagaaagacaagatggccgaagcctacagcgagatcggcatgaagggcgagcggagaagaggcaagggccacgatggcctgtaccagggcctgagcaccgccaccaaggacacctatgacgccctgcacatgcaggccctgcctccaaga

SEQ ID NO: 27621 - DNA, 936 bp, synthetic construct
  source 1..936: mol_type = other DNA
gacaagcagctggacgccgacgtgtcccccaagcctaccatcttcctgccctctatcgccgagacaaagctccagaaggccggcacctacctgtgcctgctggaaaagttcttcccagatgtgattaagatccactggcaggaaaagaagtccaacaccatcctgggcagccaggaaggcaacaccatgaagaccaacgacacctacatgaagttcagctggctgaccgtgcccgagaagtccctggacaaagaacacagatgcatcgtgcggcacgaaaacaacaagaacggcgtggaccaggaaatcatcttcccagccgattgcggctttaccagcgagagctaccagcagggcgtgctgagcgccaccatcctgtacgagatcctgctgggcaaggccaccctgtacgccgtgctggtgtctgccctggtgctgatggctatggtcaagcggaaggacagccggggaaaacggggcagaaagaaactcctgtatatattcaaacaaccatttatgagaccagtacaaactactcaagaggaagatggctgtagctgccgatttccagaagaagaagaaggaggatgtgaactgagagtgaagttcagcagaagcgccgacgcccctgcctaccagcagggacagaaccaactgtacaacgagctgaacctgggcagacgggaagagtacgacgtgctggacaagcggagaggcagggaccctgagatgggcggaaagccccagcggagaaagaacccccaggaaggactgtataacgaactccagaaagacaagatggccgaagcctacagcgagatcggcatgaagggcgagcggagaagaggcaagggccacgatggcctgtaccagggcctgagcaccgccaccaaggacacctatgacgccctgcacatgcaggccctgcctccaaga

SEQ ID NO: 27622 - DNA, 966 bp, synthetic construct
  source 1..966: mol_type = other DNA
gacaagcagctggacgccgacgtgtcccccaagcctaccatcttcctgccctctatcgccgagacaaagctccagaaggccggcacctacctgtgcctgctggaaaagttcttcccagatgtgattaagatccactggcaggaaaagaagtccaacaccatcctgggcagccaggaaggcaacaccatgaagaccaacgacacctacatgaagttcagctggctgaccgtgcccgagaagtccctggacaaagaacacagatgcatcgtgcggcacgaaaacaacaagaacggcgtggaccaggaaatcatcttcccacagatcgtgtctgccgaagcctggggcagagccgattgcggctttaccagcgagagctaccagcagggcgtgctgagcgccaccatcctgtacgagatcctgctgggcaaggccaccctgtacgccgtgctggtgtctgccctggtgctgatggctatggtcaagcggaaggacagccggggaaaacggggcagaaagaaactcctgtatatattcaaacaaccatttatgagaccagtacaaactactcaagaggaagatggctgtagctgccgatttccagaagaagaagaaggaggatgtgaactgagagtgaagttcagcagaagcgccgacgcccctgcctaccagcagggacagaaccaactgtacaacgagctgaacctgggcagacgggaagagtacgacgtgctggacaagcggagaggcagggaccctgagatgggcggaaagccccagcggagaaagaacccccaggaaggactgtataacgaactccagaaagacaagatggccgaagcctacagcgagatcggcatgaagggcgagcggagaagaggcaagggccacgatggcctgtaccagggcctgagcaccgccaccaaggacacctatgacgccctgcacatgcaggccctgcctccaaga

SEQ ID NO: 27623 - DNA, 987 bp, synthetic construct
  source 1..987: mol_type = other DNA
gacaagcagctggacgccgacgtgtcccccaagcctaccatcttcctgccctctatcgccgagacaaagctccagaaggccggcacctacctgtgcctgctggaaaagttcttcccagatgtgattaagatccactggcaggaaaagaagtccaacaccatcctgggcagccaggaaggcaacaccatgaagaccaacgacacctacatgaagttcagctggctgaccgtgcccgagaagtccctggacaaagaacacagatgcatcgtgcggcacgaaaacaacaagaacggcgtggaccaggaaatcatcttcccagaagtgaaaaccgactccaccgaccacgtgaagcccaaagagacagagaacaccaagcagcccagcaagagctgccacaagcccaaggccatcgtgcacaccgagaaagtgaacatgatgagcctgaccgtgctgggcctgcggatgctgttcgccaaaaccgtggccgtgaacttcctgctgaccgccaagctgttcttcctcaaacggggcagaaagaaactcctgtatatattcaaacaaccatttatgagaccagtacaaactactcaagaggaagatggctgtagctgccgatttccagaagaagaagaaggaggatgtgaactgagagtgaagttcagcagaagcgccgacgcccctgcctaccagcagggacagaaccaactgtacaacgagctgaacctgggcagacgggaagagtacgacgtgctggacaagcggagaggcagggaccctgagatgggcggaaagccccagcggagaaagaacccccaggaaggactgtataacgaactccagaaagacaagatggccgaagcctacagcgagatcggcatgaagggcgagcggagaagaggcaagggccacgatggcctgtaccagggcctgagcaccgccaccaaggacacctatgacgccctgcacatgcaggccctgcctccaaga

SEQ ID NO: 27624 - DNA, 966 bp, synthetic construct
  source 1..966: mol_type = other DNA
gacaagcagctggacgccgacgtgtcccccaagcctaccatcttcctgccctctatcgccgagacaaagctccagaaggccggcacctacctgtgcctgctggaaaagttcttcccagatgtgattaagatccactggcaggaaaagaagtccaacaccatcctgggcagccaggaaggcaacaccatgaagaccaacgacacctacatgaagttcagctggctgaccgtgcccgagaagtccctggacaaagaacacagatgcatcgtgcggcacgaaaacaacaagaacggcgtggaccaggaaatcatcttcccagaccacgtgaagcccaaagagacagagaacaccaagcagcccagcaagagctgccacaagcccaaggccatcgtgcacaccgagaaagtgaacatgatgagcctgaccgtgctgggcctgcggatgctgttcgccaaaaccgtggccgtgaacttcctgctgaccgccaagctgttcttcctcaaacggggcagaaagaaactcctgtatatattcaaacaaccatttatgagaccagtacaaactactcaagaggaagatggctgtagctgccgatttccagaagaagaagaaggaggatgtgaactgagagtgaagttcagcagaagcgccgacgcccctgcctaccagcagggacagaaccaactgtacaacgagctgaacctgggcagacgggaagagtacgacgtgctggacaagcggagaggcagggaccctgagatgggcggaaagccccagcggagaaagaacccccaggaaggactgtataacgaactccagaaagacaagatggccgaagcctacagcgagatcggcatgaagggcgagcggagaagaggcaagggccacgatggcctgtaccagggcctgagcaccgccaccaaggacacctatgacgccctgcacatgcaggccctgcctccaaga

SEQ ID NO: 27625 - DNA, 987 bp, synthetic construct
  source 1..987: mol_type = other DNA
gacaagcagctggacgccgacgtgtcccccaagcctaccatcttcctgccctctatcgccgagacaaagctccagaaggccggcacctacctgtgcctgctggaaaagttcttcccagatgtgattaagatccactggcaggaaaagaagtccaacaccatcctgggcagccaggaaggcaacaccatgaagaccaacgacacctacatgaagttcagctggctgaccgtgcccgagaagtccctggacaaagaacacagatgcatcgtgcggcacgaaaacaacaagaacggcgtggaccaggaaatcatcttcccacccatcaagaccgatgtgattacaatccccgaggacacattcttcccaagccccgagagcagctgcgacgtgaagctggtggaaaagagcttcgagacagacaccaacctgaacttccagaacctgagcgtgatcggcttcagaatcctgctgctgaaagtggccggctttaacctgctgatgaccctgcggctgtggtccagcaaacggggcagaaagaaactcctgtatatattcaaacaaccatttatgagaccagtacaaactactcaagaggaagatggctgtagctgccgatttccagaagaagaagaaggaggatgtgaactgagagtgaagttcagcagaagcgccgacgcccctgcctaccagcagggacagaaccaactgtacaacgagctgaacctgggcagacgggaagagtacgacgtgctggacaagcggagaggcagggaccctgagatgggcggaaagccccagcggagaaagaacccccaggaaggactgtataacgaactccagaaagacaagatggccgaagcctacagcgagatcggcatgaagggcgagcggagaagaggcaagggccacgatggcctgtaccagggcctgagcaccgccaccaaggacacctatgacgccctgcacatgcaggccctgcctccaaga

SEQ ID NO: 27626 - DNA, 957 bp, synthetic construct
  source 1..957: mol_type = other DNA
gacaagcagctggacgccgacgtgtcccccaagcctaccatcttcctgccctctatcgccgagacaaagctccagaaggccggcacctacctgtgcctgctggaaaagttcttcccagatgtgattaagatccactggcaggaaaagaagtccaacaccatcctgggcagccaggaaggcaacaccatgaagaccaacgacacctacatgaagttcagctggctgaccgtgcccgagaagtccctggacaaagaacacagatgcatcgtgcggcacgaaaacaacaagaacggcgtggaccaggaaatcatcttcccacccatcaagaccgatgtgattacagagagcagctgcgacgtgaagctggtggaaaagagcttcgagacagacaccaacctgaacttccagaacctgagcgtgatcggcttcagaatcctgctgctgaaagtggccggctttaacctgctgatgaccctgcggctgtggtccagcaaacggggcagaaagaaactcctgtatatattcaaacaaccatttatgagaccagtacaaactactcaagaggaagatggctgtagctgccgatttccagaagaagaagaaggaggatgtgaactgagagtgaagttcagcagaagcgccgacgcccctgcctaccagcagggacagaaccaactgtacaacgagctgaacctgggcagacgggaagagtacgacgtgctggacaagcggagaggcagggaccctgagatgggcggaaagccccagcggagaaagaacccccaggaaggactgtataacgaactccagaaagacaagatggccgaagcctacagcgagatcggcatgaagggcgagcggagaagaggcaagggccacgatggcctgtaccagggcctgagcaccgccaccaaggacacctatgacgccctgcacatgcaggccctgcctccaaga

SEQ ID NO: 27627 - DNA, 984 bp, synthetic construct
  source 1..984: mol_type = other DNA
gacaagcagctggacgccgacgtgtcccccaagcctaccatcttcctgccctctatcgccgagacaaagctccagaaggccggcacctacctgtgcctgctggaaaagttcttcccagatgtgattaagatccactggcaggaaaagaagtccaacaccatcctgggcagccaggaaggcaacaccatgaagaccaacgacacctacatgaagttcagctggctgaccgtgcccgagaagtccctggacaaagaacacagatgcatcgtgcggcacgaaaacaacaagaacggcgtggaccaggaaatcatcttcccacccatcaagaccgatgtgattacacccgaggacacattcttcccaagccccgagagcagctgcgacgtgaagctggtggaaaagagcttcgagacagacaccaacctgaacttccagaacctgagcgtgatcggcttcagaatcctgctgctgaaagtggccggctttaacctgctgatgaccctgcggctgtggtccagcaaacggggcagaaagaaactcctgtatatattcaaacaaccatttatgagaccagtacaaactactcaagaggaagatggctgtagctgccgatttccagaagaagaagaaggaggatgtgaactgagagtgaagttcagcagaagcgccgacgcccctgcctaccagcagggacagaaccaactgtacaacgagctgaacctgggcagacgggaagagtacgacgtgctggacaagcggagaggcagggaccctgagatgggcggaaagccccagcggagaaagaacccccaggaaggactgtataacgaactccagaaagacaagatggccgaagcctacagcgagatcggcatgaagggcgagcggagaagaggcaagggccacgatggcctgtaccagggcctgagcaccgccaccaaggacacctatgacgccctgcacatgcaggccctgcctccaaga

SEQ ID NO: 27628 - DNA, 966 bp, synthetic construct
  source 1..966: mol_type = other DNA
gacaagcagctggacgccgacgtgtcccccaagcctaccatcttcctgccctctatcgccgagacaaagctccagaaggccggcacctacctgtgcctgctggaaaagttcttcccagatgtgattaagatccactggcaggaaaagaagtccaacaccatcctgggcagccaggaaggcaacaccatgaagaccaacgacacctacatgaagttcagctggctgaccgtgcccgagaagtccctggacaaagaacacagatgcatcgtgcggcacgaaaacaacaagaacggcgtggaccaggaaatcatcttcccacccatcaagaccgatgtgattacaggcagagccgattgcggctttaccagcgagagctaccagcagggcgtgctgagcgccaccatcctgtacgagatcctgctgggcaaggccaccctgtacgccgtgctggtgtctgccctggtgctgatggctatggtcaagcggaaggacagccggggaaaacggggcagaaagaaactcctgtatatattcaaacaaccatttatgagaccagtacaaactactcaagaggaagatggctgtagctgccgatttccagaagaagaagaaggaggatgtgaactgagagtgaagttcagcagaagcgccgacgcccctgcctaccagcagggacagaaccaactgtacaacgagctgaacctgggcagacgggaagagtacgacgtgctggacaagcggagaggcagggaccctgagatgggcggaaagccccagcggagaaagaacccccaggaaggactgtataacgaactccagaaagacaagatggccgaagcctacagcgagatcggcatgaagggcgagcggagaagaggcaagggccacgatggcctgtaccagggcctgagcaccgccaccaaggacacctatgacgccctgcacatgcaggccctgcctccaaga

SEQ ID NO: 27629 - DNA, 960 bp, synthetic construct
  source 1..960: mol_type = other DNA
gacaagcagctggacgccgacgtgtcccccaagcctaccatcttcctgccctctatcgccgagacaaagctccagaaggccggcacctacctgtgcctgctggaaaagttcttcccagatgtgattaagatccactggcaggaaaagaagtccaacaccatcctgggcagccaggaaggcaacaccatgaagaccaacgacacctacatgaagttcagctggctgaccgtgcccgagaagtccctggacaaagaacacagatgcatcgtgcggcacgaaaacaacaagaacggcgtggaccaggaaatcatcttcccacccatcaagaccgatgtgattacagccgattgcggctttaccagcgagagctaccagcagggcgtgctgagcgccaccatcctgtacgagatcctgctgggcaaggccaccctgtacgccgtgctggtgtctgccctggtgctgatggctatggtcaagcggaaggacagccggggaaaacggggcagaaagaaactcctgtatatattcaaacaaccatttatgagaccagtacaaactactcaagaggaagatggctgtagctgccgatttccagaagaagaagaaggaggatgtgaactgagagtgaagttcagcagaagcgccgacgcccctgcctaccagcagggacagaaccaactgtacaacgagctgaacctgggcagacgggaagagtacgacgtgctggacaagcggagaggcagggaccctgagatgggcggaaagccccagcggagaaagaacccccaggaaggactgtataacgaactccagaaagacaagatggccgaagcctacagcgagatcggcatgaagggcgagcggagaagaggcaagggccacgatggcctgtaccagggcctgagcaccgccaccaaggacacctatgacgccctgcacatgcaggccctgcctccaaga

SEQ ID NO: 27630 - DNA, 990 bp, synthetic construct
  source 1..990: mol_type = other DNA
gacaagcagctggacgccgacgtgtcccccaagcctaccatcttcctgccctctatcgccgagacaaagctccagaaggccggcacctacctgtgcctgctggaaaagttcttcccagatgtgattaagatccactggcaggaaaagaagtccaacaccatcctgggcagccaggaaggcaacaccatgaagaccaacgacacctacatgaagttcagctggctgaccgtgcccgagaagtccctggacaaagaacacagatgcatcgtgcggcacgaaaacaacaagaacggcgtggaccaggaaatcatcttcccacccatcaagaccgatgtgattacacagatcgtgtctgccgaagcctggggcagagccgattgcggctttaccagcgagagctaccagcagggcgtgctgagcgccaccatcctgtacgagatcctgctgggcaaggccaccctgtacgccgtgctggtgtctgccctggtgctgatggctatggtcaagcggaaggacagccggggaaaacggggcagaaagaaactcctgtatatattcaaacaaccatttatgagaccagtacaaactactcaagaggaagatggctgtagctgccgatttccagaagaagaagaaggaggatgtgaactgagagtgaagttcagcagaagcgccgacgcccctgcctaccagcagggacagaaccaactgtacaacgagctgaacctgggcagacgggaagagtacgacgtgctggacaagcggagaggcagggaccctgagatgggcggaaagccccagcggagaaagaacccccaggaaggactgtataacgaactccagaaagacaagatggccgaagcctacagcgagatcggcatgaagggcgagcggagaagaggcaagggccacgatggcctgtaccagggcctgagcaccgccaccaaggacacctatgacgccctgcacatgcaggccctgcctccaaga

SEQ ID NO: 27631 - DNA, 1011 bp, synthetic construct
  source 1..1011: mol_type = other DNA
gacaagcagctggacgccgacgtgtcccccaagcctaccatcttcctgccctctatcgccgagacaaagctccagaaggccggcacctacctgtgcctgctggaaaagttcttcccagatgtgattaagatccactggcaggaaaagaagtccaacaccatcctgggcagccaggaaggcaacaccatgaagaccaacgacacctacatgaagttcagctggctgaccgtgcccgagaagtccctggacaaagaacacagatgcatcgtgcggcacgaaaacaacaagaacggcgtggaccaggaaatcatcttcccacccatcaagaccgatgtgattacagaagtgaaaaccgactccaccgaccacgtgaagcccaaagagacagagaacaccaagcagcccagcaagagctgccacaagcccaaggccatcgtgcacaccgagaaagtgaacatgatgagcctgaccgtgctgggcctgcggatgctgttcgccaaaaccgtggccgtgaacttcctgctgaccgccaagctgttcttcctcaaacggggcagaaagaaactcctgtatatattcaaacaaccatttatgagaccagtacaaactactcaagaggaagatggctgtagctgccgatttccagaagaagaagaaggaggatgtgaactgagagtgaagttcagcagaagcgccgacgcccctgcctaccagcagggacagaaccaactgtacaacgagctgaacctgggcagacgggaagagtacgacgtgctggacaagcggagaggcagggaccctgagatgggcggaaagccccagcggagaaagaacccccaggaaggactgtataacgaactccagaaagacaagatggccgaagcctacagcgagatcggcatgaagggcgagcggagaagaggcaagggccacgatggcctgtaccagggcctgagcaccgccaccaaggacacctatgacgccctgcacatgcaggccctgcctccaaga

SEQ ID NO: 27632 - DNA, 990 bp, synthetic construct
  source 1..990: mol_type = other DNA
gacaagcagctggacgccgacgtgtcccccaagcctaccatcttcctgccctctatcgccgagacaaagctccagaaggccggcacctacctgtgcctgctggaaaagttcttcccagatgtgattaagatccactggcaggaaaagaagtccaacaccatcctgggcagccaggaaggcaacaccatgaagaccaacgacacctacatgaagttcagctggctgaccgtgcccgagaagtccctggacaaagaacacagatgcatcgtgcggcacgaaaacaacaagaacggcgtggaccaggaaatcatcttcccacccatcaagaccgatgtgattacagaccacgtgaagcccaaagagacagagaacaccaagcagcccagcaagagctgccacaagcccaaggccatcgtgcacaccgagaaagtgaacatgatgagcctgaccgtgctgggcctgcggatgctgttcgccaaaaccgtggccgtgaacttcctgctgaccgccaagctgttcttcctcaaacggggcagaaagaaactcctgtatatattcaaacaaccatttatgagaccagtacaaactactcaagaggaagatggctgtagctgccgatttccagaagaagaagaaggaggatgtgaactgagagtgaagttcagcagaagcgccgacgcccctgcctaccagcagggacagaaccaactgtacaacgagctgaacctgggcagacgggaagagtacgacgtgctggacaagcggagaggcagggaccctgagatgggcggaaagccccagcggagaaagaacccccaggaaggactgtataacgaactccagaaagacaagatggccgaagcctacagcgagatcggcatgaagggcgagcggagaagaggcaagggccacgatggcctgtaccagggcctgagcaccgccaccaaggacacctatgacgccctgcacatgcaggccctgcctccaaga

SEQ ID NO: 27633 - DNA, 846 bp, synthetic construct
  source 1..846: mol_type = other DNA
cccatcaagaccgatgtgattacaatggaccccaaggacaactgctccaaggacgccaacgataccctgctgctccagctgaccaacaccagcgcctactacatgtacttgttgctgctgctgaagtccgtggtgtacttcgccatcatcacatgctgcctgctgcggagaaccgccttctgctgcaacggcgagaagtctatccccgaggacacattcttcccaagccccgagagcagctgcgacgtgaagctggtggaaaagagcttcgagacagacaccaacctgaacttccagaacctgagcgtgatcggcttcagaatcctgctgctgaaagtggccggctttaacctgctgatgaccctgcggctgtggtccagcaaacggggcagaaagaaactcctgtatatattcaaacaaccatttatgagaccagtacaaactactcaagaggaagatggctgtagctgccgatttccagaagaagaagaaggaggatgtgaactgagagtgaagttcagcagaagcgccgacgcccctgcctaccagcagggacagaaccaactgtacaacgagctgaacctgggcagacgggaagagtacgacgtgctggacaagcggagaggcagggaccctgagatgggcggaaagccccagcggagaaagaacccccaggaaggactgtataacgaactccagaaagacaagatggccgaagcctacagcgagatcggcatgaagggcgagcggagaagaggcaagggccacgatggcctgtaccagggcctgagcaccgccaccaaggacacctatgacgccctgcacatgcaggccctgcctccaaga

SEQ ID NO: 27634 - DNA, 816 bp, synthetic construct
  source 1..816: mol_type = other DNA
cccatcaagaccgatgtgattacaatggaccccaaggacaactgctccaaggacgccaacgataccctgctgctccagctgaccaacaccagcgcctactacatgtacttgttgctgctgctgaagtccgtggtgtacttcgccatcatcacatgctgcctgctgcggagaaccgccttctgctgcaacggcgagaagtctgagagcagctgcgacgtgaagctggtggaaaagagcttcgagacagacaccaacctgaacttccagaacctgagcgtgatcggcttcagaatcctgctgctgaaagtggccggctttaacctgctgatgaccctgcggctgtggtccagcaaacggggcagaaagaaactcctgtatatattcaaacaaccatttatgagaccagtacaaactactcaagaggaagatggctgtagctgccgatttccagaagaagaagaaggaggatgtgaactgagagtgaagttcagcagaagcgccgacgcccctgcctaccagcagggacagaaccaactgtacaacgagctgaacctgggcagacgggaagagtacgacgtgctggacaagcggagaggcagggaccctgagatgggcggaaagccccagcggagaaagaacccccaggaaggactgtataacgaactccagaaagacaagatggccgaagcctacagcgagatcggcatgaagggcgagcggagaagaggcaagggccacgatggcctgtaccagggcctgagcaccgccaccaaggacacctatgacgccctgcacatgcaggccctgcctccaaga

SEQ ID NO: 27635 - DNA, 843 bp, synthetic construct
  source 1..843: mol_type = other DNA
cccatcaagaccgatgtgattacaatggaccccaaggacaactgctccaaggacgccaacgataccctgctgctccagctgaccaacaccagcgcctactacatgtacttgttgctgctgctgaagtccgtggtgtacttcgccatcatcacatgctgcctgctgcggagaaccgccttctgctgcaacggcgagaagtctcccgaggacacattcttcccaagccccgagagcagctgcgacgtgaagctggtggaaaagagcttcgagacagacaccaacctgaacttccagaacctgagcgtgatcggcttcagaatcctgctgctgaaagtggccggctttaacctgctgatgaccctgcggctgtggtccagcaaacggggcagaaagaaactcctgtatatattcaaacaaccatttatgagaccagtacaaactactcaagaggaagatggctgtagctgccgatttccagaagaagaagaaggaggatgtgaactgagagtgaagttcagcagaagcgccgacgcccctgcctaccagcagggacagaaccaactgtacaacgagctgaacctgggcagacgggaagagtacgacgtgctggacaagcggagaggcagggaccctgagatgggcggaaagccccagcggagaaagaacccccaggaaggactgtataacgaactccagaaagacaagatggccgaagcctacagcgagatcggcatgaagggcgagcggagaagaggcaagggccacgatggcctgtaccagggcctgagcaccgccaccaaggacacctatgacgccctgcacatgcaggccctgcctccaaga

SEQ ID NO: 27636 - DNA, 825 bp, synthetic construct
  source 1..825: mol_type = other DNA
cccatcaagaccgatgtgattacaatggaccccaaggacaactgctccaaggacgccaacgataccctgctgctccagctgaccaacaccagcgcctactacatgtacttgttgctgctgctgaagtccgtggtgtacttcgccatcatcacatgctgcctgctgcggagaaccgccttctgctgcaacggcgagaagtctggcagagccgattgcggctttaccagcgagagctaccagcagggcgtgctgagcgccaccatcctgtacgagatcctgctgggcaaggccaccctgtacgccgtgctggtgtctgccctggtgctgatggctatggtcaagcggaaggacagccggggaaaacggggcagaaagaaactcctgtatatattcaaacaaccatttatgagaccagtacaaactactcaagaggaagatggctgtagctgccgatttccagaagaagaagaaggaggatgtgaactgagagtgaagttcagcagaagcgccgacgcccctgcctaccagcagggacagaaccaactgtacaacgagctgaacctgggcagacgggaagagtacgacgtgctggacaagcggagaggcagggaccctgagatgggcggaaagccccagcggagaaagaacccccaggaaggactgtataacgaactccagaaagacaagatggccgaagcctacagcgagatcggcatgaagggcgagcggagaagaggcaagggccacgatggcctgtaccagggcctgagcaccgccaccaaggacacctatgacgccctgcacatgcaggccctgcctccaaga

SEQ ID NO: 27637 - DNA, 819 bp, synthetic construct
  source 1..819: mol_type = other DNA
cccatcaagaccgatgtgattacaatggaccccaaggacaactgctccaaggacgccaacgataccctgctgctccagctgaccaacaccagcgcctactacatgtacttgttgctgctgctgaagtccgtggtgtacttcgccatcatcacatgctgcctgctgcggagaaccgccttctgctgcaacggcgagaagtctgccgattgcggctttaccagcgagagctaccagcagggcgtgctgagcgccaccatcctgtacgagatcctgctgggcaaggccaccctgtacgccgtgctggtgtctgccctggtgctgatggctatggtcaagcggaaggacagccggggaaaacggggcagaaagaaactcctgtatatattcaaacaaccatttatgagaccagtacaaactactcaagaggaagatggctgtagctgccgatttccagaagaagaagaaggaggatgtgaactgagagtgaagttcagcagaagcgccgacgcccctgcctaccagcagggacagaaccaactgtacaacgagctgaacctgggcagacgggaagagtacgacgtgctggacaagcggagaggcagggaccctgagatgggcggaaagccccagcggagaaagaacccccaggaaggactgtataacgaactccagaaagacaagatggccgaagcctacagcgagatcggcatgaagggcgagcggagaagaggcaagggccacgatggcctgtaccagggcctgagcaccgccaccaaggacacctatgacgccctgcacatgcaggccctgcctccaaga

SEQ ID NO: 27638 - DNA, 849 bp, synthetic construct
  source 1..849: mol_type = other DNA
cccatcaagaccgatgtgattacaatggaccccaaggacaactgctccaaggacgccaacgataccctgctgctccagctgaccaacaccagcgcctactacatgtacttgttgctgctgctgaagtccgtggtgtacttcgccatcatcacatgctgcctgctgcggagaaccgccttctgctgcaacggcgagaagtctcagatcgtgtctgccgaagcctggggcagagccgattgcggctttaccagcgagagctaccagcagggcgtgctgagcgccaccatcctgtacgagatcctgctgggcaaggccaccctgtacgccgtgctggtgtctgccctggtgctgatggctatggtcaagcggaaggacagccggggaaaacggggcagaaagaaactcctgtatatattcaaacaaccatttatgagaccagtacaaactactcaagaggaagatggctgtagctgccgatttccagaagaagaagaaggaggatgtgaactgagagtgaagttcagcagaagcgccgacgcccctgcctaccagcagggacagaaccaactgtacaacgagctgaacctgggcagacgggaagagtacgacgtgctggacaagcggagaggcagggaccctgagatgggcggaaagccccagcggagaaagaacccccaggaaggactgtataacgaactccagaaagacaagatggccgaagcctacagcgagatcggcatgaagggcgagcggagaagaggcaagggccacgatggcctgtaccagggcctgagcaccgccaccaaggacacctatgacgccctgcacatgcaggccctgcctccaaga

SEQ ID NO: 27639 - DNA, 870 bp, synthetic construct
  source 1..870: mol_type = other DNA
cccatcaagaccgatgtgattacaatggaccccaaggacaactgctccaaggacgccaacgataccctgctgctccagctgaccaacaccagcgcctactacatgtacttgttgctgctgctgaagtccgtggtgtacttcgccatcatcacatgctgcctgctgcggagaaccgccttctgctgcaacggcgagaagtctgaagtgaaaaccgactccaccgaccacgtgaagcccaaagagacagagaacaccaagcagcccagcaagagctgccacaagcccaaggccatcgtgcacaccgagaaagtgaacatgatgagcctgaccgtgctgggcctgcggatgctgttcgccaaaaccgtggccgtgaacttcctgctgaccgccaagctgttcttcctcaaacggggcagaaagaaactcctgtatatattcaaacaaccatttatgagaccagtacaaactactcaagaggaagatggctgtagctgccgatttccagaagaagaagaaggaggatgtgaactgagagtgaagttcagcagaagcgccgacgcccctgcctaccagcagggacagaaccaactgtacaacgagctgaacctgggcagacgggaagagtacgacgtgctggacaagcggagaggcagggaccctgagatgggcggaaagccccagcggagaaagaacccccaggaaggactgtataacgaactccagaaagacaagatggccgaagcctacagcgagatcggcatgaagggcgagcggagaagaggcaagggccacgatggcctgtaccagggcctgagcaccgccaccaaggacacctatgacgccctgcacatgcaggccctgcctccaaga

SEQ ID NO: 27640 - DNA, 849 bp, synthetic construct
  source 1..849: mol_type = other DNA
cccatcaagaccgatgtgattacaatggaccccaaggacaactgctccaaggacgccaacgataccctgctgctccagctgaccaacaccagcgcctactacatgtacttgttgctgctgctgaagtccgtggtgtacttcgccatcatcacatgctgcctgctgcggagaaccgccttctgctgcaacggcgagaagtctgaccacgtgaagcccaaagagacagagaacaccaagcagcccagcaagagctgccacaagcccaaggccatcgtgcacaccgagaaagtgaacatgatgagcctgaccgtgctgggcctgcggatgctgttcgccaaaaccgtggccgtgaacttcctgctgaccgccaagctgttcttcctcaaacggggcagaaagaaactcctgtatatattcaaacaaccatttatgagaccagtacaaactactcaagaggaagatggctgtagctgccgatttccagaagaagaagaaggaggatgtgaactgagagtgaagttcagcagaagcgccgacgcccctgcctaccagcagggacagaaccaactgtacaacgagctgaacctgggcagacgggaagagtacgacgtgctggacaagcggagaggcagggaccctgagatgggcggaaagccccagcggagaaagaacccccaggaaggactgtataacgaactccagaaagacaagatggccgaagcctacagcgagatcggcatgaagggcgagcggagaagaggcaagggccacgatggcctgtaccagggcctgagcaccgccaccaaggacacctatgacgccctgcacatgcaggccctgcctccaaga

SEQ ID NO: 27641 - DNA, 1002 bp, synthetic construct
  source 1..1002: mol_type = other DNA
gacaagcagctggacgccgacgtgtcccccaagcctaccatcttcctgccctctatcgccgagacaaagctccagaaggccggcacctacctgtgcctgctggaaaagttcttcccagatgtgattaagatccactggcaggaaaagaagtccaacaccatcctgggcagccaggaaggcaacaccatgaagaccaacgacacctacatgaagttcagctggctgaccgtgcccgagaagtccctggacaaagaacacagatgcatcgtgcggcacgaaaacaacaagaacggcgtggaccaggaaatcatcttcccacccatcaagaccgatgtgattacaatggaccccaaggacatccccgaggacacattcttcccaagccccgagagcagctgcgacgtgaagctggtggaaaagagcttcgagacagacaccaacctgaacttccagaacctgagcgtgatcggcttcagaatcctgctgctgaaagtggccggctttaacctgctgatgaccctgcggctgtggtccagcaaacggggcagaaagaaactcctgtatatattcaaacaaccatttatgagaccagtacaaactactcaagaggaagatggctgtagctgccgatttccagaagaagaagaaggaggatgtgaactgagagtgaagttcagcagaagcgccgacgcccctgcctaccagcagggacagaaccaactgtacaacgagctgaacctgggcagacgggaagagtacgacgtgctggacaagcggagaggcagggaccctgagatgggcggaaagccccagcggagaaagaacccccaggaaggactgtataacgaactccagaaagacaagatggccgaagcctacagcgagatcggcatgaagggcgagcggagaagaggcaagggccacgatggcctgtaccagggcctgagcaccgccaccaaggacacctatgacgccctgcacatgcaggccctgcctccaaga

SEQ ID NO: 27642 - DNA, 972 bp, synthetic construct
  source 1..972: mol_type = other DNA
gacaagcagctggacgccgacgtgtcccccaagcctaccatcttcctgccctctatcgccgagacaaagctccagaaggccggcacctacctgtgcctgctggaaaagttcttcccagatgtgattaagatccactggcaggaaaagaagtccaacaccatcctgggcagccaggaaggcaacaccatgaagaccaacgacacctacatgaagttcagctggctgaccgtgcccgagaagtccctggacaaagaacacagatgcatcgtgcggcacgaaaacaacaagaacggcgtggaccaggaaatcatcttcccacccatcaagaccgatgtgattacaatggaccccaaggacgagagcagctgcgacgtgaagctggtggaaaagagcttcgagacagacaccaacctgaacttccagaacctgagcgtgatcggcttcagaatcctgctgctgaaagtggccggctttaacctgctgatgaccctgcggctgtggtccagcaaacggggcagaaagaaactcctgtatatattcaaacaaccatttatgagaccagtacaaactactcaagaggaagatggctgtagctgccgatttccagaagaagaagaaggaggatgtgaactgagagtgaagttcagcagaagcgccgacgcccctgcctaccagcagggacagaaccaactgtacaacgagctgaacctgggcagacgggaagagtacgacgtgctggacaagcggagaggcagggaccctgagatgggcggaaagccccagcggagaaagaacccccaggaaggactgtataacgaactccagaaagacaagatggccgaagcctacagcgagatcggcatgaagggcgagcggagaagaggcaagggccacgatggcctgtaccagggcctgagcaccgccaccaaggacacctatgacgccctgcacatgcaggccctgcctccaaga

SEQ ID NO: 27643 - DNA, 999 bp, synthetic construct
  source 1..999: mol_type = other DNA
gacaagcagctggacgccgacgtgtcccccaagcctaccatcttcctgccctctatcgccgagacaaagctccagaaggccggcacctacctgtgcctgctggaaaagttcttcccagatgtgattaagatccactggcaggaaaagaagtccaacaccatcctgggcagccaggaaggcaacaccatgaagaccaacgacacctacatgaagttcagctggctgaccgtgcccgagaagtccctggacaaagaacacagatgcatcgtgcggcacgaaaacaacaagaacggcgtggaccaggaaatcatcttcccacccatcaagaccgatgtgattacaatggaccccaaggaccccgaggacacattcttcccaagccccgagagcagctgcgacgtgaagctggtggaaaagagcttcgagacagacaccaacctgaacttccagaacctgagcgtgatcggcttcagaatcctgctgctgaaagtggccggctttaacctgctgatgaccctgcggctgtggtccagcaaacggggcagaaagaaactcctgtatatattcaaacaaccatttatgagaccagtacaaactactcaagaggaagatggctgtagctgccgatttccagaagaagaagaaggaggatgtgaactgagagtgaagttcagcagaagcgccgacgcccctgcctaccagcagggacagaaccaactgtacaacgagctgaacctgggcagacgggaagagtacgacgtgctggacaagcggagaggcagggaccctgagatgggcggaaagccccagcggagaaagaacccccaggaaggactgtataacgaactccagaaagacaagatggccgaagcctacagcgagatcggcatgaagggcgagcggagaagaggcaagggccacgatggcctgtaccagggcctgagcaccgccaccaaggacacctatgacgccctgcacatgcaggccctgcctccaaga

SEQ ID NO: 27644 - DNA, 981 bp, synthetic construct
  source 1..981: mol_type = other DNA
gacaagcagctggacgccgacgtgtcccccaagcctaccatcttcctgccctctatcgccgagacaaagctccagaaggccggcacctacctgtgcctgctggaaaagttcttcccagatgtgattaagatccactggcaggaaaagaagtccaacaccatcctgggcagccaggaaggcaacaccatgaagaccaacgacacctacatgaagttcagctggctgaccgtgcccgagaagtccctggacaaagaacacagatgcatcgtgcggcacgaaaacaacaagaacggcgtggaccaggaaatcatcttcccacccatcaagaccgatgtgattacaatggaccccaaggacggcagagccgattgcggctttaccagcgagagctaccagcagggcgtgctgagcgccaccatcctgtacgagatcctgctgggcaaggccaccctgtacgccgtgctggtgtctgccctggtgctgatggctatggtcaagcggaaggacagccggggaaaacggggcagaaagaaactcctgtatatattcaaacaaccatttatgagaccagtacaaactactcaagaggaagatggctgtagctgccgatttccagaagaagaagaaggaggatgtgaactgagagtgaagttcagcagaagcgccgacgcccctgcctaccagcagggacagaaccaactgtacaacgagctgaacctgggcagacgggaagagtacgacgtgctggacaagcggagaggcagggaccctgagatgggcggaaagccccagcggagaaagaacccccaggaaggactgtataacgaactccagaaagacaagatggccgaagcctacagcgagatcggcatgaagggcgagcggagaagaggcaagggccacgatggcctgtaccagggcctgagcaccgccaccaaggacacctatgacgccctgcacatgcaggccctgcctccaaga

SEQ ID NO: 27645 - DNA, 975 bp, synthetic construct
  source 1..975: mol_type = other DNA
gacaagcagctggacgccgacgtgtcccccaagcctaccatcttcctgccctctatcgccgagacaaagctccagaaggccggcacctacctgtgcctgctggaaaagttcttcccagatgtgattaagatccactggcaggaaaagaagtccaacaccatcctgggcagccaggaaggcaacaccatgaagaccaacgacacctacatgaagttcagctggctgaccgtgcccgagaagtccctggacaaagaacacagatgcatcgtgcggcacgaaaacaacaagaacggcgtggaccaggaaatcatcttcccacccatcaagaccgatgtgattacaatggaccccaaggacgccgattgcggctttaccagcgagagctaccagcagggcgtgctgagcgccaccatcctgtacgagatcctgctgggcaaggccaccctgtacgccgtgctggtgtctgccctggtgctgatggctatggtcaagcggaaggacagccggggaaaacggggcagaaagaaactcctgtatatattcaaacaaccatttatgagaccagtacaaactactcaagaggaagatggctgtagctgccgatttccagaagaagaagaaggaggatgtgaactgagagtgaagttcagcagaagcgccgacgcccctgcctaccagcagggacagaaccaactgtacaacgagctgaacctgggcagacgggaagagtacgacgtgctggacaagcggagaggcagggaccctgagatgggcggaaagccccagcggagaaagaacccccaggaaggactgtataacgaactccagaaagacaagatggccgaagcctacagcgagatcggcatgaagggcgagcggagaagaggcaagggccacgatggcctgtaccagggcctgagcaccgccaccaaggacacctatgacgccctgcacatgcaggccctgcctccaaga

SEQ ID NO: 27646 - DNA, 1005 bp, synthetic construct
  source 1..1005: mol_type = other DNA
gacaagcagctggacgccgacgtgtcccccaagcctaccatcttcctgccctctatcgccgagacaaagctccagaaggccggcacctacctgtgcctgctggaaaagttcttcccagatgtgattaagatccactggcaggaaaagaagtccaacaccatcctgggcagccaggaaggcaacaccatgaagaccaacgacacctacatgaagttcagctggctgaccgtgcccgagaagtccctggacaaagaacacagatgcatcgtgcggcacgaaaacaacaagaacggcgtggaccaggaaatcatcttcccacccatcaagaccgatgtgattacaatggaccccaaggaccagatcgtgtctgccgaagcctggggcagagccgattgcggctttaccagcgagagctaccagcagggcgtgctgagcgccaccatcctgtacgagatcctgctgggcaaggccaccctgtacgccgtgctggtgtctgccctggtgctgatggctatggtcaagcggaaggacagccggggaaaacggggcagaaagaaactcctgtatatattcaaacaaccatttatgagaccagtacaaactactcaagaggaagatggctgtagctgccgatttccagaagaagaagaaggaggatgtgaactgagagtgaagttcagcagaagcgccgacgcccctgcctaccagcagggacagaaccaactgtacaacgagctgaacctgggcagacgggaagagtacgacgtgctggacaagcggagaggcagggaccctgagatgggcggaaagccccagcggagaaagaacccccaggaaggactgtataacgaactccagaaagacaagatggccgaagcctacagcgagatcggcatgaagggcgagcggagaagaggcaagggccacgatggcctgtaccagggcctgagcaccgccaccaaggacacctatgacgccctgcacatgcaggccctgcctccaaga

SEQ ID NO: 27647 - DNA, 1026 bp, synthetic construct
  source 1..1026: mol_type = other DNA
gacaagcagctggacgccgacgtgtcccccaagcctaccatcttcctgccctctatcgccgagacaaagctccagaaggccggcacctacctgtgcctgctggaaaagttcttcccagatgtgattaagatccactggcaggaaaagaagtccaacaccatcctgggcagccaggaaggcaacaccatgaagaccaacgacacctacatgaagttcagctggctgaccgtgcccgagaagtccctggacaaagaacacagatgcatcgtgcggcacgaaaacaacaagaacggcgtggaccaggaaatcatcttcccacccatcaagaccgatgtgattacaatggaccccaaggacgaagtgaaaaccgactccaccgaccacgtgaagcccaaagagacagagaacaccaagcagcccagcaagagctgccacaagcccaaggccatcgtgcacaccgagaaagtgaacatgatgagcctgaccgtgctgggcctgcggatgctgttcgccaaaaccgtggccgtgaacttcctgctgaccgccaagctgttcttcctcaaacggggcagaaagaaactcctgtatatattcaaacaaccatttatgagaccagtacaaactactcaagaggaagatggctgtagctgccgatttccagaagaagaagaaggaggatgtgaactgagagtgaagttcagcagaagcgccgacgcccctgcctaccagcagggacagaaccaactgtacaacgagctgaacctgggcagacgggaagagtacgacgtgctggacaagcggagaggcagggaccctgagatgggcggaaagccccagcggagaaagaacccccaggaaggactgtataacgaactccagaaagacaagatggccgaagcctacagcgagatcggcatgaagggcgagcggagaagaggcaagggccacgatggcctgtaccagggcctgagcaccgccaccaaggacacctatgacgccctgcacatgcaggccctgcctccaaga

SEQ ID NO: 27648 - DNA, 1005 bp, synthetic construct
  source 1..1005: mol_type = other DNA
gacaagcagctggacgccgacgtgtcccccaagcctaccatcttcctgccctctatcgccgagacaaagctccagaaggccggcacctacctgtgcctgctggaaaagttcttcccagatgtgattaagatccactggcaggaaaagaagtccaacaccatcctgggcagccaggaaggcaacaccatgaagaccaacgacacctacatgaagttcagctggctgaccgtgcccgagaagtccctggacaaagaacacagatgcatcgtgcggcacgaaaacaacaagaacggcgtggaccaggaaatcatcttcccacccatcaagaccgatgtgattacaatggaccccaaggacgaccacgtgaagcccaaagagacagagaacaccaagcagcccagcaagagctgccacaagcccaaggccatcgtgcacaccgagaaagtgaacatgatgagcctgaccgtgctgggcctgcggatgctgttcgccaaaaccgtggccgtgaacttcctgctgaccgccaagctgttcttcctcaaacggggcagaaagaaactcctgtatatattcaaacaaccatttatgagaccagtacaaactactcaagaggaagatggctgtagctgccgatttccagaagaagaagaaggaggatgtgaactgagagtgaagttcagcagaagcgccgacgcccctgcctaccagcagggacagaaccaactgtacaacgagctgaacctgggcagacgggaagagtacgacgtgctggacaagcggagaggcagggaccctgagatgggcggaaagccccagcggagaaagaacccccaggaaggactgtataacgaactccagaaagacaagatggccgaagcctacagcgagatcggcatgaagggcgagcggagaagaggcaagggccacgatggcctgtaccagggcctgagcaccgccaccaaggacacctatgacgccctgcacatgcaggccctgcctccaaga

SEQ ID NO: 27649 - DNA, 987 bp, synthetic construct; identical to SEQ ID NO: 27625
  source 1..987: mol_type = other DNA

SEQ ID NO: 27650 - DNA, 957 bp, synthetic construct; identical to SEQ ID NO: 27626
  source 1..957: mol_type = other DNA

SEQ ID NO: 27651 - DNA, 984 bp, synthetic construct; identical to SEQ ID NO: 27627
  source 1..984: mol_type = other DNA

SEQ ID NO: 27652 - DNA, 966 bp, synthetic construct; identical to SEQ ID NO: 27628
  source 1..966: mol_type = other DNA

SEQ ID NO: 27653 - DNA, 960 bp, synthetic construct; identical to SEQ ID NO: 27629
  source 1..960: mol_type = other DNA

SEQ ID NO: 27654 - DNA, 990 bp, synthetic construct; identical to SEQ ID NO: 27630
  source 1..990: mol_type = other DNA

SEQ ID NO: 27655 - DNA, 1011 bp, synthetic construct; identical to SEQ ID NO: 27631
  source 1..1011: mol_type = other DNA

SEQ ID NO: 27656 - DNA, 990 bp, synthetic construct; identical to SEQ ID NO: 27632
  source 1..990: mol_type = other DNA

SEQ ID NO: 27657 - DNA, 930 bp, synthetic construct
  source 1..930: mol_type = other DNA
cccaagcctaccatcttcctgccctctatcgccgagacaaagctccagaaggccggcacctacctgtgcctgctggaaaagttcttcccagatgtgattaagatccactggcaggaaaagaagtccaacaccatcctgggcagccaggaaggcaacaccatgaagaccaacgacacctacatgaagttcagctggctgaccgtgcccgagaagtccctggacaaagaacacagatgcatcgtgcggcacgaaaacaacaagaacggcgtggaccaggaaatcatcatccccgaggacacattcttcccaagccccgagagcagctgcgacgtgaagctggtggaaaagagcttcgagacagacaccaacctgaacttccagaacctgagcgtgatcggcttcagaatcctgctgctgaaagtggccggctttaacctgctgatgaccctgcggctgtggtccagcaaacggggcagaaagaaactcctgtatatattcaaacaaccatttatgagaccagtacaaactactcaagaggaagatggctgtagctgccgatttccagaagaagaagaaggaggatgtgaactgagagtgaagttcagcagaagcgccgacgcccctgcctaccagcagggacagaaccaactgtacaacgagctgaacctgggcagacgggaagagtacgacgtgctggacaagcggagaggcagggaccctgagatgggcggaaagccccagcggagaaagaacccccaggaaggactgtataacgaactccagaaagacaagatggccgaagcctacagcgagatcggcatgaagggcgagcggagaagaggcaagggccacgatggcctgtaccagggcctgagcaccgccaccaaggacacctatgacgccctgcacatgcaggccctgcctccaaga

SEQ ID NO: 27658 - DNA, 900 bp, synthetic construct
  source 1..900: mol_type = other DNA
cccaagcctaccatcttcctgccctctatcgccgagacaaagctccagaaggccggcacctacctgtgcctgctggaaaagttcttcccagatgtgattaagatccactggcaggaaaagaagtccaacaccatcctgggcagccaggaaggcaacaccatgaagaccaacgacacctacatgaagttcagctggctgaccgtgcccgagaagtccctggacaaagaacacagatgcatcgtgcggcacgaaaacaacaagaacggcgtggaccaggaaatcatcgagagcagctgcgacgtgaagctggtggaaaagagcttcgagacagacaccaacctgaacttccagaacctgagcgtgatcggcttcagaatcctgctgctgaaagtggccggctttaacctgctgatgaccctgcggctgtggtccagcaaacggggcagaaagaaactcctgtatatattcaaacaaccatttatgagaccagtacaaactactcaagaggaagatggctgtagctgccgatttccagaagaagaagaaggaggatgtgaactgagagtgaagttcagcagaagcgccgacgcccctgcctaccagcagggacagaaccaactgtacaacgagctgaacctgggcagacgggaagagtacgacgtgctggacaagcggagaggcagggaccctgagatgggcggaaagccccagcggagaaagaacccccaggaaggactgtataacgaactccagaaagacaagatggccgaagcctacagcgagatcggcatgaagggcgagcggagaagaggcaagggccacgatggcctgtaccagggcctgagcaccgccaccaaggacacctatgacgccctgcacatgcaggccctgcctccaaga

SEQ ID NO: 27659 - DNA, 927 bp, synthetic construct
  source 1..927: mol_type = other DNA
cccaagcctaccatcttcctgccctctatcgccgagacaaagctccagaaggccggcacctacctgtgcctgctggaaaagttcttcccagatgtgattaagatccactggcaggaaaagaagtccaacaccatcctgggcagccaggaaggcaacaccatgaagaccaacgacacctacatgaagttcagctggctgaccgtgcccgagaagtccctggacaaagaacacagatgcatcgtgcggcacgaaaacaacaagaacggcgtggaccaggaaatcatccccgaggacacattcttcccaagccccgagagcagctgcgacgtgaagctggtggaaaagagcttcgagacagacaccaacctgaacttccagaacctgagcgtgatcggcttcagaatcctgctgctgaaagtggccggctttaacctgctgatgaccctgcggctgtggtccagcaaacggggcagaaagaaactcctgtatatattcaaacaaccatttatgagaccagtacaaactactcaagaggaagatggctgtagctgccgatttccagaagaagaagaaggaggatgtgaactgagagtgaagttcagcagaagcgccgacgcccctgcctaccagcagggacagaaccaactgtacaacgagctgaacctgggcagacgggaagagtacgacgtgctggacaagcggagaggcagggaccctgagatgggcggaaagccccagcggagaaagaacccccaggaaggactgtataacgaactccagaaagacaagatggccgaagcctacagcgagatcggcatgaagggcgagcggagaagaggcaagggccacgatggcctgtaccagggcctgagcaccgccaccaaggacacctatgacgccctgcacatgcaggccctgcctccaaga

SEQ ID NO: 27660 - DNA, 909 bp, synthetic construct
  source 1..909: mol_type = other DNA
cccaagcctaccatcttcctgccctctatcgccgagacaaagctccagaaggccggcacctacctgtgcctgctggaaaagttcttcccagatgtgattaagatccactggcaggaaaagaagtccaacaccatcctgggcagccaggaaggcaacaccatgaagaccaacgacacctacatgaagttcagctggctgaccgtgcccgagaagtccctggacaaagaacacagatgcatcgtgcggcacgaaaacaacaagaacggcgtggaccaggaaatcatcggcagagccgattgcggctttaccagcgagagctaccagcagggcgtgctgagcgccaccatcctgtacgagatcctgctgggcaaggccaccctgtacgccgtgctggtgtctgccctggtgctgatggctatggtcaagcggaaggacagccggggaaaacggggcagaaagaaactcctgtatatattcaaacaaccatttatgagaccagtacaaactactcaagaggaagatggctgtagctgccgatttccagaagaagaagaaggaggatgtgaactgagagtgaagttcagcagaagcgccgacgcccctgcctaccagcagggacagaaccaactgtacaacgagctgaacctgggcagacgggaagagtacgacgtgctggacaagcggagaggcagggaccctgagatgggcggaaagccccagcggagaaagaacccccaggaaggactgtataacgaactccagaaagacaagatggccgaagcctacagcgagatcggcatgaagggcgagcggagaagaggcaagggccacgatggcctgtaccagggcctgagcaccgccaccaaggacacctatgacgccctgcacatgcaggccctgcctccaaga

SEQ ID NO: 27661 - DNA, 903 bp, synthetic construct
  source 1..903: mol_type = other DNA
cccaagcctaccatcttcctgccctctatcgccgagacaaagctccagaaggccggcacctacctgtgcctgctggaaaagttcttcccagatgtgattaagatccactggcaggaaaagaagtccaacaccatcctgggcagccaggaaggcaacaccatgaagaccaacgacacctacatgaagttcagctggctgaccgtgcccgagaagtccctggacaaagaacacagatgcatcgtgcggcacgaaaacaacaagaacggcgtggaccaggaaatcatcgccgattgcggctttaccagcgagagctaccagcagggcgtgctgagcgccaccatcctgtacgagatcctgctgggcaaggccaccctgtacgccgtgctggtgtctgccctggtgctgatggctatggtcaagcggaaggacagccggggaaaacggggcagaaagaaactcctgtatatattcaaacaaccatttatgagaccagtacaaactactcaagaggaagatggctgtagctgccgatttccagaagaagaagaaggaggatgtgaactgagagtgaagttcagcagaagcgccgacgcccctgcctaccagcagggacagaaccaactgtacaacgagctgaacctgggcagacgggaagagtacgacgtgctggacaagcggagaggcagggaccctgagatgggcggaaagccccagcggagaaagaacccccaggaaggactgtataacgaactccagaaagacaagatggccgaagcctacagcgagatcggcatgaagggcgagcggagaagaggcaagggccacgatggcctgtaccagggcctgagcaccgccaccaaggacacctatgacgccctgcacatgcaggccctgcctccaaga

SEQ ID NO: 27662 - DNA, 933 bp, synthetic construct
  source 1..933: mol_type = other DNA
cccaagcctaccatcttcctgccctctatcgccgagacaaagctccagaaggccggcacctacctgtgcctgctggaaaagttcttcccagatgtgattaagatccactggcaggaaaagaagtccaacaccatcctgggcagccaggaaggcaacaccatgaagaccaacgacacctacatgaagttcagctggctgaccgtgcccgagaagtccctggacaaagaacacagatgcatcgtgcggcacgaaaacaacaagaacggcgtggaccaggaaatcatccagatcgtgtctgccgaagcctggggcagagccgattgcggctttaccagcgagagctaccagcagggcgtgctgagcgccaccatcctgtacgagatcctgctgggcaaggccaccctgtacgccgtgctggtgtctgccctggtgctgatggctatggtcaagcggaaggacagccggggaaaacggggcagaaagaaactcctgtatatattcaaacaaccatttatgagaccagtacaaactactcaagaggaagatggctgtagctgccgatttccagaagaagaagaaggaggatgtgaactgagagtgaagttcagcagaagcgccgacgcccctgcctaccagcagggacagaaccaactgtacaacgagctgaacctgggcagacgggaagagtacgacgtgctggacaagcggagaggcagggaccctgagatgggcggaaagccccagcggagaaagaacccccaggaaggactgtataacgaactccagaaagacaagatggccgaagcctacagcgagatcggcatgaagggcgagcggagaagaggcaagggccacgatggcctgtaccagggcctgagcaccgccaccaaggacacctatgacgccctgcacatgcaggccctgcctccaaga

SEQ ID NO: 27663 - DNA, 957 bp, synthetic construct; identical to SEQ ID NO: 27099
  source 1..957: mol_type = other DNA

SEQ ID NO: 27664 - DNA, 951 bp, synthetic construct
  source 1..951: mol_type = other DNA
cccaagcctaccatcttcctgccctctatcgccgagacaaagctccagaaggccggcacctacctgtgcctgctggaaaagttcttcccagatgtgattaagatccactggcaggaaaagaagtccaacaccatcctgggcagccaggaaggcaacaccatgaagaccaacgacacctacatgaagttcagctggctgaccgtgcccgagaagtccctggacaaagaacacagatgcatcgtgcggcacgaaaacaacaagaacggcgtggaccaggaaatcatccccatcaagaccgatgtgattacaatggaccccaaggacaactgctccaaggacgccaacgataccctgctgctccagctgaccaacaccagcgcctactacatgtacttgttgctgctgctgaagtccgtggtgtacttcgccatcatcacatgctgcctgctgcggagaaccgccttctgctgcaacggcgagaagtctaaacggggcagaaagaaactcctgtatatattcaaacaaccatttatgagaccagtacaaactactcaagaggaagatggctgtagctgccgatttccagaagaagaagaaggaggatgtgaactgagagtgaagttcagcagaagcgccgacgcccctgcctaccagcagggacagaaccaactgtacaacgagctgaacctgggcagacgggaagagtacgacgtgctggacaagcggagaggcagggaccctgagatgggcggaaagccccagcggagaaagaacccccaggaaggactgtataacgaactccagaaagacaagatggccgaagcctacagcgagatcggcatgaagggcgagcggagaagaggcaagggccacgatggcctgtaccagggcctgagcaccgccaccaaggacacctatgacgccctgcacatgcaggccctgcctccaaga

SEQ ID NO: 27665 - DNA, 927 bp, synthetic construct
  source 1..927: mol_type = other DNA
cccaagcctaccatcttcctgccctctatcgccgagacaaagctccagaaggccggcacctacctgtgcctgctggaaaagttcttcccagatgtgattaagatccactggcaggaaaagaagtccaacaccatcctgggcagccaggaaggcaacaccatgaagaccaacgacacctacatgaagttcagctggctgaccgtgcccgagaagtccctggacaaagaacacagatgcatcgtgcggcacgaaaacaacaagaacggcgtggaccaggaaatcatcatggaccccaaggacaactgctccaaggacgccaacgataccctgctgctccagctgaccaacaccagcgcctactacatgtacttgttgctgctgctgaagtccgtggtgtacttcgccatcatcacatgctgcctgctgcggagaaccgccttctgctgcaacggcgagaagtctaaacggggcagaaagaaactcctgtatatattcaaacaaccatttatgagaccagtacaaactactcaagaggaagatggctgtagctgccgatttccagaagaagaagaaggaggatgtgaactgagagtgaagttcagcagaagcgccgacgcccctgcctaccagcagggacagaaccaactgtacaacgagctgaacctgggcagacgggaagagtacgacgtgctggacaagcggagaggcagggaccctgagatgggcggaaagccccagcggagaaagaacccccaggaaggactgtataacgaactccagaaagacaagatggccgaagcctacagcgagatcggcatgaagggcgagcggagaagaggcaagggccacgatggcctgtaccagggcctgagcaccgccaccaaggacacctatgacgccctgcacatgcaggccctgcctccaaga

SEQ ID NO: 27666 - DNA, 951 bp, synthetic construct; identical to SEQ ID NO: 27664
  source 1..951: mol_type = other DNA

SEQ ID NO: 27667 - DNA, 909 bp, synthetic construct
  source 1..909: mol_type = other DNA
cccaagcctaccatcttcctgccctctatcgccgagacaaagctccagaaggccggcacctacctgtgcctgctggaaaagttcttcccagatgtgattaagatccactggcaggaaaagaagtccaacaccatcctgggcagccaggaaggcaacaccatgaagaccaacgacacctacatgaagttcagctggctgaccgtgcccgagaagtccctggacaaagaacacagatgcatcgtgcggcacgaaaacaacaagaacggcgtggaccaggaaatcatctgctccaaggacgccaacgataccctgctgctccagctgaccaacaccagcgcctactacatgtacttgttgctgctgctgaagtccgtggtgtacttcgccatcatcacatgctgcctgctgcggagaaccgccttctgctgcaacggcgagaagtctaaacggggcagaaagaaactcctgtatatattcaaacaaccatttatgagaccagtacaaactactcaagaggaagatggctgtagctgccgatttccagaagaagaagaaggaggatgtgaactgagagtgaagttcagcagaagcgccgacgcccctgcctaccagcagggacagaaccaactgtacaacgagctgaacctgggcagacgggaagagtacgacgtgctggacaagcggagaggcagggaccctgagatgggcggaaagccccagcggagaaagaacccccaggaaggactgtataacgaactccagaaagacaagatggccgaagcctacagcgagatcggcatgaagggcgagcggagaagaggcaagggccacgatggcctgtaccagggcctgagcaccgccaccaaggacacctatgacgccctgcacatgcaggccctgcctccaaga

SEQ ID NO: 27668 - DNA, 954 bp, synthetic construct
  source 1..954: mol_type = other DNA
cccaagcctaccatcttcctgccctctatcgccgagacaaagctccagaaggccggcacctacctgtgcctgctggaaaagttcttcccagatgtgattaagatccactggcaggaaaagaagtccaacaccatcctgggcagccaggaaggcaacaccatgaagaccaacgacacctacatgaagttcagctggctgaccgtgcccgagaagtccctggacaaagaacacagatgcatcgtgcggcacgaaaacaacaagaacggcgtggaccaggaaatcatcgaagtgaaaaccgactccaccgaccacgtgaagcccaaagagacagagaacaccaagcagcccagcaagagctgccacaagcccaaggccatcgtgcacaccgagaaagtgaacatgatgagcctgaccgtgctgggcctgcggatgctgttcgccaaaaccgtggccgtgaacttcctgctgaccgccaagctgttcttcctcaaacggggcagaaagaaactcctgtatatattcaaacaaccatttatgagaccagtacaaactactcaagaggaagatggctgtagctgccgatttccagaagaagaagaaggaggatgtgaactgagagtgaagttcagcagaagcgccgacgcccctgcctaccagcagggacagaaccaactgtacaacgagctgaacctgggcagacgggaagagtacgacgtgctggacaagcggagaggcagggaccctgagatgggcggaaagccccagcggagaaagaacccccaggaaggactgtataacgaactccagaaagacaagatggccgaagcctacagcgagatcggcatgaagggcgagcggagaagaggcaagggccacgatggcctgtaccagggcctgagcaccgccaccaaggacacctatgacgccctgcacatgcaggccctgcctccaaga

SEQ ID NO: 27669 - DNA, 933 bp, synthetic construct
  source 1..933: mol_type = other DNA
cccaagcctaccatcttcctgccctctatcgccgagacaaagctccagaaggccggcacctacctgtgcctgctggaaaagttcttcccagatgtgattaagatccactggcaggaaaagaagtccaacaccatcctgggcagccaggaaggcaacaccatgaagaccaacgacacctacatgaagttcagctggctgaccgtgcccgagaagtccctggacaaagaacacagatgcatcgtgcggcacgaaaacaacaagaacggcgtggaccaggaaatcatcgaccacgtgaagcccaaagagacagagaacaccaagcagcccagcaagagctgccacaagcccaaggccatcgtgcacaccgagaaagtgaacatgatgagcctgaccgtgctgggcctgcggatgctgttcgccaaaaccgtggccgtgaacttcctgctgaccgccaagctgttcttcctcaaacggggcagaaagaaactcctgtatatattcaaacaaccatttatgagaccagtacaaactactcaagaggaagatggctgtagctgccgatttccagaagaagaagaaggaggatgtgaactgagagtgaagttcagcagaagcgccgacgcccctgcctaccagcagggacagaaccaactgtacaacgagctgaacctgggcagacgggaagagtacgacgtgctggacaagcggagaggcagggaccctgagatgggcggaaagccccagcggagaaagaacccccaggaaggactgtataacgaactccagaaagacaagatggccgaagcctacagcgagatcggcatgaagggcgagcggagaagaggcaagggccacgatggcctgtaccagggcctgagcaccgccaccaaggacacctatgacgccctgcacatgcaggccctgcctccaaga

SEQ ID NO: 27670 - DNA, 900 bp, synthetic construct
  source 1..900: mol_type = other DNA
agccagcctcacaccaagcccagcgtgttcgtgatgaagaacggcaccaacgtggcctgcctcgtgaaagagttctaccccaaggacatcaggatcaacctggtgtccagcaagaagatcaccgagttcgaccccgccatcgtgatctcccccagcggcaagtacaacgccgtgaagctggggaagtacgaggacagcaacagcgtgacctgctccgtgcagcacgacaacaagaccgtgcacagcaccgactttatccccgaggacacattcttcccaagccccgagagcagctgcgacgtgaagctggtggaaaagagcttcgagacagacaccaacctgaacttccagaacctgagcgtgatcggcttcagaatcctgctgctgaaagtggccggctttaacctgctgatgaccctgcggctgtggtccagcaaacggggcagaaagaaactcctgtatatattcaaacaaccatttatgagaccagtacaaactactcaagaggaagatggctgtagctgccgatttccagaagaagaagaaggaggatgtgaactgagagtgaagttcagcagaagcgccgacgcccctgcctaccagcagggacagaaccaactgtacaacgagctgaacctgggcagacgggaagagtacgacgtgctggacaagcggagaggcagggaccctgagatgggcggaaagccccagcggagaaagaacccccaggaaggactgtataacgaactccagaaagacaagatggccgaagcctacagcgagatcggcatgaagggcgagcggagaagaggcaagggccacgatggcctgtaccagggcctgagcaccgccaccaaggacacctatgacgccctgcacatgcaggccctgcctccaaga

SEQ ID NO: 27671 - DNA, 870 bp, synthetic construct
  source 1..870: mol_type = other DNA
agccagcctcacaccaagcccagcgtgttcgtgatgaagaacggcaccaacgtggcctgcctcgtgaaagagttctaccccaaggacatcaggatcaacctggtgtccagcaagaagatcaccgagttcgaccccgccatcgtgatctcccccagcggcaagtacaacgccgtgaagctggggaagtacgaggacagcaacagcgtgacctgctccgtgcagcacgacaacaagaccgtgcacagcaccgactttgagagcagctgcgacgtgaagctggtggaaaagagcttcgagacagacaccaacctgaacttccagaacctgagcgtgatcggcttcagaatcctgctgctgaaagtggccggctttaacctgctgatgaccctgcggctgtggtccagcaaacggggcagaaagaaactcctgtatatattcaaacaaccatttatgagaccagtacaaactactcaagaggaagatggctgtagctgccgatttccagaagaagaagaaggaggatgtgaactgagagtgaagttcagcagaagcgccgacgcccctgcctaccagcagggacagaaccaactgtacaacgagctgaacctgggcagacgggaagagtacgacgtgctggacaagcggagaggcagggaccctgagatgggcggaaagccccagcggagaaagaacccccaggaaggactgtataacgaactccagaaagacaagatggccgaagcctacagcgagatcggcatgaagggcgagcggagaagaggcaagggccacgatggcctgtaccagggcctgagcaccgccaccaaggacacctatgacgccctgcacatgcaggccctgcctccaaga

SEQ ID NO: 27672 - DNA, 897 bp, synthetic construct
  source 1..897: mol_type = other DNA
agccagcctcacaccaagcccagcgtgttcgtgatgaagaacggcaccaacgtggcctgcctcgtgaaagagttctaccccaaggacatcaggatcaacctggtgtccagcaagaagatcaccgagttcgaccccgccatcgtgatctcccccagcggcaagtacaacgccgtgaagctggggaagtacgaggacagcaacagcgtgacctgctccgtgcagcacgacaacaagaccgtgcacagcaccgactttcccgaggacacattcttcccaagccccgagagcagctgcgacgtgaagctggtggaaaagagcttcgagacagacaccaacctgaacttccagaacctgagcgtgatcggcttcagaatcctgctgctgaaagtggccggctttaacctgctgatgaccctgcggctgtggtccagcaaacggggcagaaagaaactcctgtatatattcaaacaaccatttatgagaccagtacaaactactcaagaggaagatggctgtagctgccgatttccagaagaagaagaaggaggatgtgaactgagagtgaagttcagcagaagcgccgacgcccctgcctaccagcagggacagaaccaactgtacaacgagctgaacctgggcagacgggaagagtacgacgtgctggacaagcggagaggcagggaccctgagatgggcggaaagccccagcggagaaagaacccccaggaaggactgtataacgaactccagaaagacaagatggccgaagcctacagcgagatcggcatgaagggcgagcggagaagaggcaagggccacgatggcctgtaccagggcctgagcaccgccaccaaggacacctatgacgccctgcacatgcaggccctgcctccaaga

SEQ ID NO: 27673 - DNA, 879 bp, synthetic construct
  source 1..879: mol_type = other DNA
agccagcctcacaccaagcccagcgtgttcgtgatgaagaacggcaccaacgtggcctgcctcgtgaaagagttctaccccaaggacatcaggatcaacctggtgtccagcaagaagatcaccgagttcgaccccgccatcgtgatctcccccagcggcaagtacaacgccgtgaagctggggaagtacgaggacagcaacagcgtgacctgctccgtgcagcacgacaacaagaccgtgcacagcaccgactttggcagagccgattgcggctttaccagcgagagctaccagcagggcgtgctgagcgccaccatcctgtacgagatcctgctgggcaaggccaccctgtacgccgtgctggtgtctgccctggtgctgatggctatggtcaagcggaaggacagccggggaaaacggggcagaaagaaactcctgtatatattcaaacaaccatttatgagaccagtacaaactactcaagaggaagatggctgtagctgccgatttccagaagaagaagaaggaggatgtgaactgagagtgaagttcagcagaagcgccgacgcccctgcctaccagcagggacagaaccaactgtacaacgagctgaacctgggcagacgggaagagtacgacgtgctggacaagcggagaggcagggaccctgagatgggcggaaagccccagcggagaaagaacccccaggaaggactgtataacgaactccagaaagacaagatggccgaagcctacagcgagatcggcatgaagggcgagcggagaagaggcaagggccacgatggcctgtaccagggcctgagcaccgccaccaaggacacctatgacgccctgcacatgcaggccctgcctccaaga

SEQ ID NO: 27674 - DNA, 873 bp, synthetic construct
  source 1..873: mol_type = other DNA
agccagcctcacaccaagcccagcgtgttcgtgatgaagaacggcaccaacgtggcctgcctcgtgaaagagttctaccccaaggacatcaggatcaacctggtgtccagcaagaagatcaccgagttcgaccccgccatcgtgatctcccccagcggcaagtacaacgccgtgaagctggggaagtacgaggacagcaacagcgtgacctgctccgtgcagcacgacaacaagaccgtgcacagcaccgactttgccgattgcggctttaccagcgagagctaccagcagggcgtgctgagcgccaccatcctgtacgagatcctgctgggcaaggccaccctgtacgccgtgctggtgtctgccctggtgctgatggctatggtcaagcggaaggacagccggggaaaacggggcagaaagaaactcctgtatatattcaaacaaccatttatgagaccagtacaaactactcaagaggaagatggctgtagctgccgatttccagaagaagaagaaggaggatgtgaactgagagtgaagttcagcagaagcgccgacgcccctgcctaccagcagggacagaaccaactgtacaacgagctgaacctgggcagacgggaagagtacgacgtgctggacaagcggagaggcagggaccctgagatgggcggaaagccccagcggagaaagaacccccaggaaggactgtataacgaactccagaaagacaagatggccgaagcctacagcgagatcggcatgaagggcgagcggagaagaggcaagggccacgatggcctgtaccagggcctgagcaccgccaccaaggacacctatgacgccctgcacatgcaggccctgcctccaaga

SEQ ID NO: 27675 - DNA, 903 bp, synthetic construct
  source 1..903: mol_type = other DNA
agccagcctcacaccaagcccagcgtgttcgtgatgaagaacggcaccaacgtggcctgcctcgtgaaagagttctaccccaaggacatcaggatcaacctggtgtccagcaagaagatcaccgagttcgaccccgccatcgtgatctcccccagcggcaagtacaacgccgtgaagctggggaagtacgaggacagcaacagcgtgacctgctccgtgcagcacgacaacaagaccgtgcacagcaccgactttcagatcgtgtctgccgaagcctggggcagagccgattgcggctttaccagcgagagctaccagcagggcgtgctgagcgccaccatcctgtacgagatcctgctgggcaaggccaccctgtacgccgtgctggtgtctgccctggtgctgatggctatggtcaagcggaaggacagccggggaaaacggggcagaaagaaactcctgtatatattcaaacaaccatttatgagaccagtacaaactactcaagaggaagatggctgtagctgccgatttccagaagaagaagaaggaggatgtgaactgagagtgaagttcagcagaagcgccgacgcccctgcctaccagcagggacagaaccaactgtacaacgagctgaacctgggcagacgggaagagtacgacgtgctggacaagcggagaggcagggaccctgagatgggcggaaagccccagcggagaaagaacccccaggaaggactgtataacgaactccagaaagacaagatggccgaagcctacagcgagatcggcatgaagggcgagcggagaagaggcaagggccacgatggcctgtaccagggcctgagcaccgccaccaaggacacctatgacgccctgcacatgcaggccctgcctccaaga

SEQ ID NO: 27676 - DNA, 927 bp, synthetic construct
  source 1..927: mol_type = other DNA
agccagcctcacaccaagcccagcgtgttcgtgatgaagaacggcaccaacgtggcctgcctcgtgaaagagttctaccccaaggacatcaggatcaacctggtgtccagcaagaagatcaccgagttcgaccccgccatcgtgatctcccccagcggcaagtacaacgccgtgaagctggggaagtacgaggacagcaacagcgtgacctgctccgtgcagcacgacaacaagaccgtgcacagcaccgactttttcccacccatcaagaccgatgtgattacaatggaccccaaggacaactgctccaaggacgccaacgataccctgctgctccagctgaccaacaccagcgcctactacatgtacttgttgctgctgctgaagtccgtggtgtacttcgccatcatcacatgctgcctgctgcggagaaccgccttctgctgcaacggcgagaagtctaaacggggcagaaagaaactcctgtatatattcaaacaaccatttatgagaccagtacaaactactcaagaggaagatggctgtagctgccgatttccagaagaagaagaaggaggatgtgaactgagagtgaagttcagcagaagcgccgacgcccctgcctaccagcagggacagaaccaactgtacaacgagctgaacctgggcagacgggaagagtacgacgtgctggacaagcggagaggcagggaccctgagatgggcggaaagccccagcggagaaagaacccccaggaaggactgtataacgaactccagaaagacaagatggccgaagcctacagcgagatcggcatgaagggcgagcggagaagaggcaagggccacgatggcctgtaccagggcctgagcaccgccaccaaggacacctatgacgccctgcacatgcaggccctgcctccaaga

SEQ ID NO: 27677 - DNA, 921 bp, synthetic construct
  source 1..921: mol_type = other DNA
agccagcctcacaccaagcccagcgtgttcgtgatgaagaacggcaccaacgtggcctgcctcgtgaaagagttctaccccaaggacatcaggatcaacctggtgtccagcaagaagatcaccgagttcgaccccgccatcgtgatctcccccagcggcaagtacaacgccgtgaagctggggaagtacgaggacagcaacagcgtgacctgctccgtgcagcacgacaacaagaccgtgcacagcaccgactttcccatcaagaccgatgtgattacaatggaccccaaggacaactgctccaaggacgccaacgataccctgctgctccagctgaccaacaccagcgcctactacatgtacttgttgctgctgctgaagtccgtggtgtacttcgccatcatcacatgctgcctgctgcggagaaccgccttctgctgcaacggcgagaagtctaaacggggcagaaagaaactcctgtatatattcaaacaaccatttatgagaccagtacaaactactcaagaggaagatggctgtagctgccgatttccagaagaagaagaaggaggatgtgaactgagagtgaagttcagcagaagcgccgacgcccctgcctaccagcagggacagaaccaactgtacaacgagctgaacctgggcagacgggaagagtacgacgtgctggacaagcggagaggcagggaccctgagatgggcggaaagccccagcggagaaagaacccccaggaaggactgtataacgaactccagaaagacaagatggccgaagcctacagcgagatcggcatgaagggcgagcggagaagaggcaagggccacgatggcctgtaccagggcctgagcaccgccaccaaggacacctatgacgccctgcacatgcaggccctgcctccaaga

SEQ ID NO: 27678 - DNA, 897 bp, synthetic construct
  source 1..897: mol_type = other DNA
agccagcctcacaccaagcccagcgtgttcgtgatgaagaacggcaccaacgtggcctgcctcgtgaaagagttctaccccaaggacatcaggatcaacctggtgtccagcaagaagatcaccgagttcgaccccgccatcgtgatctcccccagcggcaagtacaacgccgtgaagctggggaagtacgaggacagcaacagcgtgacctgctccgtgcagcacgacaacaagaccgtgcacagcaccgactttatggaccccaaggacaactgctccaaggacgccaacgataccctgctgctccagctgaccaacaccagcgcctactacatgtacttgttgctgctgctgaagtccgtggtgtacttcgccatcatcacatgctgcctgctgcggagaaccgccttctgctgcaacggcgagaagtctaaacggggcagaaagaaactcctgtatatattcaaacaaccatttatgagaccagtacaaactactcaagaggaagatggctgtagctgccgatttccagaagaagaagaaggaggatgtgaactgagagtgaagttcagcagaagcgccgacgcccctgcctaccagcagggacagaaccaactgtacaacgagctgaacctgggcagacgggaagagtacgacgtgctggacaagcggagaggcagggaccctgagatgggcggaaagccccagcggagaaagaacccccaggaaggactgtataacgaactccagaaagacaagatggccgaagcctacagcgagatcggcatgaagggcgagcggagaagaggcaagggccacgatggcctgtaccagggcctgagcaccgccaccaaggacacctatgacgccctgcacatgcaggccctgcctccaaga

SEQ ID NO: 27679 - DNA, 924 bp, synthetic construct; identical to SEQ ID NO: 26623
  source 1..924: mol_type = other DNA

SEQ ID NO: 27680 - DNA, 903 bp, synthetic construct
  source 1..903: mol_type = other DNA
agccagcctcacaccaagcccagcgtgttcgtgatgaagaacggcaccaacgtggcctgcctcgtgaaagagttctaccccaaggacatcaggatcaacctggtgtccagcaagaagatcaccgagttcgaccccgccatcgtgatctcccccagcggcaagtacaacgccgtgaagctggggaagtacgaggacagcaacagcgtgacctgctccgtgcagcacgacaacaagaccgtgcacagcaccgactttgaccacgtgaagcccaaagagacagagaacaccaagcagcccagcaagagctgccacaagcccaaggccatcgtgcacaccgagaaagtgaacatgatgagcctgaccgtgctgggcctgcggatgctgttcgccaaaaccgtggccgtgaacttcctgctgaccgccaagctgttcttcctcaaacggggcagaaagaaactcctgtatatattcaaacaaccatttatgagaccagtacaaactactcaagaggaagatggctgtagctgccgatttccagaagaagaagaaggaggatgtgaactgagagtgaagttcagcagaagcgccgacgcccctgcctaccagcagggacagaaccaactgtacaacgagctgaacctgggcagacgggaagagtacgacgtgctggacaagcggagaggcagggaccctgagatgggcggaaagccccagcggagaaagaacccccaggaaggactgtataacgaactccagaaagacaagatggccgaagcctacagcgagatcggcatgaagggcgagcggagaagaggcaagggccacgatggcctgtaccagggcctgagcaccgccaccaaggacacctatgacgccctgcacatgcaggccctgcctccaaga

SEQ ID NO: 27681 - DNA, 921 bp, synthetic construct
  source 1..921: mol_type = other DNA
agccagcctcacaccaagcccagcgtgttcgtgatgaagaacggcaccaacgtggcctgcctcgtgaaagagttctaccccaaggacatcaggatcaacctggtgtccagcaagaagatcaccgagttcgaccccgccatcgtgatctcccccagcggcaagtacaacgccgtgaagctggggaagtacgaggacagcaacagcgtgacctgctccgtgcagcacgacaacaagaccgtgcacagcaccgactttgaagtgaaaaccgactccaccatccccgaggacacattcttcccaagccccgagagcagctgcgacgtgaagctggtggaaaagagcttcgagacagacaccaacctgaacttccagaacctgagcgtgatcggcttcagaatcctgctgctgaaagtggccggctttaacctgctgatgaccctgcggctgtggtccagcaaacggggcagaaagaaactcctgtatatattcaaacaaccatttatgagaccagtacaaactactcaagaggaagatggctgtagctgccgatttccagaagaagaagaaggaggatgtgaactgagagtgaagttcagcagaagcgccgacgcccctgcctaccagcagggacagaaccaactgtacaacgagctgaacctgggcagacgggaagagtacgacgtgctggacaagcggagaggcagggaccctgagatgggcggaaagccccagcggagaaagaacccccaggaaggactgtataacgaactccagaaagacaagatggccgaagcctacagcgagatcggcatgaagggcgagcggagaagaggcaagggccacgatggcctgtaccagggcctgagcaccgccaccaaggacacctatgacgccctgcacatgcaggccctgcctccaaga

SEQ ID NO: 27682 - DNA, 891 bp, synthetic construct
  source 1..891: mol_type = other DNA
agccagcctcacaccaagcccagcgtgttcgtgatgaagaacggcaccaacgtggcctgcctcgtgaaagagttctaccccaaggacatcaggatcaacctggtgtccagcaagaagatcaccgagttcgaccccgccatcgtgatctcccccagcggcaagtacaacgccgtgaagctggggaagtacgaggacagcaacagcgtgacctgctccgtgcagcacgacaacaagaccgtgcacagcaccgactttgaagtgaaaaccgactccaccgagagcagctgcgacgtgaagctggtggaaaagagcttcgagacagacaccaacctgaacttccagaacctgagcgtgatcggcttcagaatcctgctgctgaaagtggccggctttaacctgctgatgaccctgcggctgtggtccagcaaacggggcagaaagaaactcctgtatatattcaaacaaccatttatgagaccagtacaaactactcaagaggaagatggctgtagctgccgatttccagaagaagaagaaggaggatgtgaactgagagtgaagttcagcagaagcgccgacgcccctgcctaccagcagggacagaaccaactgtacaacgagctgaacctgggcagacgggaagagtacgacgtgctggacaagcggagaggcagggaccctgagatgggcggaaagccccagcggagaaagaacccccaggaaggactgtataacgaactccagaaagacaagatggccgaagcctacagcgagatcggcatgaagggcgagcggagaagaggcaagggccacgatggcctgtaccagggcctgagcaccgccaccaaggacacctatgacgccctgcacatgcaggccctgcctccaaga

SEQ ID NO: 27683 - DNA, 918 bp, synthetic construct
  source 1..918: mol_type = other DNA
agccagcctcacaccaagcccagcgtgttcgtgatgaagaacggcaccaacgtggcctgcctcgtgaaagagttctaccccaaggacatcaggatcaacctggtgtccagcaagaagatcaccgagttcgaccccgccatcgtgatctcccccagcggcaagtacaacgccgtgaagctggggaagtacgaggacagcaacagcgtgacctgctccgtgcagcacgacaacaagaccgtgcacagcaccgactttgaagtgaaaaccgactccacccccgaggacacattcttcccaagccccgagagcagctgcgacgtgaagctggtggaaaagagcttcgagacagacaccaacctgaacttccagaacctgagcgtgatcggcttcagaatcctgctgctgaaagtggccggctttaacctgctgatgaccctgcggctgtggtccagcaaacggggcagaaagaaactcctgtatatattcaaacaaccatttatgagaccagtacaaactactcaagaggaagatggctgtagctgccgatttccagaagaagaagaaggaggatgtgaactgagagtgaagttcagcagaagcgccgacgcccctgcctaccagcagggacagaaccaactgtacaacgagctgaacctgggcagacgggaagagtacgacgtgctggacaagcggagaggcagggaccctgagatgggcggaaagccccagcggagaaagaacccccaggaaggactgtataacgaactccagaaagacaagatggccgaagcctacagcgagatcggcatgaagggcgagcggagaagaggcaagggccacgatggcctgtaccagggcctgagcaccgccaccaaggacacctatgacgccctgcacatgcaggccctgcctccaaga

SEQ ID NO: 27684 - DNA, 900 bp, synthetic construct
  source 1..900: mol_type = other DNA
agccagcctcacaccaagcccagcgtgttcgtgatgaagaacggcaccaacgtggcctgcctcgtgaaagagttctaccccaaggacatcaggatcaacctggtgtccagcaagaagatcaccgagttcgaccccgccatcgtgatctcccccagcggcaagtacaacgccgtgaagctggggaagtacgaggacagcaacagcgtgacctgctccgtgcagcacgacaacaagaccgtgcacagcaccgactttgaagtgaaaaccgactccaccggcagagccgattgcggctttaccagcgagagctaccagcagggcgtgctgagcgccaccatcctgtacgagatcctgctgggcaaggccaccctgtacgccgtgctggtgtctgccctggtgctgatggctatggtcaagcggaaggacagccggggaaaacggggcagaaagaaactcctgtatatattcaaacaaccatttatgagaccagtacaaactactcaagaggaagatggctgtagctgccgatttccagaagaagaagaaggaggatgtgaactgagagtgaagttcagcagaagcgccgacgcccctgcctaccagcagggacagaaccaactgtacaacgagctgaacctgggcagacgggaagagtacgacgtgctggacaagcggagaggcagggaccctgagatgggcggaaagccccagcggagaaagaacccccaggaaggactgtataacgaactccagaaagacaagatggccgaagcctacagcgagatcggcatgaagggcgagcggagaagaggcaagggccacgatggcctgtaccagggcctgagcaccgccaccaaggacacctatgacgccctgcacatgcaggccctgcctccaaga

SEQ ID NO: 27685 - DNA, 894 bp, synthetic construct
  source 1..894: mol_type = other DNA
agccagcctcacaccaagcccagcgtgttcgtgatgaagaacggcaccaacgtggcctgcctcgtgaaagagttctaccccaaggacatcaggatcaacctggtgtccagcaagaagatcaccgagttcgaccccgccatcgtgatctcccccagcggcaagtacaacgccgtgaagctggggaagtacgaggacagcaacagcgtgacctgctccgtgcagcacgacaacaagaccgtgcacagcaccgactttgaagtgaaaaccgactccaccgccgattgcggctttaccagcgagagctaccagcagggcgtgctgagcgccaccatcctgtacgagatcctgctgggcaaggccaccctgtacgccgtgctggtgtctgccctggtgctgatggctatggtcaagcggaaggacagccggggaaaacggggcagaaagaaactcctgtatatattcaaacaaccatttatgagaccagtacaaactactcaagaggaagatggctgtagctgccgatttccagaagaagaagaaggaggatgtgaactgagagtgaagttcagcagaagcgccgacgcccctgcctaccagcagggacagaaccaactgtacaacgagctgaacctgggcagacgggaagagtacgacgtgctggacaagcggagaggcagggaccctgagatgggcggaaagccccagcggagaaagaacccccaggaaggactgtataacgaactccagaaagacaagatggccgaagcctacagcgagatcggcatgaagggcgagcggagaagaggcaagggccacgatggcctgtaccagggcctgagcaccgccaccaaggacacctatgacgccctgcacatgcaggccctgcctccaaga

SEQ ID NO: 27686 - DNA, 924 bp, synthetic construct
  source 1..924: mol_type = other DNA
agccagcctcacaccaagcccagcgtgttcgtgatgaagaacggcaccaacgtggcctgcctcgtgaaagagttctaccccaaggacatcaggatcaacctggtgtccagcaagaagatcaccgagttcgaccccgccatcgtgatctcccccagcggcaagtacaacgccgtgaagctggggaagtacgaggacagcaacagcgtgacctgctccgtgcagcacgacaacaagaccgtgcacagcaccgactttgaagtgaaaaccgactccacccagatcgtgtctgccgaagcctggggcagagccgattgcggctttaccagcgagagctaccagcagggcgtgctgagcgccaccatcctgtacgagatcctgctgggcaaggccaccctgtacgccgtgctggtgtctgccctggtgctgatggctatggtcaagcggaaggacagccggggaaaacggggcagaaagaaactcctgtatatattcaaacaaccatttatgagaccagtacaaactactcaagaggaagatggctgtagctgccgatttccagaagaagaagaaggaggatgtgaactgagagtgaagttcagcagaagcgccgacgcccctgcctaccagcagggacagaaccaactgtacaacgagctgaacctgggcagacgggaagagtacgacgtgctggacaagcggagaggcagggaccctgagatgggcggaaagccccagcggagaaagaacccccaggaaggactgtataacgaactccagaaagacaagatggccgaagcctacagcgagatcggcatgaagggcgagcggagaagaggcaagggccacgatggcctgtaccagggcctgagcaccgccaccaaggacacctatgacgccctgcacatgcaggccctgcctccaaga

SEQ ID NO: 27687 - DNA, 948 bp, synthetic construct
  source 1..948: mol_type = other DNA
agccagcctcacaccaagcccagcgtgttcgtgatgaagaacggcaccaacgtggcctgcctcgtgaaagagttctaccccaaggacatcaggatcaacctggtgtccagcaagaagatcaccgagttcgaccccgccatcgtgatctcccccagcggcaagtacaacgccgtgaagctggggaagtacgaggacagcaacagcgtgacctgctccgtgcagcacgacaacaagaccgtgcacagcaccgactttgaagtgaaaaccgactccaccttcccacccatcaagaccgatgtgattacaatggaccccaaggacaactgctccaaggacgccaacgataccctgctgctccagctgaccaacaccagcgcctactacatgtacttgttgctgctgctgaagtccgtggtgtacttcgccatcatcacatgctgcctgctgcggagaaccgccttctgctgcaacggcgagaagtctaaacggggcagaaagaaactcctgtatatattcaaacaaccatttatgagaccagtacaaactactcaagaggaagatggctgtagctgccgatttccagaagaagaagaaggaggatgtgaactgagagtgaagttcagcagaagcgccgacgcccctgcctaccagcagggacagaaccaactgtacaacgagctgaacctgggcagacgggaagagtacgacgtgctggacaagcggagaggcagggaccctgagatgggcggaaagccccagcggagaaagaacccccaggaaggactgtataacgaactccagaaagacaagatggccgaagcctacagcgagatcggcatgaagggcgagcggagaagaggcaagggccacgatggcctgtaccagggcctgagcaccgccaccaaggacacctatgacgccctgcacatgcaggccctgcctccaaga

SEQ ID NO: 27688 - DNA, 942 bp, synthetic construct
  source 1..942: mol_type = other DNA
agccagcctcacaccaagcccagcgtgttcgtgatgaagaacggcaccaacgtggcctgcctcgtgaaagagttctaccccaaggacatcaggatcaacctggtgtccagcaagaagatcaccgagttcgaccccgccatcgtgatctcccccagcggcaagtacaacgccgtgaagctggggaagtacgaggacagcaacagcgtgacctgctccgtgcagcacgacaacaagaccgtgcacagcaccgactttgaagtgaaaaccgactccacccccatcaagaccgatgtgattacaatggaccccaaggacaactgctccaaggacgccaacgataccctgctgctccagctgaccaacaccagcgcctactacatgtacttgttgctgctgctgaagtccgtggtgtacttcgccatcatcacatgctgcctgctgcggagaaccgccttctgctgcaacggcgagaagtctaaacggggcagaaagaaactcctgtatatattcaaacaaccatttatgagaccagtacaaactactcaagaggaagatggctgtagctgccgatttccagaagaagaagaaggaggatgtgaactgagagtgaagttcagcagaagcgccgacgcccctgcctaccagcagggacagaaccaactgtacaacgagctgaacctgggcagacgggaagagtacgacgtgctggacaagcggagaggcagggaccctgagatgggcggaaagccccagcggagaaagaacccccaggaaggactgtataacgaactccagaaagacaagatggccgaagcctacagcgagatcggcatgaagggcgagcggagaagaggcaagggccacgatggcctgtaccagggcctgagcaccgccaccaaggacacctatgacgccctgcacatgcaggccctgcctccaaga

SEQ ID NO: 27689 - DNA, 918 bp, synthetic construct
  source 1..918: mol_type = other DNA
agccagcctcacaccaagcccagcgtgttcgtgatgaagaacggcaccaacgtggcctgcctcgtgaaagagttctaccccaaggacatcaggatcaacctggtgtccagcaagaagatcaccgagttcgaccccgccatcgtgatctcccccagcggcaagtacaacgccgtgaagctggggaagtacgaggacagcaacagcgtgacctgctccgtgcagcacgacaacaagaccgtgcacagcaccgactttgaagtgaaaaccgactccaccatggaccccaaggacaactgctccaaggacgccaacgataccctgctgctccagctgaccaacaccagcgcctactacatgtacttgttgctgctgctgaagtccgtggtgtacttcgccatcatcacatgctgcctgctgcggagaaccgccttctgctgcaacggcgagaagtctaaacggggcagaaagaaactcctgtatatattcaaacaaccatttatgagaccagtacaaactactcaagaggaagatggctgtagctgccgatttccagaagaagaagaaggaggatgtgaactgagagtgaagttcagcagaagcgccgacgcccctgcctaccagcagggacagaaccaactgtacaacgagctgaacctgggcagacgggaagagtacgacgtgctggacaagcggagaggcagggaccctgagatgggcggaaagccccagcggagaaagaacccccaggaaggactgtataacgaactccagaaagacaagatggccgaagcctacagcgagatcggcatgaagggcgagcggagaagaggcaagggccacgatggcctgtaccagggcctgagcaccgccaccaaggacacctatgacgccctgcacatgcaggccctgcctccaaga

SEQ ID NO: 27690 - DNA, 942 bp, synthetic construct; identical to SEQ ID NO: 27688
  source 1..942: mol_type = other DNA

SEQ ID NO: 27691 - DNA, 900 bp, synthetic construct
  source 1..900: mol_type = other DNA
agccagcctcacaccaagcccagcgtgttcgtgatgaagaacggcaccaacgtggcctgcctcgtgaaagagttctaccccaaggacatcaggatcaacctggtgtccagcaagaagatcaccgagttcgaccccgccatcgtgatctcccccagcggcaagtacaacgccgtgaagctggggaagtacgaggacagcaacagcgtgacctgctccgtgcagcacgacaacaagaccgtgcacagcaccgactttgaagtgaaaaccgactccacctgctccaaggacgccaacgataccctgctgctccagctgaccaacaccagcgcctactacatgtacttgttgctgctgctgaagtccgtggtgtacttcgccatcatcacatgctgcctgctgcggagaaccgccttctgctgcaacggcgagaagtctaaacggggcagaaagaaactcctgtatatattcaaacaaccatttatgagaccagtacaaactactcaagaggaagatggctgtagctgccgatttccagaagaagaagaaggaggatgtgaactgagagtgaagttcagcagaagcgccgacgcccctgcctaccagcagggacagaaccaactgtacaacgagctgaacctgggcagacgggaagagtacgacgtgctggacaagcggagaggcagggaccctgagatgggcggaaagccccagcggagaaagaacccccaggaaggactgtataacgaactccagaaagacaagatggccgaagcctacagcgagatcggcatgaagggcgagcggagaagaggcaagggccacgatggcctgtaccagggcctgagcaccgccaccaaggacacctatgacgccctgcacatgcaggccctgcctccaaga

SEQ ID NO: 27692 - DNA, 900 bp, synthetic construct; identical to SEQ ID NO: 27670
  source 1..900: mol_type = other DNA

SEQ ID NO: 27693 - DNA, 870 bp, synthetic construct; identical to SEQ ID NO: 27671
  source 1..870: mol_type = other DNA

SEQ ID NO: 27694 - DNA, 897 bp, synthetic construct; identical to SEQ ID NO: 27672
  source 1..897: mol_type = other DNA

SEQ ID NO: 27695 - DNA, 879 bp, synthetic construct; identical to SEQ ID NO: 27673
  source 1..879: mol_type = other DNA

SEQ ID NO: 27696 - DNA, 873 bp, synthetic construct; identical to SEQ ID NO: 27674
  source 1..873: mol_type = other DNA

SEQ ID NO: 27697 - DNA, 903 bp, synthetic construct; identical to SEQ ID NO: 27675
  source 1..903: mol_type = other DNA

SEQ ID NO: 27698 - DNA, 927 bp, synthetic construct; identical to SEQ ID NO: 27676
  source 1..927: mol_type = other DNA

SEQ ID NO: 27699 - DNA, 921 bp, synthetic construct; identical to SEQ ID NO: 27677
  source 1..921: mol_type = other DNA

SEQ ID NO: 27700 - DNA, 897 bp, synthetic construct; identical to SEQ ID NO: 27678
  source 1..897: mol_type = other DNA

SEQ ID NO: 27701 - DNA, 921 bp, synthetic construct; identical to SEQ ID NO: 27677
  source 1..921: mol_type = other DNA

SEQ ID NO: 27702 - DNA, 879 bp, synthetic construct
  source 1..879: mol_type = other DNA
agccagcctcacaccaagcccagcgtgttcgtgatgaagaacggcaccaacgtggcctgcctcgtgaaagagttctaccccaaggacatcaggatcaacctggtgtccagcaagaagatcaccgagttcgaccccgccatcgtgatctcccccagcggcaagtacaacgccgtgaagctggggaagtacgaggacagcaacagcgtgacctgctccgtgcagcacgacaacaagaccgtgcacagcaccgacttttgctccaaggacgccaacgataccctgctgctccagctgaccaacaccagcgcctactacatgtacttgttgctgctgctgaagtccgtggtgtacttcgccatcatcacatgctgcctgctgcggagaaccgccttctgctgcaacggcgagaagtctaaacggggcagaaagaaactcctgtatatattcaaacaaccatttatgagaccagtacaaactactcaagaggaagatggctgtagctgccgatttccagaagaagaagaaggaggatgtgaactgagagtgaagttcagcagaagcgccgacgcccctgcctaccagcagggacagaaccaactgtacaacgagctgaacctgggcagacgggaagagtacgacgtgctggacaagcggagaggcagggaccctgagatgggcggaaagccccagcggagaaagaacccccaggaaggactgtataacgaactccagaaagacaagatggccgaagcctacagcgagatcggcatgaagggcgagcggagaagaggcaagggccacgatggcctgtaccagggcctgagcaccgccaccaaggacacctatgacgccctgcacatgcaggccctgcctccaaga

SEQ ID NO: 27703 - DNA, 921 bp, synthetic construct; identical to SEQ ID NO: 27681
  source 1..921: mol_type = other DNA

SEQ ID NO: 27704 - DNA, 891 bp, synthetic construct; identical to SEQ ID NO: 27682
  source 1..891: mol_type = other DNA

SEQ ID NO: 27705 - DNA, 918 bp, synthetic construct; identical to SEQ ID NO: 27683
  source 1..918: mol_type = other DNA

SEQ ID NO: 27706 - DNA, 900 bp, synthetic construct; identical to SEQ ID NO: 27684
  source 1..900: mol_type = other DNA

SEQ ID NO: 27707 - DNA, 894 bp, synthetic construct; identical to SEQ ID NO: 27685
  source 1..894: mol_type = other DNA

SEQ ID NO: 27708 - DNA, 924 bp, synthetic construct; identical to SEQ ID NO: 27686
  source 1..924: mol_type = other DNA

SEQ ID NO: 27709 - DNA, 948 bp, synthetic construct; identical to SEQ ID NO: 27687
  source 1..948: mol_type = other DNA

SEQ ID NO: 27710 - DNA, 942 bp, synthetic construct; identical to SEQ ID NO: 27688
  source 1..942: mol_type = other DNA

SEQ ID NO: 27711 - DNA, 918 bp, synthetic construct; identical to SEQ ID NO: 27689
  source 1..918: mol_type = other DNA

SEQ ID NO: 27712 - DNA, 942 bp, synthetic construct; identical to SEQ ID NO: 27688
  source 1..942: mol_type = other DNA

SEQ ID NO: 27713 - DNA, 900 bp, synthetic construct; identical to SEQ ID NO: 27691
  source 1..900: mol_type = other DNA

SEQ ID NO: 27714 - DNA, 834 bp, synthetic construct
  source 1..834: mol_type = other DNA
ctgcgggatagcaagagcagcgacaagagcgtgtgtctgttcaccgacttcgacagccagaccaacgtgtcccagagcaaggactccgacgtgtacatcaccgataagaccgtgctggacatgcggagcatggacttcaagagcaactccgccgtggcctggtccaacaagtccgatttcgcctgcgccaacgccttcaacaacagcattggcagagccgattgcggctttaccagcgagagctaccagcagggcgtgctgagcgccaccatcctgtacgagatcctgctgggcaaggccaccctgtacgccgtgctggtgtctgccctggtgctgatggctatggtcaagcggaaggacagccggggaaaacggggcagaaagaaactcctgtatatattcaaacaaccatttatgagaccagtacaaactactcaagaggaagatggctgtagctgccgatttccagaagaagaagaaggaggatgtgaactgagagtgaagttcagcagaagcgccgacgcccctgcctaccagcagggacagaaccaactgtacaacgagctgaacctgggcagacgggaagagtacgacgtgctggacaagcggagaggcagggaccctgagatgggcggaaagccccagcggagaaagaacccccaggaaggactgtataacgaactccagaaagacaagatggccgaagcctacagcgagatcggcatgaagggcgagcggagaagaggcaagggccacgatggcctgtaccagggcctgagcaccgccaccaaggacacctatgacgccctgcacatgcaggccctgcctccaaga

SEQ ID NO: 27715 - DNA, 828 bp, synthetic construct
  source 1..828: mol_type = other DNA
ctgcgggatagcaagagcagcgacaagagcgtgtgtctgttcaccgacttcgacagccagaccaacgtgtcccagagcaaggactccgacgtgtacatcaccgataagaccgtgctggacatgcggagcatggacttcaagagcaactccgccgtggcctggtccaacaagtccgatttcgcctgcgccaacgccttcaacaacagcattgccgattgcggctttaccagcgagagctaccagcagggcgtgctgagcgccaccatcctgtacgagatcctgctgggcaaggccaccctgtacgccgtgctggtgtctgccctggtgctgatggctatggtcaagcggaaggacagccggggaaaacggggcagaaagaaactcctgtatatattcaaacaaccatttatgagaccagtacaaactactcaagaggaagatggctgtagctgccgatttccagaagaagaagaaggaggatgtgaactgagagtgaagttcagcagaagcgccgacgcccctgcctaccagcagggacagaaccaactgtacaacgagctgaacctgggcagacgggaagagtacgacgtgctggacaagcggagaggcagggaccctgagatgggcggaaagccccagcggagaaagaacccccaggaaggactgtataacgaactccagaaagacaagatggccgaagcctacagcgagatcggcatgaagggcgagcggagaagaggcaagggccacgatggcctgtaccagggcctgagcaccgccaccaaggacacctatgacgccctgcacatgcaggccctgcctccaaga

SEQ ID NO: 27716 - DNA, 858 bp, synthetic construct
  source 1..858: mol_type = other DNA
ctgcgggatagcaagagcagcgacaagagcgtgtgtctgttcaccgacttcgacagccagaccaacgtgtcccagagcaaggactccgacgtgtacatcaccgataagaccgtgctggacatgcggagcatggacttcaagagcaactccgccgtggcctggtccaacaagtccgatttcgcctgcgccaacgccttcaacaacagcattcagatcgtgtctgccgaagcctggggcagagccgattgcggctttaccagcgagagctaccagcagggcgtgctgagcgccaccatcctgtacgagatcctgctgggcaaggccaccctgtacgccgtgctggtgtctgccctggtgctgatggctatggtcaagcggaaggacagccggggaaaacggggcagaaagaaactcctgtatatattcaaacaaccatttatgagaccagtacaaactactcaagaggaagatggctgtagctgccgatttccagaagaagaagaaggaggatgtgaactgagagtgaagttcagcagaagcgccgacgcccctgcctaccagcagggacagaaccaactgtacaacgagctgaacctgggcagacgggaagagtacgacgtgctggacaagcggagaggcagggaccctgagatgggcggaaagccccagcggagaaagaacccccaggaaggactgtataacgaactccagaaagacaagatggccgaagcctacagcgagatcggcatgaagggcgagcggagaagaggcaagggccacgatggcctgtaccagggcctgagcaccgccaccaaggacacctatgacgccctgcacatgcaggccctgcctccaaga

SEQ ID NO: 27717 - DNA, 882 bp, synthetic construct
  source 1..882: mol_type = other DNA
ctgcgggatagcaagagcagcgacaagagcgtgtgtctgttcaccgacttcgacagccagaccaacgtgtcccagagcaaggactccgacgtgtacatcaccgataagaccgtgctggacatgcggagcatggacttcaagagcaactccgccgtggcctggtccaacaagtccgatttcgcctgcgccaacgccttcaacaacagcattttcccacccatcaagaccgatgtgattacaatggaccccaaggacaactgctccaaggacgccaacgataccctgctgctccagctgaccaacaccagcgcctactacatgtacttgttgctgctgctgaagtccgtggtgtacttcgccatcatcacatgctgcctgctgcggagaaccgccttctgctgcaacggcgagaagtctaaacggggcagaaagaaactcctgtatatattcaaacaaccatttatgagaccagtacaaactactcaagaggaagatggctgtagctgccgatttccagaagaagaagaaggaggatgtgaactgagagtgaagttcagcagaagcgccgacgcccctgcctaccagcagggacagaaccaactgtacaacgagctgaacctgggcagacgggaagagtacgacgtgctggacaagcggagaggcagggaccctgagatgggcggaaagccccagcggagaaagaacccccaggaaggactgtataacgaactccagaaagacaagatggccgaagcctacagcgagatcggcatgaagggcgagcggagaagaggcaagggccacgatggcctgtaccagggcctgagcaccgccaccaaggacacctatgacgccctgcacatgcaggccctgcctccaaga

SEQ ID NO: 27718 - DNA, 876 bp, synthetic construct
  source 1..876: mol_type = other DNA
ctgcgggatagcaagagcagcgacaagagcgtgtgtctgttcaccgacttcgacagccagaccaacgtgtcccagagcaaggactccgacgtgtacatcaccgataagaccgtgctggacatgcggagcatggacttcaagagcaactccgccgtggcctggtccaacaagtccgatttcgcctgcgccaacgccttcaacaacagcattcccatcaagaccgatgtgattacaatggaccccaaggacaactgctccaaggacgccaacgataccctgctgctccagctgaccaacaccagcgcctactacatgtacttgttgctgctgctgaagtccgtggtgtacttcgccatcatcacatgctgcctgctgcggagaaccgccttctgctgcaacggcgagaagtctaaacggggcagaaagaaactcctgtatatattcaaacaaccatttatgagaccagtacaaactactcaagaggaagatggctgtagctgccgatttccagaagaagaagaaggaggatgtgaactgagagtgaagttcagcagaagcgccgacgcccctgcctaccagcagggacagaaccaactgtacaacgagctgaacctgggcagacgggaagagtacgacgtgctggacaagcggagaggcagggaccctgagatgggcggaaagccccagcggagaaagaacccccaggaaggactgtataacgaactccagaaagacaagatggccgaagcctacagcgagatcggcatgaagggcgagcggagaagaggcaagggccacgatggcctgtaccagggcctgagcaccgccaccaaggacacctatgacgccctgcacatgcaggccctgcctccaaga

SEQ ID NO: 27719 - DNA, 852 bp, synthetic construct
  source 1..852: mol_type = other DNA
ctgcgggatagcaagagcagcgacaagagcgtgtgtctgttcaccgacttcgacagccagaccaacgtgtcccagagcaaggactccgacgtgtacatcaccgataagaccgtgctggacatgcggagcatggacttcaagagcaactccgccgtggcctggtccaacaagtccgatttcgcctgcgccaacgccttcaacaacagcattatggaccccaaggacaactgctccaaggacgccaacgataccctgctgctccagctgaccaacaccagcgcctactacatgtacttgttgctgctgctgaagtccgtggtgtacttcgccatcatcacatgctgcctgctgcggagaaccgccttctgctgcaacggcgagaagtctaaacggggcagaaagaaactcctgtatatattcaaacaaccatttatgagaccagtacaaactactcaagaggaagatggctgtagctgccgatttccagaagaagaagaaggaggatgtgaactgagagtgaagttcagcagaagcgccgacgcccctgcctaccagcagggacagaaccaactgtacaacgagctgaacctgggcagacgggaagagtacgacgtgctggacaagcggagaggcagggaccctgagatgggcggaaagccccagcggagaaagaacccccaggaaggactgtataacgaactccagaaagacaagatggccgaagcctacagcgagatcggcatgaagggcgagcggagaagaggcaagggccacgatggcctgtaccagggcctgagcaccgccaccaaggacacctatgacgccctgcacatgcaggccctgcctccaaga

SEQ ID NO: 27720 - DNA, 876 bp, synthetic construct; identical to SEQ ID NO: 27718
  source 1..876: mol_type = other DNA

SEQ ID NO: 27721 - DNA, 834 bp, synthetic construct
  source 1..834: mol_type = other DNA
ctgcgggatagcaagagcagcgacaagagcgtgtgtctgttcaccgacttcgacagccagaccaacgtgtcccagagcaaggactccgacgtgtacatcaccgataagaccgtgctggacatgcggagcatggacttcaagagcaactccgccgtggcctggtccaacaagtccgatttcgcctgcgccaacgccttcaacaacagcatttgctccaaggacgccaacgataccctgctgctccagctgaccaacaccagcgcctactacatgtacttgttgctgctgctgaagtccgtggtgtacttcgccatcatcacatgctgcctgctgcggagaaccgccttctgctgcaacggcgagaagtctaaacggggcagaaagaaactcctgtatatattcaaacaaccatttatgagaccagtacaaactactcaagaggaagatggctgtagctgccgatttccagaagaagaagaaggaggatgtgaactgagagtgaagttcagcagaagcgccgacgcccctgcctaccagcagggacagaaccaactgtacaacgagctgaacctgggcagacgggaagagtacgacgtgctggacaagcggagaggcagggaccctgagatgggcggaaagccccagcggagaaagaacccccaggaaggactgtataacgaactccagaaagacaagatggccgaagcctacagcgagatcggcatgaagggcgagcggagaagaggcaagggccacgatggcctgtaccagggcctgagcaccgccaccaaggacacctatgacgccctgcacatgcaggccctgcctccaaga

SEQ ID NO: 27722 - DNA, 879 bp, synthetic construct
  source 1..879: mol_type = other DNA
ctgcgggatagcaagagcagcgacaagagcgtgtgtctgttcaccgacttcgacagccagaccaacgtgtcccagagcaaggactccgacgtgtacatcaccgataagaccgtgctggacatgcggagcatggacttcaagagcaactccgccgtggcctggtccaacaagtccgatttcgcctgcgccaacgccttcaacaacagcattgaagtgaaaaccgactccaccgaccacgtgaagcccaaagagacagagaacaccaagcagcccagcaagagctgccacaagcccaaggccatcgtgcacaccgagaaagtgaacatgatgagcctgaccgtgctgggcctgcggatgctgttcgccaaaaccgtggccgtgaacttcctgctgaccgccaagctgttcttcctcaaacggggcagaaagaaactcctgtatatattcaaacaaccatttatgagaccagtacaaactactcaagaggaagatggctgtagctgccgatttccagaagaagaagaaggaggatgtgaactgagagtgaagttcagcagaagcgccgacgcccctgcctaccagcagggacagaaccaactgtacaacgagctgaacctgggcagacgggaagagtacgacgtgctggacaagcggagaggcagggaccctgagatgggcggaaagccccagcggagaaagaacccccaggaaggactgtataacgaactccagaaagacaagatggccgaagcctacagcgagatcggcatgaagggcgagcggagaagaggcaagggccacgatggcctgtaccagggcctgagcaccgccaccaaggacacctatgacgccctgcacatgcaggccctgcctccaaga

SEQ ID NO: 27723 - DNA, 858 bp, synthetic construct
  source 1..858: mol_type = other DNA
ctgcgggatagcaagagcagcgacaagagcgtgtgtctgttcaccgacttcgacagccagaccaacgtgtcccagagcaaggactccgacgtgtacatcaccgataagaccgtgctggacatgcggagcatggacttcaagagcaactccgccgtggcctggtccaacaagtccgatttcgcctgcgccaacgccttcaacaacagcattgaccacgtgaagcccaaagagacagagaacaccaagcagcccagcaagagctgccacaagcccaaggccatcgtgcacaccgagaaagtgaacatgatgagcctgaccgtgctgggcctgcggatgctgttcgccaaaaccgtggccgtgaacttcctgctgaccgccaagctgttcttcctcaaacggggcagaaagaaactcctgtatatattcaaacaaccatttatgagaccagtacaaactactcaagaggaagatggctgtagctgccgatttccagaagaagaagaaggaggatgtgaactgagagtgaagttcagcagaagcgccgacgcccctgcctaccagcagggacagaaccaactgtacaacgagctgaacctgggcagacgggaagagtacgacgtgctggacaagcggagaggcagggaccctgagatgggcggaaagccccagcggagaaagaacccccaggaaggactgtataacgaactccagaaagacaagatggccgaagcctacagcgagatcggcatgaagggcgagcggagaagaggcaagggccacgatggcctgtaccagggcctgagcaccgccaccaaggacacctatgacgccctgcacatgcaggccctgcctccaaga

SEQ ID NO: 27724 - DNA, 864 bp, synthetic construct
  source 1..864: mol_type = other DNA
ctgcgggatagcaagagcagcgacaagagcgtgtgtctgttcaccgacttcgacagccagaccaacgtgtcccagagcaaggactccgacgtgtacatcaccgataagaccgtgctggacatgcggagcatggacttcaagagcaactccgccgtggcctggtccaacaagtccgatttcgcctgcgccaacgccttcaacaacagcattatccccgaggacacattcttcccaagccccggcagagccgattgcggctttaccagcgagagctaccagcagggcgtgctgagcgccaccatcctgtacgagatcctgctgggcaaggccaccctgtacgccgtgctggtgtctgccctggtgctgatggctatggtcaagcggaaggacagccggggaaaacggggcagaaagaaactcctgtatatattcaaacaaccatttatgagaccagtacaaactactcaagaggaagatggctgtagctgccgatttccagaagaagaagaaggaggatgtgaactgagagtgaagttcagcagaagcgccgacgcccctgcctaccagcagggacagaaccaactgtacaacgagctgaacctgggcagacgggaagagtacgacgtgctggacaagcggagaggcagggaccctgagatgggcggaaagccccagcggagaaagaacccccaggaaggactgtataacgaactccagaaagacaagatggccgaagcctacagcgagatcggcatgaagggcgagcggagaagaggcaagggccacgatggcctgtaccagggcctgagcaccgccaccaaggacacctatgacgccctgcacatgcaggccctgcctccaaga

SEQ ID NO: 27725 - DNA, 858 bp, synthetic construct
  source 1..858: mol_type = other DNA
ctgcgggatagcaagagcagcgacaagagcgtgtgtctgttcaccgacttcgacagccagaccaacgtgtcccagagcaaggactccgacgtgtacatcaccgataagaccgtgctggacatgcggagcatggacttcaagagcaactccgccgtggcctggtccaacaagtccgatttcgcctgcgccaacgccttcaacaacagcattatccccgaggacacattcttcccaagccccgccgattgcggctttaccagcgagagctaccagcagggcgtgctgagcgccaccatcctgtacgagatcctgctgggcaaggccaccctgtacgccgtgctggtgtctgccctggtgctgatggctatggtcaagcggaaggacagccggggaaaacggggcagaaagaaactcctgtatatattcaaacaaccatttatgagaccagtacaaactactcaagaggaagatggctgtagctgccgatttccagaagaagaagaaggaggatgtgaactgagagtgaagttcagcagaagcgccgacgcccctgcctaccagcagggacagaaccaactgtacaacgagctgaacctgggcagacgggaagagtacgacgtgctggacaagcggagaggcagggaccctgagatgggcggaaagccccagcggagaaagaacccccaggaaggactgtataacgaactccagaaagacaagatggccgaagcctacagcgagatcggcatgaagggcgagcggagaagaggcaagggccacgatggcctgtaccagggcctgagcaccgccaccaaggacacctatgacgccctgcacatgcaggccctgcctccaaga

SEQ ID NO: 27726 - DNA, 888 bp, synthetic construct
  source 1..888: mol_type = other DNA
ctgcgggatagcaagagcagcgacaagagcgtgtgtctgttcaccgacttcgacagccagaccaacgtgtcccagagcaaggactccgacgtgtacatcaccgataagaccgtgctggacatgcggagcatggacttcaagagcaactccgccgtggcctggtccaacaagtccgatttcgcctgcgccaacgccttcaacaacagcattatccccgaggacacattcttcccaagcccccagatcgtgtctgccgaagcctggggcagagccgattgcggctttaccagcgagagctaccagcagggcgtgctgagcgccaccatcctgtacgagatcctgctgggcaaggccaccctgtacgccgtgctggtgtctgccctggtgctgatggctatggtcaagcggaaggacagccggggaaaacggggcagaaagaaactcctgtatatattcaaacaaccatttatgagaccagtacaaactactcaagaggaagatggctgtagctgccgatttccagaagaagaagaaggaggatgtgaactgagagtgaagttcagcagaagcgccgacgcccctgcctaccagcagggacagaaccaactgtacaacgagctgaacctgggcagacgggaagagtacgacgtgctggacaagcggagaggcagggaccctgagatgggcggaaagccccagcggagaaagaacccccaggaaggactgtataacgaactccagaaagacaagatggccgaagcctacagcgagatcggcatgaagggcgagcggagaagaggcaagggccacgatggcctgtaccagggcctgagcaccgccaccaaggacacctatgacgccctgcacatgcaggccctgcctccaaga

SEQ ID NO: 27727 - DNA, 912 bp, synthetic construct
  source 1..912: mol_type = other DNA
ctgcgggatagcaagagcagcgacaagagcgtgtgtctgttcaccgacttcgacagccagaccaacgtgtcccagagcaaggactccgacgtgtacatcaccgataagaccgtgctggacatgcggagcatggacttcaagagcaactccgccgtggcctggtccaacaagtccgatttcgcctgcgccaacgccttcaacaacagcattatccccgaggacacattcttcccaagccccttcccacccatcaagaccgatgtgattacaatggaccccaaggacaactgctccaaggacgccaacgataccctgctgctccagctgaccaacaccagcgcctactacatgtacttgttgctgctgctgaagtccgtggtgtacttcgccatcatcacatgctgcctgctgcggagaaccgccttctgctgcaacggcgagaagtctaaacggggcagaaagaaactcctgtatatattcaaacaaccatttatgagaccagtacaaactactcaagaggaagatggctgtagctgccgatttccagaagaagaagaaggaggatgtgaactgagagtgaagttcagcagaagcgccgacgcccctgcctaccagcagggacagaaccaactgtacaacgagctgaacctgggcagacgggaagagtacgacgtgctggacaagcggagaggcagggaccctgagatgggcggaaagccccagcggagaaagaacccccaggaaggactgtataacgaactccagaaagacaagatggccgaagcctacagcgagatcggcatgaagggcgagcggagaagaggcaagggccacgatggcctgtaccagggcctgagcaccgccaccaaggacacctatgacgccctgcacatgcaggccctgcctccaaga

SEQ ID NO: 27728 - DNA, 906 bp, synthetic construct
  source 1..906: mol_type = other DNA
ctgcgggatagcaagagcagcgacaagagcgtgtgtctgttcaccgacttcgacagccagaccaacgtgtcccagagcaaggactccgacgtgtacatcaccgataagaccgtgctggacatgcggagcatggacttcaagagcaactccgccgtggcctggtccaacaagtccgatttcgcctgcgccaacgccttcaacaacagcattatccccgaggacacattcttcccaagcccccccatcaagaccgatgtgattacaatggaccccaaggacaactgctccaaggacgccaacgataccctgctgctccagctgaccaacaccagcgcctactacatgtacttgttgctgctgctgaagtccgtggtgtacttcgccatcatcacatgctgcctgctgcggagaaccgccttctgctgcaacggcgagaagtctaaacggggcagaaagaaactcctgtatatattcaaacaaccatttatgagaccagtacaaactactcaagaggaagatggctgtagctgccgatttccagaagaagaagaaggaggatgtgaactgagagtgaagttcagcagaagcgccgacgcccctgcctaccagcagggacagaaccaactgtacaacgagctgaacctgggcagacgggaagagtacgacgtgctggacaagcggagaggcagggaccctgagatgggcggaaagccccagcggagaaagaacccccaggaaggactgtataacgaactccagaaagacaagatggccgaagcctacagcgagatcggcatgaagggcgagcggagaagaggcaagggccacgatggcctgtaccagggcctgagcaccgccaccaaggacacctatgacgccctgcacatgcaggccctgcctccaaga

SEQ ID NO: 27729 - DNA, 882 bp, synthetic construct
  source 1..882: mol_type = other DNA
ctgcgggatagcaagagcagcgacaagagcgtgtgtctgttcaccgacttcgacagccagaccaacgtgtcccagagcaaggactccgacgtgtacatcaccgataagaccgtgctggacatgcggagcatggacttcaagagcaactccgccgtggcctggtccaacaagtccgatttcgcctgcgccaacgccttcaacaacagcattatccccgaggacacattcttcccaagccccatggaccccaaggacaactgctccaaggacgccaacgataccctgctgctccagctgaccaacaccagcgcctactacatgtacttgttgctgctgctgaagtccgtggtgtacttcgccatcatcacatgctgcctgctgcggagaaccgccttctgctgcaacggcgagaagtctaaacggggcagaaagaaactcctgtatatattcaaacaaccatttatgagaccagtacaaactactcaagaggaagatggctgtagctgccgatttccagaagaagaagaaggaggatgtgaactgagagtgaagttcagcagaagcgccgacgcccctgcctaccagcagggacagaaccaactgtacaacgagctgaacctgggcagacgggaagagtacgacgtgctggacaagcggagaggcagggaccctgagatgggcggaaagccccagcggagaaagaacccccaggaaggactgtataacgaactccagaaagacaagatggccgaagcctacagcgagatcggcatgaagggcgagcggagaagaggcaagggccacgatggcctgtaccagggcctgagcaccgccaccaaggacacctatgacgccctgcacatgcaggccctgcctccaaga

SEQ ID NO: 27730 - DNA, 906 bp, synthetic construct; identical to SEQ ID NO: 27728
  source 1..906: mol_type = other DNA

SEQ ID NO: 27731 - DNA, 864 bp, synthetic construct
  source 1..864: mol_type = other DNA
ctgcgggatagcaagagcagcgacaagagcgtgtgtctgttcaccgacttcgacagccagaccaacgtgtcccagagcaaggactccgacgtgtacatcaccgataagaccgtgctggacatgcggagcatggacttcaagagcaactccgccgtggcctggtccaacaagtccgatttcgcctgcgccaacgccttcaacaacagcattatccccgaggacacattcttcccaagcccctgctccaaggacgccaacgataccctgctgctccagctgaccaacaccagcgcctactacatgtacttgttgctgctgctgaagtccgtggtgtacttcgccatcatcacatgctgcctgctgcggagaaccgccttctgctgcaacggcgagaagtctaaacggggcagaaagaaactcctgtatatattcaaacaaccatttatgagaccagtacaaactactcaagaggaagatggctgtagctgccgatttccagaagaagaagaaggaggatgtgaactgagagtgaagttcagcagaagcgccgacgcccctgcctaccagcagggacagaaccaactgtacaacgagctgaacctgggcagacgggaagagtacgacgtgctggacaagcggagaggcagggaccctgagatgggcggaaagccccagcggagaaagaacccccaggaaggactgtataacgaactccagaaagacaagatggccgaagcctacagcgagatcggcatgaagggcgagcggagaagaggcaagggccacgatggcctgtaccagggcctgagcaccgccaccaaggacacctatgacgccctgcacatgcaggccctgcctccaaga

SEQ ID NO: 27732 - DNA, 909 bp, synthetic construct
  source 1..909: mol_type = other DNA
ctgcgggatagcaagagcagcgacaagagcgtgtgtctgttcaccgacttcgacagccagaccaacgtgtcccagagcaaggactccgacgtgtacatcaccgataagaccgtgctggacatgcggagcatggacttcaagagcaactccgccgtggcctggtccaacaagtccgatttcgcctgcgccaacgccttcaacaacagcattatccccgaggacacattcttcccaagccccgaagtgaaaaccgactccaccgaccacgtgaagcccaaagagacagagaacaccaagcagcccagcaagagctgccacaagcccaaggccatcgtgcacaccgagaaagtgaacatgatgagcctgaccgtgctgggcctgcggatgctgttcgccaaaaccgtggccgtgaacttcctgctgaccgccaagctgttcttcctcaaacggggcagaaagaaactcctgtatatattcaaacaaccatttatgagaccagtacaaactactcaagaggaagatggctgtagctgccgatttccagaagaagaagaaggaggatgtgaactgagagtgaagttcagcagaagcgccgacgcccctgcctaccagcagggacagaaccaactgtacaacgagctgaacctgggcagacgggaagagtacgacgtgctggacaagcggagaggcagggaccctgagatgggcggaaagccccagcggagaaagaacccccaggaaggactgtataacgaactccagaaagacaagatggccgaagcctacagcgagatcggcatgaagggcgagcggagaagaggcaagggccacgatggcctgtaccagggcctgagcaccgccaccaaggacacctatgacgccctgcacatgcaggccctgcctccaaga

SEQ ID NO: 27733 - DNA, 888 bp, synthetic construct
  source 1..888: mol_type = other DNA
ctgcgggatagcaagagcagcgacaagagcgtgtgtctgttcaccgacttcgacagccagaccaacgtgtcccagagcaaggactccgacgtgtacatcaccgataagaccgtgctggacatgcggagcatggacttcaagagcaactccgccgtggcctggtccaacaagtccgatttcgcctgcgccaacgccttcaacaacagcattatccccgaggacacattcttcccaagccccgaccacgtgaagcccaaagagacagagaacaccaagcagcccagcaagagctgccacaagcccaaggccatcgtgcacaccgagaaagtgaacatgatgagcctgaccgtgctgggcctgcggatgctgttcgccaaaaccgtggccgtgaacttcctgctgaccgccaagctgttcttcctcaaacggggcagaaagaaactcctgtatatattcaaacaaccatttatgagaccagtacaaactactcaagaggaagatggctgtagctgccgatttccagaagaagaagaaggaggatgtgaactgagagtgaagttcagcagaagcgccgacgcccctgcctaccagcagggacagaaccaactgtacaacgagctgaacctgggcagacgggaagagtacgacgtgctggacaagcggagaggcagggaccctgagatgggcggaaagccccagcggagaaagaacccccaggaaggactgtataacgaactccagaaagacaagatggccgaagcctacagcgagatcggcatgaagggcgagcggagaagaggcaagggccacgatggcctgtaccagggcctgagcaccgccaccaaggacacctatgacgccctgcacatgcaggccctgcctccaaga

SEQ ID NO: 27734 - DNA, 876 bp, synthetic construct
  source 1..876: mol_type = other DNA
ctgcgggatagcaagagcagcgacaagagcgtgtgtctgttcaccgacttcgacagccagaccaacgtgtcccagagcaaggactccgacgtgtacatcaccgataagaccgtgctggacatgcggagcatggacttcaagagcaactccgccgtggcctggtccaacaagtccgatttcgcctgcgccaacgccttcaacaacagcattatccccgaggacacattcttcccaagccccgagagcagctgcggcagagccgattgcggctttaccagcgagagctaccagcagggcgtgctgagcgccaccatcctgtacgagatcctgctgggcaaggccaccctgtacgccgtgctggtgtctgccctggtgctgatggctatggtcaagcggaaggacagccggggaaaacggggcagaaagaaactcctgtatatattcaaacaaccatttatgagaccagtacaaactactcaagaggaagatggctgtagctgccgatttccagaagaagaagaaggaggatgtgaactgagagtgaagttcagcagaagcgccgacgcccctgcctaccagcagggacagaaccaactgtacaacgagctgaacctgggcagacgggaagagtacgacgtgctggacaagcggagaggcagggaccctgagatgggcggaaagccccagcggagaaagaacccccaggaaggactgtataacgaactccagaaagacaagatggccgaagcctacagcgagatcggcatgaagggcgagcggagaagaggcaagggccacgatggcctgtaccagggcctgagcaccgccaccaaggacacctatgacgccctgcacatgcaggccctgcctccaaga

SEQ ID NO: 27735 - DNA, 870 bp, synthetic construct
  source 1..870: mol_type = other DNA
ctgcgggatagcaagagcagcgacaagagcgtgtgtctgttcaccgacttcgacagccagaccaacgtgtcccagagcaaggactccgacgtgtacatcaccgataagaccgtgctggacatgcggagcatggacttcaagagcaactccgccgtggcctggtccaacaagtccgatttcgcctgcgccaacgccttcaacaacagcattatccccgaggacacattcttcccaagccccgagagcagctgcgccgattgcggctttaccagcgagagctaccagcagggcgtgctgagcgccaccatcctgtacgagatcctgctgggcaaggccaccctgtacgccgtgctggtgtctgccctggtgctgatggctatggtcaagcggaaggacagccggggaaaacggggcagaaagaaactcctgtatatattcaaacaaccatttatgagaccagtacaaactactcaagaggaagatggctgtagctgccgatttccagaagaagaagaaggaggatgtgaactgagagtgaagttcagcagaagcgccgacgcccctgcctaccagcagggacagaaccaactgtacaacgagctgaacctgggcagacgggaagagtacgacgtgctggacaagcggagaggcagggaccctgagatgggcggaaagccccagcggagaaagaacccccaggaaggactgtataacgaactccagaaagacaagatggccgaagcctacagcgagatcggcatgaagggcgagcggagaagaggcaagggccacgatggcctgtaccagggcctgagcaccgccaccaaggacacctatgacgccctgcacatgcaggccctgcctccaaga

SEQ ID NO: 27736 - DNA, 900 bp, synthetic construct
  source 1..900: mol_type = other DNA
ctgcgggatagcaagagcagcgacaagagcgtgtgtctgttcaccgacttcgacagccagaccaacgtgtcccagagcaaggactccgacgtgtacatcaccgataagaccgtgctggacatgcggagcatggacttcaagagcaactccgccgtggcctggtccaacaagtccgatttcgcctgcgccaacgccttcaacaacagcattatccccgaggacacattcttcccaagccccgagagcagctgccagatcgtgtctgccgaagcctggggcagagccgattgcggctttaccagcgagagctaccagcagggcgtgctgagcgccaccatcctgtacgagatcctgctgggcaaggccaccctgtacgccgtgctggtgtctgccctggtgctgatggctatggtcaagcggaaggacagccggggaaaacggggcagaaagaaactcctgtatatattcaaacaaccatttatgagaccagtacaaactactcaagaggaagatggctgtagctgccgatttccagaagaagaagaaggaggatgtgaactgagagtgaagttcagcagaagcgccgacgcccctgcctaccagcagggacagaaccaactgtacaacgagctgaacctgggcagacgggaagagtacgacgtgctggacaagcggagaggcagggaccctgagatgggcggaaagccccagcggagaaagaacccccaggaaggactgtataacgaactccagaaagacaagatggccgaagcctacagcgagatcggcatgaagggcgagcggagaagaggcaagggccacgatggcctgtaccagggcctgagcaccgccaccaaggacacctatgacgccctgcacatgcaggccctgcctccaaga

SEQ ID NO: 27737 - DNA, 924 bp, synthetic construct
  source 1..924: mol_type = other DNA
ctgcgggatagcaagagcagcgacaagagcgtgtgtctgttcaccgacttcgacagccagaccaacgtgtcccagagcaaggactccgacgtgtacatcaccgataagaccgtgctggacatgcggagcatggacttcaagagcaactccgccgtggcctggtccaacaagtccgatttcgcctgcgccaacgccttcaacaacagcattatccccgaggacacattcttcccaagccccgagagcagctgcttcccacccatcaagaccgatgtgattacaatggaccccaaggacaactgctccaaggacgccaacgataccctgctgctccagctgaccaacaccagcgcctactacatgtacttgttgctgctgctgaagtccgtggtgtacttcgccatcatcacatgctgcctgctgcggagaaccgccttctgctgcaacggcgagaagtctaaacggggcagaaagaaactcctgtatatattcaaacaaccatttatgagaccagtacaaactactcaagaggaagatggctgtagctgccgatttccagaagaagaagaaggaggatgtgaactgagagtgaagttcagcagaagcgccgacgcccctgcctaccagcagggacagaaccaactgtacaacgagctgaacctgggcagacgggaagagtacgacgtgctggacaagcggagaggcagggaccctgagatgggcggaaagccccagcggagaaagaacccccaggaaggactgtataacgaactccagaaagacaagatggccgaagcctacagcgagatcggcatgaagggcgagcggagaagaggcaagggccacgatggcctgtaccagggcctgagcaccgccaccaaggacacctatgacgccctgcacatgcaggccctgcctccaaga

SEQ ID NO: 27738 - DNA, 918 bp, synthetic construct
  source 1..918: mol_type = other DNA
ctgcgggatagcaagagcagcgacaagagcgtgtgtctgttcaccgacttcgacagccagaccaacgtgtcccagagcaaggactccgacgtgtacatcaccgataagaccgtgctggacatgcggagcatggacttcaagagcaactccgccgtggcctggtccaacaagtccgatttcgcctgcgccaacgccttcaacaacagcattatccccgaggacacattcttcccaagccccgagagcagctgccccatcaagaccgatgtgattacaatggaccccaaggacaactgctccaaggacgccaacgataccctgctgctccagctgaccaacaccagcgcctactacatgtacttgttgctgctgctgaagtccgtggtgtacttcgccatcatcacatgctgcctgctgcggagaaccgccttctgctgcaacggcgagaagtctaaacggggcagaaagaaactcctgtatatattcaaacaaccatttatgagaccagtacaaactactcaagaggaagatggctgtagctgccgatttccagaagaagaagaaggaggatgtgaactgagagtgaagttcagcagaagcgccgacgcccctgcctaccagcagggacagaaccaactgtacaacgagctgaacctgggcagacgggaagagtacgacgtgctggacaagcggagaggcagggaccctgagatgggcggaaagccccagcggagaaagaacccccaggaaggactgtataacgaactccagaaagacaagatggccgaagcctacagcgagatcggcatgaagggcgagcggagaagaggcaagggccacgatggcctgtaccagggcctgagcaccgccaccaaggacacctatgacgccctgcacatgcaggccctgcctccaaga

SEQ ID NO: 27739 - DNA, 894 bp, synthetic construct
  source 1..894: mol_type = other DNA
ctgcgggatagcaagagcagcgacaagagcgtgtgtctgttcaccgacttcgacagccagaccaacgtgtcccagagcaaggactccgacgtgtacatcaccgataagaccgtgctggacatgcggagcatggacttcaagagcaactccgccgtggcctggtccaacaagtccgatttcgcctgcgccaacgccttcaacaacagcattatccccgaggacacattcttcccaagccccgagagcagctgcatggaccccaaggacaactgctccaaggacgccaacgataccctgctgctccagctgaccaacaccagcgcctactacatgtacttgttgctgctgctgaagtccgtggtgtacttcgccatcatcacatgctgcctgctgcggagaaccgccttctgctgcaacggcgagaagtctaaacggggcagaaagaaactcctgtatatattcaaacaaccatttatgagaccagtacaaactactcaagaggaagatggctgtagctgccgatttccagaagaagaagaaggaggatgtgaactgagagtgaagttcagcagaagcgccgacgcccctgcctaccagcagggacagaaccaactgtacaacgagctgaacctgggcagacgggaagagtacgacgtgctggacaagcggagaggcagggaccctgagatgggcggaaagccccagcggagaaagaacccccaggaaggactgtataacgaactccagaaagacaagatggccgaagcctacagcgagatcggcatgaagggcgagcggagaagaggcaagggccacgatggcctgtaccagggcctgagcaccgccaccaaggacacctatgacgccctgcacatgcaggccctgcctccaaga

SEQ ID NO: 27740 - DNA, 918 bp, synthetic construct; identical to SEQ ID NO: 27738
  source 1..918: mol_type = other DNA

SEQ ID NO: 27741 - DNA, 876 bp, synthetic construct
  source 1..876: mol_type = other DNA
ctgcgggatagcaagagcagcgacaagagcgtgtgtctgttcaccgacttcgacagccagaccaacgtgtcccagagcaaggactccgacgtgtacatcaccgataagaccgtgctggacatgcggagcatggacttcaagagcaactccgccgtggcctggtccaacaagtccgatttcgcctgcgccaacgccttcaacaacagcattatccccgaggacacattcttcccaagccccgagagcagctgctgctccaaggacgccaacgataccctgctgctccagctgaccaacaccagcgcctactacatgtacttgttgctgctgctgaagtccgtggtgtacttcgccatcatcacatgctgcctgctgcggagaaccgccttctgctgcaacggcgagaagtctaaacggggcagaaagaaactcctgtatatattcaaacaaccatttatgagaccagtacaaactactcaagaggaagatggctgtagctgccgatttccagaagaagaagaaggaggatgtgaactgagagtgaagttcagcagaagcgccgacgcccctgcctaccagcagggacagaaccaactgtacaacgagctgaacctgggcagacgggaagagtacgacgtgctggacaagcggagaggcagggaccctgagatgggcggaaagccccagcggagaaagaacccccaggaaggactgtataacgaactccagaaagacaagatggccgaagcctacagcgagatcggcatgaagggcgagcggagaagaggcaagggccacgatggcctgtaccagggcctgagcaccgccaccaaggacacctatgacgccctgcacatgcaggccctgcctccaaga

SEQ ID NO: 27742 - DNA, 921 bp, synthetic construct
  source 1..921: mol_type = other DNA
ctgcgggatagcaagagcagcgacaagagcgtgtgtctgttcaccgacttcgacagccagaccaacgtgtcccagagcaaggactccgacgtgtacatcaccgataagaccgtgctggacatgcggagcatggacttcaagagcaactccgccgtggcctggtccaacaagtccgatttcgcctgcgccaacgccttcaacaacagcattatccccgaggacacattcttcccaagccccgagagcagctgcgaagtgaaaaccgactccaccgaccacgtgaagcccaaagagacagagaacaccaagcagcccagcaagagctgccacaagcccaaggccatcgtgcacaccgagaaagtgaacatgatgagcctgaccgtgctgggcctgcggatgctgttcgccaaaaccgtggccgtgaacttcctgctgaccgccaagctgttcttcctcaaacggggcagaaagaaactcctgtatatattcaaacaaccatttatgagaccagtacaaactactcaagaggaagatggctgtagctgccgatttccagaagaagaagaaggaggatgtgaactgagagtgaagttcagcagaagcgccgacgcccctgcctaccagcagggacagaaccaactgtacaacgagctgaacctgggcagacgggaagagtacgacgtgctggacaagcggagaggcagggaccctgagatgggcggaaagccccagcggagaaagaacccccaggaaggactgtataacgaactccagaaagacaagatggccgaagcctacagcgagatcggcatgaagggcgagcggagaagaggcaagggccacgatggcctgtaccagggcctgagcaccgccaccaaggacacctatgacgccctgcacatgcaggccctgcctccaaga

SEQ ID NO: 27743 - DNA, 900 bp, synthetic construct
  source 1..900: mol_type = other DNA
ctgcgggatagcaagagcagcgacaagagcgtgtgtctgttcaccgacttcgacagccagaccaacgtgtcccagagcaaggactccgacgtgtacatcaccgataagaccgtgctggacatgcggagcatggacttcaagagcaactccgccgtggcctggtccaacaagtccgatttcgcctgcgccaacgccttcaacaacagcattatccccgaggacacattcttcccaagccccgagagcagctgcgaccacgtgaagcccaaagagacagagaacaccaagcagcccagcaagagctgccacaagcccaaggccatcgtgcacaccgagaaagtgaacatgatgagcctgaccgtgctgggcctgcggatgctgttcgccaaaaccgtggccgtgaacttcctgctgaccgccaagctgttcttcctcaaacggggcagaaagaaactcctgtatatattcaaacaaccatttatgagaccagtacaaactactcaagaggaagatggctgtagctgccgatttccagaagaagaagaaggaggatgtgaactgagagtgaagttcagcagaagcgccgacgcccctgcctaccagcagggacagaaccaactgtacaacgagctgaacctgggcagacgggaagagtacgacgtgctggacaagcggagaggcagggaccctgagatgggcggaaagccccagcggagaaagaacccccaggaaggactgtataacgaactccagaaagacaagatggccgaagcctacagcgagatcggcatgaagggcgagcggagaagaggcaagggccacgatggcctgtaccagggcctgagcaccgccaccaaggacacctatgacgccctgcacatgcaggccctgcctccaaga

SEQ ID NO: 27744 - DNA, 837 bp, synthetic construct
  source 1..837: mol_type = other DNA
ctgcgggatagcaagagcagcgacaagagcgtgtgtctgttcaccgacttcgacagccagaccaacgtgtcccagagcaaggactccgacgtgtacatcaccgataagaccgtgctggacatgcggagcatggacttcaagagcaactccgccgtggcctggtccaacaagtccgatttcgcctgcgccaacgccttcaacaacagcattatcggcagagccgattgcggctttaccagcgagagctaccagcagggcgtgctgagcgccaccatcctgtacgagatcctgctgggcaaggccaccctgtacgccgtgctggtgtctgccctggtgctgatggctatggtcaagcggaaggacagccggggaaaacggggcagaaagaaactcctgtatatattcaaacaaccatttatgagaccagtacaaactactcaagaggaagatggctgtagctgccgatttccagaagaagaagaaggaggatgtgaactgagagtgaagttcagcagaagcgccgacgcccctgcctaccagcagggacagaaccaactgtacaacgagctgaacctgggcagacgggaagagtacgacgtgctggacaagcggagaggcagggaccctgagatgggcggaaagccccagcggagaaagaacccccaggaaggactgtataacgaactccagaaagacaagatggccgaagcctacagcgagatcggcatgaagggcgagcggagaagaggcaagggccacgatggcctgtaccagggcctgagcaccgccaccaaggacacctatgacgccctgcacatgcaggccctgcctccaaga

SEQ ID NO: 27745 - DNA, 831 bp, synthetic construct
  source 1..831: mol_type = other DNA
ctgcgggatagcaagagcagcgacaagagcgtgtgtctgttcaccgacttcgacagccagaccaacgtgtcccagagcaaggactccgacgtgtacatcaccgataagaccgtgctggacatgcggagcatggacttcaagagcaactccgccgtggcctggtccaacaagtccgatttcgcctgcgccaacgccttcaacaacagcattatcgccgattgcggctttaccagcgagagctaccagcagggcgtgctgagcgccaccatcctgtacgagatcctgctgggcaaggccaccctgtacgccgtgctggtgtctgccctggtgctgatggctatggtcaagcggaaggacagccggggaaaacggggcagaaagaaactcctgtatatattcaaacaaccatttatgagaccagtacaaactactcaagaggaagatggctgtagctgccgatttccagaagaagaagaaggaggatgtgaactgagagtgaagttcagcagaagcgccgacgcccctgcctaccagcagggacagaaccaactgtacaacgagctgaacctgggcagacgggaagagtacgacgtgctggacaagcggagaggcagggaccctgagatgggcggaaagccccagcggagaaagaacccccaggaaggactgtataacgaactccagaaagacaagatggccgaagcctacagcgagatcggcatgaagggcgagcggagaagaggcaagggccacgatggcctgtaccagggcctgagcaccgccaccaaggacacctatgacgccctgcacatgcaggccctgcctccaaga

SEQ ID NO: 27746 - DNA, 861 bp, synthetic construct
  source 1..861: mol_type = other DNA
ctgcgggatagcaagagcagcgacaagagcgtgtgtctgttcaccgacttcgacagccagaccaacgtgtcccagagcaaggactccgacgtgtacatcaccgataagaccgtgctggacatgcggagcatggacttcaagagcaactccgccgtggcctggtccaacaagtccgatttcgcctgcgccaacgccttcaacaacagcattatccagatcgtgtctgccgaagcctggggcagagccgattgcggctttaccagcgagagctaccagcagggcgtgctgagcgccaccatcctgtacgagatcctgctgggcaaggccaccctgtacgccgtgctggtgtctgccctggtgctgatggctatggtcaagcggaaggacagccggggaaaacggggcagaaagaaactcctgtatatattcaaacaaccatttatgagaccagtacaaactactcaagaggaagatggctgtagctgccgatttccagaagaagaagaaggaggatgtgaactgagagtgaagttcagcagaagcgccgacgcccctgcctaccagcagggacagaaccaactgtacaacgagctgaacctgggcagacgggaagagtacgacgtgctggacaagcggagaggcagggaccctgagatgggcggaaagccccagcggagaaagaacccccaggaaggactgtataacgaactccagaaagacaagatggccgaagcctacagcgagatcggcatgaagggcgagcggagaagaggcaagggccacgatggcctgtaccagggcctgagcaccgccaccaaggacacctatgacgccctgcacatgcaggccctgcctccaaga

SEQ ID NO: 27747 - DNA, 885 bp, synthetic construct
  source 1..885: mol_type = other DNA
ctgcgggatagcaagagcagcgacaagagcgtgtgtctgttcaccgacttcgacagccagaccaacgtgtcccagagcaaggactccgacgtgtacatcaccgataagaccgtgctggacatgcggagcatggacttcaagagcaactccgccgtggcctggtccaacaagtccgatttcgcctgcgccaacgccttcaacaacagcattatcttcccacccatcaagaccgatgtgattacaatggaccccaaggacaactgctccaaggacgccaacgataccctgctgctccagctgaccaacaccagcgcctactacatgtacttgttgctgctgctgaagtccgtggtgtacttcgccatcatcacatgctgcctgctgcggagaaccgccttctgctgcaacggcgagaagtctaaacggggcagaaagaaactcctgtatatattcaaacaaccatttatgagaccagtacaaactactcaagaggaagatggctgtagctgccgatttccagaagaagaagaaggaggatgtgaactgagagtgaagttcagcagaagcgccgacgcccctgcctaccagcagggacagaaccaactgtacaacgagctgaacctgggcagacgggaagagtacgacgtgctggacaagcggagaggcagggaccctgagatgggcggaaagccccagcggagaaagaacccccaggaaggactgtataacgaactccagaaagacaagatggccgaagcctacagcgagatcggcatgaagggcgagcggagaagaggcaagggccacgatggcctgtaccagggcctgagcaccgccaccaaggacacctatgacgccctgcacatgcaggccctgcctccaaga

SEQ ID NO: 27748 - DNA, 879 bp, synthetic construct
  source 1..879: mol_type = other DNA
ctgcgggatagcaagagcagcgacaagagcgtgtgtctgttcaccgacttcgacagccagaccaacgtgtcccagagcaaggactccgacgtgtacatcaccgataagaccgtgctggacatgcggagcatggacttcaagagcaactccgccgtggcctggtccaacaagtccgatttcgcctgcgccaacgccttcaacaacagcattatccccatcaagaccgatgtgattacaatggaccccaaggacaactgctccaaggacgccaacgataccctgctgctccagctgaccaacaccagcgcctactacatgtacttgttgctgctgctgaagtccgtggtgtacttcgccatcatcacatgctgcctgctgcggagaaccgccttctgctgcaacggcgagaagtctaaacggggcagaaagaaactcctgtatatattcaaacaaccatttatgagaccagtacaaactactcaagaggaagatggctgtagctgccgatttccagaagaagaagaaggaggatgtgaactgagagtgaagttcagcagaagcgccgacgcccctgcctaccagcagggacagaaccaactgtacaacgagctgaacctgggcagacgggaagagtacgacgtgctggacaagcggagaggcagggaccctgagatgggcggaaagccccagcggagaaagaacccccaggaaggactgtataacgaactccagaaagacaagatggccgaagcctacagcgagatcggcatgaagggcgagcggagaagaggcaagggccacgatggcctgtaccagggcctgagcaccgccaccaaggacacctatgacgccctgcacatgcaggccctgcctccaaga

SEQ ID NO: 27749 - DNA, 855 bp, synthetic construct
  source 1..855: mol_type = other DNA
ctgcgggatagcaagagcagcgacaagagcgtgtgtctgttcaccgacttcgacagccagaccaacgtgtcccagagcaaggactccgacgtgtacatcaccgataagaccgtgctggacatgcggagcatggacttcaagagcaactccgccgtggcctggtccaacaagtccgatttcgcctgcgccaacgccttcaacaacagcattatcatggaccccaaggacaactgctccaaggacgccaacgataccctgctgctccagctgaccaacaccagcgcctactacatgtacttgttgctgctgctgaagtccgtggtgtacttcgccatcatcacatgctgcctgctgcggagaaccgccttctgctgcaacggcgagaagtctaaacggggcagaaagaaactcctgtatatattcaaacaaccatttatgagaccagtacaaactactcaagaggaagatggctgtagctgccgatttccagaagaagaagaaggaggatgtgaactgagagtgaagttcagcagaagcgccgacgcccctgcctaccagcagggacagaaccaactgtacaacgagctgaacctgggcagacgggaagagtacgacgtgctggacaagcggagaggcagggaccctgagatgggcggaaagccccagcggagaaagaacccccaggaaggactgtataacgaactccagaaagacaagatggccgaagcctacagcgagatcggcatgaagggcgagcggagaagaggcaagggccacgatggcctgtaccagggcctgagcaccgccaccaaggacacctatgacgccctgcacatgcaggccctgcctccaaga

SEQ ID NO: 27750 - DNA, 879 bp, synthetic construct; identical to SEQ ID NO: 27748
  source 1..879: mol_type = other DNA

SEQ ID NO: 27751 - DNA, 837 bp, synthetic construct
  source 1..837: mol_type = other DNA
ctgcgggatagcaagagcagcgacaagagcgtgtgtctgttcaccgacttcgacagccagaccaacgtgtcccagagcaaggactccgacgtgtacatcaccgataagaccgtgctggacatgcggagcatggacttcaagagcaactccgccgtggcctggtccaacaagtccgatttcgcctgcgccaacgccttcaacaacagcattatctgctccaaggacgccaacgataccctgctgctccagctgaccaacaccagcgcctactacatgtacttgttgctgctgctgaagtccgtggtgtacttcgccatcatcacatgctgcctgctgcggagaaccgccttctgctgcaacggcgagaagtctaaacggggcagaaagaaactcctgtatatattcaaacaaccatttatgagaccagtacaaactactcaagaggaagatggctgtagctgccgatttccagaagaagaagaaggaggatgtgaactgagagtgaagttcagcagaagcgccgacgcccctgcctaccagcagggacagaaccaactgtacaacgagctgaacctgggcagacgggaagagtacgacgtgctggacaagcggagaggcagggaccctgagatgggcggaaagccccagcggagaaagaacccccaggaaggactgtataacgaactccagaaagacaagatggccgaagcctacagcgagatcggcatgaagggcgagcggagaagaggcaagggccacgatggcctgtaccagggcctgagcaccgccaccaaggacacctatgacgccctgcacatgcaggccctgcctccaaga

SEQ ID NO: 27752 - DNA, 882 bp, synthetic construct
  source 1..882: mol_type = other DNA
ctgcgggatagcaagagcagcgacaagagcgtgtgtctgttcaccgacttcgacagccagaccaacgtgtcccagagcaaggactccgacgtgtacatcaccgataagaccgtgctggacatgcggagcatggacttcaagagcaactccgccgtggcctggtccaacaagtccgatttcgcctgcgccaacgccttcaacaacagcattatcgaagtgaaaaccgactccaccgaccacgtgaagcccaaagagacagagaacaccaagcagcccagcaagagctgccacaagcccaaggccatcgtgcacaccgagaaagtgaacatgatgagcctgaccgtgctgggcctgcggatgctgttcgccaaaaccgtggccgtgaacttcctgctgaccgccaagctgttcttcctcaaacggggcagaaagaaactcctgtatatattcaaacaaccatttatgagaccagtacaaactactcaagaggaagatggctgtagctgccgatttccagaagaagaagaaggaggatgtgaactgagagtgaagttcagcagaagcgccgacgcccctgcctaccagcagggacagaaccaactgtacaacgagctgaacctgggcagacgggaagagtacgacgtgctggacaagcggagaggcagggaccctgagatgggcggaaagccccagcggagaaagaacccccaggaaggactgtataacgaactccagaaagacaagatggccgaagcctacagcgagatcggcatgaagggcgagcggagaagaggcaagggccacgatggcctgtaccagggcctgagcaccgccaccaaggacacctatgacgccctgcacatgcaggccctgcctccaaga

SEQ ID NO: 27753 - DNA, 861 bp, synthetic construct
  source 1..861: mol_type = other DNA
ctgcgggatagcaagagcagcgacaagagcgtgtgtctgttcaccgacttcgacagccagaccaacgtgtcccagagcaaggactccgacgtgtacatcaccgataagaccgtgctggacatgcggagcatggacttcaagagcaactccgccgtggcctggtccaacaagtccgatttcgcctgcgccaacgccttcaacaacagcattatcgaccacgtgaagcccaaagagacagagaacaccaagcagcccagcaagagctgccacaagcccaaggccatcgtgcacaccgagaaagtgaacatgatgagcctgaccgtgctgggcctgcggatgctgttcgccaaaaccgtggccgtgaacttcctgctgaccgccaagctgttcttcctcaaacggggcagaaagaaactcctgtatatattcaaacaaccatttatgagaccagtacaaactactcaagaggaagatggctgtagctgccgatttccagaagaagaagaaggaggatgtgaactgagagtgaagttcagcagaagcgccgacgcccctgcctaccagcagggacagaaccaactgtacaacgagctgaacctgggcagacgggaagagtacgacgtgctggacaagcggagaggcagggaccctgagatgggcggaaagccccagcggagaaagaacccccaggaaggactgtataacgaactccagaaagacaagatggccgaagcctacagcgagatcggcatgaagggcgagcggagaagaggcaagggccacgatggcctgtaccagggcctgagcaccgccaccaaggacacctatgacgccctgcacatgcaggccctgcctccaaga

SEQ ID NO: 27754 - DNA, 876 bp, synthetic construct; identical to SEQ ID NO: 27734
  source 1..876: mol_type = other DNA

SEQ ID NO: 27755 - DNA, 870 bp, synthetic construct; identical to SEQ ID NO: 27735
  source 1..870: mol_type = other DNA

SEQ ID NO: 27756 - DNA, 900 bp, synthetic construct; identical to SEQ ID NO: 27736
  source 1..900: mol_type = other DNA

SEQ ID NO: 27757 - DNA, 924 bp, synthetic construct; identical to SEQ ID NO: 27737
  source 1..924: mol_type = other DNA

SEQ ID NO: 27758 - DNA, 918 bp, synthetic construct; identical to SEQ ID NO: 27738
  source 1..918: mol_type = other DNA

SEQ ID NO: 27759 - DNA, 894 bp, synthetic construct; identical to SEQ ID NO: 27739
  source 1..894: mol_type = other DNA

SEQ ID NO: 27760 - DNA, 918 bp, synthetic construct; identical to SEQ ID NO: 27738
  source 1..918: mol_type = other DNA

SEQ ID NO: 27761 - DNA, 876 bp, synthetic construct; identical to SEQ ID NO: 27741
  source 1..876: mol_type = other DNA

SEQ ID NO: 27762 - DNA, 921 bp, synthetic construct; identical to SEQ ID NO: 27742
  source 1..921: mol_type = other DNA

SEQ ID NO: 27763 - DNA, 900 bp, synthetic construct; identical to SEQ ID NO: 27743
  source 1..900: mol_type = other DNA

SEQ ID NO: 27764 - DNA, 996 bp, synthetic construct
  source 1..996: mol_type = other DNA
gaggtggccgtgttcgagcctagcgaggccgagatcagccacacccagaaagccaccctcgtgtgcctggctaccggcttctaccccgaccatgtggaactgtcttggtgggtcaacggcaaagaggtgcacagcggcgtgtctaccgacccccagccactgaaagaacagcccgccctgaacgacagccggtactgcctgagcagcagactgagagtgtccgccaccttctggcagaacccccggaaccacttcagatgccaggtgcagttctacggcctgagcgagaacgacgagtggacccaggacagagccaagcccgtgacccagatcgtgtctgccgaagcctggatccccgaggacacattcttcccaagccccgagagcagctgcgacgtgaagctggtggaaaagagcttcgagacagacaccaacctgaacttccagaacctgagcgtgatcggcttcagaatcctgctgctgaaagtggccggctttaacctgctgatgaccctgcggctgtggtccagcaaacggggcagaaagaaactcctgtatatattcaaacaaccatttatgagaccagtacaaactactcaagaggaagatggctgtagctgccgatttccagaagaagaagaaggaggatgtgaactgagagtgaagttcagcagaagcgccgacgcccctgcctaccagcagggacagaaccaactgtacaacgagctgaacctgggcagacgggaagagtacgacgtgctggacaagcggagaggcagggaccctgagatgggcggaaagccccagcggagaaagaacccccaggaaggactgtataacgaactccagaaagacaagatggccgaagcctacagcgagatcggcatgaagggcgagcggagaagaggcaagggccacgatggcctgtaccagggcctgagcaccgccaccaaggacacctatgacgccctgcacatgcaggccctgcctccaaga

SEQ ID NO: 27765 - DNA, 966 bp, synthetic construct
  source 1..966: mol_type = other DNA
gaggtggccgtgttcgagcctagcgaggccgagatcagccacacccagaaagccaccctcgtgtgcctggctaccggcttctaccccgaccatgtggaactgtcttggtgggtcaacggcaaagaggtgcacagcggcgtgtctaccgacccccagccactgaaagaacagcccgccctgaacgacagccggtactgcctgagcagcagactgagagtgtccgccaccttctggcagaacccccggaaccacttcagatgccaggtgcagttctacggcctgagcgagaacgacgagtggacccaggacagagccaagcccgtgacccagatcgtgtctgccgaagcctgggagagcagctgcgacgtgaagctggtggaaaagagcttcgagacagacaccaacctgaacttccagaacctgagcgtgatcggcttcagaatcctgctgctgaaagtggccggctttaacctgctgatgaccctgcggctgtggtccagcaaacggggcagaaagaaactcctgtatatattcaaacaaccatttatgagaccagtacaaactactcaagaggaagatggctgtagctgccgatttccagaagaagaagaaggaggatgtgaactgagagtgaagttcagcagaagcgccgacgcccctgcctaccagcagggacagaaccaactgtacaacgagctgaacctgggcagacgggaagagtacgacgtgctggacaagcggagaggcagggaccctgagatgggcggaaagccccagcggagaaagaacccccaggaaggactgtataacgaactccagaaagacaagatggccgaagcctacagcgagatcggcatgaagggcgagcggagaagaggcaagggccacgatggcctgtaccagggcctgagcaccgccaccaaggacacctatgacgccctgcacatgcaggccctgcctccaaga

SEQ ID NO: 27766 - DNA, 993 bp, synthetic construct
  source 1..993: mol_type = other DNA
gaggtggccgtgttcgagcctagcgaggccgagatcagccacacccagaaagccaccctcgtgtgcctggctaccggcttctaccccgaccatgtggaactgtcttggtgggtcaacggcaaagaggtgcacagcggcgtgtctaccgacccccagccactgaaagaacagcccgccctgaacgacagccggtactgcctgagcagcagactgagagtgtccgccaccttctggcagaacccccggaaccacttcagatgccaggtgcagttctacggcctgagcgagaacgacgagtggacccaggacagagccaagcccgtgacccagatcgtgtctgccgaagcctggcccgaggacacattcttcccaagccccgagagcagctgcgacgtgaagctggtggaaaagagcttcgagacagacaccaacctgaacttccagaacctgagcgtgatcggcttcagaatcctgctgctgaaagtggccggctttaacctgctgatgaccctgcggctgtggtccagcaaacggggcagaaagaaactcctgtatatattcaaacaaccatttatgagaccagtacaaactactcaagaggaagatggctgtagctgccgatttccagaagaagaagaaggaggatgtgaactgagagtgaagttcagcagaagcgccgacgcccctgcctaccagcagggacagaaccaactgtacaacgagctgaacctgggcagacgggaagagtacgacgtgctggacaagcggagaggcagggaccctgagatgggcggaaagccccagcggagaaagaacccccaggaaggactgtataacgaactccagaaagacaagatggccgaagcctacagcgagatcggcatgaagggcgagcggagaagaggcaagggccacgatggcctgtaccagggcctgagcaccgccaccaaggacacctatgacgccctgcacatgcaggccctgcctccaaga

SEQ ID NO: 27767 - DNA, 1023 bp, synthetic construct
  source 1..1023: mol_type = other DNA
gaggtggccgtgttcgagcctagcgaggccgagatcagccacacccagaaagccaccctcgtgtgcctggctaccggcttctaccccgaccatgtggaactgtcttggtgggtcaacggcaaagaggtgcacagcggcgtgtctaccgacccccagccactgaaagaacagcccgccctgaacgacagccggtactgcctgagcagcagactgagagtgtccgccaccttctggcagaacccccggaaccacttcagatgccaggtgcagttctacggcctgagcgagaacgacgagtggacccaggacagagccaagcccgtgacccagatcgtgtctgccgaagcctggttcccacccatcaagaccgatgtgattacaatggaccccaaggacaactgctccaaggacgccaacgataccctgctgctccagctgaccaacaccagcgcctactacatgtacttgttgctgctgctgaagtccgtggtgtacttcgccatcatcacatgctgcctgctgcggagaaccgccttctgctgcaacggcgagaagtctaaacggggcagaaagaaactcctgtatatattcaaacaaccatttatgagaccagtacaaactactcaagaggaagatggctgtagctgccgatttccagaagaagaagaaggaggatgtgaactgagagtgaagttcagcagaagcgccgacgcccctgcctaccagcagggacagaaccaactgtacaacgagctgaacctgggcagacgggaagagtacgacgtgctggacaagcggagaggcagggaccctgagatgggcggaaagccccagcggagaaagaacccccaggaaggactgtataacgaactccagaaagacaagatggccgaagcctacagcgagatcggcatgaagggcgagcggagaagaggcaagggccacgatggcctgtaccagggcctgagcaccgccaccaaggacacctatgacgccctgcacatgcaggccctgcctccaaga

SEQ ID NO: 27768 - DNA, 1017 bp, synthetic construct
  source 1..1017: mol_type = other DNA
gaggtggccgtgttcgagcctagcgaggccgagatcagccacacccagaaagccaccctcgtgtgcctggctaccggcttctaccccgaccatgtggaactgtcttggtgggtcaacggcaaagaggtgcacagcggcgtgtctaccgacccccagccactgaaagaacagcccgccctgaacgacagccggtactgcctgagcagcagactgagagtgtccgccaccttctggcagaacccccggaaccacttcagatgccaggtgcagttctacggcctgagcgagaacgacgagtggacccaggacagagccaagcccgtgacccagatcgtgtctgccgaagcctggcccatcaagaccgatgtgattacaatggaccccaaggacaactgctccaaggacgccaacgataccctgctgctccagctgaccaacaccagcgcctactacatgtacttgttgctgctgctgaagtccgtggtgtacttcgccatcatcacatgctgcctgctgcggagaaccgccttctgctgcaacggcgagaagtctaaacggggcagaaagaaactcctgtatatattcaaacaaccatttatgagaccagtacaaactactcaagaggaagatggctgtagctgccgatttccagaagaagaagaaggaggatgtgaactgagagtgaagttcagcagaagcgccgacgcccctgcctaccagcagggacagaaccaactgtacaacgagctgaacctgggcagacgggaagagtacgacgtgctggacaagcggagaggcagggaccctgagatgggcggaaagccccagcggagaaagaacccccaggaaggactgtataacgaactccagaaagacaagatggccgaagcctacagcgagatcggcatgaagggcgagcggagaagaggcaagggccacgatggcctgtaccagggcctgagcaccgccaccaaggacacctatgacgccctgcacatgcaggccctgcctccaaga

SEQ ID NO: 27769 - DNA, 993 bp, synthetic construct
  source 1..993: mol_type = other DNA
gaggtggccgtgttcgagcctagcgaggccgagatcagccacacccagaaagccaccctcgtgtgcctggctaccggcttctaccccgaccatgtggaactgtcttggtgggtcaacggcaaagaggtgcacagcggcgtgtctaccgacccccagccactgaaagaacagcccgccctgaacgacagccggtactgcctgagcagcagactgagagtgtccgccaccttctggcagaacccccggaaccacttcagatgccaggtgcagttctacggcctgagcgagaacgacgagtggacccaggacagagccaagcccgtgacccagatcgtgtctgccgaagcctggatggaccccaaggacaactgctccaaggacgccaacgataccctgctgctccagctgaccaacaccagcgcctactacatgtacttgttgctgctgctgaagtccgtggtgtacttcgccatcatcacatgctgcctgctgcggagaaccgccttctgctgcaacggcgagaagtctaaacggggcagaaagaaactcctgtatatattcaaacaaccatttatgagaccagtacaaactactcaagaggaagatggctgtagctgccgatttccagaagaagaagaaggaggatgtgaactgagagtgaagttcagcagaagcgccgacgcccctgcctaccagcagggacagaaccaactgtacaacgagctgaacctgggcagacgggaagagtacgacgtgctggacaagcggagaggcagggaccctgagatgggcggaaagccccagcggagaaagaacccccaggaaggactgtataacgaactccagaaagacaagatggccgaagcctacagcgagatcggcatgaagggcgagcggagaagaggcaagggccacgatggcctgtaccagggcctgagcaccgccaccaaggacacctatgacgccctgcacatgcaggccctgcctccaaga

SEQ ID NO: 27770 - DNA, 1017 bp, synthetic construct; identical to SEQ ID NO: 27768
  source 1..1017: mol_type = other DNA

SEQ ID NO: 27771 - DNA, 975 bp, synthetic construct
  source 1..975: mol_type = other DNA
gaggtggccgtgttcgagcctagcgaggccgagatcagccacacccagaaagccaccctcgtgtgcctggctaccggcttctaccccgaccatgtggaactgtcttggtgggtcaacggcaaagaggtgcacagcggcgtgtctaccgacccccagccactgaaagaacagcccgccctgaacgacagccggtactgcctgagcagcagactgagagtgtccgccaccttctggcagaacccccggaaccacttcagatgccaggtgcagttctacggcctgagcgagaacgacgagtggacccaggacagagccaagcccgtgacccagatcgtgtctgccgaagcctggtgctccaaggacgccaacgataccctgctgctccagctgaccaacaccagcgcctactacatgtacttgttgctgctgctgaagtccgtggtgtacttcgccatcatcacatgctgcctgctgcggagaaccgccttctgctgcaacggcgagaagtctaaacggggcagaaagaaactcctgtatatattcaaacaaccatttatgagaccagtacaaactactcaagaggaagatggctgtagctgccgatttccagaagaagaagaaggaggatgtgaactgagagtgaagttcagcagaagcgccgacgcccctgcctaccagcagggacagaaccaactgtacaacgagctgaacctgggcagacgggaagagtacgacgtgctggacaagcggagaggcagggaccctgagatgggcggaaagccccagcggagaaagaacccccaggaaggactgtataacgaactccagaaagacaagatggccgaagcctacagcgagatcggcatgaagggcgagcggagaagaggcaagggccacgatggcctgtaccagggcctgagcaccgccaccaaggacacctatgacgccctgcacatgcaggccctgcctccaaga

SEQ ID NO: 27772 - DNA, 1020 bp, synthetic construct
  source 1..1020: mol_type = other DNA
gaggtggccgtgttcgagcctagcgaggccgagatcagccacacccagaaagccaccctcgtgtgcctggctaccggcttctaccccgaccatgtggaactgtcttggtgggtcaacggcaaagaggtgcacagcggcgtgtctaccgacccccagccactgaaagaacagcccgccctgaacgacagccggtactgcctgagcagcagactgagagtgtccgccaccttctggcagaacccccggaaccacttcagatgccaggtgcagttctacggcctgagcgagaacgacgagtggacccaggacagagccaagcccgtgacccagatcgtgtctgccgaagcctgggaagtgaaaaccgactccaccgaccacgtgaagcccaaagagacagagaacaccaagcagcccagcaagagctgccacaagcccaaggccatcgtgcacaccgagaaagtgaacatgatgagcctgaccgtgctgggcctgcggatgctgttcgccaaaaccgtggccgtgaacttcctgctgaccgccaagctgttcttcctcaaacggggcagaaagaaactcctgtatatattcaaacaaccatttatgagaccagtacaaactactcaagaggaagatggctgtagctgccgatttccagaagaagaagaaggaggatgtgaactgagagtgaagttcagcagaagcgccgacgcccctgcctaccagcagggacagaaccaactgtacaacgagctgaacctgggcagacgggaagagtacgacgtgctggacaagcggagaggcagggaccctgagatgggcggaaagccccagcggagaaagaacccccaggaaggactgtataacgaactccagaaagacaagatggccgaagcctacagcgagatcggcatgaagggcgagcggagaagaggcaagggccacgatggcctgtaccagggcctgagcaccgccaccaaggacacctatgacgccctgcacatgcaggccctgcctccaaga

SEQ ID NO: 27773 - DNA, 999 bp, synthetic construct
  source 1..999: mol_type = other DNA
gaggtggccgtgttcgagcctagcgaggccgagatcagccacacccagaaagccaccctcgtgtgcctggctaccggcttctaccccgaccatgtggaactgtcttggtgggtcaacggcaaagaggtgcacagcggcgtgtctaccgacccccagccactgaaagaacagcccgccctgaacgacagccggtactgcctgagcagcagactgagagtgtccgccaccttctggcagaacccccggaaccacttcagatgccaggtgcagttctacggcctgagcgagaacgacgagtggacccaggacagagccaagcccgtgacccagatcgtgtctgccgaagcctgggaccacgtgaagcccaaagagacagagaacaccaagcagcccagcaagagctgccacaagcccaaggccatcgtgcacaccgagaaagtgaacatgatgagcctgaccgtgctgggcctgcggatgctgttcgccaaaaccgtggccgtgaacttcctgctgaccgccaagctgttcttcctcaaacggggcagaaagaaactcctgtatatattcaaacaaccatttatgagaccagtacaaactactcaagaggaagatggctgtagctgccgatttccagaagaagaagaaggaggatgtgaactgagagtgaagttcagcagaagcgccgacgcccctgcctaccagcagggacagaaccaactgtacaacgagctgaacctgggcagacgggaagagtacgacgtgctggacaagcggagaggcagggaccctgagatgggcggaaagccccagcggagaaagaacccccaggaaggactgtataacgaactccagaaagacaagatggccgaagcctacagcgagatcggcatgaagggcgagcggagaagaggcaagggccacgatggcctgtaccagggcctgagcaccgccaccaaggacacctatgacgccctgcacatgcaggccctgcctccaaga

SEQ ID NO: 27774 - DNA, 1002 bp, synthetic construct
  source 1..1002: mol_type = other DNA
gaggtggccgtgttcgagcctagcgaggccgagatcagccacacccagaaagccaccctcgtgtgcctggctaccggcttctaccccgaccatgtggaactgtcttggtgggtcaacggcaaagaggtgcacagcggcgtgtctaccgacccccagccactgaaagaacagcccgccctgaacgacagccggtactgcctgagcagcagactgagagtgtccgccaccttctggcagaacccccggaaccacttcagatgccaggtgcagttctacggcctgagcgagaacgacgagtggacccaggacagagccaagcccgtgacccagatcgtgtctgccgaagcctggggcagaatccccgaggacacattcttcccaagccccgagagcagctgcgacgtgaagctggtggaaaagagcttcgagacagacaccaacctgaacttccagaacctgagcgtgatcggcttcagaatcctgctgctgaaagtggccggctttaacctgctgatgaccctgcggctgtggtccagcaaacggggcagaaagaaactcctgtatatattcaaacaaccatttatgagaccagtacaaactactcaagaggaagatggctgtagctgccgatttccagaagaagaagaaggaggatgtgaactgagagtgaagttcagcagaagcgccgacgcccctgcctaccagcagggacagaaccaactgtacaacgagctgaacctgggcagacgggaagagtacgacgtgctggacaagcggagaggcagggaccctgagatgggcggaaagccccagcggagaaagaacccccaggaaggactgtataacgaactccagaaagacaagatggccgaagcctacagcgagatcggcatgaagggcgagcggagaagaggcaagggccacgatggcctgtaccagggcctgagcaccgccaccaaggacacctatgacgccctgcacatgcaggccctgcctccaaga

SEQ ID NO: 27775 - DNA, 972 bp, synthetic construct
  source 1..972: mol_type = other DNA
gaggtggccgtgttcgagcctagcgaggccgagatcagccacacccagaaagccaccctcgtgtgcctggctaccggcttctaccccgaccatgtggaactgtcttggtgggtcaacggcaaagaggtgcacagcggcgtgtctaccgacccccagccactgaaagaacagcccgccctgaacgacagccggtactgcctgagcagcagactgagagtgtccgccaccttctggcagaacccccggaaccacttcagatgccaggtgcagttctacggcctgagcgagaacgacgagtggacccaggacagagccaagcccgtgacccagatcgtgtctgccgaagcctggggcagagagagcagctgcgacgtgaagctggtggaaaagagcttcgagacagacaccaacctgaacttccagaacctgagcgtgatcggcttcagaatcctgctgctgaaagtggccggctttaacctgctgatgaccctgcggctgtggtccagcaaacggggcagaaagaaactcctgtatatattcaaacaaccatttatgagaccagtacaaactactcaagaggaagatggctgtagctgccgatttccagaagaagaagaaggaggatgtgaactgagagtgaagttcagcagaagcgccgacgcccctgcctaccagcagggacagaaccaactgtacaacgagctgaacctgggcagacgggaagagtacgacgtgctggacaagcggagaggcagggaccctgagatgggcggaaagccccagcggagaaagaacccccaggaaggactgtataacgaactccagaaagacaagatggccgaagcctacagcgagatcggcatgaagggcgagcggagaagaggcaagggccacgatggcctgtaccagggcctgagcaccgccaccaaggacacctatgacgccctgcacatgcaggccctgcctccaaga

SEQ ID NO: 27776 - DNA, 999 bp, synthetic construct
  source 1..999: mol_type = other DNA
gaggtggccgtgttcgagcctagcgaggccgagatcagccacacccagaaagccaccctcgtgtgcctggctaccggcttctaccccgaccatgtggaactgtcttggtgggtcaacggcaaagaggtgcacagcggcgtgtctaccgacccccagccactgaaagaacagcccgccctgaacgacagccggtactgcctgagcagcagactgagagtgtccgccaccttctggcagaacccccggaaccacttcagatgccaggtgcagttctacggcctgagcgagaacgacgagtggacccaggacagagccaagcccgtgacccagatcgtgtctgccgaagcctggggcagacccgaggacacattcttcccaagccccgagagcagctgcgacgtgaagctggtggaaaagagcttcgagacagacaccaacctgaacttccagaacctgagcgtgatcggcttcagaatcctgctgctgaaagtggccggctttaacctgctgatgaccctgcggctgtggtccagcaaacggggcagaaagaaactcctgtatatattcaaacaaccatttatgagaccagtacaaactactcaagaggaagatggctgtagctgccgatttccagaagaagaagaaggaggatgtgaactgagagtgaagttcagcagaagcgccgacgcccctgcctaccagcagggacagaaccaactgtacaacgagctgaacctgggcagacgggaagagtacgacgtgctggacaagcggagaggcagggaccctgagatgggcggaaagccccagcggagaaagaacccccaggaaggactgtataacgaactccagaaagacaagatggccgaagcctacagcgagatcggcatgaagggcgagcggagaagaggcaagggccacgatggcctgtaccagggcctgagcaccgccaccaaggacacctatgacgccctgcacatgcaggccctgcctccaaga

SEQ ID NO: 27777 - DNA, 1029 bp, synthetic construct
  source 1..1029: mol_type = other DNA
gaggtggccgtgttcgagcctagcgaggccgagatcagccacacccagaaagccaccctcgtgtgcctggctaccggcttctaccccgaccatgtggaactgtcttggtgggtcaacggcaaagaggtgcacagcggcgtgtctaccgacccccagccactgaaagaacagcccgccctgaacgacagccggtactgcctgagcagcagactgagagtgtccgccaccttctggcagaacccccggaaccacttcagatgccaggtgcagttctacggcctgagcgagaacgacgagtggacccaggacagagccaagcccgtgacccagatcgtgtctgccgaagcctggggcagattcccacccatcaagaccgatgtgattacaatggaccccaaggacaactgctccaaggacgccaacgataccctgctgctccagctgaccaacaccagcgcctactacatgtacttgttgctgctgctgaagtccgtggtgtacttcgccatcatcacatgctgcctgctgcggagaaccgccttctgctgcaacggcgagaagtctaaacggggcagaaagaaactcctgtatatattcaaacaaccatttatgagaccagtacaaactactcaagaggaagatggctgtagctgccgatttccagaagaagaagaaggaggatgtgaactgagagtgaagttcagcagaagcgccgacgcccctgcctaccagcagggacagaaccaactgtacaacgagctgaacctgggcagacgggaagagtacgacgtgctggacaagcggagaggcagggaccctgagatgggcggaaagccccagcggagaaagaacccccaggaaggactgtataacgaactccagaaagacaagatggccgaagcctacagcgagatcggcatgaagggcgagcggagaagaggcaagggccacgatggcctgtaccagggcctgagcaccgccaccaaggacacctatgacgccctgcacatgcaggccctgcctccaaga

SEQ ID NO: 27778 - DNA, 1023 bp, synthetic construct
  source 1..1023: mol_type = other DNA
gaggtggccgtgttcgagcctagcgaggccgagatcagccacacccagaaagccaccctcgtgtgcctggctaccggcttctaccccgaccatgtggaactgtcttggtgggtcaacggcaaagaggtgcacagcggcgtgtctaccgacccccagccactgaaagaacagcccgccctgaacgacagccggtactgcctgagcagcagactgagagtgtccgccaccttctggcagaacccccggaaccacttcagatgccaggtgcagttctacggcctgagcgagaacgacgagtggacccaggacagagccaagcccgtgacccagatcgtgtctgccgaagcctggggcagacccatcaagaccgatgtgattacaatggaccccaaggacaactgctccaaggacgccaacgataccctgctgctccagctgaccaacaccagcgcctactacatgtacttgttgctgctgctgaagtccgtggtgtacttcgccatcatcacatgctgcctgctgcggagaaccgccttctgctgcaacggcgagaagtctaaacggggcagaaagaaactcctgtatatattcaaacaaccatttatgagaccagtacaaactactcaagaggaagatggctgtagctgccgatttccagaagaagaagaaggaggatgtgaactgagagtgaagttcagcagaagcgccgacgcccctgcctaccagcagggacagaaccaactgtacaacgagctgaacctgggcagacgggaagagtacgacgtgctggacaagcggagaggcagggaccctgagatgggcggaaagccccagcggagaaagaacccccaggaaggactgtataacgaactccagaaagacaagatggccgaagcctacagcgagatcggcatgaagggcgagcggagaagaggcaagggccacgatggcctgtaccagggcctgagcaccgccaccaaggacacctatgacgccctgcacatgcaggccctgcctccaaga

SEQ ID NO: 27779 - DNA, 999 bp, synthetic construct
  source 1..999: mol_type = other DNA
gaggtggccgtgttcgagcctagcgaggccgagatcagccacacccagaaagccaccctcgtgtgcctggctaccggcttctaccccgaccatgtggaactgtcttggtgggtcaacggcaaagaggtgcacagcggcgtgtctaccgacccccagccactgaaagaacagcccgccctgaacgacagccggtactgcctgagcagcagactgagagtgtccgccaccttctggcagaacccccggaaccacttcagatgccaggtgcagttctacggcctgagcgagaacgacgagtggacccaggacagagccaagcccgtgacccagatcgtgtctgccgaagcctggggcagaatggaccccaaggacaactgctccaaggacgccaacgataccctgctgctccagctgaccaacaccagcgcctactacatgtacttgttgctgctgctgaagtccgtggtgtacttcgccatcatcacatgctgcctgctgcggagaaccgccttctgctgcaacggcgagaagtctaaacggggcagaaagaaactcctgtatatattcaaacaaccatttatgagaccagtacaaactactcaagaggaagatggctgtagctgccgatttccagaagaagaagaaggaggatgtgaactgagagtgaagttcagcagaagcgccgacgcccctgcctaccagcagggacagaaccaactgtacaacgagctgaacctgggcagacgggaagagtacgacgtgctggacaagcggagaggcagggaccctgagatgggcggaaagccccagcggagaaagaacccccaggaaggactgtataacgaactccagaaagacaagatggccgaagcctacagcgagatcggcatgaagggcgagcggagaagaggcaagggccacgatggcctgtaccagggcctgagcaccgccaccaaggacacctatgacgccctgcacatgcaggccctgcctccaaga

SEQ ID NO: 27780 - DNA, 1023 bp, synthetic construct; identical to SEQ ID NO: 27778
  source 1..1023: mol_type = other DNA

SEQ ID NO: 27781 - DNA, 981 bp, synthetic construct
  source 1..981: mol_type = other DNA
gaggtggccgtgttcgagcctagcgaggccgagatcagccacacccagaaagccaccctcgtgtgcctggctaccggcttctaccccgaccatgtggaactgtcttggtgggtcaacggcaaagaggtgcacagcggcgtgtctaccgacccccagccactgaaagaacagcccgccctgaacgacagccggtactgcctgagcagcagactgagagtgtccgccaccttctggcagaacccccggaaccacttcagatgccaggtgcagttctacggcctgagcgagaacgacgagtggacccaggacagagccaagcccgtgacccagatcgtgtctgccgaagcctggggcagatgctccaaggacgccaacgataccctgctgctccagctgaccaacaccagcgcctactacatgtacttgttgctgctgctgaagtccgtggtgtacttcgccatcatcacatgctgcctgctgcggagaaccgccttctgctgcaacggcgagaagtctaaacggggcagaaagaaactcctgtatatattcaaacaaccatttatgagaccagtacaaactactcaagaggaagatggctgtagctgccgatttccagaagaagaagaaggaggatgtgaactgagagtgaagttcagcagaagcgccgacgcccctgcctaccagcagggacagaaccaactgtacaacgagctgaacctgggcagacgggaagagtacgacgtgctggacaagcggagaggcagggaccctgagatgggcggaaagccccagcggagaaagaacccccaggaaggactgtataacgaactccagaaagacaagatggccgaagcctacagcgagatcggcatgaagggcgagcggagaagaggcaagggccacgatggcctgtaccagggcctgagcaccgccaccaaggacacctatgacgccctgcacatgcaggccctgcctccaaga

SEQ ID NO: 27782 - DNA, 1026 bp, synthetic construct
  source 1..1026: mol_type = other DNA
gaggtggccgtgttcgagcctagcgaggccgagatcagccacacccagaaagccaccctcgtgtgcctggctaccggcttctaccccgaccatgtggaactgtcttggtgggtcaacggcaaagaggtgcacagcggcgtgtctaccgacccccagccactgaaagaacagcccgccctgaacgacagccggtactgcctgagcagcagactgagagtgtccgccaccttctggcagaacccccggaaccacttcagatgccaggtgcagttctacggcctgagcgagaacgacgagtggacccaggacagagccaagcccgtgacccagatcgtgtctgccgaagcctggggcagagaagtgaaaaccgactccaccgaccacgtgaagcccaaagagacagagaacaccaagcagcccagcaagagctgccacaagcccaaggccatcgtgcacaccgagaaagtgaacatgatgagcctgaccgtgctgggcctgcggatgctgttcgccaaaaccgtggccgtgaacttcctgctgaccgccaagctgttcttcctcaaacggggcagaaagaaactcctgtatatattcaaacaaccatttatgagaccagtacaaactactcaagaggaagatggctgtagctgccgatttccagaagaagaagaaggaggatgtgaactgagagtgaagttcagcagaagcgccgacgcccctgcctaccagcagggacagaaccaactgtacaacgagctgaacctgggcagacgggaagagtacgacgtgctggacaagcggagaggcagggaccctgagatgggcggaaagccccagcggagaaagaacccccaggaaggactgtataacgaactccagaaagacaagatggccgaagcctacagcgagatcggcatgaagggcgagcggagaagaggcaagggccacgatggcctgtaccagggcctgagcaccgccaccaaggacacctatgacgccctgcacatgcaggccctgcctccaaga

SEQ ID NO: 27783 - DNA, 1005 bp, synthetic construct
  source 1..1005: mol_type = other DNA
gaggtggccgtgttcgagcctagcgaggccgagatcagccacacccagaaagccaccctcgtgtgcctggctaccggcttctaccccgaccatgtggaactgtcttggtgggtcaacggcaaagaggtgcacagcggcgtgtctaccgacccccagccactgaaagaacagcccgccctgaacgacagccggtactgcctgagcagcagactgagagtgtccgccaccttctggcagaacccccggaaccacttcagatgccaggtgcagttctacggcctgagcgagaacgacgagtggacccaggacagagccaagcccgtgacccagatcgtgtctgccgaagcctggggcagagaccacgtgaagcccaaagagacagagaacaccaagcagcccagcaagagctgccacaagcccaaggccatcgtgcacaccgagaaagtgaacatgatgagcctgaccgtgctgggcctgcggatgctgttcgccaaaaccgtggccgtgaacttcctgctgaccgccaagctgttcttcctcaaacggggcagaaagaaactcctgtatatattcaaacaaccatttatgagaccagtacaaactactcaagaggaagatggctgtagctgccgatttccagaagaagaagaaggaggatgtgaactgagagtgaagttcagcagaagcgccgacgcccctgcctaccagcagggacagaaccaactgtacaacgagctgaacctgggcagacgggaagagtacgacgtgctggacaagcggagaggcagggaccctgagatgggcggaaagccccagcggagaaagaacccccaggaaggactgtataacgaactccagaaagacaagatggccgaagcctacagcgagatcggcatgaagggcgagcggagaagaggcaagggccacgatggcctgtaccagggcctgagcaccgccaccaaggacacctatgacgccctgcacatgcaggccctgcctccaaga

SEQ ID NO: 27784 - DNA, 1011 bp, synthetic construct
  source 1..1011: mol_type = other DNA
gaggtggccgtgttcgagcctagcgaggccgagatcagccacacccagaaagccaccctcgtgtgcctggctaccggcttctaccccgaccatgtggaactgtcttggtgggtcaacggcaaagaggtgcacagcggcgtgtctaccgacccccagccactgaaagaacagcccgccctgaacgacagccggtactgcctgagcagcagactgagagtgtccgccaccttctggcagaacccccggaaccacttcagatgccaggtgcagttctacggcctgagcgagaacgacgagtggacccaggacagagccaagcccgtgacccagatcgtgtctgccgaagcctggggcagagccgattgcatccccgaggacacattcttcccaagccccgagagcagctgcgacgtgaagctggtggaaaagagcttcgagacagacaccaacctgaacttccagaacctgagcgtgatcggcttcagaatcctgctgctgaaagtggccggctttaacctgctgatgaccctgcggctgtggtccagcaaacggggcagaaagaaactcctgtatatattcaaacaaccatttatgagaccagtacaaactactcaagaggaagatggctgtagctgccgatttccagaagaagaagaaggaggatgtgaactgagagtgaagttcagcagaagcgccgacgcccctgcctaccagcagggacagaaccaactgtacaacgagctgaacctgggcagacgggaagagtacgacgtgctggacaagcggagaggcagggaccctgagatgggcggaaagccccagcggagaaagaacccccaggaaggactgtataacgaactccagaaagacaagatggccgaagcctacagcgagatcggcatgaagggcgagcggagaagaggcaagggccacgatggcctgtaccagggcctgagcaccgccaccaaggacacctatgacgccctgcacatgcaggccctgcctccaaga

SEQ ID NO: 27785 - DNA, 981 bp, synthetic construct
  source 1..981: mol_type = other DNA
gaggtggccgtgttcgagcctagcgaggccgagatcagccacacccagaaagccaccctcgtgtgcctggctaccggcttctaccccgaccatgtggaactgtcttggtgggtcaacggcaaagaggtgcacagcggcgtgtctaccgacccccagccactgaaagaacagcccgccctgaacgacagccggtactgcctgagcagcagactgagagtgtccgccaccttctggcagaacccccggaaccacttcagatgccaggtgcagttctacggcctgagcgagaacgacgagtggacccaggacagagccaagcccgtgacccagatcgtgtctgccgaagcctggggcagagccgattgcgagagcagctgcgacgtgaagctggtggaaaagagcttcgagacagacaccaacctgaacttccagaacctgagcgtgatcggcttcagaatcctgctgctgaaagtggccggctttaacctgctgatgaccctgcggctgtggtccagcaaacggggcagaaagaaactcctgtatatattcaaacaaccatttatgagaccagtacaaactactcaagaggaagatggctgtagctgccgatttccagaagaagaagaaggaggatgtgaactgagagtgaagttcagcagaagcgccgacgcccctgcctaccagcagggacagaaccaactgtacaacgagctgaacctgggcagacgggaagagtacgacgtgctggacaagcggagaggcagggaccctgagatgggcggaaagccccagcggagaaagaacccccaggaaggactgtataacgaactccagaaagacaagatggccgaagcctacagcgagatcggcatgaagggcgagcggagaagaggcaagggccacgatggcctgtaccagggcctgagcaccgccaccaaggacacctatgacgccctgcacatgcaggccctgcctccaaga

SEQ ID NO: 27786 - DNA, 1008 bp, synthetic construct
  source 1..1008: mol_type = other DNA
gaggtggccgtgttcgagcctagcgaggccgagatcagccacacccagaaagccaccctcgtgtgcctggctaccggcttctaccccgaccatgtggaactgtcttggtgggtcaacggcaaagaggtgcacagcggcgtgtctaccgacccccagccactgaaagaacagcccgccctgaacgacagccggtactgcctgagcagcagactgagagtgtccgccaccttctggcagaacccccggaaccacttcagatgccaggtgcagttctacggcctgagcgagaacgacgagtggacccaggacagagccaagcccgtgacccagatcgtgtctgccgaagcctggggcagagccgattgccccgaggacacattcttcccaagccccgagagcagctgcgacgtgaagctggtggaaaagagcttcgagacagacaccaacctgaacttccagaacctgagcgtgatcggcttcagaatcctgctgctgaaagtggccggctttaacctgctgatgaccctgcggctgtggtccagcaaacggggcagaaagaaactcctgtatatattcaaacaaccatttatgagaccagtacaaactactcaagaggaagatggctgtagctgccgatttccagaagaagaagaaggaggatgtgaactgagagtgaagttcagcagaagcgccgacgcccctgcctaccagcagggacagaaccaactgtacaacgagctgaacctgggcagacgggaagagtacgacgtgctggacaagcggagaggcagggaccctgagatgggcggaaagccccagcggagaaagaacccccaggaaggactgtataacgaactccagaaagacaagatggccgaagcctacagcgagatcggcatgaagggcgagcggagaagaggcaagggccacgatggcctgtaccagggcctgagcaccgccaccaaggacacctatgacgccctgcacatgcaggccctgcctccaaga

SEQ ID NO: 27787 - DNA, 1038 bp, synthetic construct
  source 1..1038: mol_type = other DNA
gaggtggccgtgttcgagcctagcgaggccgagatcagccacacccagaaagccaccctcgtgtgcctggctaccggcttctaccccgaccatgtggaactgtcttggtgggtcaacggcaaagaggtgcacagcggcgtgtctaccgacccccagccactgaaagaacagcccgccctgaacgacagccggtactgcctgagcagcagactgagagtgtccgccaccttctggcagaacccccggaaccacttcagatgccaggtgcagttctacggcctgagcgagaacgacgagtggacccaggacagagccaagcccgtgacccagatcgtgtctgccgaagcctggggcagagccgattgcttcccacccatcaagaccgatgtgattacaatggaccccaaggacaactgctccaaggacgccaacgataccctgctgctccagctgaccaacaccagcgcctactacatgtacttgttgctgctgctgaagtccgtggtgtacttcgccatcatcacatgctgcctgctgcggagaaccgccttctgctgcaacggcgagaagtctaaacggggcagaaagaaactcctgtatatattcaaacaaccatttatgagaccagtacaaactactcaagaggaagatggctgtagctgccgatttccagaagaagaagaaggaggatgtgaactgagagtgaagttcagcagaagcgccgacgcccctgcctaccagcagggacagaaccaactgtacaacgagctgaacctgggcagacgggaagagtacgacgtgctggacaagcggagaggcagggaccctgagatgggcggaaagccccagcggagaaagaacccccaggaaggactgtataacgaactccagaaagacaagatggccgaagcctacagcgagatcggcatgaagggcgagcggagaagaggcaagggccacgatggcctgtaccagggcctgagcaccgccaccaaggacacctatgacgccctgcacatgcaggccctgcctccaaga

SEQ ID NO: 27788 - DNA, 1032 bp, synthetic construct
  source 1..1032: mol_type = other DNA
gaggtggccgtgttcgagcctagcgaggccgagatcagccacacccagaaagccaccctcgtgtgcctggctaccggcttctaccccgaccatgtggaactgtcttggtgggtcaacggcaaagaggtgcacagcggcgtgtctaccgacccccagccactgaaagaacagcccgccctgaacgacagccggtactgcctgagcagcagactgagagtgtccgccaccttctggcagaacccccggaaccacttcagatgccaggtgcagttctacggcctgagcgagaacgacgagtggacccaggacagagccaagcccgtgacccagatcgtgtctgccgaagcctggggcagagccgattgccccatcaagaccgatgtgattacaatggaccccaaggacaactgctccaaggacgccaacgataccctgctgctccagctgaccaacaccagcgcctactacatgtacttgttgctgctgctgaagtccgtggtgtacttcgccatcatcacatgctgcctgctgcggagaaccgccttctgctgcaacggcgagaagtctaaacggggcagaaagaaactcctgtatatattcaaacaaccatttatgagaccagtacaaactactcaagaggaagatggctgtagctgccgatttccagaagaagaagaaggaggatgtgaactgagagtgaagttcagcagaagcgccgacgcccctgcctaccagcagggacagaaccaactgtacaacgagctgaacctgggcagacgggaagagtacgacgtgctggacaagcggagaggcagggaccctgagatgggcggaaagccccagcggagaaagaacccccaggaaggactgtataacgaactccagaaagacaagatggccgaagcctacagcgagatcggcatgaagggcgagcggagaagaggcaagggccacgatggcctgtaccagggcctgagcaccgccaccaaggacacctatgacgccctgcacatgcaggccctgcctccaaga

SEQ ID NO: 27789 - DNA, 1008 bp, synthetic construct
  source 1..1008: mol_type = other DNA
gaggtggccgtgttcgagcctagcgaggccgagatcagccacacccagaaagccaccctcgtgtgcctggctaccggcttctaccccgaccatgtggaactgtcttggtgggtcaacggcaaagaggtgcacagcggcgtgtctaccgacccccagccactgaaagaacagcccgccctgaacgacagccggtactgcctgagcagcagactgagagtgtccgccaccttctggcagaacccccggaaccacttcagatgccaggtgcagttctacggcctgagcgagaacgacgagtggacccaggacagagccaagcccgtgacccagatcgtgtctgccgaagcctggggcagagccgattgcatggaccccaaggacaactgctccaaggacgccaacgataccctgctgctccagctgaccaacaccagcgcctactacatgtacttgttgctgctgctgaagtccgtggtgtacttcgccatcatcacatgctgcctgctgcggagaaccgccttctgctgcaacggcgagaagtctaaacggggcagaaagaaactcctgtatatattcaaacaaccatttatgagaccagtacaaactactcaagaggaagatggctgtagctgccgatttccagaagaagaagaaggaggatgtgaactgagagtgaagttcagcagaagcgccgacgcccctgcctaccagcagggacagaaccaactgtacaacgagctgaacctgggcagacgggaagagtacgacgtgctggacaagcggagaggcagggaccctgagatgggcggaaagccccagcggagaaagaacccccaggaaggactgtataacgaactccagaaagacaagatggccgaagcctacagcgagatcggcatgaagggcgagcggagaagaggcaagggccacgatggcctgtaccagggcctgagcaccgccaccaaggacacctatgacgccctgcacatgcaggccctgcctccaaga

SEQ ID NO: 27790 - DNA, 1032 bp, synthetic construct; identical to SEQ ID NO: 27788
  source 1..1032: mol_type = other DNA

SEQ ID NO: 27791 - DNA, 990 bp, synthetic construct
  source 1..990: mol_type = other DNA
gaggtggccgtgttcgagcctagcgaggccgagatcagccacacccagaaagccaccctcgtgtgcctggctaccggcttctaccccgaccatgtggaactgtcttggtgggtcaacggcaaagaggtgcacagcggcgtgtctaccgacccccagccactgaaagaacagcccgccctgaacgacagccggtactgcctgagcagcagactgagagtgtccgccaccttctggcagaacccccggaaccacttcagatgccaggtgcagttctacggcctgagcgagaacgacgagtggacccaggacagagccaagcccgtgacccagatcgtgtctgccgaagcctggggcagagccgattgctgctccaaggacgccaacgataccctgctgctccagctgaccaacaccagcgcctactacatgtacttgttgctgctgctgaagtccgtggtgtacttcgccatcatcacatgctgcctgctgcggagaaccgccttctgctgcaacggcgagaagtctaaacggggcagaaagaaactcctgtatatattcaaacaaccatttatgagaccagtacaaactactcaagaggaagatggctgtagctgccgatttccagaagaagaagaaggaggatgtgaactgagagtgaagttcagcagaagcgccgacgcccctgcctaccagcagggacagaaccaactgtacaacgagctgaacctgggcagacgggaagagtacgacgtgctggacaagcggagaggcagggaccctgagatgggcggaaagccccagcggagaaagaacccccaggaaggactgtataacgaactccagaaagacaagatggccgaagcctacagcgagatcggcatgaagggcgagcggagaagaggcaagggccacgatggcctgtaccagggcctgagcaccgccaccaaggacacctatgacgccctgcacatgcaggccctgcctccaaga

SEQ ID NO: 27792 - DNA, 1035 bp, synthetic construct
  source 1..1035: mol_type = other DNA
gaggtggccgtgttcgagcctagcgaggccgagatcagccacacccagaaagccaccctcgtgtgcctggctaccggcttctaccccgaccatgtggaactgtcttggtgggtcaacggcaaagaggtgcacagcggcgtgtctaccgacccccagccactgaaagaacagcccgccctgaacgacagccggtactgcctgagcagcagactgagagtgtccgccaccttctggcagaacccccggaaccacttcagatgccaggtgcagttctacggcctgagcgagaacgacgagtggacccaggacagagccaagcccgtgacccagatcgtgtctgccgaagcctggggcagagccgattgcgaagtgaaaaccgactccaccgaccacgtgaagcccaaagagacagagaacaccaagcagcccagcaagagctgccacaagcccaaggccatcgtgcacaccgagaaagtgaacatgatgagcctgaccgtgctgggcctgcggatgctgttcgccaaaaccgtggccgtgaacttcctgctgaccgccaagctgttcttcctcaaacggggcagaaagaaactcctgtatatattcaaacaaccatttatgagaccagtacaaactactcaagaggaagatggctgtagctgccgatttccagaagaagaagaaggaggatgtgaactgagagtgaagttcagcagaagcgccgacgcccctgcctaccagcagggacagaaccaactgtacaacgagctgaacctgggcagacgggaagagtacgacgtgctggacaagcggagaggcagggaccctgagatgggcggaaagccccagcggagaaagaacccccaggaaggactgtataacgaactccagaaagacaagatggccgaagcctacagcgagatcggcatgaagggcgagcggagaagaggcaagggccacgatggcctgtaccagggcctgagcaccgccaccaaggacacctatgacgccctgcacatgcaggccctgcctccaaga

SEQ ID NO: 27793 - DNA, 1014 bp, synthetic construct
  source 1..1014: mol_type = other DNA
gaggtggccgtgttcgagcctagcgaggccgagatcagccacacccagaaagccaccctcgtgtgcctggctaccggcttctaccccgaccatgtggaactgtcttggtgggtcaacggcaaagaggtgcacagcggcgtgtctaccgacccccagccactgaaagaacagcccgccctgaacgacagccggtactgcctgagcagcagactgagagtgtccgccaccttctggcagaacccccggaaccacttcagatgccaggtgcagttctacggcctgagcgagaacgacgagtggacccaggacagagccaagcccgtgacccagatcgtgtctgccgaagcctggggcagagccgattgcgaccacgtgaagcccaaagagacagagaacaccaagcagcccagcaagagctgccacaagcccaaggccatcgtgcacaccgagaaagtgaacatgatgagcctgaccgtgctgggcctgcggatgctgttcgccaaaaccgtggccgtgaacttcctgctgaccgccaagctgttcttcctcaaacggggcagaaagaaactcctgtatatattcaaacaaccatttatgagaccagtacaaactactcaagaggaagatggctgtagctgccgatttccagaagaagaagaaggaggatgtgaactgagagtgaagttcagcagaagcgccgacgcccctgcctaccagcagggacagaaccaactgtacaacgagctgaacctgggcagacgggaagagtacgacgtgctggacaagcggagaggcagggaccctgagatgggcggaaagccccagcggagaaagaacccccaggaaggactgtataacgaactccagaaagacaagatggccgaagcctacagcgagatcggcatgaagggcgagcggagaagaggcaagggccacgatggcctgtaccagggcctgagcaccgccaccaaggacacctatgacgccctgcacatgcaggccctgcctccaaga

SEQ ID NO: 27794 - DNA, 972 bp, synthetic construct
  source 1..972: mol_type = other DNA
gaggtggccgtgttcgagcctagcgaggccgagatcagccacacccagaaagccaccctcgtgtgcctggctaccggcttctaccccgaccatgtggaactgtcttggtgggtcaacggcaaagaggtgcacagcggcgtgtctaccgacccccagccactgaaagaacagcccgccctgaacgacagccggtactgcctgagcagcagactgagagtgtccgccaccttctggcagaacccccggaaccacttcagatgccaggtgcagttctacggcctgagcgagaacgacgagtggacccaggacagagccaagcccgtgaccatccccgaggacacattcttcccaagccccgagagcagctgcgacgtgaagctggtggaaaagagcttcgagacagacaccaacctgaacttccagaacctgagcgtgatcggcttcagaatcctgctgctgaaagtggccggctttaacctgctgatgaccctgcggctgtggtccagcaaacggggcagaaagaaactcctgtatatattcaaacaaccatttatgagaccagtacaaactactcaagaggaagatggctgtagctgccgatttccagaagaagaagaaggaggatgtgaactgagagtgaagttcagcagaagcgccgacgcccctgcctaccagcagggacagaaccaactgtacaacgagctgaacctgggcagacgggaagagtacgacgtgctggacaagcggagaggcagggaccctgagatgggcggaaagccccagcggagaaagaacccccaggaaggactgtataacgaactccagaaagacaagatggccgaagcctacagcgagatcggcatgaagggcgagcggagaagaggcaagggccacgatggcctgtaccagggcctgagcaccgccaccaaggacacctatgacgccctgcacatgcaggccctgcctccaaga

SEQ ID NO: 27795 - DNA, 942 bp, synthetic construct
  source 1..942: mol_type = other DNA
gaggtggccgtgttcgagcctagcgaggccgagatcagccacacccagaaagccaccctcgtgtgcctggctaccggcttctaccccgaccatgtggaactgtcttggtgggtcaacggcaaagaggtgcacagcggcgtgtctaccgacccccagccactgaaagaacagcccgccctgaacgacagccggtactgcctgagcagcagactgagagtgtccgccaccttctggcagaacccccggaaccacttcagatgccaggtgcagttctacggcctgagcgagaacgacgagtggacccaggacagagccaagcccgtgaccgagagcagctgcgacgtgaagctggtggaaaagagcttcgagacagacaccaacctgaacttccagaacctgagcgtgatcggcttcagaatcctgctgctgaaagtggccggctttaacctgctgatgaccctgcggctgtggtccagcaaacggggcagaaagaaactcctgtatatattcaaacaaccatttatgagaccagtacaaactactcaagaggaagatggctgtagctgccgatttccagaagaagaagaaggaggatgtgaactgagagtgaagttcagcagaagcgccgacgcccctgcctaccagcagggacagaaccaactgtacaacgagctgaacctgggcagacgggaagagtacgacgtgctggacaagcggagaggcagggaccctgagatgggcggaaagccccagcggagaaagaacccccaggaaggactgtataacgaactccagaaagacaagatggccgaagcctacagcgagatcggcatgaagggcgagcggagaagaggcaagggccacgatggcctgtaccagggcctgagcaccgccaccaaggacacctatgacgccctgcacatgcaggccctgcctccaaga

SEQ ID NO: 27796 - DNA, 969 bp, synthetic construct
  source 1..969: mol_type = other DNA
gaggtggccgtgttcgagcctagcgaggccgagatcagccacacccagaaagccaccctcgtgtgcctggctaccggcttctaccccgaccatgtggaactgtcttggtgggtcaacggcaaagaggtgcacagcggcgtgtctaccgacccccagccactgaaagaacagcccgccctgaacgacagccggtactgcctgagcagcagactgagagtgtccgccaccttctggcagaacccccggaaccacttcagatgccaggtgcagttctacggcctgagcgagaacgacgagtggacccaggacagagccaagcccgtgacccccgaggacacattcttcccaagccccgagagcagctgcgacgtgaagctggtggaaaagagcttcgagacagacaccaacctgaacttccagaacctgagcgtgatcggcttcagaatcctgctgctgaaagtggccggctttaacctgctgatgaccctgcggctgtggtccagcaaacggggcagaaagaaactcctgtatatattcaaacaaccatttatgagaccagtacaaactactcaagaggaagatggctgtagctgccgatttccagaagaagaagaaggaggatgtgaactgagagtgaagttcagcagaagcgccgacgcccctgcctaccagcagggacagaaccaactgtacaacgagctgaacctgggcagacgggaagagtacgacgtgctggacaagcggagaggcagggaccctgagatgggcggaaagccccagcggagaaagaacccccaggaaggactgtataacgaactccagaaagacaagatggccgaagcctacagcgagatcggcatgaagggcgagcggagaagaggcaagggccacgatggcctgtaccagggcctgagcaccgccaccaaggacacctatgacgccctgcacatgcaggccctgcctccaaga

SEQ ID NO: 27797 - DNA, 999 bp, synthetic construct
  source 1..999: mol_type = other DNA
gaggtggccgtgttcgagcctagcgaggccgagatcagccacacccagaaagccaccctcgtgtgcctggctaccggcttctaccccgaccatgtggaactgtcttggtgggtcaacggcaaagaggtgcacagcggcgtgtctaccgacccccagccactgaaagaacagcccgccctgaacgacagccggtactgcctgagcagcagactgagagtgtccgccaccttctggcagaacccccggaaccacttcagatgccaggtgcagttctacggcctgagcgagaacgacgagtggacccaggacagagccaagcccgtgaccttcccacccatcaagaccgatgtgattacaatggaccccaaggacaactgctccaaggacgccaacgataccctgctgctccagctgaccaacaccagcgcctactacatgtacttgttgctgctgctgaagtccgtggtgtacttcgccatcatcacatgctgcctgctgcggagaaccgccttctgctgcaacggcgagaagtctaaacggggcagaaagaaactcctgtatatattcaaacaaccatttatgagaccagtacaaactactcaagaggaagatggctgtagctgccgatttccagaagaagaagaaggaggatgtgaactgagagtgaagttcagcagaagcgccgacgcccctgcctaccagcagggacagaaccaactgtacaacgagctgaacctgggcagacgggaagagtacgacgtgctggacaagcggagaggcagggaccctgagatgggcggaaagccccagcggagaaagaacccccaggaaggactgtataacgaactccagaaagacaagatggccgaagcctacagcgagatcggcatgaagggcgagcggagaagaggcaagggccacgatggcctgtaccagggcctgagcaccgccaccaaggacacctatgacgccctgcacatgcaggccctgcctccaaga

SEQ ID NO: 27798 - DNA, 993 bp, synthetic construct
  source 1..993: mol_type = other DNA
gaggtggccgtgttcgagcctagcgaggccgagatcagccacacccagaaagccaccctcgtgtgcctggctaccggcttctaccccgaccatgtggaactgtcttggtgggtcaacggcaaagaggtgcacagcggcgtgtctaccgacccccagccactgaaagaacagcccgccctgaacgacagccggtactgcctgagcagcagactgagagtgtccgccaccttctggcagaacccccggaaccacttcagatgccaggtgcagttctacggcctgagcgagaacgacgagtggacccaggacagagccaagcccgtgacccccatcaagaccgatgtgattacaatggaccccaaggacaactgctccaaggacgccaacgataccctgctgctccagctgaccaacaccagcgcctactacatgtacttgttgctgctgctgaagtccgtggtgtacttcgccatcatcacatgctgcctgctgcggagaaccgccttctgctgcaacggcgagaagtctaaacggggcagaaagaaactcctgtatatattcaaacaaccatttatgagaccagtacaaactactcaagaggaagatggctgtagctgccgatttccagaagaagaagaaggaggatgtgaactgagagtgaagttcagcagaagcgccgacgcccctgcctaccagcagggacagaaccaactgtacaacgagctgaacctgggcagacgggaagagtacgacgtgctggacaagcggagaggcagggaccctgagatgggcggaaagccccagcggagaaagaacccccaggaaggactgtataacgaactccagaaagacaagatggccgaagcctacagcgagatcggcatgaagggcgagcggagaagaggcaagggccacgatggcctgtaccagggcctgagcaccgccaccaaggacacctatgacgccctgcacatgcaggccctgcctccaaga

SEQ ID NO: 27799 - DNA, 969 bp, synthetic construct
  source 1..969: mol_type = other DNA
gaggtggccgtgttcgagcctagcgaggccgagatcagccacacccagaaagccaccctcgtgtgcctggctaccggcttctaccccgaccatgtggaactgtcttggtgggtcaacggcaaagaggtgcacagcggcgtgtctaccgacccccagccactgaaagaacagcccgccctgaacgacagccggtactgcctgagcagcagactgagagtgtccgccaccttctggcagaacccccggaaccacttcagatgccaggtgcagttctacggcctgagcgagaacgacgagtggacccaggacagagccaagcccgtgaccatggaccccaaggacaactgctccaaggacgccaacgataccctgctgctccagctgaccaacaccagcgcctactacatgtacttgttgctgctgctgaagtccgtggtgtacttcgccatcatcacatgctgcctgctgcggagaaccgccttctgctgcaacggcgagaagtctaaacggggcagaaagaaactcctgtatatattcaaacaaccatttatgagaccagtacaaactactcaagaggaagatggctgtagctgccgatttccagaagaagaagaaggaggatgtgaactgagagtgaagttcagcagaagcgccgacgcccctgcctaccagcagggacagaaccaactgtacaacgagctgaacctgggcagacgggaagagtacgacgtgctggacaagcggagaggcagggaccctgagatgggcggaaagccccagcggagaaagaacccccaggaaggactgtataacgaactccagaaagacaagatggccgaagcctacagcgagatcggcatgaagggcgagcggagaagaggcaagggccacgatggcctgtaccagggcctgagcaccgccaccaaggacacctatgacgccctgcacatgcaggccctgcctccaaga

SEQ ID NO: 27800 - DNA, 993 bp, synthetic construct; identical to SEQ ID NO: 27798
  source 1..993: mol_type = other DNA

SEQ ID NO: 27801 - DNA, 951 bp, synthetic construct
  source 1..951: mol_type = other DNA
gaggtggccgtgttcgagcctagcgaggccgagatcagccacacccagaaagccaccctcgtgtgcctggctaccggcttctaccccgaccatgtggaactgtcttggtgggtcaacggcaaagaggtgcacagcggcgtgtctaccgacccccagccactgaaagaacagcccgccctgaacgacagccggtactgcctgagcagcagactgagagtgtccgccaccttctggcagaacccccggaaccacttcagatgccaggtgcagttctacggcctgagcgagaacgacgagtggacccaggacagagccaagcccgtgacctgctccaaggacgccaacgataccctgctgctccagctgaccaacaccagcgcctactacatgtacttgttgctgctgctgaagtccgtggtgtacttcgccatcatcacatgctgcctgctgcggagaaccgccttctgctgcaacggcgagaagtctaaacggggcagaaagaaactcctgtatatattcaaacaaccatttatgagaccagtacaaactactcaagaggaagatggctgtagctgccgatttccagaagaagaagaaggaggatgtgaactgagagtgaagttcagcagaagcgccgacgcccctgcctaccagcagggacagaaccaactgtacaacgagctgaacctgggcagacgggaagagtacgacgtgctggacaagcggagaggcagggaccctgagatgggcggaaagccccagcggagaaagaacccccaggaaggactgtataacgaactccagaaagacaagatggccgaagcctacagcgagatcggcatgaagggcgagcggagaagaggcaagggccacgatggcctgtaccagggcctgagcaccgccaccaaggacacctatgacgccctgcacatgcaggccctgcctccaaga

SEQ ID NO: 27802 - DNA, 996 bp, synthetic construct
  source 1..996: mol_type = other DNA
gaggtggccgtgttcgagcctagcgaggccgagatcagccacacccagaaagccaccctcgtgtgcctggctaccggcttctaccccgaccatgtggaactgtcttggtgggtcaacggcaaagaggtgcacagcggcgtgtctaccgacccccagccactgaaagaacagcccgccctgaacgacagccggtactgcctgagcagcagactgagagtgtccgccaccttctggcagaacccccggaaccacttcagatgccaggtgcagttctacggcctgagcgagaacgacgagtggacccaggacagagccaagcccgtgaccgaagtgaaaaccgactccaccgaccacgtgaagcccaaagagacagagaacaccaagcagcccagcaagagctgccacaagcccaaggccatcgtgcacaccgagaaagtgaacatgatgagcctgaccgtgctgggcctgcggatgctgttcgccaaaaccgtggccgtgaacttcctgctgaccgccaagctgttcttcctcaaacggggcagaaagaaactcctgtatatattcaaacaaccatttatgagaccagtacaaactactcaagaggaagatggctgtagctgccgatttccagaagaagaagaaggaggatgtgaactgagagtgaagttcagcagaagcgccgacgcccctgcctaccagcagggacagaaccaactgtacaacgagctgaacctgggcagacgggaagagtacgacgtgctggacaagcggagaggcagggaccctgagatgggcggaaagccccagcggagaaagaacccccaggaaggactgtataacgaactccagaaagacaagatggccgaagcctacagcgagatcggcatgaagggcgagcggagaagaggcaagggccacgatggcctgtaccagggcctgagcaccgccaccaaggacacctatgacgccctgcacatgcaggccctgcctccaaga

SEQ ID NO: 27803 - DNA, 975 bp, synthetic construct
  source 1..975: mol_type = other DNA
gaggtggccgtgttcgagcctagcgaggccgagatcagccacacccagaaagccaccctcgtgtgcctggctaccggcttctaccccgaccatgtggaactgtcttggtgggtcaacggcaaagaggtgcacagcggcgtgtctaccgacccccagccactgaaagaacagcccgccctgaacgacagccggtactgcctgagcagcagactgagagtgtccgccaccttctggcagaacccccggaaccacttcagatgccaggtgcagttctacggcctgagcgagaacgacgagtggacccaggacagagccaagcccgtgaccgaccacgtgaagcccaaagagacagagaacaccaagcagcccagcaagagctgccacaagcccaaggccatcgtgcacaccgagaaagtgaacatgatgagcctgaccgtgctgggcctgcggatgctgttcgccaaaaccgtggccgtgaacttcctgctgaccgccaagctgttcttcctcaaacggggcagaaagaaactcctgtatatattcaaacaaccatttatgagaccagtacaaactactcaagaggaagatggctgtagctgccgatttccagaagaagaagaaggaggatgtgaactgagagtgaagttcagcagaagcgccgacgcccctgcctaccagcagggacagaaccaactgtacaacgagctgaacctgggcagacgggaagagtacgacgtgctggacaagcggagaggcagggaccctgagatgggcggaaagccccagcggagaaagaacccccaggaaggactgtataacgaactccagaaagacaagatggccgaagcctacagcgagatcggcatgaagggcgagcggagaagaggcaagggccacgatggcctgtaccagggcctgagcaccgccaccaaggacacctatgacgccctgcacatgcaggccctgcctccaaga

SEQ ID NO: 27804 - DNA, 996 bp, synthetic construct; identical to SEQ ID NO: 27764
  source 1..996: mol_type = other DNA

SEQ ID NO: 27805 - DNA, 966 bp, synthetic construct; identical to SEQ ID NO: 27765
  source 1..966: mol_type = other DNA

SEQ ID NO: 27806 - DNA, 993 bp, synthetic construct; identical to SEQ ID NO: 27766
  source 1..993: mol_type = other DNA

SEQ ID NO: 27807 - DNA, 1023 bp, synthetic construct; identical to SEQ ID NO: 27767
  source 1..1023: mol_type = other DNA

SEQ ID NO: 27808 - DNA, 1017 bp, synthetic construct; identical to SEQ ID NO: 27768
  source 1..1017: mol_type = other DNA

SEQ ID NO: 27809 - DNA, 993 bp, synthetic construct; identical to SEQ ID NO: 27769
  source 1..993: mol_type = other DNA

SEQ ID NO: 27810 - DNA, 1017 bp, synthetic construct; identical to SEQ ID NO: 27768
  source 1..1017: mol_type = other DNA

SEQ ID NO: 27811 - DNA, 975 bp, synthetic construct; identical to SEQ ID NO: 27771
  source 1..975: mol_type = other DNA

SEQ ID NO: 27812 - DNA, 1020 bp, synthetic construct; identical to SEQ ID NO: 27772
  source 1..1020: mol_type = other DNA

SEQ ID NO: 27813 - DNA, 999 bp, synthetic construct; identical to SEQ ID NO: 27773
  source 1..999: mol_type = other DNA

SEQ ID NO: 27814 - DNA, 975 bp, synthetic construct; identical to SEQ ID NO: 27599
  source 1..975: mol_type = other DNA

SEQ ID NO: 27815 - DNA, 945 bp, synthetic construct; identical to SEQ ID NO: 27600
  source 1..945: mol_type = other DNA

SEQ ID NO: 27816 - DNA, 972 bp, synthetic construct; identical to SEQ ID NO: 27601
  source 1..972: mol_type = other DNA

SEQ ID NO: 27817 - DNA, 1002 bp, synthetic construct; identical to SEQ ID NO: 27602
  source 1..1002: mol_type = other DNA

SEQ ID NO: 27818 - DNA, 996 bp, synthetic construct; identical to SEQ ID NO: 27603
  source 1..996: mol_type = other DNA

SEQ ID NO: 27819 - DNA, 972 bp, synthetic construct; identical to SEQ ID NO: 27604
  source 1..972: mol_type = other DNA

SEQ ID NO: 27820 - DNA, 996 bp, synthetic construct; identical to SEQ ID NO: 27603
  source 1..996: mol_type = other DNA

SEQ ID NO: 27821 - DNA, 954 bp, synthetic construct; identical to SEQ ID NO: 27606
  source 1..954: mol_type = other DNA

SEQ ID NO: 27822 - DNA, 999 bp, synthetic construct; identical to SEQ ID NO: 27607
  source 1..999: mol_type = other DNA

SEQ ID NO: 27823 - DNA, 978 bp, synthetic construct; identical to SEQ ID NO: 27608
  source 1..978: mol_type = other DNA

SEQ ID NO: 27824 - DNA, 942 bp, synthetic construct
  source 1..942: mol_type = other DNA
gccgacgtgtcccccaagcctaccatcttcctgccctctatcgccgagacaaagctccagaaggccggcacctacctgtgcctgctggaaaagttcttcccagatgtgattaagatccactggcaggaaaagaagtccaacaccatcctgggcagccaggaaggcaacaccatgaagaccaacgacacctacatgaagttcagctggctgaccgtgcccgagaagtccctggacaaagaacacagatgcatcgtgcggcacgaaaacaacaagaacggcgtggaccaggaaatcatcatccccgaggacacattcttcccaagccccgagagcagctgcgacgtgaagctggtggaaaagagcttcgagacagacaccaacctgaacttccagaacctgagcgtgatcggcttcagaatcctgctgctgaaagtggccggctttaacctgctgatgaccctgcggctgtggtccagcaaacggggcagaaagaaactcctgtatatattcaaacaaccatttatgagaccagtacaaactactcaagaggaagatggctgtagctgccgatttccagaagaagaagaaggaggatgtgaactgagagtgaagttcagcagaagcgccgacgcccctgcctaccagcagggacagaaccaactgtacaacgagctgaacctgggcagacgggaagagtacgacgtgctggacaagcggagaggcagggaccctgagatgggcggaaagccccagcggagaaagaacccccaggaaggactgtataacgaactccagaaagacaagatggccgaagcctacagcgagatcggcatgaagggcgagcggagaagaggcaagggccacgatggcctgtaccagggcctgagcaccgccaccaaggacacctatgacgccctgcacatgcaggccctgcctccaaga

SEQ ID NO: 27825 - DNA, 912 bp, synthetic construct
  source 1..912: mol_type = other DNA
gccgacgtgtcccccaagcctaccatcttcctgccctctatcgccgagacaaagctccagaaggccggcacctacctgtgcctgctggaaaagttcttcccagatgtgattaagatccactggcaggaaaagaagtccaacaccatcctgggcagccaggaaggcaacaccatgaagaccaacgacacctacatgaagttcagctggctgaccgtgcccgagaagtccctggacaaagaacacagatgcatcgtgcggcacgaaaacaacaagaacggcgtggaccaggaaatcatcgagagcagctgcgacgtgaagctggtggaaaagagcttcgagacagacaccaacctgaacttccagaacctgagcgtgatcggcttcagaatcctgctgctgaaagtggccggctttaacctgctgatgaccctgcggctgtggtccagcaaacggggcagaaagaaactcctgtatatattcaaacaaccatttatgagaccagtacaaactactcaagaggaagatggctgtagctgccgatttccagaagaagaagaaggaggatgtgaactgagagtgaagttcagcagaagcgccgacgcccctgcctaccagcagggacagaaccaactgtacaacgagctgaacctgggcagacgggaagagtacgacgtgctggacaagcggagaggcagggaccctgagatgggcggaaagccccagcggagaaagaacccccaggaaggactgtataacgaactccagaaagacaagatggccgaagcctacagcgagatcggcatgaagggcgagcggagaagaggcaagggccacgatggcctgtaccagggcctgagcaccgccaccaaggacacctatgacgccctgcacatgcaggccctgcctccaaga

SEQ ID NO: 27826 - DNA, 939 bp, synthetic construct
  source 1..939: mol_type = other DNA
gccgacgtgtcccccaagcctaccatcttcctgccctctatcgccgagacaaagctccagaaggccggcacctacctgtgcctgctggaaaagttcttcccagatgtgattaagatccactggcaggaaaagaagtccaacaccatcctgggcagccaggaaggcaacaccatgaagaccaacgacacctacatgaagttcagctggctgaccgtgcccgagaagtccctggacaaagaacacagatgcatcgtgcggcacgaaaacaacaagaacggcgtggaccaggaaatcatccccgaggacacattcttcccaagccccgagagcagctgcgacgtgaagctggtggaaaagagcttcgagacagacaccaacctgaacttccagaacctgagcgtgatcggcttcagaatcctgctgctgaaagtggccggctttaacctgctgatgaccctgcggctgtggtccagcaaacggggcagaaagaaactcctgtatatattcaaacaaccatttatgagaccagtacaaactactcaagaggaagatggctgtagctgccgatttccagaagaagaagaaggaggatgtgaactgagagtgaagttcagcagaagcgccgacgcccctgcctaccagcagggacagaaccaactgtacaacgagctgaacctgggcagacgggaagagtacgacgtgctggacaagcggagaggcagggaccctgagatgggcggaaagccccagcggagaaagaacccccaggaaggactgtataacgaactccagaaagacaagatggccgaagcctacagcgagatcggcatgaagggcgagcggagaagaggcaagggccacgatggcctgtaccagggcctgagcaccgccaccaaggacacctatgacgccctgcacatgcaggccctgcctccaaga

SEQ ID NO: 27827 - DNA, 921 bp, synthetic construct
  source 1..921: mol_type = other DNA
gccgacgtgtcccccaagcctaccatcttcctgccctctatcgccgagacaaagctccagaaggccggcacctacctgtgcctgctggaaaagttcttcccagatgtgattaagatccactggcaggaaaagaagtccaacaccatcctgggcagccaggaaggcaacaccatgaagaccaacgacacctacatgaagttcagctggctgaccgtgcccgagaagtccctggacaaagaacacagatgcatcgtgcggcacgaaaacaacaagaacggcgtggaccaggaaatcatcggcagagccgattgcggctttaccagcgagagctaccagcagggcgtgctgagcgccaccatcctgtacgagatcctgctgggcaaggccaccctgtacgccgtgctggtgtctgccctggtgctgatggctatggtcaagcggaaggacagccggggaaaacggggcagaaagaaactcctgtatatattcaaacaaccatttatgagaccagtacaaactactcaagaggaagatggctgtagctgccgatttccagaagaagaagaaggaggatgtgaactgagagtgaagttcagcagaagcgccgacgcccctgcctaccagcagggacagaaccaactgtacaacgagctgaacctgggcagacgggaagagtacgacgtgctggacaagcggagaggcagggaccctgagatgggcggaaagccccagcggagaaagaacccccaggaaggactgtataacgaactccagaaagacaagatggccgaagcctacagcgagatcggcatgaagggcgagcggagaagaggcaagggccacgatggcctgtaccagggcctgagcaccgccaccaaggacacctatgacgccctgcacatgcaggccctgcctccaaga

SEQ ID NO: 27828 - DNA, 915 bp, synthetic construct
  source 1..915: mol_type = other DNA
gccgacgtgtcccccaagcctaccatcttcctgccctctatcgccgagacaaagctccagaaggccggcacctacctgtgcctgctggaaaagttcttcccagatgtgattaagatccactggcaggaaaagaagtccaacaccatcctgggcagccaggaaggcaacaccatgaagaccaacgacacctacatgaagttcagctggctgaccgtgcccgagaagtccctggacaaagaacacagatgcatcgtgcggcacgaaaacaacaagaacggcgtggaccaggaaatcatcgccgattgcggctttaccagcgagagctaccagcagggcgtgctgagcgccaccatcctgtacgagatcctgctgggcaaggccaccctgtacgccgtgctggtgtctgccctggtgctgatggctatggtcaagcggaaggacagccggggaaaacggggcagaaagaaactcctgtatatattcaaacaaccatttatgagaccagtacaaactactcaagaggaagatggctgtagctgccgatttccagaagaagaagaaggaggatgtgaactgagagtgaagttcagcagaagcgccgacgcccctgcctaccagcagggacagaaccaactgtacaacgagctgaacctgggcagacgggaagagtacgacgtgctggacaagcggagaggcagggaccctgagatgggcggaaagccccagcggagaaagaacccccaggaaggactgtataacgaactccagaaagacaagatggccgaagcctacagcgagatcggcatgaagggcgagcggagaagaggcaagggccacgatggcctgtaccagggcctgagcaccgccaccaaggacacctatgacgccctgcacatgcaggccctgcctccaaga

SEQ ID NO: 27829 - DNA, 945 bp, synthetic construct
  source 1..945: mol_type = other DNA
gccgacgtgtcccccaagcctaccatcttcctgccctctatcgccgagacaaagctccagaaggccggcacctacctgtgcctgctggaaaagttcttcccagatgtgattaagatccactggcaggaaaagaagtccaacaccatcctgggcagccaggaaggcaacaccatgaagaccaacgacacctacatgaagttcagctggctgaccgtgcccgagaagtccctggacaaagaacacagatgcatcgtgcggcacgaaaacaacaagaacggcgtggaccaggaaatcatccagatcgtgtctgccgaagcctggggcagagccgattgcggctttaccagcgagagctaccagcagggcgtgctgagcgccaccatcctgtacgagatcctgctgggcaaggccaccctgtacgccgtgctggtgtctgccctggtgctgatggctatggtcaagcggaaggacagccggggaaaacggggcagaaagaaactcctgtatatattcaaacaaccatttatgagaccagtacaaactactcaagaggaagatggctgtagctgccgatttccagaagaagaagaaggaggatgtgaactgagagtgaagttcagcagaagcgccgacgcccctgcctaccagcagggacagaaccaactgtacaacgagctgaacctgggcagacgggaagagtacgacgtgctggacaagcggagaggcagggaccctgagatgggcggaaagccccagcggagaaagaacccccaggaaggactgtataacgaactccagaaagacaagatggccgaagcctacagcgagatcggcatgaagggcgagcggagaagaggcaagggccacgatggcctgtaccagggcctgagcaccgccaccaaggacacctatgacgccctgcacatgcaggccctgcctccaaga

SEQ ID NO: 27830 - DNA, 966 bp, synthetic construct
  source 1..966: mol_type = other DNA
gccgacgtgtcccccaagcctaccatcttcctgccctctatcgccgagacaaagctccagaaggccggcacctacctgtgcctgctggaaaagttcttcccagatgtgattaagatccactggcaggaaaagaagtccaacaccatcctgggcagccaggaaggcaacaccatgaagaccaacgacacctacatgaagttcagctggctgaccgtgcccgagaagtccctggacaaagaacacagatgcatcgtgcggcacgaaaacaacaagaacggcgtggaccaggaaatcatcgaagtgaaaaccgactccaccgaccacgtgaagcccaaagagacagagaacaccaagcagcccagcaagagctgccacaagcccaaggccatcgtgcacaccgagaaagtgaacatgatgagcctgaccgtgctgggcctgcggatgctgttcgccaaaaccgtggccgtgaacttcctgctgaccgccaagctgttcttcctcaaacggggcagaaagaaactcctgtatatattcaaacaaccatttatgagaccagtacaaactactcaagaggaagatggctgtagctgccgatttccagaagaagaagaaggaggatgtgaactgagagtgaagttcagcagaagcgccgacgcccctgcctaccagcagggacagaaccaactgtacaacgagctgaacctgggcagacgggaagagtacgacgtgctggacaagcggagaggcagggaccctgagatgggcggaaagccccagcggagaaagaacccccaggaaggactgtataacgaactccagaaagacaagatggccgaagcctacagcgagatcggcatgaagggcgagcggagaagaggcaagggccacgatggcctgtaccagggcctgagcaccgccaccaaggacacctatgacgccctgcacatgcaggccctgcctccaaga

SEQ ID NO: 27831 - DNA, 945 bp, synthetic construct
  source 1..945: mol_type = other DNA
gccgacgtgtcccccaagcctaccatcttcctgccctctatcgccgagacaaagctccagaaggccggcacctacctgtgcctgctggaaaagttcttcccagatgtgattaagatccactggcaggaaaagaagtccaacaccatcctgggcagccaggaaggcaacaccatgaagaccaacgacacctacatgaagttcagctggctgaccgtgcccgagaagtccctggacaaagaacacagatgcatcgtgcggcacgaaaacaacaagaacggcgtggaccaggaaatcatcgaccacgtgaagcccaaagagacagagaacaccaagcagcccagcaagagctgccacaagcccaaggccatcgtgcacaccgagaaagtgaacatgatgagcctgaccgtgctgggcctgcggatgctgttcgccaaaaccgtggccgtgaacttcctgctgaccgccaagctgttcttcctcaaacggggcagaaagaaactcctgtatatattcaaacaaccatttatgagaccagtacaaactactcaagaggaagatggctgtagctgccgatttccagaagaagaagaaggaggatgtgaactgagagtgaagttcagcagaagcgccgacgcccctgcctaccagcagggacagaaccaactgtacaacgagctgaacctgggcagacgggaagagtacgacgtgctggacaagcggagaggcagggaccctgagatgggcggaaagccccagcggagaaagaacccccaggaaggactgtataacgaactccagaaagacaagatggccgaagcctacagcgagatcggcatgaagggcgagcggagaagaggcaagggccacgatggcctgtaccagggcctgagcaccgccaccaaggacacctatgacgccctgcacatgcaggccctgcctccaaga

SEQ ID NO: 27832 - DNA, 948 bp, synthetic construct
  source 1..948: mol_type = other DNA
gccgacgtgtcccccaagcctaccatcttcctgccctctatcgccgagacaaagctccagaaggccggcacctacctgtgcctgctggaaaagttcttcccagatgtgattaagatccactggcaggaaaagaagtccaacaccatcctgggcagccaggaaggcaacaccatgaagaccaacgacacctacatgaagttcagctggctgaccgtgcccgagaagtccctggacaaagaacacagatgcatcgtgcggcacgaaaacaacaagaacggcgtggaccaggaaatcatcttcccaatccccgaggacacattcttcccaagccccgagagcagctgcgacgtgaagctggtggaaaagagcttcgagacagacaccaacctgaacttccagaacctgagcgtgatcggcttcagaatcctgctgctgaaagtggccggctttaacctgctgatgaccctgcggctgtggtccagcaaacggggcagaaagaaactcctgtatatattcaaacaaccatttatgagaccagtacaaactactcaagaggaagatggctgtagctgccgatttccagaagaagaagaaggaggatgtgaactgagagtgaagttcagcagaagcgccgacgcccctgcctaccagcagggacagaaccaactgtacaacgagctgaacctgggcagacgggaagagtacgacgtgctggacaagcggagaggcagggaccctgagatgggcggaaagccccagcggagaaagaacccccaggaaggactgtataacgaactccagaaagacaagatggccgaagcctacagcgagatcggcatgaagggcgagcggagaagaggcaagggccacgatggcctgtaccagggcctgagcaccgccaccaaggacacctatgacgccctgcacatgcaggccctgcctccaaga

SEQ ID NO: 27833 - DNA, 918 bp, synthetic construct
  source 1..918: mol_type = other DNA
gccgacgtgtcccccaagcctaccatcttcctgccctctatcgccgagacaaagctccagaaggccggcacctacctgtgcctgctggaaaagttcttcccagatgtgattaagatccactggcaggaaaagaagtccaacaccatcctgggcagccaggaaggcaacaccatgaagaccaacgacacctacatgaagttcagctggctgaccgtgcccgagaagtccctggacaaagaacacagatgcatcgtgcggcacgaaaacaacaagaacggcgtggaccaggaaatcatcttcccagagagcagctgcgacgtgaagctggtggaaaagagcttcgagacagacaccaacctgaacttccagaacctgagcgtgatcggcttcagaatcctgctgctgaaagtggccggctttaacctgctgatgaccctgcggctgtggtccagcaaacggggcagaaagaaactcctgtatatattcaaacaaccatttatgagaccagtacaaactactcaagaggaagatggctgtagctgccgatttccagaagaagaagaaggaggatgtgaactgagagtgaagttcagcagaagcgccgacgcccctgcctaccagcagggacagaaccaactgtacaacgagctgaacctgggcagacgggaagagtacgacgtgctggacaagcggagaggcagggaccctgagatgggcggaaagccccagcggagaaagaacccccaggaaggactgtataacgaactccagaaagacaagatggccgaagcctacagcgagatcggcatgaagggcgagcggagaagaggcaagggccacgatggcctgtaccagggcctgagcaccgccaccaaggacacctatgacgccctgcacatgcaggccctgcctccaaga

SEQ ID NO: 27834 - DNA, 945 bp, synthetic construct
  source 1..945: mol_type = other DNA
gccgacgtgtcccccaagcctaccatcttcctgccctctatcgccgagacaaagctccagaaggccggcacctacctgtgcctgctggaaaagttcttcccagatgtgattaagatccactggcaggaaaagaagtccaacaccatcctgggcagccaggaaggcaacaccatgaagaccaacgacacctacatgaagttcagctggctgaccgtgcccgagaagtccctggacaaagaacacagatgcatcgtgcggcacgaaaacaacaagaacggcgtggaccaggaaatcatcttcccacccgaggacacattcttcccaagccccgagagcagctgcgacgtgaagctggtggaaaagagcttcgagacagacaccaacctgaacttccagaacctgagcgtgatcggcttcagaatcctgctgctgaaagtggccggctttaacctgctgatgaccctgcggctgtggtccagcaaacggggcagaaagaaactcctgtatatattcaaacaaccatttatgagaccagtacaaactactcaagaggaagatggctgtagctgccgatttccagaagaagaagaaggaggatgtgaactgagagtgaagttcagcagaagcgccgacgcccctgcctaccagcagggacagaaccaactgtacaacgagctgaacctgggcagacgggaagagtacgacgtgctggacaagcggagaggcagggaccctgagatgggcggaaagccccagcggagaaagaacccccaggaaggactgtataacgaactccagaaagacaagatggccgaagcctacagcgagatcggcatgaagggcgagcggagaagaggcaagggccacgatggcctgtaccagggcctgagcaccgccaccaaggacacctatgacgccctgcacatgcaggccctgcctccaaga

SEQ ID NO: 27835 - DNA, 927 bp, synthetic construct
  source 1..927: mol_type = other DNA
gccgacgtgtcccccaagcctaccatcttcctgccctctatcgccgagacaaagctccagaaggccggcacctacctgtgcctgctggaaaagttcttcccagatgtgattaagatccactggcaggaaaagaagtccaacaccatcctgggcagccaggaaggcaacaccatgaagaccaacgacacctacatgaagttcagctggctgaccgtgcccgagaagtccctggacaaagaacacagatgcatcgtgcggcacgaaaacaacaagaacggcgtggaccaggaaatcatcttcccaggcagagccgattgcggctttaccagcgagagctaccagcagggcgtgctgagcgccaccatcctgtacgagatcctgctgggcaaggccaccctgtacgccgtgctggtgtctgccctggtgctgatggctatggtcaagcggaaggacagccggggaaaacggggcagaaagaaactcctgtatatattcaaacaaccatttatgagaccagtacaaactactcaagaggaagatggctgtagctgccgatttccagaagaagaagaaggaggatgtgaactgagagtgaagttcagcagaagcgccgacgcccctgcctaccagcagggacagaaccaactgtacaacgagctgaacctgggcagacgggaagagtacgacgtgctggacaagcggagaggcagggaccctgagatgggcggaaagccccagcggagaaagaacccccaggaaggactgtataacgaactccagaaagacaagatggccgaagcctacagcgagatcggcatgaagggcgagcggagaagaggcaagggccacgatggcctgtaccagggcctgagcaccgccaccaaggacacctatgacgccctgcacatgcaggccctgcctccaaga

SEQ ID NO: 27836 - DNA, 921 bp, synthetic construct
  source 1..921: mol_type = other DNA
gccgacgtgtcccccaagcctaccatcttcctgccctctatcgccgagacaaagctccagaaggccggcacctacctgtgcctgctggaaaagttcttcccagatgtgattaagatccactggcaggaaaagaagtccaacaccatcctgggcagccaggaaggcaacaccatgaagaccaacgacacctacatgaagttcagctggctgaccgtgcccgagaagtccctggacaaagaacacagatgcatcgtgcggcacgaaaacaacaagaacggcgtggaccaggaaatcatcttcccagccgattgcggctttaccagcgagagctaccagcagggcgtgctgagcgccaccatcctgtacgagatcctgctgggcaaggccaccctgtacgccgtgctggtgtctgccctggtgctgatggctatggtcaagcggaaggacagccggggaaaacggggcagaaagaaactcctgtatatattcaaacaaccatttatgagaccagtacaaactactcaagaggaagatggctgtagctgccgatttccagaagaagaagaaggaggatgtgaactgagagtgaagttcagcagaagcgccgacgcccctgcctaccagcagggacagaaccaactgtacaacgagctgaacctgggcagacgggaagagtacgacgtgctggacaagcggagaggcagggaccctgagatgggcggaaagccccagcggagaaagaacccccaggaaggactgtataacgaactccagaaagacaagatggccgaagcctacagcgagatcggcatgaagggcgagcggagaagaggcaagggccacgatggcctgtaccagggcctgagcaccgccaccaaggacacctatgacgccctgcacatgcaggccctgcctccaaga

SEQ ID NO: 27837 - DNA, 951 bp, synthetic construct
  source 1..951: mol_type = other DNA
gccgacgtgtcccccaagcctaccatcttcctgccctctatcgccgagacaaagctccagaaggccggcacctacctgtgcctgctggaaaagttcttcccagatgtgattaagatccactggcaggaaaagaagtccaacaccatcctgggcagccaggaaggcaacaccatgaagaccaacgacacctacatgaagttcagctggctgaccgtgcccgagaagtccctggacaaagaacacagatgcatcgtgcggcacgaaaacaacaagaacggcgtggaccaggaaatcatcttcccacagatcgtgtctgccgaagcctggggcagagccgattgcggctttaccagcgagagctaccagcagggcgtgctgagcgccaccatcctgtacgagatcctgctgggcaaggccaccctgtacgccgtgctggtgtctgccctggtgctgatggctatggtcaagcggaaggacagccggggaaaacggggcagaaagaaactcctgtatatattcaaacaaccatttatgagaccagtacaaactactcaagaggaagatggctgtagctgccgatttccagaagaagaagaaggaggatgtgaactgagagtgaagttcagcagaagcgccgacgcccctgcctaccagcagggacagaaccaactgtacaacgagctgaacctgggcagacgggaagagtacgacgtgctggacaagcggagaggcagggaccctgagatgggcggaaagccccagcggagaaagaacccccaggaaggactgtataacgaactccagaaagacaagatggccgaagcctacagcgagatcggcatgaagggcgagcggagaagaggcaagggccacgatggcctgtaccagggcctgagcaccgccaccaaggacacctatgacgccctgcacatgcaggccctgcctccaaga

SEQ ID NO: 27838 - DNA, 972 bp, synthetic construct
  source 1..972: mol_type = other DNA
gccgacgtgtcccccaagcctaccatcttcctgccctctatcgccgagacaaagctccagaaggccggcacctacctgtgcctgctggaaaagttcttcccagatgtgattaagatccactggcaggaaaagaagtccaacaccatcctgggcagccaggaaggcaacaccatgaagaccaacgacacctacatgaagttcagctggctgaccgtgcccgagaagtccctggacaaagaacacagatgcatcgtgcggcacgaaaacaacaagaacggcgtggaccaggaaatcatcttcccagaagtgaaaaccgactccaccgaccacgtgaagcccaaagagacagagaacaccaagcagcccagcaagagctgccacaagcccaaggccatcgtgcacaccgagaaagtgaacatgatgagcctgaccgtgctgggcctgcggatgctgttcgccaaaaccgtggccgtgaacttcctgctgaccgccaagctgttcttcctcaaacggggcagaaagaaactcctgtatatattcaaacaaccatttatgagaccagtacaaactactcaagaggaagatggctgtagctgccgatttccagaagaagaagaaggaggatgtgaactgagagtgaagttcagcagaagcgccgacgcccctgcctaccagcagggacagaaccaactgtacaacgagctgaacctgggcagacgggaagagtacgacgtgctggacaagcggagaggcagggaccctgagatgggcggaaagccccagcggagaaagaacccccaggaaggactgtataacgaactccagaaagacaagatggccgaagcctacagcgagatcggcatgaagggcgagcggagaagaggcaagggccacgatggcctgtaccagggcctgagcaccgccaccaaggacacctatgacgccctgcacatgcaggccctgcctccaaga

SEQ ID NO: 27839 - DNA, 951 bp, synthetic construct
  source 1..951: mol_type = other DNA
gccgacgtgtcccccaagcctaccatcttcctgccctctatcgccgagacaaagctccagaaggccggcacctacctgtgcctgctggaaaagttcttcccagatgtgattaagatccactggcaggaaaagaagtccaacaccatcctgggcagccaggaaggcaacaccatgaagaccaacgacacctacatgaagttcagctggctgaccgtgcccgagaagtccctggacaaagaacacagatgcatcgtgcggcacgaaaacaacaagaacggcgtggaccaggaaatcatcttcccagaccacgtgaagcccaaagagacagagaacaccaagcagcccagcaagagctgccacaagcccaaggccatcgtgcacaccgagaaagtgaacatgatgagcctgaccgtgctgggcctgcggatgctgttcgccaaaaccgtggccgtgaacttcctgctgaccgccaagctgttcttcctcaaacggggcagaaagaaactcctgtatatattcaaacaaccatttatgagaccagtacaaactactcaagaggaagatggctgtagctgccgatttccagaagaagaagaaggaggatgtgaactgagagtgaagttcagcagaagcgccgacgcccctgcctaccagcagggacagaaccaactgtacaacgagctgaacctgggcagacgggaagagtacgacgtgctggacaagcggagaggcagggaccctgagatgggcggaaagccccagcggagaaagaacccccaggaaggactgtataacgaactccagaaagacaagatggccgaagcctacagcgagatcggcatgaagggcgagcggagaagaggcaagggccacgatggcctgtaccagggcctgagcaccgccaccaaggacacctatgacgccctgcacatgcaggccctgcctccaaga

SEQ ID NO: 27840 - DNA, 972 bp, synthetic construct
  source 1..972: mol_type = other DNA
gccgacgtgtcccccaagcctaccatcttcctgccctctatcgccgagacaaagctccagaaggccggcacctacctgtgcctgctggaaaagttcttcccagatgtgattaagatccactggcaggaaaagaagtccaacaccatcctgggcagccaggaaggcaacaccatgaagaccaacgacacctacatgaagttcagctggctgaccgtgcccgagaagtccctggacaaagaacacagatgcatcgtgcggcacgaaaacaacaagaacggcgtggaccaggaaatcatcttcccacccatcaagaccgatgtgattacaatccccgaggacacattcttcccaagccccgagagcagctgcgacgtgaagctggtggaaaagagcttcgagacagacaccaacctgaacttccagaacctgagcgtgatcggcttcagaatcctgctgctgaaagtggccggctttaacctgctgatgaccctgcggctgtggtccagcaaacggggcagaaagaaactcctgtatatattcaaacaaccatttatgagaccagtacaaactactcaagaggaagatggctgtagctgccgatttccagaagaagaagaaggaggatgtgaactgagagtgaagttcagcagaagcgccgacgcccctgcctaccagcagggacagaaccaactgtacaacgagctgaacctgggcagacgggaagagtacgacgtgctggacaagcggagaggcagggaccctgagatgggcggaaagccccagcggagaaagaacccccaggaaggactgtataacgaactccagaaagacaagatggccgaagcctacagcgagatcggcatgaagggcgagcggagaagaggcaagggccacgatggcctgtaccagggcctgagcaccgccaccaaggacacctatgacgccctgcacatgcaggccctgcctccaaga

SEQ ID NO: 27841 - DNA, 942 bp, synthetic construct
  source 1..942: mol_type = other DNA
gccgacgtgtcccccaagcctaccatcttcctgccctctatcgccgagacaaagctccagaaggccggcacctacctgtgcctgctggaaaagttcttcccagatgtgattaagatccactggcaggaaaagaagtccaacaccatcctgggcagccaggaaggcaacaccatgaagaccaacgacacctacatgaagttcagctggctgaccgtgcccgagaagtccctggacaaagaacacagatgcatcgtgcggcacgaaaacaacaagaacggcgtggaccaggaaatcatcttcccacccatcaagaccgatgtgattacagagagcagctgcgacgtgaagctggtggaaaagagcttcgagacagacaccaacctgaacttccagaacctgagcgtgatcggcttcagaatcctgctgctgaaagtggccggctttaacctgctgatgaccctgcggctgtggtccagcaaacggggcagaaagaaactcctgtatatattcaaacaaccatttatgagaccagtacaaactactcaagaggaagatggctgtagctgccgatttccagaagaagaagaaggaggatgtgaactgagagtgaagttcagcagaagcgccgacgcccctgcctaccagcagggacagaaccaactgtacaacgagctgaacctgggcagacgggaagagtacgacgtgctggacaagcggagaggcagggaccctgagatgggcggaaagccccagcggagaaagaacccccaggaaggactgtataacgaactccagaaagacaagatggccgaagcctacagcgagatcggcatgaagggcgagcggagaagaggcaagggccacgatggcctgtaccagggcctgagcaccgccaccaaggacacctatgacgccctgcacatgcaggccctgcctccaaga

SEQ ID NO: 27842 - DNA, 969 bp, synthetic construct
  source 1..969: mol_type = other DNA
gccgacgtgtcccccaagcctaccatcttcctgccctctatcgccgagacaaagctccagaaggccggcacctacctgtgcctgctggaaaagttcttcccagatgtgattaagatccactggcaggaaaagaagtccaacaccatcctgggcagccaggaaggcaacaccatgaagaccaacgacacctacatgaagttcagctggctgaccgtgcccgagaagtccctggacaaagaacacagatgcatcgtgcggcacgaaaacaacaagaacggcgtggaccaggaaatcatcttcccacccatcaagaccgatgtgattacacccgaggacacattcttcccaagccccgagagcagctgcgacgtgaagctggtggaaaagagcttcgagacagacaccaacctgaacttccagaacctgagcgtgatcggcttcagaatcctgctgctgaaagtggccggctttaacctgctgatgaccctgcggctgtggtccagcaaacggggcagaaagaaactcctgtatatattcaaacaaccatttatgagaccagtacaaactactcaagaggaagatggctgtagctgccgatttccagaagaagaagaaggaggatgtgaactgagagtgaagttcagcagaagcgccgacgcccctgcctaccagcagggacagaaccaactgtacaacgagctgaacctgggcagacgggaagagtacgacgtgctggacaagcggagaggcagggaccctgagatgggcggaaagccccagcggagaaagaacccccaggaaggactgtataacgaactccagaaagacaagatggccgaagcctacagcgagatcggcatgaagggcgagcggagaagaggcaagggccacgatggcctgtaccagggcctgagcaccgccaccaaggacacctatgacgccctgcacatgcaggccctgcctccaaga

SEQ ID NO: 27843 - DNA, 951 bp, synthetic construct
  source 1..951: mol_type = other DNA
gccgacgtgtcccccaagcctaccatcttcctgccctctatcgccgagacaaagctccagaaggccggcacctacctgtgcctgctggaaaagttcttcccagatgtgattaagatccactggcaggaaaagaagtccaacaccatcctgggcagccaggaaggcaacaccatgaagaccaacgacacctacatgaagttcagctggctgaccgtgcccgagaagtccctggacaaagaacacagatgcatcgtgcggcacgaaaacaacaagaacggcgtggaccaggaaatcatcttcccacccatcaagaccgatgtgattacaggcagagccgattgcggctttaccagcgagagctaccagcagggcgtgctgagcgccaccatcctgtacgagatcctgctgggcaaggccaccctgtacgccgtgctggtgtctgccctggtgctgatggctatggtcaagcggaaggacagccggggaaaacggggcagaaagaaactcctgtatatattcaaacaaccatttatgagaccagtacaaactactcaagaggaagatggctgtagctgccgatttccagaagaagaagaaggaggatgtgaactgagagtgaagttcagcagaagcgccgacgcccctgcctaccagcagggacagaaccaactgtacaacgagctgaacctgggcagacgggaagagtacgacgtgctggacaagcggagaggcagggaccctgagatgggcggaaagccccagcggagaaagaacccccaggaaggactgtataacgaactccagaaagacaagatggccgaagcctacagcgagatcggcatgaagggcgagcggagaagaggcaagggccacgatggcctgtaccagggcctgagcaccgccaccaaggacacctatgacgccctgcacatgcaggccctgcctccaaga

SEQ ID NO: 27844 - DNA, 945 bp, synthetic construct
  source 1..945: mol_type = other DNA
gccgacgtgtcccccaagcctaccatcttcctgccctctatcgccgagacaaagctccagaaggccggcacctacctgtgcctgctggaaaagttcttcccagatgtgattaagatccactggcaggaaaagaagtccaacaccatcctgggcagccaggaaggcaacaccatgaagaccaacgacacctacatgaagttcagctggctgaccgtgcccgagaagtccctggacaaagaacacagatgcatcgtgcggcacgaaaacaacaagaacggcgtggaccaggaaatcatcttcccacccatcaagaccgatgtgattacagccgattgcggctttaccagcgagagctaccagcagggcgtgctgagcgccaccatcctgtacgagatcctgctgggcaaggccaccctgtacgccgtgctggtgtctgccctggtgctgatggctatggtcaagcggaaggacagccggggaaaacggggcagaaagaaactcctgtatatattcaaacaaccatttatgagaccagtacaaactactcaagaggaagatggctgtagctgccgatttccagaagaagaagaaggaggatgtgaactgagagtgaagttcagcagaagcgccgacgcccctgcctaccagcagggacagaaccaactgtacaacgagctgaacctgggcagacgggaagagtacgacgtgctggacaagcggagaggcagggaccctgagatgggcggaaagccccagcggagaaagaacccccaggaaggactgtataacgaactccagaaagacaagatggccgaagcctacagcgagatcggcatgaagggcgagcggagaagaggcaagggccacgatggcctgtaccagggcctgagcaccgccaccaaggacacctatgacgccctgcacatgcaggccctgcctccaaga

SEQ ID NO: 27845 - DNA, 975 bp, synthetic construct
  source 1..975: mol_type = other DNA
gccgacgtgtcccccaagcctaccatcttcctgccctctatcgccgagacaaagctccagaaggccggcacctacctgtgcctgctggaaaagttcttcccagatgtgattaagatccactggcaggaaaagaagtccaacaccatcctgggcagccaggaaggcaacaccatgaagaccaacgacacctacatgaagttcagctggctgaccgtgcccgagaagtccctggacaaagaacacagatgcatcgtgcggcacgaaaacaacaagaacggcgtggaccaggaaatcatcttcccacccatcaagaccgatgtgattacacagatcgtgtctgccgaagcctggggcagagccgattgcggctttaccagcgagagctaccagcagggcgtgctgagcgccaccatcctgtacgagatcctgctgggcaaggccaccctgtacgccgtgctggtgtctgccctggtgctgatggctatggtcaagcggaaggacagccggggaaaacggggcagaaagaaactcctgtatatattcaaacaaccatttatgagaccagtacaaactactcaagaggaagatggctgtagctgccgatttccagaagaagaagaaggaggatgtgaactgagagtgaagttcagcagaagcgccgacgcccctgcctaccagcagggacagaaccaactgtacaacgagctgaacctgggcagacgggaagagtacgacgtgctggacaagcggagaggcagggaccctgagatgggcggaaagccccagcggagaaagaacccccaggaaggactgtataacgaactccagaaagacaagatggccgaagcctacagcgagatcggcatgaagggcgagcggagaagaggcaagggccacgatggcctgtaccagggcctgagcaccgccaccaaggacacctatgacgccctgcacatgcaggccctgcctccaaga

SEQ ID NO: 27846 - DNA, 996 bp, synthetic construct
  source 1..996: mol_type = other DNA
gccgacgtgtcccccaagcctaccatcttcctgccctctatcgccgagacaaagctccagaaggccggcacctacctgtgcctgctggaaaagttcttcccagatgtgattaagatccactggcaggaaaagaagtccaacaccatcctgggcagccaggaaggcaacaccatgaagaccaacgacacctacatgaagttcagctggctgaccgtgcccgagaagtccctggacaaagaacacagatgcatcgtgcggcacgaaaacaacaagaacggcgtggaccaggaaatcatcttcccacccatcaagaccgatgtgattacagaagtgaaaaccgactccaccgaccacgtgaagcccaaagagacagagaacaccaagcagcccagcaagagctgccacaagcccaaggccatcgtgcacaccgagaaagtgaacatgatgagcctgaccgtgctgggcctgcggatgctgttcgccaaaaccgtggccgtgaacttcctgctgaccgccaagctgttcttcctcaaacggggcagaaagaaactcctgtatatattcaaacaaccatttatgagaccagtacaaactactcaagaggaagatggctgtagctgccgatttccagaagaagaagaaggaggatgtgaactgagagtgaagttcagcagaagcgccgacgcccctgcctaccagcagggacagaaccaactgtacaacgagctgaacctgggcagacgggaagagtacgacgtgctggacaagcggagaggcagggaccctgagatgggcggaaagccccagcggagaaagaacccccaggaaggactgtataacgaactccagaaagacaagatggccgaagcctacagcgagatcggcatgaagggcgagcggagaagaggcaagggccacgatggcctgtaccagggcctgagcaccgccaccaaggacacctatgacgccctgcacatgcaggccctgcctccaaga

SEQ ID NO: 27847 - DNA, 975 bp, synthetic construct
  source 1..975: mol_type = other DNA
gccgacgtgtcccccaagcctaccatcttcctgccctctatcgccgagacaaagctccagaaggccggcacctacctgtgcctgctggaaaagttcttcccagatgtgattaagatccactggcaggaaaagaagtccaacaccatcctgggcagccaggaaggcaacaccatgaagaccaacgacacctacatgaagttcagctggctgaccgtgcccgagaagtccctggacaaagaacacagatgcatcgtgcggcacgaaaacaacaagaacggcgtggaccaggaaatcatcttcccacccatcaagaccgatgtgattacagaccacgtgaagcccaaagagacagagaacaccaagcagcccagcaagagctgccacaagcccaaggccatcgtgcacaccgagaaagtgaacatgatgagcctgaccgtgctgggcctgcggatgctgttcgccaaaaccgtggccgtgaacttcctgctgaccgccaagctgttcttcctcaaacggggcagaaagaaactcctgtatatattcaaacaaccatttatgagaccagtacaaactactcaagaggaagatggctgtagctgccgatttccagaagaagaagaaggaggatgtgaactgagagtgaagttcagcagaagcgccgacgcccctgcctaccagcagggacagaaccaactgtacaacgagctgaacctgggcagacgggaagagtacgacgtgctggacaagcggagaggcagggaccctgagatgggcggaaagccccagcggagaaagaacccccaggaaggactgtataacgaactccagaaagacaagatggccgaagcctacagcgagatcggcatgaagggcgagcggagaagaggcaagggccacgatggcctgtaccagggcctgagcaccgccaccaaggacacctatgacgccctgcacatgcaggccctgcctccaaga

SEQ ID NO: 27848 - DNA, 987 bp, synthetic construct
  source 1..987: mol_type = other DNA
gccgacgtgtcccccaagcctaccatcttcctgccctctatcgccgagacaaagctccagaaggccggcacctacctgtgcctgctggaaaagttcttcccagatgtgattaagatccactggcaggaaaagaagtccaacaccatcctgggcagccaggaaggcaacaccatgaagaccaacgacacctacatgaagttcagctggctgaccgtgcccgagaagtccctggacaaagaacacagatgcatcgtgcggcacgaaaacaacaagaacggcgtggaccaggaaatcatcttcccacccatcaagaccgatgtgattacaatggaccccaaggacatccccgaggacacattcttcccaagccccgagagcagctgcgacgtgaagctggtggaaaagagcttcgagacagacaccaacctgaacttccagaacctgagcgtgatcggcttcagaatcctgctgctgaaagtggccggctttaacctgctgatgaccctgcggctgtggtccagcaaacggggcagaaagaaactcctgtatatattcaaacaaccatttatgagaccagtacaaactactcaagaggaagatggctgtagctgccgatttccagaagaagaagaaggaggatgtgaactgagagtgaagttcagcagaagcgccgacgcccctgcctaccagcagggacagaaccaactgtacaacgagctgaacctgggcagacgggaagagtacgacgtgctggacaagcggagaggcagggaccctgagatgggcggaaagccccagcggagaaagaacccccaggaaggactgtataacgaactccagaaagacaagatggccgaagcctacagcgagatcggcatgaagggcgagcggagaagaggcaagggccacgatggcctgtaccagggcctgagcaccgccaccaaggacacctatgacgccctgcacatgcaggccctgcctccaaga

SEQ ID NO: 27849 - DNA, 957 bp, synthetic construct
  source 1..957: mol_type = other DNA
gccgacgtgtcccccaagcctaccatcttcctgccctctatcgccgagacaaagctccagaaggccggcacctacctgtgcctgctggaaaagttcttcccagatgtgattaagatccactggcaggaaaagaagtccaacaccatcctgggcagccaggaaggcaacaccatgaagaccaacgacacctacatgaagttcagctggctgaccgtgcccgagaagtccctggacaaagaacacagatgcatcgtgcggcacgaaaacaacaagaacggcgtggaccaggaaatcatcttcccacccatcaagaccgatgtgattacaatggaccccaaggacgagagcagctgcgacgtgaagctggtggaaaagagcttcgagacagacaccaacctgaacttccagaacctgagcgtgatcggcttcagaatcctgctgctgaaagtggccggctttaacctgctgatgaccctgcggctgtggtccagcaaacggggcagaaagaaactcctgtatatattcaaacaaccatttatgagaccagtacaaactactcaagaggaagatggctgtagctgccgatttccagaagaagaagaaggaggatgtgaactgagagtgaagttcagcagaagcgccgacgcccctgcctaccagcagggacagaaccaactgtacaacgagctgaacctgggcagacgggaagagtacgacgtgctggacaagcggagaggcagggaccctgagatgggcggaaagccccagcggagaaagaacccccaggaaggactgtataacgaactccagaaagacaagatggccgaagcctacagcgagatcggcatgaagggcgagcggagaagaggcaagggccacgatggcctgtaccagggcctgagcaccgccaccaaggacacctatgacgccctgcacatgcaggccctgcctccaaga

SEQ ID NO: 27850 - DNA, 984 bp, synthetic construct
  source 1..984: mol_type = other DNA
gccgacgtgtcccccaagcctaccatcttcctgccctctatcgccgagacaaagctccagaaggccggcacctacctgtgcctgctggaaaagttcttcccagatgtgattaagatccactggcaggaaaagaagtccaacaccatcctgggcagccaggaaggcaacaccatgaagaccaacgacacctacatgaagttcagctggctgaccgtgcccgagaagtccctggacaaagaacacagatgcatcgtgcggcacgaaaacaacaagaacggcgtggaccaggaaatcatcttcccacccatcaagaccgatgtgattacaatggaccccaaggaccccgaggacacattcttcccaagccccgagagcagctgcgacgtgaagctggtggaaaagagcttcgagacagacaccaacctgaacttccagaacctgagcgtgatcggcttcagaatcctgctgctgaaagtggccggctttaacctgctgatgaccctgcggctgtggtccagcaaacggggcagaaagaaactcctgtatatattcaaacaaccatttatgagaccagtacaaactactcaagaggaagatggctgtagctgccgatttccagaagaagaagaaggaggatgtgaactgagagtgaagttcagcagaagcgccgacgcccctgcctaccagcagggacagaaccaactgtacaacgagctgaacctgggcagacgggaagagtacgacgtgctggacaagcggagaggcagggaccctgagatgggcggaaagccccagcggagaaagaacccccaggaaggactgtataacgaactccagaaagacaagatggccgaagcctacagcgagatcggcatgaagggcgagcggagaagaggcaagggccacgatggcctgtaccagggcctgagcaccgccaccaaggacacctatgacgccctgcacatgcaggccctgcctccaaga

SEQ ID NO: 27851 - DNA, 966 bp, synthetic construct
  source 1..966: mol_type = other DNA
gccgacgtgtcccccaagcctaccatcttcctgccctctatcgccgagacaaagctccagaaggccggcacctacctgtgcctgctggaaaagttcttcccagatgtgattaagatccactggcaggaaaagaagtccaacaccatcctgggcagccaggaaggcaacaccatgaagaccaacgacacctacatgaagttcagctggctgaccgtgcccgagaagtccctggacaaagaacacagatgcatcgtgcggcacgaaaacaacaagaacggcgtggaccaggaaatcatcttcccacccatcaagaccgatgtgattacaatggaccccaaggacggcagagccgattgcggctttaccagcgagagctaccagcagggcgtgctgagcgccaccatcctgtacgagatcctgctgggcaaggccaccctgtacgccgtgctggtgtctgccctggtgctgatggctatggtcaagcggaaggacagccggggaaaacggggcagaaagaaactcctgtatatattcaaacaaccatttatgagaccagtacaaactactcaagaggaagatggctgtagctgccgatttccagaagaagaagaaggaggatgtgaactgagagtgaagttcagcagaagcgccgacgcccctgcctaccagcagggacagaaccaactgtacaacgagctgaacctgggcagacgggaagagtacgacgtgctggacaagcggagaggcagggaccctgagatgggcggaaagccccagcggagaaagaacccccaggaaggactgtataacgaactccagaaagacaagatggccgaagcctacagcgagatcggcatgaagggcgagcggagaagaggcaagggccacgatggcctgtaccagggcctgagcaccgccaccaaggacacctatgacgccctgcacatgcaggccctgcctccaaga

SEQ ID NO: 27852 - DNA, 960 bp, synthetic construct
  source 1..960: mol_type = other DNA
gccgacgtgtcccccaagcctaccatcttcctgccctctatcgccgagacaaagctccagaaggccggcacctacctgtgcctgctggaaaagttcttcccagatgtgattaagatccactggcaggaaaagaagtccaacaccatcctgggcagccaggaaggcaacaccatgaagaccaacgacacctacatgaagttcagctggctgaccgtgcccgagaagtccctggacaaagaacacagatgcatcgtgcggcacgaaaacaacaagaacggcgtggaccaggaaatcatcttcccacccatcaagaccgatgtgattacaatggaccccaaggacgccgattgcggctttaccagcgagagctaccagcagggcgtgctgagcgccaccatcctgtacgagatcctgctgggcaaggccaccctgtacgccgtgctggtgtctgccctggtgctgatggctatggtcaagcggaaggacagccggggaaaacggggcagaaagaaactcctgtatatattcaaacaaccatttatgagaccagtacaaactactcaagaggaagatggctgtagctgccgatttccagaagaagaagaaggaggatgtgaactgagagtgaagttcagcagaagcgccgacgcccctgcctaccagcagggacagaaccaactgtacaacgagctgaacctgggcagacgggaagagtacgacgtgctggacaagcggagaggcagggaccctgagatgggcggaaagccccagcggagaaagaacccccaggaaggactgtataacgaactccagaaagacaagatggccgaagcctacagcgagatcggcatgaagggcgagcggagaagaggcaagggccacgatggcctgtaccagggcctgagcaccgccaccaaggacacctatgacgccctgcacatgcaggccctgcctccaaga

SEQ ID NO: 27853 - DNA, 990 bp, synthetic construct
  source 1..990: mol_type = other DNA
gccgacgtgtcccccaagcctaccatcttcctgccctctatcgccgagacaaagctccagaaggccggcacctacctgtgcctgctggaaaagttcttcccagatgtgattaagatccactggcaggaaaagaagtccaacaccatcctgggcagccaggaaggcaacaccatgaagaccaacgacacctacatgaagttcagctggctgaccgtgcccgagaagtccctggacaaagaacacagatgcatcgtgcggcacgaaaacaacaagaacggcgtggaccaggaaatcatcttcccacccatcaagaccgatgtgattacaatggaccccaaggaccagatcgtgtctgccgaagcctggggcagagccgattgcggctttaccagcgagagctaccagcagggcgtgctgagcgccaccatcctgtacgagatcctgctgggcaaggccaccctgtacgccgtgctggtgtctgccctggtgctgatggctatggtcaagcggaaggacagccggggaaaacggggcagaaagaaactcctgtatatattcaaacaaccatttatgagaccagtacaaactactcaagaggaagatggctgtagctgccgatttccagaagaagaagaaggaggatgtgaactgagagtgaagttcagcagaagcgccgacgcccctgcctaccagcagggacagaaccaactgtacaacgagctgaacctgggcagacgggaagagtacgacgtgctggacaagcggagaggcagggaccctgagatgggcggaaagccccagcggagaaagaacccccaggaaggactgtataacgaactccagaaagacaagatggccgaagcctacagcgagatcggcatgaagggcgagcggagaagaggcaagggccacgatggcctgtaccagggcctgagcaccgccaccaaggacacctatgacgccctgcacatgcaggccctgcctccaaga

SEQ ID NO: 27854 - DNA, 1011 bp, synthetic construct
  source 1..1011: mol_type = other DNA
gccgacgtgtcccccaagcctaccatcttcctgccctctatcgccgagacaaagctccagaaggccggcacctacctgtgcctgctggaaaagttcttcccagatgtgattaagatccactggcaggaaaagaagtccaacaccatcctgggcagccaggaaggcaacaccatgaagaccaacgacacctacatgaagttcagctggctgaccgtgcccgagaagtccctggacaaagaacacagatgcatcgtgcggcacgaaaacaacaagaacggcgtggaccaggaaatcatcttcccacccatcaagaccgatgtgattacaatggaccccaaggacgaagtgaaaaccgactccaccgaccacgtgaagcccaaagagacagagaacaccaagcagcccagcaagagctgccacaagcccaaggccatcgtgcacaccgagaaagtgaacatgatgagcctgaccgtgctgggcctgcggatgctgttcgccaaaaccgtggccgtgaacttcctgctgaccgccaagctgttcttcctcaaacggggcagaaagaaactcctgtatatattcaaacaaccatttatgagaccagtacaaactactcaagaggaagatggctgtagctgccgatttccagaagaagaagaaggaggatgtgaactgagagtgaagttcagcagaagcgccgacgcccctgcctaccagcagggacagaaccaactgtacaacgagctgaacctgggcagacgggaagagtacgacgtgctggacaagcggagaggcagggaccctgagatgggcggaaagccccagcggagaaagaacccccaggaaggactgtataacgaactccagaaagacaagatggccgaagcctacagcgagatcggcatgaagggcgagcggagaagaggcaagggccacgatggcctgtaccagggcctgagcaccgccaccaaggacacctatgacgccctgcacatgcaggccctgcctccaaga

SEQ ID NO: 27855 - DNA, 990 bp, synthetic construct
  source 1..990: mol_type = other DNA
gccgacgtgtcccccaagcctaccatcttcctgccctctatcgccgagacaaagctccagaaggccggcacctacctgtgcctgctggaaaagttcttcccagatgtgattaagatccactggcaggaaaagaagtccaacaccatcctgggcagccaggaaggcaacaccatgaagaccaacgacacctacatgaagttcagctggctgaccgtgcccgagaagtccctggacaaagaacacagatgcatcgtgcggcacgaaaacaacaagaacggcgtggaccaggaaatcatcttcccacccatcaagaccgatgtgattacaatggaccccaaggacgaccacgtgaagcccaaagagacagagaacaccaagcagcccagcaagagctgccacaagcccaaggccatcgtgcacaccgagaaagtgaacatgatgagcctgaccgtgctgggcctgcggatgctgttcgccaaaaccgtggccgtgaacttcctgctgaccgccaagctgttcttcctcaaacggggcagaaagaaactcctgtatatattcaaacaaccatttatgagaccagtacaaactactcaagaggaagatggctgtagctgccgatttccagaagaagaagaaggaggatgtgaactgagagtgaagttcagcagaagcgccgacgcccctgcctaccagcagggacagaaccaactgtacaacgagctgaacctgggcagacgggaagagtacgacgtgctggacaagcggagaggcagggaccctgagatgggcggaaagccccagcggagaaagaacccccaggaaggactgtataacgaactccagaaagacaagatggccgaagcctacagcgagatcggcatgaagggcgagcggagaagaggcaagggccacgatggcctgtaccagggcctgagcaccgccaccaaggacacctatgacgccctgcacatgcaggccctgcctccaaga

SEQ ID NO: 27856 - DNA, 972 bp, synthetic construct; identical to SEQ ID NO: 27840
  source 1..972: mol_type = other DNA

SEQ ID NO: 27857 - DNA, 942 bp, synthetic construct; identical to SEQ ID NO: 27841
  source 1..942: mol_type = other DNA

SEQ ID NO: 27858 - DNA, 969 bp, synthetic construct; identical to SEQ ID NO: 27842
  source 1..969: mol_type = other DNA

SEQ ID NO: 27859 - DNA, 951 bp, synthetic construct; identical to SEQ ID NO: 27843
  source 1..951: mol_type = other DNA

SEQ ID NO: 27860 - DNA, 945 bp, synthetic construct; identical to SEQ ID NO: 27844
  source 1..945: mol_type = other DNA

SEQ ID NO: 27861 - DNA, 975 bp, synthetic construct; identical to SEQ ID NO: 27845
  source 1..975: mol_type = other DNA

SEQ ID NO: 27862 - DNA, 996 bp, synthetic construct; identical to SEQ ID NO: 27846
  source 1..996: mol_type = other DNA

SEQ ID NO: 27863 - DNA, 975 bp, synthetic construct; identical to SEQ ID NO: 27847
  source 1..975: mol_type = other DNA

SEQ ID NO: 27864 - DNA, 894 bp, synthetic construct
  source 1..894: mol_type = other DNA
cctcacaccaagcccagcgtgttcgtgatgaagaacggcaccaacgtggcctgcctcgtgaaagagttctaccccaaggacatcaggatcaacctggtgtccagcaagaagatcaccgagttcgaccccgccatcgtgatctcccccagcggcaagtacaacgccgtgaagctggggaagtacgaggacagcaacagcgtgacctgctccgtgcagcacgacaacaagaccgtgcacagcaccgactttatccccgaggacacattcttcccaagccccgagagcagctgcgacgtgaagctggtggaaaagagcttcgagacagacaccaacctgaacttccagaacctgagcgtgatcggcttcagaatcctgctgctgaaagtggccggctttaacctgctgatgaccctgcggctgtggtccagcaaacggggcagaaagaaactcctgtatatattcaaacaaccatttatgagaccagtacaaactactcaagaggaagatggctgtagctgccgatttccagaagaagaagaaggaggatgtgaactgagagtgaagttcagcagaagcgccgacgcccctgcctaccagcagggacagaaccaactgtacaacgagctgaacctgggcagacgggaagagtacgacgtgctggacaagcggagaggcagggaccctgagatgggcggaaagccccagcggagaaagaacccccaggaaggactgtataacgaactccagaaagacaagatggccgaagcctacagcgagatcggcatgaagggcgagcggagaagaggcaagggccacgatggcctgtaccagggcctgagcaccgccaccaaggacacctatgacgccctgcacatgcaggccctgcctccaaga

SEQ ID NO: 27865 - DNA, 864 bp, synthetic construct
  source 1..864: mol_type = other DNA
cctcacaccaagcccagcgtgttcgtgatgaagaacggcaccaacgtggcctgcctcgtgaaagagttctaccccaaggacatcaggatcaacctggtgtccagcaagaagatcaccgagttcgaccccgccatcgtgatctcccccagcggcaagtacaacgccgtgaagctggggaagtacgaggacagcaacagcgtgacctgctccgtgcagcacgacaacaagaccgtgcacagcaccgactttgagagcagctgcgacgtgaagctggtggaaaagagcttcgagacagacaccaacctgaacttccagaacctgagcgtgatcggcttcagaatcctgctgctgaaagtggccggctttaacctgctgatgaccctgcggctgtggtccagcaaacggggcagaaagaaactcctgtatatattcaaacaaccatttatgagaccagtacaaactactcaagaggaagatggctgtagctgccgatttccagaagaagaagaaggaggatgtgaactgagagtgaagttcagcagaagcgccgacgcccctgcctaccagcagggacagaaccaactgtacaacgagctgaacctgggcagacgggaagagtacgacgtgctggacaagcggagaggcagggaccctgagatgggcggaaagccccagcggagaaagaacccccaggaaggactgtataacgaactccagaaagacaagatggccgaagcctacagcgagatcggcatgaagggcgagcggagaagaggcaagggccacgatggcctgtaccagggcctgagcaccgccaccaaggacacctatgacgccctgcacatgcaggccctgcctccaaga

SEQ ID NO: 27866 - DNA, 891 bp, synthetic construct
  source 1..891: mol_type = other DNA
cctcacaccaagcccagcgtgttcgtgatgaagaacggcaccaacgtggcctgcctcgtgaaagagttctaccccaaggacatcaggatcaacctggtgtccagcaagaagatcaccgagttcgaccccgccatcgtgatctcccccagcggcaagtacaacgccgtgaagctggggaagtacgaggacagcaacagcgtgacctgctccgtgcagcacgacaacaagaccgtgcacagcaccgactttcccgaggacacattcttcccaagccccgagagcagctgcgacgtgaagctggtggaaaagagcttcgagacagacaccaacctgaacttccagaacctgagcgtgatcggcttcagaatcctgctgctgaaagtggccggctttaacctgctgatgaccctgcggctgtggtccagcaaacggggcagaaagaaactcctgtatatattcaaacaaccatttatgagaccagtacaaactactcaagaggaagatggctgtagctgccgatttccagaagaagaagaaggaggatgtgaactgagagtgaagttcagcagaagcgccgacgcccctgcctaccagcagggacagaaccaactgtacaacgagctgaacctgggcagacgggaagagtacgacgtgctggacaagcggagaggcagggaccctgagatgggcggaaagccccagcggagaaagaacccccaggaaggactgtataacgaactccagaaagacaagatggccgaagcctacagcgagatcggcatgaagggcgagcggagaagaggcaagggccacgatggcctgtaccagggcctgagcaccgccaccaaggacacctatgacgccctgcacatgcaggccctgcctccaaga

SEQ ID NO: 27867 - DNA, 873 bp, synthetic construct
  source 1..873: mol_type = other DNA
cctcacaccaagcccagcgtgttcgtgatgaagaacggcaccaacgtggcctgcctcgtgaaagagttctaccccaaggacatcaggatcaacctggtgtccagcaagaagatcaccgagttcgaccccgccatcgtgatctcccccagcggcaagtacaacgccgtgaagctggggaagtacgaggacagcaacagcgtgacctgctccgtgcagcacgacaacaagaccgtgcacagcaccgactttggcagagccgattgcggctttaccagcgagagctaccagcagggcgtgctgagcgccaccatcctgtacgagatcctgctgggcaaggccaccctgtacgccgtgctggtgtctgccctggtgctgatggctatggtcaagcggaaggacagccggggaaaacggggcagaaagaaactcctgtatatattcaaacaaccatttatgagaccagtacaaactactcaagaggaagatggctgtagctgccgatttccagaagaagaagaaggaggatgtgaactgagagtgaagttcagcagaagcgccgacgcccctgcctaccagcagggacagaaccaactgtacaacgagctgaacctgggcagacgggaagagtacgacgtgctggacaagcggagaggcagggaccctgagatgggcggaaagccccagcggagaaagaacccccaggaaggactgtataacgaactccagaaagacaagatggccgaagcctacagcgagatcggcatgaagggcgagcggagaagaggcaagggccacgatggcctgtaccagggcctgagcaccgccaccaaggacacctatgacgccctgcacatgcaggccctgcctccaaga

SEQ ID NO: 27868 - DNA, 867 bp, synthetic construct
  source 1..867: mol_type = other DNA
cctcacaccaagcccagcgtgttcgtgatgaagaacggcaccaacgtggcctgcctcgtgaaagagttctaccccaaggacatcaggatcaacctggtgtccagcaagaagatcaccgagttcgaccccgccatcgtgatctcccccagcggcaagtacaacgccgtgaagctggggaagtacgaggacagcaacagcgtgacctgctccgtgcagcacgacaacaagaccgtgcacagcaccgactttgccgattgcggctttaccagcgagagctaccagcagggcgtgctgagcgccaccatcctgtacgagatcctgctgggcaaggccaccctgtacgccgtgctggtgtctgccctggtgctgatggctatggtcaagcggaaggacagccggggaaaacggggcagaaagaaactcctgtatatattcaaacaaccatttatgagaccagtacaaactactcaagaggaagatggctgtagctgccgatttccagaagaagaagaaggaggatgtgaactgagagtgaagttcagcagaagcgccgacgcccctgcctaccagcagggacagaaccaactgtacaacgagctgaacctgggcagacgggaagagtacgacgtgctggacaagcggagaggcagggaccctgagatgggcggaaagccccagcggagaaagaacccccaggaaggactgtataacgaactccagaaagacaagatggccgaagcctacagcgagatcggcatgaagggcgagcggagaagaggcaagggccacgatggcctgtaccagggcctgagcaccgccaccaaggacacctatgacgccctgcacatgcaggccctgcctccaaga

SEQ ID NO: 27869 - DNA, 897 bp, synthetic construct
  source 1..897: mol_type = other DNA
cctcacaccaagcccagcgtgttcgtgatgaagaacggcaccaacgtggcctgcctcgtgaaagagttctaccccaaggacatcaggatcaacctggtgtccagcaagaagatcaccgagttcgaccccgccatcgtgatctcccccagcggcaagtacaacgccgtgaagctggggaagtacgaggacagcaacagcgtgacctgctccgtgcagcacgacaacaagaccgtgcacagcaccgactttcagatcgtgtctgccgaagcctggggcagagccgattgcggctttaccagcgagagctaccagcagggcgtgctgagcgccaccatcctgtacgagatcctgctgggcaaggccaccctgtacgccgtgctggtgtctgccctggtgctgatggctatggtcaagcggaaggacagccggggaaaacggggcagaaagaaactcctgtatatattcaaacaaccatttatgagaccagtacaaactactcaagaggaagatggctgtagctgccgatttccagaagaagaagaaggaggatgtgaactgagagtgaagttcagcagaagcgccgacgcccctgcctaccagcagggacagaaccaactgtacaacgagctgaacctgggcagacgggaagagtacgacgtgctggacaagcggagaggcagggaccctgagatgggcggaaagccccagcggagaaagaacccccaggaaggactgtataacgaactccagaaagacaagatggccgaagcctacagcgagatcggcatgaagggcgagcggagaagaggcaagggccacgatggcctgtaccagggcctgagcaccgccaccaaggacacctatgacgccctgcacatgcaggccctgcctccaaga

SEQ ID NO: 27870 - DNA, 921 bp, synthetic construct
  source 1..921: mol_type = other DNA
cctcacaccaagcccagcgtgttcgtgatgaagaacggcaccaacgtggcctgcctcgtgaaagagttctaccccaaggacatcaggatcaacctggtgtccagcaagaagatcaccgagttcgaccccgccatcgtgatctcccccagcggcaagtacaacgccgtgaagctggggaagtacgaggacagcaacagcgtgacctgctccgtgcagcacgacaacaagaccgtgcacagcaccgactttttcccacccatcaagaccgatgtgattacaatggaccccaaggacaactgctccaaggacgccaacgataccctgctgctccagctgaccaacaccagcgcctactacatgtacttgttgctgctgctgaagtccgtggtgtacttcgccatcatcacatgctgcctgctgcggagaaccgccttctgctgcaacggcgagaagtctaaacggggcagaaagaaactcctgtatatattcaaacaaccatttatgagaccagtacaaactactcaagaggaagatggctgtagctgccgatttccagaagaagaagaaggaggatgtgaactgagagtgaagttcagcagaagcgccgacgcccctgcctaccagcagggacagaaccaactgtacaacgagctgaacctgggcagacgggaagagtacgacgtgctggacaagcggagaggcagggaccctgagatgggcggaaagccccagcggagaaagaacccccaggaaggactgtataacgaactccagaaagacaagatggccgaagcctacagcgagatcggcatgaagggcgagcggagaagaggcaagggccacgatggcctgtaccagggcctgagcaccgccaccaaggacacctatgacgccctgcacatgcaggccctgcctccaaga

SEQ ID NO: 27871 - DNA, 915 bp, synthetic construct
  source 1..915: mol_type = other DNA
cctcacaccaagcccagcgtgttcgtgatgaagaacggcaccaacgtggcctgcctcgtgaaagagttctaccccaaggacatcaggatcaacctggtgtccagcaagaagatcaccgagttcgaccccgccatcgtgatctcccccagcggcaagtacaacgccgtgaagctggggaagtacgaggacagcaacagcgtgacctgctccgtgcagcacgacaacaagaccgtgcacagcaccgactttcccatcaagaccgatgtgattacaatggaccccaaggacaactgctccaaggacgccaacgataccctgctgctccagctgaccaacaccagcgcctactacatgtacttgttgctgctgctgaagtccgtggtgtacttcgccatcatcacatgctgcctgctgcggagaaccgccttctgctgcaacggcgagaagtctaaacggggcagaaagaaactcctgtatatattcaaacaaccatttatgagaccagtacaaactactcaagaggaagatggctgtagctgccgatttccagaagaagaagaaggaggatgtgaactgagagtgaagttcagcagaagcgccgacgcccctgcctaccagcagggacagaaccaactgtacaacgagctgaacctgggcagacgggaagagtacgacgtgctggacaagcggagaggcagggaccctgagatgggcggaaagccccagcggagaaagaacccccaggaaggactgtataacgaactccagaaagacaagatggccgaagcctacagcgagatcggcatgaagggcgagcggagaagaggcaagggccacgatggcctgtaccagggcctgagcaccgccaccaaggacacctatgacgccctgcacatgcaggccctgcctccaaga

SEQ ID NO: 27872 - DNA, 891 bp, synthetic construct
  source 1..891: mol_type = other DNA
cctcacaccaagcccagcgtgttcgtgatgaagaacggcaccaacgtggcctgcctcgtgaaagagttctaccccaaggacatcaggatcaacctggtgtccagcaagaagatcaccgagttcgaccccgccatcgtgatctcccccagcggcaagtacaacgccgtgaagctggggaagtacgaggacagcaacagcgtgacctgctccgtgcagcacgacaacaagaccgtgcacagcaccgactttatggaccccaaggacaactgctccaaggacgccaacgataccctgctgctccagctgaccaacaccagcgcctactacatgtacttgttgctgctgctgaagtccgtggtgtacttcgccatcatcacatgctgcctgctgcggagaaccgccttctgctgcaacggcgagaagtctaaacggggcagaaagaaactcctgtatatattcaaacaaccatttatgagaccagtacaaactactcaagaggaagatggctgtagctgccgatttccagaagaagaagaaggaggatgtgaactgagagtgaagttcagcagaagcgccgacgcccctgcctaccagcagggacagaaccaactgtacaacgagctgaacctgggcagacgggaagagtacgacgtgctggacaagcggagaggcagggaccctgagatgggcggaaagccccagcggagaaagaacccccaggaaggactgtataacgaactccagaaagacaagatggccgaagcctacagcgagatcggcatgaagggcgagcggagaagaggcaagggccacgatggcctgtaccagggcctgagcaccgccaccaaggacacctatgacgccctgcacatgcaggccctgcctccaaga

SEQ ID NO: 27873 - DNA, 918 bp, synthetic construct; identical to SEQ ID NO: 27193
  source 1..918: mol_type = other DNA

SEQ ID NO: 27874 - DNA, 897 bp, synthetic construct
  source 1..897: mol_type = other DNA
cctcacaccaagcccagcgtgttcgtgatgaagaacggcaccaacgtggcctgcctcgtgaaagagttctaccccaaggacatcaggatcaacctggtgtccagcaagaagatcaccgagttcgaccccgccatcgtgatctcccccagcggcaagtacaacgccgtgaagctggggaagtacgaggacagcaacagcgtgacctgctccgtgcagcacgacaacaagaccgtgcacagcaccgactttgaccacgtgaagcccaaagagacagagaacaccaagcagcccagcaagagctgccacaagcccaaggccatcgtgcacaccgagaaagtgaacatgatgagcctgaccgtgctgggcctgcggatgctgttcgccaaaaccgtggccgtgaacttcctgctgaccgccaagctgttcttcctcaaacggggcagaaagaaactcctgtatatattcaaacaaccatttatgagaccagtacaaactactcaagaggaagatggctgtagctgccgatttccagaagaagaagaaggaggatgtgaactgagagtgaagttcagcagaagcgccgacgcccctgcctaccagcagggacagaaccaactgtacaacgagctgaacctgggcagacgggaagagtacgacgtgctggacaagcggagaggcagggaccctgagatgggcggaaagccccagcggagaaagaacccccaggaaggactgtataacgaactccagaaagacaagatggccgaagcctacagcgagatcggcatgaagggcgagcggagaagaggcaagggccacgatggcctgtaccagggcctgagcaccgccaccaaggacacctatgacgccctgcacatgcaggccctgcctccaaga

SEQ ID NO: 27875 - DNA, 915 bp, synthetic construct
  source 1..915: mol_type = other DNA
cctcacaccaagcccagcgtgttcgtgatgaagaacggcaccaacgtggcctgcctcgtgaaagagttctaccccaaggacatcaggatcaacctggtgtccagcaagaagatcaccgagttcgaccccgccatcgtgatctcccccagcggcaagtacaacgccgtgaagctggggaagtacgaggacagcaacagcgtgacctgctccgtgcagcacgacaacaagaccgtgcacagcaccgactttgaagtgaaaaccgactccaccatccccgaggacacattcttcccaagccccgagagcagctgcgacgtgaagctggtggaaaagagcttcgagacagacaccaacctgaacttccagaacctgagcgtgatcggcttcagaatcctgctgctgaaagtggccggctttaacctgctgatgaccctgcggctgtggtccagcaaacggggcagaaagaaactcctgtatatattcaaacaaccatttatgagaccagtacaaactactcaagaggaagatggctgtagctgccgatttccagaagaagaagaaggaggatgtgaactgagagtgaagttcagcagaagcgccgacgcccctgcctaccagcagggacagaaccaactgtacaacgagctgaacctgggcagacgggaagagtacgacgtgctggacaagcggagaggcagggaccctgagatgggcggaaagccccagcggagaaagaacccccaggaaggactgtataacgaactccagaaagacaagatggccgaagcctacagcgagatcggcatgaagggcgagcggagaagaggcaagggccacgatggcctgtaccagggcctgagcaccgccaccaaggacacctatgacgccctgcacatgcaggccctgcctccaaga

SEQ ID NO: 27876 - DNA, 885 bp, synthetic construct
  source 1..885: mol_type = other DNA
cctcacaccaagcccagcgtgttcgtgatgaagaacggcaccaacgtggcctgcctcgtgaaagagttctaccccaaggacatcaggatcaacctggtgtccagcaagaagatcaccgagttcgaccccgccatcgtgatctcccccagcggcaagtacaacgccgtgaagctggggaagtacgaggacagcaacagcgtgacctgctccgtgcagcacgacaacaagaccgtgcacagcaccgactttgaagtgaaaaccgactccaccgagagcagctgcgacgtgaagctggtggaaaagagcttcgagacagacaccaacctgaacttccagaacctgagcgtgatcggcttcagaatcctgctgctgaaagtggccggctttaacctgctgatgaccctgcggctgtggtccagcaaacggggcagaaagaaactcctgtatatattcaaacaaccatttatgagaccagtacaaactactcaagaggaagatggctgtagctgccgatttccagaagaagaagaaggaggatgtgaactgagagtgaagttcagcagaagcgccgacgcccctgcctaccagcagggacagaaccaactgtacaacgagctgaacctgggcagacgggaagagtacgacgtgctggacaagcggagaggcagggaccctgagatgggcggaaagccccagcggagaaagaacccccaggaaggactgtataacgaactccagaaagacaagatggccgaagcctacagcgagatcggcatgaagggcgagcggagaagaggcaagggccacgatggcctgtaccagggcctgagcaccgccaccaaggacacctatgacgccctgcacatgcaggccctgcctccaaga

SEQ ID NO: 27877 - DNA, 912 bp, synthetic construct
  source 1..912: mol_type = other DNA
cctcacaccaagcccagcgtgttcgtgatgaagaacggcaccaacgtggcctgcctcgtgaaagagttctaccccaaggacatcaggatcaacctggtgtccagcaagaagatcaccgagttcgaccccgccatcgtgatctcccccagcggcaagtacaacgccgtgaagctggggaagtacgaggacagcaacagcgtgacctgctccgtgcagcacgacaacaagaccgtgcacagcaccgactttgaagtgaaaaccgactccacccccgaggacacattcttcccaagccccgagagcagctgcgacgtgaagctggtggaaaagagcttcgagacagacaccaacctgaacttccagaacctgagcgtgatcggcttcagaatcctgctgctgaaagtggccggctttaacctgctgatgaccctgcggctgtggtccagcaaacggggcagaaagaaactcctgtatatattcaaacaaccatttatgagaccagtacaaactactcaagaggaagatggctgtagctgccgatttccagaagaagaagaaggaggatgtgaactgagagtgaagttcagcagaagcgccgacgcccctgcctaccagcagggacagaaccaactgtacaacgagctgaacctgggcagacgggaagagtacgacgtgctggacaagcggagaggcagggaccctgagatgggcggaaagccccagcggagaaagaacccccaggaaggactgtataacgaactccagaaagacaagatggccgaagcctacagcgagatcggcatgaagggcgagcggagaagaggcaagggccacgatggcctgtaccagggcctgagcaccgccaccaaggacacctatgacgccctgcacatgcaggccctgcctccaaga

SEQ ID NO: 27878 - DNA, 894 bp, synthetic construct
  source 1..894: mol_type = other DNA
cctcacaccaagcccagcgtgttcgtgatgaagaacggcaccaacgtggcctgcctcgtgaaagagttctaccccaaggacatcaggatcaacctggtgtccagcaagaagatcaccgagttcgaccccgccatcgtgatctcccccagcggcaagtacaacgccgtgaagctggggaagtacgaggacagcaacagcgtgacctgctccgtgcagcacgacaacaagaccgtgcacagcaccgactttgaagtgaaaaccgactccaccggcagagccgattgcggctttaccagcgagagctaccagcagggcgtgctgagcgccaccatcctgtacgagatcctgctgggcaaggccaccctgtacgccgtgctggtgtctgccctggtgctgatggctatggtcaagcggaaggacagccggggaaaacggggcagaaagaaactcctgtatatattcaaacaaccatttatgagaccagtacaaactactcaagaggaagatggctgtagctgccgatttccagaagaagaagaaggaggatgtgaactgagagtgaagttcagcagaagcgccgacgcccctgcctaccagcagggacagaaccaactgtacaacgagctgaacctgggcagacgggaagagtacgacgtgctggacaagcggagaggcagggaccctgagatgggcggaaagccccagcggagaaagaacccccaggaaggactgtataacgaactccagaaagacaagatggccgaagcctacagcgagatcggcatgaagggcgagcggagaagaggcaagggccacgatggcctgtaccagggcctgagcaccgccaccaaggacacctatgacgccctgcacatgcaggccctgcctccaaga

SEQ ID NO: 27879 - DNA, 888 bp, synthetic construct
  source 1..888: mol_type = other DNA
cctcacaccaagcccagcgtgttcgtgatgaagaacggcaccaacgtggcctgcctcgtgaaagagttctaccccaaggacatcaggatcaacctggtgtccagcaagaagatcaccgagttcgaccccgccatcgtgatctcccccagcggcaagtacaacgccgtgaagctggggaagtacgaggacagcaacagcgtgacctgctccgtgcagcacgacaacaagaccgtgcacagcaccgactttgaagtgaaaaccgactccaccgccgattgcggctttaccagcgagagctaccagcagggcgtgctgagcgccaccatcctgtacgagatcctgctgggcaaggccaccctgtacgccgtgctggtgtctgccctggtgctgatggctatggtcaagcggaaggacagccggggaaaacggggcagaaagaaactcctgtatatattcaaacaaccatttatgagaccagtacaaactactcaagaggaagatggctgtagctgccgatttccagaagaagaagaaggaggatgtgaactgagagtgaagttcagcagaagcgccgacgcccctgcctaccagcagggacagaaccaactgtacaacgagctgaacctgggcagacgggaagagtacgacgtgctggacaagcggagaggcagggaccctgagatgggcggaaagccccagcggagaaagaacccccaggaaggactgtataacgaactccagaaagacaagatggccgaagcctacagcgagatcggcatgaagggcgagcggagaagaggcaagggccacgatggcctgtaccagggcctgagcaccgccaccaaggacacctatgacgccctgcacatgcaggccctgcctccaaga

SEQ ID NO: 27880 - DNA, 918 bp, synthetic construct
  source 1..918: mol_type = other DNA
cctcacaccaagcccagcgtgttcgtgatgaagaacggcaccaacgtggcctgcctcgtgaaagagttctaccccaaggacatcaggatcaacctggtgtccagcaagaagatcaccgagttcgaccccgccatcgtgatctcccccagcggcaagtacaacgccgtgaagctggggaagtacgaggacagcaacagcgtgacctgctccgtgcagcacgacaacaagaccgtgcacagcaccgactttgaagtgaaaaccgactccacccagatcgtgtctgccgaagcctggggcagagccgattgcggctttaccagcgagagctaccagcagggcgtgctgagcgccaccatcctgtacgagatcctgctgggcaaggccaccctgtacgccgtgctggtgtctgccctggtgctgatggctatggtcaagcggaaggacagccggggaaaacggggcagaaagaaactcctgtatatattcaaacaaccatttatgagaccagtacaaactactcaagaggaagatggctgtagctgccgatttccagaagaagaagaaggaggatgtgaactgagagtgaagttcagcagaagcgccgacgcccctgcctaccagcagggacagaaccaactgtacaacgagctgaacctgggcagacgggaagagtacgacgtgctggacaagcggagaggcagggaccctgagatgggcggaaagccccagcggagaaagaacccccaggaaggactgtataacgaactccagaaagacaagatggccgaagcctacagcgagatcggcatgaagggcgagcggagaagaggcaagggccacgatggcctgtaccagggcctgagcaccgccaccaaggacacctatgacgccctgcacatgcaggccctgcctccaaga

SEQ ID NO: 27881 - DNA, 942 bp, synthetic construct
  source 1..942: mol_type = other DNA
cctcacaccaagcccagcgtgttcgtgatgaagaacggcaccaacgtggcctgcctcgtgaaagagttctaccccaaggacatcaggatcaacctggtgtccagcaagaagatcaccgagttcgaccccgccatcgtgatctcccccagcggcaagtacaacgccgtgaagctggggaagtacgaggacagcaacagcgtgacctgctccgtgcagcacgacaacaagaccgtgcacagcaccgactttgaagtgaaaaccgactccaccttcccacccatcaagaccgatgtgattacaatggaccccaaggacaactgctccaaggacgccaacgataccctgctgctccagctgaccaacaccagcgcctactacatgtacttgttgctgctgctgaagtccgtggtgtacttcgccatcatcacatgctgcctgctgcggagaaccgccttctgctgcaacggcgagaagtctaaacggggcagaaagaaactcctgtatatattcaaacaaccatttatgagaccagtacaaactactcaagaggaagatggctgtagctgccgatttccagaagaagaagaaggaggatgtgaactgagagtgaagttcagcagaagcgccgacgcccctgcctaccagcagggacagaaccaactgtacaacgagctgaacctgggcagacgggaagagtacgacgtgctggacaagcggagaggcagggaccctgagatgggcggaaagccccagcggagaaagaacccccaggaaggactgtataacgaactccagaaagacaagatggccgaagcctacagcgagatcggcatgaagggcgagcggagaagaggcaagggccacgatggcctgtaccagggcctgagcaccgccaccaaggacacctatgacgccctgcacatgcaggccctgcctccaaga

SEQ ID NO: 27882 - DNA, 936 bp, synthetic construct
  source 1..936: mol_type = other DNA
cctcacaccaagcccagcgtgttcgtgatgaagaacggcaccaacgtggcctgcctcgtgaaagagttctaccccaaggacatcaggatcaacctggtgtccagcaagaagatcaccgagttcgaccccgccatcgtgatctcccccagcggcaagtacaacgccgtgaagctggggaagtacgaggacagcaacagcgtgacctgctccgtgcagcacgacaacaagaccgtgcacagcaccgactttgaagtgaaaaccgactccacccccatcaagaccgatgtgattacaatggaccccaaggacaactgctccaaggacgccaacgataccctgctgctccagctgaccaacaccagcgcctactacatgtacttgttgctgctgctgaagtccgtggtgtacttcgccatcatcacatgctgcctgctgcggagaaccgccttctgctgcaacggcgagaagtctaaacggggcagaaagaaactcctgtatatattcaaacaaccatttatgagaccagtacaaactactcaagaggaagatggctgtagctgccgatttccagaagaagaagaaggaggatgtgaactgagagtgaagttcagcagaagcgccgacgcccctgcctaccagcagggacagaaccaactgtacaacgagctgaacctgggcagacgggaagagtacgacgtgctggacaagcggagaggcagggaccctgagatgggcggaaagccccagcggagaaagaacccccaggaaggactgtataacgaactccagaaagacaagatggccgaagcctacagcgagatcggcatgaagggcgagcggagaagaggcaagggccacgatggcctgtaccagggcctgagcaccgccaccaaggacacctatgacgccctgcacatgcaggccctgcctccaaga

SEQ ID NO: 27883 - DNA, 912 bp, synthetic construct
  source 1..912: mol_type = other DNA
cctcacaccaagcccagcgtgttcgtgatgaagaacggcaccaacgtggcctgcctcgtgaaagagttctaccccaaggacatcaggatcaacctggtgtccagcaagaagatcaccgagttcgaccccgccatcgtgatctcccccagcggcaagtacaacgccgtgaagctggggaagtacgaggacagcaacagcgtgacctgctccgtgcagcacgacaacaagaccgtgcacagcaccgactttgaagtgaaaaccgactccaccatggaccccaaggacaactgctccaaggacgccaacgataccctgctgctccagctgaccaacaccagcgcctactacatgtacttgttgctgctgctgaagtccgtggtgtacttcgccatcatcacatgctgcctgctgcggagaaccgccttctgctgcaacggcgagaagtctaaacggggcagaaagaaactcctgtatatattcaaacaaccatttatgagaccagtacaaactactcaagaggaagatggctgtagctgccgatttccagaagaagaagaaggaggatgtgaactgagagtgaagttcagcagaagcgccgacgcccctgcctaccagcagggacagaaccaactgtacaacgagctgaacctgggcagacgggaagagtacgacgtgctggacaagcggagaggcagggaccctgagatgggcggaaagccccagcggagaaagaacccccaggaaggactgtataacgaactccagaaagacaagatggccgaagcctacagcgagatcggcatgaagggcgagcggagaagaggcaagggccacgatggcctgtaccagggcctgagcaccgccaccaaggacacctatgacgccctgcacatgcaggccctgcctccaaga

SEQ ID NO: 27884 - DNA, 936 bp, synthetic construct; identical to SEQ ID NO: 27882
  source 1..936: mol_type = other DNA

SEQ ID NO: 27885 - DNA, 894 bp, synthetic construct
  source 1..894: mol_type = other DNA
cctcacaccaagcccagcgtgttcgtgatgaagaacggcaccaacgtggcctgcctcgtgaaagagttctaccccaaggacatcaggatcaacctggtgtccagcaagaagatcaccgagttcgaccccgccatcgtgatctcccccagcggcaagtacaacgccgtgaagctggggaagtacgaggacagcaacagcgtgacctgctccgtgcagcacgacaacaagaccgtgcacagcaccgactttgaagtgaaaaccgactccacctgctccaaggacgccaacgataccctgctgctccagctgaccaacaccagcgcctactacatgtacttgttgctgctgctgaagtccgtggtgtacttcgccatcatcacatgctgcctgctgcggagaaccgccttctgctgcaacggcgagaagtctaaacggggcagaaagaaactcctgtatatattcaaacaaccatttatgagaccagtacaaactactcaagaggaagatggctgtagctgccgatttccagaagaagaagaaggaggatgtgaactgagagtgaagttcagcagaagcgccgacgcccctgcctaccagcagggacagaaccaactgtacaacgagctgaacctgggcagacgggaagagtacgacgtgctggacaagcggagaggcagggaccctgagatgggcggaaagccccagcggagaaagaacccccaggaaggactgtataacgaactccagaaagacaagatggccgaagcctacagcgagatcggcatgaagggcgagcggagaagaggcaagggccacgatggcctgtaccagggcctgagcaccgccaccaaggacacctatgacgccctgcacatgcaggccctgcctccaaga

SEQ ID NO: 27886 - DNA, 894 bp, synthetic construct; identical to SEQ ID NO: 27864
  source 1..894: mol_type = other DNA

SEQ ID NO: 27887 - DNA, 864 bp, synthetic construct; identical to SEQ ID NO: 27865
  source 1..864: mol_type = other DNA

SEQ ID NO: 27888 - DNA, 891 bp, synthetic construct; identical to SEQ ID NO: 27866
  source 1..891: mol_type = other DNA

SEQ ID NO: 27889 - DNA, 873 bp, synthetic construct; identical to SEQ ID NO: 27867
  source 1..873: mol_type = other DNA

SEQ ID NO: 27890 - DNA, 867 bp, synthetic construct; identical to SEQ ID NO: 27868
  source 1..867: mol_type = other DNA

SEQ ID NO: 27891 - DNA, 897 bp, synthetic construct; identical to SEQ ID NO: 27869
  source 1..897: mol_type = other DNA

SEQ ID NO: 27892 - DNA, 921 bp, synthetic construct; identical to SEQ ID NO: 27870
  source 1..921: mol_type = other DNA

SEQ ID NO: 27893 - DNA, 915 bp, synthetic construct; identical to SEQ ID NO: 27871
  source 1..915: mol_type = other DNA

SEQ ID NO: 27894 - DNA, 891 bp, synthetic construct; identical to SEQ ID NO: 27872
  source 1..891: mol_type = other DNA

SEQ ID NO: 27895 - DNA, 915 bp, synthetic construct; identical to SEQ ID NO: 27871
  source 1..915: mol_type = other DNA

SEQ ID NO: 27896 - DNA, 873 bp, synthetic construct
  source 1..873: mol_type = other DNA
cctcacaccaagcccagcgtgttcgtgatgaagaacggcaccaacgtggcctgcctcgtgaaagagttctaccccaaggacatcaggatcaacctggtgtccagcaagaagatcaccgagttcgaccccgccatcgtgatctcccccagcggcaagtacaacgccgtgaagctggggaagtacgaggacagcaacagcgtgacctgctccgtgcagcacgacaacaagaccgtgcacagcaccgacttttgctccaaggacgccaacgataccctgctgctccagctgaccaacaccagcgcctactacatgtacttgttgctgctgctgaagtccgtggtgtacttcgccatcatcacatgctgcctgctgcggagaaccgccttctgctgcaacggcgagaagtctaaacggggcagaaagaaactcctgtatatattcaaacaaccatttatgagaccagtacaaactactcaagaggaagatggctgtagctgccgatttccagaagaagaagaaggaggatgtgaactgagagtgaagttcagcagaagcgccgacgcccctgcctaccagcagggacagaaccaactgtacaacgagctgaacctgggcagacgggaagagtacgacgtgctggacaagcggagaggcagggaccctgagatgggcggaaagccccagcggagaaagaacccccaggaaggactgtataacgaactccagaaagacaagatggccgaagcctacagcgagatcggcatgaagggcgagcggagaagaggcaagggccacgatggcctgtaccagggcctgagcaccgccaccaaggacacctatgacgccctgcacatgcaggccctgcctccaaga

SEQ ID NO: 27897 - DNA, 915 bp, synthetic construct; identical to SEQ ID NO: 27875
  source 1..915: mol_type = other DNA

SEQ ID NO: 27898 - DNA, 885 bp, synthetic construct; identical to SEQ ID NO: 27876
  source 1..885: mol_type = other DNA

SEQ ID NO: 27899 - DNA, 912 bp, synthetic construct; identical to SEQ ID NO: 27877
  source 1..912: mol_type = other DNA

SEQ ID NO: 27900 - DNA, 894 bp, synthetic construct; identical to SEQ ID NO: 27878
  source 1..894: mol_type = other DNA

SEQ ID NO: 27901 - DNA, 888 bp, synthetic construct; identical to SEQ ID NO: 27879
  source 1..888: mol_type = other DNA

SEQ ID NO: 27902 - DNA, 918 bp, synthetic construct; identical to SEQ ID NO: 27880
  source 1..918: mol_type = other DNA

SEQ ID NO: 27903 - DNA, 942 bp, synthetic construct; identical to SEQ ID NO: 27881
  source 1..942: mol_type = other DNA

SEQ ID NO: 27904 - DNA, 936 bp, synthetic construct; identical to SEQ ID NO: 27882
  source 1..936: mol_type = other DNA

SEQ ID NO: 27905 - DNA, 912 bp, synthetic construct; identical to SEQ ID NO: 27883
  source 1..912: mol_type = other DNA

SEQ ID NO: 27906 - DNA, 936 bp, synthetic construct; identical to SEQ ID NO: 27882
  source 1..936: mol_type = other DNA

SEQ ID NO: 27907 - DNA, 894 bp, synthetic construct; identical to SEQ ID NO: 27885
  source 1..894: mol_type = other DNA

SEQ ID NO: 27908 - DNA, 885 bp, synthetic construct
  source 1..885: mol_type = other DNA
atccagaaccctgatcctgccgtgtaccagctgcgggatagcaagagcagcgacaagagcgtgtgtctgttcaccgacttcgacagccagaccaacgtgtcccagagcaaggactccgacgtgtacatcaccgataagtgcgtgctggacatgcggagcatggacttcaagagcaactccgccgtggcctggtccaacaagtccgatttcgcctgcgccaacgccttcaacaacagcattatccccgaggacacattcttcccaagccccgagagcagctgcgacgtgaagctggtggaaaagagcttcgagacagacaccaacctgaacttccagaacctgagcgtgatcggcctgcggatgctgttcgccaaaaccgtggccgtgaacttcctgctgaccgccaagctgttcttcctcaaacggggcagaaagaaactcctgtatatattcaaacaaccatttatgagaccagtacaaactactcaagaggaagatggctgtagctgccgatttccagaagaagaagaaggaggatgtgaactgagagtgaagttcagcagaagcgccgacgcccctgcctaccagcagggacagaaccaactgtacaacgagctgaacctgggcagacgggaagagtacgacgtgctggacaagcggagaggcagggaccctgagatgggcggaaagccccagcggagaaagaacccccaggaaggactgtataacgaactccagaaagacaagatggccgaagcctacagcgagatcggcatgaagggcgagcggagaagaggcaagggccacgatggcctgtaccagggcctgagcaccgccaccaaggacacctatgacgccctgcacatgcaggccctgcctccaaga

SEQ ID NO: 27909 - DNA, 885 bp, synthetic construct
  source 1..885: mol_type = other DNA
atccagaaccctgatcctgccgtgtaccagctgcgggatagcaagagcagcgacaagagcgtgtgtctgttcaccgacttcgacagccagaccaacgtgtcccagagcaaggactccgacgtgtacatcaccgataagtgcgtgctggacatgcggagcatggacttcaagagcaactccgccgtggcctggtccaacaagtccgatttcgcctgcgccaacgccttcaacaacagcattatccccgaggacacattcttcccaagccccgagagcagctgcgacgtgaagctggtggaaaagagcttcgagacagacaccaacctgaacttccagaacctgagcgtgctgggcctgcggatgctgttcgccaaaaccgtggccgtgaacttcctgctgaccgccaagctgttcttcctcaaacggggcagaaagaaactcctgtatatattcaaacaaccatttatgagaccagtacaaactactcaagaggaagatggctgtagctgccgatttccagaagaagaagaaggaggatgtgaactgagagtgaagttcagcagaagcgccgacgcccctgcctaccagcagggacagaaccaactgtacaacgagctgaacctgggcagacgggaagagtacgacgtgctggacaagcggagaggcagggaccctgagatgggcggaaagccccagcggagaaagaacccccaggaaggactgtataacgaactccagaaagacaagatggccgaagcctacagcgagatcggcatgaagggcgagcggagaagaggcaagggccacgatggcctgtaccagggcctgagcaccgccaccaaggacacctatgacgccctgcacatgcaggccctgcctccaaga

SEQ ID NO: 27910 - DNA, 885 bp, synthetic construct; identical to SEQ ID NO: 27909
  source 1..885: mol_type = other DNA

SEQ ID NO: 27911 - DNA, 924 bp, synthetic construct
  source 1..924: mol_type = other DNA
agccagcctcacaccaagcccagcgtgttcgtgatgaagaacggcaccaacgtggcctgcctcgtgaaagagttctaccccaaggacatcaggatcaacctggtgtccagcaagaagatcaccgagttcgaccccgccatcgtgatctcccccagcggcaagtacaacgccgtgaagctggggaagtacgaggacagcaacagcgtgacctgctccgtgcagcacgacaacaagaccgtgcacagcaccgactttgaagtgaaaaccgactccaccgaccacgtgaagcccaaagagacagagaacaccaagcagcccagcaagagctgccacaagcccaaggccatcgtgcacaccgagaaagtgaacatgatgagcctgaccgtgctgggcttcagaatcctgctgctgaaagtggccggctttaacctgctgatgaccctgcggctgtggtccagcaaacggggcagaaagaaactcctgtatatattcaaacaaccatttatgagaccagtacaaactactcaagaggaagatggctgtagctgccgatttccagaagaagaagaaggaggatgtgaactgagagtgaagttcagcagaagcgccgacgcccctgcctaccagcagggacagaaccaactgtacaacgagctgaacctgggcagacgggaagagtacgacgtgctggacaagcggagaggcagggaccctgagatgggcggaaagccccagcggagaaagaacccccaggaaggactgtataacgaactccagaaagacaagatggccgaagcctacagcgagatcggcatgaagggcgagcggagaagaggcaagggccacgatggcctgtaccagggcctgagcaccgccaccaaggacacctatgacgccctgcacatgcaggccctgcctccaaga

SEQ ID NO: 27912 - DNA, 924 bp, synthetic construct
  source 1..924: mol_type = other DNA
agccagcctcacaccaagcccagcgtgttcgtgatgaagaacggcaccaacgtggcctgcctcgtgaaagagttctaccccaaggacatcaggatcaacctggtgtccagcaagaagatcaccgagttcgaccccgccatcgtgatctcccccagcggcaagtacaacgccgtgaagctggggaagtacgaggacagcaacagcgtgacctgctccgtgcagcacgacaacaagaccgtgcacagcaccgactttgaagtgaaaaccgactccaccgaccacgtgaagcccaaagagacagagaacaccaagcagcccagcaagagctgccacaagcccaaggccatcgtgcacaccgagaaagtgaacatgatgagcctgaccgtgatcggcttcagaatcctgctgctgaaagtggccggctttaacctgctgatgaccctgcggctgtggtccagcaaacggggcagaaagaaactcctgtatatattcaaacaaccatttatgagaccagtacaaactactcaagaggaagatggctgtagctgccgatttccagaagaagaagaaggaggatgtgaactgagagtgaagttcagcagaagcgccgacgcccctgcctaccagcagggacagaaccaactgtacaacgagctgaacctgggcagacgggaagagtacgacgtgctggacaagcggagaggcagggaccctgagatgggcggaaagccccagcggagaaagaacccccaggaaggactgtataacgaactccagaaagacaagatggccgaagcctacagcgagatcggcatgaagggcgagcggagaagaggcaagggccacgatggcctgtaccagggcctgagcaccgccaccaaggacacctatgacgccctgcacatgcaggccctgcctccaaga

SEQ ID NO: 27913 - DNA, 1005 bp, synthetic construct
  source 1..1005: mol_type = other DNA
gaggacctgaagaacgtgttcccacctgaggtggccgtgttcgagcctagcgaggccgagatcagccacacccagaaagccaccctcgtgtgcctggctaccggcttctaccccgaccatgtggaactgtcttggtgggtcaacggcaaagaggtgcacagcggcgtgtgtaccgacccccagccactgaaagaacagcccgccctgaacgacagccggtactgcctgagcagcagactgagagtgtccgccaccttctggcagaacccccggaaccacttcagatgccaggtgcagttctacggcctgagcgagaacgacgagtggacccaggacagagccaagcccgtgacccagatcgtgtctgccgaagcctggggcagagccgattgcggctttaccagcgagagctaccagcagggcgtgctgagcgccaccatcctgtacttgttgctgctgctgaagtccgtggtgtacttcgccatcatcacatgctgcctgctgcggagaaccgccttctgctgcaacggcgagaagtctaaacggggcagaaagaaactcctgtatatattcaaacaaccatttatgagaccagtacaaactactcaagaggaagatggctgtagctgccgatttccagaagaagaagaaggaggatgtgaactgagagtgaagttcagcagaagcgccgacgcccctgcctaccagcagggacagaaccaactgtacaacgagctgaacctgggcagacgggaagagtacgacgtgctggacaagcggagaggcagggaccctgagatgggcggaaagccccagcggagaaagaacccccaggaaggactgtataacgaactccagaaagacaagatggccgaagcctacagcgagatcggcatgaagggcgagcggagaagaggcaagggccacgatggcctgtaccagggcctgagcaccgccaccaaggacacctatgacgccctgcacatgcaggccctgcctccaaga

SEQ ID NO: 27914 - DNA, 1005 bp, synthetic construct
  source 1..1005: mol_type = other DNA
gaggacctgaagaacgtgttcccacctgaggtggccgtgttcgagcctagcgaggccgagatcagccacacccagaaagccaccctcgtgtgcctggctaccggcttctaccccgaccatgtggaactgtcttggtgggtcaacggcaaagaggtgcacagcggcgtgtgtaccgacccccagccactgaaagaacagcccgccctgaacgacagccggtactgcctgagcagcagactgagagtgtccgccaccttctggcagaacccccggaaccacttcagatgccaggtgcagttctacggcctgagcgagaacgacgagtggacccaggacagagccaagcccgtgacccagatcgtgtctgccgaagcctggggcagagccgattgcggctttaccagcgagagctaccagcagggcgtgctgagcgcctactacatgtacttgttgctgctgctgaagtccgtggtgtacttcgccatcatcacatgctgcctgctgcggagaaccgccttctgctgcaacggcgagaagtctaaacggggcagaaagaaactcctgtatatattcaaacaaccatttatgagaccagtacaaactactcaagaggaagatggctgtagctgccgatttccagaagaagaagaaggaggatgtgaactgagagtgaagttcagcagaagcgccgacgcccctgcctaccagcagggacagaaccaactgtacaacgagctgaacctgggcagacgggaagagtacgacgtgctggacaagcggagaggcagggaccctgagatgggcggaaagccccagcggagaaagaacccccaggaaggactgtataacgaactccagaaagacaagatggccgaagcctacagcgagatcggcatgaagggcgagcggagaagaggcaagggccacgatggcctgtaccagggcctgagcaccgccaccaaggacacctatgacgccctgcacatgcaggccctgcctccaaga

SEQ ID NO: 27915 - DNA, 981 bp, synthetic construct
  source 1..981: mol_type = other DNA
gacaagcagctggacgccgacgtgtcccccaagcctaccatcttcctgccctctatcgccgagacaaagctccagaaggccggcacctacctgtgcctgctggaaaagttcttcccagatgtgattaagatccactggcaggaaaagaagtccaacaccatcctgggcagccaggaaggcaacaccatgaagaccaacgacacctacatgaagttcagctggctgaccgtgcccgagaagtccctggacaaagaacacagatgcatcgtgcggcacgaaaacaacaagaacggcgtggaccaggaaatcatcttcccacccatcaagaccgatgtgattacaatggaccccaaggacaactgctccaaggacgccaacgataccctgctgctccagctgaccaacaccagcgcctactacatgtacgagatcctgctgggcaaggccaccctgtacgccgtgctggtgtctgccctggtgctgatggctatggtcaagcggaaggacagccggggaaaacggggcagaaagaaactcctgtatatattcaaacaaccatttatgagaccagtacaaactactcaagaggaagatggctgtagctgccgatttccagaagaagaagaaggaggatgtgaactgagagtgaagttcagcagaagcgccgacgcccctgcctaccagcagggacagaaccaactgtacaacgagctgaacctgggcagacgggaagagtacgacgtgctggacaagcggagaggcagggaccctgagatgggcggaaagccccagcggagaaagaacccccaggaaggactgtataacgaactccagaaagacaagatggccgaagcctacagcgagatcggcatgaagggcgagcggagaagaggcaagggccacgatggcctgtaccagggcctgagcaccgccaccaaggacacctatgacgccctgcacatgcaggccctgcctccaaga

SEQ ID NO: 27916 - DNA, 981 bp, synthetic construct
  source 1..981: mol_type = other DNA
gacaagcagctggacgccgacgtgtcccccaagcctaccatcttcctgccctctatcgccgagacaaagctccagaaggccggcacctacctgtgcctgctggaaaagttcttcccagatgtgattaagatccactggcaggaaaagaagtccaacaccatcctgggcagccaggaaggcaacaccatgaagaccaacgacacctacatgaagttcagctggctgaccgtgcccgagaagtccctggacaaagaacacagatgcatcgtgcggcacgaaaacaacaagaacggcgtggaccaggaaatcatcttcccacccatcaagaccgatgtgattacaatggaccccaaggacaactgctccaaggacgccaacgataccctgctgctccagctgaccaacaccagcgccaccatcctgtacgagatcctgctgggcaaggccaccctgtacgccgtgctggtgtctgccctggtgctgatggctatggtcaagcggaaggacagccggggaaaacggggcagaaagaaactcctgtatatattcaaacaaccatttatgagaccagtacaaactactcaagaggaagatggctgtagctgccgatttccagaagaagaagaaggaggatgtgaactgagagtgaagttcagcagaagcgccgacgcccctgcctaccagcagggacagaaccaactgtacaacgagctgaacctgggcagacgggaagagtacgacgtgctggacaagcggagaggcagggaccctgagatgggcggaaagccccagcggagaaagaacccccaggaaggactgtataacgaactccagaaagacaagatggccgaagcctacagcgagatcggcatgaagggcgagcggagaagaggcaagggccacgatggcctgtaccagggcctgagcaccgccaccaaggacacctatgacgccctgcacatgcaggccctgcctccaaga

SEQ ID NO: 27917 - DNA, 1002 bp, synthetic construct
  source 1..1002: mol_type = other DNA
gaggacctgaagaacgtgttcccacctgaggtggccgtgttcgagcctagcgaggccgagatcagccacacccagaaagccaccctcgtgtgcctggctaccggcttctaccccgaccatgtggaactgtcttggtgggtcaacggcaaagaggtgcacagcggcgtgtgtaccgacccccagccactgaaagaacagcccgccctgaacgacagccggtactgcctgagcagcagactgagagtgtccgccaccttctggcagaacccccggaaccacttcagatgccaggtgcagttctacggcctgagcgagaacgacgagtggacccaggacagagccaagcccgtgacccagatcgtgtctgccgaagcctggggcagagccgatagcggctttaccagcgagagctaccagcagggcgtgctgagcgccaccatcctgtacgagatcctgctgggcaaggccaccctgtacgccgtgctggtgtctgccctggtgctgatggctatggtcaagcggaaggacagccggggaaaacggggcagaaagaaactcctgtatatattcaaacaaccatttatgagaccagtacaaactactcaagaggaagatggctgtagctgccgatttccagaagaagaagaaggaggatgtgaactgagagtgaagttcagcagaagcgccgacgcccctgcctaccagcagggacagaaccaactgtacaacgagctgaacctgggcagacgggaagagtacgacgtgctggacaagcggagaggcagggaccctgagatgggcggaaagccccagcggagaaagaacccccaggaaggactgtataacgaactccagaaagacaagatggccgaagcctacagcgagatcggcatgaagggcgagcggagaagaggcaagggccacgatggcctgtaccagggcctgagcaccgccaccaaggacacctatgacgccctgcacatgcaggccctgcctccaaga

SEQ ID NO: 27918 - DNA, 885 bp, synthetic construct
  source 1..885: mol_type = other DNA
atccagaaccctgatcctgccgtgtaccagctgcgggatagcaagagcagcgacaagagcgtgtgtctgttcaccgacttcgacagccagaccaacgtgtcccagagcaaggactccgacgtgtacatcaccgataagtgcgtgctggacatgcggagcatggacttcaagagcaactccgccgtggcctggtccaacaagtccgatttcgcctgcgccaacgccttcaacaacagcattatccccgaggacacattcttcccaagccccgagagcagcagcgacgtgaagctggtggaaaagagcttcgagacagacaccaacctgaacttccagaacctgagcgtgatcggcttcagaatcctgctgctgaaagtggccggctttaacctgctgatgaccctgcggctgtggtccagcaaacggggcagaaagaaactcctgtatatattcaaacaaccatttatgagaccagtacaaactactcaagaggaagatggctgtagctgccgatttccagaagaagaagaaggaggatgtgaactgagagtgaagttcagcagaagcgccgacgcccctgcctaccagcagggacagaaccaactgtacaacgagctgaacctgggcagacgggaagagtacgacgtgctggacaagcggagaggcagggaccctgagatgggcggaaagccccagcggagaaagaacccccaggaaggactgtataacgaactccagaaagacaagatggccgaagcctacagcgagatcggcatgaagggcgagcggagaagaggcaagggccacgatggcctgtaccagggcctgagcaccgccaccaaggacacctatgacgccctgcacatgcaggccctgcctccaaga

SEQ ID NO: 27919 - DNA, 1002 bp, synthetic construct
  source 1..1002: mol_type = other DNA
gaggacctgaagaacgtgttcccacctgaggtggccgtgttcgagcctagcgaggccgagatcagccacacccagaaagccaccctcgtgtgcctggctaccggcttctaccccgaccatgtggaactgtcttggtgggtcaacggcaaagaggtgcacagcggcgtgtgtaccgacccccagccactgaaagaacagcccgccctgaacgacagccggtactgcctgagcagcagactgagagtgtccgccaccttctggcagaacccccggaaccacttcagatgccaggtgcagttctacggcctgagcgagaacgacgagtggacccaggacagagccaagcccgtgacccagatcgtgtctgccgaagcctggggcagagccgatggcggctttaccagcgagagctaccagcagggcgtgctgagcgccaccatcctgtacgagatcctgctgggcaaggccaccctgtacgccgtgctggtgtctgccctggtgctgatggctatggtcaagcggaaggacagccggggaaaacggggcagaaagaaactcctgtatatattcaaacaaccatttatgagaccagtacaaactactcaagaggaagatggctgtagctgccgatttccagaagaagaagaaggaggatgtgaactgagagtgaagttcagcagaagcgccgacgcccctgcctaccagcagggacagaaccaactgtacaacgagctgaacctgggcagacgggaagagtacgacgtgctggacaagcggagaggcagggaccctgagatgggcggaaagccccagcggagaaagaacccccaggaaggactgtataacgaactccagaaagacaagatggccgaagcctacagcgagatcggcatgaagggcgagcggagaagaggcaagggccacgatggcctgtaccagggcctgagcaccgccaccaaggacacctatgacgccctgcacatgcaggccctgcctccaaga

SEQ ID NO: 27920 - DNA, 885 bp, synthetic construct
  source 1..885: mol_type = other DNA
atccagaaccctgatcctgccgtgtaccagctgcgggatagcaagagcagcgacaagagcgtgtgtctgttcaccgacttcgacagccagaccaacgtgtcccagagcaaggactccgacgtgtacatcaccgataagtgcgtgctggacatgcggagcatggacttcaagagcaactccgccgtggcctggtccaacaagtccgatttcgcctgcgccaacgccttcaacaacagcattatccccgaggacacattcttcccaagccccgagagcagccgggacgtgaagctggtggaaaagagcttcgagacagacaccaacctgaacttccagaacctgagcgtgatcggcttcagaatcctgctgctgaaagtggccggctttaacctgctgatgaccctgcggctgtggtccagcaaacggggcagaaagaaactcctgtatatattcaaacaaccatttatgagaccagtacaaactactcaagaggaagatggctgtagctgccgatttccagaagaagaagaaggaggatgtgaactgagagtgaagttcagcagaagcgccgacgcccctgcctaccagcagggacagaaccaactgtacaacgagctgaacctgggcagacgggaagagtacgacgtgctggacaagcggagaggcagggaccctgagatgggcggaaagccccagcggagaaagaacccccaggaaggactgtataacgaactccagaaagacaagatggccgaagcctacagcgagatcggcatgaagggcgagcggagaagaggcaagggccacgatggcctgtaccagggcctgagcaccgccaccaaggacacctatgacgccctgcacatgcaggccctgcctccaaga

SEQ ID NO: 27921 - DNA, 1848 bp, synthetic construct
  source 1..1848: mol_type = other DNA
atggccttaccagtgaccgccttgctcctgccgctggccttgctgctccacgccgccaggccggacatccagatgacacagagccctagcagcctgtctgccagcgtgggagacagagtgaccatcacatgcaaggccagccaggatgtgggcacagccgtggattggtatcagcagaagcctggcaaggcccctaagctgctgatctactgggccagcacaagacacacaggcgtgcccagcagattttctggcagcggctctggcaccgacttcaccctgacaatatccagcctccagcctgaggacttcgccacctactactgccagcagtacaacagctaccctctgaccttcggccagggcaccaaggtggaaatcaaaagactcgaggacctgaagaacgtgttcccacctgaggtggccgtgttcgagcctagcgaggccgagatcagccacacccagaaagccaccctcgtgtgcctggctaccggcttctaccccgaccatgtggaactgtcttggtgggtcaacggcaaagaggtgcacagcggcgtgtgtaccgacccccagccactgaaagaacagcccgccctgaacgacagccggtactgcctgagcagcagactgagagtgtccgccaccttctggcagaacccccggaaccacttcagatgccaggtgcagttctacggcctgagcgagaacgacgagtggacccaggacagagccaagcccgtgacccagatcgtgtctgccgaagcctggggcagagccgattgcggctttaccagcgagagctaccagcagggcgtgctgagcgccaccatcctgtacgagatcctgctgggcaaggccaccctgtacgccgtgctggtgtctgccctggtgctgatggctatggtcaagcggaaggacagccggggaagggccaagcgatctggatctggagcaacaaacttctcactactcaaacaagcaggtgacgtggaggagaatcccgggcctactagtatggactggatttggcgcatccttttccttgtcggcgctgctaccggcgcgcattccttcgaagaagtgcagctggttgaatcaggtggcggcctggttcaacctggcggatctctgagactgagctgtgccgccagcggctacacctttaccgagtacacaatccactgggtccgacaggcccctggcaaaggacttgagtgggtcgccaacatcaaccccaacaatggcggcaccacctacaaccagaagttcgaggacagattcaccatcagccgggacaacagcaagaacaccctgtacctccagatgaactccctgagagccgaggacaccgccgtgtactattgtgccagaggctggaacttcgactactggggccagggaacactggtcaccgttagctctacgcgtatccagaaccctgatcctgccgtgtaccagctgcgggatagcaagagcagcgacaagagcgtgtgtctgttcaccgacttcgacagccagaccaacgtgtcccagagcaaggactccgacgtgtacatcaccgataagtgcgtgctggacatgcggagcatggacttcaagagcaactccgccgtggcctggtccaacaagtccgatttcgcctgcgccaacgccttcaacaacagcattatccccgaggacacattcttcccaagccccgagagcagctgcgacgtgaagctggtggaaaagagcttcgagacagacaccaacctgaacttccagaacctgagcgtgatcggcttcagaatcctgctgctgaaagtggccggctttaacctgctgatgaccctgcggctgtggtccagc

SEQ ID NO: 27922 - DNA, 2205 bp, synthetic construct
  source 1..2205: mol_type = other DNA
atggccttaccagtgaccgccttgctcctgccgctggccttgctgctccacgccgccaggccggacatccagatgacacagagccctagcagcctgtctgccagcgtgggagacagagtgaccatcacatgcaaggccagcgaccacatcaacaactggctggcctggtatcagcagaagcctggacaggcccctaagctgctgatctacggcgctaccacactggaaacaggcgtgcccagcagattttctggcagcggctctggcaccgactacaccctgacaatatccagcctccagcctgaggacttcgccacctactactgtcagcagagctggaacaccccttggacattcggccagggcaccaagctggaaatcaagagactcgaggacctgaagaacgtgttcccacctgaggtggccgtgttcgagcctagcgaggccgagatcagccacacccagaaagccaccctcgtgtgcctggctaccggcttctaccccgaccatgtggaactgtcttggtgggtcaacggcaaagaggtgcacagcggcgtgtgtaccgacccccagccactgaaagaacagcccgccctgaacgacagccggtactgcctgagcagcagactgagagtgtccgccaccttctggcagaacccccggaaccacttcagatgccaggtgcagttctacggcctgagcgagaacgacgagtggacccaggacagagccaagcccgtgacccagatcgtgtctgccgaagcctggggcagagccgattgcggctttaccagcgagagctaccagcagggcgtgctgagcgccaccatcctgtacgagatcctgctgggcaaggccaccctgtacgccgtgctggtgtctgccctggtgctgatggctatggtcaagcggaaggacagccggggacgggttaagttttccagatccgcagacgcacccgcttaccaacaagggcagaaccaactctacaatgaacttaatttggggcggagggaagagtacgacgttctggacaaaaggaggggacgagatcccgagatgggcggaaagcctcagcgaaggaagaatccgcaagaggggctttataacgaactccagaaagataaaatggcagaagcctatagtgagattgggatgaagggagaaaggaggaggggtaaaggtcacgatgggttgtaccaaggattgagcacagccactaaagatacctatgatgcgctccacatgcaggccctgccgccaagaagggccaagcgatctggatctggagcaacaaacttctcactactcaaacaagcaggtgacgtggaggagaatcccgggcctactagtatggactggatttggcgcatccttttccttgtcggcgctgctaccggcgcgcattccttcgaacaagttcagcttcaacagcctggcgctgagctggtcaaacctggcgcttctgtgaagatgagctgcaaagccagcggctacgccttcagcagctactggatcaactggatgaagcagaaacccggccagggactcgaatggatcggccaaatctatcccggcgacggcgacaccaactacaacggcaagttcaagggcagagccacactgaccgccgatacctctagcagcacagcctacatgcagctgagcagcctgaccagcgaagatagcgccgtgtacttctgtgcccggtccatcacaacagtcgtgggctgcgctatggactattggggccagggaacaagcgtgaccgtgtctagtacgcgtatccagaaccctgatcctgccgtgtaccagctgcgggatagcaagagcagcgacaagagcgtgtgtctgttcaccgacttcgacagccagaccaacgtgtcccagagcaaggactccgacgtgtacatcaccgataagtgcgtgctggacatgcggagcatggacttcaagagcaactccgccgtggcctggtccaacaagtccgatttcgcctgcgccaacgccttcaacaacagcattatccccgaggacacattcttcccaagccccgagagcagctgcgacgtgaagctggtggaaaagagcttcgagacagacaccaacctgaacttccagaacctgagcgtgatcggcttcagaatcctgctgctgaaagtggccggctttaacctgctgatgaccctgcggctgtggtccagc

SEQ ID NO: 27923 - DNA, 2328 bp, synthetic construct
  source 1..2328: mol_type = other DNA
atggccttaccagtgaccgccttgctcctgccgctggccttgctgctccacgccgccaggccggacatccagatgacacagagccctagcagcctgtctgccagcgtgggagacagagtgaccatcacatgcaaggccagcgaccacatcaacaactggctggcctggtatcagcagaagcctggacaggcccctaagctgctgatctacggcgctaccacactggaaacaggcgtgcccagcagattttctggcagcggctctggcaccgactacaccctgacaatatccagcctccagcctgaggacttcgccacctactactgtcagcagagctggaacaccccttggacattcggccagggcaccaagctggaaatcaagagactcgaggacctgaagaacgtgttcccacctgaggtggccgtgttcgagcctagcgaggccgagatcagccacacccagaaagccaccctcgtgtgcctggctaccggcttctaccccgaccatgtggaactgtcttggtgggtcaacggcaaagaggtgcacagcggcgtgtgtaccgacccccagccactgaaagaacagcccgccctgaacgacagccggtactgcctgagcagcagactgagagtgtccgccaccttctggcagaacccccggaaccacttcagatgccaggtgcagttctacggcctgagcgagaacgacgagtggacccaggacagagccaagcccgtgacccagatcgtgtctgccgaagcctggggcagagccgattgcggctttaccagcgagagctaccagcagggcgtgctgagcgccaccatcctgtacgagatcctgctgggcaaggccaccctgtacgccgtgctggtgtctgccctggtgctgatggctatggtcaagcggaaggacagccggggaaggagtaagaggagcaggctcctgcacagtgactacatgaacatgactccacgccgccccggacccacccgcaagcattaccagccctatgccccaccacgcgacttcgcagcctatcgctccagagtgaagttcagcagaagcgccgacgcccctgcctaccagcagggacagaaccaactgtacaacgagctgaacctgggcagacgggaagagtacgacgtgctggacaagcggagaggcagggaccctgagatgggcggaaagccccagcggagaaagaacccccaggaaggactgtataacgaactccagaaagacaagatggccgaagcctacagcgagatcggcatgaagggcgagcggagaagaggcaagggccacgatggcctgtaccagggcctgagcaccgccaccaaggacacctatgacgccctgcacatgcaggccctgcctccaagaagggccaagcgatctggatctggagcaacaaacttctcactactcaaacaagcaggtgacgtggaggagaatcccgggcctactagtatggactggatttggcgcatccttttccttgtcggcgctgctaccggcgcgcattccttcgaacaagttcagcttcaacagcctggcgctgagctggtcaaacctggcgcttctgtgaagatgagctgcaaagccagcggctacgccttcagcagctactggatcaactggatgaagcagaaacccggccagggactcgaatggatcggccaaatctatcccggcgacggcgacaccaactacaacggcaagttcaagggcagagccacactgaccgccgatacctctagcagcacagcctacatgcagctgagcagcctgaccagcgaagatagcgccgtgtacttctgtgcccggtccatcacaacagtcgtgggctgcgctatggactattggggccagggaacaagcgtgaccgtgtctagtacgcgtatccagaaccctgatcctgccgtgtaccagctgcgggatagcaagagcagcgacaagagcgtgtgtctgttcaccgacttcgacagccagaccaacgtgtcccagagcaaggactccgacgtgtacatcaccgataagtgcgtgctggacatgcggagcatggacttcaagagcaactccgccgtggcctggtccaacaagtccgatttcgcctgcgccaacgccttcaacaacagcattatccccgaggacacattcttcccaagccccgagagcagctgcgacgtgaagctggtggaaaagagcttcgagacagacaccaacctgaacttccagaacctgagcgtgatcggcttcagaatcctgctgctgaaagtggccggctttaacctgctgatgaccctgcggctgtggtccagc

SEQ ID NO: 27924 - DNA, 2331 bp, synthetic construct
  source 1..2331: mol_type = other DNA
atggccttaccagtgaccgccttgctcctgccgctggccttgctgctccacgccgccaggccggacatccagatgacacagagccctagcagcctgtctgccagcgtgggagacagagtgaccatcacatgcaaggccagcgaccacatcaacaactggctggcctggtatcagcagaagcctggacaggcccctaagctgctgatctacggcgctaccacactggaaacaggcgtgcccagcagattttctggcagcggctctggcaccgactacaccctgacaatatccagcctccagcctgaggacttcgccacctactactgtcagcagagctggaacaccccttggacattcggccagggcaccaagctggaaatcaagagactcgaggacctgaagaacgtgttcccacctgaggtggccgtgttcgagcctagcgaggccgagatcagccacacccagaaagccaccctcgtgtgcctggctaccggcttctaccccgaccatgtggaactgtcttggtgggtcaacggcaaagaggtgcacagcggcgtgtgtaccgacccccagccactgaaagaacagcccgccctgaacgacagccggtactgcctgagcagcagactgagagtgtccgccaccttctggcagaacccccggaaccacttcagatgccaggtgcagttctacggcctgagcgagaacgacgagtggacccaggacagagccaagcccgtgacccagatcgtgtctgccgaagcctggggcagagccgattgcggctttaccagcgagagctaccagcagggcgtgctgagcgccaccatcctgtacgagatcctgctgggcaaggccaccctgtacgccgtgctggtgtctgccctggtgctgatggctatggtcaagcggaaggacagccggggaaaacggggcagaaagaaactcctgtatatattcaaacaaccatttatgagaccagtacaaactactcaagaggaagatggctgtagctgccgatttccagaagaagaagaaggaggatgtgaactgagagtgaagttcagcagaagcgccgacgcccctgcctaccagcagggacagaaccaactgtacaacgagctgaacctgggcagacgggaagagtacgacgtgctggacaagcggagaggcagggaccctgagatgggcggaaagccccagcggagaaagaacccccaggaaggactgtataacgaactccagaaagacaagatggccgaagcctacagcgagatcggcatgaagggcgagcggagaagaggcaagggccacgatggcctgtaccagggcctgagcaccgccaccaaggacacctatgacgccctgcacatgcaggccctgcctccaagaagggccaagcgatctggatctggagcaacaaacttctcactactcaaacaagcaggtgacgtggaggagaatcccgggcctactagtatggactggatttggcgcatccttttccttgtcggcgctgctaccggcgcgcattccttcgaacaagttcagcttcaacagcctggcgctgagctggtcaaacctggcgcttctgtgaagatgagctgcaaagccagcggctacgccttcagcagctactggatcaactggatgaagcagaaacccggccagggactcgaatggatcggccaaatctatcccggcgacggcgacaccaactacaacggcaagttcaagggcagagccacactgaccgccgatacctctagcagcacagcctacatgcagctgagcagcctgaccagcgaagatagcgccgtgtacttctgtgcccggtccatcacaacagtcgtgggctgcgctatggactattggggccagggaacaagcgtgaccgtgtctagtacgcgtatccagaaccctgatcctgccgtgtaccagctgcgggatagcaagagcagcgacaagagcgtgtgtctgttcaccgacttcgacagccagaccaacgtgtcccagagcaaggactccgacgtgtacatcaccgataagtgcgtgctggacatgcggagcatggacttcaagagcaactccgccgtggcctggtccaacaagtccgatttcgcctgcgccaacgccttcaacaacagcattatccccgaggacacattcttcccaagccccgagagcagctgcgacgtgaagctggtggaaaagagcttcgagacagacaccaacctgaacttccagaacctgagcgtgatcggcttcagaatcctgctgctgaaagtggccggctttaacctgctgatgaccctgcggctgtggtccagc

SEQ ID NO: 27925 - DNA, 2205 bp, synthetic construct
  source 1..2205: mol_type = other DNA
atggccttaccagtgaccgccttgctcctgccgctggccttgctgctccacgccgccaggccggacatccagatgacacagagccctagcagcctgtctgccagcgtgggagacagagtgaccatcacatgcaaggccagcgaccacatcaacaactggctggcctggtatcagcagaagcctggacaggcccctaagctgctgatctacggcgctaccacactggaaacaggcgtgcccagcagattttctggcagcggctctggcaccgactacaccctgacaatatccagcctccagcctgaggacttcgccacctactactgtcagcagagctggaacaccccttggacattcggccagggcaccaagctggaaatcaagagactcgaggacctgaagaacgtgttcccacctgaggtggccgtgttcgagcctagcgaggccgagatcagccacacccagaaagccaccctcgtgtgcctggctaccggcttctaccccgaccatgtggaactgtcttggtgggtcaacggcaaagaggtgcacagcggcgtgtgtaccgacccccagccactgaaagaacagcccgccctgaacgacagccggtactgcctgagcagcagactgagagtgtccgccaccttctggcagaacccccggaaccacttcagatgccaggtgcagttctacggcctgagcgagaacgacgagtggacccaggacagagccaagcccgtgacccagatcgtgtctgccgaagcctggggcagagccgattgcggctttaccagcgagagctaccagcagggcgtgctgagcgccaccatcctgtacgagatcctgctgggcaaggccaccctgtacgccgtgctggtgtctgccctggtgctgatggctatggtcaagcggaaggacagccggggaagggccaagcgatctggatctggagcaacaaacttctcactactcaaacaagcaggtgacgtggaggagaatcccgggcctactagtatggactggatttggcgcatccttttccttgtcggcgctgctaccggcgcgcattccttcgaacaagttcagcttcaacagcctggcgctgagctggtcaaacctggcgcttctgtgaagatgagctgcaaagccagcggctacgccttcagcagctactggatcaactggatgaagcagaaacccggccagggactcgaatggatcggccaaatctatcccggcgacggcgacaccaactacaacggcaagttcaagggcagagccacactgaccgccgatacctctagcagcacagcctacatgcagctgagcagcctgaccagcgaagatagcgccgtgtacttctgtgcccggtccatcacaacagtcgtgggctgcgctatggactattggggccagggaacaagcgtgaccgtgtctagtacgcgtatccagaaccctgatcctgccgtgtaccagctgcgggatagcaagagcagcgacaagagcgtgtgtctgttcaccgacttcgacagccagaccaacgtgtcccagagcaaggactccgacgtgtacatcaccgataagtgcgtgctggacatgcggagcatggacttcaagagcaactccgccgtggcctggtccaacaagtccgatttcgcctgcgccaacgccttcaacaacagcattatccccgaggacacattcttcccaagccccgagagcagctgcgacgtgaagctggtggaaaagagcttcgagacagacaccaacctgaacttccagaacctgagcgtgatcggcttcagaatcctgctgctgaaagtggccggctttaacctgctgatgaccctgcggctgtggtccagccgggttaagttttccagatccgcagacgcacccgcttaccaacaagggcagaaccaactctacaatgaacttaatttggggcggagggaagagtacgacgttctggacaaaaggaggggacgagatcccgagatgggcggaaagcctcagcgaaggaagaatccgcaagaggggctttataacgaactccagaaagataaaatggcagaagcctatagtgagattgggatgaagggagaaaggaggaggggtaaaggtcacgatgggttgtaccaaggattgagcacagccactaaagatacctatgatgcgctccacatgcaggccctgccgccaaga

SEQ ID NO: 27926 - DNA, 2328 bp, synthetic construct
  source 1..2328: mol_type = other DNA
atggccttaccagtgaccgccttgctcctgccgctggccttgctgctccacgccgccaggccggacatccagatgacacagagccctagcagcctgtctgccagcgtgggagacagagtgaccatcacatgcaaggccagcgaccacatcaacaactggctggcctggtatcagcagaagcctggacaggcccctaagctgctgatctacggcgctaccacactggaaacaggcgtgcccagcagattttctggcagcggctctggcaccgactacaccctgacaatatccagcctccagcctgaggacttcgccacctactactgtcagcagagctggaacaccccttggacattcggccagggcaccaagctggaaatcaagagactcgaggacctgaagaacgtgttcccacctgaggtggccgtgttcgagcctagcgaggccgagatcagccacacccagaaagccaccctcgtgtgcctggctaccggcttctaccccgaccatgtggaactgtcttggtgggtcaacggcaaagaggtgcacagcggcgtgtgtaccgacccccagccactgaaagaacagcccgccctgaacgacagccggtactgcctgagcagcagactgagagtgtccgccaccttctggcagaacccccggaaccacttcagatgccaggtgcagttctacggcctgagcgagaacgacgagtggacccaggacagagccaagcccgtgacccagatcgtgtctgccgaagcctggggcagagccgattgcggctttaccagcgagagctaccagcagggcgtgctgagcgccaccatcctgtacgagatcctgctgggcaaggccaccctgtacgccgtgctggtgtctgccctggtgctgatggctatggtcaagcggaaggacagccggggaagggccaagcgatctggatctggagcaacaaacttctcactactcaaacaagcaggtgacgtggaggagaatcccgggcctactagtatggactggatttggcgcatccttttccttgtcggcgctgctaccggcgcgcattccttcgaacaagttcagcttcaacagcctggcgctgagctggtcaaacctggcgcttctgtgaagatgagctgcaaagccagcggctacgccttcagcagctactggatcaactggatgaagcagaaacccggccagggactcgaatggatcggccaaatctatcccggcgacggcgacaccaactacaacggcaagttcaagggcagagccacactgaccgccgatacctctagcagcacagcctacatgcagctgagcagcctgaccagcgaagatagcgccgtgtacttctgtgcccggtccatcacaacagtcgtgggctgcgctatggactattggggccagggaacaagcgtgaccgtgtctagtacgcgtatccagaaccctgatcctgccgtgtaccagctgcgggatagcaagagcagcgacaagagcgtgtgtctgttcaccgacttcgacagccagaccaacgtgtcccagagcaaggactccgacgtgtacatcaccgataagtgcgtgctggacatgcggagcatggacttcaagagcaactccgccgtggcctggtccaacaagtccgatttcgcctgcgccaacgccttcaacaacagcattatccccgaggacacattcttcccaagccccgagagcagctgcgacgtgaagctggtggaaaagagcttcgagacagacaccaacctgaacttccagaacctgagcgtgatcggcttcagaatcctgctgctgaaagtggccggctttaacctgctgatgaccctgcggctgtggtccagcaggagtaagaggagcaggctcctgcacagtgactacatgaacatgactccacgccgccccggacccacccgcaagcattaccagccctatgccccaccacgcgacttcgcagcctatcgctccagagtgaagttcagcagaagcgccgacgcccctgcctaccagcagggacagaaccaactgtacaacgagctgaacctgggcagacgggaagagtacgacgtgctggacaagcggagaggcagggaccctgagatgggcggaaagccccagcggagaaagaacccccaggaaggactgtataacgaactccagaaagacaagatggccgaagcctacagcgagatcggcatgaagggcgagcggagaagaggcaagggccacgatggcctgtaccagggcctgagcaccgccaccaaggacacctatgacgccctgcacatgcaggccctgcctccaaga

SEQ ID NO: 27927 - DNA, 2331 bp, synthetic construct
  source 1..2331: mol_type = other DNA
atggccttaccagtgaccgccttgctcctgccgctggccttgctgctccacgccgccaggccggacatccagatgacacagagccctagcagcctgtctgccagcgtgggagacagagtgaccatcacatgcaaggccagcgaccacatcaacaactggctggcctggtatcagcagaagcctggacaggcccctaagctgctgatctacggcgctaccacactggaaacaggcgtgcccagcagattttctggcagcggctctggcaccgactacaccctgacaatatccagcctccagcctgaggacttcgccacctactactgtcagcagagctggaacaccccttggacattcggccagggcaccaagctggaaatcaagagactcgaggacctgaagaacgtgttcccacctgaggtggccgtgttcgagcctagcgaggccgagatcagccacacccagaaagccaccctcgtgtgcctggctaccggcttctaccccgaccatgtggaactgtcttggtgggtcaacggcaaagaggtgcacagcggcgtgtgtaccgacccccagccactgaaagaacagcccgccctgaacgacagccggtactgcctgagcagcagactgagagtgtccgccaccttctggcagaacccccggaaccacttcagatgccaggtgcagttctacggcctgagcgagaacgacgagtggacccaggacagagccaagcccgtgacccagatcgtgtctgccgaagcctggggcagagccgattgcggctttaccagcgagagctaccagcagggcgtgctgagcgccaccatcctgtacgagatcctgctgggcaaggccaccctgtacgccgtgctggtgtctgccctggtgctgatggctatggtcaagcggaaggacagccggggaagggccaagcgatctggatctggagcaacaaacttctcactactcaaacaagcaggtgacgtggaggagaatcccgggcctactagtatggactggatttggcgcatccttttccttgtcggcgctgctaccggcgcgcattccttcgaacaagttcagcttcaacagcctggcgctgagctggtcaaacctggcgcttctgtgaagatgagctgcaaagccagcggctacgccttcagcagctactggatcaactggatgaagcagaaacccggccagggactcgaatggatcggccaaatctatcccggcgacggcgacaccaactacaacggcaagttcaagggcagagccacactgaccgccgatacctctagcagcacagcctacatgcagctgagcagcctgaccagcgaagatagcgccgtgtacttctgtgcccggtccatcacaacagtcgtgggctgcgctatggactattggggccagggaacaagcgtgaccgtgtctagtacgcgtatccagaaccctgatcctgccgtgtaccagctgcgggatagcaagagcagcgacaagagcgtgtgtctgttcaccgacttcgacagccagaccaacgtgtcccagagcaaggactccgacgtgtacatcaccgataagtgcgtgctggacatgcggagcatggacttcaagagcaactccgccgtggcctggtccaacaagtccgatttcgcctgcgccaacgccttcaacaacagcattatccccgaggacacattcttcccaagccccgagagcagctgcgacgtgaagctggtggaaaagagcttcgagacagacaccaacctgaacttccagaacctgagcgtgatcggcttcagaatcctgctgctgaaagtggccggctttaacctgctgatgaccctgcggctgtggtccagcaaacggggcagaaagaaactcctgtatatattcaaacaaccatttatgagaccagtacaaactactcaagaggaagatggctgtagctgccgatttccagaagaagaagaaggaggatgtgaactgagagtgaagttcagcagaagcgccgacgcccctgcctaccagcagggacagaaccaactgtacaacgagctgaacctgggcagacgggaagagtacgacgtgctggacaagcggagaggcagggaccctgagatgggcggaaagccccagcggagaaagaacccccaggaaggactgtataacgaactccagaaagacaagatggccgaagcctacagcgagatcggcatgaagggcgagcggagaagaggcaagggccacgatggcctgtaccagggcctgagcaccgccaccaaggacacctatgacgccctgcacatgcaggccctgcctccaaga

SEQ ID NO: 27928 - DNA, 30 bp, synthetic construct
  source 1..30: mol_type = other DNA
gggggggggggggggggggggggggggggg

SEQ ID NO: 27929 - DNA, 30 bp, synthetic construct; identical to SEQ ID NO: 27928
  source 1..30: mol_type = other DNA

SEQ ID NO: 27930 - DNA, 30 bp, synthetic construct; identical to SEQ ID NO: 27928
  source 1..30: mol_type = other DNA

SEQ ID NO: 27931 - DNA, 30 bp, synthetic construct; identical to SEQ ID NO: 27928
  source 1..30: mol_type = other DNA

SEQ ID NO: 27932 - DNA, 30 bp, synthetic construct; identical to SEQ ID NO: 27928
  source 1..30: mol_type = other DNA

SEQ ID NO: 27933 - DNA, 30 bp, synthetic construct; identical to SEQ ID NO: 27928
  source 1..30: mol_type = other DNA

SEQ ID NO: 27934 - DNA, 30 bp, synthetic construct; identical to SEQ ID NO: 27928
  source 1..30: mol_type = other DNA

SEQ ID NO: 27935 - DNA, 30 bp, synthetic construct; identical to SEQ ID NO: 27928
  source 1..30: mol_type = other DNA

SEQ ID NO: 27936 - protein, 254 aa, synthetic construct
DIQNPDPAVYQLRDSKSSDKSVCLFTDFDSQTNVSQSKDSDVYITDKTVLDMRSMDFKSNSAVAWSNKSDFACANAFNNSIIPEDTFFPSPESSCDVKLVEKSFETDTNLNFQNLSVIGFRILLLKVAGFNLLMTLRLWSSRVKFSRSADAPAYQQGQNQLYNELNLGRREEYDVLDKRRGRDPEMGGKPQRRKNPQEGLYNELQKDKMAEAYSEIGMKGERRRGKGHDGLYQGLSTATKDTYDALHMQALPPR

SEQ ID NO: 27937 - protein, 253 aa, synthetic construct
IQNPDPAVYQLRDSKSSDKSVCLFTDFDSQTNVSQSKDSDVYITDKTVLDMRSMDFKSNSAVAWSNKSDFACANAFNNSIIPEDTFFPSPESSCDVKLVEKSFETDTNLNFQNLSVIGFRILLLKVAGFNLLMTLRLWSSRVKFSRSADAPAYQQGQNQLYNELNLGRREEYDVLDKRRGRDPEMGGKPQRRKNPQEGLYNELQKDKMAEAYSEIGMKGERRRGKGHDGLYQGLSTATKDTYDALHMQALPPR

SEQ ID NO: 27938 - protein, 253 aa, synthetic construct
IQNPDPAVYQLRDSKSSDKSVCLFTDFDSQTNVSQSKDSDVYITDKCVLDMRSMDFKSNSAVAWSNKSDFACANAFNNSIIPEDTFFPSSDVPCDVKLVEKSFETDTNLNFQNLSVIGFRILLLKVAGFNLLMTLRLWSSRVKFSRSADAPAYQQGQNQLYNELNLGRREEYDVLDKRRGRDPEMGGKPQRRKNPQEGLYNELQKDKMAEAYSEIGMKGERRRGKGHDGLYQGLSTATKDTYDALHMQALPPR

SEQ ID NO: 27939 - protein, 253 aa, synthetic construct; identical to SEQ ID NO: 27937

SEQ ID NO: 27940 - protein, 250 aa, synthetic construct
PDPAVYQLRDSKSSDKSVCLFTDFDSQTNVSQSKDSDVYITDKTVLDMRSMDFKSNSAVAWSNKSDFACANAFNNSIIPEDTFFPSPESSCDVKLVEKSFETDTNLNFQNLSVIGFRILLLKVAGFNLLMTLRLWSSRVKFSRSADAPAYQQGQNQLYNELNLGRREEYDVLDKRRGRDPEMGGKPQRRKNPQEGLYNELQKDKMAEAYSEIGMKGERRRGKGHDGLYQGLSTATKDTYDALHMQALPPR

SEQ ID NO: 27941 - protein, 253 aa, synthetic construct
IQNPDPAVYQLRDSKSSDKSVCLFTDFDSQTNVSQSKDSDVYITDKCVLDMRSMDFKSNSAVAWSNKSDFACANAFNNSIIPEDTFFPSPESSCDVKLVEKSFETDTNLNFQNLSVIGFRILLLKVAGFNLLMTLRLWSSRVKFSRSADAPAYQQGQNQLYNELNLGRREEYDVLDKRRGRDPEMGGKPQRRKNPQEGLYNELQKDKMAEAYSEIGMKGERRRGKGHDGLYQGLSTATKDTYDALHMQALPPR

SEQ ID NO: 27942 - protein, 250 aa, synthetic construct
PDPAVYQLRDSKSSDKSVCLFTDFDSQTNVSQSKDSDVYITDKCVLDMRSMDFKSNSAVAWSNKSDFACANAFNNSIIPEDTFFPSPESSCDVKLVEKSFETDTNLNFQNLSVIGFRILLLKVAGFNLLMTLRLWSSRVKFSRSADAPAYQQGQNQLYNELNLGRREEYDVLDKRRGRDPEMGGKPQRRKNPQEGLYNELQKDKMAEAYSEIGMKGERRRGKGHDGLYQGLSTATKDTYDALHMQALPPR

SEQ ID NO: 27943 - protein, 253 aa, synthetic construct
IQNPDPAVYQLRDSKSSDKSVCLFTDFDSQTNVSQSKDSDVYITDKTVLDMRSMDFKSNSAVAWSNKSDFACANAFNNSIIPEDTFFPSSDVPCDVKLVEKSFETDTNLNFQNLSVIGFRILLLKVAGFNLLMTLRLWSSRVKFSRSADAPAYQQGQNQLYNELNLGRREEYDVLDKRRGRDPEMGGKPQRRKNPQEGLYNELQKDKMAEAYSEIGMKGERRRGKGHDGLYQGLSTATKDTYDALHMQALPPR

SEQ ID NO: 27944 - protein, 253 aa, synthetic construct
IQNPDPAVYQLRDSKSSDKSVCLFTDFDSQTNVSQSKDSDVYITDKTVLDMRSMDFKSNRAVAWSNKSDFACANAFNNSIIPEDTFFPSPESSCDVKLVEKSFETDTNLNFQNLSVIGFRILLLKVAGFNLLMTLRLWSSRVKFSRSADAPAYQQGQNQLYNELNLGRREEYDVLDKRRGRDPEMGGKPQRRKNPQEGLYNELQKDKMAEAYSEIGMKGERRRGKGHDGLYQGLSTATKDTYDALHMQALPPR

SEQ ID NO: 27945 - protein, 253 aa, synthetic construct
IQNPDPAVYQLRDSKSSDKSVCLFTDFDSQTNVSQSKDSDVYITDKTVLDMRSMDFKSNRAVAWSNKSDFACANAFNNSIIPEDTFFPSSDVPCDVKLVEKSFETDTNLNFQNLSVIGFRILLLKVAGFNLLMTLRLWSSRVKFSRSADAPAYQQGQNQLYNELNLGRREEYDVLDKRRGRDPEMGGKPQRRKNPQEGLYNELQKDKMAEAYSEIGMKGERRRGKGHDGLYQGLSTATKDTYDALHMQALPPR

SEQ ID NO: 27946 - protein, 253 aa, synthetic construct
IQNPDPAVYQLRDSKSSDKSVCLFTDFDSQTNVSQSKDSDVYITDKTVLDMRSMDFKSNSAVAWSNKSDFACANAFNNSIIPEDTFFPSSDSSCDVKLVEKSFETDTNLNFQNLSVIGFRILLLKVAGFNLLMTLRLWSSRVKFSRSADAPAYQQGQNQLYNELNLGRREEYDVLDKRRGRDPEMGGKPQRRKNPQEGLYNELQKDKMAEAYSEIGMKGERRRGKGHDGLYQGLSTATKDTYDALHMQALPPR

SEQ ID NO: 27947 - protein, 352 aa, synthetic construct
IQNPDPAVYQLRDSKSSDKSVCLFTDFDSQTNVSQSKDSDVYITDKTVLDMRSMDFKSNSAVAWSNKSDFACANAFNNSIIPEDTFFPSPESSCGTQSFGLLDPKLCYLLDGILFIYGVILTALFLRVKFSRSADAPAYQQGQNQLYNELNLGRREEYDVLDKRRGRDPEMGGKPQRRKNPQEGLYNELQKDKMAEAYSEIGMKGERRRGKGHDGLYQGLSTATKDTYDALHMQALPPRRVKFSRSADAPAYQQGQNQLYNELNLGRREEYDVLDKRRGRDPEMGGKPQRRKNPQEGLYNELQKDKMAEAYSEIGMKGERRRGKGHDGLYQGLSTATKDTYDALHMQALPPR

SEQ ID NO: 27948 - protein, 249 aa, synthetic construct
IQNPEPAVYQLKDPRSQDSTLCLFTDFDSQINVPKTMESGTFITDKTVLDMKAMDSKSNGAIAWSNQTSFTCQDIFKETNATYPSSDVPCDATLTEKSFETDMNLNFQNLSVMGLRILLLKVAGFNLLMTLRLWSSRVKFSRSADAPAYQQGQNQLYNELNLGRREEYDVLDKRRGRDPEMGGKPQRRKNPQEGLYNELQKDKMAEAYSEIGMKGERRRGKGHDGLYQGLSTATKDTYDALHMQALPPR

SEQ ID NO: 27949 - protein, 246 aa, synthetic construct
VQDPDPSVYQMRSPKTGRTVCLFTDFDSQADFQKPEGATVISLNSTVLDMKVMDSKSNGALTWNSETNIECKENFQQPFYPSSNYSCDAKLIEKSFETDMDLNFYNLLVIGLRILLLKVIGFNLFMTLRLWSCRVKFSRSADAPAYQQGQNQLYNELNLGRREEYDVLDKRRGRDPEMGGKPQRRKNPQEGLYNELQKDKMAEAYSEIGMKGERRRGKGHDGLYQGLSTATKDTYDALHMQALPPR

SEQ ID NO: 27950 - protein, 290 aa, synthetic construct
EDLNKVFPPEVAVFEPSEAEISHTQKATLVCLATGFFPDHVELSWWVNGKEVHSGVSTDPQPLKEQPALNDSRYCLSSRLRVSATFWQNPRNHFRCQVQFYGLSENDEWTQDRAKPVTQIVSAEAWGRADCGFTSVSYQQGVLSATILYEILLGKATLYAVLVSALVLMAMVKRKDFRVKFSRSADAPAYQQGQNQLYNELNLGRREEYDVLDKRRGRDPEMGGKPQRRKNPQEGLYNELQKDKMAEAYSEIGMKGERRRGKGHDGLYQGLSTATKDTYDALHMQALPPR

SEQ ID NO: 27951 - protein, 292 aa, synthetic construct
EDLKNVFPPEVAVFEPSEAEISHTQKATLVCLATGFYPDHVELSWWVNGKEVHSGVSTDPQPLKEQPALNDSRYCLSSRLRVSATFWQNPRNHFRCQVQFYGLSENDEWTQDRAKPVTQIVSAEAWGRADCGFTSESYQQGVLSATILYEILLGKATLYAVLVSALVLMAMVKRKDSRGRVKFSRSADAPAYQQGQNQLYNELNLGRREEYDVLDKRRGRDPEMGGKPQRRKNPQEGLYNELQKDKMAEAYSEIGMKGERRRGKGHDGLYQGLSTATKDTYDALHMQALPPR

SEQ ID NO: 27952 - protein, 292 aa, synthetic construct; identical to SEQ ID NO: 27951

SEQ ID NO: 27953 - protein, 292 aa, synthetic construct
EDLKNVFPPEVAVFEPSEAEISHTQKATLVCLATGFYPDHVELSWWVNGKEVHSGVCTDPQPLKEQPALNDSRYCLSSRLRVSATFWQNPRNHFRCQVQFYGLSENDEWTQDRAKPVTQIVSAEAWGRADCGFTSESYQQGVLSATILYEILLGKATLYAVLVSALVLMAMVKRKDSRGRVKFSRSADAPAYQQGQNQLYNELNLGRREEYDVLDKRRGRDPEMGGKPQRRKNPQEGLYNELQKDKMAEAYSEIGMKGERRRGKGHDGLYQGLSTATKDTYDALHMQALPPR

SEQ ID NO: 27954 - protein, 292 aa, synthetic construct
EDLKNVFPPEVAVFEPSKAEIAHTQKATLVCLATGFYPDHVELSWWVNGKEVHSGVCTDPQPLKEQPALNDSRYCLSSRLRVSATFWQNPRNHFRCQVQFYGLSENDEWTQDRAKPVTQIVSAEAWGRADCGITSASYHQGVLSATILYEILLGKATLYAVLVSALVLMAMVKRKDSRGRVKFSRSADAPAYQQGQNQLYNELNLGRREEYDVLDKRRGRDPEMGGKPQRRKNPQEGLYNELQKDKMAEAYSEIGMKGERRRGKGHDGLYQGLSTATKDTYDALHMQALPPR

SEQ ID NO: 27955 - protein, 292 aa, synthetic construct; identical to SEQ ID NO: 27951

SEQ ID NO: 27956 - protein, 291 aa, synthetic construct
DLKNVFPPEVAVFEPSEAEISHTQKATLVCLATGFYPDHVELSWWVNGKEVHSGVSTDPQPLKEQPALNDSRYCLSSRLRVSATFWQNPRNHFRCQVQFYGLSENDEWTQDRAKPVTQIVSAEAWGRADCGFTSESYQQGVLSATILYEILLGKATLYAVLVSALVLMAMVKRKDSRGRVKFSRSADAPAYQQGQNQLYNELNLGRREEYDVLDKRRGRDPEMGGKPQRRKNPQEGLYNELQKDKMAEAYSEIGMKGERRRGKGHDGLYQGLSTATKDTYDALHMQALPPR

SEQ ID NO: 27957 - protein, 290 aa, synthetic construct
EDLKNVFPPEVAVFEPSEAEISHTQKATLVCLATGFFPDHVELSWWVNGKEVHSGVSTDPQPLKEQPALNDSRYCLSSRLRVSATFWQNPRNHFRCQVQFYGLSENDEWTQDRAKPVTQIVSAEAWGRADCGFTSESYQQGVLSATILYEILLGKATLYAVLVSALVLMAMVKRKDFRVKFSRSADAPAYQQGQNQLYNELNLGRREEYDVLDKRRGRDPEMGGKPQRRKNPQEGLYNELQKDKMAEAYSEIGMKGERRRGKGHDGLYQGLSTATKDTYDALHMQALPPR

SEQ ID NO: 27958 - protein, 290 aa, synthetic construct; identical to SEQ ID NO: 27950

SEQ ID NO: 27959 - protein, 292 aa, synthetic construct
EDLKNVFPPEVAVFEPSKAEIAHTQKATLVCLATGFYPDHVELSWWVNGKEVHSGVSTDPQPLKEQPALNDSRYCLSSRLRVSATFWQNPRNHFRCQVQFYGLSENDEWTQDRAKPVTQIVSAEAWGRADCGITSASYHQGVLSATILYEILLGKATLYAVLVSALVLMAMVKRKDSRGRVKFSRSADAPAYQQGQNQLYNELNLGRREEYDVLDKRRGRDPEMGGKPQRRKNPQEGLYNELQKDKMAEAYSEIGMKGERRRGKGHDGLYQGLSTATKDTYDALHMQALPPR

SEQ ID NO: 27960 - protein, 292 aa, synthetic construct
EDLKNVFPPEVAVFEPSKAEIAHTQKATLVCLATGFYPDHVELSWWVNGKEVHSGVSTDPQPLKEQPALNDSRYCLSSRLRVSATFWQNPRNHFRCQVQFYGLSENDEWTQDRAKPVTQIVSAEAWGRADCGFTSESYQQGVLSATILYEILLGKATLYAVLVSALVLMAMVKRKDSRGRVKFSRSADAPAYQQGQNQLYNELNLGRREEYDVLDKRRGRDPEMGGKPQRRKNPQEGLYNELQKDKMAEAYSEIGMKGERRRGKGHDGLYQGLSTATKDTYDALHMQALPPR

SEQ ID NO: 27961 - protein, 292 aa, synthetic construct
EDLKNVFPPEVAVFEPSKAEISHTQKATLVCLATGFYPDHVELSWWVNGKEVHSGVSTDPQPLKEQPALNDSRYCLSSRLRVSATFWQNPRNHFRCQVQFYGLSENDEWTQDRAKPVTQIVSAEAWGRADCGITSESYQQGVLSATILYEILLGKATLYAVLVSALVLMAMVKRKDSRGRVKFSRSADAPAYQQGQNQLYNELNLGRREEYDVLDKRRGRDPEMGGKPQRRKNPQEGLYNELQKDKMAEAYSEIGMKGERRRGKGHDGLYQGLSTATKDTYDALHMQALPPR

SEQ ID NO: 27962 - protein, 292 aa, synthetic construct
EDLKNVFPPEVAVFEPSKAEISHTQKATLVCLATGFYPDHVELSWWVNGKEVHSGVSTDPQPLKEQPALNDSRYCLSSRLRVSATFWQNPRNHFRCQVQFYGLSENDEWTQDRAKPVTQIVSAEAWGRADCGFTSASYQQGVLSATILYEILLGKATLYAVLVSALVLMAMVKRKDSRGRVKFSRSADAPAYQQGQNQLYNELNLGRREEYDVLDKRRGRDPEMGGKPQRRKNPQEGLYNELQKDKMAEAYSEIGMKGERRRGKGHDGLYQGLSTATKDTYDALHMQALPPR

SEQ ID NO: 27963 - protein, 292 aa, synthetic construct
EDLKNVFPPEVAVFEPSKAEISHTQKATLVCLATGFYPDHVELSWWVNGKEVHSGVSTDPQPLKEQPALNDSRYCLSSRLRVSATFWQNPRNHFRCQVQFYGLSENDEWTQDRAKPVTQIVSAEAWGRADCGFTSESYHQGVLSATILYEILLGKATLYAVLVSALVLMAMVKRKDSRGRVKFSRSADAPAYQQGQNQLYNELNLGRREEYDVLDKRRGRDPEMGGKPQRRKNPQEGLYNELQKDKMAEAYSEIGMKGERRRGKGHDGLYQGLSTATKDTYDALHMQALPPR

SEQ ID NO: 27964 - protein, 292 aa, synthetic construct
EDLKNVFPPEVAVFEPSRAEIAHTQKATLVCLATGFYPDHVELSWWVNGKEVHSGVSTDPQPLKEQPALNDSRYCLSSRLRVSATFWQNPRNHFRCQVQFYGLSENDEWTQDRAKPVTQIVSAEAWGRADCGFTSESYQQGVLSATILYEILLGKATLYAVLVSALVLMAMVKRKDSRGRVKFSRSADAPAYQQGQNQLYNELNLGRREEYDVLDKRRGRDPEMGGKPQRRKNPQEGLYNELQKDKMAEAYSEIGMKGERRRGKGHDGLYQGLSTATKDTYDALHMQALPPR

SEQ ID NO: 27965 - protein, 292 aa, synthetic construct
EDLKNVFPPEVAVFEPSRAEISHTQKATLVCLATGFYPDHVELSWWVNGKEVHSGVSTDPQPLKEQPALNDSRYCLSSRLRVSATFWQNPRNHFRCQVQFYGLSENDEWTQDRAKPVTQIVSAEAWGRADCGFTSESYQQGVLSATILYEILLGKATLYAVLVSALVLMAMVKRKDSRGRVKFSRSADAPAYQQGQNQLYNELNLGRREEYDVLDKRRGRDPEMGGKPQRRKNPQEGLYNELQKDKMAEAYSEIGMKGERRRGKGHDGLYQGLSTATKDTYDALHMQALPPR

SEQ ID NO: 27966 - protein, 292 aa, synthetic construct
EDLKNVFPPEVAVFEPSKAEIAHTQKATLVCLATGFYPDHVELSWWVNGKEVHSGVSTDPQPLKEQPALNDSRYCLSSGLRVSATFWQNPRNHFRCQVQFYGLSENDEWTQDRAKPVTQIVSAEAWGRADCGITSASYHQGVLSATILYEILLGKATLYAVLVSALVLMAMVKRKDSRGRVKFSRSADAPAYQQGQNQLYNELNLGRREEYDVLDKRRGRDPEMGGKPQRRKNPQEGLYNELQKDKMAEAYSEIGMKGERRRGKGHDGLYQGLSTATKDTYDALHMQALPPR

SEQ ID NO: 27967 - protein, 292 aa, synthetic construct
EDLKNVFPPEVAVFEPSKAEIAHTQKATLVCLATGFYPDHVELSWWVNGKEVHSGVSTDPQPLKEQPALNDSRYCLSSGLRVSATFWQNPRNHFRCQVQFYGLSENDEWTQDRAKPVTQIVSAEAWGRADCGFTSESYQQGVLSATILYEILLGKATLYAVLVSALVLMAMVKRKDSRGRVKFSRSADAPAYQQGQNQLYNELNLGRREEYDVLDKRRGRDPEMGGKPQRRKNPQEGLYNELQKDKMAEAYSEIGMKGERRRGKGHDGLYQGLSTATKDTYDALHMQALPPR

SEQ ID NO: 27968 - protein, 292 aa, synthetic construct
EDLKNVFPPEVAVFEPSEAEISHTQKATLVCLATGFYPDHVELSWWVNGKEVHSGVSTDPQPLKEQPALNDSRYCLSSGLRVSATFWQNPRNHFRCQVQFYGLSENDEWTQDRAKPVTQIVSAEAWGRADCGFTSESYQQGVLSATILYEILLGKATLYAVLVSALVLMAMVKRKDSRGRVKFSRSADAPAYQQGQNQLYNELNLGRREEYDVLDKRRGRDPEMGGKPQRRKNPQEGLYNELQKDKMAEAYSEIGMKGERRRGKGHDGLYQGLSTATKDTYDALHMQALPPR

SEQ ID NO: 27969 - protein, 284 aa, synthetic construct
EDLRNVTPPKVSLFEPSKAEIANKQKATLVCLARGFFPDHVELSWWVNGKEVHSGVSTDPQAYKESNYSYCLSSRLRVSATFWHNPRNHFRCQVQFHGLSEEDKWPEGSPKPVTQNISAEAWGRACGITSSYQQGVLSATILYEILLGKATLYAVLVSTLVVMAMVKRKNSRVKFSRSADAPAYQQGQNQLYNELNLGRREEYDVLDKRRGRDPEMGGKPQRRKNPQEGLYNELQKDKMAEAYSEIGMKGERRRGKGHDGLYQGLSTATKDTYDALHMQALPPR

SEQ ID NO: 27970 - protein, 290 aa, synthetic construct
EDLQKVTPPTVTVFEPSEAEISRTQKATLVCLARGFYPDHVELSWWVNGKEVTSGFSTDPQPDKERPSENDSSYCLSSRLRVSASFWHNPRNHFRCQVQFYGLGDDDEWKYDRVKPITQNISAEAWGRADCGFTSVSYHQGVLSATILYEILLGKATLYAVLVSILVLMAKVKRKGSRVKFSRSADAPAYQQGQNQLYNELNLGRREEYDVLDKRRGRDPEMGGKPQRRKNPQEGLYNELQKDKMAEAYSEIGMKGERRRGKGHDGLYQGLSTATKDTYDALHMQALPPR

SEQ ID NO: 27971 - protein, 389 aa, synthetic construct
EDLKNVFPPEVAVFEPSEAEISHTQKATLVCLATGFYPDHVELSWWVNGKEVHSGVSTDPQPLKEQPALNDSRYCLSSRLRVSATFWQNPRNHFRCQVQFYGLSENDEWTQDRAKPVTQIVSAEAWGRADCGSQSFGLLDPKLCYLLDGILFIYGVILTALFLRVKFSRSADAPAYQQGQNQLYNELNLGRREEYDVLDKRRGRDPEMGGKPQRRKNPQEGLYNELQKDKMAEAYSEIGMKGERRRGKGHDGLYQGLSTATKDTYDALHMQALPPRRVKFSRSADAPAYQQGQNQLYNELNLGRREEYDVLDKRRGRDPEMGGKPQRRKNPQEGLYNELQKDKMAEAYSEIGMKGERRRGKGHDGLYQGLSTATKDTYDALHMQALPPR

SEQ ID NO: 27972 - protein, 382 aa, synthetic construct
GCPALPTGVGGTPFPSLAPPIMLLVDGKQQMVVVCLVLDVAPPGLDSPIWFSAGNGSALDAFTYGPSPATDGTWTNLAHLSLPSEELASWEPLVCHTGPGAEGHSRSTQPMHLSGEASTARTCPQEPLRGTPGGALWLGVLRLLLFKLLLFDLLLTCSCLCDPAGPLPSPATTTRLRALGSHRLHPATETGGREATSSPRPQPRDRRWGDTPPGRKPGSPVWGEGSYLSSYPTCPAQAWCSRSRLRAPSSSLGAFFAGDLPPPLQAGAARVKFSRSADAPAYQQGQNQLYNELNLGRREEYDVLDKRRGRDPEMGGKPQRRKNPQEGLYNELQKDKMAEAYSEIGMKGERRRGKGHDGLYQGLSTATKDTYDALHMQALPPR

SEQ ID NO: 27973 - protein, 371 aa, synthetic construct
TPFPSLAPPIMLLVDGKQQMVVVCLVLDVAPPGLDSPIWFSAGNGSALDAFTYGPSPATDGTWTNLAHLSLPSEELASWEPLVCHTGPGAEGHSRSTQPMHLSGEASTARTCPQEPLRGTPGGALWLGVLRLLLFKLLLFDLLLTCSCLCDPAGPLPSPATTTRLRALGSHRLHPATETGGREATSSPRPQPRDRRWGDTPPGRKPGSPVWGEGSYLSSYPTCPAQAWCSRSALRAPSSSLGAFFAGDLPPPLQAGAARVKFSRSADAPAYQQGQNQLYNELNLGRREEYDVLDKRRGRDPEMGGKPQRRKNPQEGLYNELQKDKMAEAYSEIGMKGERRRGKGHDGLYQGLSTATKDTYDALHMQALPPR

SEQ ID NO: 27974 - protein, 323 aa, synthetic construct
TPFPSLAPPIMLLVDGKQQMVVVCLVLDVAPPGLDSPIWFSAGNGSALDAFTYGPSPATDGTWTNLAHLSLPSEELASWEPLVCHTGPGAEGHSRSTQPMHLSGEASTARTCPQEPLRGTPGGALWLGVLRLLLFKLLLFDLLLTCSCLCDPAGPLPSPATTTRLRALGSHRLHPATETGGREATSSPRPQPRDRRWGDTPPGRKPGSPVRVKFSRSADAPAYQQGQNQLYNELNLGRREEYDVLDKRRGRDPEMGGKPQRRKNPQEGLYNELQKDKMAEAYSEIGMKGERRRGKGHDGLYQGLSTATKDTYDALHMQALPPR

SEQ ID NO: 27975 - protein, 302 aa, synthetic construct
DKQLDADVSPKPTIFLPSIAETKLQKAGTYLCLLEKFFPDIIKIHWQEKKSNTILGSQEGNTMKTNDTYMKFSWLTVPEESLDKEHRCIVRHENNKNGIDQEIIFPPIKTDVTTVDPKYNYSKDANDVITMDPKDNWSKDANDTLLLQLTNTSAYYMYLLLLLKSVVYFAIITCCLLGRTAFCCNGEKSRVKFSRSADAPAYQQGQNQLYNELNLGRREEYDVLDKRRGRDPEMGGKPQRRKNPQEGLYNELQKDKMAEAYSEIGMKGERRRGKGHDGLYQGLSTATKDTYDALHMQALPPR

SEQ ID NO: 27976 - protein, 286 aa, synthetic construct
DKQLDADVSPKPTIFLPSIAETKLQKAGTYLCLLEKFFPDVIKIHWQEKKSNTILGSQEGNTMKTNDTYMKFSWLTVPEKSLDKEHRCIVRHENNKNGVDQEIIFPPIKTDVITMDPKDNCSKDANDTLLLQLTNTSAYYMYLLLLLKSVVYFAIITCCLLRRTAFCCNGEKSRVKFSRSADAPAYQQGQNQLYNELNLGRREEYDVLDKRRGRDPEMGGKPQRRKNPQEGLYNELQKDKMAEAYSEIGMKGERRRGKGHDGLYQGLSTATKDTYDALHMQALPPR

SEQ ID NO: 27977 - protein, 266 aa, synthetic construct
SQPHTKPSVFVMKNGTNVACLVKEFYPKDIRINLVSSKKITEFDPAIVISPSGKYNAVKLGKYEDSNSVTCSVQHDNKTVHSTDFEVKTDSTDHVKPKETENTKQPSKSCHKPKAIVHTEKVNMMSLTVLGLRMLFAKTVAVNFLLTAKLFFLRVKFSRSADAPAYQQGQNQLYNELNLGRREEYDVLDKRRGRDPEMGGKPQRRKNPQEGLYNELQKDKMAEAYSEIGMKGERRRGKGHDGLYQGLSTATKDTYDALHMQALPPR

SEQ ID NO: 27978 - protein, 266 aa, synthetic construct; identical to SEQ ID NO: 27977

SEQ ID NO: 27979 - protein, 220 aa, synthetic construct
IQNPDPAVYITDKTVLDMRSMDFKSNSAVAWSNKSDFACANAFNNSIIPEDTFFPSPESSCDVKLVEKSFETDTNLNFQNLSVIGFRILLLKVAGFNLLMTLRLWSSRVKFSRSADAPAYQQGQNQLYNELNLGRREEYDVLDKRRGRDPEMGGKPQRRKNPQEGLYNELQKDKMAEAYSEIGMKGERRRGKGHDGLYQGLSTATKDTYDALHMQALPPR

SEQ ID NO: 27980 - protein, 292 aa, synthetic construct
EDLKNVFPPEVAVFEPSRAEISHTQKATLVCLATGFYPDHVELSWWVNGKEVHSGVCTDPQPLKEQPALNDSRYCLSSRLRVSATFWQNPRNHFRCQVQFYGLSENDEWTQDRAKPVTQIVSAEAWGRADCGFTSESYQQGVLSATILYEILLGKATLYAVLVSALVLMAMVKRKDSRGRVKFSRSADAPAYQQGQNQLYNELNLGRREEYDVLDKRRGRDPEMGGKPQRRKNPQEGLYNELQKDKMAEAYSEIGMKGERRRGKGHDGLYQGLSTATKDTYDALHMQALPPR

SEQ ID NO: 27981 - protein, 292 aa, synthetic construct
EDLKNVFPPEVAVFEPSRAEIAHTQKATLVCLATGFYPDHVELSWWVNGKEVHSGVCTDPQPLKEQPALNDSRYCLSSRLRVSATFWQNPRNHFRCQVQFYGLSENDEWTQDRAKPVTQIVSAEAWGRADCGFTSESYQQGVLSATILYEILLGKATLYAVLVSALVLMAMVKRKDSRGRVKFSRSADAPAYQQGQNQLYNELNLGRREEYDVLDKRRGRDPEMGGKPQRRKNPQEGLYNELQKDKMAEAYSEIGMKGERRRGKGHDGLYQGLSTATKDTYDALHMQALPPR

SEQ ID NO: 27982 - protein, 173 aa, synthetic construct
IPEDTFFPSPESSCDVKLVEKSFETDTNLNFQNLSVIGFRILLLKVAGFNLLMTLRLWSSRVKFSRSADAPAYQQGQNQLYNELNLGRREEYDVLDKRRGRDPEMGGKPQRRKNPQEGLYNELQKDKMAEAYSEIGMKGERRRGKGHDGLYQGLSTATKDTYDALHMQALPPR

SEQ ID NO: 27983 - protein, 163 aa, synthetic construct
ESSCDVKLVEKSFETDTNLNFQNLSVIGFRILLLKVAGFNLLMTLRLWSSRVKFSRSADAPAYQQGQNQLYNELNLGRREEYDVLDKRRGRDPEMGGKPQRRKNPQEGLYNELQKDKMAEAYSEIGMKGERRRGKGHDGLYQGLSTATKDTYDALHMQALPPR

SEQ ID NO: 27984 - protein, 292 aa, synthetic construct; identical to SEQ ID NO: 27953

SEQ ID NO: 27985 - protein, 228 aa, synthetic construct
EQPALNDSRYCLSSRLRVSATFWQNPRNHFRCQVQFYGLSENDEWTQDRAKPVTQIVSAEAWGRADCGFTSESYQQGVLSATILYEILLGKATLYAVLVSALVLMAMVKRKDSRGRVKFSRSADAPAYQQGQNQLYNELNLGRREEYDVLDKRRGRDPEMGGKPQRRKNPQEGLYNELQKDKMAEAYSEIGMKGERRRGKGHDGLYQGLSTATKDTYDALHMQALPPR

SEQ ID NO: 27986 - protein, 166 aa, synthetic construct
GRADCGFTSESYQQGVLSATILYEILLGKATLYAVLVSALVLMAMVKRKDSRGRVKFSRSADAPAYQQGQNQLYNELNLGRREEYDVLDKRRGRDPEMGGKPQRRKNPQEGLYNELQKDKMAEAYSEIGMKGERRRGKGHDGLYQGLSTATKDTYDALHMQALPPR

SEQ ID NO: 27987 - protein, 164 aa, synthetic construct
ADCGFTSESYQQGVLSATILYEILLGKATLYAVLVSALVLMAMVKRKDSRGRVKFSRSADAPAYQQGQNQLYNELNLGRREEYDVLDKRRGRDPEMGGKPQRRKNPQEGLYNELQKDKMAEAYSEIGMKGERRRGKGHDGLYQGLSTATKDTYDALHMQALPPR

SEQ ID NO: 27988 - protein, 286 aa, synthetic construct; identical to SEQ ID NO: 27976

SEQ ID NO: 27989 - protein, 281 aa, synthetic construct
ADVSPKPTIFLPSIAETKLQKAGTYLCLLEKFFPDVIKIHWQEKKSNTILGSQEGNTMKTNDTYMKFSWLTVPEKSLDKEHRCIVRHENNKNGVDQEIIFPPIKTDVITMDPKDNCSKDANDTLLLQLTNTSAYYMYLLLLLKSVVYFAIITCCLLRRTAFCCNGEKSRVKFSRSADAPAYQQGQNQLYNELNLGRREEYDVLDKRRGRDPEMGGKPQRRKNPQEGLYNELQKDKMAEAYSEIGMKGERRRGKGHDGLYQGLSTATKDTYDALHMQALPPR

SEQ ID NO: 27990 - protein, 279 aa, synthetic construct
VSPKPTIFLPSIAETKLQKAGTYLCLLEKFFPDVIKIHWQEKKSNTILGSQEGNTMKTNDTYMKFSWLTVPEKSLDKEHRCIVRHENNKNGVDQEIIFPPIKTDVITMDPKDNCSKDANDTLLLQLTNTSAYYMYLLLLLKSVVYFAIITCCLLRRTAFCCNGEKSRVKFSRSADAPAYQQGQNQLYNELNLGRREEYDVLDKRRGRDPEMGGKPQRRKNPQEGLYNELQKDKMAEAYSEIGMKGERRRGKGHDGLYQGLSTATKDTYDALHMQALPPR

SEQ ID NO: 27991 - protein, 274 aa, synthetic construct
TIFLPSIAETKLQKAGTYLCLLEKFFPDVIKIHWQEKKSNTILGSQEGNTMKTNDTYMKFSWLTVPEKSLDKEHRCIVRHENNKNGVDQEIIFPPIKTDVITMDPKDNCSKDANDTLLLQLTNTSAYYMYLLLLLKSVVYFAIITCCLLRRTAFCCNGEKSRVKFSRSADAPAYQQGQNQLYNELNLGRREEYDVLDKRRGRDPEMGGKPQRRKNPQEGLYNELQKDKMAEAYSEIGMKGERRRGKGHDGLYQGLSTATKDTYDALHMQALPPR

SEQ ID NO: 27992 - protein, 180 aa, synthetic construct
PIKTDVITMDPKDNCSKDANDTLLLQLTNTSAYYMYLLLLLKSVVYFAIITCCLLRRTAFCCNGEKSRVKFSRSADAPAYQQGQNQLYNELNLGRREEYDVLDKRRGRDPEMGGKPQRRKNPQEGLYNELQKDKMAEAYSEIGMKGERRRGKGHDGLYQGLSTATKDTYDALHMQALPPR

SEQ ID NO: 27993 - protein, 172 aa, synthetic construct
MDPKDNCSKDANDTLLLQLTNTSAYYMYLLLLLKSVVYFAIITCCLLRRTAFCCNGEKSRVKFSRSADAPAYQQGQNQLYNELNLGRREEYDVLDKRRGRDPEMGGKPQRRKNPQEGLYNELQKDKMAEAYSEIGMKGERRRGKGHDGLYQGLSTATKDTYDALHMQALPPR

SEQ ID NO: 27994 - protein, 266 aa, synthetic construct; identical to SEQ ID NO: 27977

SEQ ID NO: 27995 - protein, 181 aa, synthetic construct
EVKTDSTDHVKPKETENTKQPSKSCHKPKAIVHTEKVNMMSLTVLGLRMLFAKTVAVNFLLTAKLFFLRVKFSRSADAPAYQQGQNQLYNELNLGRREEYDVLDKRRGRDPEMGGKPQRRKNPQEGLYNELQKDKMAEAYSEIGMKGERRRGKGHDGLYQGLSTATKDTYDALHMQALPPR

SEQ ID NO: 27996 - protein, 174 aa, synthetic construct
DHVKPKETENTKQPSKSCHKPKAIVHTEKVNMMSLTVLGLRMLFAKTVAVNFLLTAKLFFLRVKFSRSADAPAYQQGQNQLYNELNLGRREEYDVLDKRRGRDPEMGGKPQRRKNPQEGLYNELQKDKMAEAYSEIGMKGERRRGKGHDGLYQGLSTATKDTYDALHMQALPPR

SEQ ID NO: 27997 - protein, 290 aa, synthetic construct
EDLKNVFPPEVAVFEPSEAEISHTQKATLVCLATGFYPDHVELSWWVNGKEVHSGVCTDPQPLKEQPALNDSRYCLSSRLRVSATFWQNPRNHFRCQVQFYGLSENDEWTQDRAKPVTQIVSAEAWGRADCDVKLVEKSFETDTNLNFQNLSVIGFRILLLKVAGFNLLMTLRLWSSRVKFSRSADAPAYQQGQNQLYNELNLGRREEYDVLDKRRGRDPEMGGKPQRRKNPQEGLYNELQKDKMAEAYSEIGMKGERRRGKGHDGLYQGLSTATKDTYDALHMQALPPR

SEQ ID NO: 27998 - protein, 255 aa, synthetic construct
IQNPDPAVYQLRDSKSSDKSVCLFTDFDSQTNVSQSKDSDVYITDKCVLDMRSMDFKSNSAVAWSNKSDFACANAFNNSIIPEDTFFPSPESSCGFTSESYQQGVLSATILYEILLGKATLYAVLVSALVLMAMVKRKDSRGRVKFSRSADAPAYQQGQNQLYNELNLGRREEYDVLDKRRGRDPEMGGKPQRRKNPQEGLYNELQKDKMAEAYSEIGMKGERRRGKGHDGLYQGLSTATKDTYDALHMQALPPR

SEQ ID NO: 27999 - protein, 287 aa, synthetic construct
EDLKNVFPPEVAVFEPSEAEISHTQKATLVCLATGFYPDHVELSWWVNGKEVHSGVCTDPQPLKEQPALNDSRYCLSSRLRVSATFWQNPRNHFRCQVQFYGLSENDEWTQDRAKPVTQIVSAEAWGRADCGFTSESYQQGVLSATNLSVIGFRILLLKVAGFNLLMTLRLWSSRVKFSRSADAPAYQQGQNQLYNELNLGRREEYDVLDKRRGRDPEMGGKPQRRKNPQEGLYNELQKDKMAEAYSEIGMKGERRRGKGHDGLYQGLSTATKDTYDALHMQALPPR

SEQ ID NO: 28000 - protein, 258 aa, synthetic construct
IQNPDPAVYQLRDSKSSDKSVCLFTDFDSQTNVSQSKDSDVYITDKCVLDMRSMDFKSNSAVAWSNKSDFACANAFNNSIIPEDTFFPSPESSCDVKLVEKSFETDTNLNFQILYEILLGKATLYAVLVSALVLMAMVKRKDSRGRVKFSRSADAPAYQQGQNQLYNELNLGRREEYDVLDKRRGRDPEMGGKPQRRKNPQEGLYNELQKDKMAEAYSEIGMKGERRRGKGHDGLYQGLSTATKDTYDALHMQALPPR

SEQ ID NO: 28001 - protein, 273 aa, synthetic construct
IQNPDPAVYQLRDSKSSDKSVCLFTDFDSQTNVSQSKDSDVYITDKCVLDMRSMDFKSNSAVAWSNKSDFACANAFNNSIIPEDTFFPSPESSDSTDHVKPKETENTKQPSKSCHKPKAIVHTEKVNMMSLTVLGLRMLFAKTVAVNFLLTAKLFFLLTARVKFSRSADAPAYQQGQNQLYNELNLGRREEYDVLDKRRGRDPEMGGKPQRRKNPQEGLYNELQKDKMAEAYSEIGMKGERRRGKGHDGLYQGLSTATKDTYDALHMQALPPR

SEQ ID NO: 28002 - protein, 376 aa, synthetic construct
EDLKNVFPPEVAVFEPSEAEISHTQKATLVCLATGFYPDHVELSWWVNGKEVHSGVCTDPQPLKEQPALNDSRYCLSSRLRVSATFWQNPRNHFRCQVQFYGLSENDEWTQDRAKPVTQIVSAEAWGRADDVIKIHWQEKKSNTILGSQEGNTMKTNDTYMKFSWLTVPEKSLDKEHRCIVRHENNKNGVDQEIIFPPIKTDVITMDPKDNCSKDANDTLLLQLTNTSAYYMYLLLLLKSVVYFAIITCCLLMAMVKRKDSRGRVKFSRSADAPAYQQGQNQLYNELNLGRREEYDVLDKRRGRDPEMGGKPQRRKNPQEGLYNELQKDKMAEAYSEIGMKGERRRGKGHDGLYQGLSTATKDTYDALHMQALPPR

SEQ ID NO: 28003 - protein, 290 aa, synthetic construct
EDLKNVFPPEVAVFEPSEAEISHTQKATLVCLATGFYPDHVELSWWVNGKEVHSGVSTDPQPLKEQPALNDSRYCLSSRLRVSATFWQNPRNHFRCQVQFYGLSENDEWTQDRAKPVTQIVSAEAWGRADCDVKLVEKSFETDTNLNFQNLSVIGFRILLLKVAGFNLLMTLRLWSSRVKFSRSADAPAYQQGQNQLYNELNLGRREEYDVLDKRRGRDPEMGGKPQRRKNPQEGLYNELQKDKMAEAYSEIGMKGERRRGKGHDGLYQGLSTATKDTYDALHMQALPPR

SEQ ID NO: 28004 - protein, 255 aa, synthetic construct
IQNPDPAVYQLRDSKSSDKSVCLFTDFDSQTNVSQSKDSDVYITDKTVLDMRSMDFKSNSAVAWSNKSDFACANAFNNSIIPEDTFFPSPESSCGFTSESYQQGVLSATILYEILLGKATLYAVLVSALVLMAMVKRKDSRGRVKFSRSADAPAYQQGQNQLYNELNLGRREEYDVLDKRRGRDPEMGGKPQRRKNPQEGLYNELQKDKMAEAYSEIGMKGERRRGKGHDGLYQGLSTATKDTYDALHMQALPPR

SEQ ID NO: 28005 - protein, 287 aa, synthetic construct
EDLKNVFPPEVAVFEPSEAEISHTQKATLVCLATGFYPDHVELSWWVNGKEVHSGVSTDPQPLKEQPALNDSRYCLSSRLRVSATFWQNPRNHFRCQVQFYGLSENDEWTQDRAKPVTQIVSAEAWGRADCGFTSESYQQGVLSATNLSVIGFRILLLKVAGFNLLMTLRLWSSRVKFSRSADAPAYQQGQNQLYNELNLGRREEYDVLDKRRGRDPEMGGKPQRRKNPQEGLYNELQKDKMAEAYSEIGMKGERRRGKGHDGLYQGLSTATKDTYDALHMQALPPR

SEQ ID NO: 28006 - protein, 258 aa, synthetic construct
IQNPDPAVYQLRDSKSSDKSVCLFTDFDSQTNVSQSKDSDVYITDKTVLDMRSMDFKSNSAVAWSNKSDFACANAFNNSIIPEDTFFPSPESSCDVKLVEKSFETDTNLNFQILYEILLGKATLYAVLVSALVLMAMVKRKDSRGRVKFSRSADAPAYQQGQNQLYNELNLGRREEYDVLDKRRGRDPEMGGKPQRRKNPQEGLYNELQKDKMAEAYSEIGMKGERRRGKGHDGLYQGLSTATKDTYDALHMQALPPR

SEQ ID NO: 28007 - protein, 273 aa, synthetic construct
IQNPDPAVYQLRDSKSSDKSVCLFTDFDSQTNVSQSKDSDVYITDKTVLDMRSMDFKSNSAVAWSNKSDFACANAFNNSIIPEDTFFPSPESSDSTDHVKPKETENTKQPSKSCHKPKAIVHTEKVNMMSLTVLGLRMLFAKTVAVNFLLTAKLFFLLTARVKFSRSADAPAYQQGQNQLYNELNLGRREEYDVLDKRRGRDPEMGGKPQRRKNPQEGLYNELQKDKMAEAYSEIGMKGERRRGKGHDGLYQGLSTATKDTYDALHMQALPPR

SEQ ID NO: 28008 - protein, 376 aa, synthetic construct
EDLKNVFPPEVAVFEPSEAEISHTQKATLVCLATGFYPDHVELSWWVNGKEVHSGVSTDPQPLKEQPALNDSRYCLSSRLRVSATFWQNPRNHFRCQVQFYGLSENDEWTQDRAKPVTQIVSAEAWGRADDVIKIHWQEKKSNTILGSQEGNTMKTNDTYMKFSWLTVPEKSLDKEHRCIVRHENNKNGVDQEIIFPPIKTDVITMDPKDNCSKDANDTLLLQLTNTSAYYMYLLLLLKSVVYFAIITCCLLMAMVKRKDSRGRVKFSRSADAPAYQQGQNQLYNELNLGRREEYDVLDKRRGRDPEMGGKPQRRKNPQEGLYNELQKDKMAEAYSEIGMKGERRRGKGHDGLYQGLSTATKDTYDALHMQALPPR

SEQ ID NO: 28009 - protein, 270 aa, synthetic construct
IQNPDPAVYQLRDSKSSDKSVCLFTDFDSQTNVSQSKDSDVYITDKCVLDMRSMDFKSNSAVAWSNKSDFACANAFNNSIIPEDTFFPSPESSDSTDHVKPKETENTKQPSKSCHKPKAIVHTEKVNMMSLTVLGLRMLFAKTVAVNFLLTAKLFFLRVKFSRSADAPAYQQGQNQLYNELNLGRREEYDVLDKRRGRDPEMGGKPQRRKNPQEGLYNELQKDKMAEAYSEIGMKGERRRGKGHDGLYQGLSTATKDTYDALHMQALPPR

SEQ ID NO: 28010 - protein, 377 aa, synthetic construct
EDLKNVFPPEVAVFEPSEAEISHTQKATLVCLATGFYPDHVELSWWVNGKEVHSGVCTDPQPLKEQPALNDSRYCLSSRLRVSATFWQNPRNHFRCQVQFYGLSENDEWTQDRAKPVTQIVSAEAWGRADDVIKIHWQEKKSNTILGSQEGNTMKTNDTYMKFSWLTVPEKSLDKEHRCIVRHENNKNGVDQEIIFPPIKTDVITMDPKDNCSKDANDTLLLQLTNTSAYYMYLLLLLKSVVYFAIITCCLLRRTAFCCNGEKSRVKFSRSADAPAYQQGQNQLYNELNLGRREEYDVLDKRRGRDPEMGGKPQRRKNPQEGLYNELQKDKMAEAYSEIGMKGERRRGKGHDGLYQGLSTATKDTYDALHMQALPPR

SEQ ID NO: 28011 - protein, 270 aa, synthetic construct
IQNPDPAVYQLRDSKSSDKSVCLFTDFDSQTNVSQSKDSDVYITDKTVLDMRSMDFKSNSAVAWSNKSDFACANAFNNSIIPEDTFFPSPESSDSTDHVKPKETENTKQPSKSCHKPKAIVHTEKVNMMSLTVLGLRMLFAKTVAVNFLLTAKLFFLRVKFSRSADAPAYQQGQNQLYNELNLGRREEYDVLDKRRGRDPEMGGKPQRRKNPQEGLYNELQKDKMAEAYSEIGMKGERRRGKGHDGLYQGLSTATKDTYDALHMQALPPR

SEQ ID NO: 28012 - protein, 377 aa, synthetic construct
EDLKNVFPPEVAVFEPSEAEISHTQKATLVCLATGFYPDHVELSWWVNGKEVHSGVSTDPQPLKEQPALNDSRYCLSSRLRVSATFWQNPRNHFRCQVQFYGLSENDEWTQDRAKPVTQIVSAEAWGRADDVIKIHWQEKKSNTILGSQEGNTMKTNDTYMKFSWLTVPEKSLDKEHRCIVRHENNKNGVDQEIIFPPIKTDVITMDPKDNCSKDANDTLLLQLTNTSAYYMYLLLLLKSVVYFAIITCCLLRRTAFCCNGEKSRVKFSRSADAPAYQQGQNQLYNELNLGRREEYDVLDKRRGRDPEMGGKPQRRKNPQEGLYNELQKDKMAEAYSEIGMKGERRRGKGHDGLYQGLSTATKDTYDALHMQALPPR

SEQ ID NO: 28013 - protein, 255 aa, synthetic construct; identical to SEQ ID NO: 27998

SEQ ID NO: 28014 - protein, 254 aa, synthetic construct
QNPDPAVYQLRDSKSSDKSVCLFTDFDSQTNVSQSKDSDVYITDKCVLDMRSMDFKSNSAVAWSNKSDFACANAFNNSIIPEDTFFPSPESSCGFTSESYQQGVLSATILYEILLGKATLYAVLVSALVLMAMVKRKDSRGRVKFSRSADAPAYQQGQNQLYNELNLGRREEYDVLDKRRGRDPEMGGKPQRRKNPQEGLYNELQKDKMAEAYSEIGMKGERRRGKGHDGLYQGLSTATKDTYDALHMQALPPR

SEQ ID NO: 28015 - protein, 253 aa, synthetic construct
NPDPAVYQLRDSKSSDKSVCLFTDFDSQTNVSQSKDSDVYITDKCVLDMRSMDFKSNSAVAWSNKSDFACANAFNNSIIPEDTFFPSPESSCGFTSESYQQGVLSATILYEILLGKATLYAVLVSALVLMAMVKRKDSRGRVKFSRSADAPAYQQGQNQLYNELNLGRREEYDVLDKRRGRDPEMGGKPQRRKNPQEGLYNELQKDKMAEAYSEIGMKGERRRGKGHDGLYQGLSTATKDTYDALHMQALPPR

SEQ ID NO: 28016 - protein, 252 aa, synthetic construct
PDPAVYQLRDSKSSDKSVCLFTDFDSQTNVSQSKDSDVYITDKCVLDMRSMDFKSNSAVAWSNKSDFACANAFNNSIIPEDTFFPSPESSCGFTSESYQQGVLSATILYEILLGKATLYAVLVSALVLMAMVKRKDSRGRVKFSRSADAPAYQQGQNQLYNELNLGRREEYDVLDKRRGRDPEMGGKPQRRKNPQEGLYNELQKDKMAEAYSEIGMKGERRRGKGHDGLYQGLSTATKDTYDALHMQALPPR

SEQ ID NO: 28017 - protein, 251 aa, synthetic construct
DPAVYQLRDSKSSDKSVCLFTDFDSQTNVSQSKDSDVYITDKCVLDMRSMDFKSNSAVAWSNKSDFACANAFNNSIIPEDTFFPSPESSCGFTSESYQQGVLSATILYEILLGKATLYAVLVSALVLMAMVKRKDSRGRVKFSRSADAPAYQQGQNQLYNELNLGRREEYDVLDKRRGRDPEMGGKPQRRKNPQEGLYNELQKDKMAEAYSEIGMKGERRRGKGHDGLYQGLSTATKDTYDALHMQALPPR

SEQ ID NO: 28018 - protein, 250 aa, synthetic construct
PAVYQLRDSKSSDKSVCLFTDFDSQTNVSQSKDSDVYITDKCVLDMRSMDFKSNSAVAWSNKSDFACANAFNNSIIPEDTFFPSPESSCGFTSESYQQGVLSATILYEILLGKATLYAVLVSALVLMAMVKRKDSRGRVKFSRSADAPAYQQGQNQLYNELNLGRREEYDVLDKRRGRDPEMGGKPQRRKNPQEGLYNELQKDKMAEAYSEIGMKGERRRGKGHDGLYQGLSTATKDTYDALHMQALPPR

SEQ ID NO: 28019 - protein, 249 aa, synthetic construct
AVYQLRDSKSSDKSVCLFTDFDSQTNVSQSKDSDVYITDKCVLDMRSMDFKSNSAVAWSNKSDFACANAFNNSIIPEDTFFPSPESSCGFTSESYQQGVLSATILYEILLGKATLYAVLVSALVLMAMVKRKDSRGRVKFSRSADAPAYQQGQNQLYNELNLGRREEYDVLDKRRGRDPEMGGKPQRRKNPQEGLYNELQKDKMAEAYSEIGMKGERRRGKGHDGLYQGLSTATKDTYDALHMQALPPR

SEQ ID NO: 28020 - protein, 248 aa, synthetic construct
VYQLRDSKSSDKSVCLFTDFDSQTNVSQSKDSDVYITDKCVLDMRSMDFKSNSAVAWSNKSDFACANAFNNSIIPEDTFFPSPESSCGFTSESYQQGVLSATILYEILLGKATLYAVLVSALVLMAMVKRKDSRGRVKFSRSADAPAYQQGQNQLYNELNLGRREEYDVLDKRRGRDPEMGGKPQRRKNPQEGLYNELQKDKMAEAYSEIGMKGERRRGKGHDGLYQGLSTATKDTYDALHMQALPPR

SEQ ID NO: 28021 - protein, 247 aa, synthetic construct
YQLRDSKSSDKSVCLFTDFDSQTNVSQSKDSDVYITDKCVLDMRSMDFKSNSAVAWSNKSDFACANAFNNSIIPEDTFFPSPESSCGFTSESYQQGVLSATILYEILLGKATLYAVLVSALVLMAMVKRKDSRGRVKFSRSADAPAYQQGQNQLYNELNLGRREEYDVLDKRRGRDPEMGGKPQRRKNPQEGLYNELQKDKMAEAYSEIGMKGERRRGKGHDGLYQGLSTATKDTYDALHMQALPPR

SEQ ID NO: 28022 - protein, 246 aa, synthetic construct
QLRDSKSSDKSVCLFTDFDSQTNVSQSKDSDVYITDKCVLDMRSMDFKSNSAVAWSNKSDFACANAFNNSIIPEDTFFPSPESSCGFTSESYQQGVLSATILYEILLGKATLYAVLVSALVLMAMVKRKDSRGRVKFSRSADAPAYQQGQNQLYNELNLGRREEYDVLDKRRGRDPEMGGKPQRRKNPQEGLYNELQKDKMAEAYSEIGMKGERRRGKGHDGLYQGLSTATKDTYDALHMQALPPR

SEQ ID NO: 28023 - protein, 245 aa, synthetic construct
LRDSKSSDKSVCLFTDFDSQTNVSQSKDSDVYITDKCVLDMRSMDFKSNSAVAWSNKSDFACANAFNNSIIPEDTFFPSPESSCGFTSESYQQGVLSATILYEILLGKATLYAVLVSALVLMAMVKRKDSRGRVKFSRSADAPAYQQGQNQLYNELNLGRREEYDVLDKRRGRDPEMGGKPQRRKNPQEGLYNELQKDKMAEAYSEIGMKGERRRGKGHDGLYQGLSTATKDTYDALHMQALPPR

SEQ ID NO: 28024 - protein, 244 aa, synthetic construct
RDSKSSDKSVCLFTDFDSQTNVSQSKDSDVYITDKCVLDMRSMDFKSNSAVAWSNKSDFACANAFNNSIIPEDTFFPSPESSCGFTSESYQQGVLSATILYEILLGKATLYAVLVSALVLMAMVKRKDSRGRVKFSRSADAPAYQQGQNQLYNELNLGRREEYDVLDKRRGRDPEMGGKPQRRKNPQEGLYNELQKDKMAEAYSEIGMKGERRRGKGHDGLYQGLSTATKDTYDALHMQALPPR

SEQ ID NO: 28025 - protein, 243 aa, synthetic construct
DSKSSDKSVCLFTDFDSQTNVSQSKDSDVYITDKCVLDMRSMDFKSNSAVAWSNKSDFACANAFNNSIIPEDTFFPSPESSCGFTSESYQQGVLSATILYEILLGKATLYAVLVSALVLMAMVKRKDSRGRVKFSRSADAPAYQQGQNQLYNELNLGRREEYDVLDKRRGRDPEMGGKPQRRKNPQEGLYNELQKDKMAEAYSEIGMKGERRRGKGHDGLYQGLSTATKDTYDALHMQALPPR

SEQ ID NO: 28026 - protein, 242 aa, synthetic construct
SKSSDKSVCLFTDFDSQTNVSQSKDSDVYITDKCVLDMRSMDFKSNSAVAWSNKSDFACANAFNNSIIPEDTFFPSPESSCGFTSESYQQGVLSATILYEILLGKATLYAVLVSALVLMAMVKRKDSRGRVKFSRSADAPAYQQGQNQLYNELNLGRREEYDVLDKRRGRDPEMGGKPQRRKNPQEGLYNELQKDKMAEAYSEIGMKGERRRGKGHDGLYQGLSTATKDTYDALHMQALPPR

SEQ ID NO: 28027 - protein, 241 aa, synthetic construct
KSSDKSVCLFTDFDSQTNVSQSKDSDVYITDKCVLDMRSMDFKSNSAVAWSNKSDFACANAFNNSIIPEDTFFPSPESSCGFTSESYQQGVLSATILYEILLGKATLYAVLVSALVLMAMVKRKDSRGRVKFSRSADAPAYQQGQNQLYNELNLGRREEYDVLDKRRGRDPEMGGKPQRRKNPQEGLYNELQKDKMAEAYSEIGMKGERRRGKGHDGLYQGLSTATKDTYDALHMQALPPR

SEQ ID NO: 28028 - protein, 240 aa, synthetic construct
SSDKSVCLFTDFDSQTNVSQSKDSDVYITDKCVLDMRSMDFKSNSAVAWSNKSDFACANAFNNSIIPEDTFFPSPESSCGFTSESYQQGVLSATILYEILLGKATLYAVLVSALVLMAMVKRKDSRGRVKFSRSADAPAYQQGQNQLYNELNLGRREEYDVLDKRRGRDPEMGGKPQRRKNPQEGLYNELQKDKMAEAYSEIGMKGERRRGKGHDGLYQGLSTATKDTYDALHMQALPPR

SEQ ID NO: 28029 - protein, 239 aa, synthetic construct
SDKSVCLFTDFDSQTNVSQSKDSDVYITDKCVLDMRSMDFKSNSAVAWSNKSDFACANAFNNSIIPEDTFFPSPESSCGFTSESYQQGVLSATILYEILLGKATLYAVLVSALVLMAMVKRKDSRGRVKFSRSADAPAYQQGQNQLYNELNLGRREEYDVLDKRRGRDPEMGGKPQRRKNPQEGLYNELQKDKMAEAYSEIGMKGERRRGKGHDGLYQGLSTATKDTYDALHMQALPPR

SEQ ID NO: 28030 - protein, 238 aa, synthetic construct
DKSVCLFTDFDSQTNVSQSKDSDVYITDKCVLDMRSMDFKSNSAVAWSNKSDFACANAFNNSIIPEDTFFPSPESSCGFTSESYQQGVLSATILYEILLGKATLYAVLVSALVLMAMVKRKDSRGRVKFSRSADAPAYQQGQNQLYNELNLGRREEYDVLDKRRGRDPEMGGKPQRRKNPQEGLYNELQKDKMAEAYSEIGMKGERRRGKGHDGLYQGLSTATKDTYDALHMQALPPR

SEQ ID NO: 28031 - protein, 237 aa, synthetic construct
KSVCLFTDFDSQTNVSQSKDSDVYITDKCVLDMRSMDFKSNSAVAWSNKSDFACANAFNNSIIPEDTFFPSPESSCGFTSESYQQGVLSATILYEILLGKATLYAVLVSALVLMAMVKRKDSRGRVKFSRSADAPAYQQGQNQLYNELNLGRREEYDVLDKRRGRDPEMGGKPQRRKNPQEGLYNELQKDKMAEAYSEIGMKGERRRGKGHDGLYQGLSTATKDTYDALHMQALPPR

SEQ ID NO: 28032 - protein, 236 aa, synthetic construct
SVCLFTDFDSQTNVSQSKDSDVYITDKCVLDMRSMDFKSNSAVAWSNKSDFACANAFNNSIIPEDTFFPSPESSCGFTSESYQQGVLSATILYEILLGKATLYAVLVSALVLMAMVKRKDSRGRVKFSRSADAPAYQQGQNQLYNELNLGRREEYDVLDKRRGRDPEMGGKPQRRKNPQEGLYNELQKDKMAEAYSEIGMKGERRRGKGHDGLYQGLSTATKDTYDALHMQALPPR

SEQ ID NO: 28033 - protein, 235 aa, synthetic construct
VCLFTDFDSQTNVSQSKDSDVYITDKCVLDMRSMDFKSNSAVAWSNKSDFACANAFNNSIIPEDTFFPSPESSCGFTSESYQQGVLSATILYEILLGKATLYAVLVSALVLMAMVKRKDSRGRVKFSRSADAPAYQQGQNQLYNELNLGRREEYDVLDKRRGRDPEMGGKPQRRKNPQEGLYNELQKDKMAEAYSEIGMKGERRRGKGHDGLYQGLSTATKDTYDALHMQALPPR

SEQ ID NO: 28034 - protein, 230 aa, synthetic construct
DFDSQTNVSQSKDSDVYITDKCVLDMRSMDFKSNSAVAWSNKSDFACANAFNNSIIPEDTFFPSPESSCGFTSESYQQGVLSATILYEILLGKATLYAVLVSALVLMAMVKRKDSRGRVKFSRSADAPAYQQGQNQLYNELNLGRREEYDVLDKRRGRDPEMGGKPQRRKNPQEGLYNELQKDKMAEAYSEIGMKGERRRGKGHDGLYQGLSTATKDTYDALHMQALPPR

SEQ ID NO: 28035 - protein, 225 aa, synthetic construct
TNVSQSKDSDVYITDKCVLDMRSMDFKSNSAVAWSNKSDFACANAFNNSIIPEDTFFPSPESSCGFTSESYQQGVLSATILYEILLGKATLYAVLVSALVLMAMVKRKDSRGRVKFSRSADAPAYQQGQNQLYNELNLGRREEYDVLDKRRGRDPEMGGKPQRRKNPQEGLYNELQKDKMAEAYSEIGMKGERRRGKGHDGLYQGLSTATKDTYDALHMQALPPR

SEQ ID NO: 28036 - protein, 258 aa, synthetic construct; identical to SEQ ID NO: 28000

SEQ ID NO: 28037 - protein, 257 aa, synthetic construct
QNPDPAVYQLRDSKSSDKSVCLFTDFDSQTNVSQSKDSDVYITDKCVLDMRSMDFKSNSAVAWSNKSDFACANAFNNSIIPEDTFFPSPESSCDVKLVEKSFETDTNLNFQILYEILLGKATLYAVLVSALVLMAMVKRKDSRGRVKFSRSADAPAYQQGQNQLYNELNLGRREEYDVLDKRRGRDPEMGGKPQRRKNPQEGLYNELQKDKMAEAYSEIGMKGERRRGKGHDGLYQGLSTATKDTYDALHMQALPPR

SEQ ID NO: 28038 - protein, 256 aa, synthetic construct
NPDPAVYQLRDSKSSDKSVCLFTDFDSQTNVSQSKDSDVYITDKCVLDMRSMDFKSNSAVAWSNKSDFACANAFNNSIIPEDTFFPSPESSCDVKLVEKSFETDTNLNFQILYEILLGKATLYAVLVSALVLMAMVKRKDSRGRVKFSRSADAPAYQQGQNQLYNELNLGRREEYDVLDKRRGRDPEMGGKPQRRKNPQEGLYNELQKDKMAEAYSEIGMKGERRRGKGHDGLYQGLSTATKDTYDALHMQALPPR

SEQ ID NO: 28039 - protein, 255 aa, synthetic construct
PDPAVYQLRDSKSSDKSVCLFTDFDSQTNVSQSKDSDVYITDKCVLDMRSMDFKSNSAVAWSNKSDFACANAFNNSIIPEDTFFPSPESSCDVKLVEKSFETDTNLNFQILYEILLGKATLYAVLVSALVLMAMVKRKDSRGRVKFSRSADAPAYQQGQNQLYNELNLGRREEYDVLDKRRGRDPEMGGKPQRRKNPQEGLYNELQKDKMAEAYSEIGMKGERRRGKGHDGLYQGLSTATKDTYDALHMQALPPR

SEQ ID NO: 28040 - protein, 254 aa, synthetic construct
DPAVYQLRDSKSSDKSVCLFTDFDSQTNVSQSKDSDVYITDKCVLDMRSMDFKSNSAVAWSNKSDFACANAFNNSIIPEDTFFPSPESSCDVKLVEKSFETDTNLNFQILYEILLGKATLYAVLVSALVLMAMVKRKDSRGRVKFSRSADAPAYQQGQNQLYNELNLGRREEYDVLDKRRGRDPEMGGKPQRRKNPQEGLYNELQKDKMAEAYSEIGMKGERRRGKGHDGLYQGLSTATKDTYDALHMQALPPR

SEQ ID NO: 28041 - protein, 253 aa, synthetic construct
PAVYQLRDSKSSDKSVCLFTDFDSQTNVSQSKDSDVYITDKCVLDMRSMDFKSNSAVAWSNKSDFACANAFNNSIIPEDTFFPSPESSCDVKLVEKSFETDTNLNFQILYEILLGKATLYAVLVSALVLMAMVKRKDSRGRVKFSRSADAPAYQQGQNQLYNELNLGRREEYDVLDKRRGRDPEMGGKPQRRKNPQEGLYNELQKDKMAEAYSEIGMKGERRRGKGHDGLYQGLSTATKDTYDALHMQALPPR

SEQ ID NO: 28042 - protein, 252 aa, synthetic construct
AVYQLRDSKSSDKSVCLFTDFDSQTNVSQSKDSDVYITDKCVLDMRSMDFKSNSAVAWSNKSDFACANAFNNSIIPEDTFFPSPESSCDVKLVEKSFETDTNLNFQILYEILLGKATLYAVLVSALVLMAMVKRKDSRGRVKFSRSADAPAYQQGQNQLYNELNLGRREEYDVLDKRRGRDPEMGGKPQRRKNPQEGLYNELQKDKMAEAYSEIGMKGERRRGKGHDGLYQGLSTATKDTYDALHMQALPPR

SEQ ID NO: 28043 - protein, 251 aa, synthetic construct
VYQLRDSKSSDKSVCLFTDFDSQTNVSQSKDSDVYITDKCVLDMRSMDFKSNSAVAWSNKSDFACANAFNNSIIPEDTFFPSPESSCDVKLVEKSFETDTNLNFQILYEILLGKATLYAVLVSALVLMAMVKRKDSRGRVKFSRSADAPAYQQGQNQLYNELNLGRREEYDVLDKRRGRDPEMGGKPQRRKNPQEGLYNELQKDKMAEAYSEIGMKGERRRGKGHDGLYQGLSTATKDTYDALHMQALPPR

SEQ ID NO: 28044 - protein, 250 aa, synthetic construct
YQLRDSKSSDKSVCLFTDFDSQTNVSQSKDSDVYITDKCVLDMRSMDFKSNSAVAWSNKSDFACANAFNNSIIPEDTFFPSPESSCDVKLVEKSFETDTNLNFQILYEILLGKATLYAVLVSALVLMAMVKRKDSRGRVKFSRSADAPAYQQGQNQLYNELNLGRREEYDVLDKRRGRDPEMGGKPQRRKNPQEGLYNELQKDKMAEAYSEIGMKGERRRGKGHDGLYQGLSTATKDTYDALHMQALPPR

SEQ ID NO: 28045 - protein, 249 aa, synthetic construct
QLRDSKSSDKSVCLFTDFDSQTNVSQSKDSDVYITDKCVLDMRSMDFKSNSAVAWSNKSDFACANAFNNSIIPEDTFFPSPESSCDVKLVEKSFETDTNLNFQILYEILLGKATLYAVLVSALVLMAMVKRKDSRGRVKFSRSADAPAYQQGQNQLYNELNLGRREEYDVLDKRRGRDPEMGGKPQRRKNPQEGLYNELQKDKMAEAYSEIGMKGERRRGKGHDGLYQGLSTATKDTYDALHMQALPPR

SEQ ID NO: 28046 - protein, 248 aa, synthetic construct
LRDSKSSDKSVCLFTDFDSQTNVSQSKDSDVYITDKCVLDMRSMDFKSNSAVAWSNKSDFACANAFNNSIIPEDTFFPSPESSCDVKLVEKSFETDTNLNFQILYEILLGKATLYAVLVSALVLMAMVKRKDSRGRVKFSRSADAPAYQQGQNQLYNELNLGRREEYDVLDKRRGRDPEMGGKPQRRKNPQEGLYNELQKDKMAEAYSEIGMKGERRRGKGHDGLYQGLSTATKDTYDALHMQALPPR

SEQ ID NO: 28047 - protein, 247 aa, synthetic construct
RDSKSSDKSVCLFTDFDSQTNVSQSKDSDVYITDKCVLDMRSMDFKSNSAVAWSNKSDFACANAFNNSIIPEDTFFPSPESSCDVKLVEKSFETDTNLNFQILYEILLGKATLYAVLVSALVLMAMVKRKDSRGRVKFSRSADAPAYQQGQNQLYNELNLGRREEYDVLDKRRGRDPEMGGKPQRRKNPQEGLYNELQKDKMAEAYSEIGMKGERRRGKGHDGLYQGLSTATKDTYDALHMQALPPR

SEQ ID NO: 28048 - protein, 246 aa, synthetic construct
DSKSSDKSVCLFTDFDSQTNVSQSKDSDVYITDKCVLDMRSMDFKSNSAVAWSNKSDFACANAFNNSIIPEDTFFPSPESSCDVKLVEKSFETDTNLNFQILYEILLGKATLYAVLVSALVLMAMVKRKDSRGRVKFSRSADAPAYQQGQNQLYNELNLGRREEYDVLDKRRGRDPEMGGKPQRRKNPQEGLYNELQKDKMAEAYSEIGMKGERRRGKGHDGLYQGLSTATKDTYDALHMQALPPR

SEQ ID NO: 28049 - protein, 245 aa, synthetic construct
SKSSDKSVCLFTDFDSQTNVSQSKDSDVYITDKCVLDMRSMDFKSNSAVAWSNKSDFACANAFNNSIIPEDTFFPSPESSCDVKLVEKSFETDTNLNFQILYEILLGKATLYAVLVSALVLMAMVKRKDSRGRVKFSRSADAPAYQQGQNQLYNELNLGRREEYDVLDKRRGRDPEMGGKPQRRKNPQEGLYNELQKDKMAEAYSEIGMKGERRRGKGHDGLYQGLSTATKDTYDALHMQALPPR

SEQ ID NO: 28050 - protein, 244 aa, synthetic construct
KSSDKSVCLFTDFDSQTNVSQSKDSDVYITDKCVLDMRSMDFKSNSAVAWSNKSDFACANAFNNSIIPEDTFFPSPESSCDVKLVEKSFETDTNLNFQILYEILLGKATLYAVLVSALVLMAMVKRKDSRGRVKFSRSADAPAYQQGQNQLYNELNLGRREEYDVLDKRRGRDPEMGGKPQRRKNPQEGLYNELQKDKMAEAYSEIGMKGERRRGKGHDGLYQGLSTATKDTYDALHMQALPPR

SEQ ID NO: 28051 - protein, 243 aa, synthetic construct
SSDKSVCLFTDFDSQTNVSQSKDSDVYITDKCVLDMRSMDFKSNSAVAWSNKSDFACANAFNNSIIPEDTFFPSPESSCDVKLVEKSFETDTNLNFQILYEILLGKATLYAVLVSALVLMAMVKRKDSRGRVKFSRSADAPAYQQGQNQLYNELNLGRREEYDVLDKRRGRDPEMGGKPQRRKNPQEGLYNELQKDKMAEAYSEIGMKGERRRGKGHDGLYQGLSTATKDTYDALHMQALPPR

SEQ ID NO: 28052 - protein, 242 aa, synthetic construct
SDKSVCLFTDFDSQTNVSQSKDSDVYITDKCVLDMRSMDFKSNSAVAWSNKSDFACANAFNNSIIPEDTFFPSPESSCDVKLVEKSFETDTNLNFQILYEILLGKATLYAVLVSALVLMAMVKRKDSRGRVKFSRSADAPAYQQGQNQLYNELNLGRREEYDVLDKRRGRDPEMGGKPQRRKNPQEGLYNELQKDKMAEAYSEIGMKGERRRGKGHDGLYQGLSTATKDTYDALHMQALPPR

SEQ ID NO: 28053 - protein, 241 aa, synthetic construct
DKSVCLFTDFDSQTNVSQSKDSDVYITDKCVLDMRSMDFKSNSAVAWSNKSDFACANAFNNSIIPEDTFFPSPESSCDVKLVEKSFETDTNLNFQILYEILLGKATLYAVLVSALVLMAMVKRKDSRGRVKFSRSADAPAYQQGQNQLYNELNLGRREEYDVLDKRRGRDPEMGGKPQRRKNPQEGLYNELQKDKMAEAYSEIGMKGERRRGKGHDGLYQGLSTATKDTYDALHMQALPPR

SEQ ID NO: 28054 - protein, 240 aa, synthetic construct
KSVCLFTDFDSQTNVSQSKDSDVYITDKCVLDMRSMDFKSNSAVAWSNKSDFACANAFNNSIIPEDTFFPSPESSCDVKLVEKSFETDTNLNFQILYEILLGKATLYAVLVSALVLMAMVKRKDSRGRVKFSRSADAPAYQQGQNQLYNELNLGRREEYDVLDKRRGRDPEMGGKPQRRKNPQEGLYNELQKDKMAEAYSEIGMKGERRRGKGHDGLYQGLSTATKDTYDALHMQALPPR

SEQ ID NO: 28055 - protein, 239 aa, synthetic construct
SVCLFTDFDSQTNVSQSKDSDVYITDKCVLDMRSMDFKSNSAVAWSNKSDFACANAFNNSIIPEDTFFPSPESSCDVKLVEKSFETDTNLNFQILYEILLGKATLYAVLVSALVLMAMVKRKDSRGRVKFSRSADAPAYQQGQNQLYNELNLGRREEYDVLDKRRGRDPEMGGKPQRRKNPQEGLYNELQKDKMAEAYSEIGMKGERRRGKGHDGLYQGLSTATKDTYDALHMQALPPR

SEQ ID NO: 28056 - protein, 238 aa, synthetic construct
VCLFTDFDSQTNVSQSKDSDVYITDKCVLDMRSMDFKSNSAVAWSNKSDFACANAFNNSIIPEDTFFPSPESSCDVKLVEKSFETDTNLNFQILYEILLGKATLYAVLVSALVLMAMVKRKDSRGRVKFSRSADAPAYQQGQNQLYNELNLGRREEYDVLDKRRGRDPEMGGKPQRRKNPQEGLYNELQKDKMAEAYSEIGMKGERRRGKGHDGLYQGLSTATKDTYDALHMQALPPR

SEQ ID NO: 28057 - protein, 233 aa, synthetic construct
DFDSQTNVSQSKDSDVYITDKCVLDMRSMDFKSNSAVAWSNKSDFACANAFNNSIIPEDTFFPSPESSCDVKLVEKSFETDTNLNFQILYEILLGKATLYAVLVSALVLMAMVKRKDSRGRVKFSRSADAPAYQQGQNQLYNELNLGRREEYDVLDKRRGRDPEMGGKPQRRKNPQEGLYNELQKDKMAEAYSEIGMKGERRRGKGHDGLYQGLSTATKDTYDALHMQALPPR

SEQ ID NO: 28058 - protein, 228 aa, synthetic construct
TNVSQSKDSDVYITDKCVLDMRSMDFKSNSAVAWSNKSDFACANAFNNSIIPEDTFFPSPESSCDVKLVEKSFETDTNLNFQILYEILLGKATLYAVLVSALVLMAMVKRKDSRGRVKFSRSADAPAYQQGQNQLYNELNLGRREEYDVLDKRRGRDPEMGGKPQRRKNPQEGLYNELQKDKMAEAYSEIGMKGERRRGKGHDGLYQGLSTATKDTYDALHMQALPPR

SEQ ID NO: 28059 - protein, 273 aa, synthetic construct; identical to SEQ ID NO: 28001

SEQ ID NO: 28060 - protein, 272 aa, synthetic construct
QNPDPAVYQLRDSKSSDKSVCLFTDFDSQTNVSQSKDSDVYITDKCVLDMRSMDFKSNSAVAWSNKSDFACANAFNNSIIPEDTFFPSPESSDSTDHVKPKETENTKQPSKSCHKPKAIVHTEKVNMMSLTVLGLRMLFAKTVAVNFLLTAKLFFLLTARVKFSRSADAPAYQQGQNQLYNELNLGRREEYDVLDKRRGRDPEMGGKPQRRKNPQEGLYNELQKDKMAEAYSEIGMKGERRRGKGHDGLYQGLSTATKDTYDALHMQALPPR

SEQ ID NO: 28061 - protein, 271 aa, synthetic construct
NPDPAVYQLRDSKSSDKSVCLFTDFDSQTNVSQSKDSDVYITDKCVLDMRSMDFKSNSAVAWSNKSDFACANAFNNSIIPEDTFFPSPESSDSTDHVKPKETENTKQPSKSCHKPKAIVHTEKVNMMSLTVLGLRMLFAKTVAVNFLLTAKLFFLLTARVKFSRSADAPAYQQGQNQLYNELNLGRREEYDVLDKRRGRDPEMGGKPQRRKNPQEGLYNELQKDKMAEAYSEIGMKGERRRGKGHDGLYQGLSTATKDTYDALHMQALPPR

SEQ ID NO: 28062 - protein, 270 aa, synthetic construct
PDPAVYQLRDSKSSDKSVCLFTDFDSQTNVSQSKDSDVYITDKCVLDMRSMDFKSNSAVAWSNKSDFACANAFNNSIIPEDTFFPSPESSDSTDHVKPKETENTKQPSKSCHKPKAIVHTEKVNMMSLTVLGLRMLFAKTVAVNFLLTAKLFFLLTARVKFSRSADAPAYQQGQNQLYNELNLGRREEYDVLDKRRGRDPEMGGKPQRRKNPQEGLYNELQKDKMAEAYSEIGMKGERRRGKGHDGLYQGLSTATKDTYDALHMQALPPR

SEQ ID NO: 28063 - protein, 269 aa, synthetic construct
DPAVYQLRDSKSSDKSVCLFTDFDSQTNVSQSKDSDVYITDKCVLDMRSMDFKSNSAVAWSNKSDFACANAFNNSIIPEDTFFPSPESSDSTDHVKPKETENTKQPSKSCHKPKAIVHTEKVNMMSLTVLGLRMLFAKTVAVNFLLTAKLFFLLTARVKFSRSADAPAYQQGQNQLYNELNLGRREEYDVLDKRRGRDPEMGGKPQRRKNPQEGLYNELQKDKMAEAYSEIGMKGERRRGKGHDGLYQGLSTATKDTYDALHMQALPPR

SEQ ID NO: 28064 - protein, 268 aa, synthetic construct
PAVYQLRDSKSSDKSVCLFTDFDSQTNVSQSKDSDVYITDKCVLDMRSMDFKSNSAVAWSNKSDFACANAFNNSIIPEDTFFPSPESSDSTDHVKPKETENTKQPSKSCHKPKAIVHTEKVNMMSLTVLGLRMLFAKTVAVNFLLTAKLFFLLTARVKFSRSADAPAYQQGQNQLYNELNLGRREEYDVLDKRRGRDPEMGGKPQRRKNPQEGLYNELQKDKMAEAYSEIGMKGERRRGKGHDGLYQGLSTATKDTYDALHMQALPPR

SEQ ID NO: 28065 - protein, 267 aa, synthetic construct
AVYQLRDSKSSDKSVCLFTDFDSQTNVSQSKDSDVYITDKCVLDMRSMDFKSNSAVAWSNKSDFACANAFNNSIIPEDTFFPSPESSDSTDHVKPKETENTKQPSKSCHKPKAIVHTEKVNMMSLTVLGLRMLFAKTVAVNFLLTAKLFFLLTARVKFSRSADAPAYQQGQNQLYNELNLGRREEYDVLDKRRGRDPEMGGKPQRRKNPQEGLYNELQKDKMAEAYSEIGMKGERRRGKGHDGLYQGLSTATKDTYDALHMQALPPR

SEQ ID NO: 28066 - protein, 266 aa, synthetic construct
VYQLRDSKSSDKSVCLFTDFDSQTNVSQSKDSDVYITDKCVLDMRSMDFKSNSAVAWSNKSDFACANAFNNSIIPEDTFFPSPESSDSTDHVKPKETENTKQPSKSCHKPKAIVHTEKVNMMSLTVLGLRMLFAKTVAVNFLLTAKLFFLLTARVKFSRSADAPAYQQGQNQLYNELNLGRREEYDVLDKRRGRDPEMGGKPQRRKNPQEGLYNELQKDKMAEAYSEIGMKGERRRGKGHDGLYQGLSTATKDTYDALHMQALPPR

SEQ ID NO: 28067 - protein, 265 aa, synthetic construct
YQLRDSKSSDKSVCLFTDFDSQTNVSQSKDSDVYITDKCVLDMRSMDFKSNSAVAWSNKSDFACANAFNNSIIPEDTFFPSPESSDSTDHVKPKETENTKQPSKSCHKPKAIVHTEKVNMMSLTVLGLRMLFAKTVAVNFLLTAKLFFLLTARVKFSRSADAPAYQQGQNQLYNELNLGRREEYDVLDKRRGRDPEMGGKPQRRKNPQEGLYNELQKDKMAEAYSEIGMKGERRRGKGHDGLYQGLSTATKDTYDALHMQALPPR

SEQ ID NO: 28068 - protein, 264 aa, synthetic construct
QLRDSKSSDKSVCLFTDFDSQTNVSQSKDSDVYITDKCVLDMRSMDFKSNSAVAWSNKSDFACANAFNNSIIPEDTFFPSPESSDSTDHVKPKETENTKQPSKSCHKPKAIVHTEKVNMMSLTVLGLRMLFAKTVAVNFLLTAKLFFLLTARVKFSRSADAPAYQQGQNQLYNELNLGRREEYDVLDKRRGRDPEMGGKPQRRKNPQEGLYNELQKDKMAEAYSEIGMKGERRRGKGHDGLYQGLSTATKDTYDALHMQALPPR

SEQ ID NO: 28069 - protein, 263 aa, synthetic construct
LRDSKSSDKSVCLFTDFDSQTNVSQSKDSDVYITDKCVLDMRSMDFKSNSAVAWSNKSDFACANAFNNSIIPEDTFFPSPESSDSTDHVKPKETENTKQPSKSCHKPKAIVHTEKVNMMSLTVLGLRMLFAKTVAVNFLLTAKLFFLLTARVKFSRSADAPAYQQGQNQLYNELNLGRREEYDVLDKRRGRDPEMGGKPQRRKNPQEGLYNELQKDKMAEAYSEIGMKGERRRGKGHDGLYQGLSTATKDTYDALHMQALPPR

SEQ ID NO: 28070 - protein, 262 aa, synthetic construct
RDSKSSDKSVCLFTDFDSQTNVSQSKDSDVYITDKCVLDMRSMDFKSNSAVAWSNKSDFACANAFNNSIIPEDTFFPSPESSDSTDHVKPKETENTKQPSKSCHKPKAIVHTEKVNMMSLTVLGLRMLFAKTVAVNFLLTAKLFFLLTARVKFSRSADAPAYQQGQNQLYNELNLGRREEYDVLDKRRGRDPEMGGKPQRRKNPQEGLYNELQKDKMAEAYSEIGMKGERRRGKGHDGLYQGLSTATKDTYDALHMQALPPR

SEQ ID NO: 28071 - protein, 261 aa, synthetic construct
DSKSSDKSVCLFTDFDSQTNVSQSKDSDVYITDKCVLDMRSMDFKSNSAVAWSNKSDFACANAFNNSIIPEDTFFPSPESSDSTDHVKPKETENTKQPSKSCHKPKAIVHTEKVNMMSLTVLGLRMLFAKTVAVNFLLTAKLFFLLTARVKFSRSADAPAYQQGQNQLYNELNLGRREEYDVLDKRRGRDPEMGGKPQRRKNPQEGLYNELQKDKMAEAYSEIGMKGERRRGKGHDGLYQGLSTATKDTYDALHMQALPPR

SEQ ID NO: 28072 - protein, 260 aa, synthetic construct
SKSSDKSVCLFTDFDSQTNVSQSKDSDVYITDKCVLDMRSMDFKSNSAVAWSNKSDFACANAFNNSIIPEDTFFPSPESSDSTDHVKPKETENTKQPSKSCHKPKAIVHTEKVNMMSLTVLGLRMLFAKTVAVNFLLTAKLFFLLTARVKFSRSADAPAYQQGQNQLYNELNLGRREEYDVLDKRRGRDPEMGGKPQRRKNPQEGLYNELQKDKMAEAYSEIGMKGERRRGKGHDGLYQGLSTATKDTYDALHMQALPPR

SEQ ID NO: 28073 - protein, 259 aa, synthetic construct
KSSDKSVCLFTDFDSQTNVSQSKDSDVYITDKCVLDMRSMDFKSNSAVAWSNKSDFACANAFNNSIIPEDTFFPSPESSDSTDHVKPKETENTKQPSKSCHKPKAIVHTEKVNMMSLTVLGLRMLFAKTVAVNFLLTAKLFFLLTARVKFSRSADAPAYQQGQNQLYNELNLGRREEYDVLDKRRGRDPEMGGKPQRRKNPQEGLYNELQKDKMAEAYSEIGMKGERRRGKGHDGLYQGLSTATKDTYDALHMQALPPR

SEQ ID NO: 28074 - protein, 258 aa, synthetic construct
SSDKSVCLFTDFDSQTNVSQSKDSDVYITDKCVLDMRSMDFKSNSAVAWSNKSDFACANAFNNSIIPEDTFFPSPESSDSTDHVKPKETENTKQPSKSCHKPKAIVHTEKVNMMSLTVLGLRMLFAKTVAVNFLLTAKLFFLLTARVKFSRSADAPAYQQGQNQLYNELNLGRREEYDVLDKRRGRDPEMGGKPQRRKNPQEGLYNELQKDKMAEAYSEIGMKGERRRGKGHDGLYQGLSTATKDTYDALHMQALPPR

SEQ ID NO: 28075 - protein, 257 aa, synthetic construct
SDKSVCLFTDFDSQTNVSQSKDSDVYITDKCVLDMRSMDFKSNSAVAWSNKSDFACANAFNNSIIPEDTFFPSPESSDSTDHVKPKETENTKQPSKSCHKPKAIVHTEKVNMMSLTVLGLRMLFAKTVAVNFLLTAKLFFLLTARVKFSRSADAPAYQQGQNQLYNELNLGRREEYDVLDKRRGRDPEMGGKPQRRKNPQEGLYNELQKDKMAEAYSEIGMKGERRRGKGHDGLYQGLSTATKDTYDALHMQALPPR

SEQ ID NO: 28076 - protein, 256 aa, synthetic construct
DKSVCLFTDFDSQTNVSQSKDSDVYITDKCVLDMRSMDFKSNSAVAWSNKSDFACANAFNNSIIPEDTFFPSPESSDSTDHVKPKETENTKQPSKSCHKPKAIVHTEKVNMMSLTVLGLRMLFAKTVAVNFLLTAKLFFLLTARVKFSRSADAPAYQQGQNQLYNELNLGRREEYDVLDKRRGRDPEMGGKPQRRKNPQEGLYNELQKDKMAEAYSEIGMKGERRRGKGHDGLYQGLSTATKDTYDALHMQALPPR

SEQ ID NO: 28077 - protein, 255 aa, synthetic construct
KSVCLFTDFDSQTNVSQSKDSDVYITDKCVLDMRSMDFKSNSAVAWSNKSDFACANAFNNSIIPEDTFFPSPESSDSTDHVKPKETENTKQPSKSCHKPKAIVHTEKVNMMSLTVLGLRMLFAKTVAVNFLLTAKLFFLLTARVKFSRSADAPAYQQGQNQLYNELNLGRREEYDVLDKRRGRDPEMGGKPQRRKNPQEGLYNELQKDKMAEAYSEIGMKGERRRGKGHDGLYQGLSTATKDTYDALHMQALPPR

SEQ ID NO: 28078 - protein, 254 aa, synthetic construct
SVCLFTDFDSQTNVSQSKDSDVYITDKCVLDMRSMDFKSNSAVAWSNKSDFACANAFNNSIIPEDTFFPSPESSDSTDHVKPKETENTKQPSKSCHKPKAIVHTEKVNMMSLTVLGLRMLFAKTVAVNFLLTAKLFFLLTARVKFSRSADAPAYQQGQNQLYNELNLGRREEYDVLDKRRGRDPEMGGKPQRRKNPQEGLYNELQKDKMAEAYSEIGMKGERRRGKGHDGLYQGLSTATKDTYDALHMQALPPR

SEQ ID NO: 28079 - protein, 253 aa, synthetic construct
VCLFTDFDSQTNVSQSKDSDVYITDKCVLDMRSMDFKSNSAVAWSNKSDFACANAFNNSIIPEDTFFPSPESSDSTDHVKPKETENTKQPSKSCHKPKAIVHTEKVNMMSLTVLGLRMLFAKTVAVNFLLTAKLFFLLTARVKFSRSADAPAYQQGQNQLYNELNLGRREEYDVLDKRRGRDPEMGGKPQRRKNPQEGLYNELQKDKMAEAYSEIGMKGERRRGKGHDGLYQGLSTATKDTYDALHMQALPPR

SEQ ID NO: 28080 - protein, 248 aa, synthetic construct
DFDSQTNVSQSKDSDVYITDKCVLDMRSMDFKSNSAVAWSNKSDFACANAFNNSIIPEDTFFPSPESSDSTDHVKPKETENTKQPSKSCHKPKAIVHTEKVNMMSLTVLGLRMLFAKTVAVNFLLTAKLFFLLTARVKFSRSADAPAYQQGQNQLYNELNLGRREEYDVLDKRRGRDPEMGGKPQRRKNPQEGLYNELQKDKMAEAYSEIGMKGERRRGKGHDGLYQGLSTATKDTYDALHMQALPPR

SEQ ID NO: 28081 - protein, 243 aa, synthetic construct
TNVSQSKDSDVYITDKCVLDMRSMDFKSNSAVAWSNKSDFACANAFNNSIIPEDTFFPSPESSDSTDHVKPKETENTKQPSKSCHKPKAIVHTEKVNMMSLTVLGLRMLFAKTVAVNFLLTAKLFFLLTARVKFSRSADAPAYQQGQNQLYNELNLGRREEYDVLDKRRGRDPEMGGKPQRRKNPQEGLYNELQKDKMAEAYSEIGMKGERRRGKGHDGLYQGLSTATKDTYDALHMQALPPR

SEQ ID NO: 28082 - protein, 270 aa, synthetic construct; identical to SEQ ID NO: 28009

SEQ ID NO: 28083 - protein, 269 aa, synthetic construct
QNPDPAVYQLRDSKSSDKSVCLFTDFDSQTNVSQSKDSDVYITDKCVLDMRSMDFKSNSAVAWSNKSDFACANAFNNSIIPEDTFFPSPESSDSTDHVKPKETENTKQPSKSCHKPKAIVHTEKVNMMSLTVLGLRMLFAKTVAVNFLLTAKLFFLRVKFSRSADAPAYQQGQNQLYNELNLGRREEYDVLDKRRGRDPEMGGKPQRRKNPQEGLYNELQKDKMAEAYSEIGMKGERRRGKGHDGLYQGLSTATKDTYDALHMQALPPR

SEQ ID NO: 28084 - protein, 268 aa, synthetic construct
NPDPAVYQLRDSKSSDKSVCLFTDFDSQTNVSQSKDSDVYITDKCVLDMRSMDFKSNSAVAWSNKSDFACANAFNNSIIPEDTFFPSPESSDSTDHVKPKETENTKQPSKSCHKPKAIVHTEKVNMMSLTVLGLRMLFAKTVAVNFLLTAKLFFLRVKFSRSADAPAYQQGQNQLYNELNLGRREEYDVLDKRRGRDPEMGGKPQRRKNPQEGLYNELQKDKMAEAYSEIGMKGERRRGKGHDGLYQGLSTATKDTYDALHMQALPPR

SEQ ID NO: 28085 - protein, 267 aa, synthetic construct
PDPAVYQLRDSKSSDKSVCLFTDFDSQTNVSQSKDSDVYITDKCVLDMRSMDFKSNSAVAWSNKSDFACANAFNNSIIPEDTFFPSPESSDSTDHVKPKETENTKQPSKSCHKPKAIVHTEKVNMMSLTVLGLRMLFAKTVAVNFLLTAKLFFLRVKFSRSADAPAYQQGQNQLYNELNLGRREEYDVLDKRRGRDPEMGGKPQRRKNPQEGLYNELQKDKMAEAYSEIGMKGERRRGKGHDGLYQGLSTATKDTYDALHMQALPPR

SEQ ID NO: 28086 - protein, 266 aa, synthetic construct
DPAVYQLRDSKSSDKSVCLFTDFDSQTNVSQSKDSDVYITDKCVLDMRSMDFKSNSAVAWSNKSDFACANAFNNSIIPEDTFFPSPESSDSTDHVKPKETENTKQPSKSCHKPKAIVHTEKVNMMSLTVLGLRMLFAKTVAVNFLLTAKLFFLRVKFSRSADAPAYQQGQNQLYNELNLGRREEYDVLDKRRGRDPEMGGKPQRRKNPQEGLYNELQKDKMAEAYSEIGMKGERRRGKGHDGLYQGLSTATKDTYDALHMQALPPR

SEQ ID NO: 28087 - protein, 265 aa, synthetic construct
PAVYQLRDSKSSDKSVCLFTDFDSQTNVSQSKDSDVYITDKCVLDMRSMDFKSNSAVAWSNKSDFACANAFNNSIIPEDTFFPSPESSDSTDHVKPKETENTKQPSKSCHKPKAIVHTEKVNMMSLTVLGLRMLFAKTVAVNFLLTAKLFFLRVKFSRSADAPAYQQGQNQLYNELNLGRREEYDVLDKRRGRDPEMGGKPQRRKNPQEGLYNELQKDKMAEAYSEIGMKGERRRGKGHDGLYQGLSTATKDTYDALHMQALPPR

SEQ ID NO: 28088 - protein, 264 aa, synthetic construct
AVYQLRDSKSSDKSVCLFTDFDSQTNVSQSKDSDVYITDKCVLDMRSMDFKSNSAVAWSNKSDFACANAFNNSIIPEDTFFPSPESSDSTDHVKPKETENTKQPSKSCHKPKAIVHTEKVNMMSLTVLGLRMLFAKTVAVNFLLTAKLFFLRVKFSRSADAPAYQQGQNQLYNELNLGRREEYDVLDKRRGRDPEMGGKPQRRKNPQEGLYNELQKDKMAEAYSEIGMKGERRRGKGHDGLYQGLSTATKDTYDALHMQALPPR

SEQ ID NO: 28089 - protein, 263 aa, synthetic construct
VYQLRDSKSSDKSVCLFTDFDSQTNVSQSKDSDVYITDKCVLDMRSMDFKSNSAVAWSNKSDFACANAFNNSIIPEDTFFPSPESSDSTDHVKPKETENTKQPSKSCHKPKAIVHTEKVNMMSLTVLGLRMLFAKTVAVNFLLTAKLFFLRVKFSRSADAPAYQQGQNQLYNELNLGRREEYDVLDKRRGRDPEMGGKPQRRKNPQEGLYNELQKDKMAEAYSEIGMKGERRRGKGHDGLYQGLSTATKDTYDALHMQALPPR

SEQ ID NO: 28090 - protein, 262 aa, synthetic construct
YQLRDSKSSDKSVCLFTDFDSQTNVSQSKDSDVYITDKCVLDMRSMDFKSNSAVAWSNKSDFACANAFNNSIIPEDTFFPSPESSDSTDHVKPKETENTKQPSKSCHKPKAIVHTEKVNMMSLTVLGLRMLFAKTVAVNFLLTAKLFFLRVKFSRSADAPAYQQGQNQLYNELNLGRREEYDVLDKRRGRDPEMGGKPQRRKNPQEGLYNELQKDKMAEAYSEIGMKGERRRGKGHDGLYQGLSTATKDTYDALHMQALPPR

SEQ ID NO: 28091 - protein, 261 aa, synthetic construct
QLRDSKSSDKSVCLFTDFDSQTNVSQSKDSDVYITDKCVLDMRSMDFKSNSAVAWSNKSDFACANAFNNSIIPEDTFFPSPESSDSTDHVKPKETENTKQPSKSCHKPKAIVHTEKVNMMSLTVLGLRMLFAKTVAVNFLLTAKLFFLRVKFSRSADAPAYQQGQNQLYNELNLGRREEYDVLDKRRGRDPEMGGKPQRRKNPQEGLYNELQKDKMAEAYSEIGMKGERRRGKGHDGLYQGLSTATKDTYDALHMQALPPR

SEQ ID NO: 28092 - protein, 260 aa, synthetic construct
LRDSKSSDKSVCLFTDFDSQTNVSQSKDSDVYITDKCVLDMRSMDFKSNSAVAWSNKSDFACANAFNNSIIPEDTFFPSPESSDSTDHVKPKETENTKQPSKSCHKPKAIVHTEKVNMMSLTVLGLRMLFAKTVAVNFLLTAKLFFLRVKFSRSADAPAYQQGQNQLYNELNLGRREEYDVLDKRRGRDPEMGGKPQRRKNPQEGLYNELQKDKMAEAYSEIGMKGERRRGKGHDGLYQGLSTATKDTYDALHMQALPPR

SEQ ID NO: 28093 - protein, 259 aa, synthetic construct
RDSKSSDKSVCLFTDFDSQTNVSQSKDSDVYITDKCVLDMRSMDFKSNSAVAWSNKSDFACANAFNNSIIPEDTFFPSPESSDSTDHVKPKETENTKQPSKSCHKPKAIVHTEKVNMMSLTVLGLRMLFAKTVAVNFLLTAKLFFLRVKFSRSADAPAYQQGQNQLYNELNLGRREEYDVLDKRRGRDPEMGGKPQRRKNPQEGLYNELQKDKMAEAYSEIGMKGERRRGKGHDGLYQGLSTATKDTYDALHMQALPPR

SEQ ID NO: 28094 - protein, 258 aa, synthetic construct
DSKSSDKSVCLFTDFDSQTNVSQSKDSDVYITDKCVLDMRSMDFKSNSAVAWSNKSDFACANAFNNSIIPEDTFFPSPESSDSTDHVKPKETENTKQPSKSCHKPKAIVHTEKVNMMSLTVLGLRMLFAKTVAVNFLLTAKLFFLRVKFSRSADAPAYQQGQNQLYNELNLGRREEYDVLDKRRGRDPEMGGKPQRRKNPQEGLYNELQKDKMAEAYSEIGMKGERRRGKGHDGLYQGLSTATKDTYDALHMQALPPR

SEQ ID NO: 28095 - protein, 257 aa, synthetic construct
SKSSDKSVCLFTDFDSQTNVSQSKDSDVYITDKCVLDMRSMDFKSNSAVAWSNKSDFACANAFNNSIIPEDTFFPSPESSDSTDHVKPKETENTKQPSKSCHKPKAIVHTEKVNMMSLTVLGLRMLFAKTVAVNFLLTAKLFFLRVKFSRSADAPAYQQGQNQLYNELNLGRREEYDVLDKRRGRDPEMGGKPQRRKNPQEGLYNELQKDKMAEAYSEIGMKGERRRGKGHDGLYQGLSTATKDTYDALHMQALPPR

SEQ ID NO: 28096 - protein, 256 aa, synthetic construct
KSSDKSVCLFTDFDSQTNVSQSKDSDVYITDKCVLDMRSMDFKSNSAVAWSNKSDFACANAFNNSIIPEDTFFPSPESSDSTDHVKPKETENTKQPSKSCHKPKAIVHTEKVNMMSLTVLGLRMLFAKTVAVNFLLTAKLFFLRVKFSRSADAPAYQQGQNQLYNELNLGRREEYDVLDKRRGRDPEMGGKPQRRKNPQEGLYNELQKDKMAEAYSEIGMKGERRRGKGHDGLYQGLSTATKDTYDALHMQALPPR

SEQ ID NO: 28097 - protein, 255 aa, synthetic construct
SSDKSVCLFTDFDSQTNVSQSKDSDVYITDKCVLDMRSMDFKSNSAVAWSNKSDFACANAFNNSIIPEDTFFPSPESSDSTDHVKPKETENTKQPSKSCHKPKAIVHTEKVNMMSLTVLGLRMLFAKTVAVNFLLTAKLFFLRVKFSRSADAPAYQQGQNQLYNELNLGRREEYDVLDKRRGRDPEMGGKPQRRKNPQEGLYNELQKDKMAEAYSEIGMKGERRRGKGHDGLYQGLSTATKDTYDALHMQALPPR

SEQ ID NO: 28098 - protein, 254 aa, synthetic construct
SDKSVCLFTDFDSQTNVSQSKDSDVYITDKCVLDMRSMDFKSNSAVAWSNKSDFACANAFNNSIIPEDTFFPSPESSDSTDHVKPKETENTKQPSKSCHKPKAIVHTEKVNMMSLTVLGLRMLFAKTVAVNFLLTAKLFFLRVKFSRSADAPAYQQGQNQLYNELNLGRREEYDVLDKRRGRDPEMGGKPQRRKNPQEGLYNELQKDKMAEAYSEIGMKGERRRGKGHDGLYQGLSTATKDTYDALHMQALPPR

SEQ ID NO: 28099 - protein, 253 aa, synthetic construct
DKSVCLFTDFDSQTNVSQSKDSDVYITDKCVLDMRSMDFKSNSAVAWSNKSDFACANAFNNSIIPEDTFFPSPESSDSTDHVKPKETENTKQPSKSCHKPKAIVHTEKVNMMSLTVLGLRMLFAKTVAVNFLLTAKLFFLRVKFSRSADAPAYQQGQNQLYNELNLGRREEYDVLDKRRGRDPEMGGKPQRRKNPQEGLYNELQKDKMAEAYSEIGMKGERRRGKGHDGLYQGLSTATKDTYDALHMQALPPR

SEQ ID NO: 28100 - protein, 252 aa, synthetic construct
KSVCLFTDFDSQTNVSQSKDSDVYITDKCVLDMRSMDFKSNSAVAWSNKSDFACANAFNNSIIPEDTFFPSPESSDSTDHVKPKETENTKQPSKSCHKPKAIVHTEKVNMMSLTVLGLRMLFAKTVAVNFLLTAKLFFLRVKFSRSADAPAYQQGQNQLYNELNLGRREEYDVLDKRRGRDPEMGGKPQRRKNPQEGLYNELQKDKMAEAYSEIGMKGERRRGKGHDGLYQGLSTATKDTYDALHMQALPPR

SEQ ID NO: 28101 - protein, 251 aa, synthetic construct
SVCLFTDFDSQTNVSQSKDSDVYITDKCVLDMRSMDFKSNSAVAWSNKSDFACANAFNNSIIPEDTFFPSPESSDSTDHVKPKETENTKQPSKSCHKPKAIVHTEKVNMMSLTVLGLRMLFAKTVAVNFLLTAKLFFLRVKFSRSADAPAYQQGQNQLYNELNLGRREEYDVLDKRRGRDPEMGGKPQRRKNPQEGLYNELQKDKMAEAYSEIGMKGERRRGKGHDGLYQGLSTATKDTYDALHMQALPPR

SEQ ID NO: 28102 - protein, 250 aa, synthetic construct
VCLFTDFDSQTNVSQSKDSDVYITDKCVLDMRSMDFKSNSAVAWSNKSDFACANAFNNSIIPEDTFFPSPESSDSTDHVKPKETENTKQPSKSCHKPKAIVHTEKVNMMSLTVLGLRMLFAKTVAVNFLLTAKLFFLRVKFSRSADAPAYQQGQNQLYNELNLGRREEYDVLDKRRGRDPEMGGKPQRRKNPQEGLYNELQKDKMAEAYSEIGMKGERRRGKGHDGLYQGLSTATKDTYDALHMQALPPR

SEQ ID NO: 28103 - protein, 245 aa, synthetic construct
DFDSQTNVSQSKDSDVYITDKCVLDMRSMDFKSNSAVAWSNKSDFACANAFNNSIIPEDTFFPSPESSDSTDHVKPKETENTKQPSKSCHKPKAIVHTEKVNMMSLTVLGLRMLFAKTVAVNFLLTAKLFFLRVKFSRSADAPAYQQGQNQLYNELNLGRREEYDVLDKRRGRDPEMGGKPQRRKNPQEGLYNELQKDKMAEAYSEIGMKGERRRGKGHDGLYQGLSTATKDTYDALHMQALPPR

SEQ ID NO: 28104 - protein, 240 aa, synthetic construct
TNVSQSKDSDVYITDKCVLDMRSMDFKSNSAVAWSNKSDFACANAFNNSIIPEDTFFPSPESSDSTDHVKPKETENTKQPSKSCHKPKAIVHTEKVNMMSLTVLGLRMLFAKTVAVNFLLTAKLFFLRVKFSRSADAPAYQQGQNQLYNELNLGRREEYDVLDKRRGRDPEMGGKPQRRKNPQEGLYNELQKDKMAEAYSEIGMKGERRRGKGHDGLYQGLSTATKDTYDALHMQALPPR

SEQ ID NO: 28105 - protein, 286 aa, synthetic construct
GQPKANPTVTLFPPSSEELQANKATLVCLISDFYPGAVTVAWKADGSPVKAGVETTKPSKQSNNKYAASSYLSLTPEQWKSHRSYSCQVTHEGSTVEKTVAPTECSPIKTDVITMDPKDNCSKDANDTLLLQLTNTSAYYMYLLLLLKSVVYFAIITCCLLRRTAFCCNGEKSRVKFSRSADAPAYQQGQNQLYNELNLGRREEYDVLDKRRGRDPEMGGKPQRRKNPQEGLYNELQKDKMAEAYSEIGMKGERRRGKGHDGLYQGLSTATKDTYDALHMQALPPR

SEQ ID NO: 28106 - protein, 285 aa, synthetic construct
QPKANPTVTLFPPSSEELQANKATLVCLISDFYPGAVTVAWKADGSPVKAGVETTKPSKQSNNKYAASSYLSLTPEQWKSHRSYSCQVTHEGSTVEKTVAPTECSPIKTDVITMDPKDNCSKDANDTLLLQLTNTSAYYMYLLLLLKSVVYFAIITCCLLRRTAFCCNGEKSRVKFSRSADAPAYQQGQNQLYNELNLGRREEYDVLDKRRGRDPEMGGKPQRRKNPQEGLYNELQKDKMAEAYSEIGMKGERRRGKGHDGLYQGLSTATKDTYDALHMQALPPR

SEQ ID NO: 28107 - protein, 284 aa, synthetic construct
PKANPTVTLFPPSSEELQANKATLVCLISDFYPGAVTVAWKADGSPVKAGVETTKPSKQSNNKYAASSYLSLTPEQWKSHRSYSCQVTHEGSTVEKTVAPTECSPIKTDVITMDPKDNCSKDANDTLLLQLTNTSAYYMYLLLLLKSVVYFAIITCCLLRRTAFCCNGEKSRVKFSRSADAPAYQQGQNQLYNELNLGRREEYDVLDKRRGRDPEMGGKPQRRKNPQEGLYNELQKDKMAEAYSEIGMKGERRRGKGHDGLYQGLSTATKDTYDALHMQALPPR

SEQ ID NO: 28108 - protein, 283 aa, synthetic construct
KANPTVTLFPPSSEELQANKATLVCLISDFYPGAVTVAWKADGSPVKAGVETTKPSKQSNNKYAASSYLSLTPEQWKSHRSYSCQVTHEGSTVEKTVAPTECSPIKTDVITMDPKDNCSKDANDTLLLQLTNTSAYYMYLLLLLKSVVYFAIITCCLLRRTAFCCNGEKSRVKFSRSADAPAYQQGQNQLYNELNLGRREEYDVLDKRRGRDPEMGGKPQRRKNPQEGLYNELQKDKMAEAYSEIGMKGERRRGKGHDGLYQGLSTATKDTYDALHMQALPPR

SEQ ID NO: 28109 - protein, 282 aa, synthetic construct
ANPTVTLFPPSSEELQANKATLVCLISDFYPGAVTVAWKADGSPVKAGVETTKPSKQSNNKYAASSYLSLTPEQWKSHRSYSCQVTHEGSTVEKTVAPTECSPIKTDVITMDPKDNCSKDANDTLLLQLTNTSAYYMYLLLLLKSVVYFAIITCCLLRRTAFCCNGEKSRVKFSRSADAPAYQQGQNQLYNELNLGRREEYDVLDKRRGRDPEMGGKPQRRKNPQEGLYNELQKDKMAEAYSEIGMKGERRRGKGHDGLYQGLSTATKDTYDALHMQALPPR

SEQ ID NO: 28110 - protein, 281 aa, synthetic construct
NPTVTLFPPSSEELQANKATLVCLISDFYPGAVTVAWKADGSPVKAGVETTKPSKQSNNKYAASSYLSLTPEQWKSHRSYSCQVTHEGSTVEKTVAPTECSPIKTDVITMDPKDNCSKDANDTLLLQLTNTSAYYMYLLLLLKSVVYFAIITCCLLRRTAFCCNGEKSRVKFSRSADAPAYQQGQNQLYNELNLGRREEYDVLDKRRGRDPEMGGKPQRRKNPQEGLYNELQKDKMAEAYSEIGMKGERRRGKGHDGLYQGLSTATKDTYDALHMQALPPR

SEQ ID NO: 28111 - protein, 280 aa, synthetic construct
PTVTLFPPSSEELQANKATLVCLISDFYPGAVTVAWKADGSPVKAGVETTKPSKQSNNKYAASSYLSLTPEQWKSHRSYSCQVTHEGSTVEKTVAPTECSPIKTDVITMDPKDNCSKDANDTLLLQLTNTSAYYMYLLLLLKSVVYFAIITCCLLRRTAFCCNGEKSRVKFSRSADAPAYQQGQNQLYNELNLGRREEYDVLDKRRGRDPEMGGKPQRRKNPQEGLYNELQKDKMAEAYSEIGMKGERRRGKGHDGLYQGLSTATKDTYDALHMQALPPR

SEQ ID NO: 28112 - protein, 279 aa, synthetic construct
TVTLFPPSSEELQANKATLVCLISDFYPGAVTVAWKADGSPVKAGVETTKPSKQSNNKYAASSYLSLTPEQWKSHRSYSCQVTHEGSTVEKTVAPTECSPIKTDVITMDPKDNCSKDANDTLLLQLTNTSAYYMYLLLLLKSVVYFAIITCCLLRRTAFCCNGEKSRVKFSRSADAPAYQQGQNQLYNELNLGRREEYDVLDKRRGRDPEMGGKPQRRKNPQEGLYNELQKDKMAEAYSEIGMKGERRRGKGHDGLYQGLSTATKDTYDALHMQALPPR

SEQ ID NO: 28113 - protein, 278 aa, synthetic construct
VTLFPPSSEELQANKATLVCLISDFYPGAVTVAWKADGSPVKAGVETTKPSKQSNNKYAASSYLSLTPEQWKSHRSYSCQVTHEGSTVEKTVAPTECSPIKTDVITMDPKDNCSKDANDTLLLQLTNTSAYYMYLLLLLKSVVYFAIITCCLLRRTAFCCNGEKSRVKFSRSADAPAYQQGQNQLYNELNLGRREEYDVLDKRRGRDPEMGGKPQRRKNPQEGLYNELQKDKMAEAYSEIGMKGERRRGKGHDGLYQGLSTATKDTYDALHMQALPPR

SEQ ID NO: 28114 - protein, 277 aa, synthetic construct
TLFPPSSEELQANKATLVCLISDFYPGAVTVAWKADGSPVKAGVETTKPSKQSNNKYAASSYLSLTPEQWKSHRSYSCQVTHEGSTVEKTVAPTECSPIKTDVITMDPKDNCSKDANDTLLLQLTNTSAYYMYLLLLLKSVVYFAIITCCLLRRTAFCCNGEKSRVKFSRSADAPAYQQGQNQLYNELNLGRREEYDVLDKRRGRDPEMGGKPQRRKNPQEGLYNELQKDKMAEAYSEIGMKGERRRGKGHDGLYQGLSTATKDTYDALHMQALPPR

SEQ ID NO: 28115 - protein, 276 aa, synthetic construct
LFPPSSEELQANKATLVCLISDFYPGAVTVAWKADGSPVKAGVETTKPSKQSNNKYAASSYLSLTPEQWKSHRSYSCQVTHEGSTVEKTVAPTECSPIKTDVITMDPKDNCSKDANDTLLLQLTNTSAYYMYLLLLLKSVVYFAIITCCLLRRTAFCCNGEKSRVKFSRSADAPAYQQGQNQLYNELNLGRREEYDVLDKRRGRDPEMGGKPQRRKNPQEGLYNELQKDKMAEAYSEIGMKGERRRGKGHDGLYQGLSTATKDTYDALHMQALPPR

SEQ ID NO: 28116 - protein, 287 aa, synthetic construct
GQPKANPTVTLFPPSSEELQANKATLVCLISDFYPGAVTVAWKADGSPVKAGVETTKPSKQSNNKYAASSYLSLTPEQWKSHRSYSCQVTHEGSTVEKTVAPTECSEVKTDSTDHVKPKETENTKQPSKSCHKPKAIVHTEKVNMMSLTVLGLRMLFAKTVAVNFLLTAKLFFLRVKFSRSADAPAYQQGQNQLYNELNLGRREEYDVLDKRRGRDPEMGGKPQRRKNPQEGLYNELQKDKMAEAYSEIGMKGERRRGKGHDGLYQGLSTATKDTYDALHMQALPPR

SEQ ID NO: 28117 - protein, 286 aa, synthetic construct
QPKANPTVTLFPPSSEELQANKATLVCLISDFYPGAVTVAWKADGSPVKAGVETTKPSKQSNNKYAASSYLSLTPEQWKSHRSYSCQVTHEGSTVEKTVAPTECSEVKTDSTDHVKPKETENTKQPSKSCHKPKAIVHTEKVNMMSLTVLGLRMLFAKTVAVNFLLTAKLFFLRVKFSRSADAPAYQQGQNQLYNELNLGRREEYDVLDKRRGRDPEMGGKPQRRKNPQEGLYNELQKDKMAEAYSEIGMKGERRRGKGHDGLYQGLSTATKDTYDALHMQALPPR

SEQ ID NO: 28118 - protein, 285 aa, synthetic construct
PKANPTVTLFPPSSEELQANKATLVCLISDFYPGAVTVAWKADGSPVKAGVETTKPSKQSNNKYAASSYLSLTPEQWKSHRSYSCQVTHEGSTVEKTVAPTECSEVKTDSTDHVKPKETENTKQPSKSCHKPKAIVHTEKVNMMSLTVLGLRMLFAKTVAVNFLLTAKLFFLRVKFSRSADAPAYQQGQNQLYNELNLGRREEYDVLDKRRGRDPEMGGKPQRRKNPQEGLYNELQKDKMAEAYSEIGMKGERRRGKGHDGLYQGLSTATKDTYDALHMQALPPR

SEQ ID NO: 28119 - protein, 284 aa, synthetic construct
KANPTVTLFPPSSEELQANKATLVCLISDFYPGAVTVAWKADGSPVKAGVETTKPSKQSNNKYAASSYLSLTPEQWKSHRSYSCQVTHEGSTVEKTVAPTECSEVKTDSTDHVKPKETENTKQPSKSCHKPKAIVHTEKVNMMSLTVLGLRMLFAKTVAVNFLLTAKLFFLRVKFSRSADAPAYQQGQNQLYNELNLGRREEYDVLDKRRGRDPEMGGKPQRRKNPQEGLYNELQKDKMAEAYSEIGMKGERRRGKGHDGLYQGLSTATKDTYDALHMQALPPR

SEQ ID NO: 28120 - protein, 283 aa, synthetic construct
ANPTVTLFPPSSEELQANKATLVCLISDFYPGAVTVAWKADGSPVKAGVETTKPSKQSNNKYAASSYLSLTPEQWKSHRSYSCQVTHEGSTVEKTVAPTECSEVKTDSTDHVKPKETENTKQPSKSCHKPKAIVHTEKVNMMSLTVLGLRMLFAKTVAVNFLLTAKLFFLRVKFSRSADAPAYQQGQNQLYNELNLGRREEYDVLDKRRGRDPEMGGKPQRRKNPQEGLYNELQKDKMAEAYSEIGMKGERRRGKGHDGLYQGLSTATKDTYDALHMQALPPR

SEQ ID NO: 28121 - protein, 282 aa, synthetic construct
NPTVTLFPPSSEELQANKATLVCLISDFYPGAVTVAWKADGSPVKAGVETTKPSKQSNNKYAASSYLSLTPEQWKSHRSYSCQVTHEGSTVEKTVAPTECSEVKTDSTDHVKPKETENTKQPSKSCHKPKAIVHTEKVNMMSLTVLGLRMLFAKTVAVNFLLTAKLFFLRVKFSRSADAPAYQQGQNQLYNELNLGRREEYDVLDKRRGRDPEMGGKPQRRKNPQEGLYNELQKDKMAEAYSEIGMKGERRRGKGHDGLYQGLSTATKDTYDALHMQALPPR

SEQ ID NO: 28122 - protein, 281 aa, synthetic construct
PTVTLFPPSSEELQANKATLVCLISDFYPGAVTVAWKADGSPVKAGVETTKPSKQSNNKYAASSYLSLTPEQWKSHRSYSCQVTHEGSTVEKTVAPTECSEVKTDSTDHVKPKETENTKQPSKSCHKPKAIVHTEKVNMMSLTVLGLRMLFAKTVAVNFLLTAKLFFLRVKFSRSADAPAYQQGQNQLYNELNLGRREEYDVLDKRRGRDPEMGGKPQRRKNPQEGLYNELQKDKMAEAYSEIGMKGERRRGKGHDGLYQGLSTATKDTYDALHMQALPPR

SEQ ID NO: 28123 - protein, 280 aa, synthetic construct
TVTLFPPSSEELQANKATLVCLISDFYPGAVTVAWKADGSPVKAGVETTKPSKQSNNKYAASSYLSLTPEQWKSHRSYSCQVTHEGSTVEKTVAPTECSEVKTDSTDHVKPKETENTKQPSKSCHKPKAIVHTEKVNMMSLTVLGLRMLFAKTVAVNFLLTAKLFFLRVKFSRSADAPAYQQGQNQLYNELNLGRREEYDVLDKRRGRDPEMGGKPQRRKNPQEGLYNELQKDKMAEAYSEIGMKGERRRGKGHDGLYQGLSTATKDTYDALHMQALPPR

SEQ ID NO: 28124 - protein, 279 aa, synthetic construct
VTLFPPSSEELQANKATLVCLISDFYPGAVTVAWKADGSPVKAGVETTKPSKQSNNKYAASSYLSLTPEQWKSHRSYSCQVTHEGSTVEKTVAPTECSEVKTDSTDHVKPKETENTKQPSKSCHKPKAIVHTEKVNMMSLTVLGLRMLFAKTVAVNFLLTAKLFFLRVKFSRSADAPAYQQGQNQLYNELNLGRREEYDVLDKRRGRDPEMGGKPQRRKNPQEGLYNELQKDKMAEAYSEIGMKGERRRGKGHDGLYQGLSTATKDTYDALHMQALPPR

SEQ ID NO: 28125 - protein, 278 aa, synthetic construct
TLFPPSSEELQANKATLVCLISDFYPGAVTVAWKADGSPVKAGVETTKPSKQSNNKYAASSYLSLTPEQWKSHRSYSCQVTHEGSTVEKTVAPTECSEVKTDSTDHVKPKETENTKQPSKSCHKPKAIVHTEKVNMMSLTVLGLRMLFAKTVAVNFLLTAKLFFLRVKFSRSADAPAYQQGQNQLYNELNLGRREEYDVLDKRRGRDPEMGGKPQRRKNPQEGLYNELQKDKMAEAYSEIGMKGERRRGKGHDGLYQGLSTATKDTYDALHMQALPPR

SEQ ID NO: 28126 - protein, 277 aa, synthetic construct
LFPPSSEELQANKATLVCLISDFYPGAVTVAWKADGSPVKAGVETTKPSKQSNNKYAASSYLSLTPEQWKSHRSYSCQVTHEGSTVEKTVAPTECSEVKTDSTDHVKPKETENTKQPSKSCHKPKAIVHTEKVNMMSLTVLGLRMLFAKTVAVNFLLTAKLFFLRVKFSRSADAPAYQQGQNQLYNELNLGRREEYDVLDKRRGRDPEMGGKPQRRKNPQEGLYNELQKDKMAEAYSEIGMKGERRRGKGHDGLYQGLSTATKDTYDALHMQALPPR

SEQ ID NO: 28127 - protein, 272 aa, synthetic construct
GQPKANPTVTLFPPSSEELQANKATLVCLISDFYPGAVTVAWKADGSPVKAGVETTKPSKQSNNKYAASSYLSLTPEQWKSHRSYSCQVTHEGSTVEKTVAPTECSGRADCGFTSESYQQGVLSATILYEILLGKATLYAVLVSALVLMAMVKRKDSRGRVKFSRSADAPAYQQGQNQLYNELNLGRREEYDVLDKRRGRDPEMGGKPQRRKNPQEGLYNELQKDKMAEAYSEIGMKGERRRGKGHDGLYQGLSTATKDTYDALHMQALPPR

SEQ ID NO: 28128 - protein, 271 aa, synthetic construct
QPKANPTVTLFPPSSEELQANKATLVCLISDFYPGAVTVAWKADGSPVKAGVETTKPSKQSNNKYAASSYLSLTPEQWKSHRSYSCQVTHEGSTVEKTVAPTECSGRADCGFTSESYQQGVLSATILYEILLGKATLYAVLVSALVLMAMVKRKDSRGRVKFSRSADAPAYQQGQNQLYNELNLGRREEYDVLDKRRGRDPEMGGKPQRRKNPQEGLYNELQKDKMAEAYSEIGMKGERRRGKGHDGLYQGLSTATKDTYDALHMQALPPR

SEQ ID NO: 28129 - protein, 270 aa, synthetic construct
PKANPTVTLFPPSSEELQANKATLVCLISDFYPGAVTVAWKADGSPVKAGVETTKPSKQSNNKYAASSYLSLTPEQWKSHRSYSCQVTHEGSTVEKTVAPTECSGRADCGFTSESYQQGVLSATILYEILLGKATLYAVLVSALVLMAMVKRKDSRGRVKFSRSADAPAYQQGQNQLYNELNLGRREEYDVLDKRRGRDPEMGGKPQRRKNPQEGLYNELQKDKMAEAYSEIGMKGERRRGKGHDGLYQGLSTATKDTYDALHMQALPPR

SEQ ID NO: 28130 - protein, 269 aa, synthetic construct
KANPTVTLFPPSSEELQANKATLVCLISDFYPGAVTVAWKADGSPVKAGVETTKPSKQSNNKYAASSYLSLTPEQWKSHRSYSCQVTHEGSTVEKTVAPTECSGRADCGFTSESYQQGVLSATILYEILLGKATLYAVLVSALVLMAMVKRKDSRGRVKFSRSADAPAYQQGQNQLYNELNLGRREEYDVLDKRRGRDPEMGGKPQRRKNPQEGLYNELQKDKMAEAYSEIGMKGERRRGKGHDGLYQGLSTATKDTYDALHMQALPPR

SEQ ID NO: 28131 - protein, 268 aa, synthetic construct
ANPTVTLFPPSSEELQANKATLVCLISDFYPGAVTVAWKADGSPVKAGVETTKPSKQSNNKYAASSYLSLTPEQWKSHRSYSCQVTHEGSTVEKTVAPTECSGRADCGFTSESYQQGVLSATILYEILLGKATLYAVLVSALVLMAMVKRKDSRGRVKFSRSADAPAYQQGQNQLYNELNLGRREEYDVLDKRRGRDPEMGGKPQRRKNPQEGLYNELQKDKMAEAYSEIGMKGERRRGKGHDGLYQGLSTATKDTYDALHMQALPPR

SEQ ID NO: 28132 - protein, 267 aa, synthetic construct
NPTVTLFPPSSEELQANKATLVCLISDFYPGAVTVAWKADGSPVKAGVETTKPSKQSNNKYAASSYLSLTPEQWKSHRSYSCQVTHEGSTVEKTVAPTECSGRADCGFTSESYQQGVLSATILYEILLGKATLYAVLVSALVLMAMVKRKDSRGRVKFSRSADAPAYQQGQNQLYNELNLGRREEYDVLDKRRGRDPEMGGKPQRRKNPQEGLYNELQKDKMAEAYSEIGMKGERRRGKGHDGLYQGLSTATKDTYDALHMQALPPR

SEQ ID NO: 28133 - protein, 266 aa, synthetic construct
PTVTLFPPSSEELQANKATLVCLISDFYPGAVTVAWKADGSPVKAGVETTKPSKQSNNKYAASSYLSLTPEQWKSHRSYSCQVTHEGSTVEKTVAPTECSGRADCGFTSESYQQGVLSATILYEILLGKATLYAVLVSALVLMAMVKRKDSRGRVKFSRSADAPAYQQGQNQLYNELNLGRREEYDVLDKRRGRDPEMGGKPQRRKNPQEGLYNELQKDKMAEAYSEIGMKGERRRGKGHDGLYQGLSTATKDTYDALHMQALPPR

SEQ ID NO: 28134 - protein, 265 aa, synthetic construct
TVTLFPPSSEELQANKATLVCLISDFYPGAVTVAWKADGSPVKAGVETTKPSKQSNNKYAASSYLSLTPEQWKSHRSYSCQVTHEGSTVEKTVAPTECSGRADCGFTSESYQQGVLSATILYEILLGKATLYAVLVSALVLMAMVKRKDSRGRVKFSRSADAPAYQQGQNQLYNELNLGRREEYDVLDKRRGRDPEMGGKPQRRKNPQEGLYNELQKDKMAEAYSEIGMKGERRRGKGHDGLYQGLSTATKDTYDALHMQALPPR

SEQ ID NO: 28135 - protein, 264 aa, synthetic construct
VTLFPPSSEELQANKATLVCLISDFYPGAVTVAWKADGSPVKAGVETTKPSKQSNNKYAASSYLSLTPEQWKSHRSYSCQVTHEGSTVEKTVAPTECSGRADCGFTSESYQQGVLSATILYEILLGKATLYAVLVSALVLMAMVKRKDSRGRVKFSRSADAPAYQQGQNQLYNELNLGRREEYDVLDKRRGRDPEMGGKPQRRKNPQEGLYNELQKDKMAEAYSEIGMKGERRRGKGHDGLYQGLSTATKDTYDALHMQALPPR

SEQ ID NO: 28136 - protein, 263 aa, synthetic construct
TLFPPSSEELQANKATLVCLISDFYPGAVTVAWKADGSPVKAGVETTKPSKQSNNKYAASSYLSLTPEQWKSHRSYSCQVTHEGSTVEKTVAPTECSGRADCGFTSESYQQGVLSATILYEILLGKATLYAVLVSALVLMAMVKRKDSRGRVKFSRSADAPAYQQGQNQLYNELNLGRREEYDVLDKRRGRDPEMGGKPQRRKNPQEGLYNELQKDKMAEAYSEIGMKGERRRGKGHDGLYQGLSTATKDTYDALHMQALPPR

SEQ ID NO: 28137 - protein, 262 aa, synthetic construct
LFPPSSEELQANKATLVCLISDFYPGAVTVAWKADGSPVKAGVETTKPSKQSNNKYAASSYLSLTPEQWKSHRSYSCQVTHEGSTVEKTVAPTECSGRADCGFTSESYQQGVLSATILYEILLGKATLYAVLVSALVLMAMVKRKDSRGRVKFSRSADAPAYQQGQNQLYNELNLGRREEYDVLDKRRGRDPEMGGKPQRRKNPQEGLYNELQKDKMAEAYSEIGMKGERRRGKGHDGLYQGLSTATKDTYDALHMQALPPR

SEQ ID NO: 28138 - protein, 279 aa, synthetic construct
GQPKANPTVTLFPPSSEELQANKATLVCLISDFYPGAVTVAWKADGSPVKAGVETTKPSKQSNNKYAASSYLSLTPEQWKSHRSYSCQVTHEGSTVEKTVAPTECSIPEDTFFPSPESSCDVKLVEKSFETDTNLNFQNLSVIGFRILLLKVAGFNLLMTLRLWSSRVKFSRSADAPAYQQGQNQLYNELNLGRREEYDVLDKRRGRDPEMGGKPQRRKNPQEGLYNELQKDKMAEAYSEIGMKGERRRGKGHDGLYQGLSTATKDTYDALHMQALPPR

SEQ ID NO: 28139 - protein, 278 aa, synthetic construct
QPKANPTVTLFPPSSEELQANKATLVCLISDFYPGAVTVAWKADGSPVKAGVETTKPSKQSNNKYAASSYLSLTPEQWKSHRSYSCQVTHEGSTVEKTVAPTECSIPEDTFFPSPESSCDVKLVEKSFETDTNLNFQNLSVIGFRILLLKVAGFNLLMTLRLWSSRVKFSRSADAPAYQQGQNQLYNELNLGRREEYDVLDKRRGRDPEMGGKPQRRKNPQEGLYNELQKDKMAEAYSEIGMKGERRRGKGHDGLYQGLSTATKDTYDALHMQALPPR

SEQ ID NO: 28140 - protein, 277 aa, synthetic construct
PKANPTVTLFPPSSEELQANKATLVCLISDFYPGAVTVAWKADGSPVKAGVETTKPSKQSNNKYAASSYLSLTPEQWKSHRSYSCQVTHEGSTVEKTVAPTECSIPEDTFFPSPESSCDVKLVEKSFETDTNLNFQNLSVIGFRILLLKVAGFNLLMTLRLWSSRVKFSRSADAPAYQQGQNQLYNELNLGRREEYDVLDKRRGRDPEMGGKPQRRKNPQEGLYNELQKDKMAEAYSEIGMKGERRRGKGHDGLYQGLSTATKDTYDALHMQALPPR

SEQ ID NO: 28141 - protein, 276 aa, synthetic construct
KANPTVTLFPPSSEELQANKATLVCLISDFYPGAVTVAWKADGSPVKAGVETTKPSKQSNNKYAASSYLSLTPEQWKSHRSYSCQVTHEGSTVEKTVAPTECSIPEDTFFPSPESSCDVKLVEKSFETDTNLNFQNLSVIGFRILLLKVAGFNLLMTLRLWSSRVKFSRSADAPAYQQGQNQLYNELNLGRREEYDVLDKRRGRDPEMGGKPQRRKNPQEGLYNELQKDKMAEAYSEIGMKGERRRGKGHDGLYQGLSTATKDTYDALHMQALPPR

SEQ ID NO: 28142 - protein, 275 aa, synthetic construct
ANPTVTLFPPSSEELQANKATLVCLISDFYPGAVTVAWKADGSPVKAGVETTKPSKQSNNKYAASSYLSLTPEQWKSHRSYSCQVTHEGSTVEKTVAPTECSIPEDTFFPSPESSCDVKLVEKSFETDTNLNFQNLSVIGFRILLLKVAGFNLLMTLRLWSSRVKFSRSADAPAYQQGQNQLYNELNLGRREEYDVLDKRRGRDPEMGGKPQRRKNPQEGLYNELQKDKMAEAYSEIGMKGERRRGKGHDGLYQGLSTATKDTYDALHMQALPPR

SEQ ID NO: 28143 - protein, 274 aa, synthetic construct
NPTVTLFPPSSEELQANKATLVCLISDFYPGAVTVAWKADGSPVKAGVETTKPSKQSNNKYAASSYLSLTPEQWKSHRSYSCQVTHEGSTVEKTVAPTECSIPEDTFFPSPESSCDVKLVEKSFETDTNLNFQNLSVIGFRILLLKVAGFNLLMTLRLWSSRVKFSRSADAPAYQQGQNQLYNELNLGRREEYDVLDKRRGRDPEMGGKPQRRKNPQEGLYNELQKDKMAEAYSEIGMKGERRRGKGHDGLYQGLSTATKDTYDALHMQALPPR

SEQ ID NO: 28144 - protein, 273 aa, synthetic construct
PTVTLFPPSSEELQANKATLVCLISDFYPGAVTVAWKADGSPVKAGVETTKPSKQSNNKYAASSYLSLTPEQWKSHRSYSCQVTHEGSTVEKTVAPTECSIPEDTFFPSPESSCDVKLVEKSFETDTNLNFQNLSVIGFRILLLKVAGFNLLMTLRLWSSRVKFSRSADAPAYQQGQNQLYNELNLGRREEYDVLDKRRGRDPEMGGKPQRRKNPQEGLYNELQKDKMAEAYSEIGMKGERRRGKGHDGLYQGLSTATKDTYDALHMQALPPR

SEQ ID NO: 28145 - protein, 272 aa, synthetic construct
TVTLFPPSSEELQANKATLVCLISDFYPGAVTVAWKADGSPVKAGVETTKPSKQSNNKYAASSYLSLTPEQWKSHRSYSCQVTHEGSTVEKTVAPTECSIPEDTFFPSPESSCDVKLVEKSFETDTNLNFQNLSVIGFRILLLKVAGFNLLMTLRLWSSRVKFSRSADAPAYQQGQNQLYNELNLGRREEYDVLDKRRGRDPEMGGKPQRRKNPQEGLYNELQKDKMAEAYSEIGMKGERRRGKGHDGLYQGLSTATKDTYDALHMQALPPR

SEQ ID NO: 28146 - protein, 271 aa, synthetic construct
VTLFPPSSEELQANKATLVCLISDFYPGAVTVAWKADGSPVKAGVETTKPSKQSNNKYAASSYLSLTPEQWKSHRSYSCQVTHEGSTVEKTVAPTECSIPEDTFFPSPESSCDVKLVEKSFETDTNLNFQNLSVIGFRILLLKVAGFNLLMTLRLWSSRVKFSRSADAPAYQQGQNQLYNELNLGRREEYDVLDKRRGRDPEMGGKPQRRKNPQEGLYNELQKDKMAEAYSEIGMKGERRRGKGHDGLYQGLSTATKDTYDALHMQALPPR

SEQ ID NO: 28147 - protein, 270 aa, synthetic construct
TLFPPSSEELQANKATLVCLISDFYPGAVTVAWKADGSPVKAGVETTKPSKQSNNKYAASSYLSLTPEQWKSHRSYSCQVTHEGSTVEKTVAPTECSIPEDTFFPSPESSCDVKLVEKSFETDTNLNFQNLSVIGFRILLLKVAGFNLLMTLRLWSSRVKFSRSADAPAYQQGQNQLYNELNLGRREEYDVLDKRRGRDPEMGGKPQRRKNPQEGLYNELQKDKMAEAYSEIGMKGERRRGKGHDGLYQGLSTATKDTYDALHMQALPPR

SEQ ID NO: 28148 - protein, 269 aa, synthetic construct
LFPPSSEELQANKATLVCLISDFYPGAVTVAWKADGSPVKAGVETTKPSKQSNNKYAASSYLSLTPEQWKSHRSYSCQVTHEGSTVEKTVAPTECSIPEDTFFPSPESSCDVKLVEKSFETDTNLNFQNLSVIGFRILLLKVAGFNLLMTLRLWSSRVKFSRSADAPAYQQGQNQLYNELNLGRREEYDVLDKRRGRDPEMGGKPQRRKNPQEGLYNELQKDKMAEAYSEIGMKGERRRGKGHDGLYQGLSTATKDTYDALHMQALPPR

SEQ ID NO: 28149 - protein, 289 aa, synthetic construct
DLKNVFPPEVAVFEPSEAEISHTQKATLVCLATGFYPDHVELSWWVNGKEVHSGVCTDPQPLKEQPALNDSRYCLSSRLRVSATFWQNPRNHFRCQVQFYGLSENDEWTQDRAKPVTQIVSAEAWGRADCDVKLVEKSFETDTNLNFQNLSVIGFRILLLKVAGFNLLMTLRLWSSRVKFSRSADAPAYQQGQNQLYNELNLGRREEYDVLDKRRGRDPEMGGKPQRRKNPQEGLYNELQKDKMAEAYSEIGMKGERRRGKGHDGLYQGLSTATKDTYDALHMQALPPR

SEQ ID NO: 28150 - protein, 288 aa, synthetic construct
LKNVFPPEVAVFEPSEAEISHTQKATLVCLATGFYPDHVELSWWVNGKEVHSGVCTDPQPLKEQPALNDSRYCLSSRLRVSATFWQNPRNHFRCQVQFYGLSENDEWTQDRAKPVTQIVSAEAWGRADCDVKLVEKSFETDTNLNFQNLSVIGFRILLLKVAGFNLLMTLRLWSSRVKFSRSADAPAYQQGQNQLYNELNLGRREEYDVLDKRRGRDPEMGGKPQRRKNPQEGLYNELQKDKMAEAYSEIGMKGERRRGKGHDGLYQGLSTATKDTYDALHMQALPPR

SEQ ID NO: 28151 - protein, 287 aa, synthetic construct
KNVFPPEVAVFEPSEAEISHTQKATLVCLATGFYPDHVELSWWVNGKEVHSGVCTDPQPLKEQPALNDSRYCLSSRLRVSATFWQNPRNHFRCQVQFYGLSENDEWTQDRAKPVTQIVSAEAWGRADCDVKLVEKSFETDTNLNFQNLSVIGFRILLLKVAGFNLLMTLRLWSSRVKFSRSADAPAYQQGQNQLYNELNLGRREEYDVLDKRRGRDPEMGGKPQRRKNPQEGLYNELQKDKMAEAYSEIGMKGERRRGKGHDGLYQGLSTATKDTYDALHMQALPPR

SEQ ID NO: 28152 - protein, 286 aa, synthetic construct
NVFPPEVAVFEPSEAEISHTQKATLVCLATGFYPDHVELSWWVNGKEVHSGVCTDPQPLKEQPALNDSRYCLSSRLRVSATFWQNPRNHFRCQVQFYGLSENDEWTQDRAKPVTQIVSAEAWGRADCDVKLVEKSFETDTNLNFQNLSVIGFRILLLKVAGFNLLMTLRLWSSRVKFSRSADAPAYQQGQNQLYNELNLGRREEYDVLDKRRGRDPEMGGKPQRRKNPQEGLYNELQKDKMAEAYSEIGMKGERRRGKGHDGLYQGLSTATKDTYDALHMQALPPR

SEQ ID NO: 28153 - protein, 285 aa, synthetic construct
VFPPEVAVFEPSEAEISHTQKATLVCLATGFYPDHVELSWWVNGKEVHSGVCTDPQPLKEQPALNDSRYCLSSRLRVSATFWQNPRNHFRCQVQFYGLSENDEWTQDRAKPVTQIVSAEAWGRADCDVKLVEKSFETDTNLNFQNLSVIGFRILLLKVAGFNLLMTLRLWSSRVKFSRSADAPAYQQGQNQLYNELNLGRREEYDVLDKRRGRDPEMGGKPQRRKNPQEGLYNELQKDKMAEAYSEIGMKGERRRGKGHDGLYQGLSTATKDTYDALHMQALPPR

SEQ ID NO: 28154 - protein, 284 aa, synthetic construct
FPPEVAVFEPSEAEISHTQKATLVCLATGFYPDHVELSWWVNGKEVHSGVCTDPQPLKEQPALNDSRYCLSSRLRVSATFWQNPRNHFRCQVQFYGLSENDEWTQDRAKPVTQIVSAEAWGRADCDVKLVEKSFETDTNLNFQNLSVIGFRILLLKVAGFNLLMTLRLWSSRVKFSRSADAPAYQQGQNQLYNELNLGRREEYDVLDKRRGRDPEMGGKPQRRKNPQEGLYNELQKDKMAEAYSEIGMKGERRRGKGHDGLYQGLSTATKDTYDALHMQALPPR

SEQ ID NO: 28155 - protein, 283 aa, synthetic construct
PPEVAVFEPSEAEISHTQKATLVCLATGFYPDHVELSWWVNGKEVHSGVCTDPQPLKEQPALNDSRYCLSSRLRVSATFWQNPRNHFRCQVQFYGLSENDEWTQDRAKPVTQIVSAEAWGRADCDVKLVEKSFETDTNLNFQNLSVIGFRILLLKVAGFNLLMTLRLWSSRVKFSRSADAPAYQQGQNQLYNELNLGRREEYDVLDKRRGRDPEMGGKPQRRKNPQEGLYNELQKDKMAEAYSEIGMKGERRRGKGHDGLYQGLSTATKDTYDALHMQALPPR

SEQ ID NO: 28156 - protein, 282 aa, synthetic construct
PEVAVFEPSEAEISHTQKATLVCLATGFYPDHVELSWWVNGKEVHSGVCTDPQPLKEQPALNDSRYCLSSRLRVSATFWQNPRNHFRCQVQFYGLSENDEWTQDRAKPVTQIVSAEAWGRADCDVKLVEKSFETDTNLNFQNLSVIGFRILLLKVAGFNLLMTLRLWSSRVKFSRSADAPAYQQGQNQLYNELNLGRREEYDVLDKRRGRDPEMGGKPQRRKNPQEGLYNELQKDKMAEAYSEIGMKGERRRGKGHDGLYQGLSTATKDTYDALHMQALPPR

SEQ ID NO: 28157 - protein, 281 aa, synthetic construct
EVAVFEPSEAEISHTQKATLVCLATGFYPDHVELSWWVNGKEVHSGVCTDPQPLKEQPALNDSRYCLSSRLRVSATFWQNPRNHFRCQVQFYGLSENDEWTQDRAKPVTQIVSAEAWGRADCDVKLVEKSFETDTNLNFQNLSVIGFRILLLKVAGFNLLMTLRLWSSRVKFSRSADAPAYQQGQNQLYNELNLGRREEYDVLDKRRGRDPEMGGKPQRRKNPQEGLYNELQKDKMAEAYSEIGMKGERRRGKGHDGLYQGLSTATKDTYDALHMQALPPR

SEQ ID NO: 28158 - protein, 280 aa, synthetic construct
VAVFEPSEAEISHTQKATLVCLATGFYPDHVELSWWVNGKEVHSGVCTDPQPLKEQPALNDSRYCLSSRLRVSATFWQNPRNHFRCQVQFYGLSENDEWTQDRAKPVTQIVSAEAWGRADCDVKLVEKSFETDTNLNFQNLSVIGFRILLLKVAGFNLLMTLRLWSSRVKFSRSADAPAYQQGQNQLYNELNLGRREEYDVLDKRRGRDPEMGGKPQRRKNPQEGLYNELQKDKMAEAYSEIGMKGERRRGKGHDGLYQGLSTATKDTYDALHMQALPPR

SEQ ID NO: 28159 - protein, 279 aa, synthetic construct
AVFEPSEAEISHTQKATLVCLATGFYPDHVELSWWVNGKEVHSGVCTDPQPLKEQPALNDSRYCLSSRLRVSATFWQNPRNHFRCQVQFYGLSENDEWTQDRAKPVTQIVSAEAWGRADCDVKLVEKSFETDTNLNFQNLSVIGFRILLLKVAGFNLLMTLRLWSSRVKFSRSADAPAYQQGQNQLYNELNLGRREEYDVLDKRRGRDPEMGGKPQRRKNPQEGLYNELQKDKMAEAYSEIGMKGERRRGKGHDGLYQGLSTATKDTYDALHMQALPPR

SEQ ID NO: 28160 - protein, 278 aa, synthetic construct
VFEPSEAEISHTQKATLVCLATGFYPDHVELSWWVNGKEVHSGVCTDPQPLKEQPALNDSRYCLSSRLRVSATFWQNPRNHFRCQVQFYGLSENDEWTQDRAKPVTQIVSAEAWGRADCDVKLVEKSFETDTNLNFQNLSVIGFRILLLKVAGFNLLMTLRLWSSRVKFSRSADAPAYQQGQNQLYNELNLGRREEYDVLDKRRGRDPEMGGKPQRRKNPQEGLYNELQKDKMAEAYSEIGMKGERRRGKGHDGLYQGLSTATKDTYDALHMQALPPR

SEQ ID NO: 28161 - protein, 277 aa, synthetic construct
FEPSEAEISHTQKATLVCLATGFYPDHVELSWWVNGKEVHSGVCTDPQPLKEQPALNDSRYCLSSRLRVSATFWQNPRNHFRCQVQFYGLSENDEWTQDRAKPVTQIVSAEAWGRADCDVKLVEKSFETDTNLNFQNLSVIGFRILLLKVAGFNLLMTLRLWSSRVKFSRSADAPAYQQGQNQLYNELNLGRREEYDVLDKRRGRDPEMGGKPQRRKNPQEGLYNELQKDKMAEAYSEIGMKGERRRGKGHDGLYQGLSTATKDTYDALHMQALPPR

SEQ ID NO: 28162 - protein, 276 aa, synthetic construct
EPSEAEISHTQKATLVCLATGFYPDHVELSWWVNGKEVHSGVCTDPQPLKEQPALNDSRYCLSSRLRVSATFWQNPRNHFRCQVQFYGLSENDEWTQDRAKPVTQIVSAEAWGRADCDVKLVEKSFETDTNLNFQNLSVIGFRILLLKVAGFNLLMTLRLWSSRVKFSRSADAPAYQQGQNQLYNELNLGRREEYDVLDKRRGRDPEMGGKPQRRKNPQEGLYNELQKDKMAEAYSEIGMKGERRRGKGHDGLYQGLSTATKDTYDALHMQALPPR

SEQ ID NO: 28163 - protein, 275 aa, synthetic construct
PSEAEISHTQKATLVCLATGFYPDHVELSWWVNGKEVHSGVCTDPQPLKEQPALNDSRYCLSSRLRVSATFWQNPRNHFRCQVQFYGLSENDEWTQDRAKPVTQIVSAEAWGRADCDVKLVEKSFETDTNLNFQNLSVIGFRILLLKVAGFNLLMTLRLWSSRVKFSRSADAPAYQQGQNQLYNELNLGRREEYDVLDKRRGRDPEMGGKPQRRKNPQEGLYNELQKDKMAEAYSEIGMKGERRRGKGHDGLYQGLSTATKDTYDALHMQALPPR

SEQ ID NO: 28164 - protein, 274 aa, synthetic construct
SEAEISHTQKATLVCLATGFYPDHVELSWWVNGKEVHSGVCTDPQPLKEQPALNDSRYCLSSRLRVSATFWQNPRNHFRCQVQFYGLSENDEWTQDRAKPVTQIVSAEAWGRADCDVKLVEKSFETDTNLNFQNLSVIGFRILLLKVAGFNLLMTLRLWSSRVKFSRSADAPAYQQGQNQLYNELNLGRREEYDVLDKRRGRDPEMGGKPQRRKNPQEGLYNELQKDKMAEAYSEIGMKGERRRGKGHDGLYQGLSTATKDTYDALHMQALPPR

SEQ ID NO: 28165 - protein, 273 aa, synthetic construct
EAEISHTQKATLVCLATGFYPDHVELSWWVNGKEVHSGVCTDPQPLKEQPALNDSRYCLSSRLRVSATFWQNPRNHFRCQVQFYGLSENDEWTQDRAKPVTQIVSAEAWGRADCDVKLVEKSFETDTNLNFQNLSVIGFRILLLKVAGFNLLMTLRLWSSRVKFSRSADAPAYQQGQNQLYNELNLGRREEYDVLDKRRGRDPEMGGKPQRRKNPQEGLYNELQKDKMAEAYSEIGMKGERRRGKGHDGLYQGLSTATKDTYDALHMQALPPR

SEQ ID NO: 28166 - protein, 272 aa, synthetic construct
AEISHTQKATLVCLATGFYPDHVELSWWVNGKEVHSGVCTDPQPLKEQPALNDSRYCLSSRLRVSATFWQNPRNHFRCQVQFYGLSENDEWTQDRAKPVTQIVSAEAWGRADCDVKLVEKSFETDTNLNFQNLSVIGFRILLLKVAGFNLLMTLRLWSSRVKFSRSADAPAYQQGQNQLYNELNLGRREEYDVLDKRRGRDPEMGGKPQRRKNPQEGLYNELQKDKMAEAYSEIGMKGERRRGKGHDGLYQGLSTATKDTYDALHMQALPPR

SEQ ID NO: 28167 - protein, 271 aa, synthetic construct
EISHTQKATLVCLATGFYPDHVELSWWVNGKEVHSGVCTDPQPLKEQPALNDSRYCLSSRLRVSATFWQNPRNHFRCQVQFYGLSENDEWTQDRAKPVTQIVSAEAWGRADCDVKLVEKSFETDTNLNFQNLSVIGFRILLLKVAGFNLLMTLRLWSSRVKFSRSADAPAYQQGQNQLYNELNLGRREEYDVLDKRRGRDPEMGGKPQRRKNPQEGLYNELQKDKMAEAYSEIGMKGERRRGKGHDGLYQGLSTATKDTYDALHMQALPPR

SEQ ID NO: 28168 - protein, 270 aa, synthetic construct
ISHTQKATLVCLATGFYPDHVELSWWVNGKEVHSGVCTDPQPLKEQPALNDSRYCLSSRLRVSATFWQNPRNHFRCQVQFYGLSENDEWTQDRAKPVTQIVSAEAWGRADCDVKLVEKSFETDTNLNFQNLSVIGFRILLLKVAGFNLLMTLRLWSSRVKFSRSADAPAYQQGQNQLYNELNLGRREEYDVLDKRRGRDPEMGGKPQRRKNPQEGLYNELQKDKMAEAYSEIGMKGERRRGKGHDGLYQGLSTATKDTYDALHMQALPPR

SEQ ID NO: 28169 - protein, 269 aa, synthetic construct
SHTQKATLVCLATGFYPDHVELSWWVNGKEVHSGVCTDPQPLKEQPALNDSRYCLSSRLRVSATFWQNPRNHFRCQVQFYGLSENDEWTQDRAKPVTQIVSAEAWGRADCDVKLVEKSFETDTNLNFQNLSVIGFRILLLKVAGFNLLMTLRLWSSRVKFSRSADAPAYQQGQNQLYNELNLGRREEYDVLDKRRGRDPEMGGKPQRRKNPQEGLYNELQKDKMAEAYSEIGMKGERRRGKGHDGLYQGLSTATKDTYDALHMQALPPR

SEQ ID NO: 28170 - protein, 264 aa, synthetic construct
ATLVCLATGFYPDHVELSWWVNGKEVHSGVCTDPQPLKEQPALNDSRYCLSSRLRVSATFWQNPRNHFRCQVQFYGLSENDEWTQDRAKPVTQIVSAEAWGRADCDVKLVEKSFETDTNLNFQNLSVIGFRILLLKVAGFNLLMTLRLWSSRVKFSRSADAPAYQQGQNQLYNELNLGRREEYDVLDKRRGRDPEMGGKPQRRKNPQEGLYNELQKDKMAEAYSEIGMKGERRRGKGHDGLYQGLSTATKDTYDALHMQALPPR

SEQ ID NO: 28171 - protein, 259 aa, synthetic construct
LATGFYPDHVELSWWVNGKEVHSGVCTDPQPLKEQPALNDSRYCLSSRLRVSATFWQNPRNHFRCQVQFYGLSENDEWTQDRAKPVTQIVSAEAWGRADCDVKLVEKSFETDTNLNFQNLSVIGFRILLLKVAGFNLLMTLRLWSSRVKFSRSADAPAYQQGQNQLYNELNLGRREEYDVLDKRRGRDPEMGGKPQRRKNPQEGLYNELQKDKMAEAYSEIGMKGERRRGKGHDGLYQGLSTATKDTYDALHMQALPPR

SEQ ID NO: 28172 - protein, 286 aa, synthetic construct
DLKNVFPPEVAVFEPSEAEISHTQKATLVCLATGFYPDHVELSWWVNGKEVHSGVCTDPQPLKEQPALNDSRYCLSSRLRVSATFWQNPRNHFRCQVQFYGLSENDEWTQDRAKPVTQIVSAEAWGRADCGFTSESYQQGVLSATNLSVIGFRILLLKVAGFNLLMTLRLWSSRVKFSRSADAPAYQQGQNQLYNELNLGRREEYDVLDKRRGRDPEMGGKPQRRKNPQEGLYNELQKDKMAEAYSEIGMKGERRRGKGHDGLYQGLSTATKDTYDALHMQALPPR

SEQ ID NO: 28173 - protein, 285 aa, synthetic construct
LKNVFPPEVAVFEPSEAEISHTQKATLVCLATGFYPDHVELSWWVNGKEVHSGVCTDPQPLKEQPALNDSRYCLSSRLRVSATFWQNPRNHFRCQVQFYGLSENDEWTQDRAKPVTQIVSAEAWGRADCGFTSESYQQGVLSATNLSVIGFRILLLKVAGFNLLMTLRLWSSRVKFSRSADAPAYQQGQNQLYNELNLGRREEYDVLDKRRGRDPEMGGKPQRRKNPQEGLYNELQKDKMAEAYSEIGMKGERRRGKGHDGLYQGLSTATKDTYDALHMQALPPR

SEQ ID NO: 28174 - protein, 284 aa, synthetic construct
KNVFPPEVAVFEPSEAEISHTQKATLVCLATGFYPDHVELSWWVNGKEVHSGVCTDPQPLKEQPALNDSRYCLSSRLRVSATFWQNPRNHFRCQVQFYGLSENDEWTQDRAKPVTQIVSAEAWGRADCGFTSESYQQGVLSATNLSVIGFRILLLKVAGFNLLMTLRLWSSRVKFSRSADAPAYQQGQNQLYNELNLGRREEYDVLDKRRGRDPEMGGKPQRRKNPQEGLYNELQKDKMAEAYSEIGMKGERRRGKGHDGLYQGLSTATKDTYDALHMQALPPR

SEQ ID NO: 28175 - protein, 283 aa, synthetic construct
NVFPPEVAVFEPSEAEISHTQKATLVCLATGFYPDHVELSWWVNGKEVHSGVCTDPQPLKEQPALNDSRYCLSSRLRVSATFWQNPRNHFRCQVQFYGLSENDEWTQDRAKPVTQIVSAEAWGRADCGFTSESYQQGVLSATNLSVIGFRILLLKVAGFNLLMTLRLWSSRVKFSRSADAPAYQQGQNQLYNELNLGRREEYDVLDKRRGRDPEMGGKPQRRKNPQEGLYNELQKDKMAEAYSEIGMKGERRRGKGHDGLYQGLSTATKDTYDALHMQALPPR

SEQ ID NO: 28176 - protein, 282 aa, synthetic construct
VFPPEVAVFEPSEAEISHTQKATLVCLATGFYPDHVELSWWVNGKEVHSGVCTDPQPLKEQPALNDSRYCLSSRLRVSATFWQNPRNHFRCQVQFYGLSENDEWTQDRAKPVTQIVSAEAWGRADCGFTSESYQQGVLSATNLSVIGFRILLLKVAGFNLLMTLRLWSSRVKFSRSADAPAYQQGQNQLYNELNLGRREEYDVLDKRRGRDPEMGGKPQRRKNPQEGLYNELQKDKMAEAYSEIGMKGERRRGKGHDGLYQGLSTATKDTYDALHMQALPPR

SEQ ID NO: 28177 - protein, 281 aa, synthetic construct
FPPEVAVFEPSEAEISHTQKATLVCLATGFYPDHVELSWWVNGKEVHSGVCTDPQPLKEQPALNDSRYCLSSRLRVSATFWQNPRNHFRCQVQFYGLSENDEWTQDRAKPVTQIVSAEAWGRADCGFTSESYQQGVLSATNLSVIGFRILLLKVAGFNLLMTLRLWSSRVKFSRSADAPAYQQGQNQLYNELNLGRREEYDVLDKRRGRDPEMGGKPQRRKNPQEGLYNELQKDKMAEAYSEIGMKGERRRGKGHDGLYQGLSTATKDTYDALHMQALPPR

SEQ ID NO: 28178 - protein, 280 aa, synthetic construct
PPEVAVFEPSEAEISHTQKATLVCLATGFYPDHVELSWWVNGKEVHSGVCTDPQPLKEQPALNDSRYCLSSRLRVSATFWQNPRNHFRCQVQFYGLSENDEWTQDRAKPVTQIVSAEAWGRADCGFTSESYQQGVLSATNLSVIGFRILLLKVAGFNLLMTLRLWSSRVKFSRSADAPAYQQGQNQLYNELNLGRREEYDVLDKRRGRDPEMGGKPQRRKNPQEGLYNELQKDKMAEAYSEIGMKGERRRGKGHDGLYQGLSTATKDTYDALHMQALPPR

SEQ ID NO: 28179 - protein, 279 aa, synthetic construct
PEVAVFEPSEAEISHTQKATLVCLATGFYPDHVELSWWVNGKEVHSGVCTDPQPLKEQPALNDSRYCLSSRLRVSATFWQNPRNHFRCQVQFYGLSENDEWTQDRAKPVTQIVSAEAWGRADCGFTSESYQQGVLSATNLSVIGFRILLLKVAGFNLLMTLRLWSSRVKFSRSADAPAYQQGQNQLYNELNLGRREEYDVLDKRRGRDPEMGGKPQRRKNPQEGLYNELQKDKMAEAYSEIGMKGERRRGKGHDGLYQGLSTATKDTYDALHMQALPPR

SEQ ID NO: 28180 - protein, 278 aa, synthetic construct
EVAVFEPSEAEISHTQKATLVCLATGFYPDHVELSWWVNGKEVHSGVCTDPQPLKEQPALNDSRYCLSSRLRVSATFWQNPRNHFRCQVQFYGLSENDEWTQDRAKPVTQIVSAEAWGRADCGFTSESYQQGVLSATNLSVIGFRILLLKVAGFNLLMTLRLWSSRVKFSRSADAPAYQQGQNQLYNELNLGRREEYDVLDKRRGRDPEMGGKPQRRKNPQEGLYNELQKDKMAEAYSEIGMKGERRRGKGHDGLYQGLSTATKDTYDALHMQALPPR

SEQ ID NO: 28181 - protein, 277 aa, synthetic construct
VAVFEPSEAEISHTQKATLVCLATGFYPDHVELSWWVNGKEVHSGVCTDPQPLKEQPALNDSRYCLSSRLRVSATFWQNPRNHFRCQVQFYGLSENDEWTQDRAKPVTQIVSAEAWGRADCGFTSESYQQGVLSATNLSVIGFRILLLKVAGFNLLMTLRLWSSRVKFSRSADAPAYQQGQNQLYNELNLGRREEYDVLDKRRGRDPEMGGKPQRRKNPQEGLYNELQKDKMAEAYSEIGMKGERRRGKGHDGLYQGLSTATKDTYDALHMQALPPR

SEQ ID NO: 28182 - protein, 276 aa, synthetic construct
AVFEPSEAEISHTQKATLVCLATGFYPDHVELSWWVNGKEVHSGVCTDPQPLKEQPALNDSRYCLSSRLRVSATFWQNPRNHFRCQVQFYGLSENDEWTQDRAKPVTQIVSAEAWGRADCGFTSESYQQGVLSATNLSVIGFRILLLKVAGFNLLMTLRLWSSRVKFSRSADAPAYQQGQNQLYNELNLGRREEYDVLDKRRGRDPEMGGKPQRRKNPQEGLYNELQKDKMAEAYSEIGMKGERRRGKGHDGLYQGLSTATKDTYDALHMQALPPR

SEQ ID NO: 28183 - protein, 275 aa, synthetic construct
VFEPSEAEISHTQKATLVCLATGFYPDHVELSWWVNGKEVHSGVCTDPQPLKEQPALNDSRYCLSSRLRVSATFWQNPRNHFRCQVQFYGLSENDEWTQDRAKPVTQIVSAEAWGRADCGFTSESYQQGVLSATNLSVIGFRILLLKVAGFNLLMTLRLWSSRVKFSRSADAPAYQQGQNQLYNELNLGRREEYDVLDKRRGRDPEMGGKPQRRKNPQEGLYNELQKDKMAEAYSEIGMKGERRRGKGHDGLYQGLSTATKDTYDALHMQALPPR

SEQ ID NO: 28184 - protein, 274 aa, synthetic construct
FEPSEAEISHTQKATLVCLATGFYPDHVELSWWVNGKEVHSGVCTDPQPLKEQPALNDSRYCLSSRLRVSATFWQNPRNHFRCQVQFYGLSENDEWTQDRAKPVTQIVSAEAWGRADCGFTSESYQQGVLSATNLSVIGFRILLLKVAGFNLLMTLRLWSSRVKFSRSADAPAYQQGQNQLYNELNLGRREEYDVLDKRRGRDPEMGGKPQRRKNPQEGLYNELQKDKMAEAYSEIGMKGERRRGKGHDGLYQGLSTATKDTYDALHMQALPPR

SEQ ID NO: 28185 - protein, 273 aa, synthetic construct
EPSEAEISHTQKATLVCLATGFYPDHVELSWWVNGKEVHSGVCTDPQPLKEQPALNDSRYCLSSRLRVSATFWQNPRNHFRCQVQFYGLSENDEWTQDRAKPVTQIVSAEAWGRADCGFTSESYQQGVLSATNLSVIGFRILLLKVAGFNLLMTLRLWSSRVKFSRSADAPAYQQGQNQLYNELNLGRREEYDVLDKRRGRDPEMGGKPQRRKNPQEGLYNELQKDKMAEAYSEIGMKGERRRGKGHDGLYQGLSTATKDTYDALHMQALPPR

SEQ ID NO: 28186 - protein, 272 aa, synthetic construct
PSEAEISHTQKATLVCLATGFYPDHVELSWWVNGKEVHSGVCTDPQPLKEQPALNDSRYCLSSRLRVSATFWQNPRNHFRCQVQFYGLSENDEWTQDRAKPVTQIVSAEAWGRADCGFTSESYQQGVLSATNLSVIGFRILLLKVAGFNLLMTLRLWSSRVKFSRSADAPAYQQGQNQLYNELNLGRREEYDVLDKRRGRDPEMGGKPQRRKNPQEGLYNELQKDKMAEAYSEIGMKGERRRGKGHDGLYQGLSTATKDTYDALHMQALPPR

SEQ ID NO: 28187 - protein, 271 aa, synthetic construct
SEAEISHTQKATLVCLATGFYPDHVELSWWVNGKEVHSGVCTDPQPLKEQPALNDSRYCLSSRLRVSATFWQNPRNHFRCQVQFYGLSENDEWTQDRAKPVTQIVSAEAWGRADCGFTSESYQQGVLSATNLSVIGFRILLLKVAGFNLLMTLRLWSSRVKFSRSADAPAYQQGQNQLYNELNLGRREEYDVLDKRRGRDPEMGGKPQRRKNPQEGLYNELQKDKMAEAYSEIGMKGERRRGKGHDGLYQGLSTATKDTYDALHMQALPPR

SEQ ID NO: 28188 - protein, 270 aa, synthetic construct
EAEISHTQKATLVCLATGFYPDHVELSWWVNGKEVHSGVCTDPQPLKEQPALNDSRYCLSSRLRVSATFWQNPRNHFRCQVQFYGLSENDEWTQDRAKPVTQIVSAEAWGRADCGFTSESYQQGVLSATNLSVIGFRILLLKVAGFNLLMTLRLWSSRVKFSRSADAPAYQQGQNQLYNELNLGRREEYDVLDKRRGRDPEMGGKPQRRKNPQEGLYNELQKDKMAEAYSEIGMKGERRRGKGHDGLYQGLSTATKDTYDALHMQALPPR

SEQ ID NO: 28189 - protein, 269 aa, synthetic construct
AEISHTQKATLVCLATGFYPDHVELSWWVNGKEVHSGVCTDPQPLKEQPALNDSRYCLSSRLRVSATFWQNPRNHFRCQVQFYGLSENDEWTQDRAKPVTQIVSAEAWGRADCGFTSESYQQGVLSATNLSVIGFRILLLKVAGFNLLMTLRLWSSRVKFSRSADAPAYQQGQNQLYNELNLGRREEYDVLDKRRGRDPEMGGKPQRRKNPQEGLYNELQKDKMAEAYSEIGMKGERRRGKGHDGLYQGLSTATKDTYDALHMQALPPR

SEQ ID NO: 28190 - protein, 268 aa, synthetic construct
EISHTQKATLVCLATGFYPDHVELSWWVNGKEVHSGVCTDPQPLKEQPALNDSRYCLSSRLRVSATFWQNPRNHFRCQVQFYGLSENDEWTQDRAKPVTQIVSAEAWGRADCGFTSESYQQGVLSATNLSVIGFRILLLKVAGFNLLMTLRLWSSRVKFSRSADAPAYQQGQNQLYNELNLGRREEYDVLDKRRGRDPEMGGKPQRRKNPQEGLYNELQKDKMAEAYSEIGMKGERRRGKGHDGLYQGLSTATKDTYDALHMQALPPR

SEQ ID NO: 28191 - protein, 267 aa, synthetic construct
ISHTQKATLVCLATGFYPDHVELSWWVNGKEVHSGVCTDPQPLKEQPALNDSRYCLSSRLRVSATFWQNPRNHFRCQVQFYGLSENDEWTQDRAKPVTQIVSAEAWGRADCGFTSESYQQGVLSATNLSVIGFRILLLKVAGFNLLMTLRLWSSRVKFSRSADAPAYQQGQNQLYNELNLGRREEYDVLDKRRGRDPEMGGKPQRRKNPQEGLYNELQKDKMAEAYSEIGMKGERRRGKGHDGLYQGLSTATKDTYDALHMQALPPR

SEQ ID NO: 28192 - protein, 266 aa, synthetic construct
SHTQKATLVCLATGFYPDHVELSWWVNGKEVHSGVCTDPQPLKEQPALNDSRYCLSSRLRVSATFWQNPRNHFRCQVQFYGLSENDEWTQDRAKPVTQIVSAEAWGRADCGFTSESYQQGVLSATNLSVIGFRILLLKVAGFNLLMTLRLWSSRVKFSRSADAPAYQQGQNQLYNELNLGRREEYDVLDKRRGRDPEMGGKPQRRKNPQEGLYNELQKDKMAEAYSEIGMKGERRRGKGHDGLYQGLSTATKDTYDALHMQALPPR

SEQ ID NO: 28193 - protein, 261 aa, synthetic construct
ATLVCLATGFYPDHVELSWWVNGKEVHSGVCTDPQPLKEQPALNDSRYCLSSRLRVSATFWQNPRNHFRCQVQFYGLSENDEWTQDRAKPVTQIVSAEAWGRADCGFTSESYQQGVLSATNLSVIGFRILLLKVAGFNLLMTLRLWSSRVKFSRSADAPAYQQGQNQLYNELNLGRREEYDVLDKRRGRDPEMGGKPQRRKNPQEGLYNELQKDKMAEAYSEIGMKGERRRGKGHDGLYQGLSTATKDTYDALHMQALPPR

SEQ ID NO: 28194 - protein, 256 aa, synthetic construct
LATGFYPDHVELSWWVNGKEVHSGVCTDPQPLKEQPALNDSRYCLSSRLRVSATFWQNPRNHFRCQVQFYGLSENDEWTQDRAKPVTQIVSAEAWGRADCGFTSESYQQGVLSATNLSVIGFRILLLKVAGFNLLMTLRLWSSRVKFSRSADAPAYQQGQNQLYNELNLGRREEYDVLDKRRGRDPEMGGKPQRRKNPQEGLYNELQKDKMAEAYSEIGMKGERRRGKGHDGLYQGLSTATKDTYDALHMQALPPR

SEQ ID NO: 28195 - protein, 375 aa, synthetic construct
DLKNVFPPEVAVFEPSEAEISHTQKATLVCLATGFYPDHVELSWWVNGKEVHSGVCTDPQPLKEQPALNDSRYCLSSRLRVSATFWQNPRNHFRCQVQFYGLSENDEWTQDRAKPVTQIVSAEAWGRADDVIKIHWQEKKSNTILGSQEGNTMKTNDTYMKFSWLTVPEKSLDKEHRCIVRHENNKNGVDQEIIFPPIKTDVITMDPKDNCSKDANDTLLLQLTNTSAYYMYLLLLLKSVVYFAIITCCLLMAMVKRKDSRGRVKFSRSADAPAYQQGQNQLYNELNLGRREEYDVLDKRRGRDPEMGGKPQRRKNPQEGLYNELQKDKMAEAYSEIGMKGERRRGKGHDGLYQGLSTATKDTYDALHMQALPPR

SEQ ID NO: 28196 - protein, 374 aa, synthetic construct
LKNVFPPEVAVFEPSEAEISHTQKATLVCLATGFYPDHVELSWWVNGKEVHSGVCTDPQPLKEQPALNDSRYCLSSRLRVSATFWQNPRNHFRCQVQFYGLSENDEWTQDRAKPVTQIVSAEAWGRADDVIKIHWQEKKSNTILGSQEGNTMKTNDTYMKFSWLTVPEKSLDKEHRCIVRHENNKNGVDQEIIFPPIKTDVITMDPKDNCSKDANDTLLLQLTNTSAYYMYLLLLLKSVVYFAIITCCLLMAMVKRKDSRGRVKFSRSADAPAYQQGQNQLYNELNLGRREEYDVLDKRRGRDPEMGGKPQRRKNPQEGLYNELQKDKMAEAYSEIGMKGERRRGKGHDGLYQGLSTATKDTYDALHMQALPPR

SEQ ID NO: 28197 - protein, 373 aa, synthetic construct
KNVFPPEVAVFEPSEAEISHTQKATLVCLATGFYPDHVELSWWVNGKEVHSGVCTDPQPLKEQPALNDSRYCLSSRLRVSATFWQNPRNHFRCQVQFYGLSENDEWTQDRAKPVTQIVSAEAWGRADDVIKIHWQEKKSNTILGSQEGNTMKTNDTYMKFSWLTVPEKSLDKEHRCIVRHENNKNGVDQEIIFPPIKTDVITMDPKDNCSKDANDTLLLQLTNTSAYYMYLLLLLKSVVYFAIITCCLLMAMVKRKDSRGRVKFSRSADAPAYQQGQNQLYNELNLGRREEYDVLDKRRGRDPEMGGKPQRRKNPQEGLYNELQKDKMAEAYSEIGMKGERRRGKGHDGLYQGLSTATKDTYDALHMQALPPR

SEQ ID NO: 28198 - protein, 372 aa, synthetic construct
NVFPPEVAVFEPSEAEISHTQKATLVCLATGFYPDHVELSWWVNGKEVHSGVCTDPQPLKEQPALNDSRYCLSSRLRVSATFWQNPRNHFRCQVQFYGLSENDEWTQDRAKPVTQIVSAEAWGRADDVIKIHWQEKKSNTILGSQEGNTMKTNDTYMKFSWLTVPEKSLDKEHRCIVRHENNKNGVDQEIIFPPIKTDVITMDPKDNCSKDANDTLLLQLTNTSAYYMYLLLLLKSVVYFAIITCCLLMAMVKRKDSRGRVKFSRSADAPAYQQGQNQLYNELNLGRREEYDVLDKRRGRDPEMGGKPQRRKNPQEGLYNELQKDKMAEAYSEIGMKGERRRGKGHDGLYQGLSTATKDTYDALHMQALPPR

SEQ ID NO: 28199 - protein, 371 aa, synthetic construct
VFPPEVAVFEPSEAEISHTQKATLVCLATGFYPDHVELSWWVNGKEVHSGVCTDPQPLKEQPALNDSRYCLSSRLRVSATFWQNPRNHFRCQVQFYGLSENDEWTQDRAKPVTQIVSAEAWGRADDVIKIHWQEKKSNTILGSQEGNTMKTNDTYMKFSWLTVPEKSLDKEHRCIVRHENNKNGVDQEIIFPPIKTDVITMDPKDNCSKDANDTLLLQLTNTSAYYMYLLLLLKSVVYFAIITCCLLMAMVKRKDSRGRVKFSRSADAPAYQQGQNQLYNELNLGRREEYDVLDKRRGRDPEMGGKPQRRKNPQEGLYNELQKDKMAEAYSEIGMKGERRRGKGHDGLYQGLSTATKDTYDALHMQALPPR

SEQ ID NO: 28200 - protein, 370 aa, synthetic construct
FPPEVAVFEPSEAEISHTQKATLVCLATGFYPDHVELSWWVNGKEVHSGVCTDPQPLKEQPALNDSRYCLSSRLRVSATFWQNPRNHFRCQVQFYGLSENDEWTQDRAKPVTQIVSAEAWGRADDVIKIHWQEKKSNTILGSQEGNTMKTNDTYMKFSWLTVPEKSLDKEHRCIVRHENNKNGVDQEIIFPPIKTDVITMDPKDNCSKDANDTLLLQLTNTSAYYMYLLLLLKSVVYFAIITCCLLMAMVKRKDSRGRVKFSRSADAPAYQQGQNQLYNELNLGRREEYDVLDKRRGRDPEMGGKPQRRKNPQEGLYNELQKDKMAEAYSEIGMKGERRRGKGHDGLYQGLSTATKDTYDALHMQALPPR

SEQ ID NO: 28201 - protein, 369 aa, synthetic construct
PPEVAVFEPSEAEISHTQKATLVCLATGFYPDHVELSWWVNGKEVHSGVCTDPQPLKEQPALNDSRYCLSSRLRVSATFWQNPRNHFRCQVQFYGLSENDEWTQDRAKPVTQIVSAEAWGRADDVIKIHWQEKKSNTILGSQEGNTMKTNDTYMKFSWLTVPEKSLDKEHRCIVRHENNKNGVDQEIIFPPIKTDVITMDPKDNCSKDANDTLLLQLTNTSAYYMYLLLLLKSVVYFAIITCCLLMAMVKRKDSRGRVKFSRSADAPAYQQGQNQLYNELNLGRREEYDVLDKRRGRDPEMGGKPQRRKNPQEGLYNELQKDKMAEAYSEIGMKGERRRGKGHDGLYQGLSTATKDTYDALHMQALPPR

SEQ ID NO: 28202 - protein, 368 aa, synthetic construct
PEVAVFEPSEAEISHTQKATLVCLATGFYPDHVELSWWVNGKEVHSGVCTDPQPLKEQPALNDSRYCLSSRLRVSATFWQNPRNHFRCQVQFYGLSENDEWTQDRAKPVTQIVSAEAWGRADDVIKIHWQEKKSNTILGSQEGNTMKTNDTYMKFSWLTVPEKSLDKEHRCIVRHENNKNGVDQEIIFPPIKTDVITMDPKDNCSKDANDTLLLQLTNTSAYYMYLLLLLKSVVYFAIITCCLLMAMVKRKDSRGRVKFSRSADAPAYQQGQNQLYNELNLGRREEYDVLDKRRGRDPEMGGKPQRRKNPQEGLYNELQKDKMAEAYSEIGMKGERRRGKGHDGLYQGLSTATKDTYDALHMQALPPR

SEQ ID NO: 28203 - protein, 367 aa, synthetic construct
EVAVFEPSEAEISHTQKATLVCLATGFYPDHVELSWWVNGKEVHSGVCTDPQPLKEQPALNDSRYCLSSRLRVSATFWQNPRNHFRCQVQFYGLSENDEWTQDRAKPVTQIVSAEAWGRADDVIKIHWQEKKSNTILGSQEGNTMKTNDTYMKFSWLTVPEKSLDKEHRCIVRHENNKNGVDQEIIFPPIKTDVITMDPKDNCSKDANDTLLLQLTNTSAYYMYLLLLLKSVVYFAIITCCLLMAMVKRKDSRGRVKFSRSADAPAYQQGQNQLYNELNLGRREEYDVLDKRRGRDPEMGGKPQRRKNPQEGLYNELQKDKMAEAYSEIGMKGERRRGKGHDGLYQGLSTATKDTYDALHMQALPPR

SEQ ID NO: 28204 - protein, 366 aa, synthetic construct
VAVFEPSEAEISHTQKATLVCLATGFYPDHVELSWWVNGKEVHSGVCTDPQPLKEQPALNDSRYCLSSRLRVSATFWQNPRNHFRCQVQFYGLSENDEWTQDRAKPVTQIVSAEAWGRADDVIKIHWQEKKSNTILGSQEGNTMKTNDTYMKFSWLTVPEKSLDKEHRCIVRHENNKNGVDQEIIFPPIKTDVITMDPKDNCSKDANDTLLLQLTNTSAYYMYLLLLLKSVVYFAIITCCLLMAMVKRKDSRGRVKFSRSADAPAYQQGQNQLYNELNLGRREEYDVLDKRRGRDPEMGGKPQRRKNPQEGLYNELQKDKMAEAYSEIGMKGERRRGKGHDGLYQGLSTATKDTYDALHMQALPPR

SEQ ID NO: 28205 - protein, 365 aa, synthetic construct
AVFEPSEAEISHTQKATLVCLATGFYPDHVELSWWVNGKEVHSGVCTDPQPLKEQPALNDSRYCLSSRLRVSATFWQNPRNHFRCQVQFYGLSENDEWTQDRAKPVTQIVSAEAWGRADDVIKIHWQEKKSNTILGSQEGNTMKTNDTYMKFSWLTVPEKSLDKEHRCIVRHENNKNGVDQEIIFPPIKTDVITMDPKDNCSKDANDTLLLQLTNTSAYYMYLLLLLKSVVYFAIITCCLLMAMVKRKDSRGRVKFSRSADAPAYQQGQNQLYNELNLGRREEYDVLDKRRGRDPEMGGKPQRRKNPQEGLYNELQKDKMAEAYSEIGMKGERRRGKGHDGLYQGLSTATKDTYDALHMQALPPR

SEQ ID NO: 28206 - protein, 377 aa, synthetic construct; identical to SEQ ID NO: 28010

SEQ ID NO: 28207 - protein, 376 aa, synthetic construct
DLKNVFPPEVAVFEPSEAEISHTQKATLVCLATGFYPDHVELSWWVNGKEVHSGVCTDPQPLKEQPALNDSRYCLSSRLRVSATFWQNPRNHFRCQVQFYGLSENDEWTQDRAKPVTQIVSAEAWGRADDVIKIHWQEKKSNTILGSQEGNTMKTNDTYMKFSWLTVPEKSLDKEHRCIVRHENNKNGVDQEIIFPPIKTDVITMDPKDNCSKDANDTLLLQLTNTSAYYMYLLLLLKSVVYFAIITCCLLRRTAFCCNGEKSRVKFSRSADAPAYQQGQNQLYNELNLGRREEYDVLDKRRGRDPEMGGKPQRRKNPQEGLYNELQKDKMAEAYSEIGMKGERRRGKGHDGLYQGLSTATKDTYDALHMQALPPR

SEQ ID NO: 28208 - protein, 375 aa, synthetic construct
LKNVFPPEVAVFEPSEAEISHTQKATLVCLATGFYPDHVELSWWVNGKEVHSGVCTDPQPLKEQPALNDSRYCLSSRLRVSATFWQNPRNHFRCQVQFYGLSENDEWTQDRAKPVTQIVSAEAWGRADDVIKIHWQEKKSNTILGSQEGNTMKTNDTYMKFSWLTVPEKSLDKEHRCIVRHENNKNGVDQEIIFPPIKTDVITMDPKDNCSKDANDTLLLQLTNTSAYYMYLLLLLKSVVYFAIITCCLLRRTAFCCNGEKSRVKFSRSADAPAYQQGQNQLYNELNLGRREEYDVLDKRRGRDPEMGGKPQRRKNPQEGLYNELQKDKMAEAYSEIGMKGERRRGKGHDGLYQGLSTATKDTYDALHMQALPPR

SEQ ID NO: 28209 - protein, 374 aa, synthetic construct
KNVFPPEVAVFEPSEAEISHTQKATLVCLATGFYPDHVELSWWVNGKEVHSGVCTDPQPLKEQPALNDSRYCLSSRLRVSATFWQNPRNHFRCQVQFYGLSENDEWTQDRAKPVTQIVSAEAWGRADDVIKIHWQEKKSNTILGSQEGNTMKTNDTYMKFSWLTVPEKSLDKEHRCIVRHENNKNGVDQEIIFPPIKTDVITMDPKDNCSKDANDTLLLQLTNTSAYYMYLLLLLKSVVYFAIITCCLLRRTAFCCNGEKSRVKFSRSADAPAYQQGQNQLYNELNLGRREEYDVLDKRRGRDPEMGGKPQRRKNPQEGLYNELQKDKMAEAYSEIGMKGERRRGKGHDGLYQGLSTATKDTYDALHMQALPPR

SEQ ID NO: 28210 - protein, 373 aa, synthetic construct
NVFPPEVAVFEPSEAEISHTQKATLVCLATGFYPDHVELSWWVNGKEVHSGVCTDPQPLKEQPALNDSRYCLSSRLRVSATFWQNPRNHFRCQVQFYGLSENDEWTQDRAKPVTQIVSAEAWGRADDVIKIHWQEKKSNTILGSQEGNTMKTNDTYMKFSWLTVPEKSLDKEHRCIVRHENNKNGVDQEIIFPPIKTDVITMDPKDNCSKDANDTLLLQLTNTSAYYMYLLLLLKSVVYFAIITCCLLRRTAFCCNGEKSRVKFSRSADAPAYQQGQNQLYNELNLGRREEYDVLDKRRGRDPEMGGKPQRRKNPQEGLYNELQKDKMAEAYSEIGMKGERRRGKGHDGLYQGLSTATKDTYDALHMQALPPR

SEQ ID NO: 28211 - protein, 372 aa, synthetic construct
VFPPEVAVFEPSEAEISHTQKATLVCLATGFYPDHVELSWWVNGKEVHSGVCTDPQPLKEQPALNDSRYCLSSRLRVSATFWQNPRNHFRCQVQFYGLSENDEWTQDRAKPVTQIVSAEAWGRADDVIKIHWQEKKSNTILGSQEGNTMKTNDTYMKFSWLTVPEKSLDKEHRCIVRHENNKNGVDQEIIFPPIKTDVITMDPKDNCSKDANDTLLLQLTNTSAYYMYLLLLLKSVVYFAIITCCLLRRTAFCCNGEKSRVKFSRSADAPAYQQGQNQLYNELNLGRREEYDVLDKRRGRDPEMGGKPQRRKNPQEGLYNELQKDKMAEAYSEIGMKGERRRGKGHDGLYQGLSTATKDTYDALHMQALPPR

SEQ ID NO: 28212 - protein, 371 aa, synthetic construct
FPPEVAVFEPSEAEISHTQKATLVCLATGFYPDHVELSWWVNGKEVHSGVCTDPQPLKEQPALNDSRYCLSSRLRVSATFWQNPRNHFRCQVQFYGLSENDEWTQDRAKPVTQIVSAEAWGRADDVIKIHWQEKKSNTILGSQEGNTMKTNDTYMKFSWLTVPEKSLDKEHRCIVRHENNKNGVDQEIIFPPIKTDVITMDPKDNCSKDANDTLLLQLTNTSAYYMYLLLLLKSVVYFAIITCCLLRRTAFCCNGEKSRVKFSRSADAPAYQQGQNQLYNELNLGRREEYDVLDKRRGRDPEMGGKPQRRKNPQEGLYNELQKDKMAEAYSEIGMKGERRRGKGHDGLYQGLSTATKDTYDALHMQALPPR

SEQ ID NO: 28213 - protein, 370 aa, synthetic construct
PPEVAVFEPSEAEISHTQKATLVCLATGFYPDHVELSWWVNGKEVHSGVCTDPQPLKEQPALNDSRYCLSSRLRVSATFWQNPRNHFRCQVQFYGLSENDEWTQDRAKPVTQIVSAEAWGRADDVIKIHWQEKKSNTILGSQEGNTMKTNDTYMKFSWLTVPEKSLDKEHRCIVRHENNKNGVDQEIIFPPIKTDVITMDPKDNCSKDANDTLLLQLTNTSAYYMYLLLLLKSVVYFAIITCCLLRRTAFCCNGEKSRVKFSRSADAPAYQQGQNQLYNELNLGRREEYDVLDKRRGRDPEMGGKPQRRKNPQEGLYNELQKDKMAEAYSEIGMKGERRRGKGHDGLYQGLSTATKDTYDALHMQALPPR

SEQ ID NO: 28214 - protein, 369 aa, synthetic construct
PEVAVFEPSEAEISHTQKATLVCLATGFYPDHVELSWWVNGKEVHSGVCTDPQPLKEQPALNDSRYCLSSRLRVSATFWQNPRNHFRCQVQFYGLSENDEWTQDRAKPVTQIVSAEAWGRADDVIKIHWQEKKSNTILGSQEGNTMKTNDTYMKFSWLTVPEKSLDKEHRCIVRHENNKNGVDQEIIFPPIKTDVITMDPKDNCSKDANDTLLLQLTNTSAYYMYLLLLLKSVVYFAIITCCLLRRTAFCCNGEKSRVKFSRSADAPAYQQGQNQLYNELNLGRREEYDVLDKRRGRDPEMGGKPQRRKNPQEGLYNELQKDKMAEAYSEIGMKGERRRGKGHDGLYQGLSTATKDTYDALHMQALPPR

SEQ ID NO: 28215 - protein, 368 aa, synthetic construct
EVAVFEPSEAEISHTQKATLVCLATGFYPDHVELSWWVNGKEVHSGVCTDPQPLKEQPALNDSRYCLSSRLRVSATFWQNPRNHFRCQVQFYGLSENDEWTQDRAKPVTQIVSAEAWGRADDVIKIHWQEKKSNTILGSQEGNTMKTNDTYMKFSWLTVPEKSLDKEHRCIVRHENNKNGVDQEIIFPPIKTDVITMDPKDNCSKDANDTLLLQLTNTSAYYMYLLLLLKSVVYFAIITCCLLRRTAFCCNGEKSRVKFSRSADAPAYQQGQNQLYNELNLGRREEYDVLDKRRGRDPEMGGKPQRRKNPQEGLYNELQKDKMAEAYSEIGMKGERRRGKGHDGLYQGLSTATKDTYDALHMQALPPR

SEQ ID NO: 28216 - protein, 367 aa, synthetic construct
VAVFEPSEAEISHTQKATLVCLATGFYPDHVELSWWVNGKEVHSGVCTDPQPLKEQPALNDSRYCLSSRLRVSATFWQNPRNHFRCQVQFYGLSENDEWTQDRAKPVTQIVSAEAWGRADDVIKIHWQEKKSNTILGSQEGNTMKTNDTYMKFSWLTVPEKSLDKEHRCIVRHENNKNGVDQEIIFPPIKTDVITMDPKDNCSKDANDTLLLQLTNTSAYYMYLLLLLKSVVYFAIITCCLLRRTAFCCNGEKSRVKFSRSADAPAYQQGQNQLYNELNLGRREEYDVLDKRRGRDPEMGGKPQRRKNPQEGLYNELQKDKMAEAYSEIGMKGERRRGKGHDGLYQGLSTATKDTYDALHMQALPPR

SEQ ID NO: 28217 - protein, 253 aa, synthetic construct; identical to SEQ ID NO: 27941

SEQ ID NO: 28218 - protein, 252 aa, synthetic construct
QNPDPAVYQLRDSKSSDKSVCLFTDFDSQTNVSQSKDSDVYITDKCVLDMRSMDFKSNSAVAWSNKSDFACANAFNNSIIPEDTFFPSPESSCDVKLVEKSFETDTNLNFQNLSVIGFRILLLKVAGFNLLMTLRLWSSRVKFSRSADAPAYQQGQNQLYNELNLGRREEYDVLDKRRGRDPEMGGKPQRRKNPQEGLYNELQKDKMAEAYSEIGMKGERRRGKGHDGLYQGLSTATKDTYDALHMQALPPR

SEQ ID NO: 28219 - protein, 251 aa, synthetic construct
NPDPAVYQLRDSKSSDKSVCLFTDFDSQTNVSQSKDSDVYITDKCVLDMRSMDFKSNSAVAWSNKSDFACANAFNNSIIPEDTFFPSPESSCDVKLVEKSFETDTNLNFQNLSVIGFRILLLKVAGFNLLMTLRLWSSRVKFSRSADAPAYQQGQNQLYNELNLGRREEYDVLDKRRGRDPEMGGKPQRRKNPQEGLYNELQKDKMAEAYSEIGMKGERRRGKGHDGLYQGLSTATKDTYDALHMQALPPR

SEQ ID NO: 28220 - protein, 250 aa, synthetic construct; identical to SEQ ID NO: 27942

SEQ ID NO: 28221 - protein, 249 aa, synthetic construct
DPAVYQLRDSKSSDKSVCLFTDFDSQTNVSQSKDSDVYITDKCVLDMRSMDFKSNSAVAWSNKSDFACANAFNNSIIPEDTFFPSPESSCDVKLVEKSFETDTNLNFQNLSVIGFRILLLKVAGFNLLMTLRLWSSRVKFSRSADAPAYQQGQNQLYNELNLGRREEYDVLDKRRGRDPEMGGKPQRRKNPQEGLYNELQKDKMAEAYSEIGMKGERRRGKGHDGLYQGLSTATKDTYDALHMQALPPR

SEQ ID NO: 28222 - protein, 248 aa, synthetic construct
PAVYQLRDSKSSDKSVCLFTDFDSQTNVSQSKDSDVYITDKCVLDMRSMDFKSNSAVAWSNKSDFACANAFNNSIIPEDTFFPSPESSCDVKLVEKSFETDTNLNFQNLSVIGFRILLLKVAGFNLLMTLRLWSSRVKFSRSADAPAYQQGQNQLYNELNLGRREEYDVLDKRRGRDPEMGGKPQRRKNPQEGLYNELQKDKMAEAYSEIGMKGERRRGKGHDGLYQGLSTATKDTYDALHMQALPPR

SEQ ID NO: 28223 - protein, 247 aa, synthetic construct
AVYQLRDSKSSDKSVCLFTDFDSQTNVSQSKDSDVYITDKCVLDMRSMDFKSNSAVAWSNKSDFACANAFNNSIIPEDTFFPSPESSCDVKLVEKSFETDTNLNFQNLSVIGFRILLLKVAGFNLLMTLRLWSSRVKFSRSADAPAYQQGQNQLYNELNLGRREEYDVLDKRRGRDPEMGGKPQRRKNPQEGLYNELQKDKMAEAYSEIGMKGERRRGKGHDGLYQGLSTATKDTYDALHMQALPPR

SEQ ID NO: 28224 - protein, 246 aa, synthetic construct
VYQLRDSKSSDKSVCLFTDFDSQTNVSQSKDSDVYITDKCVLDMRSMDFKSNSAVAWSNKSDFACANAFNNSIIPEDTFFPSPESSCDVKLVEKSFETDTNLNFQNLSVIGFRILLLKVAGFNLLMTLRLWSSRVKFSRSADAPAYQQGQNQLYNELNLGRREEYDVLDKRRGRDPEMGGKPQRRKNPQEGLYNELQKDKMAEAYSEIGMKGERRRGKGHDGLYQGLSTATKDTYDALHMQALPPR

SEQ ID NO: 28225 - protein, 245 aa, synthetic construct
YQLRDSKSSDKSVCLFTDFDSQTNVSQSKDSDVYITDKCVLDMRSMDFKSNSAVAWSNKSDFACANAFNNSIIPEDTFFPSPESSCDVKLVEKSFETDTNLNFQNLSVIGFRILLLKVAGFNLLMTLRLWSSRVKFSRSADAPAYQQGQNQLYNELNLGRREEYDVLDKRRGRDPEMGGKPQRRKNPQEGLYNELQKDKMAEAYSEIGMKGERRRGKGHDGLYQGLSTATKDTYDALHMQALPPR

SEQ ID NO: 28226 - protein, 244 aa, synthetic construct
QLRDSKSSDKSVCLFTDFDSQTNVSQSKDSDVYITDKCVLDMRSMDFKSNSAVAWSNKSDFACANAFNNSIIPEDTFFPSPESSCDVKLVEKSFETDTNLNFQNLSVIGFRILLLKVAGFNLLMTLRLWSSRVKFSRSADAPAYQQGQNQLYNELNLGRREEYDVLDKRRGRDPEMGGKPQRRKNPQEGLYNELQKDKMAEAYSEIGMKGERRRGKGHDGLYQGLSTATKDTYDALHMQALPPR

SEQ ID NO: 28227 - protein, 243 aa, synthetic construct
LRDSKSSDKSVCLFTDFDSQTNVSQSKDSDVYITDKCVLDMRSMDFKSNSAVAWSNKSDFACANAFNNSIIPEDTFFPSPESSCDVKLVEKSFETDTNLNFQNLSVIGFRILLLKVAGFNLLMTLRLWSSRVKFSRSADAPAYQQGQNQLYNELNLGRREEYDVLDKRRGRDPEMGGKPQRRKNPQEGLYNELQKDKMAEAYSEIGMKGERRRGKGHDGLYQGLSTATKDTYDALHMQALPPR

SEQ ID NO: 28228 - protein, 242 aa, synthetic construct
RDSKSSDKSVCLFTDFDSQTNVSQSKDSDVYITDKCVLDMRSMDFKSNSAVAWSNKSDFACANAFNNSIIPEDTFFPSPESSCDVKLVEKSFETDTNLNFQNLSVIGFRILLLKVAGFNLLMTLRLWSSRVKFSRSADAPAYQQGQNQLYNELNLGRREEYDVLDKRRGRDPEMGGKPQRRKNPQEGLYNELQKDKMAEAYSEIGMKGERRRGKGHDGLYQGLSTATKDTYDALHMQALPPR

SEQ ID NO: 28229 - protein, 241 aa, synthetic construct
DSKSSDKSVCLFTDFDSQTNVSQSKDSDVYITDKCVLDMRSMDFKSNSAVAWSNKSDFACANAFNNSIIPEDTFFPSPESSCDVKLVEKSFETDTNLNFQNLSVIGFRILLLKVAGFNLLMTLRLWSSRVKFSRSADAPAYQQGQNQLYNELNLGRREEYDVLDKRRGRDPEMGGKPQRRKNPQEGLYNELQKDKMAEAYSEIGMKGERRRGKGHDGLYQGLSTATKDTYDALHMQALPPR

SEQ ID NO: 28230 - protein, 240 aa, synthetic construct
SKSSDKSVCLFTDFDSQTNVSQSKDSDVYITDKCVLDMRSMDFKSNSAVAWSNKSDFACANAFNNSIIPEDTFFPSPESSCDVKLVEKSFETDTNLNFQNLSVIGFRILLLKVAGFNLLMTLRLWSSRVKFSRSADAPAYQQGQNQLYNELNLGRREEYDVLDKRRGRDPEMGGKPQRRKNPQEGLYNELQKDKMAEAYSEIGMKGERRRGKGHDGLYQGLSTATKDTYDALHMQALPPR

SEQ ID NO: 28231 - protein, 239 aa, synthetic construct
KSSDKSVCLFTDFDSQTNVSQSKDSDVYITDKCVLDMRSMDFKSNSAVAWSNKSDFACANAFNNSIIPEDTFFPSPESSCDVKLVEKSFETDTNLNFQNLSVIGFRILLLKVAGFNLLMTLRLWSSRVKFSRSADAPAYQQGQNQLYNELNLGRREEYDVLDKRRGRDPEMGGKPQRRKNPQEGLYNELQKDKMAEAYSEIGMKGERRRGKGHDGLYQGLSTATKDTYDALHMQALPPR

SEQ ID NO: 28232 - protein, 238 aa, synthetic construct
SSDKSVCLFTDFDSQTNVSQSKDSDVYITDKCVLDMRSMDFKSNSAVAWSNKSDFACANAFNNSIIPEDTFFPSPESSCDVKLVEKSFETDTNLNFQNLSVIGFRILLLKVAGFNLLMTLRLWSSRVKFSRSADAPAYQQGQNQLYNELNLGRREEYDVLDKRRGRDPEMGGKPQRRKNPQEGLYNELQKDKMAEAYSEIGMKGERRRGKGHDGLYQGLSTATKDTYDALHMQALPPR

SEQ ID NO: 28233 - protein, 237 aa, synthetic construct
SDKSVCLFTDFDSQTNVSQSKDSDVYITDKCVLDMRSMDFKSNSAVAWSNKSDFACANAFNNSIIPEDTFFPSPESSCDVKLVEKSFETDTNLNFQNLSVIGFRILLLKVAGFNLLMTLRLWSSRVKFSRSADAPAYQQGQNQLYNELNLGRREEYDVLDKRRGRDPEMGGKPQRRKNPQEGLYNELQKDKMAEAYSEIGMKGERRRGKGHDGLYQGLSTATKDTYDALHMQALPPR

SEQ ID NO: 28234 - protein, 236 aa, synthetic construct
DKSVCLFTDFDSQTNVSQSKDSDVYITDKCVLDMRSMDFKSNSAVAWSNKSDFACANAFNNSIIPEDTFFPSPESSCDVKLVEKSFETDTNLNFQNLSVIGFRILLLKVAGFNLLMTLRLWSSRVKFSRSADAPAYQQGQNQLYNELNLGRREEYDVLDKRRGRDPEMGGKPQRRKNPQEGLYNELQKDKMAEAYSEIGMKGERRRGKGHDGLYQGLSTATKDTYDALHMQALPPR

SEQ ID NO: 28235 - protein, 235 aa, synthetic construct
KSVCLFTDFDSQTNVSQSKDSDVYITDKCVLDMRSMDFKSNSAVAWSNKSDFACANAFNNSIIPEDTFFPSPESSCDVKLVEKSFETDTNLNFQNLSVIGFRILLLKVAGFNLLMTLRLWSSRVKFSRSADAPAYQQGQNQLYNELNLGRREEYDVLDKRRGRDPEMGGKPQRRKNPQEGLYNELQKDKMAEAYSEIGMKGERRRGKGHDGLYQGLSTATKDTYDALHMQALPPR

SEQ ID NO: 28236 - protein, 234 aa, synthetic construct
SVCLFTDFDSQTNVSQSKDSDVYITDKCVLDMRSMDFKSNSAVAWSNKSDFACANAFNNSIIPEDTFFPSPESSCDVKLVEKSFETDTNLNFQNLSVIGFRILLLKVAGFNLLMTLRLWSSRVKFSRSADAPAYQQGQNQLYNELNLGRREEYDVLDKRRGRDPEMGGKPQRRKNPQEGLYNELQKDKMAEAYSEIGMKGERRRGKGHDGLYQGLSTATKDTYDALHMQALPPR

SEQ ID NO: 28237 - protein, 233 aa, synthetic construct
VCLFTDFDSQTNVSQSKDSDVYITDKCVLDMRSMDFKSNSAVAWSNKSDFACANAFNNSIIPEDTFFPSPESSCDVKLVEKSFETDTNLNFQNLSVIGFRILLLKVAGFNLLMTLRLWSSRVKFSRSADAPAYQQGQNQLYNELNLGRREEYDVLDKRRGRDPEMGGKPQRRKNPQEGLYNELQKDKMAEAYSEIGMKGERRRGKGHDGLYQGLSTATKDTYDALHMQALPPR

SEQ ID NO: 28238 - protein, 232 aa, synthetic construct
CLFTDFDSQTNVSQSKDSDVYITDKCVLDMRSMDFKSNSAVAWSNKSDFACANAFNNSIIPEDTFFPSPESSCDVKLVEKSFETDTNLNFQNLSVIGFRILLLKVAGFNLLMTLRLWSSRVKFSRSADAPAYQQGQNQLYNELNLGRREEYDVLDKRRGRDPEMGGKPQRRKNPQEGLYNELQKDKMAEAYSEIGMKGERRRGKGHDGLYQGLSTATKDTYDALHMQALPPR

SEQ ID NO: 28239 - protein, 231 aa, synthetic construct
LFTDFDSQTNVSQSKDSDVYITDKCVLDMRSMDFKSNSAVAWSNKSDFACANAFNNSIIPEDTFFPSPESSCDVKLVEKSFETDTNLNFQNLSVIGFRILLLKVAGFNLLMTLRLWSSRVKFSRSADAPAYQQGQNQLYNELNLGRREEYDVLDKRRGRDPEMGGKPQRRKNPQEGLYNELQKDKMAEAYSEIGMKGERRRGKGHDGLYQGLSTATKDTYDALHMQALPPR

SEQ ID NO: 28240 - protein, 230 aa, synthetic construct
FTDFDSQTNVSQSKDSDVYITDKCVLDMRSMDFKSNSAVAWSNKSDFACANAFNNSIIPEDTFFPSPESSCDVKLVEKSFETDTNLNFQNLSVIGFRILLLKVAGFNLLMTLRLWSSRVKFSRSADAPAYQQGQNQLYNELNLGRREEYDVLDKRRGRDPEMGGKPQRRKNPQEGLYNELQKDKMAEAYSEIGMKGERRRGKGHDGLYQGLSTATKDTYDALHMQALPPR

SEQ ID NO: 28241 - protein, 229 aa, synthetic construct
TDFDSQTNVSQSKDSDVYITDKCVLDMRSMDFKSNSAVAWSNKSDFACANAFNNSIIPEDTFFPSPESSCDVKLVEKSFETDTNLNFQNLSVIGFRILLLKVAGFNLLMTLRLWSSRVKFSRSADAPAYQQGQNQLYNELNLGRREEYDVLDKRRGRDPEMGGKPQRRKNPQEGLYNELQKDKMAEAYSEIGMKGERRRGKGHDGLYQGLSTATKDTYDALHMQALPPR

SEQ ID NO: 28242 - protein, 228 aa, synthetic construct
DFDSQTNVSQSKDSDVYITDKCVLDMRSMDFKSNSAVAWSNKSDFACANAFNNSIIPEDTFFPSPESSCDVKLVEKSFETDTNLNFQNLSVIGFRILLLKVAGFNLLMTLRLWSSRVKFSRSADAPAYQQGQNQLYNELNLGRREEYDVLDKRRGRDPEMGGKPQRRKNPQEGLYNELQKDKMAEAYSEIGMKGERRRGKGHDGLYQGLSTATKDTYDALHMQALPPR

SEQ ID NO: 28243 - protein, 227 aa, synthetic construct
FDSQTNVSQSKDSDVYITDKCVLDMRSMDFKSNSAVAWSNKSDFACANAFNNSIIPEDTFFPSPESSCDVKLVEKSFETDTNLNFQNLSVIGFRILLLKVAGFNLLMTLRLWSSRVKFSRSADAPAYQQGQNQLYNELNLGRREEYDVLDKRRGRDPEMGGKPQRRKNPQEGLYNELQKDKMAEAYSEIGMKGERRRGKGHDGLYQGLSTATKDTYDALHMQALPPR

SEQ ID NO: 28244 - protein, 226 aa, synthetic construct
DSQTNVSQSKDSDVYITDKCVLDMRSMDFKSNSAVAWSNKSDFACANAFNNSIIPEDTFFPSPESSCDVKLVEKSFETDTNLNFQNLSVIGFRILLLKVAGFNLLMTLRLWSSRVKFSRSADAPAYQQGQNQLYNELNLGRREEYDVLDKRRGRDPEMGGKPQRRKNPQEGLYNELQKDKMAEAYSEIGMKGERRRGKGHDGLYQGLSTATKDTYDALHMQALPPR

SEQ ID NO: 28245 - protein, 225 aa, synthetic construct
SQTNVSQSKDSDVYITDKCVLDMRSMDFKSNSAVAWSNKSDFACANAFNNSIIPEDTFFPSPESSCDVKLVEKSFETDTNLNFQNLSVIGFRILLLKVAGFNLLMTLRLWSSRVKFSRSADAPAYQQGQNQLYNELNLGRREEYDVLDKRRGRDPEMGGKPQRRKNPQEGLYNELQKDKMAEAYSEIGMKGERRRGKGHDGLYQGLSTATKDTYDALHMQALPPR

SEQ ID NO: 28246 - protein, 224 aa, synthetic construct
QTNVSQSKDSDVYITDKCVLDMRSMDFKSNSAVAWSNKSDFACANAFNNSIIPEDTFFPSPESSCDVKLVEKSFETDTNLNFQNLSVIGFRILLLKVAGFNLLMTLRLWSSRVKFSRSADAPAYQQGQNQLYNELNLGRREEYDVLDKRRGRDPEMGGKPQRRKNPQEGLYNELQKDKMAEAYSEIGMKGERRRGKGHDGLYQGLSTATKDTYDALHMQALPPR

SEQ ID NO: 28247 - protein, 223 aa, synthetic construct
TNVSQSKDSDVYITDKCVLDMRSMDFKSNSAVAWSNKSDFACANAFNNSIIPEDTFFPSPESSCDVKLVEKSFETDTNLNFQNLSVIGFRILLLKVAGFNLLMTLRLWSSRVKFSRSADAPAYQQGQNQLYNELNLGRREEYDVLDKRRGRDPEMGGKPQRRKNPQEGLYNELQKDKMAEAYSEIGMKGERRRGKGHDGLYQGLSTATKDTYDALHMQALPPR

SEQ ID NO: 28248 - protein, 222 aa, synthetic construct
NVSQSKDSDVYITDKCVLDMRSMDFKSNSAVAWSNKSDFACANAFNNSIIPEDTFFPSPESSCDVKLVEKSFETDTNLNFQNLSVIGFRILLLKVAGFNLLMTLRLWSSRVKFSRSADAPAYQQGQNQLYNELNLGRREEYDVLDKRRGRDPEMGGKPQRRKNPQEGLYNELQKDKMAEAYSEIGMKGERRRGKGHDGLYQGLSTATKDTYDALHMQALPPR

SEQ ID NO: 28249 - protein, 221 aa, synthetic construct
VSQSKDSDVYITDKCVLDMRSMDFKSNSAVAWSNKSDFACANAFNNSIIPEDTFFPSPESSCDVKLVEKSFETDTNLNFQNLSVIGFRILLLKVAGFNLLMTLRLWSSRVKFSRSADAPAYQQGQNQLYNELNLGRREEYDVLDKRRGRDPEMGGKPQRRKNPQEGLYNELQKDKMAEAYSEIGMKGERRRGKGHDGLYQGLSTATKDTYDALHMQALPPR

SEQ ID NO: 28250 - protein, 220 aa, synthetic construct
SQSKDSDVYITDKCVLDMRSMDFKSNSAVAWSNKSDFACANAFNNSIIPEDTFFPSPESSCDVKLVEKSFETDTNLNFQNLSVIGFRILLLKVAGFNLLMTLRLWSSRVKFSRSADAPAYQQGQNQLYNELNLGRREEYDVLDKRRGRDPEMGGKPQRRKNPQEGLYNELQKDKMAEAYSEIGMKGERRRGKGHDGLYQGLSTATKDTYDALHMQALPPR

SEQ ID NO: 28251 - protein, 219 aa, synthetic construct
QSKDSDVYITDKCVLDMRSMDFKSNSAVAWSNKSDFACANAFNNSIIPEDTFFPSPESSCDVKLVEKSFETDTNLNFQNLSVIGFRILLLKVAGFNLLMTLRLWSSRVKFSRSADAPAYQQGQNQLYNELNLGRREEYDVLDKRRGRDPEMGGKPQRRKNPQEGLYNELQKDKMAEAYSEIGMKGERRRGKGHDGLYQGLSTATKDTYDALHMQALPPR

SEQ ID NO: 28252 - protein, 218 aa, synthetic construct
SKDSDVYITDKCVLDMRSMDFKSNSAVAWSNKSDFACANAFNNSIIPEDTFFPSPESSCDVKLVEKSFETDTNLNFQNLSVIGFRILLLKVAGFNLLMTLRLWSSRVKFSRSADAPAYQQGQNQLYNELNLGRREEYDVLDKRRGRDPEMGGKPQRRKNPQEGLYNELQKDKMAEAYSEIGMKGERRRGKGHDGLYQGLSTATKDTYDALHMQALPPR

SEQ ID NO: 28253 - protein, 217 aa, synthetic construct
KDSDVYITDKCVLDMRSMDFKSNSAVAWSNKSDFACANAFNNSIIPEDTFFPSPESSCDVKLVEKSFETDTNLNFQNLSVIGFRILLLKVAGFNLLMTLRLWSSRVKFSRSADAPAYQQGQNQLYNELNLGRREEYDVLDKRRGRDPEMGGKPQRRKNPQEGLYNELQKDKMAEAYSEIGMKGERRRGKGHDGLYQGLSTATKDTYDALHMQALPPR

SEQ ID NO: 28254 - protein, 216 aa, synthetic construct
DSDVYITDKCVLDMRSMDFKSNSAVAWSNKSDFACANAFNNSIIPEDTFFPSPESSCDVKLVEKSFETDTNLNFQNLSVIGFRILLLKVAGFNLLMTLRLWSSRVKFSRSADAPAYQQGQNQLYNELNLGRREEYDVLDKRRGRDPEMGGKPQRRKNPQEGLYNELQKDKMAEAYSEIGMKGERRRGKGHDGLYQGLSTATKDTYDALHMQALPPR

SEQ ID NO: 28255 - protein, 215 aa, synthetic construct
SDVYITDKCVLDMRSMDFKSNSAVAWSNKSDFACANAFNNSIIPEDTFFPSPESSCDVKLVEKSFETDTNLNFQNLSVIGFRILLLKVAGFNLLMTLRLWSSRVKFSRSADAPAYQQGQNQLYNELNLGRREEYDVLDKRRGRDPEMGGKPQRRKNPQEGLYNELQKDKMAEAYSEIGMKGERRRGKGHDGLYQGLSTATKDTYDALHMQALPPR

SEQ ID NO: 28256 - protein, 214 aa, synthetic construct
DVYITDKCVLDMRSMDFKSNSAVAWSNKSDFACANAFNNSIIPEDTFFPSPESSCDVKLVEKSFETDTNLNFQNLSVIGFRILLLKVAGFNLLMTLRLWSSRVKFSRSADAPAYQQGQNQLYNELNLGRREEYDVLDKRRGRDPEMGGKPQRRKNPQEGLYNELQKDKMAEAYSEIGMKGERRRGKGHDGLYQGLSTATKDTYDALHMQALPPR

SEQ ID NO: 28257 - protein, 213 aa, synthetic construct
VYITDKCVLDMRSMDFKSNSAVAWSNKSDFACANAFNNSIIPEDTFFPSPESSCDVKLVEKSFETDTNLNFQNLSVIGFRILLLKVAGFNLLMTLRLWSSRVKFSRSADAPAYQQGQNQLYNELNLGRREEYDVLDKRRGRDPEMGGKPQRRKNPQEGLYNELQKDKMAEAYSEIGMKGERRRGKGHDGLYQGLSTATKDTYDALHMQALPPR

SEQ ID NO: 28258 - protein, 212 aa, synthetic construct
YITDKCVLDMRSMDFKSNSAVAWSNKSDFACANAFNNSIIPEDTFFPSPESSCDVKLVEKSFETDTNLNFQNLSVIGFRILLLKVAGFNLLMTLRLWSSRVKFSRSADAPAYQQGQNQLYNELNLGRREEYDVLDKRRGRDPEMGGKPQRRKNPQEGLYNELQKDKMAEAYSEIGMKGERRRGKGHDGLYQGLSTATKDTYDALHMQALPPR

SEQ ID NO: 28259 - protein, 211 aa, synthetic construct
ITDKCVLDMRSMDFKSNSAVAWSNKSDFACANAFNNSIIPEDTFFPSPESSCDVKLVEKSFETDTNLNFQNLSVIGFRILLLKVAGFNLLMTLRLWSSRVKFSRSADAPAYQQGQNQLYNELNLGRREEYDVLDKRRGRDPEMGGKPQRRKNPQEGLYNELQKDKMAEAYSEIGMKGERRRGKGHDGLYQGLSTATKDTYDALHMQALPPR

SEQ ID NO: 28260 - protein, 210 aa, synthetic construct
TDKCVLDMRSMDFKSNSAVAWSNKSDFACANAFNNSIIPEDTFFPSPESSCDVKLVEKSFETDTNLNFQNLSVIGFRILLLKVAGFNLLMTLRLWSSRVKFSRSADAPAYQQGQNQLYNELNLGRREEYDVLDKRRGRDPEMGGKPQRRKNPQEGLYNELQKDKMAEAYSEIGMKGERRRGKGHDGLYQGLSTATKDTYDALHMQALPPR

SEQ ID NO: 28261 - protein, 209 aa, synthetic construct
DKCVLDMRSMDFKSNSAVAWSNKSDFACANAFNNSIIPEDTFFPSPESSCDVKLVEKSFETDTNLNFQNLSVIGFRILLLKVAGFNLLMTLRLWSSRVKFSRSADAPAYQQGQNQLYNELNLGRREEYDVLDKRRGRDPEMGGKPQRRKNPQEGLYNELQKDKMAEAYSEIGMKGERRRGKGHDGLYQGLSTATKDTYDALHMQALPPR

SEQ ID NO: 28262 - protein, 207 aa, synthetic construct
CVLDMRSMDFKSNSAVAWSNKSDFACANAFNNSIIPEDTFFPSPESSCDVKLVEKSFETDTNLNFQNLSVIGFRILLLKVAGFNLLMTLRLWSSRVKFSRSADAPAYQQGQNQLYNELNLGRREEYDVLDKRRGRDPEMGGKPQRRKNPQEGLYNELQKDKMAEAYSEIGMKGERRRGKGHDGLYQGLSTATKDTYDALHMQALPPR

SEQ ID NO: 28263 - protein, 206 aa, synthetic construct
VLDMRSMDFKSNSAVAWSNKSDFACANAFNNSIIPEDTFFPSPESSCDVKLVEKSFETDTNLNFQNLSVIGFRILLLKVAGFNLLMTLRLWSSRVKFSRSADAPAYQQGQNQLYNELNLGRREEYDVLDKRRGRDPEMGGKPQRRKNPQEGLYNELQKDKMAEAYSEIGMKGERRRGKGHDGLYQGLSTATKDTYDALHMQALPPR

SEQ ID NO: 28264 - protein, 205 aa, synthetic construct
LDMRSMDFKSNSAVAWSNKSDFACANAFNNSIIPEDTFFPSPESSCDVKLVEKSFETDTNLNFQNLSVIGFRILLLKVAGFNLLMTLRLWSSRVKFSRSADAPAYQQGQNQLYNELNLGRREEYDVLDKRRGRDPEMGGKPQRRKNPQEGLYNELQKDKMAEAYSEIGMKGERRRGKGHDGLYQGLSTATKDTYDALHMQALPPR

SEQ ID NO: 28265 - protein, 204 aa, synthetic construct
DMRSMDFKSNSAVAWSNKSDFACANAFNNSIIPEDTFFPSPESSCDVKLVEKSFETDTNLNFQNLSVIGFRILLLKVAGFNLLMTLRLWSSRVKFSRSADAPAYQQGQNQLYNELNLGRREEYDVLDKRRGRDPEMGGKPQRRKNPQEGLYNELQKDKMAEAYSEIGMKGERRRGKGHDGLYQGLSTATKDTYDALHMQALPPR

SEQ ID NO: 28266 - protein, 203 aa, synthetic construct
MRSMDFKSNSAVAWSNKSDFACANAFNNSIIPEDTFFPSPESSCDVKLVEKSFETDTNLNFQNLSVIGFRILLLKVAGFNLLMTLRLWSSRVKFSRSADAPAYQQGQNQLYNELNLGRREEYDVLDKRRGRDPEMGGKPQRRKNPQEGLYNELQKDKMAEAYSEIGMKGERRRGKGHDGLYQGLSTATKDTYDALHMQALPPR

SEQ ID NO: 28267 - protein, 202 aa, synthetic construct
RSMDFKSNSAVAWSNKSDFACANAFNNSIIPEDTFFPSPESSCDVKLVEKSFETDTNLNFQNLSVIGFRILLLKVAGFNLLMTLRLWSSRVKFSRSADAPAYQQGQNQLYNELNLGRREEYDVLDKRRGRDPEMGGKPQRRKNPQEGLYNELQKDKMAEAYSEIGMKGERRRGKGHDGLYQGLSTATKDTYDALHMQALPPR

SEQ ID NO: 28268 - protein, 201 aa, synthetic construct
SMDFKSNSAVAWSNKSDFACANAFNNSIIPEDTFFPSPESSCDVKLVEKSFETDTNLNFQNLSVIGFRILLLKVAGFNLLMTLRLWSSRVKFSRSADAPAYQQGQNQLYNELNLGRREEYDVLDKRRGRDPEMGGKPQRRKNPQEGLYNELQKDKMAEAYSEIGMKGERRRGKGHDGLYQGLSTATKDTYDALHMQALPPR

SEQ ID NO: 28269 - protein, 200 aa, synthetic construct
MDFKSNSAVAWSNKSDFACANAFNNSIIPEDTFFPSPESSCDVKLVEKSFETDTNLNFQNLSVIGFRILLLKVAGFNLLMTLRLWSSRVKFSRSADAPAYQQGQNQLYNELNLGRREEYDVLDKRRGRDPEMGGKPQRRKNPQEGLYNELQKDKMAEAYSEIGMKGERRRGKGHDGLYQGLSTATKDTYDALHMQALPPR

SEQ ID NO: 28270 - protein, 199 aa, synthetic construct
DFKSNSAVAWSNKSDFACANAFNNSIIPEDTFFPSPESSCDVKLVEKSFETDTNLNFQNLSVIGFRILLLKVAGFNLLMTLRLWSSRVKFSRSADAPAYQQGQNQLYNELNLGRREEYDVLDKRRGRDPEMGGKPQRRKNPQEGLYNELQKDKMAEAYSEIGMKGERRRGKGHDGLYQGLSTATKDTYDALHMQALPPR

SEQ ID NO: 28271 - protein, 198 aa, synthetic construct
FKSNSAVAWSNKSDFACANAFNNSIIPEDTFFPSPESSCDVKLVEKSFETDTNLNFQNLSVIGFRILLLKVAGFNLLMTLRLWSSRVKFSRSADAPAYQQGQNQLYNELNLGRREEYDVLDKRRGRDPEMGGKPQRRKNPQEGLYNELQKDKMAEAYSEIGMKGERRRGKGHDGLYQGLSTATKDTYDALHMQALPPR

SEQ ID NO: 28272 - protein, 197 aa, synthetic construct
KSNSAVAWSNKSDFACANAFNNSIIPEDTFFPSPESSCDVKLVEKSFETDTNLNFQNLSVIGFRILLLKVAGFNLLMTLRLWSSRVKFSRSADAPAYQQGQNQLYNELNLGRREEYDVLDKRRGRDPEMGGKPQRRKNPQEGLYNELQKDKMAEAYSEIGMKGERRRGKGHDGLYQGLSTATKDTYDALHMQALPPR

SEQ ID NO: 28273 - protein, 196 aa, synthetic construct
SNSAVAWSNKSDFACANAFNNSIIPEDTFFPSPESSCDVKLVEKSFETDTNLNFQNLSVIGFRILLLKVAGFNLLMTLRLWSSRVKFSRSADAPAYQQGQNQLYNELNLGRREEYDVLDKRRGRDPEMGGKPQRRKNPQEGLYNELQKDKMAEAYSEIGMKGERRRGKGHDGLYQGLSTATKDTYDALHMQALPPR

SEQ ID NO: 28274 - protein, 195 aa, synthetic construct
NSAVAWSNKSDFACANAFNNSIIPEDTFFPSPESSCDVKLVEKSFETDTNLNFQNLSVIGFRILLLKVAGFNLLMTLRLWSSRVKFSRSADAPAYQQGQNQLYNELNLGRREEYDVLDKRRGRDPEMGGKPQRRKNPQEGLYNELQKDKMAEAYSEIGMKGERRRGKGHDGLYQGLSTATKDTYDALHMQALPPR

SEQ ID NO: 28275 - protein, 194 aa, synthetic construct
SAVAWSNKSDFACANAFNNSIIPEDTFFPSPESSCDVKLVEKSFETDTNLNFQNLSVIGFRILLLKVAGFNLLMTLRLWSSRVKFSRSADAPAYQQGQNQLYNELNLGRREEYDVLDKRRGRDPEMGGKPQRRKNPQEGLYNELQKDKMAEAYSEIGMKGERRRGKGHDGLYQGLSTATKDTYDALHMQALPPR

SEQ ID NO: 28276 - protein, 193 aa, synthetic construct
AVAWSNKSDFACANAFNNSIIPEDTFFPSPESSCDVKLVEKSFETDTNLNFQNLSVIGFRILLLKVAGFNLLMTLRLWSSRVKFSRSADAPAYQQGQNQLYNELNLGRREEYDVLDKRRGRDPEMGGKPQRRKNPQEGLYNELQKDKMAEAYSEIGMKGERRRGKGHDGLYQGLSTATKDTYDALHMQALPPR

SEQ ID NO: 28277 - protein, 192 aa, synthetic construct
VAWSNKSDFACANAFNNSIIPEDTFFPSPESSCDVKLVEKSFETDTNLNFQNLSVIGFRILLLKVAGFNLLMTLRLWSSRVKFSRSADAPAYQQGQNQLYNELNLGRREEYDVLDKRRGRDPEMGGKPQRRKNPQEGLYNELQKDKMAEAYSEIGMKGERRRGKGHDGLYQGLSTATKDTYDALHMQALPPR

SEQ ID NO: 28278 - protein, 191 aa, synthetic construct
AWSNKSDFACANAFNNSIIPEDTFFPSPESSCDVKLVEKSFETDTNLNFQNLSVIGFRILLLKVAGFNLLMTLRLWSSRVKFSRSADAPAYQQGQNQLYNELNLGRREEYDVLDKRRGRDPEMGGKPQRRKNPQEGLYNELQKDKMAEAYSEIGMKGERRRGKGHDGLYQGLSTATKDTYDALHMQALPPR

SEQ ID NO: 28279 - protein, 190 aa, synthetic construct
WSNKSDFACANAFNNSIIPEDTFFPSPESSCDVKLVEKSFETDTNLNFQNLSVIGFRILLLKVAGFNLLMTLRLWSSRVKFSRSADAPAYQQGQNQLYNELNLGRREEYDVLDKRRGRDPEMGGKPQRRKNPQEGLYNELQKDKMAEAYSEIGMKGERRRGKGHDGLYQGLSTATKDTYDALHMQALPPR

SEQ ID NO: 28280 - protein, 189 aa, synthetic construct
SNKSDFACANAFNNSIIPEDTFFPSPESSCDVKLVEKSFETDTNLNFQNLSVIGFRILLLKVAGFNLLMTLRLWSSRVKFSRSADAPAYQQGQNQLYNELNLGRREEYDVLDKRRGRDPEMGGKPQRRKNPQEGLYNELQKDKMAEAYSEIGMKGERRRGKGHDGLYQGLSTATKDTYDALHMQALPPR

SEQ ID NO: 28281 - protein, 188 aa, synthetic construct
NKSDFACANAFNNSIIPEDTFFPSPESSCDVKLVEKSFETDTNLNFQNLSVIGFRILLLKVAGFNLLMTLRLWSSRVKFSRSADAPAYQQGQNQLYNELNLGRREEYDVLDKRRGRDPEMGGKPQRRKNPQEGLYNELQKDKMAEAYSEIGMKGERRRGKGHDGLYQGLSTATKDTYDALHMQALPPR

SEQ ID NO: 28282 - protein, 187 aa, synthetic construct
KSDFACANAFNNSIIPEDTFFPSPESSCDVKLVEKSFETDTNLNFQNLSVIGFRILLLKVAGFNLLMTLRLWSSRVKFSRSADAPAYQQGQNQLYNELNLGRREEYDVLDKRRGRDPEMGGKPQRRKNPQEGLYNELQKDKMAEAYSEIGMKGERRRGKGHDGLYQGLSTATKDTYDALHMQALPPR

SEQ ID NO: 28283 - protein, 186 aa, synthetic construct
SDFACANAFNNSIIPEDTFFPSPESSCDVKLVEKSFETDTNLNFQNLSVIGFRILLLKVAGFNLLMTLRLWSSRVKFSRSADAPAYQQGQNQLYNELNLGRREEYDVLDKRRGRDPEMGGKPQRRKNPQEGLYNELQKDKMAEAYSEIGMKGERRRGKGHDGLYQGLSTATKDTYDALHMQALPPR

SEQ ID NO: 28284 - protein, 185 aa, synthetic construct
DFACANAFNNSIIPEDTFFPSPESSCDVKLVEKSFETDTNLNFQNLSVIGFRILLLKVAGFNLLMTLRLWSSRVKFSRSADAPAYQQGQNQLYNELNLGRREEYDVLDKRRGRDPEMGGKPQRRKNPQEGLYNELQKDKMAEAYSEIGMKGERRRGKGHDGLYQGLSTATKDTYDALHMQALPPR

SEQ ID NO: 28285 - protein, 184 aa, synthetic construct
FACANAFNNSIIPEDTFFPSPESSCDVKLVEKSFETDTNLNFQNLSVIGFRILLLKVAGFNLLMTLRLWSSRVKFSRSADAPAYQQGQNQLYNELNLGRREEYDVLDKRRGRDPEMGGKPQRRKNPQEGLYNELQKDKMAEAYSEIGMKGERRRGKGHDGLYQGLSTATKDTYDALHMQALPPR

SEQ ID NO: 28286 - protein, 183 aa, synthetic construct
ACANAFNNSIIPEDTFFPSPESSCDVKLVEKSFETDTNLNFQNLSVIGFRILLLKVAGFNLLMTLRLWSSRVKFSRSADAPAYQQGQNQLYNELNLGRREEYDVLDKRRGRDPEMGGKPQRRKNPQEGLYNELQKDKMAEAYSEIGMKGERRRGKGHDGLYQGLSTATKDTYDALHMQALPPR

SEQ ID NO: 28287 - protein, 182 aa, synthetic construct
CANAFNNSIIPEDTFFPSPESSCDVKLVEKSFETDTNLNFQNLSVIGFRILLLKVAGFNLLMTLRLWSSRVKFSRSADAPAYQQGQNQLYNELNLGRREEYDVLDKRRGRDPEMGGKPQRRKNPQEGLYNELQKDKMAEAYSEIGMKGERRRGKGHDGLYQGLSTATKDTYDALHMQALPPR

SEQ ID NO: 28288 - protein, 181 aa, synthetic construct
ANAFNNSIIPEDTFFPSPESSCDVKLVEKSFETDTNLNFQNLSVIGFRILLLKVAGFNLLMTLRLWSSRVKFSRSADAPAYQQGQNQLYNELNLGRREEYDVLDKRRGRDPEMGGKPQRRKNPQEGLYNELQKDKMAEAYSEIGMKGERRRGKGHDGLYQGLSTATKDTYDALHMQALPPR

SEQ ID NO: 28289 - protein, 180 aa, synthetic construct
NAFNNSIIPEDTFFPSPESSCDVKLVEKSFETDTNLNFQNLSVIGFRILLLKVAGFNLLMTLRLWSSRVKFSRSADAPAYQQGQNQLYNELNLGRREEYDVLDKRRGRDPEMGGKPQRRKNPQEGLYNELQKDKMAEAYSEIGMKGERRRGKGHDGLYQGLSTATKDTYDALHMQALPPR

SEQ ID NO: 28290 - protein, 179 aa, synthetic construct
AFNNSIIPEDTFFPSPESSCDVKLVEKSFETDTNLNFQNLSVIGFRILLLKVAGFNLLMTLRLWSSRVKFSRSADAPAYQQGQNQLYNELNLGRREEYDVLDKRRGRDPEMGGKPQRRKNPQEGLYNELQKDKMAEAYSEIGMKGERRRGKGHDGLYQGLSTATKDTYDALHMQALPPR

SEQ ID NO: 28291 - protein, 178 aa, synthetic construct
FNNSIIPEDTFFPSPESSCDVKLVEKSFETDTNLNFQNLSVIGFRILLLKVAGFNLLMTLRLWSSRVKFSRSADAPAYQQGQNQLYNELNLGRREEYDVLDKRRGRDPEMGGKPQRRKNPQEGLYNELQKDKMAEAYSEIGMKGERRRGKGHDGLYQGLSTATKDTYDALHMQALPPR

SEQ ID NO: 28292 - protein, 177 aa, synthetic construct
NNSIIPEDTFFPSPESSCDVKLVEKSFETDTNLNFQNLSVIGFRILLLKVAGFNLLMTLRLWSSRVKFSRSADAPAYQQGQNQLYNELNLGRREEYDVLDKRRGRDPEMGGKPQRRKNPQEGLYNELQKDKMAEAYSEIGMKGERRRGKGHDGLYQGLSTATKDTYDALHMQALPPR

SEQ ID NO: 28293 - protein, 176 aa, synthetic construct
NSIIPEDTFFPSPESSCDVKLVEKSFETDTNLNFQNLSVIGFRILLLKVAGFNLLMTLRLWSSRVKFSRSADAPAYQQGQNQLYNELNLGRREEYDVLDKRRGRDPEMGGKPQRRKNPQEGLYNELQKDKMAEAYSEIGMKGERRRGKGHDGLYQGLSTATKDTYDALHMQALPPR

SEQ ID NO: 28294 - protein, 175 aa, synthetic construct
SIIPEDTFFPSPESSCDVKLVEKSFETDTNLNFQNLSVIGFRILLLKVAGFNLLMTLRLWSSRVKFSRSADAPAYQQGQNQLYNELNLGRREEYDVLDKRRGRDPEMGGKPQRRKNPQEGLYNELQKDKMAEAYSEIGMKGERRRGKGHDGLYQGLSTATKDTYDALHMQALPPR

SEQ ID NO: 28295 - protein, 174 aa, synthetic construct
IIPEDTFFPSPESSCDVKLVEKSFETDTNLNFQNLSVIGFRILLLKVAGFNLLMTLRLWSSRVKFSRSADAPAYQQGQNQLYNELNLGRREEYDVLDKRRGRDPEMGGKPQRRKNPQEGLYNELQKDKMAEAYSEIGMKGERRRGKGHDGLYQGLSTATKDTYDALHMQALPPR

SEQ ID NO: 28296 - protein, 173 aa, synthetic construct; identical to SEQ ID NO: 27982

SEQ ID NO: 28297 - protein, 172 aa, synthetic construct
PEDTFFPSPESSCDVKLVEKSFETDTNLNFQNLSVIGFRILLLKVAGFNLLMTLRLWSSRVKFSRSADAPAYQQGQNQLYNELNLGRREEYDVLDKRRGRDPEMGGKPQRRKNPQEGLYNELQKDKMAEAYSEIGMKGERRRGKGHDGLYQGLSTATKDTYDALHMQALPPR

SEQ ID NO: 28298 - protein, 171 aa, synthetic construct
EDTFFPSPESSCDVKLVEKSFETDTNLNFQNLSVIGFRILLLKVAGFNLLMTLRLWSSRVKFSRSADAPAYQQGQNQLYNELNLGRREEYDVLDKRRGRDPEMGGKPQRRKNPQEGLYNELQKDKMAEAYSEIGMKGERRRGKGHDGLYQGLSTATKDTYDALHMQALPPR

SEQ ID NO: 28299 - protein, 170 aa, synthetic construct
DTFFPSPESSCDVKLVEKSFETDTNLNFQNLSVIGFRILLLKVAGFNLLMTLRLWSSRVKFSRSADAPAYQQGQNQLYNELNLGRREEYDVLDKRRGRDPEMGGKPQRRKNPQEGLYNELQKDKMAEAYSEIGMKGERRRGKGHDGLYQGLSTATKDTYDALHMQALPPR

SEQ ID NO: 28300 - protein, 169 aa, synthetic construct
TFFPSPESSCDVKLVEKSFETDTNLNFQNLSVIGFRILLLKVAGFNLLMTLRLWSSRVKFSRSADAPAYQQGQNQLYNELNLGRREEYDVLDKRRGRDPEMGGKPQRRKNPQEGLYNELQKDKMAEAYSEIGMKGERRRGKGHDGLYQGLSTATKDTYDALHMQALPPR

SEQ ID NO: 28301 - protein, 168 aa, synthetic construct
FFPSPESSCDVKLVEKSFETDTNLNFQNLSVIGFRILLLKVAGFNLLMTLRLWSSRVKFSRSADAPAYQQGQNQLYNELNLGRREEYDVLDKRRGRDPEMGGKPQRRKNPQEGLYNELQKDKMAEAYSEIGMKGERRRGKGHDGLYQGLSTATKDTYDALHMQALPPR

SEQ ID NO: 28302 - protein, 167 aa, synthetic construct
FPSPESSCDVKLVEKSFETDTNLNFQNLSVIGFRILLLKVAGFNLLMTLRLWSSRVKFSRSADAPAYQQGQNQLYNELNLGRREEYDVLDKRRGRDPEMGGKPQRRKNPQEGLYNELQKDKMAEAYSEIGMKGERRRGKGHDGLYQGLSTATKDTYDALHMQALPPR

SEQ ID NO: 28303 - protein, 166 aa, synthetic construct
PSPESSCDVKLVEKSFETDTNLNFQNLSVIGFRILLLKVAGFNLLMTLRLWSSRVKFSRSADAPAYQQGQNQLYNELNLGRREEYDVLDKRRGRDPEMGGKPQRRKNPQEGLYNELQKDKMAEAYSEIGMKGERRRGKGHDGLYQGLSTATKDTYDALHMQALPPR

SEQ ID NO: 28304 - protein, 165 aa, synthetic construct
SPESSCDVKLVEKSFETDTNLNFQNLSVIGFRILLLKVAGFNLLMTLRLWSSRVKFSRSADAPAYQQGQNQLYNELNLGRREEYDVLDKRRGRDPEMGGKPQRRKNPQEGLYNELQKDKMAEAYSEIGMKGERRRGKGHDGLYQGLSTATKDTYDALHMQALPPR

SEQ ID NO: 28305 - protein, 164 aa, synthetic construct
PESSCDVKLVEKSFETDTNLNFQNLSVIGFRILLLKVAGFNLLMTLRLWSSRVKFSRSADAPAYQQGQNQLYNELNLGRREEYDVLDKRRGRDPEMGGKPQRRKNPQEGLYNELQKDKMAEAYSEIGMKGERRRGKGHDGLYQGLSTATKDTYDALHMQALPPR

SEQ ID NO: 28306 - protein, 163 aa, synthetic construct; identical to SEQ ID NO: 27983

SEQ ID NO: 28307 - protein, 162 aa, synthetic construct
SSCDVKLVEKSFETDTNLNFQNLSVIGFRILLLKVAGFNLLMTLRLWSSRVKFSRSADAPAYQQGQNQLYNELNLGRREEYDVLDKRRGRDPEMGGKPQRRKNPQEGLYNELQKDKMAEAYSEIGMKGERRRGKGHDGLYQGLSTATKDTYDALHMQALPPR

SEQ ID NO: 28308 - protein, 161 aa, synthetic construct
SCDVKLVEKSFETDTNLNFQNLSVIGFRILLLKVAGFNLLMTLRLWSSRVKFSRSADAPAYQQGQNQLYNELNLGRREEYDVLDKRRGRDPEMGGKPQRRKNPQEGLYNELQKDKMAEAYSEIGMKGERRRGKGHDGLYQGLSTATKDTYDALHMQALPPR

SEQ ID NO: 28309 - protein, 160 aa, synthetic construct
CDVKLVEKSFETDTNLNFQNLSVIGFRILLLKVAGFNLLMTLRLWSSRVKFSRSADAPAYQQGQNQLYNELNLGRREEYDVLDKRRGRDPEMGGKPQRRKNPQEGLYNELQKDKMAEAYSEIGMKGERRRGKGHDGLYQGLSTATKDTYDALHMQALPPR

SEQ ID NO: 28310 - protein, 159 aa, synthetic construct
DVKLVEKSFETDTNLNFQNLSVIGFRILLLKVAGFNLLMTLRLWSSRVKFSRSADAPAYQQGQNQLYNELNLGRREEYDVLDKRRGRDPEMGGKPQRRKNPQEGLYNELQKDKMAEAYSEIGMKGERRRGKGHDGLYQGLSTATKDTYDALHMQALPPR

SEQ ID NO: 28311 - protein, 158 aa, synthetic construct
VKLVEKSFETDTNLNFQNLSVIGFRILLLKVAGFNLLMTLRLWSSRVKFSRSADAPAYQQGQNQLYNELNLGRREEYDVLDKRRGRDPEMGGKPQRRKNPQEGLYNELQKDKMAEAYSEIGMKGERRRGKGHDGLYQGLSTATKDTYDALHMQALPPR

SEQ ID NO: 28312 - protein, 157 aa, synthetic construct
KLVEKSFETDTNLNFQNLSVIGFRILLLKVAGFNLLMTLRLWSSRVKFSRSADAPAYQQGQNQLYNELNLGRREEYDVLDKRRGRDPEMGGKPQRRKNPQEGLYNELQKDKMAEAYSEIGMKGERRRGKGHDGLYQGLSTATKDTYDALHMQALPPR

SEQ ID NO: 28313 - protein, 156 aa, synthetic construct
LVEKSFETDTNLNFQNLSVIGFRILLLKVAGFNLLMTLRLWSSRVKFSRSADAPAYQQGQNQLYNELNLGRREEYDVLDKRRGRDPEMGGKPQRRKNPQEGLYNELQKDKMAEAYSEIGMKGERRRGKGHDGLYQGLSTATKDTYDALHMQALPPR

SEQ ID NO: 28314 - protein, 155 aa, synthetic construct
VEKSFETDTNLNFQNLSVIGFRILLLKVAGFNLLMTLRLWSSRVKFSRSADAPAYQQGQNQLYNELNLGRREEYDVLDKRRGRDPEMGGKPQRRKNPQEGLYNELQKDKMAEAYSEIGMKGERRRGKGHDGLYQGLSTATKDTYDALHMQALPPR

SEQ ID NO: 28315 - protein, 154 aa, synthetic construct
EKSFETDTNLNFQNLSVIGFRILLLKVAGFNLLMTLRLWSSRVKFSRSADAPAYQQGQNQLYNELNLGRREEYDVLDKRRGRDPEMGGKPQRRKNPQEGLYNELQKDKMAEAYSEIGMKGERRRGKGHDGLYQGLSTATKDTYDALHMQALPPR

SEQ ID NO: 28316 - protein, 153 aa, synthetic construct
KSFETDTNLNFQNLSVIGFRILLLKVAGFNLLMTLRLWSSRVKFSRSADAPAYQQGQNQLYNELNLGRREEYDVLDKRRGRDPEMGGKPQRRKNPQEGLYNELQKDKMAEAYSEIGMKGERRRGKGHDGLYQGLSTATKDTYDALHMQALPPR

SEQ ID NO: 28317 - protein, 152 aa, synthetic construct
SFETDTNLNFQNLSVIGFRILLLKVAGFNLLMTLRLWSSRVKFSRSADAPAYQQGQNQLYNELNLGRREEYDVLDKRRGRDPEMGGKPQRRKNPQEGLYNELQKDKMAEAYSEIGMKGERRRGKGHDGLYQGLSTATKDTYDALHMQALPPR

SEQ ID NO: 28318 - protein, 292 aa, synthetic construct; identical to SEQ ID NO: 27953

SEQ ID NO: 28319 - protein, 291 aa, synthetic construct
DLKNVFPPEVAVFEPSEAEISHTQKATLVCLATGFYPDHVELSWWVNGKEVHSGVCTDPQPLKEQPALNDSRYCLSSRLRVSATFWQNPRNHFRCQVQFYGLSENDEWTQDRAKPVTQIVSAEAWGRADCGFTSESYQQGVLSATILYEILLGKATLYAVLVSALVLMAMVKRKDSRGRVKFSRSADAPAYQQGQNQLYNELNLGRREEYDVLDKRRGRDPEMGGKPQRRKNPQEGLYNELQKDKMAEAYSEIGMKGERRRGKGHDGLYQGLSTATKDTYDALHMQALPPR

SEQ ID NO: 28320 - protein, 290 aa, synthetic construct
LKNVFPPEVAVFEPSEAEISHTQKATLVCLATGFYPDHVELSWWVNGKEVHSGVCTDPQPLKEQPALNDSRYCLSSRLRVSATFWQNPRNHFRCQVQFYGLSENDEWTQDRAKPVTQIVSAEAWGRADCGFTSESYQQGVLSATILYEILLGKATLYAVLVSALVLMAMVKRKDSRGRVKFSRSADAPAYQQGQNQLYNELNLGRREEYDVLDKRRGRDPEMGGKPQRRKNPQEGLYNELQKDKMAEAYSEIGMKGERRRGKGHDGLYQGLSTATKDTYDALHMQALPPR

SEQ ID NO: 28321 - protein, 289 aa, synthetic construct
KNVFPPEVAVFEPSEAEISHTQKATLVCLATGFYPDHVELSWWVNGKEVHSGVCTDPQPLKEQPALNDSRYCLSSRLRVSATFWQNPRNHFRCQVQFYGLSENDEWTQDRAKPVTQIVSAEAWGRADCGFTSESYQQGVLSATILYEILLGKATLYAVLVSALVLMAMVKRKDSRGRVKFSRSADAPAYQQGQNQLYNELNLGRREEYDVLDKRRGRDPEMGGKPQRRKNPQEGLYNELQKDKMAEAYSEIGMKGERRRGKGHDGLYQGLSTATKDTYDALHMQALPPR

SEQ ID NO: 28322 - protein, 288 aa, synthetic construct
NVFPPEVAVFEPSEAEISHTQKATLVCLATGFYPDHVELSWWVNGKEVHSGVCTDPQPLKEQPALNDSRYCLSSRLRVSATFWQNPRNHFRCQVQFYGLSENDEWTQDRAKPVTQIVSAEAWGRADCGFTSESYQQGVLSATILYEILLGKATLYAVLVSALVLMAMVKRKDSRGRVKFSRSADAPAYQQGQNQLYNELNLGRREEYDVLDKRRGRDPEMGGKPQRRKNPQEGLYNELQKDKMAEAYSEIGMKGERRRGKGHDGLYQGLSTATKDTYDALHMQALPPR

SEQ ID NO: 28323 - protein, 287 aa, synthetic construct
VFPPEVAVFEPSEAEISHTQKATLVCLATGFYPDHVELSWWVNGKEVHSGVCTDPQPLKEQPALNDSRYCLSSRLRVSATFWQNPRNHFRCQVQFYGLSENDEWTQDRAKPVTQIVSAEAWGRADCGFTSESYQQGVLSATILYEILLGKATLYAVLVSALVLMAMVKRKDSRGRVKFSRSADAPAYQQGQNQLYNELNLGRREEYDVLDKRRGRDPEMGGKPQRRKNPQEGLYNELQKDKMAEAYSEIGMKGERRRGKGHDGLYQGLSTATKDTYDALHMQALPPR

SEQ ID NO: 28324 - protein, 286 aa, synthetic construct
FPPEVAVFEPSEAEISHTQKATLVCLATGFYPDHVELSWWVNGKEVHSGVCTDPQPLKEQPALNDSRYCLSSRLRVSATFWQNPRNHFRCQVQFYGLSENDEWTQDRAKPVTQIVSAEAWGRADCGFTSESYQQGVLSATILYEILLGKATLYAVLVSALVLMAMVKRKDSRGRVKFSRSADAPAYQQGQNQLYNELNLGRREEYDVLDKRRGRDPEMGGKPQRRKNPQEGLYNELQKDKMAEAYSEIGMKGERRRGKGHDGLYQGLSTATKDTYDALHMQALPPR

SEQ ID NO: 28325 - protein, 285 aa, synthetic construct
PPEVAVFEPSEAEISHTQKATLVCLATGFYPDHVELSWWVNGKEVHSGVCTDPQPLKEQPALNDSRYCLSSRLRVSATFWQNPRNHFRCQVQFYGLSENDEWTQDRAKPVTQIVSAEAWGRADCGFTSESYQQGVLSATILYEILLGKATLYAVLVSALVLMAMVKRKDSRGRVKFSRSADAPAYQQGQNQLYNELNLGRREEYDVLDKRRGRDPEMGGKPQRRKNPQEGLYNELQKDKMAEAYSEIGMKGERRRGKGHDGLYQGLSTATKDTYDALHMQALPPR

SEQ ID NO: 28326 - protein, 284 aa, synthetic construct
PEVAVFEPSEAEISHTQKATLVCLATGFYPDHVELSWWVNGKEVHSGVCTDPQPLKEQPALNDSRYCLSSRLRVSATFWQNPRNHFRCQVQFYGLSENDEWTQDRAKPVTQIVSAEAWGRADCGFTSESYQQGVLSATILYEILLGKATLYAVLVSALVLMAMVKRKDSRGRVKFSRSADAPAYQQGQNQLYNELNLGRREEYDVLDKRRGRDPEMGGKPQRRKNPQEGLYNELQKDKMAEAYSEIGMKGERRRGKGHDGLYQGLSTATKDTYDALHMQALPPR

SEQ ID NO: 28327 - protein, 283 aa, synthetic construct
EVAVFEPSEAEISHTQKATLVCLATGFYPDHVELSWWVNGKEVHSGVCTDPQPLKEQPALNDSRYCLSSRLRVSATFWQNPRNHFRCQVQFYGLSENDEWTQDRAKPVTQIVSAEAWGRADCGFTSESYQQGVLSATILYEILLGKATLYAVLVSALVLMAMVKRKDSRGRVKFSRSADAPAYQQGQNQLYNELNLGRREEYDVLDKRRGRDPEMGGKPQRRKNPQEGLYNELQKDKMAEAYSEIGMKGERRRGKGHDGLYQGLSTATKDTYDALHMQALPPR

SEQ ID NO: 28328 - protein, 282 aa, synthetic construct
VAVFEPSEAEISHTQKATLVCLATGFYPDHVELSWWVNGKEVHSGVCTDPQPLKEQPALNDSRYCLSSRLRVSATFWQNPRNHFRCQVQFYGLSENDEWTQDRAKPVTQIVSAEAWGRADCGFTSESYQQGVLSATILYEILLGKATLYAVLVSALVLMAMVKRKDSRGRVKFSRSADAPAYQQGQNQLYNELNLGRREEYDVLDKRRGRDPEMGGKPQRRKNPQEGLYNELQKDKMAEAYSEIGMKGERRRGKGHDGLYQGLSTATKDTYDALHMQALPPR

SEQ ID NO: 28329 - protein, 281 aa, synthetic construct
AVFEPSEAEISHTQKATLVCLATGFYPDHVELSWWVNGKEVHSGVCTDPQPLKEQPALNDSRYCLSSRLRVSATFWQNPRNHFRCQVQFYGLSENDEWTQDRAKPVTQIVSAEAWGRADCGFTSESYQQGVLSATILYEILLGKATLYAVLVSALVLMAMVKRKDSRGRVKFSRSADAPAYQQGQNQLYNELNLGRREEYDVLDKRRGRDPEMGGKPQRRKNPQEGLYNELQKDKMAEAYSEIGMKGERRRGKGHDGLYQGLSTATKDTYDALHMQALPPR

SEQ ID NO: 28330 - protein, 280 aa, synthetic construct
VFEPSEAEISHTQKATLVCLATGFYPDHVELSWWVNGKEVHSGVCTDPQPLKEQPALNDSRYCLSSRLRVSATFWQNPRNHFRCQVQFYGLSENDEWTQDRAKPVTQIVSAEAWGRADCGFTSESYQQGVLSATILYEILLGKATLYAVLVSALVLMAMVKRKDSRGRVKFSRSADAPAYQQGQNQLYNELNLGRREEYDVLDKRRGRDPEMGGKPQRRKNPQEGLYNELQKDKMAEAYSEIGMKGERRRGKGHDGLYQGLSTATKDTYDALHMQALPPR

SEQ ID NO: 28331 - protein, 279 aa, synthetic construct
FEPSEAEISHTQKATLVCLATGFYPDHVELSWWVNGKEVHSGVCTDPQPLKEQPALNDSRYCLSSRLRVSATFWQNPRNHFRCQVQFYGLSENDEWTQDRAKPVTQIVSAEAWGRADCGFTSESYQQGVLSATILYEILLGKATLYAVLVSALVLMAMVKRKDSRGRVKFSRSADAPAYQQGQNQLYNELNLGRREEYDVLDKRRGRDPEMGGKPQRRKNPQEGLYNELQKDKMAEAYSEIGMKGERRRGKGHDGLYQGLSTATKDTYDALHMQALPPR

SEQ ID NO: 28332 - protein, 278 aa, synthetic construct
EPSEAEISHTQKATLVCLATGFYPDHVELSWWVNGKEVHSGVCTDPQPLKEQPALNDSRYCLSSRLRVSATFWQNPRNHFRCQVQFYGLSENDEWTQDRAKPVTQIVSAEAWGRADCGFTSESYQQGVLSATILYEILLGKATLYAVLVSALVLMAMVKRKDSRGRVKFSRSADAPAYQQGQNQLYNELNLGRREEYDVLDKRRGRDPEMGGKPQRRKNPQEGLYNELQKDKMAEAYSEIGMKGERRRGKGHDGLYQGLSTATKDTYDALHMQALPPR

SEQ ID NO: 28333 - protein, 277 aa, synthetic construct
PSEAEISHTQKATLVCLATGFYPDHVELSWWVNGKEVHSGVCTDPQPLKEQPALNDSRYCLSSRLRVSATFWQNPRNHFRCQVQFYGLSENDEWTQDRAKPVTQIVSAEAWGRADCGFTSESYQQGVLSATILYEILLGKATLYAVLVSALVLMAMVKRKDSRGRVKFSRSADAPAYQQGQNQLYNELNLGRREEYDVLDKRRGRDPEMGGKPQRRKNPQEGLYNELQKDKMAEAYSEIGMKGERRRGKGHDGLYQGLSTATKDTYDALHMQALPPR

SEQ ID NO: 28334 - protein, 276 aa, synthetic construct
SEAEISHTQKATLVCLATGFYPDHVELSWWVNGKEVHSGVCTDPQPLKEQPALNDSRYCLSSRLRVSATFWQNPRNHFRCQVQFYGLSENDEWTQDRAKPVTQIVSAEAWGRADCGFTSESYQQGVLSATILYEILLGKATLYAVLVSALVLMAMVKRKDSRGRVKFSRSADAPAYQQGQNQLYNELNLGRREEYDVLDKRRGRDPEMGGKPQRRKNPQEGLYNELQKDKMAEAYSEIGMKGERRRGKGHDGLYQGLSTATKDTYDALHMQALPPR

SEQ ID NO: 28335 - protein, 275 aa, synthetic construct
EAEISHTQKATLVCLATGFYPDHVELSWWVNGKEVHSGVCTDPQPLKEQPALNDSRYCLSSRLRVSATFWQNPRNHFRCQVQFYGLSENDEWTQDRAKPVTQIVSAEAWGRADCGFTSESYQQGVLSATILYEILLGKATLYAVLVSALVLMAMVKRKDSRGRVKFSRSADAPAYQQGQNQLYNELNLGRREEYDVLDKRRGRDPEMGGKPQRRKNPQEGLYNELQKDKMAEAYSEIGMKGERRRGKGHDGLYQGLSTATKDTYDALHMQALPPR

SEQ ID NO: 28336 - protein, 274 aa, synthetic construct
AEISHTQKATLVCLATGFYPDHVELSWWVNGKEVHSGVCTDPQPLKEQPALNDSRYCLSSRLRVSATFWQNPRNHFRCQVQFYGLSENDEWTQDRAKPVTQIVSAEAWGRADCGFTSESYQQGVLSATILYEILLGKATLYAVLVSALVLMAMVKRKDSRGRVKFSRSADAPAYQQGQNQLYNELNLGRREEYDVLDKRRGRDPEMGGKPQRRKNPQEGLYNELQKDKMAEAYSEIGMKGERRRGKGHDGLYQGLSTATKDTYDALHMQALPPR

SEQ ID NO: 28337 - protein, 273 aa, synthetic construct
EISHTQKATLVCLATGFYPDHVELSWWVNGKEVHSGVCTDPQPLKEQPALNDSRYCLSSRLRVSATFWQNPRNHFRCQVQFYGLSENDEWTQDRAKPVTQIVSAEAWGRADCGFTSESYQQGVLSATILYEILLGKATLYAVLVSALVLMAMVKRKDSRGRVKFSRSADAPAYQQGQNQLYNELNLGRREEYDVLDKRRGRDPEMGGKPQRRKNPQEGLYNELQKDKMAEAYSEIGMKGERRRGKGHDGLYQGLSTATKDTYDALHMQALPPR

SEQ ID NO: 28338 - protein, 272 aa, synthetic construct
ISHTQKATLVCLATGFYPDHVELSWWVNGKEVHSGVCTDPQPLKEQPALNDSRYCLSSRLRVSATFWQNPRNHFRCQVQFYGLSENDEWTQDRAKPVTQIVSAEAWGRADCGFTSESYQQGVLSATILYEILLGKATLYAVLVSALVLMAMVKRKDSRGRVKFSRSADAPAYQQGQNQLYNELNLGRREEYDVLDKRRGRDPEMGGKPQRRKNPQEGLYNELQKDKMAEAYSEIGMKGERRRGKGHDGLYQGLSTATKDTYDALHMQALPPR

SEQ ID NO: 28339 - protein, 271 aa, synthetic construct
SHTQKATLVCLATGFYPDHVELSWWVNGKEVHSGVCTDPQPLKEQPALNDSRYCLSSRLRVSATFWQNPRNHFRCQVQFYGLSENDEWTQDRAKPVTQIVSAEAWGRADCGFTSESYQQGVLSATILYEILLGKATLYAVLVSALVLMAMVKRKDSRGRVKFSRSADAPAYQQGQNQLYNELNLGRREEYDVLDKRRGRDPEMGGKPQRRKNPQEGLYNELQKDKMAEAYSEIGMKGERRRGKGHDGLYQGLSTATKDTYDALHMQALPPR

SEQ ID NO: 28340 - protein, 270 aa, synthetic construct
HTQKATLVCLATGFYPDHVELSWWVNGKEVHSGVCTDPQPLKEQPALNDSRYCLSSRLRVSATFWQNPRNHFRCQVQFYGLSENDEWTQDRAKPVTQIVSAEAWGRADCGFTSESYQQGVLSATILYEILLGKATLYAVLVSALVLMAMVKRKDSRGRVKFSRSADAPAYQQGQNQLYNELNLGRREEYDVLDKRRGRDPEMGGKPQRRKNPQEGLYNELQKDKMAEAYSEIGMKGERRRGKGHDGLYQGLSTATKDTYDALHMQALPPR

SEQ ID NO: 28341 - protein, 269 aa, synthetic construct
TQKATLVCLATGFYPDHVELSWWVNGKEVHSGVCTDPQPLKEQPALNDSRYCLSSRLRVSATFWQNPRNHFRCQVQFYGLSENDEWTQDRAKPVTQIVSAEAWGRADCGFTSESYQQGVLSATILYEILLGKATLYAVLVSALVLMAMVKRKDSRGRVKFSRSADAPAYQQGQNQLYNELNLGRREEYDVLDKRRGRDPEMGGKPQRRKNPQEGLYNELQKDKMAEAYSEIGMKGERRRGKGHDGLYQGLSTATKDTYDALHMQALPPR

SEQ ID NO: 28342 - protein, 268 aa, synthetic construct
QKATLVCLATGFYPDHVELSWWVNGKEVHSGVCTDPQPLKEQPALNDSRYCLSSRLRVSATFWQNPRNHFRCQVQFYGLSENDEWTQDRAKPVTQIVSAEAWGRADCGFTSESYQQGVLSATILYEILLGKATLYAVLVSALVLMAMVKRKDSRGRVKFSRSADAPAYQQGQNQLYNELNLGRREEYDVLDKRRGRDPEMGGKPQRRKNPQEGLYNELQKDKMAEAYSEIGMKGERRRGKGHDGLYQGLSTATKDTYDALHMQALPPR

SEQ ID NO: 28343 - protein, 267 aa, synthetic construct
KATLVCLATGFYPDHVELSWWVNGKEVHSGVCTDPQPLKEQPALNDSRYCLSSRLRVSATFWQNPRNHFRCQVQFYGLSENDEWTQDRAKPVTQIVSAEAWGRADCGFTSESYQQGVLSATILYEILLGKATLYAVLVSALVLMAMVKRKDSRGRVKFSRSADAPAYQQGQNQLYNELNLGRREEYDVLDKRRGRDPEMGGKPQRRKNPQEGLYNELQKDKMAEAYSEIGMKGERRRGKGHDGLYQGLSTATKDTYDALHMQALPPR

SEQ ID NO: 28344 - protein, 266 aa, synthetic construct
ATLVCLATGFYPDHVELSWWVNGKEVHSGVCTDPQPLKEQPALNDSRYCLSSRLRVSATFWQNPRNHFRCQVQFYGLSENDEWTQDRAKPVTQIVSAEAWGRADCGFTSESYQQGVLSATILYEILLGKATLYAVLVSALVLMAMVKRKDSRGRVKFSRSADAPAYQQGQNQLYNELNLGRREEYDVLDKRRGRDPEMGGKPQRRKNPQEGLYNELQKDKMAEAYSEIGMKGERRRGKGHDGLYQGLSTATKDTYDALHMQALPPR

SEQ ID NO: 28345 - protein, 265 aa, synthetic construct
TLVCLATGFYPDHVELSWWVNGKEVHSGVCTDPQPLKEQPALNDSRYCLSSRLRVSATFWQNPRNHFRCQVQFYGLSENDEWTQDRAKPVTQIVSAEAWGRADCGFTSESYQQGVLSATILYEILLGKATLYAVLVSALVLMAMVKRKDSRGRVKFSRSADAPAYQQGQNQLYNELNLGRREEYDVLDKRRGRDPEMGGKPQRRKNPQEGLYNELQKDKMAEAYSEIGMKGERRRGKGHDGLYQGLSTATKDTYDALHMQALPPR

SEQ ID NO: 28346 - protein, 264 aa, synthetic construct
LVCLATGFYPDHVELSWWVNGKEVHSGVCTDPQPLKEQPALNDSRYCLSSRLRVSATFWQNPRNHFRCQVQFYGLSENDEWTQDRAKPVTQIVSAEAWGRADCGFTSESYQQGVLSATILYEILLGKATLYAVLVSALVLMAMVKRKDSRGRVKFSRSADAPAYQQGQNQLYNELNLGRREEYDVLDKRRGRDPEMGGKPQRRKNPQEGLYNELQKDKMAEAYSEIGMKGERRRGKGHDGLYQGLSTATKDTYDALHMQALPPR

SEQ ID NO: 28347 - protein, 263 aa, synthetic construct
VCLATGFYPDHVELSWWVNGKEVHSGVCTDPQPLKEQPALNDSRYCLSSRLRVSATFWQNPRNHFRCQVQFYGLSENDEWTQDRAKPVTQIVSAEAWGRADCGFTSESYQQGVLSATILYEILLGKATLYAVLVSALVLMAMVKRKDSRGRVKFSRSADAPAYQQGQNQLYNELNLGRREEYDVLDKRRGRDPEMGGKPQRRKNPQEGLYNELQKDKMAEAYSEIGMKGERRRGKGHDGLYQGLSTATKDTYDALHMQALPPR

SEQ ID NO: 28348 - protein, 262 aa, synthetic construct
CLATGFYPDHVELSWWVNGKEVHSGVCTDPQPLKEQPALNDSRYCLSSRLRVSATFWQNPRNHFRCQVQFYGLSENDEWTQDRAKPVTQIVSAEAWGRADCGFTSESYQQGVLSATILYEILLGKATLYAVLVSALVLMAMVKRKDSRGRVKFSRSADAPAYQQGQNQLYNELNLGRREEYDVLDKRRGRDPEMGGKPQRRKNPQEGLYNELQKDKMAEAYSEIGMKGERRRGKGHDGLYQGLSTATKDTYDALHMQALPPR

SEQ ID NO: 28349 - protein, 261 aa, synthetic construct
LATGFYPDHVELSWWVNGKEVHSGVCTDPQPLKEQPALNDSRYCLSSRLRVSATFWQNPRNHFRCQVQFYGLSENDEWTQDRAKPVTQIVSAEAWGRADCGFTSESYQQGVLSATILYEILLGKATLYAVLVSALVLMAMVKRKDSRGRVKFSRSADAPAYQQGQNQLYNELNLGRREEYDVLDKRRGRDPEMGGKPQRRKNPQEGLYNELQKDKMAEAYSEIGMKGERRRGKGHDGLYQGLSTATKDTYDALHMQALPPR

SEQ ID NO: 28350 - protein, 260 aa, synthetic construct
ATGFYPDHVELSWWVNGKEVHSGVCTDPQPLKEQPALNDSRYCLSSRLRVSATFWQNPRNHFRCQVQFYGLSENDEWTQDRAKPVTQIVSAEAWGRADCGFTSESYQQGVLSATILYEILLGKATLYAVLVSALVLMAMVKRKDSRGRVKFSRSADAPAYQQGQNQLYNELNLGRREEYDVLDKRRGRDPEMGGKPQRRKNPQEGLYNELQKDKMAEAYSEIGMKGERRRGKGHDGLYQGLSTATKDTYDALHMQALPPR

SEQ ID NO: 28351 - protein, 259 aa, synthetic construct
TGFYPDHVELSWWVNGKEVHSGVCTDPQPLKEQPALNDSRYCLSSRLRVSATFWQNPRNHFRCQVQFYGLSENDEWTQDRAKPVTQIVSAEAWGRADCGFTSESYQQGVLSATILYEILLGKATLYAVLVSALVLMAMVKRKDSRGRVKFSRSADAPAYQQGQNQLYNELNLGRREEYDVLDKRRGRDPEMGGKPQRRKNPQEGLYNELQKDKMAEAYSEIGMKGERRRGKGHDGLYQGLSTATKDTYDALHMQALPPR

SEQ ID NO: 28352 - protein, 258 aa, synthetic construct
GFYPDHVELSWWVNGKEVHSGVCTDPQPLKEQPALNDSRYCLSSRLRVSATFWQNPRNHFRCQVQFYGLSENDEWTQDRAKPVTQIVSAEAWGRADCGFTSESYQQGVLSATILYEILLGKATLYAVLVSALVLMAMVKRKDSRGRVKFSRSADAPAYQQGQNQLYNELNLGRREEYDVLDKRRGRDPEMGGKPQRRKNPQEGLYNELQKDKMAEAYSEIGMKGERRRGKGHDGLYQGLSTATKDTYDALHMQALPPR

SEQ ID NO: 28353 - protein, 257 aa, synthetic construct
FYPDHVELSWWVNGKEVHSGVCTDPQPLKEQPALNDSRYCLSSRLRVSATFWQNPRNHFRCQVQFYGLSENDEWTQDRAKPVTQIVSAEAWGRADCGFTSESYQQGVLSATILYEILLGKATLYAVLVSALVLMAMVKRKDSRGRVKFSRSADAPAYQQGQNQLYNELNLGRREEYDVLDKRRGRDPEMGGKPQRRKNPQEGLYNELQKDKMAEAYSEIGMKGERRRGKGHDGLYQGLSTATKDTYDALHMQALPPR

SEQ ID NO: 28354 - protein, 256 aa, synthetic construct
YPDHVELSWWVNGKEVHSGVCTDPQPLKEQPALNDSRYCLSSRLRVSATFWQNPRNHFRCQVQFYGLSENDEWTQDRAKPVTQIVSAEAWGRADCGFTSESYQQGVLSATILYEILLGKATLYAVLVSALVLMAMVKRKDSRGRVKFSRSADAPAYQQGQNQLYNELNLGRREEYDVLDKRRGRDPEMGGKPQRRKNPQEGLYNELQKDKMAEAYSEIGMKGERRRGKGHDGLYQGLSTATKDTYDALHMQALPPR

SEQ ID NO: 28355 - protein, 255 aa, synthetic construct
PDHVELSWWVNGKEVHSGVCTDPQPLKEQPALNDSRYCLSSRLRVSATFWQNPRNHFRCQVQFYGLSENDEWTQDRAKPVTQIVSAEAWGRADCGFTSESYQQGVLSATILYEILLGKATLYAVLVSALVLMAMVKRKDSRGRVKFSRSADAPAYQQGQNQLYNELNLGRREEYDVLDKRRGRDPEMGGKPQRRKNPQEGLYNELQKDKMAEAYSEIGMKGERRRGKGHDGLYQGLSTATKDTYDALHMQALPPR

SEQ ID NO: 28356 - protein, 254 aa, synthetic construct
DHVELSWWVNGKEVHSGVCTDPQPLKEQPALNDSRYCLSSRLRVSATFWQNPRNHFRCQVQFYGLSENDEWTQDRAKPVTQIVSAEAWGRADCGFTSESYQQGVLSATILYEILLGKATLYAVLVSALVLMAMVKRKDSRGRVKFSRSADAPAYQQGQNQLYNELNLGRREEYDVLDKRRGRDPEMGGKPQRRKNPQEGLYNELQKDKMAEAYSEIGMKGERRRGKGHDGLYQGLSTATKDTYDALHMQALPPR

SEQ ID NO: 28357 - protein, 253 aa, synthetic construct
HVELSWWVNGKEVHSGVCTDPQPLKEQPALNDSRYCLSSRLRVSATFWQNPRNHFRCQVQFYGLSENDEWTQDRAKPVTQIVSAEAWGRADCGFTSESYQQGVLSATILYEILLGKATLYAVLVSALVLMAMVKRKDSRGRVKFSRSADAPAYQQGQNQLYNELNLGRREEYDVLDKRRGRDPEMGGKPQRRKNPQEGLYNELQKDKMAEAYSEIGMKGERRRGKGHDGLYQGLSTATKDTYDALHMQALPPR

SEQ ID NO: 28358 - protein, 252 aa, synthetic construct
VELSWWVNGKEVHSGVCTDPQPLKEQPALNDSRYCLSSRLRVSATFWQNPRNHFRCQVQFYGLSENDEWTQDRAKPVTQIVSAEAWGRADCGFTSESYQQGVLSATILYEILLGKATLYAVLVSALVLMAMVKRKDSRGRVKFSRSADAPAYQQGQNQLYNELNLGRREEYDVLDKRRGRDPEMGGKPQRRKNPQEGLYNELQKDKMAEAYSEIGMKGERRRGKGHDGLYQGLSTATKDTYDALHMQALPPR

SEQ ID NO: 28359 - protein, 251 aa, synthetic construct
ELSWWVNGKEVHSGVCTDPQPLKEQPALNDSRYCLSSRLRVSATFWQNPRNHFRCQVQFYGLSENDEWTQDRAKPVTQIVSAEAWGRADCGFTSESYQQGVLSATILYEILLGKATLYAVLVSALVLMAMVKRKDSRGRVKFSRSADAPAYQQGQNQLYNELNLGRREEYDVLDKRRGRDPEMGGKPQRRKNPQEGLYNELQKDKMAEAYSEIGMKGERRRGKGHDGLYQGLSTATKDTYDALHMQALPPR

SEQ ID NO: 28360 - protein, 250 aa, synthetic construct
LSWWVNGKEVHSGVCTDPQPLKEQPALNDSRYCLSSRLRVSATFWQNPRNHFRCQVQFYGLSENDEWTQDRAKPVTQIVSAEAWGRADCGFTSESYQQGVLSATILYEILLGKATLYAVLVSALVLMAMVKRKDSRGRVKFSRSADAPAYQQGQNQLYNELNLGRREEYDVLDKRRGRDPEMGGKPQRRKNPQEGLYNELQKDKMAEAYSEIGMKGERRRGKGHDGLYQGLSTATKDTYDALHMQALPPR

SEQ ID NO: 28361 - protein, 249 aa, synthetic construct
SWWVNGKEVHSGVCTDPQPLKEQPALNDSRYCLSSRLRVSATFWQNPRNHFRCQVQFYGLSENDEWTQDRAKPVTQIVSAEAWGRADCGFTSESYQQGVLSATILYEILLGKATLYAVLVSALVLMAMVKRKDSRGRVKFSRSADAPAYQQGQNQLYNELNLGRREEYDVLDKRRGRDPEMGGKPQRRKNPQEGLYNELQKDKMAEAYSEIGMKGERRRGKGHDGLYQGLSTATKDTYDALHMQALPPR

SEQ ID NO: 28362 - protein, 248 aa, synthetic construct
WWVNGKEVHSGVCTDPQPLKEQPALNDSRYCLSSRLRVSATFWQNPRNHFRCQVQFYGLSENDEWTQDRAKPVTQIVSAEAWGRADCGFTSESYQQGVLSATILYEILLGKATLYAVLVSALVLMAMVKRKDSRGRVKFSRSADAPAYQQGQNQLYNELNLGRREEYDVLDKRRGRDPEMGGKPQRRKNPQEGLYNELQKDKMAEAYSEIGMKGERRRGKGHDGLYQGLSTATKDTYDALHMQALPPR

SEQ ID NO: 28363 - protein, 247 aa, synthetic construct
WVNGKEVHSGVCTDPQPLKEQPALNDSRYCLSSRLRVSATFWQNPRNHFRCQVQFYGLSENDEWTQDRAKPVTQIVSAEAWGRADCGFTSESYQQGVLSATILYEILLGKATLYAVLVSALVLMAMVKRKDSRGRVKFSRSADAPAYQQGQNQLYNELNLGRREEYDVLDKRRGRDPEMGGKPQRRKNPQEGLYNELQKDKMAEAYSEIGMKGERRRGKGHDGLYQGLSTATKDTYDALHMQALPPR

SEQ ID NO: 28364 - protein, 246 aa, synthetic construct
VNGKEVHSGVCTDPQPLKEQPALNDSRYCLSSRLRVSATFWQNPRNHFRCQVQFYGLSENDEWTQDRAKPVTQIVSAEAWGRADCGFTSESYQQGVLSATILYEILLGKATLYAVLVSALVLMAMVKRKDSRGRVKFSRSADAPAYQQGQNQLYNELNLGRREEYDVLDKRRGRDPEMGGKPQRRKNPQEGLYNELQKDKMAEAYSEIGMKGERRRGKGHDGLYQGLSTATKDTYDALHMQALPPR

SEQ ID NO: 28365 - protein, 245 aa, synthetic construct
NGKEVHSGVCTDPQPLKEQPALNDSRYCLSSRLRVSATFWQNPRNHFRCQVQFYGLSENDEWTQDRAKPVTQIVSAEAWGRADCGFTSESYQQGVLSATILYEILLGKATLYAVLVSALVLMAMVKRKDSRGRVKFSRSADAPAYQQGQNQLYNELNLGRREEYDVLDKRRGRDPEMGGKPQRRKNPQEGLYNELQKDKMAEAYSEIGMKGERRRGKGHDGLYQGLSTATKDTYDALHMQALPPR

SEQ ID NO: 28366 - protein, 244 aa, synthetic construct
GKEVHSGVCTDPQPLKEQPALNDSRYCLSSRLRVSATFWQNPRNHFRCQVQFYGLSENDEWTQDRAKPVTQIVSAEAWGRADCGFTSESYQQGVLSATILYEILLGKATLYAVLVSALVLMAMVKRKDSRGRVKFSRSADAPAYQQGQNQLYNELNLGRREEYDVLDKRRGRDPEMGGKPQRRKNPQEGLYNELQKDKMAEAYSEIGMKGERRRGKGHDGLYQGLSTATKDTYDALHMQALPPR

SEQ ID NO: 28367 - protein, 243 aa, synthetic construct
KEVHSGVCTDPQPLKEQPALNDSRYCLSSRLRVSATFWQNPRNHFRCQVQFYGLSENDEWTQDRAKPVTQIVSAEAWGRADCGFTSESYQQGVLSATILYEILLGKATLYAVLVSALVLMAMVKRKDSRGRVKFSRSADAPAYQQGQNQLYNELNLGRREEYDVLDKRRGRDPEMGGKPQRRKNPQEGLYNELQKDKMAEAYSEIGMKGERRRGKGHDGLYQGLSTATKDTYDALHMQALPPR

SEQ ID NO: 28368 - protein, 242 aa, synthetic construct
EVHSGVCTDPQPLKEQPALNDSRYCLSSRLRVSATFWQNPRNHFRCQVQFYGLSENDEWTQDRAKPVTQIVSAEAWGRADCGFTSESYQQGVLSATILYEILLGKATLYAVLVSALVLMAMVKRKDSRGRVKFSRSADAPAYQQGQNQLYNELNLGRREEYDVLDKRRGRDPEMGGKPQRRKNPQEGLYNELQKDKMAEAYSEIGMKGERRRGKGHDGLYQGLSTATKDTYDALHMQALPPR

SEQ ID NO: 28369 - protein, 241 aa, synthetic construct
VHSGVCTDPQPLKEQPALNDSRYCLSSRLRVSATFWQNPRNHFRCQVQFYGLSENDEWTQDRAKPVTQIVSAEAWGRADCGFTSESYQQGVLSATILYEILLGKATLYAVLVSALVLMAMVKRKDSRGRVKFSRSADAPAYQQGQNQLYNELNLGRREEYDVLDKRRGRDPEMGGKPQRRKNPQEGLYNELQKDKMAEAYSEIGMKGERRRGKGHDGLYQGLSTATKDTYDALHMQALPPR

SEQ ID NO: 28370 - protein, 240 aa, synthetic construct
HSGVCTDPQPLKEQPALNDSRYCLSSRLRVSATFWQNPRNHFRCQVQFYGLSENDEWTQDRAKPVTQIVSAEAWGRADCGFTSESYQQGVLSATILYEILLGKATLYAVLVSALVLMAMVKRKDSRGRVKFSRSADAPAYQQGQNQLYNELNLGRREEYDVLDKRRGRDPEMGGKPQRRKNPQEGLYNELQKDKMAEAYSEIGMKGERRRGKGHDGLYQGLSTATKDTYDALHMQALPPR

SEQ ID NO: 28371 - protein, 239 aa, synthetic construct
SGVCTDPQPLKEQPALNDSRYCLSSRLRVSATFWQNPRNHFRCQVQFYGLSENDEWTQDRAKPVTQIVSAEAWGRADCGFTSESYQQGVLSATILYEILLGKATLYAVLVSALVLMAMVKRKDSRGRVKFSRSADAPAYQQGQNQLYNELNLGRREEYDVLDKRRGRDPEMGGKPQRRKNPQEGLYNELQKDKMAEAYSEIGMKGERRRGKGHDGLYQGLSTATKDTYDALHMQALPPR

SEQ ID NO: 28372 - protein, 238 aa, synthetic construct
GVCTDPQPLKEQPALNDSRYCLSSRLRVSATFWQNPRNHFRCQVQFYGLSENDEWTQDRAKPVTQIVSAEAWGRADCGFTSESYQQGVLSATILYEILLGKATLYAVLVSALVLMAMVKRKDSRGRVKFSRSADAPAYQQGQNQLYNELNLGRREEYDVLDKRRGRDPEMGGKPQRRKNPQEGLYNELQKDKMAEAYSEIGMKGERRRGKGHDGLYQGLSTATKDTYDALHMQALPPR

SEQ ID NO: 28373 - protein, 237 aa, synthetic construct
VCTDPQPLKEQPALNDSRYCLSSRLRVSATFWQNPRNHFRCQVQFYGLSENDEWTQDRAKPVTQIVSAEAWGRADCGFTSESYQQGVLSATILYEILLGKATLYAVLVSALVLMAMVKRKDSRGRVKFSRSADAPAYQQGQNQLYNELNLGRREEYDVLDKRRGRDPEMGGKPQRRKNPQEGLYNELQKDKMAEAYSEIGMKGERRRGKGHDGLYQGLSTATKDTYDALHMQALPPR

SEQ ID NO: 28374 - protein, 236 aa, synthetic construct
CTDPQPLKEQPALNDSRYCLSSRLRVSATFWQNPRNHFRCQVQFYGLSENDEWTQDRAKPVTQIVSAEAWGRADCGFTSESYQQGVLSATILYEILLGKATLYAVLVSALVLMAMVKRKDSRGRVKFSRSADAPAYQQGQNQLYNELNLGRREEYDVLDKRRGRDPEMGGKPQRRKNPQEGLYNELQKDKMAEAYSEIGMKGERRRGKGHDGLYQGLSTATKDTYDALHMQALPPR

SEQ ID NO: 28375 - protein, 235 aa, synthetic construct
TDPQPLKEQPALNDSRYCLSSRLRVSATFWQNPRNHFRCQVQFYGLSENDEWTQDRAKPVTQIVSAEAWGRADCGFTSESYQQGVLSATILYEILLGKATLYAVLVSALVLMAMVKRKDSRGRVKFSRSADAPAYQQGQNQLYNELNLGRREEYDVLDKRRGRDPEMGGKPQRRKNPQEGLYNELQKDKMAEAYSEIGMKGERRRGKGHDGLYQGLSTATKDTYDALHMQALPPR

SEQ ID NO: 28376 - protein, 234 aa, synthetic construct
DPQPLKEQPALNDSRYCLSSRLRVSATFWQNPRNHFRCQVQFYGLSENDEWTQDRAKPVTQIVSAEAWGRADCGFTSESYQQGVLSATILYEILLGKATLYAVLVSALVLMAMVKRKDSRGRVKFSRSADAPAYQQGQNQLYNELNLGRREEYDVLDKRRGRDPEMGGKPQRRKNPQEGLYNELQKDKMAEAYSEIGMKGERRRGKGHDGLYQGLSTATKDTYDALHMQALPPR

SEQ ID NO: 28377 - protein, 233 aa, synthetic construct
PQPLKEQPALNDSRYCLSSRLRVSATFWQNPRNHFRCQVQFYGLSENDEWTQDRAKPVTQIVSAEAWGRADCGFTSESYQQGVLSATILYEILLGKATLYAVLVSALVLMAMVKRKDSRGRVKFSRSADAPAYQQGQNQLYNELNLGRREEYDVLDKRRGRDPEMGGKPQRRKNPQEGLYNELQKDKMAEAYSEIGMKGERRRGKGHDGLYQGLSTATKDTYDALHMQALPPR

SEQ ID NO: 28378 - protein, 232 aa, synthetic construct
QPLKEQPALNDSRYCLSSRLRVSATFWQNPRNHFRCQVQFYGLSENDEWTQDRAKPVTQIVSAEAWGRADCGFTSESYQQGVLSATILYEILLGKATLYAVLVSALVLMAMVKRKDSRGRVKFSRSADAPAYQQGQNQLYNELNLGRREEYDVLDKRRGRDPEMGGKPQRRKNPQEGLYNELQKDKMAEAYSEIGMKGERRRGKGHDGLYQGLSTATKDTYDALHMQALPPR

SEQ ID NO: 28379 - protein, 231 aa, synthetic construct
PLKEQPALNDSRYCLSSRLRVSATFWQNPRNHFRCQVQFYGLSENDEWTQDRAKPVTQIVSAEAWGRADCGFTSESYQQGVLSATILYEILLGKATLYAVLVSALVLMAMVKRKDSRGRVKFSRSADAPAYQQGQNQLYNELNLGRREEYDVLDKRRGRDPEMGGKPQRRKNPQEGLYNELQKDKMAEAYSEIGMKGERRRGKGHDGLYQGLSTATKDTYDALHMQALPPR

SEQ ID NO: 28380 - protein, 230 aa, synthetic construct
LKEQPALNDSRYCLSSRLRVSATFWQNPRNHFRCQVQFYGLSENDEWTQDRAKPVTQIVSAEAWGRADCGFTSESYQQGVLSATILYEILLGKATLYAVLVSALVLMAMVKRKDSRGRVKFSRSADAPAYQQGQNQLYNELNLGRREEYDVLDKRRGRDPEMGGKPQRRKNPQEGLYNELQKDKMAEAYSEIGMKGERRRGKGHDGLYQGLSTATKDTYDALHMQALPPR

SEQ ID NO: 28381 - protein, 229 aa, synthetic construct
KEQPALNDSRYCLSSRLRVSATFWQNPRNHFRCQVQFYGLSENDEWTQDRAKPVTQIVSAEAWGRADCGFTSESYQQGVLSATILYEILLGKATLYAVLVSALVLMAMVKRKDSRGRVKFSRSADAPAYQQGQNQLYNELNLGRREEYDVLDKRRGRDPEMGGKPQRRKNPQEGLYNELQKDKMAEAYSEIGMKGERRRGKGHDGLYQGLSTATKDTYDALHMQALPPR

SEQ ID NO: 28382 - protein, 228 aa, synthetic construct; identical to SEQ ID NO: 27985

SEQ ID NO: 28383 - protein, 227 aa, synthetic construct
QPALNDSRYCLSSRLRVSATFWQNPRNHFRCQVQFYGLSENDEWTQDRAKPVTQIVSAEAWGRADCGFTSESYQQGVLSATILYEILLGKATLYAVLVSALVLMAMVKRKDSRGRVKFSRSADAPAYQQGQNQLYNELNLGRREEYDVLDKRRGRDPEMGGKPQRRKNPQEGLYNELQKDKMAEAYSEIGMKGERRRGKGHDGLYQGLSTATKDTYDALHMQALPPR

SEQ ID NO: 28384 - protein, 226 aa, synthetic construct
PALNDSRYCLSSRLRVSATFWQNPRNHFRCQVQFYGLSENDEWTQDRAKPVTQIVSAEAWGRADCGFTSESYQQGVLSATILYEILLGKATLYAVLVSALVLMAMVKRKDSRGRVKFSRSADAPAYQQGQNQLYNELNLGRREEYDVLDKRRGRDPEMGGKPQRRKNPQEGLYNELQKDKMAEAYSEIGMKGERRRGKGHDGLYQGLSTATKDTYDALHMQALPPR

SEQ ID NO: 28385 - protein, 225 aa, synthetic construct
ALNDSRYCLSSRLRVSATFWQNPRNHFRCQVQFYGLSENDEWTQDRAKPVTQIVSAEAWGRADCGFTSESYQQGVLSATILYEILLGKATLYAVLVSALVLMAMVKRKDSRGRVKFSRSADAPAYQQGQNQLYNELNLGRREEYDVLDKRRGRDPEMGGKPQRRKNPQEGLYNELQKDKMAEAYSEIGMKGERRRGKGHDGLYQGLSTATKDTYDALHMQALPPR

SEQ ID NO: 28386 - protein, 224 aa, synthetic construct
LNDSRYCLSSRLRVSATFWQNPRNHFRCQVQFYGLSENDEWTQDRAKPVTQIVSAEAWGRADCGFTSESYQQGVLSATILYEILLGKATLYAVLVSALVLMAMVKRKDSRGRVKFSRSADAPAYQQGQNQLYNELNLGRREEYDVLDKRRGRDPEMGGKPQRRKNPQEGLYNELQKDKMAEAYSEIGMKGERRRGKGHDGLYQGLSTATKDTYDALHMQALPPR

SEQ ID NO: 28387 - protein, 223 aa, synthetic construct
NDSRYCLSSRLRVSATFWQNPRNHFRCQVQFYGLSENDEWTQDRAKPVTQIVSAEAWGRADCGFTSESYQQGVLSATILYEILLGKATLYAVLVSALVLMAMVKRKDSRGRVKFSRSADAPAYQQGQNQLYNELNLGRREEYDVLDKRRGRDPEMGGKPQRRKNPQEGLYNELQKDKMAEAYSEIGMKGERRRGKGHDGLYQGLSTATKDTYDALHMQALPPR

SEQ ID NO: 28388 - protein, 222 aa, synthetic construct
DSRYCLSSRLRVSATFWQNPRNHFRCQVQFYGLSENDEWTQDRAKPVTQIVSAEAWGRADCGFTSESYQQGVLSATILYEILLGKATLYAVLVSALVLMAMVKRKDSRGRVKFSRSADAPAYQQGQNQLYNELNLGRREEYDVLDKRRGRDPEMGGKPQRRKNPQEGLYNELQKDKMAEAYSEIGMKGERRRGKGHDGLYQGLSTATKDTYDALHMQALPPR

SEQ ID NO: 28389 - protein, 221 aa, synthetic construct
SRYCLSSRLRVSATFWQNPRNHFRCQVQFYGLSENDEWTQDRAKPVTQIVSAEAWGRADCGFTSESYQQGVLSATILYEILLGKATLYAVLVSALVLMAMVKRKDSRGRVKFSRSADAPAYQQGQNQLYNELNLGRREEYDVLDKRRGRDPEMGGKPQRRKNPQEGLYNELQKDKMAEAYSEIGMKGERRRGKGHDGLYQGLSTATKDTYDALHMQALPPR

SEQ ID NO: 28390 - protein, 220 aa, synthetic construct
RYCLSSRLRVSATFWQNPRNHFRCQVQFYGLSENDEWTQDRAKPVTQIVSAEAWGRADCGFTSESYQQGVLSATILYEILLGKATLYAVLVSALVLMAMVKRKDSRGRVKFSRSADAPAYQQGQNQLYNELNLGRREEYDVLDKRRGRDPEMGGKPQRRKNPQEGLYNELQKDKMAEAYSEIGMKGERRRGKGHDGLYQGLSTATKDTYDALHMQALPPR

SEQ ID NO: 28391 - protein, 219 aa, synthetic construct
YCLSSRLRVSATFWQNPRNHFRCQVQFYGLSENDEWTQDRAKPVTQIVSAEAWGRADCGFTSESYQQGVLSATILYEILLGKATLYAVLVSALVLMAMVKRKDSRGRVKFSRSADAPAYQQGQNQLYNELNLGRREEYDVLDKRRGRDPEMGGKPQRRKNPQEGLYNELQKDKMAEAYSEIGMKGERRRGKGHDGLYQGLSTATKDTYDALHMQALPPR

SEQ ID NO: 28392 - protein, 218 aa, synthetic construct
CLSSRLRVSATFWQNPRNHFRCQVQFYGLSENDEWTQDRAKPVTQIVSAEAWGRADCGFTSESYQQGVLSATILYEILLGKATLYAVLVSALVLMAMVKRKDSRGRVKFSRSADAPAYQQGQNQLYNELNLGRREEYDVLDKRRGRDPEMGGKPQRRKNPQEGLYNELQKDKMAEAYSEIGMKGERRRGKGHDGLYQGLSTATKDTYDALHMQALPPR

SEQ ID NO: 28393 - protein, 217 aa, synthetic construct
LSSRLRVSATFWQNPRNHFRCQVQFYGLSENDEWTQDRAKPVTQIVSAEAWGRADCGFTSESYQQGVLSATILYEILLGKATLYAVLVSALVLMAMVKRKDSRGRVKFSRSADAPAYQQGQNQLYNELNLGRREEYDVLDKRRGRDPEMGGKPQRRKNPQEGLYNELQKDKMAEAYSEIGMKGERRRGKGHDGLYQGLSTATKDTYDALHMQALPPR

SEQ ID NO: 28394 - protein, 216 aa, synthetic construct
SSRLRVSATFWQNPRNHFRCQVQFYGLSENDEWTQDRAKPVTQIVSAEAWGRADCGFTSESYQQGVLSATILYEILLGKATLYAVLVSALVLMAMVKRKDSRGRVKFSRSADAPAYQQGQNQLYNELNLGRREEYDVLDKRRGRDPEMGGKPQRRKNPQEGLYNELQKDKMAEAYSEIGMKGERRRGKGHDGLYQGLSTATKDTYDALHMQALPPR

SEQ ID NO: 28395 - protein, 215 aa, synthetic construct
SRLRVSATFWQNPRNHFRCQVQFYGLSENDEWTQDRAKPVTQIVSAEAWGRADCGFTSESYQQGVLSATILYEILLGKATLYAVLVSALVLMAMVKRKDSRGRVKFSRSADAPAYQQGQNQLYNELNLGRREEYDVLDKRRGRDPEMGGKPQRRKNPQEGLYNELQKDKMAEAYSEIGMKGERRRGKGHDGLYQGLSTATKDTYDALHMQALPPR

SEQ ID NO: 28396 - protein, 214 aa, synthetic construct
RLRVSATFWQNPRNHFRCQVQFYGLSENDEWTQDRAKPVTQIVSAEAWGRADCGFTSESYQQGVLSATILYEILLGKATLYAVLVSALVLMAMVKRKDSRGRVKFSRSADAPAYQQGQNQLYNELNLGRREEYDVLDKRRGRDPEMGGKPQRRKNPQEGLYNELQKDKMAEAYSEIGMKGERRRGKGHDGLYQGLSTATKDTYDALHMQALPPR

SEQ ID NO: 28397 - protein, 213 aa, synthetic construct
LRVSATFWQNPRNHFRCQVQFYGLSENDEWTQDRAKPVTQIVSAEAWGRADCGFTSESYQQGVLSATILYEILLGKATLYAVLVSALVLMAMVKRKDSRGRVKFSRSADAPAYQQGQNQLYNELNLGRREEYDVLDKRRGRDPEMGGKPQRRKNPQEGLYNELQKDKMAEAYSEIGMKGERRRGKGHDGLYQGLSTATKDTYDALHMQALPPR

SEQ ID NO: 28398 - protein, 212 aa, synthetic construct
RVSATFWQNPRNHFRCQVQFYGLSENDEWTQDRAKPVTQIVSAEAWGRADCGFTSESYQQGVLSATILYEILLGKATLYAVLVSALVLMAMVKRKDSRGRVKFSRSADAPAYQQGQNQLYNELNLGRREEYDVLDKRRGRDPEMGGKPQRRKNPQEGLYNELQKDKMAEAYSEIGMKGERRRGKGHDGLYQGLSTATKDTYDALHMQALPPR

SEQ ID NO: 28399 - protein, 211 aa, synthetic construct
VSATFWQNPRNHFRCQVQFYGLSENDEWTQDRAKPVTQIVSAEAWGRADCGFTSESYQQGVLSATILYEILLGKATLYAVLVSALVLMAMVKRKDSRGRVKFSRSADAPAYQQGQNQLYNELNLGRREEYDVLDKRRGRDPEMGGKPQRRKNPQEGLYNELQKDKMAEAYSEIGMKGERRRGKGHDGLYQGLSTATKDTYDALHMQALPPR

SEQ ID NO: 28400 - protein, 210 aa, synthetic construct
SATFWQNPRNHFRCQVQFYGLSENDEWTQDRAKPVTQIVSAEAWGRADCGFTSESYQQGVLSATILYEILLGKATLYAVLVSALVLMAMVKRKDSRGRVKFSRSADAPAYQQGQNQLYNELNLGRREEYDVLDKRRGRDPEMGGKPQRRKNPQEGLYNELQKDKMAEAYSEIGMKGERRRGKGHDGLYQGLSTATKDTYDALHMQALPPR

SEQ ID NO: 28401 - protein, 209 aa, synthetic construct
ATFWQNPRNHFRCQVQFYGLSENDEWTQDRAKPVTQIVSAEAWGRADCGFTSESYQQGVLSATILYEILLGKATLYAVLVSALVLMAMVKRKDSRGRVKFSRSADAPAYQQGQNQLYNELNLGRREEYDVLDKRRGRDPEMGGKPQRRKNPQEGLYNELQKDKMAEAYSEIGMKGERRRGKGHDGLYQGLSTATKDTYDALHMQALPPR

SEQ ID NO: 28402 - protein, 208 aa, synthetic construct
TFWQNPRNHFRCQVQFYGLSENDEWTQDRAKPVTQIVSAEAWGRADCGFTSESYQQGVLSATILYEILLGKATLYAVLVSALVLMAMVKRKDSRGRVKFSRSADAPAYQQGQNQLYNELNLGRREEYDVLDKRRGRDPEMGGKPQRRKNPQEGLYNELQKDKMAEAYSEIGMKGERRRGKGHDGLYQGLSTATKDTYDALHMQALPPR

SEQ ID NO: 28403 - protein, 207 aa, synthetic construct
FWQNPRNHFRCQVQFYGLSENDEWTQDRAKPVTQIVSAEAWGRADCGFTSESYQQGVLSATILYEILLGKATLYAVLVSALVLMAMVKRKDSRGRVKFSRSADAPAYQQGQNQLYNELNLGRREEYDVLDKRRGRDPEMGGKPQRRKNPQEGLYNELQKDKMAEAYSEIGMKGERRRGKGHDGLYQGLSTATKDTYDALHMQALPPR

SEQ ID NO: 28404 - protein, 206 aa, synthetic construct
WQNPRNHFRCQVQFYGLSENDEWTQDRAKPVTQIVSAEAWGRADCGFTSESYQQGVLSATILYEILLGKATLYAVLVSALVLMAMVKRKDSRGRVKFSRSADAPAYQQGQNQLYNELNLGRREEYDVLDKRRGRDPEMGGKPQRRKNPQEGLYNELQKDKMAEAYSEIGMKGERRRGKGHDGLYQGLSTATKDTYDALHMQALPPR

SEQ ID NO: 28405 - protein, 205 aa, synthetic construct
QNPRNHFRCQVQFYGLSENDEWTQDRAKPVTQIVSAEAWGRADCGFTSESYQQGVLSATILYEILLGKATLYAVLVSALVLMAMVKRKDSRGRVKFSRSADAPAYQQGQNQLYNELNLGRREEYDVLDKRRGRDPEMGGKPQRRKNPQEGLYNELQKDKMAEAYSEIGMKGERRRGKGHDGLYQGLSTATKDTYDALHMQALPPR

SEQ ID NO: 28406 - protein, 204 aa, synthetic construct
NPRNHFRCQVQFYGLSENDEWTQDRAKPVTQIVSAEAWGRADCGFTSESYQQGVLSATILYEILLGKATLYAVLVSALVLMAMVKRKDSRGRVKFSRSADAPAYQQGQNQLYNELNLGRREEYDVLDKRRGRDPEMGGKPQRRKNPQEGLYNELQKDKMAEAYSEIGMKGERRRGKGHDGLYQGLSTATKDTYDALHMQALPPR

SEQ ID NO: 28407 - protein, 203 aa, synthetic construct
PRNHFRCQVQFYGLSENDEWTQDRAKPVTQIVSAEAWGRADCGFTSESYQQGVLSATILYEILLGKATLYAVLVSALVLMAMVKRKDSRGRVKFSRSADAPAYQQGQNQLYNELNLGRREEYDVLDKRRGRDPEMGGKPQRRKNPQEGLYNELQKDKMAEAYSEIGMKGERRRGKGHDGLYQGLSTATKDTYDALHMQALPPR

SEQ ID NO: 28408 - protein, 202 aa, synthetic construct
RNHFRCQVQFYGLSENDEWTQDRAKPVTQIVSAEAWGRADCGFTSESYQQGVLSATILYEILLGKATLYAVLVSALVLMAMVKRKDSRGRVKFSRSADAPAYQQGQNQLYNELNLGRREEYDVLDKRRGRDPEMGGKPQRRKNPQEGLYNELQKDKMAEAYSEIGMKGERRRGKGHDGLYQGLSTATKDTYDALHMQALPPR

SEQ ID NO: 28409 - protein, 201 aa, synthetic construct
NHFRCQVQFYGLSENDEWTQDRAKPVTQIVSAEAWGRADCGFTSESYQQGVLSATILYEILLGKATLYAVLVSALVLMAMVKRKDSRGRVKFSRSADAPAYQQGQNQLYNELNLGRREEYDVLDKRRGRDPEMGGKPQRRKNPQEGLYNELQKDKMAEAYSEIGMKGERRRGKGHDGLYQGLSTATKDTYDALHMQALPPR

SEQ ID NO: 28410 - protein, 200 aa, synthetic construct
HFRCQVQFYGLSENDEWTQDRAKPVTQIVSAEAWGRADCGFTSESYQQGVLSATILYEILLGKATLYAVLVSALVLMAMVKRKDSRGRVKFSRSADAPAYQQGQNQLYNELNLGRREEYDVLDKRRGRDPEMGGKPQRRKNPQEGLYNELQKDKMAEAYSEIGMKGERRRGKGHDGLYQGLSTATKDTYDALHMQALPPR

SEQ ID NO: 28411 - protein, 199 aa, synthetic construct
FRCQVQFYGLSENDEWTQDRAKPVTQIVSAEAWGRADCGFTSESYQQGVLSATILYEILLGKATLYAVLVSALVLMAMVKRKDSRGRVKFSRSADAPAYQQGQNQLYNELNLGRREEYDVLDKRRGRDPEMGGKPQRRKNPQEGLYNELQKDKMAEAYSEIGMKGERRRGKGHDGLYQGLSTATKDTYDALHMQALPPR

SEQ ID NO: 28412 - protein, 198 aa, synthetic construct
RCQVQFYGLSENDEWTQDRAKPVTQIVSAEAWGRADCGFTSESYQQGVLSATILYEILLGKATLYAVLVSALVLMAMVKRKDSRGRVKFSRSADAPAYQQGQNQLYNELNLGRREEYDVLDKRRGRDPEMGGKPQRRKNPQEGLYNELQKDKMAEAYSEIGMKGERRRGKGHDGLYQGLSTATKDTYDALHMQALPPR

SEQ ID NO: 28413 - protein, 197 aa, synthetic construct
CQVQFYGLSENDEWTQDRAKPVTQIVSAEAWGRADCGFTSESYQQGVLSATILYEILLGKATLYAVLVSALVLMAMVKRKDSRGRVKFSRSADAPAYQQGQNQLYNELNLGRREEYDVLDKRRGRDPEMGGKPQRRKNPQEGLYNELQKDKMAEAYSEIGMKGERRRGKGHDGLYQGLSTATKDTYDALHMQALPPR

SEQ ID NO: 28414 - protein, 196 aa, synthetic construct
QVQFYGLSENDEWTQDRAKPVTQIVSAEAWGRADCGFTSESYQQGVLSATILYEILLGKATLYAVLVSALVLMAMVKRKDSRGRVKFSRSADAPAYQQGQNQLYNELNLGRREEYDVLDKRRGRDPEMGGKPQRRKNPQEGLYNELQKDKMAEAYSEIGMKGERRRGKGHDGLYQGLSTATKDTYDALHMQALPPR

SEQ ID NO: 28415 - protein, 195 aa, synthetic construct
VQFYGLSENDEWTQDRAKPVTQIVSAEAWGRADCGFTSESYQQGVLSATILYEILLGKATLYAVLVSALVLMAMVKRKDSRGRVKFSRSADAPAYQQGQNQLYNELNLGRREEYDVLDKRRGRDPEMGGKPQRRKNPQEGLYNELQKDKMAEAYSEIGMKGERRRGKGHDGLYQGLSTATKDTYDALHMQALPPR

SEQ ID NO: 28416 - protein, 194 aa, synthetic construct
QFYGLSENDEWTQDRAKPVTQIVSAEAWGRADCGFTSESYQQGVLSATILYEILLGKATLYAVLVSALVLMAMVKRKDSRGRVKFSRSADAPAYQQGQNQLYNELNLGRREEYDVLDKRRGRDPEMGGKPQRRKNPQEGLYNELQKDKMAEAYSEIGMKGERRRGKGHDGLYQGLSTATKDTYDALHMQALPPR

SEQ ID NO: 28417 - protein, 193 aa, synthetic construct
FYGLSENDEWTQDRAKPVTQIVSAEAWGRADCGFTSESYQQGVLSATILYEILLGKATLYAVLVSALVLMAMVKRKDSRGRVKFSRSADAPAYQQGQNQLYNELNLGRREEYDVLDKRRGRDPEMGGKPQRRKNPQEGLYNELQKDKMAEAYSEIGMKGERRRGKGHDGLYQGLSTATKDTYDALHMQALPPR

SEQ ID NO: 28418 - protein, 192 aa, synthetic construct
YGLSENDEWTQDRAKPVTQIVSAEAWGRADCGFTSESYQQGVLSATILYEILLGKATLYAVLVSALVLMAMVKRKDSRGRVKFSRSADAPAYQQGQNQLYNELNLGRREEYDVLDKRRGRDPEMGGKPQRRKNPQEGLYNELQKDKMAEAYSEIGMKGERRRGKGHDGLYQGLSTATKDTYDALHMQALPPR

SEQ ID NO: 28419 - protein, 191 aa, synthetic construct
GLSENDEWTQDRAKPVTQIVSAEAWGRADCGFTSESYQQGVLSATILYEILLGKATLYAVLVSALVLMAMVKRKDSRGRVKFSRSADAPAYQQGQNQLYNELNLGRREEYDVLDKRRGRDPEMGGKPQRRKNPQEGLYNELQKDKMAEAYSEIGMKGERRRGKGHDGLYQGLSTATKDTYDALHMQALPPR

SEQ ID NO: 28420 - protein, 190 aa, synthetic construct
LSENDEWTQDRAKPVTQIVSAEAWGRADCGFTSESYQQGVLSATILYEILLGKATLYAVLVSALVLMAMVKRKDSRGRVKFSRSADAPAYQQGQNQLYNELNLGRREEYDVLDKRRGRDPEMGGKPQRRKNPQEGLYNELQKDKMAEAYSEIGMKGERRRGKGHDGLYQGLSTATKDTYDALHMQALPPR

SEQ ID NO: 28421 - protein, 189 aa, synthetic construct
SENDEWTQDRAKPVTQIVSAEAWGRADCGFTSESYQQGVLSATILYEILLGKATLYAVLVSALVLMAMVKRKDSRGRVKFSRSADAPAYQQGQNQLYNELNLGRREEYDVLDKRRGRDPEMGGKPQRRKNPQEGLYNELQKDKMAEAYSEIGMKGERRRGKGHDGLYQGLSTATKDTYDALHMQALPPR

SEQ ID NO: 28422 - protein, 188 aa, synthetic construct
ENDEWTQDRAKPVTQIVSAEAWGRADCGFTSESYQQGVLSATILYEILLGKATLYAVLVSALVLMAMVKRKDSRGRVKFSRSADAPAYQQGQNQLYNELNLGRREEYDVLDKRRGRDPEMGGKPQRRKNPQEGLYNELQKDKMAEAYSEIGMKGERRRGKGHDGLYQGLSTATKDTYDALHMQALPPR

SEQ ID NO: 28423 - protein, 187 aa, synthetic construct
NDEWTQDRAKPVTQIVSAEAWGRADCGFTSESYQQGVLSATILYEILLGKATLYAVLVSALVLMAMVKRKDSRGRVKFSRSADAPAYQQGQNQLYNELNLGRREEYDVLDKRRGRDPEMGGKPQRRKNPQEGLYNELQKDKMAEAYSEIGMKGERRRGKGHDGLYQGLSTATKDTYDALHMQALPPR

SEQ ID NO: 28424 - protein, 186 aa, synthetic construct
DEWTQDRAKPVTQIVSAEAWGRADCGFTSESYQQGVLSATILYEILLGKATLYAVLVSALVLMAMVKRKDSRGRVKFSRSADAPAYQQGQNQLYNELNLGRREEYDVLDKRRGRDPEMGGKPQRRKNPQEGLYNELQKDKMAEAYSEIGMKGERRRGKGHDGLYQGLSTATKDTYDALHMQALPPR

SEQ ID NO: 28425 - protein, 185 aa, synthetic construct
EWTQDRAKPVTQIVSAEAWGRADCGFTSESYQQGVLSATILYEILLGKATLYAVLVSALVLMAMVKRKDSRGRVKFSRSADAPAYQQGQNQLYNELNLGRREEYDVLDKRRGRDPEMGGKPQRRKNPQEGLYNELQKDKMAEAYSEIGMKGERRRGKGHDGLYQGLSTATKDTYDALHMQALPPR

SEQ ID NO: 28426 - protein, 184 aa, synthetic construct
WTQDRAKPVTQIVSAEAWGRADCGFTSESYQQGVLSATILYEILLGKATLYAVLVSALVLMAMVKRKDSRGRVKFSRSADAPAYQQGQNQLYNELNLGRREEYDVLDKRRGRDPEMGGKPQRRKNPQEGLYNELQKDKMAEAYSEIGMKGERRRGKGHDGLYQGLSTATKDTYDALHMQALPPR

SEQ ID NO: 28427 - protein, 183 aa, synthetic construct
TQDRAKPVTQIVSAEAWGRADCGFTSESYQQGVLSATILYEILLGKATLYAVLVSALVLMAMVKRKDSRGRVKFSRSADAPAYQQGQNQLYNELNLGRREEYDVLDKRRGRDPEMGGKPQRRKNPQEGLYNELQKDKMAEAYSEIGMKGERRRGKGHDGLYQGLSTATKDTYDALHMQALPPR

SEQ ID NO: 28428 - protein, 182 aa, synthetic construct
QDRAKPVTQIVSAEAWGRADCGFTSESYQQGVLSATILYEILLGKATLYAVLVSALVLMAMVKRKDSRGRVKFSRSADAPAYQQGQNQLYNELNLGRREEYDVLDKRRGRDPEMGGKPQRRKNPQEGLYNELQKDKMAEAYSEIGMKGERRRGKGHDGLYQGLSTATKDTYDALHMQALPPR

SEQ ID NO: 28429 - protein, 181 aa, synthetic construct
DRAKPVTQIVSAEAWGRADCGFTSESYQQGVLSATILYEILLGKATLYAVLVSALVLMAMVKRKDSRGRVKFSRSADAPAYQQGQNQLYNELNLGRREEYDVLDKRRGRDPEMGGKPQRRKNPQEGLYNELQKDKMAEAYSEIGMKGERRRGKGHDGLYQGLSTATKDTYDALHMQALPPR

SEQ ID NO: 28430 - protein, 180 aa, synthetic construct
RAKPVTQIVSAEAWGRADCGFTSESYQQGVLSATILYEILLGKATLYAVLVSALVLMAMVKRKDSRGRVKFSRSADAPAYQQGQNQLYNELNLGRREEYDVLDKRRGRDPEMGGKPQRRKNPQEGLYNELQKDKMAEAYSEIGMKGERRRGKGHDGLYQGLSTATKDTYDALHMQALPPR

SEQ ID NO: 28431 - protein, 179 aa, synthetic construct
AKPVTQIVSAEAWGRADCGFTSESYQQGVLSATILYEILLGKATLYAVLVSALVLMAMVKRKDSRGRVKFSRSADAPAYQQGQNQLYNELNLGRREEYDVLDKRRGRDPEMGGKPQRRKNPQEGLYNELQKDKMAEAYSEIGMKGERRRGKGHDGLYQGLSTATKDTYDALHMQALPPR

SEQ ID NO: 28432 - protein, 178 aa, synthetic construct
KPVTQIVSAEAWGRADCGFTSESYQQGVLSATILYEILLGKATLYAVLVSALVLMAMVKRKDSRGRVKFSRSADAPAYQQGQNQLYNELNLGRREEYDVLDKRRGRDPEMGGKPQRRKNPQEGLYNELQKDKMAEAYSEIGMKGERRRGKGHDGLYQGLSTATKDTYDALHMQALPPR

SEQ ID NO: 28433 - protein, 177 aa, synthetic construct
PVTQIVSAEAWGRADCGFTSESYQQGVLSATILYEILLGKATLYAVLVSALVLMAMVKRKDSRGRVKFSRSADAPAYQQGQNQLYNELNLGRREEYDVLDKRRGRDPEMGGKPQRRKNPQEGLYNELQKDKMAEAYSEIGMKGERRRGKGHDGLYQGLSTATKDTYDALHMQALPPR

SEQ ID NO: 28434 - protein, 176 aa, synthetic construct
VTQIVSAEAWGRADCGFTSESYQQGVLSATILYEILLGKATLYAVLVSALVLMAMVKRKDSRGRVKFSRSADAPAYQQGQNQLYNELNLGRREEYDVLDKRRGRDPEMGGKPQRRKNPQEGLYNELQKDKMAEAYSEIGMKGERRRGKGHDGLYQGLSTATKDTYDALHMQALPPR

SEQ ID NO: 28435 - protein, 175 aa, synthetic construct
TQIVSAEAWGRADCGFTSESYQQGVLSATILYEILLGKATLYAVLVSALVLMAMVKRKDSRGRVKFSRSADAPAYQQGQNQLYNELNLGRREEYDVLDKRRGRDPEMGGKPQRRKNPQEGLYNELQKDKMAEAYSEIGMKGERRRGKGHDGLYQGLSTATKDTYDALHMQALPPR

SEQ ID NO: 28436 - protein, 174 aa, synthetic construct
QIVSAEAWGRADCGFTSESYQQGVLSATILYEILLGKATLYAVLVSALVLMAMVKRKDSRGRVKFSRSADAPAYQQGQNQLYNELNLGRREEYDVLDKRRGRDPEMGGKPQRRKNPQEGLYNELQKDKMAEAYSEIGMKGERRRGKGHDGLYQGLSTATKDTYDALHMQALPPR

SEQ ID NO: 28437 - protein, 173 aa, synthetic construct
IVSAEAWGRADCGFTSESYQQGVLSATILYEILLGKATLYAVLVSALVLMAMVKRKDSRGRVKFSRSADAPAYQQGQNQLYNELNLGRREEYDVLDKRRGRDPEMGGKPQRRKNPQEGLYNELQKDKMAEAYSEIGMKGERRRGKGHDGLYQGLSTATKDTYDALHMQALPPR

SEQ ID NO: 28438 - protein, 172 aa, synthetic construct
VSAEAWGRADCGFTSESYQQGVLSATILYEILLGKATLYAVLVSALVLMAMVKRKDSRGRVKFSRSADAPAYQQGQNQLYNELNLGRREEYDVLDKRRGRDPEMGGKPQRRKNPQEGLYNELQKDKMAEAYSEIGMKGERRRGKGHDGLYQGLSTATKDTYDALHMQALPPR

SEQ ID NO: 28439 - protein, 171 aa, synthetic construct
SAEAWGRADCGFTSESYQQGVLSATILYEILLGKATLYAVLVSALVLMAMVKRKDSRGRVKFSRSADAPAYQQGQNQLYNELNLGRREEYDVLDKRRGRDPEMGGKPQRRKNPQEGLYNELQKDKMAEAYSEIGMKGERRRGKGHDGLYQGLSTATKDTYDALHMQALPPR

SEQ ID NO: 28440 - protein, 170 aa, synthetic construct
AEAWGRADCGFTSESYQQGVLSATILYEILLGKATLYAVLVSALVLMAMVKRKDSRGRVKFSRSADAPAYQQGQNQLYNELNLGRREEYDVLDKRRGRDPEMGGKPQRRKNPQEGLYNELQKDKMAEAYSEIGMKGERRRGKGHDGLYQGLSTATKDTYDALHMQALPPR

SEQ ID NO: 28441 - protein, 169 aa, synthetic construct
EAWGRADCGFTSESYQQGVLSATILYEILLGKATLYAVLVSALVLMAMVKRKDSRGRVKFSRSADAPAYQQGQNQLYNELNLGRREEYDVLDKRRGRDPEMGGKPQRRKNPQEGLYNELQKDKMAEAYSEIGMKGERRRGKGHDGLYQGLSTATKDTYDALHMQALPPR

SEQ ID NO: 28442 - protein, 168 aa, synthetic construct
AWGRADCGFTSESYQQGVLSATILYEILLGKATLYAVLVSALVLMAMVKRKDSRGRVKFSRSADAPAYQQGQNQLYNELNLGRREEYDVLDKRRGRDPEMGGKPQRRKNPQEGLYNELQKDKMAEAYSEIGMKGERRRGKGHDGLYQGLSTATKDTYDALHMQALPPR

SEQ ID NO: 28443 - protein, 167 aa, synthetic construct
WGRADCGFTSESYQQGVLSATILYEILLGKATLYAVLVSALVLMAMVKRKDSRGRVKFSRSADAPAYQQGQNQLYNELNLGRREEYDVLDKRRGRDPEMGGKPQRRKNPQEGLYNELQKDKMAEAYSEIGMKGERRRGKGHDGLYQGLSTATKDTYDALHMQALPPR

SEQ ID NO: 28444 - protein, 166 aa, synthetic construct; identical to SEQ ID NO: 27986

SEQ ID NO: 28445 - protein, 286 aa, synthetic construct; identical to SEQ ID NO: 27976

SEQ ID NO: 28446 - protein, 285 aa, synthetic construct
KQLDADVSPKPTIFLPSIAETKLQKAGTYLCLLEKFFPDVIKIHWQEKKSNTILGSQEGNTMKTNDTYMKFSWLTVPEKSLDKEHRCIVRHENNKNGVDQEIIFPPIKTDVITMDPKDNCSKDANDTLLLQLTNTSAYYMYLLLLLKSVVYFAIITCCLLRRTAFCCNGEKSRVKFSRSADAPAYQQGQNQLYNELNLGRREEYDVLDKRRGRDPEMGGKPQRRKNPQEGLYNELQKDKMAEAYSEIGMKGERRRGKGHDGLYQGLSTATKDTYDALHMQALPPR

SEQ ID NO: 28447 - protein, 284 aa, synthetic construct
QLDADVSPKPTIFLPSIAETKLQKAGTYLCLLEKFFPDVIKIHWQEKKSNTILGSQEGNTMKTNDTYMKFSWLTVPEKSLDKEHRCIVRHENNKNGVDQEIIFPPIKTDVITMDPKDNCSKDANDTLLLQLTNTSAYYMYLLLLLKSVVYFAIITCCLLRRTAFCCNGEKSRVKFSRSADAPAYQQGQNQLYNELNLGRREEYDVLDKRRGRDPEMGGKPQRRKNPQEGLYNELQKDKMAEAYSEIGMKGERRRGKGHDGLYQGLSTATKDTYDALHMQALPPR

SEQ ID NO: 28448 - protein, 283 aa, synthetic construct
LDADVSPKPTIFLPSIAETKLQKAGTYLCLLEKFFPDVIKIHWQEKKSNTILGSQEGNTMKTNDTYMKFSWLTVPEKSLDKEHRCIVRHENNKNGVDQEIIFPPIKTDVITMDPKDNCSKDANDTLLLQLTNTSAYYMYLLLLLKSVVYFAIITCCLLRRTAFCCNGEKSRVKFSRSADAPAYQQGQNQLYNELNLGRREEYDVLDKRRGRDPEMGGKPQRRKNPQEGLYNELQKDKMAEAYSEIGMKGERRRGKGHDGLYQGLSTATKDTYDALHMQALPPR

SEQ ID NO: 28449 - protein, 282 aa, synthetic construct
DADVSPKPTIFLPSIAETKLQKAGTYLCLLEKFFPDVIKIHWQEKKSNTILGSQEGNTMKTNDTYMKFSWLTVPEKSLDKEHRCIVRHENNKNGVDQEIIFPPIKTDVITMDPKDNCSKDANDTLLLQLTNTSAYYMYLLLLLKSVVYFAIITCCLLRRTAFCCNGEKSRVKFSRSADAPAYQQGQNQLYNELNLGRREEYDVLDKRRGRDPEMGGKPQRRKNPQEGLYNELQKDKMAEAYSEIGMKGERRRGKGHDGLYQGLSTATKDTYDALHMQALPPR

SEQ ID NO: 28450 - protein, 281 aa, synthetic construct; identical to SEQ ID NO: 27989

SEQ ID NO: 28451 - protein, 280 aa, synthetic construct
DVSPKPTIFLPSIAETKLQKAGTYLCLLEKFFPDVIKIHWQEKKSNTILGSQEGNTMKTNDTYMKFSWLTVPEKSLDKEHRCIVRHENNKNGVDQEIIFPPIKTDVITMDPKDNCSKDANDTLLLQLTNTSAYYMYLLLLLKSVVYFAIITCCLLRRTAFCCNGEKSRVKFSRSADAPAYQQGQNQLYNELNLGRREEYDVLDKRRGRDPEMGGKPQRRKNPQEGLYNELQKDKMAEAYSEIGMKGERRRGKGHDGLYQGLSTATKDTYDALHMQALPPR

SEQ ID NO: 28452 - protein, 279 aa, synthetic construct; identical to SEQ ID NO: 27990

SEQ ID NO: 28453 - protein, 278 aa, synthetic construct
SPKPTIFLPSIAETKLQKAGTYLCLLEKFFPDVIKIHWQEKKSNTILGSQEGNTMKTNDTYMKFSWLTVPEKSLDKEHRCIVRHENNKNGVDQEIIFPPIKTDVITMDPKDNCSKDANDTLLLQLTNTSAYYMYLLLLLKSVVYFAIITCCLLRRTAFCCNGEKSRVKFSRSADAPAYQQGQNQLYNELNLGRREEYDVLDKRRGRDPEMGGKPQRRKNPQEGLYNELQKDKMAEAYSEIGMKGERRRGKGHDGLYQGLSTATKDTYDALHMQALPPR

SEQ ID NO: 28454 - protein, 277 aa, synthetic construct
PKPTIFLPSIAETKLQKAGTYLCLLEKFFPDVIKIHWQEKKSNTILGSQEGNTMKTNDTYMKFSWLTVPEKSLDKEHRCIVRHENNKNGVDQEIIFPPIKTDVITMDPKDNCSKDANDTLLLQLTNTSAYYMYLLLLLKSVVYFAIITCCLLRRTAFCCNGEKSRVKFSRSADAPAYQQGQNQLYNELNLGRREEYDVLDKRRGRDPEMGGKPQRRKNPQEGLYNELQKDKMAEAYSEIGMKGERRRGKGHDGLYQGLSTATKDTYDALHMQALPPR

SEQ ID NO: 28455 - protein, 276 aa, synthetic construct
KPTIFLPSIAETKLQKAGTYLCLLEKFFPDVIKIHWQEKKSNTILGSQEGNTMKTNDTYMKFSWLTVPEKSLDKEHRCIVRHENNKNGVDQEIIFPPIKTDVITMDPKDNCSKDANDTLLLQLTNTSAYYMYLLLLLKSVVYFAIITCCLLRRTAFCCNGEKSRVKFSRSADAPAYQQGQNQLYNELNLGRREEYDVLDKRRGRDPEMGGKPQRRKNPQEGLYNELQKDKMAEAYSEIGMKGERRRGKGHDGLYQGLSTATKDTYDALHMQALPPR

SEQ ID NO: 28456 - protein, 275 aa, synthetic construct
PTIFLPSIAETKLQKAGTYLCLLEKFFPDVIKIHWQEKKSNTILGSQEGNTMKTNDTYMKFSWLTVPEKSLDKEHRCIVRHENNKNGVDQEIIFPPIKTDVITMDPKDNCSKDANDTLLLQLTNTSAYYMYLLLLLKSVVYFAIITCCLLRRTAFCCNGEKSRVKFSRSADAPAYQQGQNQLYNELNLGRREEYDVLDKRRGRDPEMGGKPQRRKNPQEGLYNELQKDKMAEAYSEIGMKGERRRGKGHDGLYQGLSTATKDTYDALHMQALPPR

SEQ ID NO: 28457 - protein, 274 aa, synthetic construct; identical to SEQ ID NO: 27991

SEQ ID NO: 28458 - protein, 273 aa, synthetic construct
IFLPSIAETKLQKAGTYLCLLEKFFPDVIKIHWQEKKSNTILGSQEGNTMKTNDTYMKFSWLTVPEKSLDKEHRCIVRHENNKNGVDQEIIFPPIKTDVITMDPKDNCSKDANDTLLLQLTNTSAYYMYLLLLLKSVVYFAIITCCLLRRTAFCCNGEKSRVKFSRSADAPAYQQGQNQLYNELNLGRREEYDVLDKRRGRDPEMGGKPQRRKNPQEGLYNELQKDKMAEAYSEIGMKGERRRGKGHDGLYQGLSTATKDTYDALHMQALPPR

SEQ ID NO: 28459 - protein, 272 aa, synthetic construct
FLPSIAETKLQKAGTYLCLLEKFFPDVIKIHWQEKKSNTILGSQEGNTMKTNDTYMKFSWLTVPEKSLDKEHRCIVRHENNKNGVDQEIIFPPIKTDVITMDPKDNCSKDANDTLLLQLTNTSAYYMYLLLLLKSVVYFAIITCCLLRRTAFCCNGEKSRVKFSRSADAPAYQQGQNQLYNELNLGRREEYDVLDKRRGRDPEMGGKPQRRKNPQEGLYNELQKDKMAEAYSEIGMKGERRRGKGHDGLYQGLSTATKDTYDALHMQALPPR

SEQ ID NO: 28460 - protein, 271 aa, synthetic construct
LPSIAETKLQKAGTYLCLLEKFFPDVIKIHWQEKKSNTILGSQEGNTMKTNDTYMKFSWLTVPEKSLDKEHRCIVRHENNKNGVDQEIIFPPIKTDVITMDPKDNCSKDANDTLLLQLTNTSAYYMYLLLLLKSVVYFAIITCCLLRRTAFCCNGEKSRVKFSRSADAPAYQQGQNQLYNELNLGRREEYDVLDKRRGRDPEMGGKPQRRKNPQEGLYNELQKDKMAEAYSEIGMKGERRRGKGHDGLYQGLSTATKDTYDALHMQALPPR

SEQ ID NO: 28461 - protein, 270 aa, synthetic construct
PSIAETKLQKAGTYLCLLEKFFPDVIKIHWQEKKSNTILGSQEGNTMKTNDTYMKFSWLTVPEKSLDKEHRCIVRHENNKNGVDQEIIFPPIKTDVITMDPKDNCSKDANDTLLLQLTNTSAYYMYLLLLLKSVVYFAIITCCLLRRTAFCCNGEKSRVKFSRSADAPAYQQGQNQLYNELNLGRREEYDVLDKRRGRDPEMGGKPQRRKNPQEGLYNELQKDKMAEAYSEIGMKGERRRGKGHDGLYQGLSTATKDTYDALHMQALPPR

SEQ ID NO: 28462 - protein, 269 aa, synthetic construct
SIAETKLQKAGTYLCLLEKFFPDVIKIHWQEKKSNTILGSQEGNTMKTNDTYMKFSWLTVPEKSLDKEHRCIVRHENNKNGVDQEIIFPPIKTDVITMDPKDNCSKDANDTLLLQLTNTSAYYMYLLLLLKSVVYFAIITCCLLRRTAFCCNGEKSRVKFSRSADAPAYQQGQNQLYNELNLGRREEYDVLDKRRGRDPEMGGKPQRRKNPQEGLYNELQKDKMAEAYSEIGMKGERRRGKGHDGLYQGLSTATKDTYDALHMQALPPR

SEQ ID NO: 28463 - protein, 268 aa, synthetic construct
IAETKLQKAGTYLCLLEKFFPDVIKIHWQEKKSNTILGSQEGNTMKTNDTYMKFSWLTVPEKSLDKEHRCIVRHENNKNGVDQEIIFPPIKTDVITMDPKDNCSKDANDTLLLQLTNTSAYYMYLLLLLKSVVYFAIITCCLLRRTAFCCNGEKSRVKFSRSADAPAYQQGQNQLYNELNLGRREEYDVLDKRRGRDPEMGGKPQRRKNPQEGLYNELQKDKMAEAYSEIGMKGERRRGKGHDGLYQGLSTATKDTYDALHMQALPPR

SEQ ID NO: 28464 - protein, 267 aa, synthetic construct
AETKLQKAGTYLCLLEKFFPDVIKIHWQEKKSNTILGSQEGNTMKTNDTYMKFSWLTVPEKSLDKEHRCIVRHENNKNGVDQEIIFPPIKTDVITMDPKDNCSKDANDTLLLQLTNTSAYYMYLLLLLKSVVYFAIITCCLLRRTAFCCNGEKSRVKFSRSADAPAYQQGQNQLYNELNLGRREEYDVLDKRRGRDPEMGGKPQRRKNPQEGLYNELQKDKMAEAYSEIGMKGERRRGKGHDGLYQGLSTATKDTYDALHMQALPPR

SEQ ID NO: 28465 - protein, 266 aa, synthetic construct
ETKLQKAGTYLCLLEKFFPDVIKIHWQEKKSNTILGSQEGNTMKTNDTYMKFSWLTVPEKSLDKEHRCIVRHENNKNGVDQEIIFPPIKTDVITMDPKDNCSKDANDTLLLQLTNTSAYYMYLLLLLKSVVYFAIITCCLLRRTAFCCNGEKSRVKFSRSADAPAYQQGQNQLYNELNLGRREEYDVLDKRRGRDPEMGGKPQRRKNPQEGLYNELQKDKMAEAYSEIGMKGERRRGKGHDGLYQGLSTATKDTYDALHMQALPPR

SEQ ID NO: 28466 - protein, 265 aa, synthetic construct
TKLQKAGTYLCLLEKFFPDVIKIHWQEKKSNTILGSQEGNTMKTNDTYMKFSWLTVPEKSLDKEHRCIVRHENNKNGVDQEIIFPPIKTDVITMDPKDNCSKDANDTLLLQLTNTSAYYMYLLLLLKSVVYFAIITCCLLRRTAFCCNGEKSRVKFSRSADAPAYQQGQNQLYNELNLGRREEYDVLDKRRGRDPEMGGKPQRRKNPQEGLYNELQKDKMAEAYSEIGMKGERRRGKGHDGLYQGLSTATKDTYDALHMQALPPR

SEQ ID NO: 28467 - protein, 264 aa, synthetic construct
KLQKAGTYLCLLEKFFPDVIKIHWQEKKSNTILGSQEGNTMKTNDTYMKFSWLTVPEKSLDKEHRCIVRHENNKNGVDQEIIFPPIKTDVITMDPKDNCSKDANDTLLLQLTNTSAYYMYLLLLLKSVVYFAIITCCLLRRTAFCCNGEKSRVKFSRSADAPAYQQGQNQLYNELNLGRREEYDVLDKRRGRDPEMGGKPQRRKNPQEGLYNELQKDKMAEAYSEIGMKGERRRGKGHDGLYQGLSTATKDTYDALHMQALPPR

SEQ ID NO: 28468 - protein, 263 aa, synthetic construct
LQKAGTYLCLLEKFFPDVIKIHWQEKKSNTILGSQEGNTMKTNDTYMKFSWLTVPEKSLDKEHRCIVRHENNKNGVDQEIIFPPIKTDVITMDPKDNCSKDANDTLLLQLTNTSAYYMYLLLLLKSVVYFAIITCCLLRRTAFCCNGEKSRVKFSRSADAPAYQQGQNQLYNELNLGRREEYDVLDKRRGRDPEMGGKPQRRKNPQEGLYNELQKDKMAEAYSEIGMKGERRRGKGHDGLYQGLSTATKDTYDALHMQALPPR

SEQ ID NO: 28469 - protein, 262 aa, synthetic construct
QKAGTYLCLLEKFFPDVIKIHWQEKKSNTILGSQEGNTMKTNDTYMKFSWLTVPEKSLDKEHRCIVRHENNKNGVDQEIIFPPIKTDVITMDPKDNCSKDANDTLLLQLTNTSAYYMYLLLLLKSVVYFAIITCCLLRRTAFCCNGEKSRVKFSRSADAPAYQQGQNQLYNELNLGRREEYDVLDKRRGRDPEMGGKPQRRKNPQEGLYNELQKDKMAEAYSEIGMKGERRRGKGHDGLYQGLSTATKDTYDALHMQALPPR

SEQ ID NO: 28470 - protein, 261 aa, synthetic construct
KAGTYLCLLEKFFPDVIKIHWQEKKSNTILGSQEGNTMKTNDTYMKFSWLTVPEKSLDKEHRCIVRHENNKNGVDQEIIFPPIKTDVITMDPKDNCSKDANDTLLLQLTNTSAYYMYLLLLLKSVVYFAIITCCLLRRTAFCCNGEKSRVKFSRSADAPAYQQGQNQLYNELNLGRREEYDVLDKRRGRDPEMGGKPQRRKNPQEGLYNELQKDKMAEAYSEIGMKGERRRGKGHDGLYQGLSTATKDTYDALHMQALPPR

SEQ ID NO: 28471 - protein, 260 aa, synthetic construct
AGTYLCLLEKFFPDVIKIHWQEKKSNTILGSQEGNTMKTNDTYMKFSWLTVPEKSLDKEHRCIVRHENNKNGVDQEIIFPPIKTDVITMDPKDNCSKDANDTLLLQLTNTSAYYMYLLLLLKSVVYFAIITCCLLRRTAFCCNGEKSRVKFSRSADAPAYQQGQNQLYNELNLGRREEYDVLDKRRGRDPEMGGKPQRRKNPQEGLYNELQKDKMAEAYSEIGMKGERRRGKGHDGLYQGLSTATKDTYDALHMQALPPR

SEQ ID NO: 28472 - protein, 259 aa, synthetic construct
GTYLCLLEKFFPDVIKIHWQEKKSNTILGSQEGNTMKTNDTYMKFSWLTVPEKSLDKEHRCIVRHENNKNGVDQEIIFPPIKTDVITMDPKDNCSKDANDTLLLQLTNTSAYYMYLLLLLKSVVYFAIITCCLLRRTAFCCNGEKSRVKFSRSADAPAYQQGQNQLYNELNLGRREEYDVLDKRRGRDPEMGGKPQRRKNPQEGLYNELQKDKMAEAYSEIGMKGERRRGKGHDGLYQGLSTATKDTYDALHMQALPPR

SEQ ID NO: 28473 - protein, 258 aa, synthetic construct
TYLCLLEKFFPDVIKIHWQEKKSNTILGSQEGNTMKTNDTYMKFSWLTVPEKSLDKEHRCIVRHENNKNGVDQEIIFPPIKTDVITMDPKDNCSKDANDTLLLQLTNTSAYYMYLLLLLKSVVYFAIITCCLLRRTAFCCNGEKSRVKFSRSADAPAYQQGQNQLYNELNLGRREEYDVLDKRRGRDPEMGGKPQRRKNPQEGLYNELQKDKMAEAYSEIGMKGERRRGKGHDGLYQGLSTATKDTYDALHMQALPPR

SEQ ID NO: 28474 - protein, 257 aa, synthetic construct
YLCLLEKFFPDVIKIHWQEKKSNTILGSQEGNTMKTNDTYMKFSWLTVPEKSLDKEHRCIVRHENNKNGVDQEIIFPPIKTDVITMDPKDNCSKDANDTLLLQLTNTSAYYMYLLLLLKSVVYFAIITCCLLRRTAFCCNGEKSRVKFSRSADAPAYQQGQNQLYNELNLGRREEYDVLDKRRGRDPEMGGKPQRRKNPQEGLYNELQKDKMAEAYSEIGMKGERRRGKGHDGLYQGLSTATKDTYDALHMQALPPR

SEQ ID NO: 28475 - protein, 256 aa, synthetic construct
LCLLEKFFPDVIKIHWQEKKSNTILGSQEGNTMKTNDTYMKFSWLTVPEKSLDKEHRCIVRHENNKNGVDQEIIFPPIKTDVITMDPKDNCSKDANDTLLLQLTNTSAYYMYLLLLLKSVVYFAIITCCLLRRTAFCCNGEKSRVKFSRSADAPAYQQGQNQLYNELNLGRREEYDVLDKRRGRDPEMGGKPQRRKNPQEGLYNELQKDKMAEAYSEIGMKGERRRGKGHDGLYQGLSTATKDTYDALHMQALPPR

SEQ ID NO: 28476 - protein, 255 aa, synthetic construct
CLLEKFFPDVIKIHWQEKKSNTILGSQEGNTMKTNDTYMKFSWLTVPEKSLDKEHRCIVRHENNKNGVDQEIIFPPIKTDVITMDPKDNCSKDANDTLLLQLTNTSAYYMYLLLLLKSVVYFAIITCCLLRRTAFCCNGEKSRVKFSRSADAPAYQQGQNQLYNELNLGRREEYDVLDKRRGRDPEMGGKPQRRKNPQEGLYNELQKDKMAEAYSEIGMKGERRRGKGHDGLYQGLSTATKDTYDALHMQALPPR

SEQ ID NO: 28477 - protein, 254 aa, synthetic construct
LLEKFFPDVIKIHWQEKKSNTILGSQEGNTMKTNDTYMKFSWLTVPEKSLDKEHRCIVRHENNKNGVDQEIIFPPIKTDVITMDPKDNCSKDANDTLLLQLTNTSAYYMYLLLLLKSVVYFAIITCCLLRRTAFCCNGEKSRVKFSRSADAPAYQQGQNQLYNELNLGRREEYDVLDKRRGRDPEMGGKPQRRKNPQEGLYNELQKDKMAEAYSEIGMKGERRRGKGHDGLYQGLSTATKDTYDALHMQALPPR

SEQ ID NO: 28478 - protein, 253 aa, synthetic construct
LEKFFPDVIKIHWQEKKSNTILGSQEGNTMKTNDTYMKFSWLTVPEKSLDKEHRCIVRHENNKNGVDQEIIFPPIKTDVITMDPKDNCSKDANDTLLLQLTNTSAYYMYLLLLLKSVVYFAIITCCLLRRTAFCCNGEKSRVKFSRSADAPAYQQGQNQLYNELNLGRREEYDVLDKRRGRDPEMGGKPQRRKNPQEGLYNELQKDKMAEAYSEIGMKGERRRGKGHDGLYQGLSTATKDTYDALHMQALPPR

SEQ ID NO: 28479 - protein, 252 aa, synthetic construct
EKFFPDVIKIHWQEKKSNTILGSQEGNTMKTNDTYMKFSWLTVPEKSLDKEHRCIVRHENNKNGVDQEIIFPPIKTDVITMDPKDNCSKDANDTLLLQLTNTSAYYMYLLLLLKSVVYFAIITCCLLRRTAFCCNGEKSRVKFSRSADAPAYQQGQNQLYNELNLGRREEYDVLDKRRGRDPEMGGKPQRRKNPQEGLYNELQKDKMAEAYSEIGMKGERRRGKGHDGLYQGLSTATKDTYDALHMQALPPR

SEQ ID NO: 28480 - protein, 251 aa, synthetic construct
KFFPDVIKIHWQEKKSNTILGSQEGNTMKTNDTYMKFSWLTVPEKSLDKEHRCIVRHENNKNGVDQEIIFPPIKTDVITMDPKDNCSKDANDTLLLQLTNTSAYYMYLLLLLKSVVYFAIITCCLLRRTAFCCNGEKSRVKFSRSADAPAYQQGQNQLYNELNLGRREEYDVLDKRRGRDPEMGGKPQRRKNPQEGLYNELQKDKMAEAYSEIGMKGERRRGKGHDGLYQGLSTATKDTYDALHMQALPPR

SEQ ID NO: 28481 - protein, 250 aa, synthetic construct
FFPDVIKIHWQEKKSNTILGSQEGNTMKTNDTYMKFSWLTVPEKSLDKEHRCIVRHENNKNGVDQEIIFPPIKTDVITMDPKDNCSKDANDTLLLQLTNTSAYYMYLLLLLKSVVYFAIITCCLLRRTAFCCNGEKSRVKFSRSADAPAYQQGQNQLYNELNLGRREEYDVLDKRRGRDPEMGGKPQRRKNPQEGLYNELQKDKMAEAYSEIGMKGERRRGKGHDGLYQGLSTATKDTYDALHMQALPPR

SEQ ID NO: 28482 - protein, 249 aa, synthetic construct
FPDVIKIHWQEKKSNTILGSQEGNTMKTNDTYMKFSWLTVPEKSLDKEHRCIVRHENNKNGVDQEIIFPPIKTDVITMDPKDNCSKDANDTLLLQLTNTSAYYMYLLLLLKSVVYFAIITCCLLRRTAFCCNGEKSRVKFSRSADAPAYQQGQNQLYNELNLGRREEYDVLDKRRGRDPEMGGKPQRRKNPQEGLYNELQKDKMAEAYSEIGMKGERRRGKGHDGLYQGLSTATKDTYDALHMQALPPR

SEQ ID NO: 28483 - protein, 248 aa, synthetic construct
PDVIKIHWQEKKSNTILGSQEGNTMKTNDTYMKFSWLTVPEKSLDKEHRCIVRHENNKNGVDQEIIFPPIKTDVITMDPKDNCSKDANDTLLLQLTNTSAYYMYLLLLLKSVVYFAIITCCLLRRTAFCCNGEKSRVKFSRSADAPAYQQGQNQLYNELNLGRREEYDVLDKRRGRDPEMGGKPQRRKNPQEGLYNELQKDKMAEAYSEIGMKGERRRGKGHDGLYQGLSTATKDTYDALHMQALPPR

SEQ ID NO: 28484 - protein, 247 aa, synthetic construct
DVIKIHWQEKKSNTILGSQEGNTMKTNDTYMKFSWLTVPEKSLDKEHRCIVRHENNKNGVDQEIIFPPIKTDVITMDPKDNCSKDANDTLLLQLTNTSAYYMYLLLLLKSVVYFAIITCCLLRRTAFCCNGEKSRVKFSRSADAPAYQQGQNQLYNELNLGRREEYDVLDKRRGRDPEMGGKPQRRKNPQEGLYNELQKDKMAEAYSEIGMKGERRRGKGHDGLYQGLSTATKDTYDALHMQALPPR

SEQ ID NO: 28485 - protein, 246 aa, synthetic construct
VIKIHWQEKKSNTILGSQEGNTMKTNDTYMKFSWLTVPEKSLDKEHRCIVRHENNKNGVDQEIIFPPIKTDVITMDPKDNCSKDANDTLLLQLTNTSAYYMYLLLLLKSVVYFAIITCCLLRRTAFCCNGEKSRVKFSRSADAPAYQQGQNQLYNELNLGRREEYDVLDKRRGRDPEMGGKPQRRKNPQEGLYNELQKDKMAEAYSEIGMKGERRRGKGHDGLYQGLSTATKDTYDALHMQALPPR

SEQ ID NO: 28486 - protein, 245 aa, synthetic construct
IKIHWQEKKSNTILGSQEGNTMKTNDTYMKFSWLTVPEKSLDKEHRCIVRHENNKNGVDQEIIFPPIKTDVITMDPKDNCSKDANDTLLLQLTNTSAYYMYLLLLLKSVVYFAIITCCLLRRTAFCCNGEKSRVKFSRSADAPAYQQGQNQLYNELNLGRREEYDVLDKRRGRDPEMGGKPQRRKNPQEGLYNELQKDKMAEAYSEIGMKGERRRGKGHDGLYQGLSTATKDTYDALHMQALPPR

SEQ ID NO: 28487 - protein, 244 aa, synthetic construct
KIHWQEKKSNTILGSQEGNTMKTNDTYMKFSWLTVPEKSLDKEHRCIVRHENNKNGVDQEIIFPPIKTDVITMDPKDNCSKDANDTLLLQLTNTSAYYMYLLLLLKSVVYFAIITCCLLRRTAFCCNGEKSRVKFSRSADAPAYQQGQNQLYNELNLGRREEYDVLDKRRGRDPEMGGKPQRRKNPQEGLYNELQKDKMAEAYSEIGMKGERRRGKGHDGLYQGLSTATKDTYDALHMQALPPR

SEQ ID NO: 28488 - protein, 243 aa, synthetic construct
IHWQEKKSNTILGSQEGNTMKTNDTYMKFSWLTVPEKSLDKEHRCIVRHENNKNGVDQEIIFPPIKTDVITMDPKDNCSKDANDTLLLQLTNTSAYYMYLLLLLKSVVYFAIITCCLLRRTAFCCNGEKSRVKFSRSADAPAYQQGQNQLYNELNLGRREEYDVLDKRRGRDPEMGGKPQRRKNPQEGLYNELQKDKMAEAYSEIGMKGERRRGKGHDGLYQGLSTATKDTYDALHMQALPPR

SEQ ID NO: 28489 - protein, 242 aa, synthetic construct
HWQEKKSNTILGSQEGNTMKTNDTYMKFSWLTVPEKSLDKEHRCIVRHENNKNGVDQEIIFPPIKTDVITMDPKDNCSKDANDTLLLQLTNTSAYYMYLLLLLKSVVYFAIITCCLLRRTAFCCNGEKSRVKFSRSADAPAYQQGQNQLYNELNLGRREEYDVLDKRRGRDPEMGGKPQRRKNPQEGLYNELQKDKMAEAYSEIGMKGERRRGKGHDGLYQGLSTATKDTYDALHMQALPPR

SEQ ID NO: 28490 - protein, 241 aa, synthetic construct
WQEKKSNTILGSQEGNTMKTNDTYMKFSWLTVPEKSLDKEHRCIVRHENNKNGVDQEIIFPPIKTDVITMDPKDNCSKDANDTLLLQLTNTSAYYMYLLLLLKSVVYFAIITCCLLRRTAFCCNGEKSRVKFSRSADAPAYQQGQNQLYNELNLGRREEYDVLDKRRGRDPEMGGKPQRRKNPQEGLYNELQKDKMAEAYSEIGMKGERRRGKGHDGLYQGLSTATKDTYDALHMQALPPR

SEQ ID NO: 28491 - protein, 240 aa, synthetic construct
QEKKSNTILGSQEGNTMKTNDTYMKFSWLTVPEKSLDKEHRCIVRHENNKNGVDQEIIFPPIKTDVITMDPKDNCSKDANDTLLLQLTNTSAYYMYLLLLLKSVVYFAIITCCLLRRTAFCCNGEKSRVKFSRSADAPAYQQGQNQLYNELNLGRREEYDVLDKRRGRDPEMGGKPQRRKNPQEGLYNELQKDKMAEAYSEIGMKGERRRGKGHDGLYQGLSTATKDTYDALHMQALPPR

SEQ ID NO: 28492 - protein, 239 aa, synthetic construct
EKKSNTILGSQEGNTMKTNDTYMKFSWLTVPEKSLDKEHRCIVRHENNKNGVDQEIIFPPIKTDVITMDPKDNCSKDANDTLLLQLTNTSAYYMYLLLLLKSVVYFAIITCCLLRRTAFCCNGEKSRVKFSRSADAPAYQQGQNQLYNELNLGRREEYDVLDKRRGRDPEMGGKPQRRKNPQEGLYNELQKDKMAEAYSEIGMKGERRRGKGHDGLYQGLSTATKDTYDALHMQALPPR

SEQ ID NO: 28493 - protein, 238 aa, synthetic construct
KKSNTILGSQEGNTMKTNDTYMKFSWLTVPEKSLDKEHRCIVRHENNKNGVDQEIIFPPIKTDVITMDPKDNCSKDANDTLLLQLTNTSAYYMYLLLLLKSVVYFAIITCCLLRRTAFCCNGEKSRVKFSRSADAPAYQQGQNQLYNELNLGRREEYDVLDKRRGRDPEMGGKPQRRKNPQEGLYNELQKDKMAEAYSEIGMKGERRRGKGHDGLYQGLSTATKDTYDALHMQALPPR

SEQ ID NO: 28494 - protein, 237 aa, synthetic construct
KSNTILGSQEGNTMKTNDTYMKFSWLTVPEKSLDKEHRCIVRHENNKNGVDQEIIFPPIKTDVITMDPKDNCSKDANDTLLLQLTNTSAYYMYLLLLLKSVVYFAIITCCLLRRTAFCCNGEKSRVKFSRSADAPAYQQGQNQLYNELNLGRREEYDVLDKRRGRDPEMGGKPQRRKNPQEGLYNELQKDKMAEAYSEIGMKGERRRGKGHDGLYQGLSTATKDTYDALHMQALPPR

SEQ ID NO: 28495 - protein, 236 aa, synthetic construct
SNTILGSQEGNTMKTNDTYMKFSWLTVPEKSLDKEHRCIVRHENNKNGVDQEIIFPPIKTDVITMDPKDNCSKDANDTLLLQLTNTSAYYMYLLLLLKSVVYFAIITCCLLRRTAFCCNGEKSRVKFSRSADAPAYQQGQNQLYNELNLGRREEYDVLDKRRGRDPEMGGKPQRRKNPQEGLYNELQKDKMAEAYSEIGMKGERRRGKGHDGLYQGLSTATKDTYDALHMQALPPR

SEQ ID NO: 28496 - protein, 235 aa, synthetic construct
NTILGSQEGNTMKTNDTYMKFSWLTVPEKSLDKEHRCIVRHENNKNGVDQEIIFPPIKTDVITMDPKDNCSKDANDTLLLQLTNTSAYYMYLLLLLKSVVYFAIITCCLLRRTAFCCNGEKSRVKFSRSADAPAYQQGQNQLYNELNLGRREEYDVLDKRRGRDPEMGGKPQRRKNPQEGLYNELQKDKMAEAYSEIGMKGERRRGKGHDGLYQGLSTATKDTYDALHMQALPPR

SEQ ID NO: 28497 - protein, 234 aa, synthetic construct
TILGSQEGNTMKTNDTYMKFSWLTVPEKSLDKEHRCIVRHENNKNGVDQEIIFPPIKTDVITMDPKDNCSKDANDTLLLQLTNTSAYYMYLLLLLKSVVYFAIITCCLLRRTAFCCNGEKSRVKFSRSADAPAYQQGQNQLYNELNLGRREEYDVLDKRRGRDPEMGGKPQRRKNPQEGLYNELQKDKMAEAYSEIGMKGERRRGKGHDGLYQGLSTATKDTYDALHMQALPPR

SEQ ID NO: 28498 - protein, 233 aa, synthetic construct
ILGSQEGNTMKTNDTYMKFSWLTVPEKSLDKEHRCIVRHENNKNGVDQEIIFPPIKTDVITMDPKDNCSKDANDTLLLQLTNTSAYYMYLLLLLKSVVYFAIITCCLLRRTAFCCNGEKSRVKFSRSADAPAYQQGQNQLYNELNLGRREEYDVLDKRRGRDPEMGGKPQRRKNPQEGLYNELQKDKMAEAYSEIGMKGERRRGKGHDGLYQGLSTATKDTYDALHMQALPPR

SEQ ID NO: 28499 - protein, 232 aa, synthetic construct
LGSQEGNTMKTNDTYMKFSWLTVPEKSLDKEHRCIVRHENNKNGVDQEIIFPPIKTDVITMDPKDNCSKDANDTLLLQLTNTSAYYMYLLLLLKSVVYFAIITCCLLRRTAFCCNGEKSRVKFSRSADAPAYQQGQNQLYNELNLGRREEYDVLDKRRGRDPEMGGKPQRRKNPQEGLYNELQKDKMAEAYSEIGMKGERRRGKGHDGLYQGLSTATKDTYDALHMQALPPR

SEQ ID NO: 28500 - protein, 231 aa, synthetic construct
GSQEGNTMKTNDTYMKFSWLTVPEKSLDKEHRCIVRHENNKNGVDQEIIFPPIKTDVITMDPKDNCSKDANDTLLLQLTNTSAYYMYLLLLLKSVVYFAIITCCLLRRTAFCCNGEKSRVKFSRSADAPAYQQGQNQLYNELNLGRREEYDVLDKRRGRDPEMGGKPQRRKNPQEGLYNELQKDKMAEAYSEIGMKGERRRGKGHDGLYQGLSTATKDTYDALHMQALPPR

SEQ ID NO: 28501 - protein, 230 aa, synthetic construct
SQEGNTMKTNDTYMKFSWLTVPEKSLDKEHRCIVRHENNKNGVDQEIIFPPIKTDVITMDPKDNCSKDANDTLLLQLTNTSAYYMYLLLLLKSVVYFAIITCCLLRRTAFCCNGEKSRVKFSRSADAPAYQQGQNQLYNELNLGRREEYDVLDKRRGRDPEMGGKPQRRKNPQEGLYNELQKDKMAEAYSEIGMKGERRRGKGHDGLYQGLSTATKDTYDALHMQALPPR

SEQ ID NO: 28502 - protein, 229 aa, synthetic construct
QEGNTMKTNDTYMKFSWLTVPEKSLDKEHRCIVRHENNKNGVDQEIIFPPIKTDVITMDPKDNCSKDANDTLLLQLTNTSAYYMYLLLLLKSVVYFAIITCCLLRRTAFCCNGEKSRVKFSRSADAPAYQQGQNQLYNELNLGRREEYDVLDKRRGRDPEMGGKPQRRKNPQEGLYNELQKDKMAEAYSEIGMKGERRRGKGHDGLYQGLSTATKDTYDALHMQALPPR

SEQ ID NO: 28503 - protein, 228 aa, synthetic construct
EGNTMKTNDTYMKFSWLTVPEKSLDKEHRCIVRHENNKNGVDQEIIFPPIKTDVITMDPKDNCSKDANDTLLLQLTNTSAYYMYLLLLLKSVVYFAIITCCLLRRTAFCCNGEKSRVKFSRSADAPAYQQGQNQLYNELNLGRREEYDVLDKRRGRDPEMGGKPQRRKNPQEGLYNELQKDKMAEAYSEIGMKGERRRGKGHDGLYQGLSTATKDTYDALHMQALPPR

SEQ ID NO: 28504 - protein, 227 aa, synthetic construct
GNTMKTNDTYMKFSWLTVPEKSLDKEHRCIVRHENNKNGVDQEIIFPPIKTDVITMDPKDNCSKDANDTLLLQLTNTSAYYMYLLLLLKSVVYFAIITCCLLRRTAFCCNGEKSRVKFSRSADAPAYQQGQNQLYNELNLGRREEYDVLDKRRGRDPEMGGKPQRRKNPQEGLYNELQKDKMAEAYSEIGMKGERRRGKGHDGLYQGLSTATKDTYDALHMQALPPR

SEQ ID NO: 28505 - protein, 226 aa, synthetic construct
NTMKTNDTYMKFSWLTVPEKSLDKEHRCIVRHENNKNGVDQEIIFPPIKTDVITMDPKDNCSKDANDTLLLQLTNTSAYYMYLLLLLKSVVYFAIITCCLLRRTAFCCNGEKSRVKFSRSADAPAYQQGQNQLYNELNLGRREEYDVLDKRRGRDPEMGGKPQRRKNPQEGLYNELQKDKMAEAYSEIGMKGERRRGKGHDGLYQGLSTATKDTYDALHMQALPPR

SEQ ID NO: 28506 - protein, 225 aa, synthetic construct
TMKTNDTYMKFSWLTVPEKSLDKEHRCIVRHENNKNGVDQEIIFPPIKTDVITMDPKDNCSKDANDTLLLQLTNTSAYYMYLLLLLKSVVYFAIITCCLLRRTAFCCNGEKSRVKFSRSADAPAYQQGQNQLYNELNLGRREEYDVLDKRRGRDPEMGGKPQRRKNPQEGLYNELQKDKMAEAYSEIGMKGERRRGKGHDGLYQGLSTATKDTYDALHMQALPPR

SEQ ID NO: 28507 - protein, 224 aa, synthetic construct
MKTNDTYMKFSWLTVPEKSLDKEHRCIVRHENNKNGVDQEIIFPPIKTDVITMDPKDNCSKDANDTLLLQLTNTSAYYMYLLLLLKSVVYFAIITCCLLRRTAFCCNGEKSRVKFSRSADAPAYQQGQNQLYNELNLGRREEYDVLDKRRGRDPEMGGKPQRRKNPQEGLYNELQKDKMAEAYSEIGMKGERRRGKGHDGLYQGLSTATKDTYDALHMQALPPR

SEQ ID NO: 28508 - protein, 223 aa, synthetic construct
KTNDTYMKFSWLTVPEKSLDKEHRCIVRHENNKNGVDQEIIFPPIKTDVITMDPKDNCSKDANDTLLLQLTNTSAYYMYLLLLLKSVVYFAIITCCLLRRTAFCCNGEKSRVKFSRSADAPAYQQGQNQLYNELNLGRREEYDVLDKRRGRDPEMGGKPQRRKNPQEGLYNELQKDKMAEAYSEIGMKGERRRGKGHDGLYQGLSTATKDTYDALHMQALPPR

SEQ ID NO: 28509 - protein, 222 aa, synthetic construct
TNDTYMKFSWLTVPEKSLDKEHRCIVRHENNKNGVDQEIIFPPIKTDVITMDPKDNCSKDANDTLLLQLTNTSAYYMYLLLLLKSVVYFAIITCCLLRRTAFCCNGEKSRVKFSRSADAPAYQQGQNQLYNELNLGRREEYDVLDKRRGRDPEMGGKPQRRKNPQEGLYNELQKDKMAEAYSEIGMKGERRRGKGHDGLYQGLSTATKDTYDALHMQALPPR

SEQ ID NO: 28510 - protein, 221 aa, synthetic construct
NDTYMKFSWLTVPEKSLDKEHRCIVRHENNKNGVDQEIIFPPIKTDVITMDPKDNCSKDANDTLLLQLTNTSAYYMYLLLLLKSVVYFAIITCCLLRRTAFCCNGEKSRVKFSRSADAPAYQQGQNQLYNELNLGRREEYDVLDKRRGRDPEMGGKPQRRKNPQEGLYNELQKDKMAEAYSEIGMKGERRRGKGHDGLYQGLSTATKDTYDALHMQALPPR

SEQ ID NO: 28511 - protein, 220 aa, synthetic construct
DTYMKFSWLTVPEKSLDKEHRCIVRHENNKNGVDQEIIFPPIKTDVITMDPKDNCSKDANDTLLLQLTNTSAYYMYLLLLLKSVVYFAIITCCLLRRTAFCCNGEKSRVKFSRSADAPAYQQGQNQLYNELNLGRREEYDVLDKRRGRDPEMGGKPQRRKNPQEGLYNELQKDKMAEAYSEIGMKGERRRGKGHDGLYQGLSTATKDTYDALHMQALPPR

SEQ ID NO: 28512 - protein, 219 aa, synthetic construct
TYMKFSWLTVPEKSLDKEHRCIVRHENNKNGVDQEIIFPPIKTDVITMDPKDNCSKDANDTLLLQLTNTSAYYMYLLLLLKSVVYFAIITCCLLRRTAFCCNGEKSRVKFSRSADAPAYQQGQNQLYNELNLGRREEYDVLDKRRGRDPEMGGKPQRRKNPQEGLYNELQKDKMAEAYSEIGMKGERRRGKGHDGLYQGLSTATKDTYDALHMQALPPR

SEQ ID NO: 28513 - protein, 218 aa, synthetic construct
YMKFSWLTVPEKSLDKEHRCIVRHENNKNGVDQEIIFPPIKTDVITMDPKDNCSKDANDTLLLQLTNTSAYYMYLLLLLKSVVYFAIITCCLLRRTAFCCNGEKSRVKFSRSADAPAYQQGQNQLYNELNLGRREEYDVLDKRRGRDPEMGGKPQRRKNPQEGLYNELQKDKMAEAYSEIGMKGERRRGKGHDGLYQGLSTATKDTYDALHMQALPPR

SEQ ID NO: 28514 - protein, 217 aa, synthetic construct
MKFSWLTVPEKSLDKEHRCIVRHENNKNGVDQEIIFPPIKTDVITMDPKDNCSKDANDTLLLQLTNTSAYYMYLLLLLKSVVYFAIITCCLLRRTAFCCNGEKSRVKFSRSADAPAYQQGQNQLYNELNLGRREEYDVLDKRRGRDPEMGGKPQRRKNPQEGLYNELQKDKMAEAYSEIGMKGERRRGKGHDGLYQGLSTATKDTYDALHMQALPPR

SEQ ID NO: 28515 - protein, 216 aa, synthetic construct
KFSWLTVPEKSLDKEHRCIVRHENNKNGVDQEIIFPPIKTDVITMDPKDNCSKDANDTLLLQLTNTSAYYMYLLLLLKSVVYFAIITCCLLRRTAFCCNGEKSRVKFSRSADAPAYQQGQNQLYNELNLGRREEYDVLDKRRGRDPEMGGKPQRRKNPQEGLYNELQKDKMAEAYSEIGMKGERRRGKGHDGLYQGLSTATKDTYDALHMQALPPR

SEQ ID NO: 28516 - protein, 215 aa, synthetic construct
FSWLTVPEKSLDKEHRCIVRHENNKNGVDQEIIFPPIKTDVITMDPKDNCSKDANDTLLLQLTNTSAYYMYLLLLLKSVVYFAIITCCLLRRTAFCCNGEKSRVKFSRSADAPAYQQGQNQLYNELNLGRREEYDVLDKRRGRDPEMGGKPQRRKNPQEGLYNELQKDKMAEAYSEIGMKGERRRGKGHDGLYQGLSTATKDTYDALHMQALPPR

SEQ ID NO: 28517 - protein, 214 aa, synthetic construct
SWLTVPEKSLDKEHRCIVRHENNKNGVDQEIIFPPIKTDVITMDPKDNCSKDANDTLLLQLTNTSAYYMYLLLLLKSVVYFAIITCCLLRRTAFCCNGEKSRVKFSRSADAPAYQQGQNQLYNELNLGRREEYDVLDKRRGRDPEMGGKPQRRKNPQEGLYNELQKDKMAEAYSEIGMKGERRRGKGHDGLYQGLSTATKDTYDALHMQALPPR

SEQ ID NO: 28518 - protein, 213 aa, synthetic construct
WLTVPEKSLDKEHRCIVRHENNKNGVDQEIIFPPIKTDVITMDPKDNCSKDANDTLLLQLTNTSAYYMYLLLLLKSVVYFAIITCCLLRRTAFCCNGEKSRVKFSRSADAPAYQQGQNQLYNELNLGRREEYDVLDKRRGRDPEMGGKPQRRKNPQEGLYNELQKDKMAEAYSEIGMKGERRRGKGHDGLYQGLSTATKDTYDALHMQALPPR

SEQ ID NO: 28519 - protein, 212 aa, synthetic construct
LTVPEKSLDKEHRCIVRHENNKNGVDQEIIFPPIKTDVITMDPKDNCSKDANDTLLLQLTNTSAYYMYLLLLLKSVVYFAIITCCLLRRTAFCCNGEKSRVKFSRSADAPAYQQGQNQLYNELNLGRREEYDVLDKRRGRDPEMGGKPQRRKNPQEGLYNELQKDKMAEAYSEIGMKGERRRGKGHDGLYQGLSTATKDTYDALHMQALPPR

SEQ ID NO: 28520 - protein, 211 aa, synthetic construct
TVPEKSLDKEHRCIVRHENNKNGVDQEIIFPPIKTDVITMDPKDNCSKDANDTLLLQLTNTSAYYMYLLLLLKSVVYFAIITCCLLRRTAFCCNGEKSRVKFSRSADAPAYQQGQNQLYNELNLGRREEYDVLDKRRGRDPEMGGKPQRRKNPQEGLYNELQKDKMAEAYSEIGMKGERRRGKGHDGLYQGLSTATKDTYDALHMQALPPR

SEQ ID NO: 28521 - protein, 210 aa, synthetic construct
VPEKSLDKEHRCIVRHENNKNGVDQEIIFPPIKTDVITMDPKDNCSKDANDTLLLQLTNTSAYYMYLLLLLKSVVYFAIITCCLLRRTAFCCNGEKSRVKFSRSADAPAYQQGQNQLYNELNLGRREEYDVLDKRRGRDPEMGGKPQRRKNPQEGLYNELQKDKMAEAYSEIGMKGERRRGKGHDGLYQGLSTATKDTYDALHMQALPPR

SEQ ID NO: 28522 - protein, 209 aa, synthetic construct
PEKSLDKEHRCIVRHENNKNGVDQEIIFPPIKTDVITMDPKDNCSKDANDTLLLQLTNTSAYYMYLLLLLKSVVYFAIITCCLLRRTAFCCNGEKSRVKFSRSADAPAYQQGQNQLYNELNLGRREEYDVLDKRRGRDPEMGGKPQRRKNPQEGLYNELQKDKMAEAYSEIGMKGERRRGKGHDGLYQGLSTATKDTYDALHMQALPPR

SEQ ID NO: 28523 - protein, 208 aa, synthetic construct
EKSLDKEHRCIVRHENNKNGVDQEIIFPPIKTDVITMDPKDNCSKDANDTLLLQLTNTSAYYMYLLLLLKSVVYFAIITCCLLRRTAFCCNGEKSRVKFSRSADAPAYQQGQNQLYNELNLGRREEYDVLDKRRGRDPEMGGKPQRRKNPQEGLYNELQKDKMAEAYSEIGMKGERRRGKGHDGLYQGLSTATKDTYDALHMQALPPR

SEQ ID NO: 28524 - protein, 207 aa, synthetic construct
KSLDKEHRCIVRHENNKNGVDQEIIFPPIKTDVITMDPKDNCSKDANDTLLLQLTNTSAYYMYLLLLLKSVVYFAIITCCLLRRTAFCCNGEKSRVKFSRSADAPAYQQGQNQLYNELNLGRREEYDVLDKRRGRDPEMGGKPQRRKNPQEGLYNELQKDKMAEAYSEIGMKGERRRGKGHDGLYQGLSTATKDTYDALHMQALPPR

SEQ ID NO: 28525 - protein, 206 aa, synthetic construct
SLDKEHRCIVRHENNKNGVDQEIIFPPIKTDVITMDPKDNCSKDANDTLLLQLTNTSAYYMYLLLLLKSVVYFAIITCCLLRRTAFCCNGEKSRVKFSRSADAPAYQQGQNQLYNELNLGRREEYDVLDKRRGRDPEMGGKPQRRKNPQEGLYNELQKDKMAEAYSEIGMKGERRRGKGHDGLYQGLSTATKDTYDALHMQALPPR

SEQ ID NO: 28526 - protein, 205 aa, synthetic construct
LDKEHRCIVRHENNKNGVDQEIIFPPIKTDVITMDPKDNCSKDANDTLLLQLTNTSAYYMYLLLLLKSVVYFAIITCCLLRRTAFCCNGEKSRVKFSRSADAPAYQQGQNQLYNELNLGRREEYDVLDKRRGRDPEMGGKPQRRKNPQEGLYNELQKDKMAEAYSEIGMKGERRRGKGHDGLYQGLSTATKDTYDALHMQALPPR

SEQ ID NO: 28527 - protein, 204 aa, synthetic construct
DKEHRCIVRHENNKNGVDQEIIFPPIKTDVITMDPKDNCSKDANDTLLLQLTNTSAYYMYLLLLLKSVVYFAIITCCLLRRTAFCCNGEKSRVKFSRSADAPAYQQGQNQLYNELNLGRREEYDVLDKRRGRDPEMGGKPQRRKNPQEGLYNELQKDKMAEAYSEIGMKGERRRGKGHDGLYQGLSTATKDTYDALHMQALPPR

SEQ ID NO: 28528 - protein, 203 aa, synthetic construct
KEHRCIVRHENNKNGVDQEIIFPPIKTDVITMDPKDNCSKDANDTLLLQLTNTSAYYMYLLLLLKSVVYFAIITCCLLRRTAFCCNGEKSRVKFSRSADAPAYQQGQNQLYNELNLGRREEYDVLDKRRGRDPEMGGKPQRRKNPQEGLYNELQKDKMAEAYSEIGMKGERRRGKGHDGLYQGLSTATKDTYDALHMQALPPR

SEQ ID NO: 28529 - protein, 202 aa, synthetic construct
EHRCIVRHENNKNGVDQEIIFPPIKTDVITMDPKDNCSKDANDTLLLQLTNTSAYYMYLLLLLKSVVYFAIITCCLLRRTAFCCNGEKSRVKFSRSADAPAYQQGQNQLYNELNLGRREEYDVLDKRRGRDPEMGGKPQRRKNPQEGLYNELQKDKMAEAYSEIGMKGERRRGKGHDGLYQGLSTATKDTYDALHMQALPPR

SEQ ID NO: 28530 - protein, 201 aa, synthetic construct
HRCIVRHENNKNGVDQEIIFPPIKTDVITMDPKDNCSKDANDTLLLQLTNTSAYYMYLLLLLKSVVYFAIITCCLLRRTAFCCNGEKSRVKFSRSADAPAYQQGQNQLYNELNLGRREEYDVLDKRRGRDPEMGGKPQRRKNPQEGLYNELQKDKMAEAYSEIGMKGERRRGKGHDGLYQGLSTATKDTYDALHMQALPPR

SEQ ID NO: 28531 - protein, 200 aa, synthetic construct
RCIVRHENNKNGVDQEIIFPPIKTDVITMDPKDNCSKDANDTLLLQLTNTSAYYMYLLLLLKSVVYFAIITCCLLRRTAFCCNGEKSRVKFSRSADAPAYQQGQNQLYNELNLGRREEYDVLDKRRGRDPEMGGKPQRRKNPQEGLYNELQKDKMAEAYSEIGMKGERRRGKGHDGLYQGLSTATKDTYDALHMQALPPR

SEQ ID NO: 28532 - protein, 199 aa, synthetic construct
CIVRHENNKNGVDQEIIFPPIKTDVITMDPKDNCSKDANDTLLLQLTNTSAYYMYLLLLLKSVVYFAIITCCLLRRTAFCCNGEKSRVKFSRSADAPAYQQGQNQLYNELNLGRREEYDVLDKRRGRDPEMGGKPQRRKNPQEGLYNELQKDKMAEAYSEIGMKGERRRGKGHDGLYQGLSTATKDTYDALHMQALPPR

SEQ ID NO: 28533 - protein, 198 aa, synthetic construct
IVRHENNKNGVDQEIIFPPIKTDVITMDPKDNCSKDANDTLLLQLTNTSAYYMYLLLLLKSVVYFAIITCCLLRRTAFCCNGEKSRVKFSRSADAPAYQQGQNQLYNELNLGRREEYDVLDKRRGRDPEMGGKPQRRKNPQEGLYNELQKDKMAEAYSEIGMKGERRRGKGHDGLYQGLSTATKDTYDALHMQALPPR

SEQ ID NO: 28534 - protein, 197 aa, synthetic construct
VRHENNKNGVDQEIIFPPIKTDVITMDPKDNCSKDANDTLLLQLTNTSAYYMYLLLLLKSVVYFAIITCCLLRRTAFCCNGEKSRVKFSRSADAPAYQQGQNQLYNELNLGRREEYDVLDKRRGRDPEMGGKPQRRKNPQEGLYNELQKDKMAEAYSEIGMKGERRRGKGHDGLYQGLSTATKDTYDALHMQALPPR

SEQ ID NO: 28535 - protein, 196 aa, synthetic construct
RHENNKNGVDQEIIFPPIKTDVITMDPKDNCSKDANDTLLLQLTNTSAYYMYLLLLLKSVVYFAIITCCLLRRTAFCCNGEKSRVKFSRSADAPAYQQGQNQLYNELNLGRREEYDVLDKRRGRDPEMGGKPQRRKNPQEGLYNELQKDKMAEAYSEIGMKGERRRGKGHDGLYQGLSTATKDTYDALHMQALPPR

SEQ ID NO: 28536 - protein, 195 aa, synthetic construct
HENNKNGVDQEIIFPPIKTDVITMDPKDNCSKDANDTLLLQLTNTSAYYMYLLLLLKSVVYFAIITCCLLRRTAFCCNGEKSRVKFSRSADAPAYQQGQNQLYNELNLGRREEYDVLDKRRGRDPEMGGKPQRRKNPQEGLYNELQKDKMAEAYSEIGMKGERRRGKGHDGLYQGLSTATKDTYDALHMQALPPR

SEQ ID NO: 28537 - protein, 194 aa, synthetic construct
ENNKNGVDQEIIFPPIKTDVITMDPKDNCSKDANDTLLLQLTNTSAYYMYLLLLLKSVVYFAIITCCLLRRTAFCCNGEKSRVKFSRSADAPAYQQGQNQLYNELNLGRREEYDVLDKRRGRDPEMGGKPQRRKNPQEGLYNELQKDKMAEAYSEIGMKGERRRGKGHDGLYQGLSTATKDTYDALHMQALPPR

SEQ ID NO: 28538 - protein, 193 aa, synthetic construct
NNKNGVDQEIIFPPIKTDVITMDPKDNCSKDANDTLLLQLTNTSAYYMYLLLLLKSVVYFAIITCCLLRRTAFCCNGEKSRVKFSRSADAPAYQQGQNQLYNELNLGRREEYDVLDKRRGRDPEMGGKPQRRKNPQEGLYNELQKDKMAEAYSEIGMKGERRRGKGHDGLYQGLSTATKDTYDALHMQALPPR

SEQ ID NO: 28539 - protein, 192 aa, synthetic construct
NKNGVDQEIIFPPIKTDVITMDPKDNCSKDANDTLLLQLTNTSAYYMYLLLLLKSVVYFAIITCCLLRRTAFCCNGEKSRVKFSRSADAPAYQQGQNQLYNELNLGRREEYDVLDKRRGRDPEMGGKPQRRKNPQEGLYNELQKDKMAEAYSEIGMKGERRRGKGHDGLYQGLSTATKDTYDALHMQALPPR

SEQ ID NO: 28540 - protein, 191 aa, synthetic construct
KNGVDQEIIFPPIKTDVITMDPKDNCSKDANDTLLLQLTNTSAYYMYLLLLLKSVVYFAIITCCLLRRTAFCCNGEKSRVKFSRSADAPAYQQGQNQLYNELNLGRREEYDVLDKRRGRDPEMGGKPQRRKNPQEGLYNELQKDKMAEAYSEIGMKGERRRGKGHDGLYQGLSTATKDTYDALHMQALPPR

SEQ ID NO: 28541 - protein, 190 aa, synthetic construct
NGVDQEIIFPPIKTDVITMDPKDNCSKDANDTLLLQLTNTSAYYMYLLLLLKSVVYFAIITCCLLRRTAFCCNGEKSRVKFSRSADAPAYQQGQNQLYNELNLGRREEYDVLDKRRGRDPEMGGKPQRRKNPQEGLYNELQKDKMAEAYSEIGMKGERRRGKGHDGLYQGLSTATKDTYDALHMQALPPR

SEQ ID NO: 28542 - protein, 189 aa, synthetic construct
GVDQEIIFPPIKTDVITMDPKDNCSKDANDTLLLQLTNTSAYYMYLLLLLKSVVYFAIITCCLLRRTAFCCNGEKSRVKFSRSADAPAYQQGQNQLYNELNLGRREEYDVLDKRRGRDPEMGGKPQRRKNPQEGLYNELQKDKMAEAYSEIGMKGERRRGKGHDGLYQGLSTATKDTYDALHMQALPPR

SEQ ID NO: 28543 - protein, 188 aa, synthetic construct
VDQEIIFPPIKTDVITMDPKDNCSKDANDTLLLQLTNTSAYYMYLLLLLKSVVYFAIITCCLLRRTAFCCNGEKSRVKFSRSADAPAYQQGQNQLYNELNLGRREEYDVLDKRRGRDPEMGGKPQRRKNPQEGLYNELQKDKMAEAYSEIGMKGERRRGKGHDGLYQGLSTATKDTYDALHMQALPPR

SEQ ID NO: 28544 - protein, 187 aa, synthetic construct
DQEIIFPPIKTDVITMDPKDNCSKDANDTLLLQLTNTSAYYMYLLLLLKSVVYFAIITCCLLRRTAFCCNGEKSRVKFSRSADAPAYQQGQNQLYNELNLGRREEYDVLDKRRGRDPEMGGKPQRRKNPQEGLYNELQKDKMAEAYSEIGMKGERRRGKGHDGLYQGLSTATKDTYDALHMQALPPR

SEQ ID NO: 28545 - protein, 186 aa, synthetic construct
QEIIFPPIKTDVITMDPKDNCSKDANDTLLLQLTNTSAYYMYLLLLLKSVVYFAIITCCLLRRTAFCCNGEKSRVKFSRSADAPAYQQGQNQLYNELNLGRREEYDVLDKRRGRDPEMGGKPQRRKNPQEGLYNELQKDKMAEAYSEIGMKGERRRGKGHDGLYQGLSTATKDTYDALHMQALPPR

SEQ ID NO: 28546 - protein, 266 aa, synthetic construct; identical to SEQ ID NO: 27977

SEQ ID NO: 28547 - protein, 265 aa, synthetic construct
QPHTKPSVFVMKNGTNVACLVKEFYPKDIRINLVSSKKITEFDPAIVISPSGKYNAVKLGKYEDSNSVTCSVQHDNKTVHSTDFEVKTDSTDHVKPKETENTKQPSKSCHKPKAIVHTEKVNMMSLTVLGLRMLFAKTVAVNFLLTAKLFFLRVKFSRSADAPAYQQGQNQLYNELNLGRREEYDVLDKRRGRDPEMGGKPQRRKNPQEGLYNELQKDKMAEAYSEIGMKGERRRGKGHDGLYQGLSTATKDTYDALHMQALPPR

SEQ ID NO: 28548 - protein, 264 aa, synthetic construct
PHTKPSVFVMKNGTNVACLVKEFYPKDIRINLVSSKKITEFDPAIVISPSGKYNAVKLGKYEDSNSVTCSVQHDNKTVHSTDFEVKTDSTDHVKPKETENTKQPSKSCHKPKAIVHTEKVNMMSLTVLGLRMLFAKTVAVNFLLTAKLFFLRVKFSRSADAPAYQQGQNQLYNELNLGRREEYDVLDKRRGRDPEMGGKPQRRKNPQEGLYNELQKDKMAEAYSEIGMKGERRRGKGHDGLYQGLSTATKDTYDALHMQALPPR

SEQ ID NO: 28549 - protein, 263 aa, synthetic construct
HTKPSVFVMKNGTNVACLVKEFYPKDIRINLVSSKKITEFDPAIVISPSGKYNAVKLGKYEDSNSVTCSVQHDNKTVHSTDFEVKTDSTDHVKPKETENTKQPSKSCHKPKAIVHTEKVNMMSLTVLGLRMLFAKTVAVNFLLTAKLFFLRVKFSRSADAPAYQQGQNQLYNELNLGRREEYDVLDKRRGRDPEMGGKPQRRKNPQEGLYNELQKDKMAEAYSEIGMKGERRRGKGHDGLYQGLSTATKDTYDALHMQALPPR

SEQ ID NO: 28550 - protein, 262 aa, synthetic construct
TKPSVFVMKNGTNVACLVKEFYPKDIRINLVSSKKITEFDPAIVISPSGKYNAVKLGKYEDSNSVTCSVQHDNKTVHSTDFEVKTDSTDHVKPKETENTKQPSKSCHKPKAIVHTEKVNMMSLTVLGLRMLFAKTVAVNFLLTAKLFFLRVKFSRSADAPAYQQGQNQLYNELNLGRREEYDVLDKRRGRDPEMGGKPQRRKNPQEGLYNELQKDKMAEAYSEIGMKGERRRGKGHDGLYQGLSTATKDTYDALHMQALPPR

SEQ ID NO: 28551 - protein, 261 aa, synthetic construct
KPSVFVMKNGTNVACLVKEFYPKDIRINLVSSKKITEFDPAIVISPSGKYNAVKLGKYEDSNSVTCSVQHDNKTVHSTDFEVKTDSTDHVKPKETENTKQPSKSCHKPKAIVHTEKVNMMSLTVLGLRMLFAKTVAVNFLLTAKLFFLRVKFSRSADAPAYQQGQNQLYNELNLGRREEYDVLDKRRGRDPEMGGKPQRRKNPQEGLYNELQKDKMAEAYSEIGMKGERRRGKGHDGLYQGLSTATKDTYDALHMQALPPR

SEQ ID NO: 28552 - protein, 259 aa, synthetic construct
SVFVMKNGTNVACLVKEFYPKDIRINLVSSKKITEFDPAIVISPSGKYNAVKLGKYEDSNSVTCSVQHDNKTVHSTDFEVKTDSTDHVKPKETENTKQPSKSCHKPKAIVHTEKVNMMSLTVLGLRMLFAKTVAVNFLLTAKLFFLRVKFSRSADAPAYQQGQNQLYNELNLGRREEYDVLDKRRGRDPEMGGKPQRRKNPQEGLYNELQKDKMAEAYSEIGMKGERRRGKGHDGLYQGLSTATKDTYDALHMQALPPR

SEQ ID NO: 28553 - protein, 258 aa, synthetic construct
VFVMKNGTNVACLVKEFYPKDIRINLVSSKKITEFDPAIVISPSGKYNAVKLGKYEDSNSVTCSVQHDNKTVHSTDFEVKTDSTDHVKPKETENTKQPSKSCHKPKAIVHTEKVNMMSLTVLGLRMLFAKTVAVNFLLTAKLFFLRVKFSRSADAPAYQQGQNQLYNELNLGRREEYDVLDKRRGRDPEMGGKPQRRKNPQEGLYNELQKDKMAEAYSEIGMKGERRRGKGHDGLYQGLSTATKDTYDALHMQALPPR

SEQ ID NO: 28554 - protein, 257 aa, synthetic construct
FVMKNGTNVACLVKEFYPKDIRINLVSSKKITEFDPAIVISPSGKYNAVKLGKYEDSNSVTCSVQHDNKTVHSTDFEVKTDSTDHVKPKETENTKQPSKSCHKPKAIVHTEKVNMMSLTVLGLRMLFAKTVAVNFLLTAKLFFLRVKFSRSADAPAYQQGQNQLYNELNLGRREEYDVLDKRRGRDPEMGGKPQRRKNPQEGLYNELQKDKMAEAYSEIGMKGERRRGKGHDGLYQGLSTATKDTYDALHMQALPPR

SEQ ID NO: 28555 - protein, 256 aa, synthetic construct
VMKNGTNVACLVKEFYPKDIRINLVSSKKITEFDPAIVISPSGKYNAVKLGKYEDSNSVTCSVQHDNKTVHSTDFEVKTDSTDHVKPKETENTKQPSKSCHKPKAIVHTEKVNMMSLTVLGLRMLFAKTVAVNFLLTAKLFFLRVKFSRSADAPAYQQGQNQLYNELNLGRREEYDVLDKRRGRDPEMGGKPQRRKNPQEGLYNELQKDKMAEAYSEIGMKGERRRGKGHDGLYQGLSTATKDTYDALHMQALPPR

SEQ ID NO: 28556 - protein, 255 aa, synthetic construct
MKNGTNVACLVKEFYPKDIRINLVSSKKITEFDPAIVISPSGKYNAVKLGKYEDSNSVTCSVQHDNKTVHSTDFEVKTDSTDHVKPKETENTKQPSKSCHKPKAIVHTEKVNMMSLTVLGLRMLFAKTVAVNFLLTAKLFFLRVKFSRSADAPAYQQGQNQLYNELNLGRREEYDVLDKRRGRDPEMGGKPQRRKNPQEGLYNELQKDKMAEAYSEIGMKGERRRGKGHDGLYQGLSTATKDTYDALHMQALPPR

SEQ ID NO: 28557 - protein, 254 aa, synthetic construct
KNGTNVACLVKEFYPKDIRINLVSSKKITEFDPAIVISPSGKYNAVKLGKYEDSNSVTCSVQHDNKTVHSTDFEVKTDSTDHVKPKETENTKQPSKSCHKPKAIVHTEKVNMMSLTVLGLRMLFAKTVAVNFLLTAKLFFLRVKFSRSADAPAYQQGQNQLYNELNLGRREEYDVLDKRRGRDPEMGGKPQRRKNPQEGLYNELQKDKMAEAYSEIGMKGERRRGKGHDGLYQGLSTATKDTYDALHMQALPPR

SEQ ID NO: 28558 - protein, 253 aa, synthetic construct
NGTNVACLVKEFYPKDIRINLVSSKKITEFDPAIVISPSGKYNAVKLGKYEDSNSVTCSVQHDNKTVHSTDFEVKTDSTDHVKPKETENTKQPSKSCHKPKAIVHTEKVNMMSLTVLGLRMLFAKTVAVNFLLTAKLFFLRVKFSRSADAPAYQQGQNQLYNELNLGRREEYDVLDKRRGRDPEMGGKPQRRKNPQEGLYNELQKDKMAEAYSEIGMKGERRRGKGHDGLYQGLSTATKDTYDALHMQALPPR

SEQ ID NO: 28559 - protein, 252 aa, synthetic construct
GTNVACLVKEFYPKDIRINLVSSKKITEFDPAIVISPSGKYNAVKLGKYEDSNSVTCSVQHDNKTVHSTDFEVKTDSTDHVKPKETENTKQPSKSCHKPKAIVHTEKVNMMSLTVLGLRMLFAKTVAVNFLLTAKLFFLRVKFSRSADAPAYQQGQNQLYNELNLGRREEYDVLDKRRGRDPEMGGKPQRRKNPQEGLYNELQKDKMAEAYSEIGMKGERRRGKGHDGLYQGLSTATKDTYDALHMQALPPR

SEQ ID NO: 28560 - protein, 251 aa, synthetic construct
TNVACLVKEFYPKDIRINLVSSKKITEFDPAIVISPSGKYNAVKLGKYEDSNSVTCSVQHDNKTVHSTDFEVKTDSTDHVKPKETENTKQPSKSCHKPKAIVHTEKVNMMSLTVLGLRMLFAKTVAVNFLLTAKLFFLRVKFSRSADAPAYQQGQNQLYNELNLGRREEYDVLDKRRGRDPEMGGKPQRRKNPQEGLYNELQKDKMAEAYSEIGMKGERRRGKGHDGLYQGLSTATKDTYDALHMQALPPR

SEQ ID NO: 28561 - protein, 250 aa, synthetic construct
NVACLVKEFYPKDIRINLVSSKKITEFDPAIVISPSGKYNAVKLGKYEDSNSVTCSVQHDNKTVHSTDFEVKTDSTDHVKPKETENTKQPSKSCHKPKAIVHTEKVNMMSLTVLGLRMLFAKTVAVNFLLTAKLFFLRVKFSRSADAPAYQQGQNQLYNELNLGRREEYDVLDKRRGRDPEMGGKPQRRKNPQEGLYNELQKDKMAEAYSEIGMKGERRRGKGHDGLYQGLSTATKDTYDALHMQALPPR

SEQ ID NO: 28562 - protein, 249 aa, synthetic construct
VACLVKEFYPKDIRINLVSSKKITEFDPAIVISPSGKYNAVKLGKYEDSNSVTCSVQHDNKTVHSTDFEVKTDSTDHVKPKETENTKQPSKSCHKPKAIVHTEKVNMMSLTVLGLRMLFAKTVAVNFLLTAKLFFLRVKFSRSADAPAYQQGQNQLYNELNLGRREEYDVLDKRRGRDPEMGGKPQRRKNPQEGLYNELQKDKMAEAYSEIGMKGERRRGKGHDGLYQGLSTATKDTYDALHMQALPPR

SEQ ID NO: 28563 - protein, 248 aa, synthetic construct
ACLVKEFYPKDIRINLVSSKKITEFDPAIVISPSGKYNAVKLGKYEDSNSVTCSVQHDNKTVHSTDFEVKTDSTDHVKPKETENTKQPSKSCHKPKAIVHTEKVNMMSLTVLGLRMLFAKTVAVNFLLTAKLFFLRVKFSRSADAPAYQQGQNQLYNELNLGRREEYDVLDKRRGRDPEMGGKPQRRKNPQEGLYNELQKDKMAEAYSEIGMKGERRRGKGHDGLYQGLSTATKDTYDALHMQALPPR

SEQ ID NO: 28564 - protein, 247 aa, synthetic construct
CLVKEFYPKDIRINLVSSKKITEFDPAIVISPSGKYNAVKLGKYEDSNSVTCSVQHDNKTVHSTDFEVKTDSTDHVKPKETENTKQPSKSCHKPKAIVHTEKVNMMSLTVLGLRMLFAKTVAVNFLLTAKLFFLRVKFSRSADAPAYQQGQNQLYNELNLGRREEYDVLDKRRGRDPEMGGKPQRRKNPQEGLYNELQKDKMAEAYSEIGMKGERRRGKGHDGLYQGLSTATKDTYDALHMQALPPR

SEQ ID NO: 28565 - protein, 246 aa, synthetic construct
LVKEFYPKDIRINLVSSKKITEFDPAIVISPSGKYNAVKLGKYEDSNSVTCSVQHDNKTVHSTDFEVKTDSTDHVKPKETENTKQPSKSCHKPKAIVHTEKVNMMSLTVLGLRMLFAKTVAVNFLLTAKLFFLRVKFSRSADAPAYQQGQNQLYNELNLGRREEYDVLDKRRGRDPEMGGKPQRRKNPQEGLYNELQKDKMAEAYSEIGMKGERRRGKGHDGLYQGLSTATKDTYDALHMQALPPR

SEQ ID NO: 28566 - protein, 245 aa, synthetic construct
VKEFYPKDIRINLVSSKKITEFDPAIVISPSGKYNAVKLGKYEDSNSVTCSVQHDNKTVHSTDFEVKTDSTDHVKPKETENTKQPSKSCHKPKAIVHTEKVNMMSLTVLGLRMLFAKTVAVNFLLTAKLFFLRVKFSRSADAPAYQQGQNQLYNELNLGRREEYDVLDKRRGRDPEMGGKPQRRKNPQEGLYNELQKDKMAEAYSEIGMKGERRRGKGHDGLYQGLSTATKDTYDALHMQALPPR

SEQ ID NO: 28567 - protein, 244 aa, synthetic construct
KEFYPKDIRINLVSSKKITEFDPAIVISPSGKYNAVKLGKYEDSNSVTCSVQHDNKTVHSTDFEVKTDSTDHVKPKETENTKQPSKSCHKPKAIVHTEKVNMMSLTVLGLRMLFAKTVAVNFLLTAKLFFLRVKFSRSADAPAYQQGQNQLYNELNLGRREEYDVLDKRRGRDPEMGGKPQRRKNPQEGLYNELQKDKMAEAYSEIGMKGERRRGKGHDGLYQGLSTATKDTYDALHMQALPPR

SEQ ID NO: 28568 - protein, 243 aa, synthetic construct
EFYPKDIRINLVSSKKITEFDPAIVISPSGKYNAVKLGKYEDSNSVTCSVQHDNKTVHSTDFEVKTDSTDHVKPKETENTKQPSKSCHKPKAIVHTEKVNMMSLTVLGLRMLFAKTVAVNFLLTAKLFFLRVKFSRSADAPAYQQGQNQLYNELNLGRREEYDVLDKRRGRDPEMGGKPQRRKNPQEGLYNELQKDKMAEAYSEIGMKGERRRGKGHDGLYQGLSTATKDTYDALHMQALPPR

SEQ ID NO: 28569 - protein, 242 aa, synthetic construct
FYPKDIRINLVSSKKITEFDPAIVISPSGKYNAVKLGKYEDSNSVTCSVQHDNKTVHSTDFEVKTDSTDHVKPKETENTKQPSKSCHKPKAIVHTEKVNMMSLTVLGLRMLFAKTVAVNFLLTAKLFFLRVKFSRSADAPAYQQGQNQLYNELNLGRREEYDVLDKRRGRDPEMGGKPQRRKNPQEGLYNELQKDKMAEAYSEIGMKGERRRGKGHDGLYQGLSTATKDTYDALHMQALPPR

SEQ ID NO: 28570 - protein, 241 aa, synthetic construct
YPKDIRINLVSSKKITEFDPAIVISPSGKYNAVKLGKYEDSNSVTCSVQHDNKTVHSTDFEVKTDSTDHVKPKETENTKQPSKSCHKPKAIVHTEKVNMMSLTVLGLRMLFAKTVAVNFLLTAKLFFLRVKFSRSADAPAYQQGQNQLYNELNLGRREEYDVLDKRRGRDPEMGGKPQRRKNPQEGLYNELQKDKMAEAYSEIGMKGERRRGKGHDGLYQGLSTATKDTYDALHMQALPPR

SEQ ID NO: 28571 - protein, 240 aa, synthetic construct
PKDIRINLVSSKKITEFDPAIVISPSGKYNAVKLGKYEDSNSVTCSVQHDNKTVHSTDFEVKTDSTDHVKPKETENTKQPSKSCHKPKAIVHTEKVNMMSLTVLGLRMLFAKTVAVNFLLTAKLFFLRVKFSRSADAPAYQQGQNQLYNELNLGRREEYDVLDKRRGRDPEMGGKPQRRKNPQEGLYNELQKDKMAEAYSEIGMKGERRRGKGHDGLYQGLSTATKDTYDALHMQALPPR

SEQ ID NO: 28572 - protein, 239 aa, synthetic construct
KDIRINLVSSKKITEFDPAIVISPSGKYNAVKLGKYEDSNSVTCSVQHDNKTVHSTDFEVKTDSTDHVKPKETENTKQPSKSCHKPKAIVHTEKVNMMSLTVLGLRMLFAKTVAVNFLLTAKLFFLRVKFSRSADAPAYQQGQNQLYNELNLGRREEYDVLDKRRGRDPEMGGKPQRRKNPQEGLYNELQKDKMAEAYSEIGMKGERRRGKGHDGLYQGLSTATKDTYDALHMQALPPR

SEQ ID NO: 28573 - protein, 238 aa, synthetic construct
DIRINLVSSKKITEFDPAIVISPSGKYNAVKLGKYEDSNSVTCSVQHDNKTVHSTDFEVKTDSTDHVKPKETENTKQPSKSCHKPKAIVHTEKVNMMSLTVLGLRMLFAKTVAVNFLLTAKLFFLRVKFSRSADAPAYQQGQNQLYNELNLGRREEYDVLDKRRGRDPEMGGKPQRRKNPQEGLYNELQKDKMAEAYSEIGMKGERRRGKGHDGLYQGLSTATKDTYDALHMQALPPR

SEQ ID NO: 28574 - protein, 237 aa, synthetic construct
IRINLVSSKKITEFDPAIVISPSGKYNAVKLGKYEDSNSVTCSVQHDNKTVHSTDFEVKTDSTDHVKPKETENTKQPSKSCHKPKAIVHTEKVNMMSLTVLGLRMLFAKTVAVNFLLTAKLFFLRVKFSRSADAPAYQQGQNQLYNELNLGRREEYDVLDKRRGRDPEMGGKPQRRKNPQEGLYNELQKDKMAEAYSEIGMKGERRRGKGHDGLYQGLSTATKDTYDALHMQALPPR

SEQ ID NO: 28575 - protein, 236 aa, synthetic construct
RINLVSSKKITEFDPAIVISPSGKYNAVKLGKYEDSNSVTCSVQHDNKTVHSTDFEVKTDSTDHVKPKETENTKQPSKSCHKPKAIVHTEKVNMMSLTVLGLRMLFAKTVAVNFLLTAKLFFLRVKFSRSADAPAYQQGQNQLYNELNLGRREEYDVLDKRRGRDPEMGGKPQRRKNPQEGLYNELQKDKMAEAYSEIGMKGERRRGKGHDGLYQGLSTATKDTYDALHMQALPPR

SEQ ID NO: 28576 - protein, 235 aa, synthetic construct
INLVSSKKITEFDPAIVISPSGKYNAVKLGKYEDSNSVTCSVQHDNKTVHSTDFEVKTDSTDHVKPKETENTKQPSKSCHKPKAIVHTEKVNMMSLTVLGLRMLFAKTVAVNFLLTAKLFFLRVKFSRSADAPAYQQGQNQLYNELNLGRREEYDVLDKRRGRDPEMGGKPQRRKNPQEGLYNELQKDKMAEAYSEIGMKGERRRGKGHDGLYQGLSTATKDTYDALHMQALPPR

SEQ ID NO: 28577 - protein, 234 aa, synthetic construct
NLVSSKKITEFDPAIVISPSGKYNAVKLGKYEDSNSVTCSVQHDNKTVHSTDFEVKTDSTDHVKPKETENTKQPSKSCHKPKAIVHTEKVNMMSLTVLGLRMLFAKTVAVNFLLTAKLFFLRVKFSRSADAPAYQQGQNQLYNELNLGRREEYDVLDKRRGRDPEMGGKPQRRKNPQEGLYNELQKDKMAEAYSEIGMKGERRRGKGHDGLYQGLSTATKDTYDALHMQALPPR

SEQ ID NO: 28578 - protein, 233 aa, synthetic construct
LVSSKKITEFDPAIVISPSGKYNAVKLGKYEDSNSVTCSVQHDNKTVHSTDFEVKTDSTDHVKPKETENTKQPSKSCHKPKAIVHTEKVNMMSLTVLGLRMLFAKTVAVNFLLTAKLFFLRVKFSRSADAPAYQQGQNQLYNELNLGRREEYDVLDKRRGRDPEMGGKPQRRKNPQEGLYNELQKDKMAEAYSEIGMKGERRRGKGHDGLYQGLSTATKDTYDALHMQALPPR

SEQ ID NO: 28579 - protein, 232 aa, synthetic construct
VSSKKITEFDPAIVISPSGKYNAVKLGKYEDSNSVTCSVQHDNKTVHSTDFEVKTDSTDHVKPKETENTKQPSKSCHKPKAIVHTEKVNMMSLTVLGLRMLFAKTVAVNFLLTAKLFFLRVKFSRSADAPAYQQGQNQLYNELNLGRREEYDVLDKRRGRDPEMGGKPQRRKNPQEGLYNELQKDKMAEAYSEIGMKGERRRGKGHDGLYQGLSTATKDTYDALHMQALPPR

SEQ ID NO: 28580 - protein, 231 aa, synthetic construct
SSKKITEFDPAIVISPSGKYNAVKLGKYEDSNSVTCSVQHDNKTVHSTDFEVKTDSTDHVKPKETENTKQPSKSCHKPKAIVHTEKVNMMSLTVLGLRMLFAKTVAVNFLLTAKLFFLRVKFSRSADAPAYQQGQNQLYNELNLGRREEYDVLDKRRGRDPEMGGKPQRRKNPQEGLYNELQKDKMAEAYSEIGMKGERRRGKGHDGLYQGLSTATKDTYDALHMQALPPR

SEQ ID NO: 28581 - protein, 230 aa, synthetic construct
SKKITEFDPAIVISPSGKYNAVKLGKYEDSNSVTCSVQHDNKTVHSTDFEVKTDSTDHVKPKETENTKQPSKSCHKPKAIVHTEKVNMMSLTVLGLRMLFAKTVAVNFLLTAKLFFLRVKFSRSADAPAYQQGQNQLYNELNLGRREEYDVLDKRRGRDPEMGGKPQRRKNPQEGLYNELQKDKMAEAYSEIGMKGERRRGKGHDGLYQGLSTATKDTYDALHMQALPPR

SEQ ID NO: 28582 - protein, 229 aa, synthetic construct
KKITEFDPAIVISPSGKYNAVKLGKYEDSNSVTCSVQHDNKTVHSTDFEVKTDSTDHVKPKETENTKQPSKSCHKPKAIVHTEKVNMMSLTVLGLRMLFAKTVAVNFLLTAKLFFLRVKFSRSADAPAYQQGQNQLYNELNLGRREEYDVLDKRRGRDPEMGGKPQRRKNPQEGLYNELQKDKMAEAYSEIGMKGERRRGKGHDGLYQGLSTATKDTYDALHMQALPPR

SEQ ID NO: 28583 - protein, 228 aa, synthetic construct
KITEFDPAIVISPSGKYNAVKLGKYEDSNSVTCSVQHDNKTVHSTDFEVKTDSTDHVKPKETENTKQPSKSCHKPKAIVHTEKVNMMSLTVLGLRMLFAKTVAVNFLLTAKLFFLRVKFSRSADAPAYQQGQNQLYNELNLGRREEYDVLDKRRGRDPEMGGKPQRRKNPQEGLYNELQKDKMAEAYSEIGMKGERRRGKGHDGLYQGLSTATKDTYDALHMQALPPR

SEQ ID NO: 28584 - protein, 227 aa, synthetic construct
ITEFDPAIVISPSGKYNAVKLGKYEDSNSVTCSVQHDNKTVHSTDFEVKTDSTDHVKPKETENTKQPSKSCHKPKAIVHTEKVNMMSLTVLGLRMLFAKTVAVNFLLTAKLFFLRVKFSRSADAPAYQQGQNQLYNELNLGRREEYDVLDKRRGRDPEMGGKPQRRKNPQEGLYNELQKDKMAEAYSEIGMKGERRRGKGHDGLYQGLSTATKDTYDALHMQALPPR

SEQ ID NO: 28585 - protein, 226 aa, synthetic construct
TEFDPAIVISPSGKYNAVKLGKYEDSNSVTCSVQHDNKTVHSTDFEVKTDSTDHVKPKETENTKQPSKSCHKPKAIVHTEKVNMMSLTVLGLRMLFAKTVAVNFLLTAKLFFLRVKFSRSADAPAYQQGQNQLYNELNLGRREEYDVLDKRRGRDPEMGGKPQRRKNPQEGLYNELQKDKMAEAYSEIGMKGERRRGKGHDGLYQGLSTATKDTYDALHMQALPPR

SEQ ID NO: 28586 - protein, 225 aa, synthetic construct
EFDPAIVISPSGKYNAVKLGKYEDSNSVTCSVQHDNKTVHSTDFEVKTDSTDHVKPKETENTKQPSKSCHKPKAIVHTEKVNMMSLTVLGLRMLFAKTVAVNFLLTAKLFFLRVKFSRSADAPAYQQGQNQLYNELNLGRREEYDVLDKRRGRDPEMGGKPQRRKNPQEGLYNELQKDKMAEAYSEIGMKGERRRGKGHDGLYQGLSTATKDTYDALHMQALPPR

SEQ ID NO: 28587 - protein, 224 aa, synthetic construct
FDPAIVISPSGKYNAVKLGKYEDSNSVTCSVQHDNKTVHSTDFEVKTDSTDHVKPKETENTKQPSKSCHKPKAIVHTEKVNMMSLTVLGLRMLFAKTVAVNFLLTAKLFFLRVKFSRSADAPAYQQGQNQLYNELNLGRREEYDVLDKRRGRDPEMGGKPQRRKNPQEGLYNELQKDKMAEAYSEIGMKGERRRGKGHDGLYQGLSTATKDTYDALHMQALPPR

SEQ ID NO: 28588 - protein, 223 aa, synthetic construct
DPAIVISPSGKYNAVKLGKYEDSNSVTCSVQHDNKTVHSTDFEVKTDSTDHVKPKETENTKQPSKSCHKPKAIVHTEKVNMMSLTVLGLRMLFAKTVAVNFLLTAKLFFLRVKFSRSADAPAYQQGQNQLYNELNLGRREEYDVLDKRRGRDPEMGGKPQRRKNPQEGLYNELQKDKMAEAYSEIGMKGERRRGKGHDGLYQGLSTATKDTYDALHMQALPPR

SEQ ID NO: 28589 - protein, 222 aa, synthetic construct
PAIVISPSGKYNAVKLGKYEDSNSVTCSVQHDNKTVHSTDFEVKTDSTDHVKPKETENTKQPSKSCHKPKAIVHTEKVNMMSLTVLGLRMLFAKTVAVNFLLTAKLFFLRVKFSRSADAPAYQQGQNQLYNELNLGRREEYDVLDKRRGRDPEMGGKPQRRKNPQEGLYNELQKDKMAEAYSEIGMKGERRRGKGHDGLYQGLSTATKDTYDALHMQALPPR

SEQ ID NO: 28590 - protein, 221 aa, synthetic construct
AIVISPSGKYNAVKLGKYEDSNSVTCSVQHDNKTVHSTDFEVKTDSTDHVKPKETENTKQPSKSCHKPKAIVHTEKVNMMSLTVLGLRMLFAKTVAVNFLLTAKLFFLRVKFSRSADAPAYQQGQNQLYNELNLGRREEYDVLDKRRGRDPEMGGKPQRRKNPQEGLYNELQKDKMAEAYSEIGMKGERRRGKGHDGLYQGLSTATKDTYDALHMQALPPR

SEQ ID NO: 28591 - protein, 220 aa, synthetic construct
IVISPSGKYNAVKLGKYEDSNSVTCSVQHDNKTVHSTDFEVKTDSTDHVKPKETENTKQPSKSCHKPKAIVHTEKVNMMSLTVLGLRMLFAKTVAVNFLLTAKLFFLRVKFSRSADAPAYQQGQNQLYNELNLGRREEYDVLDKRRGRDPEMGGKPQRRKNPQEGLYNELQKDKMAEAYSEIGMKGERRRGKGHDGLYQGLSTATKDTYDALHMQALPPR

SEQ ID NO: 28592 - protein, 219 aa, synthetic construct
VISPSGKYNAVKLGKYEDSNSVTCSVQHDNKTVHSTDFEVKTDSTDHVKPKETENTKQPSKSCHKPKAIVHTEKVNMMSLTVLGLRMLFAKTVAVNFLLTAKLFFLRVKFSRSADAPAYQQGQNQLYNELNLGRREEYDVLDKRRGRDPEMGGKPQRRKNPQEGLYNELQKDKMAEAYSEIGMKGERRRGKGHDGLYQGLSTATKDTYDALHMQALPPR

SEQ ID NO: 28593 - protein, 218 aa, synthetic construct
ISPSGKYNAVKLGKYEDSNSVTCSVQHDNKTVHSTDFEVKTDSTDHVKPKETENTKQPSKSCHKPKAIVHTEKVNMMSLTVLGLRMLFAKTVAVNFLLTAKLFFLRVKFSRSADAPAYQQGQNQLYNELNLGRREEYDVLDKRRGRDPEMGGKPQRRKNPQEGLYNELQKDKMAEAYSEIGMKGERRRGKGHDGLYQGLSTATKDTYDALHMQALPPR

SEQ ID NO: 28594 - protein, 217 aa, synthetic construct
SPSGKYNAVKLGKYEDSNSVTCSVQHDNKTVHSTDFEVKTDSTDHVKPKETENTKQPSKSCHKPKAIVHTEKVNMMSLTVLGLRMLFAKTVAVNFLLTAKLFFLRVKFSRSADAPAYQQGQNQLYNELNLGRREEYDVLDKRRGRDPEMGGKPQRRKNPQEGLYNELQKDKMAEAYSEIGMKGERRRGKGHDGLYQGLSTATKDTYDALHMQALPPR

SEQ ID NO: 28595 - protein, 216 aa, synthetic construct
PSGKYNAVKLGKYEDSNSVTCSVQHDNKTVHSTDFEVKTDSTDHVKPKETENTKQPSKSCHKPKAIVHTEKVNMMSLTVLGLRMLFAKTVAVNFLLTAKLFFLRVKFSRSADAPAYQQGQNQLYNELNLGRREEYDVLDKRRGRDPEMGGKPQRRKNPQEGLYNELQKDKMAEAYSEIGMKGERRRGKGHDGLYQGLSTATKDTYDALHMQALPPR

SEQ ID NO: 28596 - protein, 215 aa, synthetic construct
SGKYNAVKLGKYEDSNSVTCSVQHDNKTVHSTDFEVKTDSTDHVKPKETENTKQPSKSCHKPKAIVHTEKVNMMSLTVLGLRMLFAKTVAVNFLLTAKLFFLRVKFSRSADAPAYQQGQNQLYNELNLGRREEYDVLDKRRGRDPEMGGKPQRRKNPQEGLYNELQKDKMAEAYSEIGMKGERRRGKGHDGLYQGLSTATKDTYDALHMQALPPR

SEQ ID NO: 28597 - protein, 214 aa, synthetic construct
GKYNAVKLGKYEDSNSVTCSVQHDNKTVHSTDFEVKTDSTDHVKPKETENTKQPSKSCHKPKAIVHTEKVNMMSLTVLGLRMLFAKTVAVNFLLTAKLFFLRVKFSRSADAPAYQQGQNQLYNELNLGRREEYDVLDKRRGRDPEMGGKPQRRKNPQEGLYNELQKDKMAEAYSEIGMKGERRRGKGHDGLYQGLSTATKDTYDALHMQALPPR

SEQ ID NO: 28598 - protein, 213 aa, synthetic construct
KYNAVKLGKYEDSNSVTCSVQHDNKTVHSTDFEVKTDSTDHVKPKETENTKQPSKSCHKPKAIVHTEKVNMMSLTVLGLRMLFAKTVAVNFLLTAKLFFLRVKFSRSADAPAYQQGQNQLYNELNLGRREEYDVLDKRRGRDPEMGGKPQRRKNPQEGLYNELQKDKMAEAYSEIGMKGERRRGKGHDGLYQGLSTATKDTYDALHMQALPPR

SEQ ID NO: 28599 - protein, 212 aa, synthetic construct
YNAVKLGKYEDSNSVTCSVQHDNKTVHSTDFEVKTDSTDHVKPKETENTKQPSKSCHKPKAIVHTEKVNMMSLTVLGLRMLFAKTVAVNFLLTAKLFFLRVKFSRSADAPAYQQGQNQLYNELNLGRREEYDVLDKRRGRDPEMGGKPQRRKNPQEGLYNELQKDKMAEAYSEIGMKGERRRGKGHDGLYQGLSTATKDTYDALHMQALPPR

SEQ ID NO: 28600 - protein, 211 aa, synthetic construct
NAVKLGKYEDSNSVTCSVQHDNKTVHSTDFEVKTDSTDHVKPKETENTKQPSKSCHKPKAIVHTEKVNMMSLTVLGLRMLFAKTVAVNFLLTAKLFFLRVKFSRSADAPAYQQGQNQLYNELNLGRREEYDVLDKRRGRDPEMGGKPQRRKNPQEGLYNELQKDKMAEAYSEIGMKGERRRGKGHDGLYQGLSTATKDTYDALHMQALPPR

SEQ ID NO: 28601 - protein, 210 aa, synthetic construct
AVKLGKYEDSNSVTCSVQHDNKTVHSTDFEVKTDSTDHVKPKETENTKQPSKSCHKPKAIVHTEKVNMMSLTVLGLRMLFAKTVAVNFLLTAKLFFLRVKFSRSADAPAYQQGQNQLYNELNLGRREEYDVLDKRRGRDPEMGGKPQRRKNPQEGLYNELQKDKMAEAYSEIGMKGERRRGKGHDGLYQGLSTATKDTYDALHMQALPPR

SEQ ID NO: 28602 - protein, 209 aa, synthetic construct
VKLGKYEDSNSVTCSVQHDNKTVHSTDFEVKTDSTDHVKPKETENTKQPSKSCHKPKAIVHTEKVNMMSLTVLGLRMLFAKTVAVNFLLTAKLFFLRVKFSRSADAPAYQQGQNQLYNELNLGRREEYDVLDKRRGRDPEMGGKPQRRKNPQEGLYNELQKDKMAEAYSEIGMKGERRRGKGHDGLYQGLSTATKDTYDALHMQALPPR

SEQ ID NO: 28603 - protein, 208 aa, synthetic construct
KLGKYEDSNSVTCSVQHDNKTVHSTDFEVKTDSTDHVKPKETENTKQPSKSCHKPKAIVHTEKVNMMSLTVLGLRMLFAKTVAVNFLLTAKLFFLRVKFSRSADAPAYQQGQNQLYNELNLGRREEYDVLDKRRGRDPEMGGKPQRRKNPQEGLYNELQKDKMAEAYSEIGMKGERRRGKGHDGLYQGLSTATKDTYDALHMQALPPR

SEQ ID NO: 28604 - protein, 207 aa, synthetic construct
LGKYEDSNSVTCSVQHDNKTVHSTDFEVKTDSTDHVKPKETENTKQPSKSCHKPKAIVHTEKVNMMSLTVLGLRMLFAKTVAVNFLLTAKLFFLRVKFSRSADAPAYQQGQNQLYNELNLGRREEYDVLDKRRGRDPEMGGKPQRRKNPQEGLYNELQKDKMAEAYSEIGMKGERRRGKGHDGLYQGLSTATKDTYDALHMQALPPR

SEQ ID NO: 28605 - protein, 206 aa, synthetic construct
GKYEDSNSVTCSVQHDNKTVHSTDFEVKTDSTDHVKPKETENTKQPSKSCHKPKAIVHTEKVNMMSLTVLGLRMLFAKTVAVNFLLTAKLFFLRVKFSRSADAPAYQQGQNQLYNELNLGRREEYDVLDKRRGRDPEMGGKPQRRKNPQEGLYNELQKDKMAEAYSEIGMKGERRRGKGHDGLYQGLSTATKDTYDALHMQALPPR

SEQ ID NO: 28606 - protein, 205 aa, synthetic construct
KYEDSNSVTCSVQHDNKTVHSTDFEVKTDSTDHVKPKETENTKQPSKSCHKPKAIVHTEKVNMMSLTVLGLRMLFAKTVAVNFLLTAKLFFLRVKFSRSADAPAYQQGQNQLYNELNLGRREEYDVLDKRRGRDPEMGGKPQRRKNPQEGLYNELQKDKMAEAYSEIGMKGERRRGKGHDGLYQGLSTATKDTYDALHMQALPPR

SEQ ID NO: 28607 - protein, 204 aa, synthetic construct
YEDSNSVTCSVQHDNKTVHSTDFEVKTDSTDHVKPKETENTKQPSKSCHKPKAIVHTEKVNMMSLTVLGLRMLFAKTVAVNFLLTAKLFFLRVKFSRSADAPAYQQGQNQLYNELNLGRREEYDVLDKRRGRDPEMGGKPQRRKNPQEGLYNELQKDKMAEAYSEIGMKGERRRGKGHDGLYQGLSTATKDTYDALHMQALPPR

SEQ ID NO: 28608 - protein, 203 aa, synthetic construct
EDSNSVTCSVQHDNKTVHSTDFEVKTDSTDHVKPKETENTKQPSKSCHKPKAIVHTEKVNMMSLTVLGLRMLFAKTVAVNFLLTAKLFFLRVKFSRSADAPAYQQGQNQLYNELNLGRREEYDVLDKRRGRDPEMGGKPQRRKNPQEGLYNELQKDKMAEAYSEIGMKGERRRGKGHDGLYQGLSTATKDTYDALHMQALPPR

SEQ ID NO: 28609 - protein, 202 aa, synthetic construct
DSNSVTCSVQHDNKTVHSTDFEVKTDSTDHVKPKETENTKQPSKSCHKPKAIVHTEKVNMMSLTVLGLRMLFAKTVAVNFLLTAKLFFLRVKFSRSADAPAYQQGQNQLYNELNLGRREEYDVLDKRRGRDPEMGGKPQRRKNPQEGLYNELQKDKMAEAYSEIGMKGERRRGKGHDGLYQGLSTATKDTYDALHMQALPPR

SEQ ID NO: 28610 - protein, 201 aa, synthetic construct
SNSVTCSVQHDNKTVHSTDFEVKTDSTDHVKPKETENTKQPSKSCHKPKAIVHTEKVNMMSLTVLGLRMLFAKTVAVNFLLTAKLFFLRVKFSRSADAPAYQQGQNQLYNELNLGRREEYDVLDKRRGRDPEMGGKPQRRKNPQEGLYNELQKDKMAEAYSEIGMKGERRRGKGHDGLYQGLSTATKDTYDALHMQALPPR

SEQ ID NO: 28611 - protein, 200 aa, synthetic construct
NSVTCSVQHDNKTVHSTDFEVKTDSTDHVKPKETENTKQPSKSCHKPKAIVHTEKVNMMSLTVLGLRMLFAKTVAVNFLLTAKLFFLRVKFSRSADAPAYQQGQNQLYNELNLGRREEYDVLDKRRGRDPEMGGKPQRRKNPQEGLYNELQKDKMAEAYSEIGMKGERRRGKGHDGLYQGLSTATKDTYDALHMQALPPR

SEQ ID NO: 28612 - protein, 199 aa, synthetic construct
SVTCSVQHDNKTVHSTDFEVKTDSTDHVKPKETENTKQPSKSCHKPKAIVHTEKVNMMSLTVLGLRMLFAKTVAVNFLLTAKLFFLRVKFSRSADAPAYQQGQNQLYNELNLGRREEYDVLDKRRGRDPEMGGKPQRRKNPQEGLYNELQKDKMAEAYSEIGMKGERRRGKGHDGLYQGLSTATKDTYDALHMQALPPR

SEQ ID NO: 28613 - protein, 198 aa, synthetic construct
VTCSVQHDNKTVHSTDFEVKTDSTDHVKPKETENTKQPSKSCHKPKAIVHTEKVNMMSLTVLGLRMLFAKTVAVNFLLTAKLFFLRVKFSRSADAPAYQQGQNQLYNELNLGRREEYDVLDKRRGRDPEMGGKPQRRKNPQEGLYNELQKDKMAEAYSEIGMKGERRRGKGHDGLYQGLSTATKDTYDALHMQALPPR

SEQ ID NO: 28614 - protein, 197 aa, synthetic construct
TCSVQHDNKTVHSTDFEVKTDSTDHVKPKETENTKQPSKSCHKPKAIVHTEKVNMMSLTVLGLRMLFAKTVAVNFLLTAKLFFLRVKFSRSADAPAYQQGQNQLYNELNLGRREEYDVLDKRRGRDPEMGGKPQRRKNPQEGLYNELQKDKMAEAYSEIGMKGERRRGKGHDGLYQGLSTATKDTYDALHMQALPPR

SEQ ID NO: 28615 - protein, 196 aa, synthetic construct
CSVQHDNKTVHSTDFEVKTDSTDHVKPKETENTKQPSKSCHKPKAIVHTEKVNMMSLTVLGLRMLFAKTVAVNFLLTAKLFFLRVKFSRSADAPAYQQGQNQLYNELNLGRREEYDVLDKRRGRDPEMGGKPQRRKNPQEGLYNELQKDKMAEAYSEIGMKGERRRGKGHDGLYQGLSTATKDTYDALHMQALPPR

SEQ ID NO: 28616 - protein, 195 aa, synthetic construct
SVQHDNKTVHSTDFEVKTDSTDHVKPKETENTKQPSKSCHKPKAIVHTEKVNMMSLTVLGLRMLFAKTVAVNFLLTAKLFFLRVKFSRSADAPAYQQGQNQLYNELNLGRREEYDVLDKRRGRDPEMGGKPQRRKNPQEGLYNELQKDKMAEAYSEIGMKGERRRGKGHDGLYQGLSTATKDTYDALHMQALPPR

SEQ ID NO: 28617 - protein, 194 aa, synthetic construct
VQHDNKTVHSTDFEVKTDSTDHVKPKETENTKQPSKSCHKPKAIVHTEKVNMMSLTVLGLRMLFAKTVAVNFLLTAKLFFLRVKFSRSADAPAYQQGQNQLYNELNLGRREEYDVLDKRRGRDPEMGGKPQRRKNPQEGLYNELQKDKMAEAYSEIGMKGERRRGKGHDGLYQGLSTATKDTYDALHMQALPPR

SEQ ID NO: 28618 - protein, 193 aa, synthetic construct
QHDNKTVHSTDFEVKTDSTDHVKPKETENTKQPSKSCHKPKAIVHTEKVNMMSLTVLGLRMLFAKTVAVNFLLTAKLFFLRVKFSRSADAPAYQQGQNQLYNELNLGRREEYDVLDKRRGRDPEMGGKPQRRKNPQEGLYNELQKDKMAEAYSEIGMKGERRRGKGHDGLYQGLSTATKDTYDALHMQALPPR

SEQ ID NO: 28619 - protein, 192 aa, synthetic construct
HDNKTVHSTDFEVKTDSTDHVKPKETENTKQPSKSCHKPKAIVHTEKVNMMSLTVLGLRMLFAKTVAVNFLLTAKLFFLRVKFSRSADAPAYQQGQNQLYNELNLGRREEYDVLDKRRGRDPEMGGKPQRRKNPQEGLYNELQKDKMAEAYSEIGMKGERRRGKGHDGLYQGLSTATKDTYDALHMQALPPR

SEQ ID NO: 28620 - protein, 191 aa, synthetic construct
DNKTVHSTDFEVKTDSTDHVKPKETENTKQPSKSCHKPKAIVHTEKVNMMSLTVLGLRMLFAKTVAVNFLLTAKLFFLRVKFSRSADAPAYQQGQNQLYNELNLGRREEYDVLDKRRGRDPEMGGKPQRRKNPQEGLYNELQKDKMAEAYSEIGMKGERRRGKGHDGLYQGLSTATKDTYDALHMQALPPR

SEQ ID NO: 28621 - protein, 190 aa, synthetic construct
NKTVHSTDFEVKTDSTDHVKPKETENTKQPSKSCHKPKAIVHTEKVNMMSLTVLGLRMLFAKTVAVNFLLTAKLFFLRVKFSRSADAPAYQQGQNQLYNELNLGRREEYDVLDKRRGRDPEMGGKPQRRKNPQEGLYNELQKDKMAEAYSEIGMKGERRRGKGHDGLYQGLSTATKDTYDALHMQALPPR

SEQ ID NO: 28622 - protein, 189 aa, synthetic construct
KTVHSTDFEVKTDSTDHVKPKETENTKQPSKSCHKPKAIVHTEKVNMMSLTVLGLRMLFAKTVAVNFLLTAKLFFLRVKFSRSADAPAYQQGQNQLYNELNLGRREEYDVLDKRRGRDPEMGGKPQRRKNPQEGLYNELQKDKMAEAYSEIGMKGERRRGKGHDGLYQGLSTATKDTYDALHMQALPPR

SEQ ID NO: 28623 - protein, 188 aa, synthetic construct
TVHSTDFEVKTDSTDHVKPKETENTKQPSKSCHKPKAIVHTEKVNMMSLTVLGLRMLFAKTVAVNFLLTAKLFFLRVKFSRSADAPAYQQGQNQLYNELNLGRREEYDVLDKRRGRDPEMGGKPQRRKNPQEGLYNELQKDKMAEAYSEIGMKGERRRGKGHDGLYQGLSTATKDTYDALHMQALPPR

SEQ ID NO: 28624 - protein, 187 aa, synthetic construct
VHSTDFEVKTDSTDHVKPKETENTKQPSKSCHKPKAIVHTEKVNMMSLTVLGLRMLFAKTVAVNFLLTAKLFFLRVKFSRSADAPAYQQGQNQLYNELNLGRREEYDVLDKRRGRDPEMGGKPQRRKNPQEGLYNELQKDKMAEAYSEIGMKGERRRGKGHDGLYQGLSTATKDTYDALHMQALPPR

SEQ ID NO: 28625 - protein, 186 aa, synthetic construct
HSTDFEVKTDSTDHVKPKETENTKQPSKSCHKPKAIVHTEKVNMMSLTVLGLRMLFAKTVAVNFLLTAKLFFLRVKFSRSADAPAYQQGQNQLYNELNLGRREEYDVLDKRRGRDPEMGGKPQRRKNPQEGLYNELQKDKMAEAYSEIGMKGERRRGKGHDGLYQGLSTATKDTYDALHMQALPPR

SEQ ID NO: 28626 - protein, 185 aa, synthetic construct
STDFEVKTDSTDHVKPKETENTKQPSKSCHKPKAIVHTEKVNMMSLTVLGLRMLFAKTVAVNFLLTAKLFFLRVKFSRSADAPAYQQGQNQLYNELNLGRREEYDVLDKRRGRDPEMGGKPQRRKNPQEGLYNELQKDKMAEAYSEIGMKGERRRGKGHDGLYQGLSTATKDTYDALHMQALPPR

SEQ ID NO: 28627 - protein, 184 aa, synthetic construct
TDFEVKTDSTDHVKPKETENTKQPSKSCHKPKAIVHTEKVNMMSLTVLGLRMLFAKTVAVNFLLTAKLFFLRVKFSRSADAPAYQQGQNQLYNELNLGRREEYDVLDKRRGRDPEMGGKPQRRKNPQEGLYNELQKDKMAEAYSEIGMKGERRRGKGHDGLYQGLSTATKDTYDALHMQALPPR

SEQ ID NO: 28628 - protein, 183 aa, synthetic construct
DFEVKTDSTDHVKPKETENTKQPSKSCHKPKAIVHTEKVNMMSLTVLGLRMLFAKTVAVNFLLTAKLFFLRVKFSRSADAPAYQQGQNQLYNELNLGRREEYDVLDKRRGRDPEMGGKPQRRKNPQEGLYNELQKDKMAEAYSEIGMKGERRRGKGHDGLYQGLSTATKDTYDALHMQALPPR

SEQ ID NO: 28629 - protein, 182 aa, synthetic construct
FEVKTDSTDHVKPKETENTKQPSKSCHKPKAIVHTEKVNMMSLTVLGLRMLFAKTVAVNFLLTAKLFFLRVKFSRSADAPAYQQGQNQLYNELNLGRREEYDVLDKRRGRDPEMGGKPQRRKNPQEGLYNELQKDKMAEAYSEIGMKGERRRGKGHDGLYQGLSTATKDTYDALHMQALPPR

SEQ ID NO: 28630 - protein, 181 aa, synthetic construct; identical to SEQ ID NO: 27995

SEQ ID NO: 28631 - protein, 180 aa, synthetic construct
VKTDSTDHVKPKETENTKQPSKSCHKPKAIVHTEKVNMMSLTVLGLRMLFAKTVAVNFLLTAKLFFLRVKFSRSADAPAYQQGQNQLYNELNLGRREEYDVLDKRRGRDPEMGGKPQRRKNPQEGLYNELQKDKMAEAYSEIGMKGERRRGKGHDGLYQGLSTATKDTYDALHMQALPPR

SEQ ID NO: 28632 - protein, 179 aa, synthetic construct
KTDSTDHVKPKETENTKQPSKSCHKPKAIVHTEKVNMMSLTVLGLRMLFAKTVAVNFLLTAKLFFLRVKFSRSADAPAYQQGQNQLYNELNLGRREEYDVLDKRRGRDPEMGGKPQRRKNPQEGLYNELQKDKMAEAYSEIGMKGERRRGKGHDGLYQGLSTATKDTYDALHMQALPPR

SEQ ID NO: 28633 - protein, 178 aa, synthetic construct
TDSTDHVKPKETENTKQPSKSCHKPKAIVHTEKVNMMSLTVLGLRMLFAKTVAVNFLLTAKLFFLRVKFSRSADAPAYQQGQNQLYNELNLGRREEYDVLDKRRGRDPEMGGKPQRRKNPQEGLYNELQKDKMAEAYSEIGMKGERRRGKGHDGLYQGLSTATKDTYDALHMQALPPR

SEQ ID NO: 28634 - protein, 177 aa, synthetic construct
DSTDHVKPKETENTKQPSKSCHKPKAIVHTEKVNMMSLTVLGLRMLFAKTVAVNFLLTAKLFFLRVKFSRSADAPAYQQGQNQLYNELNLGRREEYDVLDKRRGRDPEMGGKPQRRKNPQEGLYNELQKDKMAEAYSEIGMKGERRRGKGHDGLYQGLSTATKDTYDALHMQALPPR

SEQ ID NO: 28635 - protein, 176 aa, synthetic construct
STDHVKPKETENTKQPSKSCHKPKAIVHTEKVNMMSLTVLGLRMLFAKTVAVNFLLTAKLFFLRVKFSRSADAPAYQQGQNQLYNELNLGRREEYDVLDKRRGRDPEMGGKPQRRKNPQEGLYNELQKDKMAEAYSEIGMKGERRRGKGHDGLYQGLSTATKDTYDALHMQALPPR

SEQ ID NO: 28636 - protein, 175 aa, synthetic construct
TDHVKPKETENTKQPSKSCHKPKAIVHTEKVNMMSLTVLGLRMLFAKTVAVNFLLTAKLFFLRVKFSRSADAPAYQQGQNQLYNELNLGRREEYDVLDKRRGRDPEMGGKPQRRKNPQEGLYNELQKDKMAEAYSEIGMKGERRRGKGHDGLYQGLSTATKDTYDALHMQALPPR

SEQ ID NO: 28637 - protein, 174 aa, synthetic construct; identical to SEQ ID NO: 27996

SEQ ID NO: 28638 - protein, 173 aa, synthetic construct
HVKPKETENTKQPSKSCHKPKAIVHTEKVNMMSLTVLGLRMLFAKTVAVNFLLTAKLFFLRVKFSRSADAPAYQQGQNQLYNELNLGRREEYDVLDKRRGRDPEMGGKPQRRKNPQEGLYNELQKDKMAEAYSEIGMKGERRRGKGHDGLYQGLSTATKDTYDALHMQALPPR

SEQ ID NO: 28639 - protein, 172 aa, synthetic construct
VKPKETENTKQPSKSCHKPKAIVHTEKVNMMSLTVLGLRMLFAKTVAVNFLLTAKLFFLRVKFSRSADAPAYQQGQNQLYNELNLGRREEYDVLDKRRGRDPEMGGKPQRRKNPQEGLYNELQKDKMAEAYSEIGMKGERRRGKGHDGLYQGLSTATKDTYDALHMQALPPR

SEQ ID NO: 28640 - protein, 171 aa, synthetic construct
KPKETENTKQPSKSCHKPKAIVHTEKVNMMSLTVLGLRMLFAKTVAVNFLLTAKLFFLRVKFSRSADAPAYQQGQNQLYNELNLGRREEYDVLDKRRGRDPEMGGKPQRRKNPQEGLYNELQKDKMAEAYSEIGMKGERRRGKGHDGLYQGLSTATKDTYDALHMQALPPR

SEQ ID NO: 28641 - protein, 170 aa, synthetic construct
PKETENTKQPSKSCHKPKAIVHTEKVNMMSLTVLGLRMLFAKTVAVNFLLTAKLFFLRVKFSRSADAPAYQQGQNQLYNELNLGRREEYDVLDKRRGRDPEMGGKPQRRKNPQEGLYNELQKDKMAEAYSEIGMKGERRRGKGHDGLYQGLSTATKDTYDALHMQALPPR

SEQ ID NO: 28642 - protein, 169 aa, synthetic construct
KETENTKQPSKSCHKPKAIVHTEKVNMMSLTVLGLRMLFAKTVAVNFLLTAKLFFLRVKFSRSADAPAYQQGQNQLYNELNLGRREEYDVLDKRRGRDPEMGGKPQRRKNPQEGLYNELQKDKMAEAYSEIGMKGERRRGKGHDGLYQGLSTATKDTYDALHMQALPPR

SEQ ID NO: 28643 - protein, 168 aa, synthetic construct
ETENTKQPSKSCHKPKAIVHTEKVNMMSLTVLGLRMLFAKTVAVNFLLTAKLFFLRVKFSRSADAPAYQQGQNQLYNELNLGRREEYDVLDKRRGRDPEMGGKPQRRKNPQEGLYNELQKDKMAEAYSEIGMKGERRRGKGHDGLYQGLSTATKDTYDALHMQALPPR

SEQ ID NO: 28644 - protein, 167 aa, synthetic construct
TENTKQPSKSCHKPKAIVHTEKVNMMSLTVLGLRMLFAKTVAVNFLLTAKLFFLRVKFSRSADAPAYQQGQNQLYNELNLGRREEYDVLDKRRGRDPEMGGKPQRRKNPQEGLYNELQKDKMAEAYSEIGMKGERRRGKGHDGLYQGLSTATKDTYDALHMQALPPR

SEQ ID NO: 28645 - protein, 166 aa, synthetic construct
ENTKQPSKSCHKPKAIVHTEKVNMMSLTVLGLRMLFAKTVAVNFLLTAKLFFLRVKFSRSADAPAYQQGQNQLYNELNLGRREEYDVLDKRRGRDPEMGGKPQRRKNPQEGLYNELQKDKMAEAYSEIGMKGERRRGKGHDGLYQGLSTATKDTYDALHMQALPPR

SEQ ID NO: 28646 - protein, 165 aa, synthetic construct
NTKQPSKSCHKPKAIVHTEKVNMMSLTVLGLRMLFAKTVAVNFLLTAKLFFLRVKFSRSADAPAYQQGQNQLYNELNLGRREEYDVLDKRRGRDPEMGGKPQRRKNPQEGLYNELQKDKMAEAYSEIGMKGERRRGKGHDGLYQGLSTATKDTYDALHMQALPPR

SEQ ID NO: 28647 - protein, 249 aa, synthetic construct
IQNPEPAVYQLKDPRSQDSTLCLFTDFDSQINVPKTMESGTFITDKCVLDMKAMDSKSNGAIAWSNQTSFTCQDIFKETNATYPSSDVPCDATLTEKSFETDMNLNFQNLSVMGLRILLLKVAGFNLLMTLRLWSSRVKFSRSADAPAYQQGQNQLYNELNLGRREEYDVLDKRRGRDPEMGGKPQRRKNPQEGLYNELQKDKMAEAYSEIGMKGERRRGKGHDGLYQGLSTATKDTYDALHMQALPPR

SEQ ID NO: 28648 - protein, 248 aa, synthetic construct
QNPEPAVYQLKDPRSQDSTLCLFTDFDSQINVPKTMESGTFITDKCVLDMKAMDSKSNGAIAWSNQTSFTCQDIFKETNATYPSSDVPCDATLTEKSFETDMNLNFQNLSVMGLRILLLKVAGFNLLMTLRLWSSRVKFSRSADAPAYQQGQNQLYNELNLGRREEYDVLDKRRGRDPEMGGKPQRRKNPQEGLYNELQKDKMAEAYSEIGMKGERRRGKGHDGLYQGLSTATKDTYDALHMQALPPR

SEQ ID NO: 28649 - protein, 247 aa, synthetic construct
NPEPAVYQLKDPRSQDSTLCLFTDFDSQINVPKTMESGTFITDKCVLDMKAMDSKSNGAIAWSNQTSFTCQDIFKETNATYPSSDVPCDATLTEKSFETDMNLNFQNLSVMGLRILLLKVAGFNLLMTLRLWSSRVKFSRSADAPAYQQGQNQLYNELNLGRREEYDVLDKRRGRDPEMGGKPQRRKNPQEGLYNELQKDKMAEAYSEIGMKGERRRGKGHDGLYQGLSTATKDTYDALHMQALPPR

SEQ ID NO: 28650 - protein, 246 aa, synthetic construct
PEPAVYQLKDPRSQDSTLCLFTDFDSQINVPKTMESGTFITDKCVLDMKAMDSKSNGAIAWSNQTSFTCQDIFKETNATYPSSDVPCDATLTEKSFETDMNLNFQNLSVMGLRILLLKVAGFNLLMTLRLWSSRVKFSRSADAPAYQQGQNQLYNELNLGRREEYDVLDKRRGRDPEMGGKPQRRKNPQEGLYNELQKDKMAEAYSEIGMKGERRRGKGHDGLYQGLSTATKDTYDALHMQALPPR

SEQ ID NO: 28651 - protein, 245 aa, synthetic construct
EPAVYQLKDPRSQDSTLCLFTDFDSQINVPKTMESGTFITDKCVLDMKAMDSKSNGAIAWSNQTSFTCQDIFKETNATYPSSDVPCDATLTEKSFETDMNLNFQNLSVMGLRILLLKVAGFNLLMTLRLWSSRVKFSRSADAPAYQQGQNQLYNELNLGRREEYDVLDKRRGRDPEMGGKPQRRKNPQEGLYNELQKDKMAEAYSEIGMKGERRRGKGHDGLYQGLSTATKDTYDALHMQALPPR

SEQ ID NO: 28652 - protein, 244 aa, synthetic construct
PAVYQLKDPRSQDSTLCLFTDFDSQINVPKTMESGTFITDKCVLDMKAMDSKSNGAIAWSNQTSFTCQDIFKETNATYPSSDVPCDATLTEKSFETDMNLNFQNLSVMGLRILLLKVAGFNLLMTLRLWSSRVKFSRSADAPAYQQGQNQLYNELNLGRREEYDVLDKRRGRDPEMGGKPQRRKNPQEGLYNELQKDKMAEAYSEIGMKGERRRGKGHDGLYQGLSTATKDTYDALHMQALPPR

SEQ ID NO: 28653 - protein, 243 aa, synthetic construct
AVYQLKDPRSQDSTLCLFTDFDSQINVPKTMESGTFITDKCVLDMKAMDSKSNGAIAWSNQTSFTCQDIFKETNATYPSSDVPCDATLTEKSFETDMNLNFQNLSVMGLRILLLKVAGFNLLMTLRLWSSRVKFSRSADAPAYQQGQNQLYNELNLGRREEYDVLDKRRGRDPEMGGKPQRRKNPQEGLYNELQKDKMAEAYSEIGMKGERRRGKGHDGLYQGLSTATKDTYDALHMQALPPR

SEQ ID NO: 28654 - protein, 242 aa, synthetic construct
VYQLKDPRSQDSTLCLFTDFDSQINVPKTMESGTFITDKCVLDMKAMDSKSNGAIAWSNQTSFTCQDIFKETNATYPSSDVPCDATLTEKSFETDMNLNFQNLSVMGLRILLLKVAGFNLLMTLRLWSSRVKFSRSADAPAYQQGQNQLYNELNLGRREEYDVLDKRRGRDPEMGGKPQRRKNPQEGLYNELQKDKMAEAYSEIGMKGERRRGKGHDGLYQGLSTATKDTYDALHMQALPPR

SEQ ID NO: 28655 - protein, 241 aa, synthetic construct
YQLKDPRSQDSTLCLFTDFDSQINVPKTMESGTFITDKCVLDMKAMDSKSNGAIAWSNQTSFTCQDIFKETNATYPSSDVPCDATLTEKSFETDMNLNFQNLSVMGLRILLLKVAGFNLLMTLRLWSSRVKFSRSADAPAYQQGQNQLYNELNLGRREEYDVLDKRRGRDPEMGGKPQRRKNPQEGLYNELQKDKMAEAYSEIGMKGERRRGKGHDGLYQGLSTATKDTYDALHMQALPPR

SEQ ID NO: 28656 - protein, 240 aa, synthetic construct
QLKDPRSQDSTLCLFTDFDSQINVPKTMESGTFITDKCVLDMKAMDSKSNGAIAWSNQTSFTCQDIFKETNATYPSSDVPCDATLTEKSFETDMNLNFQNLSVMGLRILLLKVAGFNLLMTLRLWSSRVKFSRSADAPAYQQGQNQLYNELNLGRREEYDVLDKRRGRDPEMGGKPQRRKNPQEGLYNELQKDKMAEAYSEIGMKGERRRGKGHDGLYQGLSTATKDTYDALHMQALPPR

SEQ ID NO: 28657 - protein, 239 aa, synthetic construct
LKDPRSQDSTLCLFTDFDSQINVPKTMESGTFITDKCVLDMKAMDSKSNGAIAWSNQTSFTCQDIFKETNATYPSSDVPCDATLTEKSFETDMNLNFQNLSVMGLRILLLKVAGFNLLMTLRLWSSRVKFSRSADAPAYQQGQNQLYNELNLGRREEYDVLDKRRGRDPEMGGKPQRRKNPQEGLYNELQKDKMAEAYSEIGMKGERRRGKGHDGLYQGLSTATKDTYDALHMQALPPR

SEQ ID NO: 28658 - protein, 234 aa, synthetic construct
SQDSTLCLFTDFDSQINVPKTMESGTFITDKCVLDMKAMDSKSNGAIAWSNQTSFTCQDIFKETNATYPSSDVPCDATLTEKSFETDMNLNFQNLSVMGLRILLLKVAGFNLLMTLRLWSSRVKFSRSADAPAYQQGQNQLYNELNLGRREEYDVLDKRRGRDPEMGGKPQRRKNPQEGLYNELQKDKMAEAYSEIGMKGERRRGKGHDGLYQGLSTATKDTYDALHMQALPPR

SEQ ID NO: 28659 - protein, 229 aa, synthetic construct
LCLFTDFDSQINVPKTMESGTFITDKCVLDMKAMDSKSNGAIAWSNQTSFTCQDIFKETNATYPSSDVPCDATLTEKSFETDMNLNFQNLSVMGLRILLLKVAGFNLLMTLRLWSSRVKFSRSADAPAYQQGQNQLYNELNLGRREEYDVLDKRRGRDPEMGGKPQRRKNPQEGLYNELQKDKMAEAYSEIGMKGERRRGKGHDGLYQGLSTATKDTYDALHMQALPPR

SEQ ID NO: 28660 - protein, 249 aa, synthetic construct
IQNPEPAVYQLKDPRSQDSTLCLFTDFDSQINVPKTMESGTFITDKCVLDMKAMDSKSNGAIAWSNQTSFTCQDIFKETNATYPSSDVPCDATLTEKSFETDMNLNFQNLLVVGLRILLLKVAGFNLLMTLRLWSSRVKFSRSADAPAYQQGQNQLYNELNLGRREEYDVLDKRRGRDPEMGGKPQRRKNPQEGLYNELQKDKMAEAYSEIGMKGERRRGKGHDGLYQGLSTATKDTYDALHMQALPPR

SEQ ID NO: 28661 - protein, 248 aa, synthetic construct
QNPEPAVYQLKDPRSQDSTLCLFTDFDSQINVPKTMESGTFITDKCVLDMKAMDSKSNGAIAWSNQTSFTCQDIFKETNATYPSSDVPCDATLTEKSFETDMNLNFQNLLVVGLRILLLKVAGFNLLMTLRLWSSRVKFSRSADAPAYQQGQNQLYNELNLGRREEYDVLDKRRGRDPEMGGKPQRRKNPQEGLYNELQKDKMAEAYSEIGMKGERRRGKGHDGLYQGLSTATKDTYDALHMQALPPR

SEQ ID NO: 28662 - protein, 247 aa, synthetic construct
NPEPAVYQLKDPRSQDSTLCLFTDFDSQINVPKTMESGTFITDKCVLDMKAMDSKSNGAIAWSNQTSFTCQDIFKETNATYPSSDVPCDATLTEKSFETDMNLNFQNLLVVGLRILLLKVAGFNLLMTLRLWSSRVKFSRSADAPAYQQGQNQLYNELNLGRREEYDVLDKRRGRDPEMGGKPQRRKNPQEGLYNELQKDKMAEAYSEIGMKGERRRGKGHDGLYQGLSTATKDTYDALHMQALPPR

SEQ ID NO: 28663 - protein, 246 aa, synthetic construct
PEPAVYQLKDPRSQDSTLCLFTDFDSQINVPKTMESGTFITDKCVLDMKAMDSKSNGAIAWSNQTSFTCQDIFKETNATYPSSDVPCDATLTEKSFETDMNLNFQNLLVVGLRILLLKVAGFNLLMTLRLWSSRVKFSRSADAPAYQQGQNQLYNELNLGRREEYDVLDKRRGRDPEMGGKPQRRKNPQEGLYNELQKDKMAEAYSEIGMKGERRRGKGHDGLYQGLSTATKDTYDALHMQALPPR

SEQ ID NO: 28664 - protein, 245 aa, synthetic construct
EPAVYQLKDPRSQDSTLCLFTDFDSQINVPKTMESGTFITDKCVLDMKAMDSKSNGAIAWSNQTSFTCQDIFKETNATYPSSDVPCDATLTEKSFETDMNLNFQNLLVVGLRILLLKVAGFNLLMTLRLWSSRVKFSRSADAPAYQQGQNQLYNELNLGRREEYDVLDKRRGRDPEMGGKPQRRKNPQEGLYNELQKDKMAEAYSEIGMKGERRRGKGHDGLYQGLSTATKDTYDALHMQALPPR

SEQ ID NO: 28665 - protein, 244 aa, synthetic construct
PAVYQLKDPRSQDSTLCLFTDFDSQINVPKTMESGTFITDKCVLDMKAMDSKSNGAIAWSNQTSFTCQDIFKETNATYPSSDVPCDATLTEKSFETDMNLNFQNLLVVGLRILLLKVAGFNLLMTLRLWSSRVKFSRSADAPAYQQGQNQLYNELNLGRREEYDVLDKRRGRDPEMGGKPQRRKNPQEGLYNELQKDKMAEAYSEIGMKGERRRGKGHDGLYQGLSTATKDTYDALHMQALPPR

SEQ ID NO: 28666 - protein, 243 aa, synthetic construct
AVYQLKDPRSQDSTLCLFTDFDSQINVPKTMESGTFITDKCVLDMKAMDSKSNGAIAWSNQTSFTCQDIFKETNATYPSSDVPCDATLTEKSFETDMNLNFQNLLVVGLRILLLKVAGFNLLMTLRLWSSRVKFSRSADAPAYQQGQNQLYNELNLGRREEYDVLDKRRGRDPEMGGKPQRRKNPQEGLYNELQKDKMAEAYSEIGMKGERRRGKGHDGLYQGLSTATKDTYDALHMQALPPR

SEQ ID NO: 28667 - protein, 242 aa, synthetic construct
VYQLKDPRSQDSTLCLFTDFDSQINVPKTMESGTFITDKCVLDMKAMDSKSNGAIAWSNQTSFTCQDIFKETNATYPSSDVPCDATLTEKSFETDMNLNFQNLLVVGLRILLLKVAGFNLLMTLRLWSSRVKFSRSADAPAYQQGQNQLYNELNLGRREEYDVLDKRRGRDPEMGGKPQRRKNPQEGLYNELQKDKMAEAYSEIGMKGERRRGKGHDGLYQGLSTATKDTYDALHMQALPPR

SEQ ID NO: 28668 - protein, 241 aa, synthetic construct
YQLKDPRSQDSTLCLFTDFDSQINVPKTMESGTFITDKCVLDMKAMDSKSNGAIAWSNQTSFTCQDIFKETNATYPSSDVPCDATLTEKSFETDMNLNFQNLLVVGLRILLLKVAGFNLLMTLRLWSSRVKFSRSADAPAYQQGQNQLYNELNLGRREEYDVLDKRRGRDPEMGGKPQRRKNPQEGLYNELQKDKMAEAYSEIGMKGERRRGKGHDGLYQGLSTATKDTYDALHMQALPPR

SEQ ID NO: 28669 - protein, 240 aa, synthetic construct
QLKDPRSQDSTLCLFTDFDSQINVPKTMESGTFITDKCVLDMKAMDSKSNGAIAWSNQTSFTCQDIFKETNATYPSSDVPCDATLTEKSFETDMNLNFQNLLVVGLRILLLKVAGFNLLMTLRLWSSRVKFSRSADAPAYQQGQNQLYNELNLGRREEYDVLDKRRGRDPEMGGKPQRRKNPQEGLYNELQKDKMAEAYSEIGMKGERRRGKGHDGLYQGLSTATKDTYDALHMQALPPR

SEQ ID NO: 28670 - protein, 239 aa, synthetic construct
LKDPRSQDSTLCLFTDFDSQINVPKTMESGTFITDKCVLDMKAMDSKSNGAIAWSNQTSFTCQDIFKETNATYPSSDVPCDATLTEKSFETDMNLNFQNLLVVGLRILLLKVAGFNLLMTLRLWSSRVKFSRSADAPAYQQGQNQLYNELNLGRREEYDVLDKRRGRDPEMGGKPQRRKNPQEGLYNELQKDKMAEAYSEIGMKGERRRGKGHDGLYQGLSTATKDTYDALHMQALPPR

SEQ ID NO: 28671 - protein, 234 aa, synthetic construct
SQDSTLCLFTDFDSQINVPKTMESGTFITDKCVLDMKAMDSKSNGAIAWSNQTSFTCQDIFKETNATYPSSDVPCDATLTEKSFETDMNLNFQNLLVVGLRILLLKVAGFNLLMTLRLWSSRVKFSRSADAPAYQQGQNQLYNELNLGRREEYDVLDKRRGRDPEMGGKPQRRKNPQEGLYNELQKDKMAEAYSEIGMKGERRRGKGHDGLYQGLSTATKDTYDALHMQALPPR

SEQ ID NO: 28672 - protein, 229 aa, synthetic construct
LCLFTDFDSQINVPKTMESGTFITDKCVLDMKAMDSKSNGAIAWSNQTSFTCQDIFKETNATYPSSDVPCDATLTEKSFETDMNLNFQNLLVVGLRILLLKVAGFNLLMTLRLWSSRVKFSRSADAPAYQQGQNQLYNELNLGRREEYDVLDKRRGRDPEMGGKPQRRKNPQEGLYNELQKDKMAEAYSEIGMKGERRRGKGHDGLYQGLSTATKDTYDALHMQALPPR

SEQ ID NO: 28673 - protein, 284 aa, synthetic construct
EDLRNVTPPKVSLFEPSKAEIANKQKATLVCLARGFFPDHVELSWWVNGKEVHSGVCTDPQAYKESNYSYCLSSRLRVSATFWHNPRNHFRCQVQFHGLSEEDKWPEGSPKPVTQNISAEAWGRACGITSSYQQGVLSATILYEILLGKATLYAVLVSTLVVMAMVKRKNSRVKFSRSADAPAYQQGQNQLYNELNLGRREEYDVLDKRRGRDPEMGGKPQRRKNPQEGLYNELQKDKMAEAYSEIGMKGERRRGKGHDGLYQGLSTATKDTYDALHMQALPPR

SEQ ID NO: 28674 - protein, 283 aa, synthetic construct
DLRNVTPPKVSLFEPSKAEIANKQKATLVCLARGFFPDHVELSWWVNGKEVHSGVCTDPQAYKESNYSYCLSSRLRVSATFWHNPRNHFRCQVQFHGLSEEDKWPEGSPKPVTQNISAEAWGRACGITSSYQQGVLSATILYEILLGKATLYAVLVSTLVVMAMVKRKNSRVKFSRSADAPAYQQGQNQLYNELNLGRREEYDVLDKRRGRDPEMGGKPQRRKNPQEGLYNELQKDKMAEAYSEIGMKGERRRGKGHDGLYQGLSTATKDTYDALHMQALPPR

SEQ ID NO: 28675 - protein, 281 aa, synthetic construct
RNVTPPKVSLFEPSKAEIANKQKATLVCLARGFFPDHVELSWWVNGKEVHSGVCTDPQAYKESNYSYCLSSRLRVSATFWHNPRNHFRCQVQFHGLSEEDKWPEGSPKPVTQNISAEAWGRACGITSSYQQGVLSATILYEILLGKATLYAVLVSTLVVMAMVKRKNSRVKFSRSADAPAYQQGQNQLYNELNLGRREEYDVLDKRRGRDPEMGGKPQRRKNPQEGLYNELQKDKMAEAYSEIGMKGERRRGKGHDGLYQGLSTATKDTYDALHMQALPPR

SEQ ID NO: 28676 - protein, 280 aa, synthetic construct
NVTPPKVSLFEPSKAEIANKQKATLVCLARGFFPDHVELSWWVNGKEVHSGVCTDPQAYKESNYSYCLSSRLRVSATFWHNPRNHFRCQVQFHGLSEEDKWPEGSPKPVTQNISAEAWGRACGITSSYQQGVLSATILYEILLGKATLYAVLVSTLVVMAMVKRKNSRVKFSRSADAPAYQQGQNQLYNELNLGRREEYDVLDKRRGRDPEMGGKPQRRKNPQEGLYNELQKDKMAEAYSEIGMKGERRRGKGHDGLYQGLSTATKDTYDALHMQALPPR

SEQ ID NO: 28677 - protein, 279 aa, synthetic construct
VTPPKVSLFEPSKAEIANKQKATLVCLARGFFPDHVELSWWVNGKEVHSGVCTDPQAYKESNYSYCLSSRLRVSATFWHNPRNHFRCQVQFHGLSEEDKWPEGSPKPVTQNISAEAWGRACGITSSYQQGVLSATILYEILLGKATLYAVLVSTLVVMAMVKRKNSRVKFSRSADAPAYQQGQNQLYNELNLGRREEYDVLDKRRGRDPEMGGKPQRRKNPQEGLYNELQKDKMAEAYSEIGMKGERRRGKGHDGLYQGLSTATKDTYDALHMQALPPR

SEQ ID NO: 28678 - protein, 278 aa, synthetic construct
TPPKVSLFEPSKAEIANKQKATLVCLARGFFPDHVELSWWVNGKEVHSGVCTDPQAYKESNYSYCLSSRLRVSATFWHNPRNHFRCQVQFHGLSEEDKWPEGSPKPVTQNISAEAWGRACGITSSYQQGVLSATILYEILLGKATLYAVLVSTLVVMAMVKRKNSRVKFSRSADAPAYQQGQNQLYNELNLGRREEYDVLDKRRGRDPEMGGKPQRRKNPQEGLYNELQKDKMAEAYSEIGMKGERRRGKGHDGLYQGLSTATKDTYDALHMQALPPR

SEQ ID NO: 28679 - protein, 277 aa, synthetic construct
PPKVSLFEPSKAEIANKQKATLVCLARGFFPDHVELSWWVNGKEVHSGVCTDPQAYKESNYSYCLSSRLRVSATFWHNPRNHFRCQVQFHGLSEEDKWPEGSPKPVTQNISAEAWGRACGITSSYQQGVLSATILYEILLGKATLYAVLVSTLVVMAMVKRKNSRVKFSRSADAPAYQQGQNQLYNELNLGRREEYDVLDKRRGRDPEMGGKPQRRKNPQEGLYNELQKDKMAEAYSEIGMKGERRRGKGHDGLYQGLSTATKDTYDALHMQALPPR

SEQ ID NO: 28680 - protein, 276 aa, synthetic construct
PKVSLFEPSKAEIANKQKATLVCLARGFFPDHVELSWWVNGKEVHSGVCTDPQAYKESNYSYCLSSRLRVSATFWHNPRNHFRCQVQFHGLSEEDKWPEGSPKPVTQNISAEAWGRACGITSSYQQGVLSATILYEILLGKATLYAVLVSTLVVMAMVKRKNSRVKFSRSADAPAYQQGQNQLYNELNLGRREEYDVLDKRRGRDPEMGGKPQRRKNPQEGLYNELQKDKMAEAYSEIGMKGERRRGKGHDGLYQGLSTATKDTYDALHMQALPPR

SEQ ID NO: 28681 - protein, 275 aa, synthetic construct
KVSLFEPSKAEIANKQKATLVCLARGFFPDHVELSWWVNGKEVHSGVCTDPQAYKESNYSYCLSSRLRVSATFWHNPRNHFRCQVQFHGLSEEDKWPEGSPKPVTQNISAEAWGRACGITSSYQQGVLSATILYEILLGKATLYAVLVSTLVVMAMVKRKNSRVKFSRSADAPAYQQGQNQLYNELNLGRREEYDVLDKRRGRDPEMGGKPQRRKNPQEGLYNELQKDKMAEAYSEIGMKGERRRGKGHDGLYQGLSTATKDTYDALHMQALPPR

SEQ ID NO: 28682 - protein, 274 aa, synthetic construct
VSLFEPSKAEIANKQKATLVCLARGFFPDHVELSWWVNGKEVHSGVCTDPQAYKESNYSYCLSSRLRVSATFWHNPRNHFRCQVQFHGLSEEDKWPEGSPKPVTQNISAEAWGRACGITSSYQQGVLSATILYEILLGKATLYAVLVSTLVVMAMVKRKNSRVKFSRSADAPAYQQGQNQLYNELNLGRREEYDVLDKRRGRDPEMGGKPQRRKNPQEGLYNELQKDKMAEAYSEIGMKGERRRGKGHDGLYQGLSTATKDTYDALHMQALPPR

SEQ ID NO: 28683 - protein, 284 aa, synthetic construct; identical to SEQ ID NO: 28673

SEQ ID NO: 28684 - protein, 279 aa, synthetic construct; identical to SEQ ID NO: 28677

SEQ ID NO: 28685 - protein, 274 aa, synthetic construct; identical to SEQ ID NO: 28682

SEQ ID NO: 28686 - protein, 253 aa, synthetic construct
IQNPDPAVYQLRDSKSSDKSVCLFTDFDSQTNVSQSKDSDVYITDKCVLDMRSMDFKSNSAVAWSNKSDFACANAFNNSIIPEDTFFPSPESSCDVKLVEKSFETDTNLNFQNLLVIVLRILLLKVAGFNLLMTLRLWSSRVKFSRSADAPAYQQGQNQLYNELNLGRREEYDVLDKRRGRDPEMGGKPQRRKNPQEGLYNELQKDKMAEAYSEIGMKGERRRGKGHDGLYQGLSTATKDTYDALHMQALPPR

SEQ ID NO: 28687 - protein, 252 aa, synthetic construct
QNPDPAVYQLRDSKSSDKSVCLFTDFDSQTNVSQSKDSDVYITDKCVLDMRSMDFKSNSAVAWSNKSDFACANAFNNSIIPEDTFFPSPESSCDVKLVEKSFETDTNLNFQNLLVIVLRILLLKVAGFNLLMTLRLWSSRVKFSRSADAPAYQQGQNQLYNELNLGRREEYDVLDKRRGRDPEMGGKPQRRKNPQEGLYNELQKDKMAEAYSEIGMKGERRRGKGHDGLYQGLSTATKDTYDALHMQALPPR

SEQ ID NO: 28688 - protein, 251 aa, synthetic construct
NPDPAVYQLRDSKSSDKSVCLFTDFDSQTNVSQSKDSDVYITDKCVLDMRSMDFKSNSAVAWSNKSDFACANAFNNSIIPEDTFFPSPESSCDVKLVEKSFETDTNLNFQNLLVIVLRILLLKVAGFNLLMTLRLWSSRVKFSRSADAPAYQQGQNQLYNELNLGRREEYDVLDKRRGRDPEMGGKPQRRKNPQEGLYNELQKDKMAEAYSEIGMKGERRRGKGHDGLYQGLSTATKDTYDALHMQALPPR

SEQ ID NO: 28689 - protein, 250 aa, synthetic construct
PDPAVYQLRDSKSSDKSVCLFTDFDSQTNVSQSKDSDVYITDKCVLDMRSMDFKSNSAVAWSNKSDFACANAFNNSIIPEDTFFPSPESSCDVKLVEKSFETDTNLNFQNLLVIVLRILLLKVAGFNLLMTLRLWSSRVKFSRSADAPAYQQGQNQLYNELNLGRREEYDVLDKRRGRDPEMGGKPQRRKNPQEGLYNELQKDKMAEAYSEIGMKGERRRGKGHDGLYQGLSTATKDTYDALHMQALPPR

SEQ ID NO: 28690 - protein, 249 aa, synthetic construct
DPAVYQLRDSKSSDKSVCLFTDFDSQTNVSQSKDSDVYITDKCVLDMRSMDFKSNSAVAWSNKSDFACANAFNNSIIPEDTFFPSPESSCDVKLVEKSFETDTNLNFQNLLVIVLRILLLKVAGFNLLMTLRLWSSRVKFSRSADAPAYQQGQNQLYNELNLGRREEYDVLDKRRGRDPEMGGKPQRRKNPQEGLYNELQKDKMAEAYSEIGMKGERRRGKGHDGLYQGLSTATKDTYDALHMQALPPR

SEQ ID NO: 28691 - protein, 248 aa, synthetic construct
PAVYQLRDSKSSDKSVCLFTDFDSQTNVSQSKDSDVYITDKCVLDMRSMDFKSNSAVAWSNKSDFACANAFNNSIIPEDTFFPSPESSCDVKLVEKSFETDTNLNFQNLLVIVLRILLLKVAGFNLLMTLRLWSSRVKFSRSADAPAYQQGQNQLYNELNLGRREEYDVLDKRRGRDPEMGGKPQRRKNPQEGLYNELQKDKMAEAYSEIGMKGERRRGKGHDGLYQGLSTATKDTYDALHMQALPPR

SEQ ID NO: 28692 - protein, 247 aa, synthetic construct
AVYQLRDSKSSDKSVCLFTDFDSQTNVSQSKDSDVYITDKCVLDMRSMDFKSNSAVAWSNKSDFACANAFNNSIIPEDTFFPSPESSCDVKLVEKSFETDTNLNFQNLLVIVLRILLLKVAGFNLLMTLRLWSSRVKFSRSADAPAYQQGQNQLYNELNLGRREEYDVLDKRRGRDPEMGGKPQRRKNPQEGLYNELQKDKMAEAYSEIGMKGERRRGKGHDGLYQGLSTATKDTYDALHMQALPPR

SEQ ID NO: 28693 - protein, 246 aa, synthetic construct
VYQLRDSKSSDKSVCLFTDFDSQTNVSQSKDSDVYITDKCVLDMRSMDFKSNSAVAWSNKSDFACANAFNNSIIPEDTFFPSPESSCDVKLVEKSFETDTNLNFQNLLVIVLRILLLKVAGFNLLMTLRLWSSRVKFSRSADAPAYQQGQNQLYNELNLGRREEYDVLDKRRGRDPEMGGKPQRRKNPQEGLYNELQKDKMAEAYSEIGMKGERRRGKGHDGLYQGLSTATKDTYDALHMQALPPR

SEQ ID NO: 28694 - protein, 245 aa, synthetic construct
YQLRDSKSSDKSVCLFTDFDSQTNVSQSKDSDVYITDKCVLDMRSMDFKSNSAVAWSNKSDFACANAFNNSIIPEDTFFPSPESSCDVKLVEKSFETDTNLNFQNLLVIVLRILLLKVAGFNLLMTLRLWSSRVKFSRSADAPAYQQGQNQLYNELNLGRREEYDVLDKRRGRDPEMGGKPQRRKNPQEGLYNELQKDKMAEAYSEIGMKGERRRGKGHDGLYQGLSTATKDTYDALHMQALPPR

SEQ ID NO: 28695 - protein, 244 aa, synthetic construct
QLRDSKSSDKSVCLFTDFDSQTNVSQSKDSDVYITDKCVLDMRSMDFKSNSAVAWSNKSDFACANAFNNSIIPEDTFFPSPESSCDVKLVEKSFETDTNLNFQNLLVIVLRILLLKVAGFNLLMTLRLWSSRVKFSRSADAPAYQQGQNQLYNELNLGRREEYDVLDKRRGRDPEMGGKPQRRKNPQEGLYNELQKDKMAEAYSEIGMKGERRRGKGHDGLYQGLSTATKDTYDALHMQALPPR

SEQ ID NO: 28696 - protein, 243 aa, synthetic construct
LRDSKSSDKSVCLFTDFDSQTNVSQSKDSDVYITDKCVLDMRSMDFKSNSAVAWSNKSDFACANAFNNSIIPEDTFFPSPESSCDVKLVEKSFETDTNLNFQNLLVIVLRILLLKVAGFNLLMTLRLWSSRVKFSRSADAPAYQQGQNQLYNELNLGRREEYDVLDKRRGRDPEMGGKPQRRKNPQEGLYNELQKDKMAEAYSEIGMKGERRRGKGHDGLYQGLSTATKDTYDALHMQALPPR

SEQ ID NO: 28697 - protein, 242 aa, synthetic construct
RDSKSSDKSVCLFTDFDSQTNVSQSKDSDVYITDKCVLDMRSMDFKSNSAVAWSNKSDFACANAFNNSIIPEDTFFPSPESSCDVKLVEKSFETDTNLNFQNLLVIVLRILLLKVAGFNLLMTLRLWSSRVKFSRSADAPAYQQGQNQLYNELNLGRREEYDVLDKRRGRDPEMGGKPQRRKNPQEGLYNELQKDKMAEAYSEIGMKGERRRGKGHDGLYQGLSTATKDTYDALHMQALPPR

SEQ ID NO: 28698 - protein, 241 aa, synthetic construct
DSKSSDKSVCLFTDFDSQTNVSQSKDSDVYITDKCVLDMRSMDFKSNSAVAWSNKSDFACANAFNNSIIPEDTFFPSPESSCDVKLVEKSFETDTNLNFQNLLVIVLRILLLKVAGFNLLMTLRLWSSRVKFSRSADAPAYQQGQNQLYNELNLGRREEYDVLDKRRGRDPEMGGKPQRRKNPQEGLYNELQKDKMAEAYSEIGMKGERRRGKGHDGLYQGLSTATKDTYDALHMQALPPR

SEQ ID NO: 28699 - protein, 240 aa, synthetic construct
SKSSDKSVCLFTDFDSQTNVSQSKDSDVYITDKCVLDMRSMDFKSNSAVAWSNKSDFACANAFNNSIIPEDTFFPSPESSCDVKLVEKSFETDTNLNFQNLLVIVLRILLLKVAGFNLLMTLRLWSSRVKFSRSADAPAYQQGQNQLYNELNLGRREEYDVLDKRRGRDPEMGGKPQRRKNPQEGLYNELQKDKMAEAYSEIGMKGERRRGKGHDGLYQGLSTATKDTYDALHMQALPPR

SEQ ID NO: 28700 - protein, 239 aa, synthetic construct
KSSDKSVCLFTDFDSQTNVSQSKDSDVYITDKCVLDMRSMDFKSNSAVAWSNKSDFACANAFNNSIIPEDTFFPSPESSCDVKLVEKSFETDTNLNFQNLLVIVLRILLLKVAGFNLLMTLRLWSSRVKFSRSADAPAYQQGQNQLYNELNLGRREEYDVLDKRRGRDPEMGGKPQRRKNPQEGLYNELQKDKMAEAYSEIGMKGERRRGKGHDGLYQGLSTATKDTYDALHMQALPPR

SEQ ID NO: 28701 - protein, 238 aa, synthetic construct
SSDKSVCLFTDFDSQTNVSQSKDSDVYITDKCVLDMRSMDFKSNSAVAWSNKSDFACANAFNNSIIPEDTFFPSPESSCDVKLVEKSFETDTNLNFQNLLVIVLRILLLKVAGFNLLMTLRLWSSRVKFSRSADAPAYQQGQNQLYNELNLGRREEYDVLDKRRGRDPEMGGKPQRRKNPQEGLYNELQKDKMAEAYSEIGMKGERRRGKGHDGLYQGLSTATKDTYDALHMQALPPR

SEQ ID NO: 28702 - protein, 237 aa, synthetic construct
SDKSVCLFTDFDSQTNVSQSKDSDVYITDKCVLDMRSMDFKSNSAVAWSNKSDFACANAFNNSIIPEDTFFPSPESSCDVKLVEKSFETDTNLNFQNLLVIVLRILLLKVAGFNLLMTLRLWSSRVKFSRSADAPAYQQGQNQLYNELNLGRREEYDVLDKRRGRDPEMGGKPQRRKNPQEGLYNELQKDKMAEAYSEIGMKGERRRGKGHDGLYQGLSTATKDTYDALHMQALPPR

SEQ ID NO: 28703 - protein, 236 aa, synthetic construct
DKSVCLFTDFDSQTNVSQSKDSDVYITDKCVLDMRSMDFKSNSAVAWSNKSDFACANAFNNSIIPEDTFFPSPESSCDVKLVEKSFETDTNLNFQNLLVIVLRILLLKVAGFNLLMTLRLWSSRVKFSRSADAPAYQQGQNQLYNELNLGRREEYDVLDKRRGRDPEMGGKPQRRKNPQEGLYNELQKDKMAEAYSEIGMKGERRRGKGHDGLYQGLSTATKDTYDALHMQALPPR

SEQ ID NO: 28704 - protein, 235 aa, synthetic construct
KSVCLFTDFDSQTNVSQSKDSDVYITDKCVLDMRSMDFKSNSAVAWSNKSDFACANAFNNSIIPEDTFFPSPESSCDVKLVEKSFETDTNLNFQNLLVIVLRILLLKVAGFNLLMTLRLWSSRVKFSRSADAPAYQQGQNQLYNELNLGRREEYDVLDKRRGRDPEMGGKPQRRKNPQEGLYNELQKDKMAEAYSEIGMKGERRRGKGHDGLYQGLSTATKDTYDALHMQALPPR

SEQ ID NO: 28705 - protein, 234 aa, synthetic construct
SVCLFTDFDSQTNVSQSKDSDVYITDKCVLDMRSMDFKSNSAVAWSNKSDFACANAFNNSIIPEDTFFPSPESSCDVKLVEKSFETDTNLNFQNLLVIVLRILLLKVAGFNLLMTLRLWSSRVKFSRSADAPAYQQGQNQLYNELNLGRREEYDVLDKRRGRDPEMGGKPQRRKNPQEGLYNELQKDKMAEAYSEIGMKGERRRGKGHDGLYQGLSTATKDTYDALHMQALPPR

SEQ ID NO: 28706 - protein, 233 aa, synthetic construct
VCLFTDFDSQTNVSQSKDSDVYITDKCVLDMRSMDFKSNSAVAWSNKSDFACANAFNNSIIPEDTFFPSPESSCDVKLVEKSFETDTNLNFQNLLVIVLRILLLKVAGFNLLMTLRLWSSRVKFSRSADAPAYQQGQNQLYNELNLGRREEYDVLDKRRGRDPEMGGKPQRRKNPQEGLYNELQKDKMAEAYSEIGMKGERRRGKGHDGLYQGLSTATKDTYDALHMQALPPR

SEQ ID NO: 28707 - protein, 232 aa, synthetic construct
CLFTDFDSQTNVSQSKDSDVYITDKCVLDMRSMDFKSNSAVAWSNKSDFACANAFNNSIIPEDTFFPSPESSCDVKLVEKSFETDTNLNFQNLLVIVLRILLLKVAGFNLLMTLRLWSSRVKFSRSADAPAYQQGQNQLYNELNLGRREEYDVLDKRRGRDPEMGGKPQRRKNPQEGLYNELQKDKMAEAYSEIGMKGERRRGKGHDGLYQGLSTATKDTYDALHMQALPPR

SEQ ID NO: 28708 - protein, 231 aa, synthetic construct
LFTDFDSQTNVSQSKDSDVYITDKCVLDMRSMDFKSNSAVAWSNKSDFACANAFNNSIIPEDTFFPSPESSCDVKLVEKSFETDTNLNFQNLLVIVLRILLLKVAGFNLLMTLRLWSSRVKFSRSADAPAYQQGQNQLYNELNLGRREEYDVLDKRRGRDPEMGGKPQRRKNPQEGLYNELQKDKMAEAYSEIGMKGERRRGKGHDGLYQGLSTATKDTYDALHMQALPPR

SEQ ID NO: 28709 - protein, 230 aa, synthetic construct
FTDFDSQTNVSQSKDSDVYITDKCVLDMRSMDFKSNSAVAWSNKSDFACANAFNNSIIPEDTFFPSPESSCDVKLVEKSFETDTNLNFQNLLVIVLRILLLKVAGFNLLMTLRLWSSRVKFSRSADAPAYQQGQNQLYNELNLGRREEYDVLDKRRGRDPEMGGKPQRRKNPQEGLYNELQKDKMAEAYSEIGMKGERRRGKGHDGLYQGLSTATKDTYDALHMQALPPR

SEQ ID NO: 28710 - protein, 229 aa, synthetic construct
TDFDSQTNVSQSKDSDVYITDKCVLDMRSMDFKSNSAVAWSNKSDFACANAFNNSIIPEDTFFPSPESSCDVKLVEKSFETDTNLNFQNLLVIVLRILLLKVAGFNLLMTLRLWSSRVKFSRSADAPAYQQGQNQLYNELNLGRREEYDVLDKRRGRDPEMGGKPQRRKNPQEGLYNELQKDKMAEAYSEIGMKGERRRGKGHDGLYQGLSTATKDTYDALHMQALPPR

SEQ ID NO: 28711 - protein, 228 aa, synthetic construct
DFDSQTNVSQSKDSDVYITDKCVLDMRSMDFKSNSAVAWSNKSDFACANAFNNSIIPEDTFFPSPESSCDVKLVEKSFETDTNLNFQNLLVIVLRILLLKVAGFNLLMTLRLWSSRVKFSRSADAPAYQQGQNQLYNELNLGRREEYDVLDKRRGRDPEMGGKPQRRKNPQEGLYNELQKDKMAEAYSEIGMKGERRRGKGHDGLYQGLSTATKDTYDALHMQALPPR

SEQ ID NO: 28712 - protein, 227 aa, synthetic construct
FDSQTNVSQSKDSDVYITDKCVLDMRSMDFKSNSAVAWSNKSDFACANAFNNSIIPEDTFFPSPESSCDVKLVEKSFETDTNLNFQNLLVIVLRILLLKVAGFNLLMTLRLWSSRVKFSRSADAPAYQQGQNQLYNELNLGRREEYDVLDKRRGRDPEMGGKPQRRKNPQEGLYNELQKDKMAEAYSEIGMKGERRRGKGHDGLYQGLSTATKDTYDALHMQALPPR

SEQ ID NO: 28713 - protein, 226 aa, synthetic construct
DSQTNVSQSKDSDVYITDKCVLDMRSMDFKSNSAVAWSNKSDFACANAFNNSIIPEDTFFPSPESSCDVKLVEKSFETDTNLNFQNLLVIVLRILLLKVAGFNLLMTLRLWSSRVKFSRSADAPAYQQGQNQLYNELNLGRREEYDVLDKRRGRDPEMGGKPQRRKNPQEGLYNELQKDKMAEAYSEIGMKGERRRGKGHDGLYQGLSTATKDTYDALHMQALPPR

SEQ ID NO: 28714 - protein, 225 aa, synthetic construct
SQTNVSQSKDSDVYITDKCVLDMRSMDFKSNSAVAWSNKSDFACANAFNNSIIPEDTFFPSPESSCDVKLVEKSFETDTNLNFQNLLVIVLRILLLKVAGFNLLMTLRLWSSRVKFSRSADAPAYQQGQNQLYNELNLGRREEYDVLDKRRGRDPEMGGKPQRRKNPQEGLYNELQKDKMAEAYSEIGMKGERRRGKGHDGLYQGLSTATKDTYDALHMQALPPR

SEQ ID NO: 28715 - protein, 224 aa, synthetic construct
QTNVSQSKDSDVYITDKCVLDMRSMDFKSNSAVAWSNKSDFACANAFNNSIIPEDTFFPSPESSCDVKLVEKSFETDTNLNFQNLLVIVLRILLLKVAGFNLLMTLRLWSSRVKFSRSADAPAYQQGQNQLYNELNLGRREEYDVLDKRRGRDPEMGGKPQRRKNPQEGLYNELQKDKMAEAYSEIGMKGERRRGKGHDGLYQGLSTATKDTYDALHMQALPPR

SEQ ID NO: 28716 - protein, 223 aa, synthetic construct
TNVSQSKDSDVYITDKCVLDMRSMDFKSNSAVAWSNKSDFACANAFNNSIIPEDTFFPSPESSCDVKLVEKSFETDTNLNFQNLLVIVLRILLLKVAGFNLLMTLRLWSSRVKFSRSADAPAYQQGQNQLYNELNLGRREEYDVLDKRRGRDPEMGGKPQRRKNPQEGLYNELQKDKMAEAYSEIGMKGERRRGKGHDGLYQGLSTATKDTYDALHMQALPPR

SEQ ID NO: 28717 - protein, 222 aa, synthetic construct
NVSQSKDSDVYITDKCVLDMRSMDFKSNSAVAWSNKSDFACANAFNNSIIPEDTFFPSPESSCDVKLVEKSFETDTNLNFQNLLVIVLRILLLKVAGFNLLMTLRLWSSRVKFSRSADAPAYQQGQNQLYNELNLGRREEYDVLDKRRGRDPEMGGKPQRRKNPQEGLYNELQKDKMAEAYSEIGMKGERRRGKGHDGLYQGLSTATKDTYDALHMQALPPR

SEQ ID NO: 28718 - protein, 221 aa, synthetic construct
VSQSKDSDVYITDKCVLDMRSMDFKSNSAVAWSNKSDFACANAFNNSIIPEDTFFPSPESSCDVKLVEKSFETDTNLNFQNLLVIVLRILLLKVAGFNLLMTLRLWSSRVKFSRSADAPAYQQGQNQLYNELNLGRREEYDVLDKRRGRDPEMGGKPQRRKNPQEGLYNELQKDKMAEAYSEIGMKGERRRGKGHDGLYQGLSTATKDTYDALHMQALPPR

SEQ ID NO: 28719 - protein, 220 aa, synthetic construct
SQSKDSDVYITDKCVLDMRSMDFKSNSAVAWSNKSDFACANAFNNSIIPEDTFFPSPESSCDVKLVEKSFETDTNLNFQNLLVIVLRILLLKVAGFNLLMTLRLWSSRVKFSRSADAPAYQQGQNQLYNELNLGRREEYDVLDKRRGRDPEMGGKPQRRKNPQEGLYNELQKDKMAEAYSEIGMKGERRRGKGHDGLYQGLSTATKDTYDALHMQALPPR

SEQ ID NO: 28720 - protein, 219 aa, synthetic construct
QSKDSDVYITDKCVLDMRSMDFKSNSAVAWSNKSDFACANAFNNSIIPEDTFFPSPESSCDVKLVEKSFETDTNLNFQNLLVIVLRILLLKVAGFNLLMTLRLWSSRVKFSRSADAPAYQQGQNQLYNELNLGRREEYDVLDKRRGRDPEMGGKPQRRKNPQEGLYNELQKDKMAEAYSEIGMKGERRRGKGHDGLYQGLSTATKDTYDALHMQALPPR

SEQ ID NO: 28721 - protein, 218 aa, synthetic construct
SKDSDVYITDKCVLDMRSMDFKSNSAVAWSNKSDFACANAFNNSIIPEDTFFPSPESSCDVKLVEKSFETDTNLNFQNLLVIVLRILLLKVAGFNLLMTLRLWSSRVKFSRSADAPAYQQGQNQLYNELNLGRREEYDVLDKRRGRDPEMGGKPQRRKNPQEGLYNELQKDKMAEAYSEIGMKGERRRGKGHDGLYQGLSTATKDTYDALHMQALPPR

SEQ ID NO: 28722 - protein, 217 aa, synthetic construct
KDSDVYITDKCVLDMRSMDFKSNSAVAWSNKSDFACANAFNNSIIPEDTFFPSPESSCDVKLVEKSFETDTNLNFQNLLVIVLRILLLKVAGFNLLMTLRLWSSRVKFSRSADAPAYQQGQNQLYNELNLGRREEYDVLDKRRGRDPEMGGKPQRRKNPQEGLYNELQKDKMAEAYSEIGMKGERRRGKGHDGLYQGLSTATKDTYDALHMQALPPR

SEQ ID NO: 28723 - protein, 216 aa, synthetic construct
DSDVYITDKCVLDMRSMDFKSNSAVAWSNKSDFACANAFNNSIIPEDTFFPSPESSCDVKLVEKSFETDTNLNFQNLLVIVLRILLLKVAGFNLLMTLRLWSSRVKFSRSADAPAYQQGQNQLYNELNLGRREEYDVLDKRRGRDPEMGGKPQRRKNPQEGLYNELQKDKMAEAYSEIGMKGERRRGKGHDGLYQGLSTATKDTYDALHMQALPPR

SEQ ID NO: 28724 - protein, 215 aa, synthetic construct
SDVYITDKCVLDMRSMDFKSNSAVAWSNKSDFACANAFNNSIIPEDTFFPSPESSCDVKLVEKSFETDTNLNFQNLLVIVLRILLLKVAGFNLLMTLRLWSSRVKFSRSADAPAYQQGQNQLYNELNLGRREEYDVLDKRRGRDPEMGGKPQRRKNPQEGLYNELQKDKMAEAYSEIGMKGERRRGKGHDGLYQGLSTATKDTYDALHMQALPPR

SEQ ID NO: 28725 - protein, 214 aa, synthetic construct
DVYITDKCVLDMRSMDFKSNSAVAWSNKSDFACANAFNNSIIPEDTFFPSPESSCDVKLVEKSFETDTNLNFQNLLVIVLRILLLKVAGFNLLMTLRLWSSRVKFSRSADAPAYQQGQNQLYNELNLGRREEYDVLDKRRGRDPEMGGKPQRRKNPQEGLYNELQKDKMAEAYSEIGMKGERRRGKGHDGLYQGLSTATKDTYDALHMQALPPR

SEQ ID NO: 28726 - protein, 213 aa, synthetic construct
VYITDKCVLDMRSMDFKSNSAVAWSNKSDFACANAFNNSIIPEDTFFPSPESSCDVKLVEKSFETDTNLNFQNLLVIVLRILLLKVAGFNLLMTLRLWSSRVKFSRSADAPAYQQGQNQLYNELNLGRREEYDVLDKRRGRDPEMGGKPQRRKNPQEGLYNELQKDKMAEAYSEIGMKGERRRGKGHDGLYQGLSTATKDTYDALHMQALPPR

SEQ ID NO: 28727 - protein, 212 aa, synthetic construct
YITDKCVLDMRSMDFKSNSAVAWSNKSDFACANAFNNSIIPEDTFFPSPESSCDVKLVEKSFETDTNLNFQNLLVIVLRILLLKVAGFNLLMTLRLWSSRVKFSRSADAPAYQQGQNQLYNELNLGRREEYDVLDKRRGRDPEMGGKPQRRKNPQEGLYNELQKDKMAEAYSEIGMKGERRRGKGHDGLYQGLSTATKDTYDALHMQALPPR

SEQ ID NO: 28728 - protein, 211 aa, synthetic construct
ITDKCVLDMRSMDFKSNSAVAWSNKSDFACANAFNNSIIPEDTFFPSPESSCDVKLVEKSFETDTNLNFQNLLVIVLRILLLKVAGFNLLMTLRLWSSRVKFSRSADAPAYQQGQNQLYNELNLGRREEYDVLDKRRGRDPEMGGKPQRRKNPQEGLYNELQKDKMAEAYSEIGMKGERRRGKGHDGLYQGLSTATKDTYDALHMQALPPR

SEQ ID NO: 28729 - protein, 210 aa, synthetic construct
TDKCVLDMRSMDFKSNSAVAWSNKSDFACANAFNNSIIPEDTFFPSPESSCDVKLVEKSFETDTNLNFQNLLVIVLRILLLKVAGFNLLMTLRLWSSRVKFSRSADAPAYQQGQNQLYNELNLGRREEYDVLDKRRGRDPEMGGKPQRRKNPQEGLYNELQKDKMAEAYSEIGMKGERRRGKGHDGLYQGLSTATKDTYDALHMQALPPR

SEQ ID NO: 28730 - protein, 209 aa, synthetic construct
DKCVLDMRSMDFKSNSAVAWSNKSDFACANAFNNSIIPEDTFFPSPESSCDVKLVEKSFETDTNLNFQNLLVIVLRILLLKVAGFNLLMTLRLWSSRVKFSRSADAPAYQQGQNQLYNELNLGRREEYDVLDKRRGRDPEMGGKPQRRKNPQEGLYNELQKDKMAEAYSEIGMKGERRRGKGHDGLYQGLSTATKDTYDALHMQALPPR

SEQ ID NO: 28731 - protein, 207 aa, synthetic construct
CVLDMRSMDFKSNSAVAWSNKSDFACANAFNNSIIPEDTFFPSPESSCDVKLVEKSFETDTNLNFQNLLVIVLRILLLKVAGFNLLMTLRLWSSRVKFSRSADAPAYQQGQNQLYNELNLGRREEYDVLDKRRGRDPEMGGKPQRRKNPQEGLYNELQKDKMAEAYSEIGMKGERRRGKGHDGLYQGLSTATKDTYDALHMQALPPR

SEQ ID NO: 28732 - protein, 206 aa, synthetic construct
VLDMRSMDFKSNSAVAWSNKSDFACANAFNNSIIPEDTFFPSPESSCDVKLVEKSFETDTNLNFQNLLVIVLRILLLKVAGFNLLMTLRLWSSRVKFSRSADAPAYQQGQNQLYNELNLGRREEYDVLDKRRGRDPEMGGKPQRRKNPQEGLYNELQKDKMAEAYSEIGMKGERRRGKGHDGLYQGLSTATKDTYDALHMQALPPR

SEQ ID NO: 28733 - protein, 205 aa, synthetic construct
LDMRSMDFKSNSAVAWSNKSDFACANAFNNSIIPEDTFFPSPESSCDVKLVEKSFETDTNLNFQNLLVIVLRILLLKVAGFNLLMTLRLWSSRVKFSRSADAPAYQQGQNQLYNELNLGRREEYDVLDKRRGRDPEMGGKPQRRKNPQEGLYNELQKDKMAEAYSEIGMKGERRRGKGHDGLYQGLSTATKDTYDALHMQALPPR

SEQ ID NO: 28734 - protein, 204 aa, synthetic construct
DMRSMDFKSNSAVAWSNKSDFACANAFNNSIIPEDTFFPSPESSCDVKLVEKSFETDTNLNFQNLLVIVLRILLLKVAGFNLLMTLRLWSSRVKFSRSADAPAYQQGQNQLYNELNLGRREEYDVLDKRRGRDPEMGGKPQRRKNPQEGLYNELQKDKMAEAYSEIGMKGERRRGKGHDGLYQGLSTATKDTYDALHMQALPPR

SEQ ID NO: 28735 - protein, 203 aa, synthetic construct
MRSMDFKSNSAVAWSNKSDFACANAFNNSIIPEDTFFPSPESSCDVKLVEKSFETDTNLNFQNLLVIVLRILLLKVAGFNLLMTLRLWSSRVKFSRSADAPAYQQGQNQLYNELNLGRREEYDVLDKRRGRDPEMGGKPQRRKNPQEGLYNELQKDKMAEAYSEIGMKGERRRGKGHDGLYQGLSTATKDTYDALHMQALPPR

SEQ ID NO: 28736 - protein, 202 aa, synthetic construct
RSMDFKSNSAVAWSNKSDFACANAFNNSIIPEDTFFPSPESSCDVKLVEKSFETDTNLNFQNLLVIVLRILLLKVAGFNLLMTLRLWSSRVKFSRSADAPAYQQGQNQLYNELNLGRREEYDVLDKRRGRDPEMGGKPQRRKNPQEGLYNELQKDKMAEAYSEIGMKGERRRGKGHDGLYQGLSTATKDTYDALHMQALPPR

SEQ ID NO: 28737 - protein, 201 aa, synthetic construct
SMDFKSNSAVAWSNKSDFACANAFNNSIIPEDTFFPSPESSCDVKLVEKSFETDTNLNFQNLLVIVLRILLLKVAGFNLLMTLRLWSSRVKFSRSADAPAYQQGQNQLYNELNLGRREEYDVLDKRRGRDPEMGGKPQRRKNPQEGLYNELQKDKMAEAYSEIGMKGERRRGKGHDGLYQGLSTATKDTYDALHMQALPPR

SEQ ID NO: 28738 - protein, 200 aa, synthetic construct
MDFKSNSAVAWSNKSDFACANAFNNSIIPEDTFFPSPESSCDVKLVEKSFETDTNLNFQNLLVIVLRILLLKVAGFNLLMTLRLWSSRVKFSRSADAPAYQQGQNQLYNELNLGRREEYDVLDKRRGRDPEMGGKPQRRKNPQEGLYNELQKDKMAEAYSEIGMKGERRRGKGHDGLYQGLSTATKDTYDALHMQALPPR

SEQ ID NO: 28739 - protein, 199 aa, synthetic construct
DFKSNSAVAWSNKSDFACANAFNNSIIPEDTFFPSPESSCDVKLVEKSFETDTNLNFQNLLVIVLRILLLKVAGFNLLMTLRLWSSRVKFSRSADAPAYQQGQNQLYNELNLGRREEYDVLDKRRGRDPEMGGKPQRRKNPQEGLYNELQKDKMAEAYSEIGMKGERRRGKGHDGLYQGLSTATKDTYDALHMQALPPR

SEQ ID NO: 28740 - protein, 198 aa, synthetic construct
FKSNSAVAWSNKSDFACANAFNNSIIPEDTFFPSPESSCDVKLVEKSFETDTNLNFQNLLVIVLRILLLKVAGFNLLMTLRLWSSRVKFSRSADAPAYQQGQNQLYNELNLGRREEYDVLDKRRGRDPEMGGKPQRRKNPQEGLYNELQKDKMAEAYSEIGMKGERRRGKGHDGLYQGLSTATKDTYDALHMQALPPR

SEQ ID NO: 28741 - protein, 197 aa, synthetic construct
KSNSAVAWSNKSDFACANAFNNSIIPEDTFFPSPESSCDVKLVEKSFETDTNLNFQNLLVIVLRILLLKVAGFNLLMTLRLWSSRVKFSRSADAPAYQQGQNQLYNELNLGRREEYDVLDKRRGRDPEMGGKPQRRKNPQEGLYNELQKDKMAEAYSEIGMKGERRRGKGHDGLYQGLSTATKDTYDALHMQALPPR

SEQ ID NO: 28742 - protein, 196 aa, synthetic construct
SNSAVAWSNKSDFACANAFNNSIIPEDTFFPSPESSCDVKLVEKSFETDTNLNFQNLLVIVLRILLLKVAGFNLLMTLRLWSSRVKFSRSADAPAYQQGQNQLYNELNLGRREEYDVLDKRRGRDPEMGGKPQRRKNPQEGLYNELQKDKMAEAYSEIGMKGERRRGKGHDGLYQGLSTATKDTYDALHMQALPPR

SEQ ID NO: 28743 - protein, 195 aa, synthetic construct
NSAVAWSNKSDFACANAFNNSIIPEDTFFPSPESSCDVKLVEKSFETDTNLNFQNLLVIVLRILLLKVAGFNLLMTLRLWSSRVKFSRSADAPAYQQGQNQLYNELNLGRREEYDVLDKRRGRDPEMGGKPQRRKNPQEGLYNELQKDKMAEAYSEIGMKGERRRGKGHDGLYQGLSTATKDTYDALHMQALPPR

SEQ ID NO: 28744 - protein, 194 aa, synthetic construct
SAVAWSNKSDFACANAFNNSIIPEDTFFPSPESSCDVKLVEKSFETDTNLNFQNLLVIVLRILLLKVAGFNLLMTLRLWSSRVKFSRSADAPAYQQGQNQLYNELNLGRREEYDVLDKRRGRDPEMGGKPQRRKNPQEGLYNELQKDKMAEAYSEIGMKGERRRGKGHDGLYQGLSTATKDTYDALHMQALPPR

SEQ ID NO: 28745 - protein, 193 aa, synthetic construct
AVAWSNKSDFACANAFNNSIIPEDTFFPSPESSCDVKLVEKSFETDTNLNFQNLLVIVLRILLLKVAGFNLLMTLRLWSSRVKFSRSADAPAYQQGQNQLYNELNLGRREEYDVLDKRRGRDPEMGGKPQRRKNPQEGLYNELQKDKMAEAYSEIGMKGERRRGKGHDGLYQGLSTATKDTYDALHMQALPPR

SEQ ID NO: 28746 - protein, 192 aa, synthetic construct
VAWSNKSDFACANAFNNSIIPEDTFFPSPESSCDVKLVEKSFETDTNLNFQNLLVIVLRILLLKVAGFNLLMTLRLWSSRVKFSRSADAPAYQQGQNQLYNELNLGRREEYDVLDKRRGRDPEMGGKPQRRKNPQEGLYNELQKDKMAEAYSEIGMKGERRRGKGHDGLYQGLSTATKDTYDALHMQALPPR

SEQ ID NO: 28747 - protein, 191 aa, synthetic construct
AWSNKSDFACANAFNNSIIPEDTFFPSPESSCDVKLVEKSFETDTNLNFQNLLVIVLRILLLKVAGFNLLMTLRLWSSRVKFSRSADAPAYQQGQNQLYNELNLGRREEYDVLDKRRGRDPEMGGKPQRRKNPQEGLYNELQKDKMAEAYSEIGMKGERRRGKGHDGLYQGLSTATKDTYDALHMQALPPR

SEQ ID NO: 28748 - protein, 190 aa, synthetic construct
WSNKSDFACANAFNNSIIPEDTFFPSPESSCDVKLVEKSFETDTNLNFQNLLVIVLRILLLKVAGFNLLMTLRLWSSRVKFSRSADAPAYQQGQNQLYNELNLGRREEYDVLDKRRGRDPEMGGKPQRRKNPQEGLYNELQKDKMAEAYSEIGMKGERRRGKGHDGLYQGLSTATKDTYDALHMQALPPR

SEQ ID NO: 28749 - protein, 189 aa, synthetic construct
SNKSDFACANAFNNSIIPEDTFFPSPESSCDVKLVEKSFETDTNLNFQNLLVIVLRILLLKVAGFNLLMTLRLWSSRVKFSRSADAPAYQQGQNQLYNELNLGRREEYDVLDKRRGRDPEMGGKPQRRKNPQEGLYNELQKDKMAEAYSEIGMKGERRRGKGHDGLYQGLSTATKDTYDALHMQALPPR

SEQ ID NO: 28750 - protein, 188 aa, synthetic construct
NKSDFACANAFNNSIIPEDTFFPSPESSCDVKLVEKSFETDTNLNFQNLLVIVLRILLLKVAGFNLLMTLRLWSSRVKFSRSADAPAYQQGQNQLYNELNLGRREEYDVLDKRRGRDPEMGGKPQRRKNPQEGLYNELQKDKMAEAYSEIGMKGERRRGKGHDGLYQGLSTATKDTYDALHMQALPPR

SEQ ID NO: 28751 - protein, 187 aa, synthetic construct
KSDFACANAFNNSIIPEDTFFPSPESSCDVKLVEKSFETDTNLNFQNLLVIVLRILLLKVAGFNLLMTLRLWSSRVKFSRSADAPAYQQGQNQLYNELNLGRREEYDVLDKRRGRDPEMGGKPQRRKNPQEGLYNELQKDKMAEAYSEIGMKGERRRGKGHDGLYQGLSTATKDTYDALHMQALPPR

SEQ ID NO: 28752 - protein, 186 aa, synthetic construct
SDFACANAFNNSIIPEDTFFPSPESSCDVKLVEKSFETDTNLNFQNLLVIVLRILLLKVAGFNLLMTLRLWSSRVKFSRSADAPAYQQGQNQLYNELNLGRREEYDVLDKRRGRDPEMGGKPQRRKNPQEGLYNELQKDKMAEAYSEIGMKGERRRGKGHDGLYQGLSTATKDTYDALHMQALPPR

SEQ ID NO: 28753 - protein, 185 aa, synthetic construct
DFACANAFNNSIIPEDTFFPSPESSCDVKLVEKSFETDTNLNFQNLLVIVLRILLLKVAGFNLLMTLRLWSSRVKFSRSADAPAYQQGQNQLYNELNLGRREEYDVLDKRRGRDPEMGGKPQRRKNPQEGLYNELQKDKMAEAYSEIGMKGERRRGKGHDGLYQGLSTATKDTYDALHMQALPPR

SEQ ID NO: 28754 - protein, 184 aa, synthetic construct
FACANAFNNSIIPEDTFFPSPESSCDVKLVEKSFETDTNLNFQNLLVIVLRILLLKVAGFNLLMTLRLWSSRVKFSRSADAPAYQQGQNQLYNELNLGRREEYDVLDKRRGRDPEMGGKPQRRKNPQEGLYNELQKDKMAEAYSEIGMKGERRRGKGHDGLYQGLSTATKDTYDALHMQALPPR

SEQ ID NO: 28755 - protein, 183 aa, synthetic construct
ACANAFNNSIIPEDTFFPSPESSCDVKLVEKSFETDTNLNFQNLLVIVLRILLLKVAGFNLLMTLRLWSSRVKFSRSADAPAYQQGQNQLYNELNLGRREEYDVLDKRRGRDPEMGGKPQRRKNPQEGLYNELQKDKMAEAYSEIGMKGERRRGKGHDGLYQGLSTATKDTYDALHMQALPPR

SEQ ID NO: 28756 - protein, 182 aa, synthetic construct
CANAFNNSIIPEDTFFPSPESSCDVKLVEKSFETDTNLNFQNLLVIVLRILLLKVAGFNLLMTLRLWSSRVKFSRSADAPAYQQGQNQLYNELNLGRREEYDVLDKRRGRDPEMGGKPQRRKNPQEGLYNELQKDKMAEAYSEIGMKGERRRGKGHDGLYQGLSTATKDTYDALHMQALPPR

SEQ ID NO: 28757 - protein, 181 aa, synthetic construct
ANAFNNSIIPEDTFFPSPESSCDVKLVEKSFETDTNLNFQNLLVIVLRILLLKVAGFNLLMTLRLWSSRVKFSRSADAPAYQQGQNQLYNELNLGRREEYDVLDKRRGRDPEMGGKPQRRKNPQEGLYNELQKDKMAEAYSEIGMKGERRRGKGHDGLYQGLSTATKDTYDALHMQALPPR

SEQ ID NO: 28758 - protein, 180 aa, synthetic construct
NAFNNSIIPEDTFFPSPESSCDVKLVEKSFETDTNLNFQNLLVIVLRILLLKVAGFNLLMTLRLWSSRVKFSRSADAPAYQQGQNQLYNELNLGRREEYDVLDKRRGRDPEMGGKPQRRKNPQEGLYNELQKDKMAEAYSEIGMKGERRRGKGHDGLYQGLSTATKDTYDALHMQALPPR

SEQ ID NO: 28759 - protein, 179 aa, synthetic construct
AFNNSIIPEDTFFPSPESSCDVKLVEKSFETDTNLNFQNLLVIVLRILLLKVAGFNLLMTLRLWSSRVKFSRSADAPAYQQGQNQLYNELNLGRREEYDVLDKRRGRDPEMGGKPQRRKNPQEGLYNELQKDKMAEAYSEIGMKGERRRGKGHDGLYQGLSTATKDTYDALHMQALPPR

SEQ ID NO: 28760 - protein, 178 aa, synthetic construct
FNNSIIPEDTFFPSPESSCDVKLVEKSFETDTNLNFQNLLVIVLRILLLKVAGFNLLMTLRLWSSRVKFSRSADAPAYQQGQNQLYNELNLGRREEYDVLDKRRGRDPEMGGKPQRRKNPQEGLYNELQKDKMAEAYSEIGMKGERRRGKGHDGLYQGLSTATKDTYDALHMQALPPR

SEQ ID NO: 28761 - protein, 177 aa, synthetic construct
NNSIIPEDTFFPSPESSCDVKLVEKSFETDTNLNFQNLLVIVLRILLLKVAGFNLLMTLRLWSSRVKFSRSADAPAYQQGQNQLYNELNLGRREEYDVLDKRRGRDPEMGGKPQRRKNPQEGLYNELQKDKMAEAYSEIGMKGERRRGKGHDGLYQGLSTATKDTYDALHMQALPPR

SEQ ID NO: 28762 - protein, 176 aa, synthetic construct
NSIIPEDTFFPSPESSCDVKLVEKSFETDTNLNFQNLLVIVLRILLLKVAGFNLLMTLRLWSSRVKFSRSADAPAYQQGQNQLYNELNLGRREEYDVLDKRRGRDPEMGGKPQRRKNPQEGLYNELQKDKMAEAYSEIGMKGERRRGKGHDGLYQGLSTATKDTYDALHMQALPPR

SEQ ID NO: 28763 - protein, 175 aa, synthetic construct
SIIPEDTFFPSPESSCDVKLVEKSFETDTNLNFQNLLVIVLRILLLKVAGFNLLMTLRLWSSRVKFSRSADAPAYQQGQNQLYNELNLGRREEYDVLDKRRGRDPEMGGKPQRRKNPQEGLYNELQKDKMAEAYSEIGMKGERRRGKGHDGLYQGLSTATKDTYDALHMQALPPR

SEQ ID NO: 28764 - protein, 174 aa, synthetic construct
IIPEDTFFPSPESSCDVKLVEKSFETDTNLNFQNLLVIVLRILLLKVAGFNLLMTLRLWSSRVKFSRSADAPAYQQGQNQLYNELNLGRREEYDVLDKRRGRDPEMGGKPQRRKNPQEGLYNELQKDKMAEAYSEIGMKGERRRGKGHDGLYQGLSTATKDTYDALHMQALPPR

SEQ ID NO: 28765 - protein, 173 aa, synthetic construct
IPEDTFFPSPESSCDVKLVEKSFETDTNLNFQNLLVIVLRILLLKVAGFNLLMTLRLWSSRVKFSRSADAPAYQQGQNQLYNELNLGRREEYDVLDKRRGRDPEMGGKPQRRKNPQEGLYNELQKDKMAEAYSEIGMKGERRRGKGHDGLYQGLSTATKDTYDALHMQALPPR

SEQ ID NO: 28766 - protein, 172 aa, synthetic construct
PEDTFFPSPESSCDVKLVEKSFETDTNLNFQNLLVIVLRILLLKVAGFNLLMTLRLWSSRVKFSRSADAPAYQQGQNQLYNELNLGRREEYDVLDKRRGRDPEMGGKPQRRKNPQEGLYNELQKDKMAEAYSEIGMKGERRRGKGHDGLYQGLSTATKDTYDALHMQALPPR

SEQ ID NO: 28767 - protein, 171 aa, synthetic construct
EDTFFPSPESSCDVKLVEKSFETDTNLNFQNLLVIVLRILLLKVAGFNLLMTLRLWSSRVKFSRSADAPAYQQGQNQLYNELNLGRREEYDVLDKRRGRDPEMGGKPQRRKNPQEGLYNELQKDKMAEAYSEIGMKGERRRGKGHDGLYQGLSTATKDTYDALHMQALPPR

SEQ ID NO: 28768 - protein, 170 aa, synthetic construct
DTFFPSPESSCDVKLVEKSFETDTNLNFQNLLVIVLRILLLKVAGFNLLMTLRLWSSRVKFSRSADAPAYQQGQNQLYNELNLGRREEYDVLDKRRGRDPEMGGKPQRRKNPQEGLYNELQKDKMAEAYSEIGMKGERRRGKGHDGLYQGLSTATKDTYDALHMQALPPR

SEQ ID NO: 28769 - protein, 169 aa, synthetic construct
TFFPSPESSCDVKLVEKSFETDTNLNFQNLLVIVLRILLLKVAGFNLLMTLRLWSSRVKFSRSADAPAYQQGQNQLYNELNLGRREEYDVLDKRRGRDPEMGGKPQRRKNPQEGLYNELQKDKMAEAYSEIGMKGERRRGKGHDGLYQGLSTATKDTYDALHMQALPPR

SEQ ID NO: 28770 - protein, 168 aa, synthetic construct
FFPSPESSCDVKLVEKSFETDTNLNFQNLLVIVLRILLLKVAGFNLLMTLRLWSSRVKFSRSADAPAYQQGQNQLYNELNLGRREEYDVLDKRRGRDPEMGGKPQRRKNPQEGLYNELQKDKMAEAYSEIGMKGERRRGKGHDGLYQGLSTATKDTYDALHMQALPPR

SEQ ID NO: 28771 - protein, 167 aa, synthetic construct
FPSPESSCDVKLVEKSFETDTNLNFQNLLVIVLRILLLKVAGFNLLMTLRLWSSRVKFSRSADAPAYQQGQNQLYNELNLGRREEYDVLDKRRGRDPEMGGKPQRRKNPQEGLYNELQKDKMAEAYSEIGMKGERRRGKGHDGLYQGLSTATKDTYDALHMQALPPR

SEQ ID NO: 28772 - protein, 166 aa, synthetic construct
PSPESSCDVKLVEKSFETDTNLNFQNLLVIVLRILLLKVAGFNLLMTLRLWSSRVKFSRSADAPAYQQGQNQLYNELNLGRREEYDVLDKRRGRDPEMGGKPQRRKNPQEGLYNELQKDKMAEAYSEIGMKGERRRGKGHDGLYQGLSTATKDTYDALHMQALPPR

SEQ ID NO: 28773 - protein, 165 aa, synthetic construct
SPESSCDVKLVEKSFETDTNLNFQNLLVIVLRILLLKVAGFNLLMTLRLWSSRVKFSRSADAPAYQQGQNQLYNELNLGRREEYDVLDKRRGRDPEMGGKPQRRKNPQEGLYNELQKDKMAEAYSEIGMKGERRRGKGHDGLYQGLSTATKDTYDALHMQALPPR

SEQ ID NO: 28774 - protein, 164 aa, synthetic construct
PESSCDVKLVEKSFETDTNLNFQNLLVIVLRILLLKVAGFNLLMTLRLWSSRVKFSRSADAPAYQQGQNQLYNELNLGRREEYDVLDKRRGRDPEMGGKPQRRKNPQEGLYNELQKDKMAEAYSEIGMKGERRRGKGHDGLYQGLSTATKDTYDALHMQALPPR

SEQ ID NO: 28775 - protein, 163 aa, synthetic construct
ESSCDVKLVEKSFETDTNLNFQNLLVIVLRILLLKVAGFNLLMTLRLWSSRVKFSRSADAPAYQQGQNQLYNELNLGRREEYDVLDKRRGRDPEMGGKPQRRKNPQEGLYNELQKDKMAEAYSEIGMKGERRRGKGHDGLYQGLSTATKDTYDALHMQALPPR

SEQ ID NO: 28776 - protein, 162 aa, synthetic construct
SSCDVKLVEKSFETDTNLNFQNLLVIVLRILLLKVAGFNLLMTLRLWSSRVKFSRSADAPAYQQGQNQLYNELNLGRREEYDVLDKRRGRDPEMGGKPQRRKNPQEGLYNELQKDKMAEAYSEIGMKGERRRGKGHDGLYQGLSTATKDTYDALHMQALPPR

SEQ ID NO: 28777 - protein, 161 aa, synthetic construct
SCDVKLVEKSFETDTNLNFQNLLVIVLRILLLKVAGFNLLMTLRLWSSRVKFSRSADAPAYQQGQNQLYNELNLGRREEYDVLDKRRGRDPEMGGKPQRRKNPQEGLYNELQKDKMAEAYSEIGMKGERRRGKGHDGLYQGLSTATKDTYDALHMQALPPR

SEQ ID NO: 28778 - protein, 160 aa, synthetic construct
CDVKLVEKSFETDTNLNFQNLLVIVLRILLLKVAGFNLLMTLRLWSSRVKFSRSADAPAYQQGQNQLYNELNLGRREEYDVLDKRRGRDPEMGGKPQRRKNPQEGLYNELQKDKMAEAYSEIGMKGERRRGKGHDGLYQGLSTATKDTYDALHMQALPPR

SEQ ID NO: 28779 - protein, 159 aa, synthetic construct
DVKLVEKSFETDTNLNFQNLLVIVLRILLLKVAGFNLLMTLRLWSSRVKFSRSADAPAYQQGQNQLYNELNLGRREEYDVLDKRRGRDPEMGGKPQRRKNPQEGLYNELQKDKMAEAYSEIGMKGERRRGKGHDGLYQGLSTATKDTYDALHMQALPPR

SEQ ID NO: 28780 - protein, 158 aa, synthetic construct
VKLVEKSFETDTNLNFQNLLVIVLRILLLKVAGFNLLMTLRLWSSRVKFSRSADAPAYQQGQNQLYNELNLGRREEYDVLDKRRGRDPEMGGKPQRRKNPQEGLYNELQKDKMAEAYSEIGMKGERRRGKGHDGLYQGLSTATKDTYDALHMQALPPR

SEQ ID NO: 28781 - protein, 157 aa, synthetic construct
KLVEKSFETDTNLNFQNLLVIVLRILLLKVAGFNLLMTLRLWSSRVKFSRSADAPAYQQGQNQLYNELNLGRREEYDVLDKRRGRDPEMGGKPQRRKNPQEGLYNELQKDKMAEAYSEIGMKGERRRGKGHDGLYQGLSTATKDTYDALHMQALPPR

SEQ ID NO: 28782 - protein, 156 aa, synthetic construct
LVEKSFETDTNLNFQNLLVIVLRILLLKVAGFNLLMTLRLWSSRVKFSRSADAPAYQQGQNQLYNELNLGRREEYDVLDKRRGRDPEMGGKPQRRKNPQEGLYNELQKDKMAEAYSEIGMKGERRRGKGHDGLYQGLSTATKDTYDALHMQALPPR

SEQ ID NO: 28783 - protein, 155 aa, synthetic construct
VEKSFETDTNLNFQNLLVIVLRILLLKVAGFNLLMTLRLWSSRVKFSRSADAPAYQQGQNQLYNELNLGRREEYDVLDKRRGRDPEMGGKPQRRKNPQEGLYNELQKDKMAEAYSEIGMKGERRRGKGHDGLYQGLSTATKDTYDALHMQALPPR

SEQ ID NO: 28784 - protein, 154 aa, synthetic construct
EKSFETDTNLNFQNLLVIVLRILLLKVAGFNLLMTLRLWSSRVKFSRSADAPAYQQGQNQLYNELNLGRREEYDVLDKRRGRDPEMGGKPQRRKNPQEGLYNELQKDKMAEAYSEIGMKGERRRGKGHDGLYQGLSTATKDTYDALHMQALPPR

SEQ ID NO: 28785 - protein, 153 aa, synthetic construct
KSFETDTNLNFQNLLVIVLRILLLKVAGFNLLMTLRLWSSRVKFSRSADAPAYQQGQNQLYNELNLGRREEYDVLDKRRGRDPEMGGKPQRRKNPQEGLYNELQKDKMAEAYSEIGMKGERRRGKGHDGLYQGLSTATKDTYDALHMQALPPR

SEQ ID NO: 28786 - protein, 152 aa, synthetic construct
SFETDTNLNFQNLLVIVLRILLLKVAGFNLLMTLRLWSSRVKFSRSADAPAYQQGQNQLYNELNLGRREEYDVLDKRRGRDPEMGGKPQRRKNPQEGLYNELQKDKMAEAYSEIGMKGERRRGKGHDGLYQGLSTATKDTYDALHMQALPPR

SEQ ID NO: 28787 - protein, 279 aa, synthetic construct
GQPKANPTVTLFPPSSEELQANKATLVCLISDFYPGAVTVAWKADGSPVKAGVETTKPSKQSNNKYAASSYLSLTPEQWKSHRSYSCQVTHEGSTVEKTVAPTECSIPEDTFFPSPESSCDVKLVEKSFETDTNLNFQNLLVIVLRILLLKVAGFNLLMTLRLWSSRVKFSRSADAPAYQQGQNQLYNELNLGRREEYDVLDKRRGRDPEMGGKPQRRKNPQEGLYNELQKDKMAEAYSEIGMKGERRRGKGHDGLYQGLSTATKDTYDALHMQALPPR

SEQ ID NO: 28788 - protein, 278 aa, synthetic construct
QPKANPTVTLFPPSSEELQANKATLVCLISDFYPGAVTVAWKADGSPVKAGVETTKPSKQSNNKYAASSYLSLTPEQWKSHRSYSCQVTHEGSTVEKTVAPTECSIPEDTFFPSPESSCDVKLVEKSFETDTNLNFQNLLVIVLRILLLKVAGFNLLMTLRLWSSRVKFSRSADAPAYQQGQNQLYNELNLGRREEYDVLDKRRGRDPEMGGKPQRRKNPQEGLYNELQKDKMAEAYSEIGMKGERRRGKGHDGLYQGLSTATKDTYDALHMQALPPR

SEQ ID NO: 28789 - protein, 277 aa, synthetic construct
PKANPTVTLFPPSSEELQANKATLVCLISDFYPGAVTVAWKADGSPVKAGVETTKPSKQSNNKYAASSYLSLTPEQWKSHRSYSCQVTHEGSTVEKTVAPTECSIPEDTFFPSPESSCDVKLVEKSFETDTNLNFQNLLVIVLRILLLKVAGFNLLMTLRLWSSRVKFSRSADAPAYQQGQNQLYNELNLGRREEYDVLDKRRGRDPEMGGKPQRRKNPQEGLYNELQKDKMAEAYSEIGMKGERRRGKGHDGLYQGLSTATKDTYDALHMQALPPR

SEQ ID NO: 28790 - protein, 276 aa, synthetic construct
KANPTVTLFPPSSEELQANKATLVCLISDFYPGAVTVAWKADGSPVKAGVETTKPSKQSNNKYAASSYLSLTPEQWKSHRSYSCQVTHEGSTVEKTVAPTECSIPEDTFFPSPESSCDVKLVEKSFETDTNLNFQNLLVIVLRILLLKVAGFNLLMTLRLWSSRVKFSRSADAPAYQQGQNQLYNELNLGRREEYDVLDKRRGRDPEMGGKPQRRKNPQEGLYNELQKDKMAEAYSEIGMKGERRRGKGHDGLYQGLSTATKDTYDALHMQALPPR

SEQ ID NO: 28791 - protein, 275 aa, synthetic construct
ANPTVTLFPPSSEELQANKATLVCLISDFYPGAVTVAWKADGSPVKAGVETTKPSKQSNNKYAASSYLSLTPEQWKSHRSYSCQVTHEGSTVEKTVAPTECSIPEDTFFPSPESSCDVKLVEKSFETDTNLNFQNLLVIVLRILLLKVAGFNLLMTLRLWSSRVKFSRSADAPAYQQGQNQLYNELNLGRREEYDVLDKRRGRDPEMGGKPQRRKNPQEGLYNELQKDKMAEAYSEIGMKGERRRGKGHDGLYQGLSTATKDTYDALHMQALPPR

SEQ ID NO: 28792 - protein, 274 aa, synthetic construct
NPTVTLFPPSSEELQANKATLVCLISDFYPGAVTVAWKADGSPVKAGVETTKPSKQSNNKYAASSYLSLTPEQWKSHRSYSCQVTHEGSTVEKTVAPTECSIPEDTFFPSPESSCDVKLVEKSFETDTNLNFQNLLVIVLRILLLKVAGFNLLMTLRLWSSRVKFSRSADAPAYQQGQNQLYNELNLGRREEYDVLDKRRGRDPEMGGKPQRRKNPQEGLYNELQKDKMAEAYSEIGMKGERRRGKGHDGLYQGLSTATKDTYDALHMQALPPR

SEQ ID NO: 28793 - protein, 273 aa, synthetic construct
PTVTLFPPSSEELQANKATLVCLISDFYPGAVTVAWKADGSPVKAGVETTKPSKQSNNKYAASSYLSLTPEQWKSHRSYSCQVTHEGSTVEKTVAPTECSIPEDTFFPSPESSCDVKLVEKSFETDTNLNFQNLLVIVLRILLLKVAGFNLLMTLRLWSSRVKFSRSADAPAYQQGQNQLYNELNLGRREEYDVLDKRRGRDPEMGGKPQRRKNPQEGLYNELQKDKMAEAYSEIGMKGERRRGKGHDGLYQGLSTATKDTYDALHMQALPPR

SEQ ID NO: 28794 - protein, 272 aa, synthetic construct
TVTLFPPSSEELQANKATLVCLISDFYPGAVTVAWKADGSPVKAGVETTKPSKQSNNKYAASSYLSLTPEQWKSHRSYSCQVTHEGSTVEKTVAPTECSIPEDTFFPSPESSCDVKLVEKSFETDTNLNFQNLLVIVLRILLLKVAGFNLLMTLRLWSSRVKFSRSADAPAYQQGQNQLYNELNLGRREEYDVLDKRRGRDPEMGGKPQRRKNPQEGLYNELQKDKMAEAYSEIGMKGERRRGKGHDGLYQGLSTATKDTYDALHMQALPPR

SEQ ID NO: 28795 - protein, 271 aa, synthetic construct
VTLFPPSSEELQANKATLVCLISDFYPGAVTVAWKADGSPVKAGVETTKPSKQSNNKYAASSYLSLTPEQWKSHRSYSCQVTHEGSTVEKTVAPTECSIPEDTFFPSPESSCDVKLVEKSFETDTNLNFQNLLVIVLRILLLKVAGFNLLMTLRLWSSRVKFSRSADAPAYQQGQNQLYNELNLGRREEYDVLDKRRGRDPEMGGKPQRRKNPQEGLYNELQKDKMAEAYSEIGMKGERRRGKGHDGLYQGLSTATKDTYDALHMQALPPR

SEQ ID NO: 28796 - protein, 270 aa, synthetic construct
TLFPPSSEELQANKATLVCLISDFYPGAVTVAWKADGSPVKAGVETTKPSKQSNNKYAASSYLSLTPEQWKSHRSYSCQVTHEGSTVEKTVAPTECSIPEDTFFPSPESSCDVKLVEKSFETDTNLNFQNLLVIVLRILLLKVAGFNLLMTLRLWSSRVKFSRSADAPAYQQGQNQLYNELNLGRREEYDVLDKRRGRDPEMGGKPQRRKNPQEGLYNELQKDKMAEAYSEIGMKGERRRGKGHDGLYQGLSTATKDTYDALHMQALPPR

SEQ ID NO: 28797 - protein, 269 aa, synthetic construct
LFPPSSEELQANKATLVCLISDFYPGAVTVAWKADGSPVKAGVETTKPSKQSNNKYAASSYLSLTPEQWKSHRSYSCQVTHEGSTVEKTVAPTECSIPEDTFFPSPESSCDVKLVEKSFETDTNLNFQNLLVIVLRILLLKVAGFNLLMTLRLWSSRVKFSRSADAPAYQQGQNQLYNELNLGRREEYDVLDKRRGRDPEMGGKPQRRKNPQEGLYNELQKDKMAEAYSEIGMKGERRRGKGHDGLYQGLSTATKDTYDALHMQALPPR

SEQ ID NO: 28798 - protein, 289 aa, synthetic construct
DLKNVFPPEVAVFEPSEAEISHTQKATLVCLATGFYPDHVELSWWVNGKEVHSGVCTDPQPLKEQPALNDSRYCLSSRLRVSATFWQNPRNHFRCQVQFYGLSENDEWTQDRAKPVTQIVSAEAWGRADCDVKLVEKSFETDTNLNFQNLLVIVLRILLLKVAGFNLLMTLRLWSSRVKFSRSADAPAYQQGQNQLYNELNLGRREEYDVLDKRRGRDPEMGGKPQRRKNPQEGLYNELQKDKMAEAYSEIGMKGERRRGKGHDGLYQGLSTATKDTYDALHMQALPPR

SEQ ID NO: 28799 - protein, 288 aa, synthetic construct
LKNVFPPEVAVFEPSEAEISHTQKATLVCLATGFYPDHVELSWWVNGKEVHSGVCTDPQPLKEQPALNDSRYCLSSRLRVSATFWQNPRNHFRCQVQFYGLSENDEWTQDRAKPVTQIVSAEAWGRADCDVKLVEKSFETDTNLNFQNLLVIVLRILLLKVAGFNLLMTLRLWSSRVKFSRSADAPAYQQGQNQLYNELNLGRREEYDVLDKRRGRDPEMGGKPQRRKNPQEGLYNELQKDKMAEAYSEIGMKGERRRGKGHDGLYQGLSTATKDTYDALHMQALPPR

SEQ ID NO: 28800 - protein, 287 aa, synthetic construct
KNVFPPEVAVFEPSEAEISHTQKATLVCLATGFYPDHVELSWWVNGKEVHSGVCTDPQPLKEQPALNDSRYCLSSRLRVSATFWQNPRNHFRCQVQFYGLSENDEWTQDRAKPVTQIVSAEAWGRADCDVKLVEKSFETDTNLNFQNLLVIVLRILLLKVAGFNLLMTLRLWSSRVKFSRSADAPAYQQGQNQLYNELNLGRREEYDVLDKRRGRDPEMGGKPQRRKNPQEGLYNELQKDKMAEAYSEIGMKGERRRGKGHDGLYQGLSTATKDTYDALHMQALPPR

SEQ ID NO: 28801 - protein, 286 aa, synthetic construct
NVFPPEVAVFEPSEAEISHTQKATLVCLATGFYPDHVELSWWVNGKEVHSGVCTDPQPLKEQPALNDSRYCLSSRLRVSATFWQNPRNHFRCQVQFYGLSENDEWTQDRAKPVTQIVSAEAWGRADCDVKLVEKSFETDTNLNFQNLLVIVLRILLLKVAGFNLLMTLRLWSSRVKFSRSADAPAYQQGQNQLYNELNLGRREEYDVLDKRRGRDPEMGGKPQRRKNPQEGLYNELQKDKMAEAYSEIGMKGERRRGKGHDGLYQGLSTATKDTYDALHMQALPPR

SEQ ID NO: 28802 - protein, 285 aa, synthetic construct
VFPPEVAVFEPSEAEISHTQKATLVCLATGFYPDHVELSWWVNGKEVHSGVCTDPQPLKEQPALNDSRYCLSSRLRVSATFWQNPRNHFRCQVQFYGLSENDEWTQDRAKPVTQIVSAEAWGRADCDVKLVEKSFETDTNLNFQNLLVIVLRILLLKVAGFNLLMTLRLWSSRVKFSRSADAPAYQQGQNQLYNELNLGRREEYDVLDKRRGRDPEMGGKPQRRKNPQEGLYNELQKDKMAEAYSEIGMKGERRRGKGHDGLYQGLSTATKDTYDALHMQALPPR

SEQ ID NO: 28803 - protein, 284 aa, synthetic construct
FPPEVAVFEPSEAEISHTQKATLVCLATGFYPDHVELSWWVNGKEVHSGVCTDPQPLKEQPALNDSRYCLSSRLRVSATFWQNPRNHFRCQVQFYGLSENDEWTQDRAKPVTQIVSAEAWGRADCDVKLVEKSFETDTNLNFQNLLVIVLRILLLKVAGFNLLMTLRLWSSRVKFSRSADAPAYQQGQNQLYNELNLGRREEYDVLDKRRGRDPEMGGKPQRRKNPQEGLYNELQKDKMAEAYSEIGMKGERRRGKGHDGLYQGLSTATKDTYDALHMQALPPR

SEQ ID NO: 28804 - protein, 283 aa, synthetic construct
PPEVAVFEPSEAEISHTQKATLVCLATGFYPDHVELSWWVNGKEVHSGVCTDPQPLKEQPALNDSRYCLSSRLRVSATFWQNPRNHFRCQVQFYGLSENDEWTQDRAKPVTQIVSAEAWGRADCDVKLVEKSFETDTNLNFQNLLVIVLRILLLKVAGFNLLMTLRLWSSRVKFSRSADAPAYQQGQNQLYNELNLGRREEYDVLDKRRGRDPEMGGKPQRRKNPQEGLYNELQKDKMAEAYSEIGMKGERRRGKGHDGLYQGLSTATKDTYDALHMQALPPR

SEQ ID NO: 28805 - protein, 282 aa, synthetic construct
PEVAVFEPSEAEISHTQKATLVCLATGFYPDHVELSWWVNGKEVHSGVCTDPQPLKEQPALNDSRYCLSSRLRVSATFWQNPRNHFRCQVQFYGLSENDEWTQDRAKPVTQIVSAEAWGRADCDVKLVEKSFETDTNLNFQNLLVIVLRILLLKVAGFNLLMTLRLWSSRVKFSRSADAPAYQQGQNQLYNELNLGRREEYDVLDKRRGRDPEMGGKPQRRKNPQEGLYNELQKDKMAEAYSEIGMKGERRRGKGHDGLYQGLSTATKDTYDALHMQALPPR

SEQ ID NO: 28806 - protein, 281 aa, synthetic construct
EVAVFEPSEAEISHTQKATLVCLATGFYPDHVELSWWVNGKEVHSGVCTDPQPLKEQPALNDSRYCLSSRLRVSATFWQNPRNHFRCQVQFYGLSENDEWTQDRAKPVTQIVSAEAWGRADCDVKLVEKSFETDTNLNFQNLLVIVLRILLLKVAGFNLLMTLRLWSSRVKFSRSADAPAYQQGQNQLYNELNLGRREEYDVLDKRRGRDPEMGGKPQRRKNPQEGLYNELQKDKMAEAYSEIGMKGERRRGKGHDGLYQGLSTATKDTYDALHMQALPPR

SEQ ID NO: 28807 - protein, 280 aa, synthetic construct
VAVFEPSEAEISHTQKATLVCLATGFYPDHVELSWWVNGKEVHSGVCTDPQPLKEQPALNDSRYCLSSRLRVSATFWQNPRNHFRCQVQFYGLSENDEWTQDRAKPVTQIVSAEAWGRADCDVKLVEKSFETDTNLNFQNLLVIVLRILLLKVAGFNLLMTLRLWSSRVKFSRSADAPAYQQGQNQLYNELNLGRREEYDVLDKRRGRDPEMGGKPQRRKNPQEGLYNELQKDKMAEAYSEIGMKGERRRGKGHDGLYQGLSTATKDTYDALHMQALPPR

SEQ ID NO: 28808 - protein, 279 aa, synthetic construct
AVFEPSEAEISHTQKATLVCLATGFYPDHVELSWWVNGKEVHSGVCTDPQPLKEQPALNDSRYCLSSRLRVSATFWQNPRNHFRCQVQFYGLSENDEWTQDRAKPVTQIVSAEAWGRADCDVKLVEKSFETDTNLNFQNLLVIVLRILLLKVAGFNLLMTLRLWSSRVKFSRSADAPAYQQGQNQLYNELNLGRREEYDVLDKRRGRDPEMGGKPQRRKNPQEGLYNELQKDKMAEAYSEIGMKGERRRGKGHDGLYQGLSTATKDTYDALHMQALPPR

SEQ ID NO: 28809 - protein, 278 aa, synthetic construct
VFEPSEAEISHTQKATLVCLATGFYPDHVELSWWVNGKEVHSGVCTDPQPLKEQPALNDSRYCLSSRLRVSATFWQNPRNHFRCQVQFYGLSENDEWTQDRAKPVTQIVSAEAWGRADCDVKLVEKSFETDTNLNFQNLLVIVLRILLLKVAGFNLLMTLRLWSSRVKFSRSADAPAYQQGQNQLYNELNLGRREEYDVLDKRRGRDPEMGGKPQRRKNPQEGLYNELQKDKMAEAYSEIGMKGERRRGKGHDGLYQGLSTATKDTYDALHMQALPPR

SEQ ID NO: 28810 - protein, 277 aa, synthetic construct
FEPSEAEISHTQKATLVCLATGFYPDHVELSWWVNGKEVHSGVCTDPQPLKEQPALNDSRYCLSSRLRVSATFWQNPRNHFRCQVQFYGLSENDEWTQDRAKPVTQIVSAEAWGRADCDVKLVEKSFETDTNLNFQNLLVIVLRILLLKVAGFNLLMTLRLWSSRVKFSRSADAPAYQQGQNQLYNELNLGRREEYDVLDKRRGRDPEMGGKPQRRKNPQEGLYNELQKDKMAEAYSEIGMKGERRRGKGHDGLYQGLSTATKDTYDALHMQALPPR

SEQ ID NO: 28811 - protein, 276 aa, synthetic construct
EPSEAEISHTQKATLVCLATGFYPDHVELSWWVNGKEVHSGVCTDPQPLKEQPALNDSRYCLSSRLRVSATFWQNPRNHFRCQVQFYGLSENDEWTQDRAKPVTQIVSAEAWGRADCDVKLVEKSFETDTNLNFQNLLVIVLRILLLKVAGFNLLMTLRLWSSRVKFSRSADAPAYQQGQNQLYNELNLGRREEYDVLDKRRGRDPEMGGKPQRRKNPQEGLYNELQKDKMAEAYSEIGMKGERRRGKGHDGLYQGLSTATKDTYDALHMQALPPR

SEQ ID NO: 28812 - protein, 275 aa, synthetic construct
PSEAEISHTQKATLVCLATGFYPDHVELSWWVNGKEVHSGVCTDPQPLKEQPALNDSRYCLSSRLRVSATFWQNPRNHFRCQVQFYGLSENDEWTQDRAKPVTQIVSAEAWGRADCDVKLVEKSFETDTNLNFQNLLVIVLRILLLKVAGFNLLMTLRLWSSRVKFSRSADAPAYQQGQNQLYNELNLGRREEYDVLDKRRGRDPEMGGKPQRRKNPQEGLYNELQKDKMAEAYSEIGMKGERRRGKGHDGLYQGLSTATKDTYDALHMQALPPR

SEQ ID NO: 28813 - protein, 274 aa, synthetic construct
SEAEISHTQKATLVCLATGFYPDHVELSWWVNGKEVHSGVCTDPQPLKEQPALNDSRYCLSSRLRVSATFWQNPRNHFRCQVQFYGLSENDEWTQDRAKPVTQIVSAEAWGRADCDVKLVEKSFETDTNLNFQNLLVIVLRILLLKVAGFNLLMTLRLWSSRVKFSRSADAPAYQQGQNQLYNELNLGRREEYDVLDKRRGRDPEMGGKPQRRKNPQEGLYNELQKDKMAEAYSEIGMKGERRRGKGHDGLYQGLSTATKDTYDALHMQALPPR

SEQ ID NO: 28814 - protein, 273 aa, synthetic construct
EAEISHTQKATLVCLATGFYPDHVELSWWVNGKEVHSGVCTDPQPLKEQPALNDSRYCLSSRLRVSATFWQNPRNHFRCQVQFYGLSENDEWTQDRAKPVTQIVSAEAWGRADCDVKLVEKSFETDTNLNFQNLLVIVLRILLLKVAGFNLLMTLRLWSSRVKFSRSADAPAYQQGQNQLYNELNLGRREEYDVLDKRRGRDPEMGGKPQRRKNPQEGLYNELQKDKMAEAYSEIGMKGERRRGKGHDGLYQGLSTATKDTYDALHMQALPPR

SEQ ID NO: 28815 - protein, 272 aa, synthetic construct
AEISHTQKATLVCLATGFYPDHVELSWWVNGKEVHSGVCTDPQPLKEQPALNDSRYCLSSRLRVSATFWQNPRNHFRCQVQFYGLSENDEWTQDRAKPVTQIVSAEAWGRADCDVKLVEKSFETDTNLNFQNLLVIVLRILLLKVAGFNLLMTLRLWSSRVKFSRSADAPAYQQGQNQLYNELNLGRREEYDVLDKRRGRDPEMGGKPQRRKNPQEGLYNELQKDKMAEAYSEIGMKGERRRGKGHDGLYQGLSTATKDTYDALHMQALPPR

SEQ ID NO: 28816 - protein, 271 aa, synthetic construct
EISHTQKATLVCLATGFYPDHVELSWWVNGKEVHSGVCTDPQPLKEQPALNDSRYCLSSRLRVSATFWQNPRNHFRCQVQFYGLSENDEWTQDRAKPVTQIVSAEAWGRADCDVKLVEKSFETDTNLNFQNLLVIVLRILLLKVAGFNLLMTLRLWSSRVKFSRSADAPAYQQGQNQLYNELNLGRREEYDVLDKRRGRDPEMGGKPQRRKNPQEGLYNELQKDKMAEAYSEIGMKGERRRGKGHDGLYQGLSTATKDTYDALHMQALPPR

SEQ ID NO: 28817 - protein, 270 aa, synthetic construct
ISHTQKATLVCLATGFYPDHVELSWWVNGKEVHSGVCTDPQPLKEQPALNDSRYCLSSRLRVSATFWQNPRNHFRCQVQFYGLSENDEWTQDRAKPVTQIVSAEAWGRADCDVKLVEKSFETDTNLNFQNLLVIVLRILLLKVAGFNLLMTLRLWSSRVKFSRSADAPAYQQGQNQLYNELNLGRREEYDVLDKRRGRDPEMGGKPQRRKNPQEGLYNELQKDKMAEAYSEIGMKGERRRGKGHDGLYQGLSTATKDTYDALHMQALPPR

SEQ ID NO: 28818 - protein, 269 aa, synthetic construct
SHTQKATLVCLATGFYPDHVELSWWVNGKEVHSGVCTDPQPLKEQPALNDSRYCLSSRLRVSATFWQNPRNHFRCQVQFYGLSENDEWTQDRAKPVTQIVSAEAWGRADCDVKLVEKSFETDTNLNFQNLLVIVLRILLLKVAGFNLLMTLRLWSSRVKFSRSADAPAYQQGQNQLYNELNLGRREEYDVLDKRRGRDPEMGGKPQRRKNPQEGLYNELQKDKMAEAYSEIGMKGERRRGKGHDGLYQGLSTATKDTYDALHMQALPPR

SEQ ID NO: 28819 - protein, 264 aa, synthetic construct
ATLVCLATGFYPDHVELSWWVNGKEVHSGVCTDPQPLKEQPALNDSRYCLSSRLRVSATFWQNPRNHFRCQVQFYGLSENDEWTQDRAKPVTQIVSAEAWGRADCDVKLVEKSFETDTNLNFQNLLVIVLRILLLKVAGFNLLMTLRLWSSRVKFSRSADAPAYQQGQNQLYNELNLGRREEYDVLDKRRGRDPEMGGKPQRRKNPQEGLYNELQKDKMAEAYSEIGMKGERRRGKGHDGLYQGLSTATKDTYDALHMQALPPR

SEQ ID NO: 28820 - protein, 259 aa, synthetic construct
LATGFYPDHVELSWWVNGKEVHSGVCTDPQPLKEQPALNDSRYCLSSRLRVSATFWQNPRNHFRCQVQFYGLSENDEWTQDRAKPVTQIVSAEAWGRADCDVKLVEKSFETDTNLNFQNLLVIVLRILLLKVAGFNLLMTLRLWSSRVKFSRSADAPAYQQGQNQLYNELNLGRREEYDVLDKRRGRDPEMGGKPQRRKNPQEGLYNELQKDKMAEAYSEIGMKGERRRGKGHDGLYQGLSTATKDTYDALHMQALPPR

SEQ ID NO: 28821 - protein, 286 aa, synthetic construct
DLKNVFPPEVAVFEPSEAEISHTQKATLVCLATGFYPDHVELSWWVNGKEVHSGVCTDPQPLKEQPALNDSRYCLSSRLRVSATFWQNPRNHFRCQVQFYGLSENDEWTQDRAKPVTQIVSAEAWGRADCGFTSESYQQGVLSATNLLVIVLRILLLKVAGFNLLMTLRLWSSRVKFSRSADAPAYQQGQNQLYNELNLGRREEYDVLDKRRGRDPEMGGKPQRRKNPQEGLYNELQKDKMAEAYSEIGMKGERRRGKGHDGLYQGLSTATKDTYDALHMQALPPR

SEQ ID NO: 28822 - protein, 285 aa, synthetic construct
LKNVFPPEVAVFEPSEAEISHTQKATLVCLATGFYPDHVELSWWVNGKEVHSGVCTDPQPLKEQPALNDSRYCLSSRLRVSATFWQNPRNHFRCQVQFYGLSENDEWTQDRAKPVTQIVSAEAWGRADCGFTSESYQQGVLSATNLLVIVLRILLLKVAGFNLLMTLRLWSSRVKFSRSADAPAYQQGQNQLYNELNLGRREEYDVLDKRRGRDPEMGGKPQRRKNPQEGLYNELQKDKMAEAYSEIGMKGERRRGKGHDGLYQGLSTATKDTYDALHMQALPPR

SEQ ID NO: 28823 - protein, 284 aa, synthetic construct
KNVFPPEVAVFEPSEAEISHTQKATLVCLATGFYPDHVELSWWVNGKEVHSGVCTDPQPLKEQPALNDSRYCLSSRLRVSATFWQNPRNHFRCQVQFYGLSENDEWTQDRAKPVTQIVSAEAWGRADCGFTSESYQQGVLSATNLLVIVLRILLLKVAGFNLLMTLRLWSSRVKFSRSADAPAYQQGQNQLYNELNLGRREEYDVLDKRRGRDPEMGGKPQRRKNPQEGLYNELQKDKMAEAYSEIGMKGERRRGKGHDGLYQGLSTATKDTYDALHMQALPPR

SEQ ID NO: 28824 - protein, 283 aa, synthetic construct
NVFPPEVAVFEPSEAEISHTQKATLVCLATGFYPDHVELSWWVNGKEVHSGVCTDPQPLKEQPALNDSRYCLSSRLRVSATFWQNPRNHFRCQVQFYGLSENDEWTQDRAKPVTQIVSAEAWGRADCGFTSESYQQGVLSATNLLVIVLRILLLKVAGFNLLMTLRLWSSRVKFSRSADAPAYQQGQNQLYNELNLGRREEYDVLDKRRGRDPEMGGKPQRRKNPQEGLYNELQKDKMAEAYSEIGMKGERRRGKGHDGLYQGLSTATKDTYDALHMQALPPR

SEQ ID NO: 28825 - protein, 282 aa, synthetic construct
VFPPEVAVFEPSEAEISHTQKATLVCLATGFYPDHVELSWWVNGKEVHSGVCTDPQPLKEQPALNDSRYCLSSRLRVSATFWQNPRNHFRCQVQFYGLSENDEWTQDRAKPVTQIVSAEAWGRADCGFTSESYQQGVLSATNLLVIVLRILLLKVAGFNLLMTLRLWSSRVKFSRSADAPAYQQGQNQLYNELNLGRREEYDVLDKRRGRDPEMGGKPQRRKNPQEGLYNELQKDKMAEAYSEIGMKGERRRGKGHDGLYQGLSTATKDTYDALHMQALPPR

SEQ ID NO: 28826 - protein, 281 aa, synthetic construct
FPPEVAVFEPSEAEISHTQKATLVCLATGFYPDHVELSWWVNGKEVHSGVCTDPQPLKEQPALNDSRYCLSSRLRVSATFWQNPRNHFRCQVQFYGLSENDEWTQDRAKPVTQIVSAEAWGRADCGFTSESYQQGVLSATNLLVIVLRILLLKVAGFNLLMTLRLWSSRVKFSRSADAPAYQQGQNQLYNELNLGRREEYDVLDKRRGRDPEMGGKPQRRKNPQEGLYNELQKDKMAEAYSEIGMKGERRRGKGHDGLYQGLSTATKDTYDALHMQALPPR

SEQ ID NO: 28827 - protein, 280 aa, synthetic construct
PPEVAVFEPSEAEISHTQKATLVCLATGFYPDHVELSWWVNGKEVHSGVCTDPQPLKEQPALNDSRYCLSSRLRVSATFWQNPRNHFRCQVQFYGLSENDEWTQDRAKPVTQIVSAEAWGRADCGFTSESYQQGVLSATNLLVIVLRILLLKVAGFNLLMTLRLWSSRVKFSRSADAPAYQQGQNQLYNELNLGRREEYDVLDKRRGRDPEMGGKPQRRKNPQEGLYNELQKDKMAEAYSEIGMKGERRRGKGHDGLYQGLSTATKDTYDALHMQALPPR

SEQ ID NO: 28828 - protein, 279 aa, synthetic construct
PEVAVFEPSEAEISHTQKATLVCLATGFYPDHVELSWWVNGKEVHSGVCTDPQPLKEQPALNDSRYCLSSRLRVSATFWQNPRNHFRCQVQFYGLSENDEWTQDRAKPVTQIVSAEAWGRADCGFTSESYQQGVLSATNLLVIVLRILLLKVAGFNLLMTLRLWSSRVKFSRSADAPAYQQGQNQLYNELNLGRREEYDVLDKRRGRDPEMGGKPQRRKNPQEGLYNELQKDKMAEAYSEIGMKGERRRGKGHDGLYQGLSTATKDTYDALHMQALPPR

SEQ ID NO: 28829 - protein, 278 aa, synthetic construct
EVAVFEPSEAEISHTQKATLVCLATGFYPDHVELSWWVNGKEVHSGVCTDPQPLKEQPALNDSRYCLSSRLRVSATFWQNPRNHFRCQVQFYGLSENDEWTQDRAKPVTQIVSAEAWGRADCGFTSESYQQGVLSATNLLVIVLRILLLKVAGFNLLMTLRLWSSRVKFSRSADAPAYQQGQNQLYNELNLGRREEYDVLDKRRGRDPEMGGKPQRRKNPQEGLYNELQKDKMAEAYSEIGMKGERRRGKGHDGLYQGLSTATKDTYDALHMQALPPR

SEQ ID NO: 28830 - protein, 277 aa, synthetic construct
VAVFEPSEAEISHTQKATLVCLATGFYPDHVELSWWVNGKEVHSGVCTDPQPLKEQPALNDSRYCLSSRLRVSATFWQNPRNHFRCQVQFYGLSENDEWTQDRAKPVTQIVSAEAWGRADCGFTSESYQQGVLSATNLLVIVLRILLLKVAGFNLLMTLRLWSSRVKFSRSADAPAYQQGQNQLYNELNLGRREEYDVLDKRRGRDPEMGGKPQRRKNPQEGLYNELQKDKMAEAYSEIGMKGERRRGKGHDGLYQGLSTATKDTYDALHMQALPPR

SEQ ID NO: 28831 - protein, 276 aa, synthetic construct
AVFEPSEAEISHTQKATLVCLATGFYPDHVELSWWVNGKEVHSGVCTDPQPLKEQPALNDSRYCLSSRLRVSATFWQNPRNHFRCQVQFYGLSENDEWTQDRAKPVTQIVSAEAWGRADCGFTSESYQQGVLSATNLLVIVLRILLLKVAGFNLLMTLRLWSSRVKFSRSADAPAYQQGQNQLYNELNLGRREEYDVLDKRRGRDPEMGGKPQRRKNPQEGLYNELQKDKMAEAYSEIGMKGERRRGKGHDGLYQGLSTATKDTYDALHMQALPPR

SEQ ID NO: 28832 - protein, 275 aa, synthetic construct
VFEPSEAEISHTQKATLVCLATGFYPDHVELSWWVNGKEVHSGVCTDPQPLKEQPALNDSRYCLSSRLRVSATFWQNPRNHFRCQVQFYGLSENDEWTQDRAKPVTQIVSAEAWGRADCGFTSESYQQGVLSATNLLVIVLRILLLKVAGFNLLMTLRLWSSRVKFSRSADAPAYQQGQNQLYNELNLGRREEYDVLDKRRGRDPEMGGKPQRRKNPQEGLYNELQKDKMAEAYSEIGMKGERRRGKGHDGLYQGLSTATKDTYDALHMQALPPR

SEQ ID NO: 28833 - protein, 274 aa, synthetic construct
FEPSEAEISHTQKATLVCLATGFYPDHVELSWWVNGKEVHSGVCTDPQPLKEQPALNDSRYCLSSRLRVSATFWQNPRNHFRCQVQFYGLSENDEWTQDRAKPVTQIVSAEAWGRADCGFTSESYQQGVLSATNLLVIVLRILLLKVAGFNLLMTLRLWSSRVKFSRSADAPAYQQGQNQLYNELNLGRREEYDVLDKRRGRDPEMGGKPQRRKNPQEGLYNELQKDKMAEAYSEIGMKGERRRGKGHDGLYQGLSTATKDTYDALHMQALPPR

SEQ ID NO: 28834 - protein, 273 aa, synthetic construct
EPSEAEISHTQKATLVCLATGFYPDHVELSWWVNGKEVHSGVCTDPQPLKEQPALNDSRYCLSSRLRVSATFWQNPRNHFRCQVQFYGLSENDEWTQDRAKPVTQIVSAEAWGRADCGFTSESYQQGVLSATNLLVIVLRILLLKVAGFNLLMTLRLWSSRVKFSRSADAPAYQQGQNQLYNELNLGRREEYDVLDKRRGRDPEMGGKPQRRKNPQEGLYNELQKDKMAEAYSEIGMKGERRRGKGHDGLYQGLSTATKDTYDALHMQALPPR

SEQ ID NO: 28835 - protein, 272 aa, synthetic construct
PSEAEISHTQKATLVCLATGFYPDHVELSWWVNGKEVHSGVCTDPQPLKEQPALNDSRYCLSSRLRVSATFWQNPRNHFRCQVQFYGLSENDEWTQDRAKPVTQIVSAEAWGRADCGFTSESYQQGVLSATNLLVIVLRILLLKVAGFNLLMTLRLWSSRVKFSRSADAPAYQQGQNQLYNELNLGRREEYDVLDKRRGRDPEMGGKPQRRKNPQEGLYNELQKDKMAEAYSEIGMKGERRRGKGHDGLYQGLSTATKDTYDALHMQALPPR

SEQ ID NO: 28836 - protein, 271 aa, synthetic construct
SEAEISHTQKATLVCLATGFYPDHVELSWWVNGKEVHSGVCTDPQPLKEQPALNDSRYCLSSRLRVSATFWQNPRNHFRCQVQFYGLSENDEWTQDRAKPVTQIVSAEAWGRADCGFTSESYQQGVLSATNLLVIVLRILLLKVAGFNLLMTLRLWSSRVKFSRSADAPAYQQGQNQLYNELNLGRREEYDVLDKRRGRDPEMGGKPQRRKNPQEGLYNELQKDKMAEAYSEIGMKGERRRGKGHDGLYQGLSTATKDTYDALHMQALPPR

SEQ ID NO: 28837 - protein, 270 aa, synthetic construct
EAEISHTQKATLVCLATGFYPDHVELSWWVNGKEVHSGVCTDPQPLKEQPALNDSRYCLSSRLRVSATFWQNPRNHFRCQVQFYGLSENDEWTQDRAKPVTQIVSAEAWGRADCGFTSESYQQGVLSATNLLVIVLRILLLKVAGFNLLMTLRLWSSRVKFSRSADAPAYQQGQNQLYNELNLGRREEYDVLDKRRGRDPEMGGKPQRRKNPQEGLYNELQKDKMAEAYSEIGMKGERRRGKGHDGLYQGLSTATKDTYDALHMQALPPR

SEQ ID NO: 28838 - protein, 269 aa, synthetic construct
AEISHTQKATLVCLATGFYPDHVELSWWVNGKEVHSGVCTDPQPLKEQPALNDSRYCLSSRLRVSATFWQNPRNHFRCQVQFYGLSENDEWTQDRAKPVTQIVSAEAWGRADCGFTSESYQQGVLSATNLLVIVLRILLLKVAGFNLLMTLRLWSSRVKFSRSADAPAYQQGQNQLYNELNLGRREEYDVLDKRRGRDPEMGGKPQRRKNPQEGLYNELQKDKMAEAYSEIGMKGERRRGKGHDGLYQGLSTATKDTYDALHMQALPPR

SEQ ID NO: 28839 - protein, 268 aa, synthetic construct
EISHTQKATLVCLATGFYPDHVELSWWVNGKEVHSGVCTDPQPLKEQPALNDSRYCLSSRLRVSATFWQNPRNHFRCQVQFYGLSENDEWTQDRAKPVTQIVSAEAWGRADCGFTSESYQQGVLSATNLLVIVLRILLLKVAGFNLLMTLRLWSSRVKFSRSADAPAYQQGQNQLYNELNLGRREEYDVLDKRRGRDPEMGGKPQRRKNPQEGLYNELQKDKMAEAYSEIGMKGERRRGKGHDGLYQGLSTATKDTYDALHMQALPPR

SEQ ID NO: 28840 - protein, 267 aa, synthetic construct
ISHTQKATLVCLATGFYPDHVELSWWVNGKEVHSGVCTDPQPLKEQPALNDSRYCLSSRLRVSATFWQNPRNHFRCQVQFYGLSENDEWTQDRAKPVTQIVSAEAWGRADCGFTSESYQQGVLSATNLLVIVLRILLLKVAGFNLLMTLRLWSSRVKFSRSADAPAYQQGQNQLYNELNLGRREEYDVLDKRRGRDPEMGGKPQRRKNPQEGLYNELQKDKMAEAYSEIGMKGERRRGKGHDGLYQGLSTATKDTYDALHMQALPPR

SEQ ID NO: 28841 - protein, 266 aa, synthetic construct
SHTQKATLVCLATGFYPDHVELSWWVNGKEVHSGVCTDPQPLKEQPALNDSRYCLSSRLRVSATFWQNPRNHFRCQVQFYGLSENDEWTQDRAKPVTQIVSAEAWGRADCGFTSESYQQGVLSATNLLVIVLRILLLKVAGFNLLMTLRLWSSRVKFSRSADAPAYQQGQNQLYNELNLGRREEYDVLDKRRGRDPEMGGKPQRRKNPQEGLYNELQKDKMAEAYSEIGMKGERRRGKGHDGLYQGLSTATKDTYDALHMQALPPR

SEQ ID NO: 28842 - protein, 261 aa, synthetic construct
ATLVCLATGFYPDHVELSWWVNGKEVHSGVCTDPQPLKEQPALNDSRYCLSSRLRVSATFWQNPRNHFRCQVQFYGLSENDEWTQDRAKPVTQIVSAEAWGRADCGFTSESYQQGVLSATNLLVIVLRILLLKVAGFNLLMTLRLWSSRVKFSRSADAPAYQQGQNQLYNELNLGRREEYDVLDKRRGRDPEMGGKPQRRKNPQEGLYNELQKDKMAEAYSEIGMKGERRRGKGHDGLYQGLSTATKDTYDALHMQALPPR

SEQ ID NO: 28843 - protein, 256 aa, synthetic construct
LATGFYPDHVELSWWVNGKEVHSGVCTDPQPLKEQPALNDSRYCLSSRLRVSATFWQNPRNHFRCQVQFYGLSENDEWTQDRAKPVTQIVSAEAWGRADCGFTSESYQQGVLSATNLLVIVLRILLLKVAGFNLLMTLRLWSSRVKFSRSADAPAYQQGQNQLYNELNLGRREEYDVLDKRRGRDPEMGGKPQRRKNPQEGLYNELQKDKMAEAYSEIGMKGERRRGKGHDGLYQGLSTATKDTYDALHMQALPPR

SEQ ID NO: 28844 - protein, 246 aa, synthetic construct
IQNPDPAVYQLRDSKSSDKSVCLFTDFDSQTNVSQSKDSDVYITDKTVLDMRSMDFKSNSAVAWSNKSDFACANAFNNSIGRADCGFTSESYQQGVLSATILYEILLGKATLYAVLVSALVLMAMVKRKDSRGRVKFSRSADAPAYQQGQNQLYNELNLGRREEYDVLDKRRGRDPEMGGKPQRRKNPQEGLYNELQKDKMAEAYSEIGMKGERRRGKGHDGLYQGLSTATKDTYDALHMQALPPR

SEQ ID NO: 28845 - protein, 244 aa, synthetic construct
IQNPDPAVYQLRDSKSSDKSVCLFTDFDSQTNVSQSKDSDVYITDKTVLDMRSMDFKSNSAVAWSNKSDFACANAFNNSIADCGFTSESYQQGVLSATILYEILLGKATLYAVLVSALVLMAMVKRKDSRGRVKFSRSADAPAYQQGQNQLYNELNLGRREEYDVLDKRRGRDPEMGGKPQRRKNPQEGLYNELQKDKMAEAYSEIGMKGERRRGKGHDGLYQGLSTATKDTYDALHMQALPPR

SEQ ID NO: 28846 - protein, 254 aa, synthetic construct
IQNPDPAVYQLRDSKSSDKSVCLFTDFDSQTNVSQSKDSDVYITDKTVLDMRSMDFKSNSAVAWSNKSDFACANAFNNSIQIVSAEAWGRADCGFTSESYQQGVLSATILYEILLGKATLYAVLVSALVLMAMVKRKDSRGRVKFSRSADAPAYQQGQNQLYNELNLGRREEYDVLDKRRGRDPEMGGKPQRRKNPQEGLYNELQKDKMAEAYSEIGMKGERRRGKGHDGLYQGLSTATKDTYDALHMQALPPR

SEQ ID NO: 28847 - protein, 262 aa, synthetic construct
IQNPDPAVYQLRDSKSSDKSVCLFTDFDSQTNVSQSKDSDVYITDKTVLDMRSMDFKSNSAVAWSNKSDFACANAFNNSIFPPIKTDVITMDPKDNCSKDANDTLLLQLTNTSAYYMYLLLLLKSVVYFAIITCCLLRRTAFCCNGEKSRVKFSRSADAPAYQQGQNQLYNELNLGRREEYDVLDKRRGRDPEMGGKPQRRKNPQEGLYNELQKDKMAEAYSEIGMKGERRRGKGHDGLYQGLSTATKDTYDALHMQALPPR

SEQ ID NO: 28848 - protein, 260 aa, synthetic construct
IQNPDPAVYQLRDSKSSDKSVCLFTDFDSQTNVSQSKDSDVYITDKTVLDMRSMDFKSNSAVAWSNKSDFACANAFNNSIPIKTDVITMDPKDNCSKDANDTLLLQLTNTSAYYMYLLLLLKSVVYFAIITCCLLRRTAFCCNGEKSRVKFSRSADAPAYQQGQNQLYNELNLGRREEYDVLDKRRGRDPEMGGKPQRRKNPQEGLYNELQKDKMAEAYSEIGMKGERRRGKGHDGLYQGLSTATKDTYDALHMQALPPR

SEQ ID NO: 28849 - protein, 252 aa, synthetic construct
IQNPDPAVYQLRDSKSSDKSVCLFTDFDSQTNVSQSKDSDVYITDKTVLDMRSMDFKSNSAVAWSNKSDFACANAFNNSIMDPKDNCSKDANDTLLLQLTNTSAYYMYLLLLLKSVVYFAIITCCLLRRTAFCCNGEKSRVKFSRSADAPAYQQGQNQLYNELNLGRREEYDVLDKRRGRDPEMGGKPQRRKNPQEGLYNELQKDKMAEAYSEIGMKGERRRGKGHDGLYQGLSTATKDTYDALHMQALPPR

SEQ ID NO: 28850 - protein, 260 aa, synthetic construct; identical to SEQ ID NO: 28848

SEQ ID NO: 28851 - protein, 246 aa, synthetic construct
IQNPDPAVYQLRDSKSSDKSVCLFTDFDSQTNVSQSKDSDVYITDKTVLDMRSMDFKSNSAVAWSNKSDFACANAFNNSICSKDANDTLLLQLTNTSAYYMYLLLLLKSVVYFAIITCCLLRRTAFCCNGEKSRVKFSRSADAPAYQQGQNQLYNELNLGRREEYDVLDKRRGRDPEMGGKPQRRKNPQEGLYNELQKDKMAEAYSEIGMKGERRRGKGHDGLYQGLSTATKDTYDALHMQALPPR

SEQ ID NO: 28852 - protein, 261 aa, synthetic construct
IQNPDPAVYQLRDSKSSDKSVCLFTDFDSQTNVSQSKDSDVYITDKTVLDMRSMDFKSNSAVAWSNKSDFACANAFNNSIEVKTDSTDHVKPKETENTKQPSKSCHKPKAIVHTEKVNMMSLTVLGLRMLFAKTVAVNFLLTAKLFFLRVKFSRSADAPAYQQGQNQLYNELNLGRREEYDVLDKRRGRDPEMGGKPQRRKNPQEGLYNELQKDKMAEAYSEIGMKGERRRGKGHDGLYQGLSTATKDTYDALHMQALPPR

SEQ ID NO: 28853 - protein, 254 aa, synthetic construct
IQNPDPAVYQLRDSKSSDKSVCLFTDFDSQTNVSQSKDSDVYITDKTVLDMRSMDFKSNSAVAWSNKSDFACANAFNNSIDHVKPKETENTKQPSKSCHKPKAIVHTEKVNMMSLTVLGLRMLFAKTVAVNFLLTAKLFFLRVKFSRSADAPAYQQGQNQLYNELNLGRREEYDVLDKRRGRDPEMGGKPQRRKNPQEGLYNELQKDKMAEAYSEIGMKGERRRGKGHDGLYQGLSTATKDTYDALHMQALPPR

SEQ ID NO: 28854 - protein, 256 aa, synthetic construct
IQNPDPAVYQLRDSKSSDKSVCLFTDFDSQTNVSQSKDSDVYITDKTVLDMRSMDFKSNSAVAWSNKSDFACANAFNNSIIPEDTFFPSPGRADCGFTSESYQQGVLSATILYEILLGKATLYAVLVSALVLMAMVKRKDSRGRVKFSRSADAPAYQQGQNQLYNELNLGRREEYDVLDKRRGRDPEMGGKPQRRKNPQEGLYNELQKDKMAEAYSEIGMKGERRRGKGHDGLYQGLSTATKDTYDALHMQALPPR

SEQ ID NO: 28855 - protein, 254 aa, synthetic construct
IQNPDPAVYQLRDSKSSDKSVCLFTDFDSQTNVSQSKDSDVYITDKTVLDMRSMDFKSNSAVAWSNKSDFACANAFNNSIIPEDTFFPSPADCGFTSESYQQGVLSATILYEILLGKATLYAVLVSALVLMAMVKRKDSRGRVKFSRSADAPAYQQGQNQLYNELNLGRREEYDVLDKRRGRDPEMGGKPQRRKNPQEGLYNELQKDKMAEAYSEIGMKGERRRGKGHDGLYQGLSTATKDTYDALHMQALPPR

SEQ ID NO: 28856 - protein, 264 aa, synthetic construct
IQNPDPAVYQLRDSKSSDKSVCLFTDFDSQTNVSQSKDSDVYITDKTVLDMRSMDFKSNSAVAWSNKSDFACANAFNNSIIPEDTFFPSPQIVSAEAWGRADCGFTSESYQQGVLSATILYEILLGKATLYAVLVSALVLMAMVKRKDSRGRVKFSRSADAPAYQQGQNQLYNELNLGRREEYDVLDKRRGRDPEMGGKPQRRKNPQEGLYNELQKDKMAEAYSEIGMKGERRRGKGHDGLYQGLSTATKDTYDALHMQALPPR

SEQ ID NO: 28857 - protein, 272 aa, synthetic construct
IQNPDPAVYQLRDSKSSDKSVCLFTDFDSQTNVSQSKDSDVYITDKTVLDMRSMDFKSNSAVAWSNKSDFACANAFNNSIIPEDTFFPSPFPPIKTDVITMDPKDNCSKDANDTLLLQLTNTSAYYMYLLLLLKSVVYFAIITCCLLRRTAFCCNGEKSRVKFSRSADAPAYQQGQNQLYNELNLGRREEYDVLDKRRGRDPEMGGKPQRRKNPQEGLYNELQKDKMAEAYSEIGMKGERRRGKGHDGLYQGLSTATKDTYDALHMQALPPR

SEQ ID NO: 28858 - protein, 270 aa, synthetic construct
IQNPDPAVYQLRDSKSSDKSVCLFTDFDSQTNVSQSKDSDVYITDKTVLDMRSMDFKSNSAVAWSNKSDFACANAFNNSIIPEDTFFPSPPIKTDVITMDPKDNCSKDANDTLLLQLTNTSAYYMYLLLLLKSVVYFAIITCCLLRRTAFCCNGEKSRVKFSRSADAPAYQQGQNQLYNELNLGRREEYDVLDKRRGRDPEMGGKPQRRKNPQEGLYNELQKDKMAEAYSEIGMKGERRRGKGHDGLYQGLSTATKDTYDALHMQALPPR

SEQ ID NO: 28859 - protein, 262 aa, synthetic construct
IQNPDPAVYQLRDSKSSDKSVCLFTDFDSQTNVSQSKDSDVYITDKTVLDMRSMDFKSNSAVAWSNKSDFACANAFNNSIIPEDTFFPSPMDPKDNCSKDANDTLLLQLTNTSAYYMYLLLLLKSVVYFAIITCCLLRRTAFCCNGEKSRVKFSRSADAPAYQQGQNQLYNELNLGRREEYDVLDKRRGRDPEMGGKPQRRKNPQEGLYNELQKDKMAEAYSEIGMKGERRRGKGHDGLYQGLSTATKDTYDALHMQALPPR

SEQ ID NO: 28860 - protein, 270 aa, synthetic construct; identical to SEQ ID NO: 28858

SEQ ID NO: 28861 - protein, 256 aa, synthetic construct
IQNPDPAVYQLRDSKSSDKSVCLFTDFDSQTNVSQSKDSDVYITDKTVLDMRSMDFKSNSAVAWSNKSDFACANAFNNSIIPEDTFFPSPCSKDANDTLLLQLTNTSAYYMYLLLLLKSVVYFAIITCCLLRRTAFCCNGEKSRVKFSRSADAPAYQQGQNQLYNELNLGRREEYDVLDKRRGRDPEMGGKPQRRKNPQEGLYNELQKDKMAEAYSEIGMKGERRRGKGHDGLYQGLSTATKDTYDALHMQALPPR

SEQ ID NO: 28862 - protein, 271 aa, synthetic construct
IQNPDPAVYQLRDSKSSDKSVCLFTDFDSQTNVSQSKDSDVYITDKTVLDMRSMDFKSNSAVAWSNKSDFACANAFNNSIIPEDTFFPSPEVKTDSTDHVKPKETENTKQPSKSCHKPKAIVHTEKVNMMSLTVLGLRMLFAKTVAVNFLLTAKLFFLRVKFSRSADAPAYQQGQNQLYNELNLGRREEYDVLDKRRGRDPEMGGKPQRRKNPQEGLYNELQKDKMAEAYSEIGMKGERRRGKGHDGLYQGLSTATKDTYDALHMQALPPR

SEQ ID NO: 28863 - protein, 264 aa, synthetic construct
IQNPDPAVYQLRDSKSSDKSVCLFTDFDSQTNVSQSKDSDVYITDKTVLDMRSMDFKSNSAVAWSNKSDFACANAFNNSIIPEDTFFPSPDHVKPKETENTKQPSKSCHKPKAIVHTEKVNMMSLTVLGLRMLFAKTVAVNFLLTAKLFFLRVKFSRSADAPAYQQGQNQLYNELNLGRREEYDVLDKRRGRDPEMGGKPQRRKNPQEGLYNELQKDKMAEAYSEIGMKGERRRGKGHDGLYQGLSTATKDTYDALHMQALPPR

SEQ ID NO: 28864 - protein, 260 aa, synthetic construct
IQNPDPAVYQLRDSKSSDKSVCLFTDFDSQTNVSQSKDSDVYITDKTVLDMRSMDFKSNSAVAWSNKSDFACANAFNNSIIPEDTFFPSPESSCGRADCGFTSESYQQGVLSATILYEILLGKATLYAVLVSALVLMAMVKRKDSRGRVKFSRSADAPAYQQGQNQLYNELNLGRREEYDVLDKRRGRDPEMGGKPQRRKNPQEGLYNELQKDKMAEAYSEIGMKGERRRGKGHDGLYQGLSTATKDTYDALHMQALPPR

SEQ ID NO: 28865 - protein, 258 aa, synthetic construct
IQNPDPAVYQLRDSKSSDKSVCLFTDFDSQTNVSQSKDSDVYITDKTVLDMRSMDFKSNSAVAWSNKSDFACANAFNNSIIPEDTFFPSPESSCADCGFTSESYQQGVLSATILYEILLGKATLYAVLVSALVLMAMVKRKDSRGRVKFSRSADAPAYQQGQNQLYNELNLGRREEYDVLDKRRGRDPEMGGKPQRRKNPQEGLYNELQKDKMAEAYSEIGMKGERRRGKGHDGLYQGLSTATKDTYDALHMQALPPR

SEQ ID NO: 28866 - protein, 268 aa, synthetic construct
IQNPDPAVYQLRDSKSSDKSVCLFTDFDSQTNVSQSKDSDVYITDKTVLDMRSMDFKSNSAVAWSNKSDFACANAFNNSIIPEDTFFPSPESSCQIVSAEAWGRADCGFTSESYQQGVLSATILYEILLGKATLYAVLVSALVLMAMVKRKDSRGRVKFSRSADAPAYQQGQNQLYNELNLGRREEYDVLDKRRGRDPEMGGKPQRRKNPQEGLYNELQKDKMAEAYSEIGMKGERRRGKGHDGLYQGLSTATKDTYDALHMQALPPR

SEQ ID NO: 28867 - protein, 276 aa, synthetic construct
IQNPDPAVYQLRDSKSSDKSVCLFTDFDSQTNVSQSKDSDVYITDKTVLDMRSMDFKSNSAVAWSNKSDFACANAFNNSIIPEDTFFPSPESSCFPPIKTDVITMDPKDNCSKDANDTLLLQLTNTSAYYMYLLLLLKSVVYFAIITCCLLRRTAFCCNGEKSRVKFSRSADAPAYQQGQNQLYNELNLGRREEYDVLDKRRGRDPEMGGKPQRRKNPQEGLYNELQKDKMAEAYSEIGMKGERRRGKGHDGLYQGLSTATKDTYDALHMQALPPR

SEQ ID NO: 28868 - protein, 274 aa, synthetic construct
IQNPDPAVYQLRDSKSSDKSVCLFTDFDSQTNVSQSKDSDVYITDKTVLDMRSMDFKSNSAVAWSNKSDFACANAFNNSIIPEDTFFPSPESSCPIKTDVITMDPKDNCSKDANDTLLLQLTNTSAYYMYLLLLLKSVVYFAIITCCLLRRTAFCCNGEKSRVKFSRSADAPAYQQGQNQLYNELNLGRREEYDVLDKRRGRDPEMGGKPQRRKNPQEGLYNELQKDKMAEAYSEIGMKGERRRGKGHDGLYQGLSTATKDTYDALHMQALPPR

SEQ ID NO: 28869 - protein, 266 aa, synthetic construct
IQNPDPAVYQLRDSKSSDKSVCLFTDFDSQTNVSQSKDSDVYITDKTVLDMRSMDFKSNSAVAWSNKSDFACANAFNNSIIPEDTFFPSPESSCMDPKDNCSKDANDTLLLQLTNTSAYYMYLLLLLKSVVYFAIITCCLLRRTAFCCNGEKSRVKFSRSADAPAYQQGQNQLYNELNLGRREEYDVLDKRRGRDPEMGGKPQRRKNPQEGLYNELQKDKMAEAYSEIGMKGERRRGKGHDGLYQGLSTATKDTYDALHMQALPPR

SEQ ID NO: 28870 - protein, 274 aa, synthetic construct; identical to SEQ ID NO: 28868

SEQ ID NO: 28871 - protein, 260 aa, synthetic construct
IQNPDPAVYQLRDSKSSDKSVCLFTDFDSQTNVSQSKDSDVYITDKTVLDMRSMDFKSNSAVAWSNKSDFACANAFNNSIIPEDTFFPSPESSCCSKDANDTLLLQLTNTSAYYMYLLLLLKSVVYFAIITCCLLRRTAFCCNGEKSRVKFSRSADAPAYQQGQNQLYNELNLGRREEYDVLDKRRGRDPEMGGKPQRRKNPQEGLYNELQKDKMAEAYSEIGMKGERRRGKGHDGLYQGLSTATKDTYDALHMQALPPR

SEQ ID NO: 28872 - protein, 275 aa, synthetic construct
IQNPDPAVYQLRDSKSSDKSVCLFTDFDSQTNVSQSKDSDVYITDKTVLDMRSMDFKSNSAVAWSNKSDFACANAFNNSIIPEDTFFPSPESSCEVKTDSTDHVKPKETENTKQPSKSCHKPKAIVHTEKVNMMSLTVLGLRMLFAKTVAVNFLLTAKLFFLRVKFSRSADAPAYQQGQNQLYNELNLGRREEYDVLDKRRGRDPEMGGKPQRRKNPQEGLYNELQKDKMAEAYSEIGMKGERRRGKGHDGLYQGLSTATKDTYDALHMQALPPR

SEQ ID NO: 28873 - protein, 268 aa, synthetic construct
IQNPDPAVYQLRDSKSSDKSVCLFTDFDSQTNVSQSKDSDVYITDKTVLDMRSMDFKSNSAVAWSNKSDFACANAFNNSIIPEDTFFPSPESSCDHVKPKETENTKQPSKSCHKPKAIVHTEKVNMMSLTVLGLRMLFAKTVAVNFLLTAKLFFLRVKFSRSADAPAYQQGQNQLYNELNLGRREEYDVLDKRRGRDPEMGGKPQRRKNPQEGLYNELQKDKMAEAYSEIGMKGERRRGKGHDGLYQGLSTATKDTYDALHMQALPPR

SEQ ID NO: 28874 - protein, 247 aa, synthetic construct
IQNPDPAVYQLRDSKSSDKSVCLFTDFDSQTNVSQSKDSDVYITDKTVLDMRSMDFKSNSAVAWSNKSDFACANAFNNSIIGRADCGFTSESYQQGVLSATILYEILLGKATLYAVLVSALVLMAMVKRKDSRGRVKFSRSADAPAYQQGQNQLYNELNLGRREEYDVLDKRRGRDPEMGGKPQRRKNPQEGLYNELQKDKMAEAYSEIGMKGERRRGKGHDGLYQGLSTATKDTYDALHMQALPPR

SEQ ID NO: 28875 - protein, 245 aa, synthetic construct
IQNPDPAVYQLRDSKSSDKSVCLFTDFDSQTNVSQSKDSDVYITDKTVLDMRSMDFKSNSAVAWSNKSDFACANAFNNSIIADCGFTSESYQQGVLSATILYEILLGKATLYAVLVSALVLMAMVKRKDSRGRVKFSRSADAPAYQQGQNQLYNELNLGRREEYDVLDKRRGRDPEMGGKPQRRKNPQEGLYNELQKDKMAEAYSEIGMKGERRRGKGHDGLYQGLSTATKDTYDALHMQALPPR

SEQ ID NO: 28876 - protein, 255 aa, synthetic construct
IQNPDPAVYQLRDSKSSDKSVCLFTDFDSQTNVSQSKDSDVYITDKTVLDMRSMDFKSNSAVAWSNKSDFACANAFNNSIIQIVSAEAWGRADCGFTSESYQQGVLSATILYEILLGKATLYAVLVSALVLMAMVKRKDSRGRVKFSRSADAPAYQQGQNQLYNELNLGRREEYDVLDKRRGRDPEMGGKPQRRKNPQEGLYNELQKDKMAEAYSEIGMKGERRRGKGHDGLYQGLSTATKDTYDALHMQALPPR

SEQ ID NO: 28877 - protein, 263 aa, synthetic construct
IQNPDPAVYQLRDSKSSDKSVCLFTDFDSQTNVSQSKDSDVYITDKTVLDMRSMDFKSNSAVAWSNKSDFACANAFNNSIIFPPIKTDVITMDPKDNCSKDANDTLLLQLTNTSAYYMYLLLLLKSVVYFAIITCCLLRRTAFCCNGEKSRVKFSRSADAPAYQQGQNQLYNELNLGRREEYDVLDKRRGRDPEMGGKPQRRKNPQEGLYNELQKDKMAEAYSEIGMKGERRRGKGHDGLYQGLSTATKDTYDALHMQALPPR

SEQ ID NO: 28878 - protein, 261 aa, synthetic construct
IQNPDPAVYQLRDSKSSDKSVCLFTDFDSQTNVSQSKDSDVYITDKTVLDMRSMDFKSNSAVAWSNKSDFACANAFNNSIIPIKTDVITMDPKDNCSKDANDTLLLQLTNTSAYYMYLLLLLKSVVYFAIITCCLLRRTAFCCNGEKSRVKFSRSADAPAYQQGQNQLYNELNLGRREEYDVLDKRRGRDPEMGGKPQRRKNPQEGLYNELQKDKMAEAYSEIGMKGERRRGKGHDGLYQGLSTATKDTYDALHMQALPPR

SEQ ID NO: 28879 - protein, 253 aa, synthetic construct
IQNPDPAVYQLRDSKSSDKSVCLFTDFDSQTNVSQSKDSDVYITDKTVLDMRSMDFKSNSAVAWSNKSDFACANAFNNSIIMDPKDNCSKDANDTLLLQLTNTSAYYMYLLLLLKSVVYFAIITCCLLRRTAFCCNGEKSRVKFSRSADAPAYQQGQNQLYNELNLGRREEYDVLDKRRGRDPEMGGKPQRRKNPQEGLYNELQKDKMAEAYSEIGMKGERRRGKGHDGLYQGLSTATKDTYDALHMQALPPR

SEQ ID NO: 28880 - protein, 261 aa, synthetic construct; identical to SEQ ID NO: 28878

SEQ ID NO: 28881 - protein, 247 aa, synthetic construct
IQNPDPAVYQLRDSKSSDKSVCLFTDFDSQTNVSQSKDSDVYITDKTVLDMRSMDFKSNSAVAWSNKSDFACANAFNNSIICSKDANDTLLLQLTNTSAYYMYLLLLLKSVVYFAIITCCLLRRTAFCCNGEKSRVKFSRSADAPAYQQGQNQLYNELNLGRREEYDVLDKRRGRDPEMGGKPQRRKNPQEGLYNELQKDKMAEAYSEIGMKGERRRGKGHDGLYQGLSTATKDTYDALHMQALPPR

SEQ ID NO: 28882 - protein, 262 aa, synthetic construct
IQNPDPAVYQLRDSKSSDKSVCLFTDFDSQTNVSQSKDSDVYITDKTVLDMRSMDFKSNSAVAWSNKSDFACANAFNNSIIEVKTDSTDHVKPKETENTKQPSKSCHKPKAIVHTEKVNMMSLTVLGLRMLFAKTVAVNFLLTAKLFFLRVKFSRSADAPAYQQGQNQLYNELNLGRREEYDVLDKRRGRDPEMGGKPQRRKNPQEGLYNELQKDKMAEAYSEIGMKGERRRGKGHDGLYQGLSTATKDTYDALHMQALPPR

SEQ ID NO: 28883 - protein, 255 aa, synthetic construct
IQNPDPAVYQLRDSKSSDKSVCLFTDFDSQTNVSQSKDSDVYITDKTVLDMRSMDFKSNSAVAWSNKSDFACANAFNNSIIDHVKPKETENTKQPSKSCHKPKAIVHTEKVNMMSLTVLGLRMLFAKTVAVNFLLTAKLFFLRVKFSRSADAPAYQQGQNQLYNELNLGRREEYDVLDKRRGRDPEMGGKPQRRKNPQEGLYNELQKDKMAEAYSEIGMKGERRRGKGHDGLYQGLSTATKDTYDALHMQALPPR

SEQ ID NO: 28884 - protein, 260 aa, synthetic construct; identical to SEQ ID NO: 28864

SEQ ID NO: 28885 - protein, 258 aa, synthetic construct; identical to SEQ ID NO: 28865

SEQ ID NO: 28886 - protein, 268 aa, synthetic construct; identical to SEQ ID NO: 28866

SEQ ID NO: 28887 - protein, 276 aa, synthetic construct; identical to SEQ ID NO: 28867

SEQ ID NO: 28888 - protein, 274 aa, synthetic construct; identical to SEQ ID NO: 28868

SEQ ID NO: 28889 - protein, 266 aa, synthetic construct; identical to SEQ ID NO: 28869

SEQ ID NO: 28890 - protein, 274 aa, synthetic construct; identical to SEQ ID NO: 28868

SEQ ID NO: 28891 - protein, 260 aa, synthetic construct; identical to SEQ ID NO: 28871

SEQ ID NO: 28892 - protein, 275 aa, synthetic construct; identical to SEQ ID NO: 28872

SEQ ID NO: 28893 - protein, 268 aa, synthetic construct; identical to SEQ ID NO: 28873

SEQ ID NO: 28894 - protein, 245 aa, synthetic construct
KSSDKSVCLFTDFDSQTNVSQSKDSDVYITDKTVLDMRSMDFKSNSAVAWSNKSDFACANAFNNSIIPEDTFFPSPESSGRADCGFTSESYQQGVLSATILYEILLGKATLYAVLVSALVLMAMVKRKDSRGRVKFSRSADAPAYQQGQNQLYNELNLGRREEYDVLDKRRGRDPEMGGKPQRRKNPQEGLYNELQKDKMAEAYSEIGMKGERRRGKGHDGLYQGLSTATKDTYDALHMQALPPR

SEQ ID NO: 28895 - protein, 243 aa, synthetic construct
KSSDKSVCLFTDFDSQTNVSQSKDSDVYITDKTVLDMRSMDFKSNSAVAWSNKSDFACANAFNNSIIPEDTFFPSPESSADCGFTSESYQQGVLSATILYEILLGKATLYAVLVSALVLMAMVKRKDSRGRVKFSRSADAPAYQQGQNQLYNELNLGRREEYDVLDKRRGRDPEMGGKPQRRKNPQEGLYNELQKDKMAEAYSEIGMKGERRRGKGHDGLYQGLSTATKDTYDALHMQALPPR

SEQ ID NO: 28896 - protein, 253 aa, synthetic construct
KSSDKSVCLFTDFDSQTNVSQSKDSDVYITDKTVLDMRSMDFKSNSAVAWSNKSDFACANAFNNSIIPEDTFFPSPESSQIVSAEAWGRADCGFTSESYQQGVLSATILYEILLGKATLYAVLVSALVLMAMVKRKDSRGRVKFSRSADAPAYQQGQNQLYNELNLGRREEYDVLDKRRGRDPEMGGKPQRRKNPQEGLYNELQKDKMAEAYSEIGMKGERRRGKGHDGLYQGLSTATKDTYDALHMQALPPR

SEQ ID NO: 28897 - protein, 261 aa, synthetic construct
KSSDKSVCLFTDFDSQTNVSQSKDSDVYITDKTVLDMRSMDFKSNSAVAWSNKSDFACANAFNNSIIPEDTFFPSPESSFPPIKTDVITMDPKDNCSKDANDTLLLQLTNTSAYYMYLLLLLKSVVYFAIITCCLLRRTAFCCNGEKSRVKFSRSADAPAYQQGQNQLYNELNLGRREEYDVLDKRRGRDPEMGGKPQRRKNPQEGLYNELQKDKMAEAYSEIGMKGERRRGKGHDGLYQGLSTATKDTYDALHMQALPPR

SEQ ID NO: 28898 - protein, 259 aa, synthetic construct
KSSDKSVCLFTDFDSQTNVSQSKDSDVYITDKTVLDMRSMDFKSNSAVAWSNKSDFACANAFNNSIIPEDTFFPSPESSPIKTDVITMDPKDNCSKDANDTLLLQLTNTSAYYMYLLLLLKSVVYFAIITCCLLRRTAFCCNGEKSRVKFSRSADAPAYQQGQNQLYNELNLGRREEYDVLDKRRGRDPEMGGKPQRRKNPQEGLYNELQKDKMAEAYSEIGMKGERRRGKGHDGLYQGLSTATKDTYDALHMQALPPR

SEQ ID NO: 28899 - protein, 251 aa, synthetic construct
KSSDKSVCLFTDFDSQTNVSQSKDSDVYITDKTVLDMRSMDFKSNSAVAWSNKSDFACANAFNNSIIPEDTFFPSPESSMDPKDNCSKDANDTLLLQLTNTSAYYMYLLLLLKSVVYFAIITCCLLRRTAFCCNGEKSRVKFSRSADAPAYQQGQNQLYNELNLGRREEYDVLDKRRGRDPEMGGKPQRRKNPQEGLYNELQKDKMAEAYSEIGMKGERRRGKGHDGLYQGLSTATKDTYDALHMQALPPR

SEQ ID NO: 28900 - protein, 259 aa, synthetic construct; identical to SEQ ID NO: 28898

SEQ ID NO: 28901 - protein, 245 aa, synthetic construct
KSSDKSVCLFTDFDSQTNVSQSKDSDVYITDKTVLDMRSMDFKSNSAVAWSNKSDFACANAFNNSIIPEDTFFPSPESSCSKDANDTLLLQLTNTSAYYMYLLLLLKSVVYFAIITCCLLRRTAFCCNGEKSRVKFSRSADAPAYQQGQNQLYNELNLGRREEYDVLDKRRGRDPEMGGKPQRRKNPQEGLYNELQKDKMAEAYSEIGMKGERRRGKGHDGLYQGLSTATKDTYDALHMQALPPR

SEQ ID NO: 28902 - protein, 260 aa, synthetic construct
KSSDKSVCLFTDFDSQTNVSQSKDSDVYITDKTVLDMRSMDFKSNSAVAWSNKSDFACANAFNNSIIPEDTFFPSPESSEVKTDSTDHVKPKETENTKQPSKSCHKPKAIVHTEKVNMMSLTVLGLRMLFAKTVAVNFLLTAKLFFLRVKFSRSADAPAYQQGQNQLYNELNLGRREEYDVLDKRRGRDPEMGGKPQRRKNPQEGLYNELQKDKMAEAYSEIGMKGERRRGKGHDGLYQGLSTATKDTYDALHMQALPPR

SEQ ID NO: 28903 - protein, 253 aa, synthetic construct
KSSDKSVCLFTDFDSQTNVSQSKDSDVYITDKTVLDMRSMDFKSNSAVAWSNKSDFACANAFNNSIIPEDTFFPSPESSDHVKPKETENTKQPSKSCHKPKAIVHTEKVNMMSLTVLGLRMLFAKTVAVNFLLTAKLFFLRVKFSRSADAPAYQQGQNQLYNELNLGRREEYDVLDKRRGRDPEMGGKPQRRKNPQEGLYNELQKDKMAEAYSEIGMKGERRRGKGHDGLYQGLSTATKDTYDALHMQALPPR

SEQ ID NO: 28904 - protein, 299 aa, synthetic construct
EDLKNVFPPEVAVFEPSEAEISHTQKATLVCLATGFYPDHVELSWWVNGKEVHSGVSTDPQPLKEQPALNDSRYCLSSRLRVSATFWQNPRNHFRCQVQFYGLSENDEWTQDRAKPVTQIVSAEAWIPEDTFFPSPESSCDVKLVEKSFETDTNLNFQNLSVIGFRILLLKVAGFNLLMTLRLWSSRVKFSRSADAPAYQQGQNQLYNELNLGRREEYDVLDKRRGRDPEMGGKPQRRKNPQEGLYNELQKDKMAEAYSEIGMKGERRRGKGHDGLYQGLSTATKDTYDALHMQALPPR

SEQ ID NO: 28905 - protein, 289 aa, synthetic construct
EDLKNVFPPEVAVFEPSEAEISHTQKATLVCLATGFYPDHVELSWWVNGKEVHSGVSTDPQPLKEQPALNDSRYCLSSRLRVSATFWQNPRNHFRCQVQFYGLSENDEWTQDRAKPVTQIVSAEAWESSCDVKLVEKSFETDTNLNFQNLSVIGFRILLLKVAGFNLLMTLRLWSSRVKFSRSADAPAYQQGQNQLYNELNLGRREEYDVLDKRRGRDPEMGGKPQRRKNPQEGLYNELQKDKMAEAYSEIGMKGERRRGKGHDGLYQGLSTATKDTYDALHMQALPPR

SEQ ID NO: 28906 - protein, 298 aa, synthetic construct
EDLKNVFPPEVAVFEPSEAEISHTQKATLVCLATGFYPDHVELSWWVNGKEVHSGVSTDPQPLKEQPALNDSRYCLSSRLRVSATFWQNPRNHFRCQVQFYGLSENDEWTQDRAKPVTQIVSAEAWPEDTFFPSPESSCDVKLVEKSFETDTNLNFQNLSVIGFRILLLKVAGFNLLMTLRLWSSRVKFSRSADAPAYQQGQNQLYNELNLGRREEYDVLDKRRGRDPEMGGKPQRRKNPQEGLYNELQKDKMAEAYSEIGMKGERRRGKGHDGLYQGLSTATKDTYDALHMQALPPR

SEQ ID NO: 28907 - protein, 308 aa, synthetic construct
EDLKNVFPPEVAVFEPSEAEISHTQKATLVCLATGFYPDHVELSWWVNGKEVHSGVSTDPQPLKEQPALNDSRYCLSSRLRVSATFWQNPRNHFRCQVQFYGLSENDEWTQDRAKPVTQIVSAEAWFPPIKTDVITMDPKDNCSKDANDTLLLQLTNTSAYYMYLLLLLKSVVYFAIITCCLLRRTAFCCNGEKSRVKFSRSADAPAYQQGQNQLYNELNLGRREEYDVLDKRRGRDPEMGGKPQRRKNPQEGLYNELQKDKMAEAYSEIGMKGERRRGKGHDGLYQGLSTATKDTYDALHMQALPPR

SEQ ID NO: 28908 - protein, 306 aa, synthetic construct
EDLKNVFPPEVAVFEPSEAEISHTQKATLVCLATGFYPDHVELSWWVNGKEVHSGVSTDPQPLKEQPALNDSRYCLSSRLRVSATFWQNPRNHFRCQVQFYGLSENDEWTQDRAKPVTQIVSAEAWPIKTDVITMDPKDNCSKDANDTLLLQLTNTSAYYMYLLLLLKSVVYFAIITCCLLRRTAFCCNGEKSRVKFSRSADAPAYQQGQNQLYNELNLGRREEYDVLDKRRGRDPEMGGKPQRRKNPQEGLYNELQKDKMAEAYSEIGMKGERRRGKGHDGLYQGLSTATKDTYDALHMQALPPR

SEQ ID NO: 28909 - protein, 298 aa, synthetic construct
EDLKNVFPPEVAVFEPSEAEISHTQKATLVCLATGFYPDHVELSWWVNGKEVHSGVSTDPQPLKEQPALNDSRYCLSSRLRVSATFWQNPRNHFRCQVQFYGLSENDEWTQDRAKPVTQIVSAEAWMDPKDNCSKDANDTLLLQLTNTSAYYMYLLLLLKSVVYFAIITCCLLRRTAFCCNGEKSRVKFSRSADAPAYQQGQNQLYNELNLGRREEYDVLDKRRGRDPEMGGKPQRRKNPQEGLYNELQKDKMAEAYSEIGMKGERRRGKGHDGLYQGLSTATKDTYDALHMQALPPR

SEQ ID NO: 28910 - protein, 306 aa, synthetic construct; identical to SEQ ID NO: 28908

SEQ ID NO: 28911 - protein, 292 aa, synthetic construct
EDLKNVFPPEVAVFEPSEAEISHTQKATLVCLATGFYPDHVELSWWVNGKEVHSGVSTDPQPLKEQPALNDSRYCLSSRLRVSATFWQNPRNHFRCQVQFYGLSENDEWTQDRAKPVTQIVSAEAWCSKDANDTLLLQLTNTSAYYMYLLLLLKSVVYFAIITCCLLRRTAFCCNGEKSRVKFSRSADAPAYQQGQNQLYNELNLGRREEYDVLDKRRGRDPEMGGKPQRRKNPQEGLYNELQKDKMAEAYSEIGMKGERRRGKGHDGLYQGLSTATKDTYDALHMQALPPR

SEQ ID NO: 28912 - protein, 307 aa, synthetic construct
EDLKNVFPPEVAVFEPSEAEISHTQKATLVCLATGFYPDHVELSWWVNGKEVHSGVSTDPQPLKEQPALNDSRYCLSSRLRVSATFWQNPRNHFRCQVQFYGLSENDEWTQDRAKPVTQIVSAEAWEVKTDSTDHVKPKETENTKQPSKSCHKPKAIVHTEKVNMMSLTVLGLRMLFAKTVAVNFLLTAKLFFLRVKFSRSADAPAYQQGQNQLYNELNLGRREEYDVLDKRRGRDPEMGGKPQRRKNPQEGLYNELQKDKMAEAYSEIGMKGERRRGKGHDGLYQGLSTATKDTYDALHMQALPPR

SEQ ID NO: 28913 - protein, 300 aa, synthetic construct
EDLKNVFPPEVAVFEPSEAEISHTQKATLVCLATGFYPDHVELSWWVNGKEVHSGVSTDPQPLKEQPALNDSRYCLSSRLRVSATFWQNPRNHFRCQVQFYGLSENDEWTQDRAKPVTQIVSAEAWDHVKPKETENTKQPSKSCHKPKAIVHTEKVNMMSLTVLGLRMLFAKTVAVNFLLTAKLFFLRVKFSRSADAPAYQQGQNQLYNELNLGRREEYDVLDKRRGRDPEMGGKPQRRKNPQEGLYNELQKDKMAEAYSEIGMKGERRRGKGHDGLYQGLSTATKDTYDALHMQALPPR

SEQ ID NO: 28914 - protein, 301 aa, synthetic construct
EDLKNVFPPEVAVFEPSEAEISHTQKATLVCLATGFYPDHVELSWWVNGKEVHSGVSTDPQPLKEQPALNDSRYCLSSRLRVSATFWQNPRNHFRCQVQFYGLSENDEWTQDRAKPVTQIVSAEAWGRIPEDTFFPSPESSCDVKLVEKSFETDTNLNFQNLSVIGFRILLLKVAGFNLLMTLRLWSSRVKFSRSADAPAYQQGQNQLYNELNLGRREEYDVLDKRRGRDPEMGGKPQRRKNPQEGLYNELQKDKMAEAYSEIGMKGERRRGKGHDGLYQGLSTATKDTYDALHMQALPPR

SEQ ID NO: 28915 - protein, 291 aa, synthetic construct
EDLKNVFPPEVAVFEPSEAEISHTQKATLVCLATGFYPDHVELSWWVNGKEVHSGVSTDPQPLKEQPALNDSRYCLSSRLRVSATFWQNPRNHFRCQVQFYGLSENDEWTQDRAKPVTQIVSAEAWGRESSCDVKLVEKSFETDTNLNFQNLSVIGFRILLLKVAGFNLLMTLRLWSSRVKFSRSADAPAYQQGQNQLYNELNLGRREEYDVLDKRRGRDPEMGGKPQRRKNPQEGLYNELQKDKMAEAYSEIGMKGERRRGKGHDGLYQGLSTATKDTYDALHMQALPPR

SEQ ID NO: 28916 - protein, 300 aa, synthetic construct
EDLKNVFPPEVAVFEPSEAEISHTQKATLVCLATGFYPDHVELSWWVNGKEVHSGVSTDPQPLKEQPALNDSRYCLSSRLRVSATFWQNPRNHFRCQVQFYGLSENDEWTQDRAKPVTQIVSAEAWGRPEDTFFPSPESSCDVKLVEKSFETDTNLNFQNLSVIGFRILLLKVAGFNLLMTLRLWSSRVKFSRSADAPAYQQGQNQLYNELNLGRREEYDVLDKRRGRDPEMGGKPQRRKNPQEGLYNELQKDKMAEAYSEIGMKGERRRGKGHDGLYQGLSTATKDTYDALHMQALPPR

SEQ ID NO: 28917 - protein, 310 aa, synthetic construct
EDLKNVFPPEVAVFEPSEAEISHTQKATLVCLATGFYPDHVELSWWVNGKEVHSGVSTDPQPLKEQPALNDSRYCLSSRLRVSATFWQNPRNHFRCQVQFYGLSENDEWTQDRAKPVTQIVSAEAWGRFPPIKTDVITMDPKDNCSKDANDTLLLQLTNTSAYYMYLLLLLKSVVYFAIITCCLLRRTAFCCNGEKSRVKFSRSADAPAYQQGQNQLYNELNLGRREEYDVLDKRRGRDPEMGGKPQRRKNPQEGLYNELQKDKMAEAYSEIGMKGERRRGKGHDGLYQGLSTATKDTYDALHMQALPPR

SEQ ID NO: 28918 - protein, 308 aa, synthetic construct
EDLKNVFPPEVAVFEPSEAEISHTQKATLVCLATGFYPDHVELSWWVNGKEVHSGVSTDPQPLKEQPALNDSRYCLSSRLRVSATFWQNPRNHFRCQVQFYGLSENDEWTQDRAKPVTQIVSAEAWGRPIKTDVITMDPKDNCSKDANDTLLLQLTNTSAYYMYLLLLLKSVVYFAIITCCLLRRTAFCCNGEKSRVKFSRSADAPAYQQGQNQLYNELNLGRREEYDVLDKRRGRDPEMGGKPQRRKNPQEGLYNELQKDKMAEAYSEIGMKGERRRGKGHDGLYQGLSTATKDTYDALHMQALPPR

SEQ ID NO: 28919 - protein, 300 aa, synthetic construct
EDLKNVFPPEVAVFEPSEAEISHTQKATLVCLATGFYPDHVELSWWVNGKEVHSGVSTDPQPLKEQPALNDSRYCLSSRLRVSATFWQNPRNHFRCQVQFYGLSENDEWTQDRAKPVTQIVSAEAWGRMDPKDNCSKDANDTLLLQLTNTSAYYMYLLLLLKSVVYFAIITCCLLRRTAFCCNGEKSRVKFSRSADAPAYQQGQNQLYNELNLGRREEYDVLDKRRGRDPEMGGKPQRRKNPQEGLYNELQKDKMAEAYSEIGMKGERRRGKGHDGLYQGLSTATKDTYDALHMQALPPR

SEQ ID NO: 28920 - protein, 308 aa, synthetic construct; identical to SEQ ID NO: 28918

SEQ ID NO: 28921 - protein, 294 aa, synthetic construct
EDLKNVFPPEVAVFEPSEAEISHTQKATLVCLATGFYPDHVELSWWVNGKEVHSGVSTDPQPLKEQPALNDSRYCLSSRLRVSATFWQNPRNHFRCQVQFYGLSENDEWTQDRAKPVTQIVSAEAWGRCSKDANDTLLLQLTNTSAYYMYLLLLLKSVVYFAIITCCLLRRTAFCCNGEKSRVKFSRSADAPAYQQGQNQLYNELNLGRREEYDVLDKRRGRDPEMGGKPQRRKNPQEGLYNELQKDKMAEAYSEIGMKGERRRGKGHDGLYQGLSTATKDTYDALHMQALPPR

SEQ ID NO: 28922 - protein, 309 aa, synthetic construct
EDLKNVFPPEVAVFEPSEAEISHTQKATLVCLATGFYPDHVELSWWVNGKEVHSGVSTDPQPLKEQPALNDSRYCLSSRLRVSATFWQNPRNHFRCQVQFYGLSENDEWTQDRAKPVTQIVSAEAWGREVKTDSTDHVKPKETENTKQPSKSCHKPKAIVHTEKVNMMSLTVLGLRMLFAKTVAVNFLLTAKLFFLRVKFSRSADAPAYQQGQNQLYNELNLGRREEYDVLDKRRGRDPEMGGKPQRRKNPQEGLYNELQKDKMAEAYSEIGMKGERRRGKGHDGLYQGLSTATKDTYDALHMQALPPR

SEQ ID NO: 28923 - protein, 302 aa, synthetic construct
EDLKNVFPPEVAVFEPSEAEISHTQKATLVCLATGFYPDHVELSWWVNGKEVHSGVSTDPQPLKEQPALNDSRYCLSSRLRVSATFWQNPRNHFRCQVQFYGLSENDEWTQDRAKPVTQIVSAEAWGRDHVKPKETENTKQPSKSCHKPKAIVHTEKVNMMSLTVLGLRMLFAKTVAVNFLLTAKLFFLRVKFSRSADAPAYQQGQNQLYNELNLGRREEYDVLDKRRGRDPEMGGKPQRRKNPQEGLYNELQKDKMAEAYSEIGMKGERRRGKGHDGLYQGLSTATKDTYDALHMQALPPR

SEQ ID NO: 28924 - protein, 304 aa, synthetic construct
EDLKNVFPPEVAVFEPSEAEISHTQKATLVCLATGFYPDHVELSWWVNGKEVHSGVSTDPQPLKEQPALNDSRYCLSSRLRVSATFWQNPRNHFRCQVQFYGLSENDEWTQDRAKPVTQIVSAEAWGRADCIPEDTFFPSPESSCDVKLVEKSFETDTNLNFQNLSVIGFRILLLKVAGFNLLMTLRLWSSRVKFSRSADAPAYQQGQNQLYNELNLGRREEYDVLDKRRGRDPEMGGKPQRRKNPQEGLYNELQKDKMAEAYSEIGMKGERRRGKGHDGLYQGLSTATKDTYDALHMQALPPR

SEQ ID NO: 28925 - protein, 294 aa, synthetic construct
EDLKNVFPPEVAVFEPSEAEISHTQKATLVCLATGFYPDHVELSWWVNGKEVHSGVSTDPQPLKEQPALNDSRYCLSSRLRVSATFWQNPRNHFRCQVQFYGLSENDEWTQDRAKPVTQIVSAEAWGRADCESSCDVKLVEKSFETDTNLNFQNLSVIGFRILLLKVAGFNLLMTLRLWSSRVKFSRSADAPAYQQGQNQLYNELNLGRREEYDVLDKRRGRDPEMGGKPQRRKNPQEGLYNELQKDKMAEAYSEIGMKGERRRGKGHDGLYQGLSTATKDTYDALHMQALPPR

SEQ ID NO: 28926 - protein, 303 aa, synthetic construct
EDLKNVFPPEVAVFEPSEAEISHTQKATLVCLATGFYPDHVELSWWVNGKEVHSGVSTDPQPLKEQPALNDSRYCLSSRLRVSATFWQNPRNHFRCQVQFYGLSENDEWTQDRAKPVTQIVSAEAWGRADCPEDTFFPSPESSCDVKLVEKSFETDTNLNFQNLSVIGFRILLLKVAGFNLLMTLRLWSSRVKFSRSADAPAYQQGQNQLYNELNLGRREEYDVLDKRRGRDPEMGGKPQRRKNPQEGLYNELQKDKMAEAYSEIGMKGERRRGKGHDGLYQGLSTATKDTYDALHMQALPPR

SEQ ID NO: 28927 - protein, 313 aa, synthetic construct
EDLKNVFPPEVAVFEPSEAEISHTQKATLVCLATGFYPDHVELSWWVNGKEVHSGVSTDPQPLKEQPALNDSRYCLSSRLRVSATFWQNPRNHFRCQVQFYGLSENDEWTQDRAKPVTQIVSAEAWGRADCFPPIKTDVITMDPKDNCSKDANDTLLLQLTNTSAYYMYLLLLLKSVVYFAIITCCLLRRTAFCCNGEKSRVKFSRSADAPAYQQGQNQLYNELNLGRREEYDVLDKRRGRDPEMGGKPQRRKNPQEGLYNELQKDKMAEAYSEIGMKGERRRGKGHDGLYQGLSTATKDTYDALHMQALPPR

SEQ ID NO: 28928 - protein, 311 aa, synthetic construct
EDLKNVFPPEVAVFEPSEAEISHTQKATLVCLATGFYPDHVELSWWVNGKEVHSGVSTDPQPLKEQPALNDSRYCLSSRLRVSATFWQNPRNHFRCQVQFYGLSENDEWTQDRAKPVTQIVSAEAWGRADCPIKTDVITMDPKDNCSKDANDTLLLQLTNTSAYYMYLLLLLKSVVYFAIITCCLLRRTAFCCNGEKSRVKFSRSADAPAYQQGQNQLYNELNLGRREEYDVLDKRRGRDPEMGGKPQRRKNPQEGLYNELQKDKMAEAYSEIGMKGERRRGKGHDGLYQGLSTATKDTYDALHMQALPPR

SEQ ID NO: 28929 - protein, 303 aa, synthetic construct
EDLKNVFPPEVAVFEPSEAEISHTQKATLVCLATGFYPDHVELSWWVNGKEVHSGVSTDPQPLKEQPALNDSRYCLSSRLRVSATFWQNPRNHFRCQVQFYGLSENDEWTQDRAKPVTQIVSAEAWGRADCMDPKDNCSKDANDTLLLQLTNTSAYYMYLLLLLKSVVYFAIITCCLLRRTAFCCNGEKSRVKFSRSADAPAYQQGQNQLYNELNLGRREEYDVLDKRRGRDPEMGGKPQRRKNPQEGLYNELQKDKMAEAYSEIGMKGERRRGKGHDGLYQGLSTATKDTYDALHMQALPPR

SEQ ID NO: 28930 - protein, 311 aa, synthetic construct; identical to SEQ ID NO: 28928

SEQ ID NO: 28931 - protein, 297 aa, synthetic construct
EDLKNVFPPEVAVFEPSEAEISHTQKATLVCLATGFYPDHVELSWWVNGKEVHSGVSTDPQPLKEQPALNDSRYCLSSRLRVSATFWQNPRNHFRCQVQFYGLSENDEWTQDRAKPVTQIVSAEAWGRADCCSKDANDTLLLQLTNTSAYYMYLLLLLKSVVYFAIITCCLLRRTAFCCNGEKSRVKFSRSADAPAYQQGQNQLYNELNLGRREEYDVLDKRRGRDPEMGGKPQRRKNPQEGLYNELQKDKMAEAYSEIGMKGERRRGKGHDGLYQGLSTATKDTYDALHMQALPPR

SEQ ID NO: 28932 - protein, 312 aa, synthetic construct
EDLKNVFPPEVAVFEPSEAEISHTQKATLVCLATGFYPDHVELSWWVNGKEVHSGVSTDPQPLKEQPALNDSRYCLSSRLRVSATFWQNPRNHFRCQVQFYGLSENDEWTQDRAKPVTQIVSAEAWGRADCEVKTDSTDHVKPKETENTKQPSKSCHKPKAIVHTEKVNMMSLTVLGLRMLFAKTVAVNFLLTAKLFFLRVKFSRSADAPAYQQGQNQLYNELNLGRREEYDVLDKRRGRDPEMGGKPQRRKNPQEGLYNELQKDKMAEAYSEIGMKGERRRGKGHDGLYQGLSTATKDTYDALHMQALPPR

SEQ ID NO: 28933 - protein, 305 aa, synthetic construct
EDLKNVFPPEVAVFEPSEAEISHTQKATLVCLATGFYPDHVELSWWVNGKEVHSGVSTDPQPLKEQPALNDSRYCLSSRLRVSATFWQNPRNHFRCQVQFYGLSENDEWTQDRAKPVTQIVSAEAWGRADCDHVKPKETENTKQPSKSCHKPKAIVHTEKVNMMSLTVLGLRMLFAKTVAVNFLLTAKLFFLRVKFSRSADAPAYQQGQNQLYNELNLGRREEYDVLDKRRGRDPEMGGKPQRRKNPQEGLYNELQKDKMAEAYSEIGMKGERRRGKGHDGLYQGLSTATKDTYDALHMQALPPR

SEQ ID NO: 28934 - protein, 291 aa, synthetic construct
EDLKNVFPPEVAVFEPSEAEISHTQKATLVCLATGFYPDHVELSWWVNGKEVHSGVSTDPQPLKEQPALNDSRYCLSSRLRVSATFWQNPRNHFRCQVQFYGLSENDEWTQDRAKPVTIPEDTFFPSPESSCDVKLVEKSFETDTNLNFQNLSVIGFRILLLKVAGFNLLMTLRLWSSRVKFSRSADAPAYQQGQNQLYNELNLGRREEYDVLDKRRGRDPEMGGKPQRRKNPQEGLYNELQKDKMAEAYSEIGMKGERRRGKGHDGLYQGLSTATKDTYDALHMQALPPR

SEQ ID NO: 28935 - protein, 281 aa, synthetic construct
EDLKNVFPPEVAVFEPSEAEISHTQKATLVCLATGFYPDHVELSWWVNGKEVHSGVSTDPQPLKEQPALNDSRYCLSSRLRVSATFWQNPRNHFRCQVQFYGLSENDEWTQDRAKPVTESSCDVKLVEKSFETDTNLNFQNLSVIGFRILLLKVAGFNLLMTLRLWSSRVKFSRSADAPAYQQGQNQLYNELNLGRREEYDVLDKRRGRDPEMGGKPQRRKNPQEGLYNELQKDKMAEAYSEIGMKGERRRGKGHDGLYQGLSTATKDTYDALHMQALPPR

SEQ ID NO: 28936 - protein, 290 aa, synthetic construct
EDLKNVFPPEVAVFEPSEAEISHTQKATLVCLATGFYPDHVELSWWVNGKEVHSGVSTDPQPLKEQPALNDSRYCLSSRLRVSATFWQNPRNHFRCQVQFYGLSENDEWTQDRAKPVTPEDTFFPSPESSCDVKLVEKSFETDTNLNFQNLSVIGFRILLLKVAGFNLLMTLRLWSSRVKFSRSADAPAYQQGQNQLYNELNLGRREEYDVLDKRRGRDPEMGGKPQRRKNPQEGLYNELQKDKMAEAYSEIGMKGERRRGKGHDGLYQGLSTATKDTYDALHMQALPPR

SEQ ID NO: 28937 - protein, 300 aa, synthetic construct
EDLKNVFPPEVAVFEPSEAEISHTQKATLVCLATGFYPDHVELSWWVNGKEVHSGVSTDPQPLKEQPALNDSRYCLSSRLRVSATFWQNPRNHFRCQVQFYGLSENDEWTQDRAKPVTFPPIKTDVITMDPKDNCSKDANDTLLLQLTNTSAYYMYLLLLLKSVVYFAIITCCLLRRTAFCCNGEKSRVKFSRSADAPAYQQGQNQLYNELNLGRREEYDVLDKRRGRDPEMGGKPQRRKNPQEGLYNELQKDKMAEAYSEIGMKGERRRGKGHDGLYQGLSTATKDTYDALHMQALPPR

SEQ ID NO: 28938 - protein, 298 aa, synthetic construct
EDLKNVFPPEVAVFEPSEAEISHTQKATLVCLATGFYPDHVELSWWVNGKEVHSGVSTDPQPLKEQPALNDSRYCLSSRLRVSATFWQNPRNHFRCQVQFYGLSENDEWTQDRAKPVTPIKTDVITMDPKDNCSKDANDTLLLQLTNTSAYYMYLLLLLKSVVYFAIITCCLLRRTAFCCNGEKSRVKFSRSADAPAYQQGQNQLYNELNLGRREEYDVLDKRRGRDPEMGGKPQRRKNPQEGLYNELQKDKMAEAYSEIGMKGERRRGKGHDGLYQGLSTATKDTYDALHMQALPPR

SEQ ID NO: 28939 - protein, 290 aa, synthetic construct
EDLKNVFPPEVAVFEPSEAEISHTQKATLVCLATGFYPDHVELSWWVNGKEVHSGVSTDPQPLKEQPALNDSRYCLSSRLRVSATFWQNPRNHFRCQVQFYGLSENDEWTQDRAKPVTMDPKDNCSKDANDTLLLQLTNTSAYYMYLLLLLKSVVYFAIITCCLLRRTAFCCNGEKSRVKFSRSADAPAYQQGQNQLYNELNLGRREEYDVLDKRRGRDPEMGGKPQRRKNPQEGLYNELQKDKMAEAYSEIGMKGERRRGKGHDGLYQGLSTATKDTYDALHMQALPPR

SEQ ID NO: 28940 - protein, 298 aa, synthetic construct; identical to SEQ ID NO: 28938

SEQ ID NO: 28941 - protein, 284 aa, synthetic construct
EDLKNVFPPEVAVFEPSEAEISHTQKATLVCLATGFYPDHVELSWWVNGKEVHSGVSTDPQPLKEQPALNDSRYCLSSRLRVSATFWQNPRNHFRCQVQFYGLSENDEWTQDRAKPVTCSKDANDTLLLQLTNTSAYYMYLLLLLKSVVYFAIITCCLLRRTAFCCNGEKSRVKFSRSADAPAYQQGQNQLYNELNLGRREEYDVLDKRRGRDPEMGGKPQRRKNPQEGLYNELQKDKMAEAYSEIGMKGERRRGKGHDGLYQGLSTATKDTYDALHMQALPPR

SEQ ID NO: 28942 - protein, 299 aa, synthetic construct
EDLKNVFPPEVAVFEPSEAEISHTQKATLVCLATGFYPDHVELSWWVNGKEVHSGVSTDPQPLKEQPALNDSRYCLSSRLRVSATFWQNPRNHFRCQVQFYGLSENDEWTQDRAKPVTEVKTDSTDHVKPKETENTKQPSKSCHKPKAIVHTEKVNMMSLTVLGLRMLFAKTVAVNFLLTAKLFFLRVKFSRSADAPAYQQGQNQLYNELNLGRREEYDVLDKRRGRDPEMGGKPQRRKNPQEGLYNELQKDKMAEAYSEIGMKGERRRGKGHDGLYQGLSTATKDTYDALHMQALPPR

SEQ ID NO: 28943 - protein, 292 aa, synthetic construct
EDLKNVFPPEVAVFEPSEAEISHTQKATLVCLATGFYPDHVELSWWVNGKEVHSGVSTDPQPLKEQPALNDSRYCLSSRLRVSATFWQNPRNHFRCQVQFYGLSENDEWTQDRAKPVTDHVKPKETENTKQPSKSCHKPKAIVHTEKVNMMSLTVLGLRMLFAKTVAVNFLLTAKLFFLRVKFSRSADAPAYQQGQNQLYNELNLGRREEYDVLDKRRGRDPEMGGKPQRRKNPQEGLYNELQKDKMAEAYSEIGMKGERRRGKGHDGLYQGLSTATKDTYDALHMQALPPR

SEQ ID NO: 28944 - protein, 299 aa, synthetic construct; identical to SEQ ID NO: 28904

SEQ ID NO: 28945 - protein, 289 aa, synthetic construct; identical to SEQ ID NO: 28905

SEQ ID NO: 28946 - protein, 298 aa, synthetic construct; identical to SEQ ID NO: 28906

SEQ ID NO: 28947 - protein, 308 aa, synthetic construct; identical to SEQ ID NO: 28907

SEQ ID NO: 28948 - protein, 306 aa, synthetic construct; identical to SEQ ID NO: 28908

SEQ ID NO: 28949 - protein, 298 aa, synthetic construct; identical to SEQ ID NO: 28909

SEQ ID NO: 28950 - protein, 306 aa, synthetic construct; identical to SEQ ID NO: 28908

SEQ ID NO: 28951 - protein, 292 aa, synthetic construct; identical to SEQ ID NO: 28911

SEQ ID NO: 28952 - protein, 307 aa, synthetic construct; identical to SEQ ID NO: 28912

SEQ ID NO: 28953 - protein, 300 aa, synthetic construct; identical to SEQ ID NO: 28913

SEQ ID NO: 28954 - protein, 283 aa, synthetic construct
PEVAVFEPSEAEISHTQKATLVCLATGFYPDHVELSWWVNGKEVHSGVSTDPQPLKEQPALNDSRYCLSSRLRVSATFWQNPRNHFRCQVQFYGLSENDEWTQDRAKPVTIPEDTFFPSPESSCDVKLVEKSFETDTNLNFQNLSVIGFRILLLKVAGFNLLMTLRLWSSRVKFSRSADAPAYQQGQNQLYNELNLGRREEYDVLDKRRGRDPEMGGKPQRRKNPQEGLYNELQKDKMAEAYSEIGMKGERRRGKGHDGLYQGLSTATKDTYDALHMQALPPR

SEQ ID NO: 28955 - protein, 273 aa, synthetic construct
PEVAVFEPSEAEISHTQKATLVCLATGFYPDHVELSWWVNGKEVHSGVSTDPQPLKEQPALNDSRYCLSSRLRVSATFWQNPRNHFRCQVQFYGLSENDEWTQDRAKPVTESSCDVKLVEKSFETDTNLNFQNLSVIGFRILLLKVAGFNLLMTLRLWSSRVKFSRSADAPAYQQGQNQLYNELNLGRREEYDVLDKRRGRDPEMGGKPQRRKNPQEGLYNELQKDKMAEAYSEIGMKGERRRGKGHDGLYQGLSTATKDTYDALHMQALPPR

SEQ ID NO: 28956 - protein, 282 aa, synthetic construct
PEVAVFEPSEAEISHTQKATLVCLATGFYPDHVELSWWVNGKEVHSGVSTDPQPLKEQPALNDSRYCLSSRLRVSATFWQNPRNHFRCQVQFYGLSENDEWTQDRAKPVTPEDTFFPSPESSCDVKLVEKSFETDTNLNFQNLSVIGFRILLLKVAGFNLLMTLRLWSSRVKFSRSADAPAYQQGQNQLYNELNLGRREEYDVLDKRRGRDPEMGGKPQRRKNPQEGLYNELQKDKMAEAYSEIGMKGERRRGKGHDGLYQGLSTATKDTYDALHMQALPPR

SEQ ID NO: 28957 - protein, 292 aa, synthetic construct
PEVAVFEPSEAEISHTQKATLVCLATGFYPDHVELSWWVNGKEVHSGVSTDPQPLKEQPALNDSRYCLSSRLRVSATFWQNPRNHFRCQVQFYGLSENDEWTQDRAKPVTFPPIKTDVITMDPKDNCSKDANDTLLLQLTNTSAYYMYLLLLLKSVVYFAIITCCLLRRTAFCCNGEKSRVKFSRSADAPAYQQGQNQLYNELNLGRREEYDVLDKRRGRDPEMGGKPQRRKNPQEGLYNELQKDKMAEAYSEIGMKGERRRGKGHDGLYQGLSTATKDTYDALHMQALPPR

SEQ ID NO: 28958 - protein, 290 aa, synthetic construct
PEVAVFEPSEAEISHTQKATLVCLATGFYPDHVELSWWVNGKEVHSGVSTDPQPLKEQPALNDSRYCLSSRLRVSATFWQNPRNHFRCQVQFYGLSENDEWTQDRAKPVTPIKTDVITMDPKDNCSKDANDTLLLQLTNTSAYYMYLLLLLKSVVYFAIITCCLLRRTAFCCNGEKSRVKFSRSADAPAYQQGQNQLYNELNLGRREEYDVLDKRRGRDPEMGGKPQRRKNPQEGLYNELQKDKMAEAYSEIGMKGERRRGKGHDGLYQGLSTATKDTYDALHMQALPPR

SEQ ID NO: 28959 - protein, 282 aa, synthetic construct
PEVAVFEPSEAEISHTQKATLVCLATGFYPDHVELSWWVNGKEVHSGVSTDPQPLKEQPALNDSRYCLSSRLRVSATFWQNPRNHFRCQVQFYGLSENDEWTQDRAKPVTMDPKDNCSKDANDTLLLQLTNTSAYYMYLLLLLKSVVYFAIITCCLLRRTAFCCNGEKSRVKFSRSADAPAYQQGQNQLYNELNLGRREEYDVLDKRRGRDPEMGGKPQRRKNPQEGLYNELQKDKMAEAYSEIGMKGERRRGKGHDGLYQGLSTATKDTYDALHMQALPPR

SEQ ID NO: 28960 - protein, 290 aa, synthetic construct; identical to SEQ ID NO: 28958

SEQ ID NO: 28961 - protein, 276 aa, synthetic construct
PEVAVFEPSEAEISHTQKATLVCLATGFYPDHVELSWWVNGKEVHSGVSTDPQPLKEQPALNDSRYCLSSRLRVSATFWQNPRNHFRCQVQFYGLSENDEWTQDRAKPVTCSKDANDTLLLQLTNTSAYYMYLLLLLKSVVYFAIITCCLLRRTAFCCNGEKSRVKFSRSADAPAYQQGQNQLYNELNLGRREEYDVLDKRRGRDPEMGGKPQRRKNPQEGLYNELQKDKMAEAYSEIGMKGERRRGKGHDGLYQGLSTATKDTYDALHMQALPPR

SEQ ID NO: 28962 - protein, 291 aa, synthetic construct
PEVAVFEPSEAEISHTQKATLVCLATGFYPDHVELSWWVNGKEVHSGVSTDPQPLKEQPALNDSRYCLSSRLRVSATFWQNPRNHFRCQVQFYGLSENDEWTQDRAKPVTEVKTDSTDHVKPKETENTKQPSKSCHKPKAIVHTEKVNMMSLTVLGLRMLFAKTVAVNFLLTAKLFFLRVKFSRSADAPAYQQGQNQLYNELNLGRREEYDVLDKRRGRDPEMGGKPQRRKNPQEGLYNELQKDKMAEAYSEIGMKGERRRGKGHDGLYQGLSTATKDTYDALHMQALPPR

SEQ ID NO: 28963 - protein, 284 aa, synthetic construct
PEVAVFEPSEAEISHTQKATLVCLATGFYPDHVELSWWVNGKEVHSGVSTDPQPLKEQPALNDSRYCLSSRLRVSATFWQNPRNHFRCQVQFYGLSENDEWTQDRAKPVTDHVKPKETENTKQPSKSCHKPKAIVHTEKVNMMSLTVLGLRMLFAKTVAVNFLLTAKLFFLRVKFSRSADAPAYQQGQNQLYNELNLGRREEYDVLDKRRGRDPEMGGKPQRRKNPQEGLYNELQKDKMAEAYSEIGMKGERRRGKGHDGLYQGLSTATKDTYDALHMQALPPR

SEQ ID NO: 28964 - protein, 277 aa, synthetic construct
DKQLDADVSPKPTIFLPSIAETKLQKAGTYLCLLEKFFPDVIKIHWQEKKSNTILGSQEGNTMKTNDTYMKFSWLTVPEKSLDKEHRCIVRHENNKNGVDQEIIIPEDTFFPSPESSCDVKLVEKSFETDTNLNFQNLSVIGFRILLLKVAGFNLLMTLRLWSSRVKFSRSADAPAYQQGQNQLYNELNLGRREEYDVLDKRRGRDPEMGGKPQRRKNPQEGLYNELQKDKMAEAYSEIGMKGERRRGKGHDGLYQGLSTATKDTYDALHMQALPPR

SEQ ID NO: 28965 - protein, 267 aa, synthetic construct
DKQLDADVSPKPTIFLPSIAETKLQKAGTYLCLLEKFFPDVIKIHWQEKKSNTILGSQEGNTMKTNDTYMKFSWLTVPEKSLDKEHRCIVRHENNKNGVDQEIIESSCDVKLVEKSFETDTNLNFQNLSVIGFRILLLKVAGFNLLMTLRLWSSRVKFSRSADAPAYQQGQNQLYNELNLGRREEYDVLDKRRGRDPEMGGKPQRRKNPQEGLYNELQKDKMAEAYSEIGMKGERRRGKGHDGLYQGLSTATKDTYDALHMQALPPR

SEQ ID NO: 28966 - protein, 276 aa, synthetic construct
DKQLDADVSPKPTIFLPSIAETKLQKAGTYLCLLEKFFPDVIKIHWQEKKSNTILGSQEGNTMKTNDTYMKFSWLTVPEKSLDKEHRCIVRHENNKNGVDQEIIPEDTFFPSPESSCDVKLVEKSFETDTNLNFQNLSVIGFRILLLKVAGFNLLMTLRLWSSRVKFSRSADAPAYQQGQNQLYNELNLGRREEYDVLDKRRGRDPEMGGKPQRRKNPQEGLYNELQKDKMAEAYSEIGMKGERRRGKGHDGLYQGLSTATKDTYDALHMQALPPR

SEQ ID NO: 28967 - protein, 270 aa, synthetic construct
DKQLDADVSPKPTIFLPSIAETKLQKAGTYLCLLEKFFPDVIKIHWQEKKSNTILGSQEGNTMKTNDTYMKFSWLTVPEKSLDKEHRCIVRHENNKNGVDQEIIGRADCGFTSESYQQGVLSATILYEILLGKATLYAVLVSALVLMAMVKRKDSRGRVKFSRSADAPAYQQGQNQLYNELNLGRREEYDVLDKRRGRDPEMGGKPQRRKNPQEGLYNELQKDKMAEAYSEIGMKGERRRGKGHDGLYQGLSTATKDTYDALHMQALPPR

SEQ ID NO: 28968 - protein, 268 aa, synthetic construct
DKQLDADVSPKPTIFLPSIAETKLQKAGTYLCLLEKFFPDVIKIHWQEKKSNTILGSQEGNTMKTNDTYMKFSWLTVPEKSLDKEHRCIVRHENNKNGVDQEIIADCGFTSESYQQGVLSATILYEILLGKATLYAVLVSALVLMAMVKRKDSRGRVKFSRSADAPAYQQGQNQLYNELNLGRREEYDVLDKRRGRDPEMGGKPQRRKNPQEGLYNELQKDKMAEAYSEIGMKGERRRGKGHDGLYQGLSTATKDTYDALHMQALPPR

SEQ ID NO: 28969 - protein, 278 aa, synthetic construct
DKQLDADVSPKPTIFLPSIAETKLQKAGTYLCLLEKFFPDVIKIHWQEKKSNTILGSQEGNTMKTNDTYMKFSWLTVPEKSLDKEHRCIVRHENNKNGVDQEIIQIVSAEAWGRADCGFTSESYQQGVLSATILYEILLGKATLYAVLVSALVLMAMVKRKDSRGRVKFSRSADAPAYQQGQNQLYNELNLGRREEYDVLDKRRGRDPEMGGKPQRRKNPQEGLYNELQKDKMAEAYSEIGMKGERRRGKGHDGLYQGLSTATKDTYDALHMQALPPR

SEQ ID NO: 28970 - protein, 285 aa, synthetic construct
DKQLDADVSPKPTIFLPSIAETKLQKAGTYLCLLEKFFPDVIKIHWQEKKSNTILGSQEGNTMKTNDTYMKFSWLTVPEKSLDKEHRCIVRHENNKNGVDQEIIEVKTDSTDHVKPKETENTKQPSKSCHKPKAIVHTEKVNMMSLTVLGLRMLFAKTVAVNFLLTAKLFFLRVKFSRSADAPAYQQGQNQLYNELNLGRREEYDVLDKRRGRDPEMGGKPQRRKNPQEGLYNELQKDKMAEAYSEIGMKGERRRGKGHDGLYQGLSTATKDTYDALHMQALPPR

SEQ ID NO: 28971 - protein, 278 aa, synthetic construct
DKQLDADVSPKPTIFLPSIAETKLQKAGTYLCLLEKFFPDVIKIHWQEKKSNTILGSQEGNTMKTNDTYMKFSWLTVPEKSLDKEHRCIVRHENNKNGVDQEIIDHVKPKETENTKQPSKSCHKPKAIVHTEKVNMMSLTVLGLRMLFAKTVAVNFLLTAKLFFLRVKFSRSADAPAYQQGQNQLYNELNLGRREEYDVLDKRRGRDPEMGGKPQRRKNPQEGLYNELQKDKMAEAYSEIGMKGERRRGKGHDGLYQGLSTATKDTYDALHMQALPPR

SEQ ID NO: 28972 - protein, 279 aa, synthetic construct
DKQLDADVSPKPTIFLPSIAETKLQKAGTYLCLLEKFFPDVIKIHWQEKKSNTILGSQEGNTMKTNDTYMKFSWLTVPEKSLDKEHRCIVRHENNKNGVDQEIIFPIPEDTFFPSPESSCDVKLVEKSFETDTNLNFQNLSVIGFRILLLKVAGFNLLMTLRLWSSRVKFSRSADAPAYQQGQNQLYNELNLGRREEYDVLDKRRGRDPEMGGKPQRRKNPQEGLYNELQKDKMAEAYSEIGMKGERRRGKGHDGLYQGLSTATKDTYDALHMQALPPR

SEQ ID NO: 28973 - protein, 269 aa, synthetic construct
DKQLDADVSPKPTIFLPSIAETKLQKAGTYLCLLEKFFPDVIKIHWQEKKSNTILGSQEGNTMKTNDTYMKFSWLTVPEKSLDKEHRCIVRHENNKNGVDQEIIFPESSCDVKLVEKSFETDTNLNFQNLSVIGFRILLLKVAGFNLLMTLRLWSSRVKFSRSADAPAYQQGQNQLYNELNLGRREEYDVLDKRRGRDPEMGGKPQRRKNPQEGLYNELQKDKMAEAYSEIGMKGERRRGKGHDGLYQGLSTATKDTYDALHMQALPPR

SEQ ID NO: 28974 - protein, 278 aa, synthetic construct
DKQLDADVSPKPTIFLPSIAETKLQKAGTYLCLLEKFFPDVIKIHWQEKKSNTILGSQEGNTMKTNDTYMKFSWLTVPEKSLDKEHRCIVRHENNKNGVDQEIIFPPEDTFFPSPESSCDVKLVEKSFETDTNLNFQNLSVIGFRILLLKVAGFNLLMTLRLWSSRVKFSRSADAPAYQQGQNQLYNELNLGRREEYDVLDKRRGRDPEMGGKPQRRKNPQEGLYNELQKDKMAEAYSEIGMKGERRRGKGHDGLYQGLSTATKDTYDALHMQALPPR

SEQ ID NO: 28975 - protein, 272 aa, synthetic construct
DKQLDADVSPKPTIFLPSIAETKLQKAGTYLCLLEKFFPDVIKIHWQEKKSNTILGSQEGNTMKTNDTYMKFSWLTVPEKSLDKEHRCIVRHENNKNGVDQEIIFPGRADCGFTSESYQQGVLSATILYEILLGKATLYAVLVSALVLMAMVKRKDSRGRVKFSRSADAPAYQQGQNQLYNELNLGRREEYDVLDKRRGRDPEMGGKPQRRKNPQEGLYNELQKDKMAEAYSEIGMKGERRRGKGHDGLYQGLSTATKDTYDALHMQALPPR

SEQ ID NO: 28976 - protein, 270 aa, synthetic construct
DKQLDADVSPKPTIFLPSIAETKLQKAGTYLCLLEKFFPDVIKIHWQEKKSNTILGSQEGNTMKTNDTYMKFSWLTVPEKSLDKEHRCIVRHENNKNGVDQEIIFPADCGFTSESYQQGVLSATILYEILLGKATLYAVLVSALVLMAMVKRKDSRGRVKFSRSADAPAYQQGQNQLYNELNLGRREEYDVLDKRRGRDPEMGGKPQRRKNPQEGLYNELQKDKMAEAYSEIGMKGERRRGKGHDGLYQGLSTATKDTYDALHMQALPPR

SEQ ID NO: 28977 - protein, 280 aa, synthetic construct
DKQLDADVSPKPTIFLPSIAETKLQKAGTYLCLLEKFFPDVIKIHWQEKKSNTILGSQEGNTMKTNDTYMKFSWLTVPEKSLDKEHRCIVRHENNKNGVDQEIIFPQIVSAEAWGRADCGFTSESYQQGVLSATILYEILLGKATLYAVLVSALVLMAMVKRKDSRGRVKFSRSADAPAYQQGQNQLYNELNLGRREEYDVLDKRRGRDPEMGGKPQRRKNPQEGLYNELQKDKMAEAYSEIGMKGERRRGKGHDGLYQGLSTATKDTYDALHMQALPPR

SEQ ID NO: 28978 - protein, 287 aa, synthetic construct
DKQLDADVSPKPTIFLPSIAETKLQKAGTYLCLLEKFFPDVIKIHWQEKKSNTILGSQEGNTMKTNDTYMKFSWLTVPEKSLDKEHRCIVRHENNKNGVDQEIIFPEVKTDSTDHVKPKETENTKQPSKSCHKPKAIVHTEKVNMMSLTVLGLRMLFAKTVAVNFLLTAKLFFLRVKFSRSADAPAYQQGQNQLYNELNLGRREEYDVLDKRRGRDPEMGGKPQRRKNPQEGLYNELQKDKMAEAYSEIGMKGERRRGKGHDGLYQGLSTATKDTYDALHMQALPPR

SEQ ID NO: 28979 - protein, 280 aa, synthetic construct
DKQLDADVSPKPTIFLPSIAETKLQKAGTYLCLLEKFFPDVIKIHWQEKKSNTILGSQEGNTMKTNDTYMKFSWLTVPEKSLDKEHRCIVRHENNKNGVDQEIIFPDHVKPKETENTKQPSKSCHKPKAIVHTEKVNMMSLTVLGLRMLFAKTVAVNFLLTAKLFFLRVKFSRSADAPAYQQGQNQLYNELNLGRREEYDVLDKRRGRDPEMGGKPQRRKNPQEGLYNELQKDKMAEAYSEIGMKGERRRGKGHDGLYQGLSTATKDTYDALHMQALPPR

SEQ ID NO: 28980 - protein, 287 aa, synthetic construct
DKQLDADVSPKPTIFLPSIAETKLQKAGTYLCLLEKFFPDVIKIHWQEKKSNTILGSQEGNTMKTNDTYMKFSWLTVPEKSLDKEHRCIVRHENNKNGVDQEIIFPPIKTDVITIPEDTFFPSPESSCDVKLVEKSFETDTNLNFQNLSVIGFRILLLKVAGFNLLMTLRLWSSRVKFSRSADAPAYQQGQNQLYNELNLGRREEYDVLDKRRGRDPEMGGKPQRRKNPQEGLYNELQKDKMAEAYSEIGMKGERRRGKGHDGLYQGLSTATKDTYDALHMQALPPR

SEQ ID NO: 28981 - protein, 277 aa, synthetic construct
DKQLDADVSPKPTIFLPSIAETKLQKAGTYLCLLEKFFPDVIKIHWQEKKSNTILGSQEGNTMKTNDTYMKFSWLTVPEKSLDKEHRCIVRHENNKNGVDQEIIFPPIKTDVITESSCDVKLVEKSFETDTNLNFQNLSVIGFRILLLKVAGFNLLMTLRLWSSRVKFSRSADAPAYQQGQNQLYNELNLGRREEYDVLDKRRGRDPEMGGKPQRRKNPQEGLYNELQKDKMAEAYSEIGMKGERRRGKGHDGLYQGLSTATKDTYDALHMQALPPR

SEQ ID NO: 28982 - protein, 286 aa, synthetic construct
DKQLDADVSPKPTIFLPSIAETKLQKAGTYLCLLEKFFPDVIKIHWQEKKSNTILGSQEGNTMKTNDTYMKFSWLTVPEKSLDKEHRCIVRHENNKNGVDQEIIFPPIKTDVITPEDTFFPSPESSCDVKLVEKSFETDTNLNFQNLSVIGFRILLLKVAGFNLLMTLRLWSSRVKFSRSADAPAYQQGQNQLYNELNLGRREEYDVLDKRRGRDPEMGGKPQRRKNPQEGLYNELQKDKMAEAYSEIGMKGERRRGKGHDGLYQGLSTATKDTYDALHMQALPPR

SEQ ID NO: 28983 - protein, 280 aa, synthetic construct
DKQLDADVSPKPTIFLPSIAETKLQKAGTYLCLLEKFFPDVIKIHWQEKKSNTILGSQEGNTMKTNDTYMKFSWLTVPEKSLDKEHRCIVRHENNKNGVDQEIIFPPIKTDVITGRADCGFTSESYQQGVLSATILYEILLGKATLYAVLVSALVLMAMVKRKDSRGRVKFSRSADAPAYQQGQNQLYNELNLGRREEYDVLDKRRGRDPEMGGKPQRRKNPQEGLYNELQKDKMAEAYSEIGMKGERRRGKGHDGLYQGLSTATKDTYDALHMQALPPR

SEQ ID NO: 28984 - protein, 278 aa, synthetic construct
DKQLDADVSPKPTIFLPSIAETKLQKAGTYLCLLEKFFPDVIKIHWQEKKSNTILGSQEGNTMKTNDTYMKFSWLTVPEKSLDKEHRCIVRHENNKNGVDQEIIFPPIKTDVITADCGFTSESYQQGVLSATILYEILLGKATLYAVLVSALVLMAMVKRKDSRGRVKFSRSADAPAYQQGQNQLYNELNLGRREEYDVLDKRRGRDPEMGGKPQRRKNPQEGLYNELQKDKMAEAYSEIGMKGERRRGKGHDGLYQGLSTATKDTYDALHMQALPPR

SEQ ID NO: 28985 - protein, 288 aa, synthetic construct
DKQLDADVSPKPTIFLPSIAETKLQKAGTYLCLLEKFFPDVIKIHWQEKKSNTILGSQEGNTMKTNDTYMKFSWLTVPEKSLDKEHRCIVRHENNKNGVDQEIIFPPIKTDVITQIVSAEAWGRADCGFTSESYQQGVLSATILYEILLGKATLYAVLVSALVLMAMVKRKDSRGRVKFSRSADAPAYQQGQNQLYNELNLGRREEYDVLDKRRGRDPEMGGKPQRRKNPQEGLYNELQKDKMAEAYSEIGMKGERRRGKGHDGLYQGLSTATKDTYDALHMQALPPR

SEQ ID NO: 28986 - protein, 295 aa, synthetic construct
DKQLDADVSPKPTIFLPSIAETKLQKAGTYLCLLEKFFPDVIKIHWQEKKSNTILGSQEGNTMKTNDTYMKFSWLTVPEKSLDKEHRCIVRHENNKNGVDQEIIFPPIKTDVITEVKTDSTDHVKPKETENTKQPSKSCHKPKAIVHTEKVNMMSLTVLGLRMLFAKTVAVNFLLTAKLFFLRVKFSRSADAPAYQQGQNQLYNELNLGRREEYDVLDKRRGRDPEMGGKPQRRKNPQEGLYNELQKDKMAEAYSEIGMKGERRRGKGHDGLYQGLSTATKDTYDALHMQALPPR

SEQ ID NO: 28987 - protein, 288 aa, synthetic construct
DKQLDADVSPKPTIFLPSIAETKLQKAGTYLCLLEKFFPDVIKIHWQEKKSNTILGSQEGNTMKTNDTYMKFSWLTVPEKSLDKEHRCIVRHENNKNGVDQEIIFPPIKTDVITDHVKPKETENTKQPSKSCHKPKAIVHTEKVNMMSLTVLGLRMLFAKTVAVNFLLTAKLFFLRVKFSRSADAPAYQQGQNQLYNELNLGRREEYDVLDKRRGRDPEMGGKPQRRKNPQEGLYNELQKDKMAEAYSEIGMKGERRRGKGHDGLYQGLSTATKDTYDALHMQALPPR

SEQ ID NO: 28988 - protein, 240 aa, synthetic construct
PIKTDVITMDPKDNCSKDANDTLLLQLTNTSAYYMYLLLLLKSVVYFAIITCCLLRRTAFCCNGEKSIPEDTFFPSPESSCDVKLVEKSFETDTNLNFQNLSVIGFRILLLKVAGFNLLMTLRLWSSRVKFSRSADAPAYQQGQNQLYNELNLGRREEYDVLDKRRGRDPEMGGKPQRRKNPQEGLYNELQKDKMAEAYSEIGMKGERRRGKGHDGLYQGLSTATKDTYDALHMQALPPR

SEQ ID NO: 28989 - protein, 230 aa, synthetic construct
PIKTDVITMDPKDNCSKDANDTLLLQLTNTSAYYMYLLLLLKSVVYFAIITCCLLRRTAFCCNGEKSESSCDVKLVEKSFETDTNLNFQNLSVIGFRILLLKVAGFNLLMTLRLWSSRVKFSRSADAPAYQQGQNQLYNELNLGRREEYDVLDKRRGRDPEMGGKPQRRKNPQEGLYNELQKDKMAEAYSEIGMKGERRRGKGHDGLYQGLSTATKDTYDALHMQALPPR

SEQ ID NO: 28990 - protein, 239 aa, synthetic construct
PIKTDVITMDPKDNCSKDANDTLLLQLTNTSAYYMYLLLLLKSVVYFAIITCCLLRRTAFCCNGEKSPEDTFFPSPESSCDVKLVEKSFETDTNLNFQNLSVIGFRILLLKVAGFNLLMTLRLWSSRVKFSRSADAPAYQQGQNQLYNELNLGRREEYDVLDKRRGRDPEMGGKPQRRKNPQEGLYNELQKDKMAEAYSEIGMKGERRRGKGHDGLYQGLSTATKDTYDALHMQALPPR

SEQ ID NO: 28991 - protein, 233 aa, synthetic construct
PIKTDVITMDPKDNCSKDANDTLLLQLTNTSAYYMYLLLLLKSVVYFAIITCCLLRRTAFCCNGEKSGRADCGFTSESYQQGVLSATILYEILLGKATLYAVLVSALVLMAMVKRKDSRGRVKFSRSADAPAYQQGQNQLYNELNLGRREEYDVLDKRRGRDPEMGGKPQRRKNPQEGLYNELQKDKMAEAYSEIGMKGERRRGKGHDGLYQGLSTATKDTYDALHMQALPPR

SEQ ID NO: 28992 - protein, 231 aa, synthetic construct
PIKTDVITMDPKDNCSKDANDTLLLQLTNTSAYYMYLLLLLKSVVYFAIITCCLLRRTAFCCNGEKSADCGFTSESYQQGVLSATILYEILLGKATLYAVLVSALVLMAMVKRKDSRGRVKFSRSADAPAYQQGQNQLYNELNLGRREEYDVLDKRRGRDPEMGGKPQRRKNPQEGLYNELQKDKMAEAYSEIGMKGERRRGKGHDGLYQGLSTATKDTYDALHMQALPPR

SEQ ID NO: 28993 - protein, 241 aa, synthetic construct
PIKTDVITMDPKDNCSKDANDTLLLQLTNTSAYYMYLLLLLKSVVYFAIITCCLLRRTAFCCNGEKSQIVSAEAWGRADCGFTSESYQQGVLSATILYEILLGKATLYAVLVSALVLMAMVKRKDSRGRVKFSRSADAPAYQQGQNQLYNELNLGRREEYDVLDKRRGRDPEMGGKPQRRKNPQEGLYNELQKDKMAEAYSEIGMKGERRRGKGHDGLYQGLSTATKDTYDALHMQALPPR

SEQ ID NO: 28994 - protein, 248 aa, synthetic construct
PIKTDVITMDPKDNCSKDANDTLLLQLTNTSAYYMYLLLLLKSVVYFAIITCCLLRRTAFCCNGEKSEVKTDSTDHVKPKETENTKQPSKSCHKPKAIVHTEKVNMMSLTVLGLRMLFAKTVAVNFLLTAKLFFLRVKFSRSADAPAYQQGQNQLYNELNLGRREEYDVLDKRRGRDPEMGGKPQRRKNPQEGLYNELQKDKMAEAYSEIGMKGERRRGKGHDGLYQGLSTATKDTYDALHMQALPPR

SEQ ID NO: 28995 - protein, 241 aa, synthetic construct
PIKTDVITMDPKDNCSKDANDTLLLQLTNTSAYYMYLLLLLKSVVYFAIITCCLLRRTAFCCNGEKSDHVKPKETENTKQPSKSCHKPKAIVHTEKVNMMSLTVLGLRMLFAKTVAVNFLLTAKLFFLRVKFSRSADAPAYQQGQNQLYNELNLGRREEYDVLDKRRGRDPEMGGKPQRRKNPQEGLYNELQKDKMAEAYSEIGMKGERRRGKGHDGLYQGLSTATKDTYDALHMQALPPR

SEQ ID NO: 28996 - protein, 292 aa, synthetic construct
DKQLDADVSPKPTIFLPSIAETKLQKAGTYLCLLEKFFPDVIKIHWQEKKSNTILGSQEGNTMKTNDTYMKFSWLTVPEKSLDKEHRCIVRHENNKNGVDQEIIFPPIKTDVITMDPKDIPEDTFFPSPESSCDVKLVEKSFETDTNLNFQNLSVIGFRILLLKVAGFNLLMTLRLWSSRVKFSRSADAPAYQQGQNQLYNELNLGRREEYDVLDKRRGRDPEMGGKPQRRKNPQEGLYNELQKDKMAEAYSEIGMKGERRRGKGHDGLYQGLSTATKDTYDALHMQALPPR

SEQ ID NO: 28997 - protein, 282 aa, synthetic construct
DKQLDADVSPKPTIFLPSIAETKLQKAGTYLCLLEKFFPDVIKIHWQEKKSNTILGSQEGNTMKTNDTYMKFSWLTVPEKSLDKEHRCIVRHENNKNGVDQEIIFPPIKTDVITMDPKDESSCDVKLVEKSFETDTNLNFQNLSVIGFRILLLKVAGFNLLMTLRLWSSRVKFSRSADAPAYQQGQNQLYNELNLGRREEYDVLDKRRGRDPEMGGKPQRRKNPQEGLYNELQKDKMAEAYSEIGMKGERRRGKGHDGLYQGLSTATKDTYDALHMQALPPR

SEQ ID NO: 28998 - protein, 291 aa, synthetic construct
DKQLDADVSPKPTIFLPSIAETKLQKAGTYLCLLEKFFPDVIKIHWQEKKSNTILGSQEGNTMKTNDTYMKFSWLTVPEKSLDKEHRCIVRHENNKNGVDQEIIFPPIKTDVITMDPKDPEDTFFPSPESSCDVKLVEKSFETDTNLNFQNLSVIGFRILLLKVAGFNLLMTLRLWSSRVKFSRSADAPAYQQGQNQLYNELNLGRREEYDVLDKRRGRDPEMGGKPQRRKNPQEGLYNELQKDKMAEAYSEIGMKGERRRGKGHDGLYQGLSTATKDTYDALHMQALPPR

SEQ ID NO: 28999 - protein, 285 aa, synthetic construct
DKQLDADVSPKPTIFLPSIAETKLQKAGTYLCLLEKFFPDVIKIHWQEKKSNTILGSQEGNTMKTNDTYMKFSWLTVPEKSLDKEHRCIVRHENNKNGVDQEIIFPPIKTDVITMDPKDGRADCGFTSESYQQGVLSATILYEILLGKATLYAVLVSALVLMAMVKRKDSRGRVKFSRSADAPAYQQGQNQLYNELNLGRREEYDVLDKRRGRDPEMGGKPQRRKNPQEGLYNELQKDKMAEAYSEIGMKGERRRGKGHDGLYQGLSTATKDTYDALHMQALPPR

SEQ ID NO: 29000 - protein, 283 aa, synthetic construct
DKQLDADVSPKPTIFLPSIAETKLQKAGTYLCLLEKFFPDVIKIHWQEKKSNTILGSQEGNTMKTNDTYMKFSWLTVPEKSLDKEHRCIVRHENNKNGVDQEIIFPPIKTDVITMDPKDADCGFTSESYQQGVLSATILYEILLGKATLYAVLVSALVLMAMVKRKDSRGRVKFSRSADAPAYQQGQNQLYNELNLGRREEYDVLDKRRGRDPEMGGKPQRRKNPQEGLYNELQKDKMAEAYSEIGMKGERRRGKGHDGLYQGLSTATKDTYDALHMQALPPR

SEQ ID NO: 29001 - protein, 293 aa, synthetic construct
DKQLDADVSPKPTIFLPSIAETKLQKAGTYLCLLEKFFPDVIKIHWQEKKSNTILGSQEGNTMKTNDTYMKFSWLTVPEKSLDKEHRCIVRHENNKNGVDQEIIFPPIKTDVITMDPKDQIVSAEAWGRADCGFTSESYQQGVLSATILYEILLGKATLYAVLVSALVLMAMVKRKDSRGRVKFSRSADAPAYQQGQNQLYNELNLGRREEYDVLDKRRGRDPEMGGKPQRRKNPQEGLYNELQKDKMAEAYSEIGMKGERRRGKGHDGLYQGLSTATKDTYDALHMQALPPR

SEQ ID NO: 29002 - protein, 300 aa, synthetic construct
DKQLDADVSPKPTIFLPSIAETKLQKAGTYLCLLEKFFPDVIKIHWQEKKSNTILGSQEGNTMKTNDTYMKFSWLTVPEKSLDKEHRCIVRHENNKNGVDQEIIFPPIKTDVITMDPKDEVKTDSTDHVKPKETENTKQPSKSCHKPKAIVHTEKVNMMSLTVLGLRMLFAKTVAVNFLLTAKLFFLRVKFSRSADAPAYQQGQNQLYNELNLGRREEYDVLDKRRGRDPEMGGKPQRRKNPQEGLYNELQKDKMAEAYSEIGMKGERRRGKGHDGLYQGLSTATKDTYDALHMQALPPR

SEQ ID NO: 29003 - protein, 293 aa, synthetic construct
DKQLDADVSPKPTIFLPSIAETKLQKAGTYLCLLEKFFPDVIKIHWQEKKSNTILGSQEGNTMKTNDTYMKFSWLTVPEKSLDKEHRCIVRHENNKNGVDQEIIFPPIKTDVITMDPKDDHVKPKETENTKQPSKSCHKPKAIVHTEKVNMMSLTVLGLRMLFAKTVAVNFLLTAKLFFLRVKFSRSADAPAYQQGQNQLYNELNLGRREEYDVLDKRRGRDPEMGGKPQRRKNPQEGLYNELQKDKMAEAYSEIGMKGERRRGKGHDGLYQGLSTATKDTYDALHMQALPPR

SEQ ID NO: 29004 - protein, 287 aa, synthetic construct; identical to SEQ ID NO: 28980

SEQ ID NO: 29005 - protein, 277 aa, synthetic construct; identical to SEQ ID NO: 28981

SEQ ID NO: 29006 - protein, 286 aa, synthetic construct; identical to SEQ ID NO: 28982

SEQ ID NO: 29007 - protein, 280 aa, synthetic construct; identical to SEQ ID NO: 28983

SEQ ID NO: 29008 - protein, 278 aa, synthetic construct; identical to SEQ ID NO: 28984

SEQ ID NO: 29009 - protein, 288 aa, synthetic construct; identical to SEQ ID NO: 28985

SEQ ID NO: 29010 - protein, 295 aa, synthetic construct; identical to SEQ ID NO: 28986

SEQ ID NO: 29011 - protein, 288 aa, synthetic construct; identical to SEQ ID NO: 28987

SEQ ID NO: 29012 - protein, 268 aa, synthetic construct
PKPTIFLPSIAETKLQKAGTYLCLLEKFFPDVIKIHWQEKKSNTILGSQEGNTMKTNDTYMKFSWLTVPEKSLDKEHRCIVRHENNKNGVDQEIIIPEDTFFPSPESSCDVKLVEKSFETDTNLNFQNLSVIGFRILLLKVAGFNLLMTLRLWSSRVKFSRSADAPAYQQGQNQLYNELNLGRREEYDVLDKRRGRDPEMGGKPQRRKNPQEGLYNELQKDKMAEAYSEIGMKGERRRGKGHDGLYQGLSTATKDTYDALHMQALPPR

SEQ ID NO: 29013 - protein, 258 aa, synthetic construct
PKPTIFLPSIAETKLQKAGTYLCLLEKFFPDVIKIHWQEKKSNTILGSQEGNTMKTNDTYMKFSWLTVPEKSLDKEHRCIVRHENNKNGVDQEIIESSCDVKLVEKSFETDTNLNFQNLSVIGFRILLLKVAGFNLLMTLRLWSSRVKFSRSADAPAYQQGQNQLYNELNLGRREEYDVLDKRRGRDPEMGGKPQRRKNPQEGLYNELQKDKMAEAYSEIGMKGERRRGKGHDGLYQGLSTATKDTYDALHMQALPPR

SEQ ID NO: 29014 - protein, 267 aa, synthetic construct
PKPTIFLPSIAETKLQKAGTYLCLLEKFFPDVIKIHWQEKKSNTILGSQEGNTMKTNDTYMKFSWLTVPEKSLDKEHRCIVRHENNKNGVDQEIIPEDTFFPSPESSCDVKLVEKSFETDTNLNFQNLSVIGFRILLLKVAGFNLLMTLRLWSSRVKFSRSADAPAYQQGQNQLYNELNLGRREEYDVLDKRRGRDPEMGGKPQRRKNPQEGLYNELQKDKMAEAYSEIGMKGERRRGKGHDGLYQGLSTATKDTYDALHMQALPPR

SEQ ID NO: 29015 - protein, 261 aa, synthetic construct
PKPTIFLPSIAETKLQKAGTYLCLLEKFFPDVIKIHWQEKKSNTILGSQEGNTMKTNDTYMKFSWLTVPEKSLDKEHRCIVRHENNKNGVDQEIIGRADCGFTSESYQQGVLSATILYEILLGKATLYAVLVSALVLMAMVKRKDSRGRVKFSRSADAPAYQQGQNQLYNELNLGRREEYDVLDKRRGRDPEMGGKPQRRKNPQEGLYNELQKDKMAEAYSEIGMKGERRRGKGHDGLYQGLSTATKDTYDALHMQALPPR

SEQ ID NO: 29016 - protein, 259 aa, synthetic construct
PKPTIFLPSIAETKLQKAGTYLCLLEKFFPDVIKIHWQEKKSNTILGSQEGNTMKTNDTYMKFSWLTVPEKSLDKEHRCIVRHENNKNGVDQEIIADCGFTSESYQQGVLSATILYEILLGKATLYAVLVSALVLMAMVKRKDSRGRVKFSRSADAPAYQQGQNQLYNELNLGRREEYDVLDKRRGRDPEMGGKPQRRKNPQEGLYNELQKDKMAEAYSEIGMKGERRRGKGHDGLYQGLSTATKDTYDALHMQALPPR

SEQ ID NO: 29017 - protein, 269 aa, synthetic construct
PKPTIFLPSIAETKLQKAGTYLCLLEKFFPDVIKIHWQEKKSNTILGSQEGNTMKTNDTYMKFSWLTVPEKSLDKEHRCIVRHENNKNGVDQEIIQIVSAEAWGRADCGFTSESYQQGVLSATILYEILLGKATLYAVLVSALVLMAMVKRKDSRGRVKFSRSADAPAYQQGQNQLYNELNLGRREEYDVLDKRRGRDPEMGGKPQRRKNPQEGLYNELQKDKMAEAYSEIGMKGERRRGKGHDGLYQGLSTATKDTYDALHMQALPPR

SEQ ID NO: 29018 - protein, 277 aa, synthetic construct; identical to SEQ ID NO: 28454

SEQ ID NO: 29019 - protein, 275 aa, synthetic construct
PKPTIFLPSIAETKLQKAGTYLCLLEKFFPDVIKIHWQEKKSNTILGSQEGNTMKTNDTYMKFSWLTVPEKSLDKEHRCIVRHENNKNGVDQEIIPIKTDVITMDPKDNCSKDANDTLLLQLTNTSAYYMYLLLLLKSVVYFAIITCCLLRRTAFCCNGEKSRVKFSRSADAPAYQQGQNQLYNELNLGRREEYDVLDKRRGRDPEMGGKPQRRKNPQEGLYNELQKDKMAEAYSEIGMKGERRRGKGHDGLYQGLSTATKDTYDALHMQALPPR

SEQ ID NO: 29020 - protein, 267 aa, synthetic construct
PKPTIFLPSIAETKLQKAGTYLCLLEKFFPDVIKIHWQEKKSNTILGSQEGNTMKTNDTYMKFSWLTVPEKSLDKEHRCIVRHENNKNGVDQEIIMDPKDNCSKDANDTLLLQLTNTSAYYMYLLLLLKSVVYFAIITCCLLRRTAFCCNGEKSRVKFSRSADAPAYQQGQNQLYNELNLGRREEYDVLDKRRGRDPEMGGKPQRRKNPQEGLYNELQKDKMAEAYSEIGMKGERRRGKGHDGLYQGLSTATKDTYDALHMQALPPR

SEQ ID NO: 29021 - protein, 275 aa, synthetic construct; identical to SEQ ID NO: 29019

SEQ ID NO: 29022 - protein, 261 aa, synthetic construct
PKPTIFLPSIAETKLQKAGTYLCLLEKFFPDVIKIHWQEKKSNTILGSQEGNTMKTNDTYMKFSWLTVPEKSLDKEHRCIVRHENNKNGVDQEIICSKDANDTLLLQLTNTSAYYMYLLLLLKSVVYFAIITCCLLRRTAFCCNGEKSRVKFSRSADAPAYQQGQNQLYNELNLGRREEYDVLDKRRGRDPEMGGKPQRRKNPQEGLYNELQKDKMAEAYSEIGMKGERRRGKGHDGLYQGLSTATKDTYDALHMQALPPR

SEQ ID NO: 29023 - protein, 276 aa, synthetic construct
PKPTIFLPSIAETKLQKAGTYLCLLEKFFPDVIKIHWQEKKSNTILGSQEGNTMKTNDTYMKFSWLTVPEKSLDKEHRCIVRHENNKNGVDQEIIEVKTDSTDHVKPKETENTKQPSKSCHKPKAIVHTEKVNMMSLTVLGLRMLFAKTVAVNFLLTAKLFFLRVKFSRSADAPAYQQGQNQLYNELNLGRREEYDVLDKRRGRDPEMGGKPQRRKNPQEGLYNELQKDKMAEAYSEIGMKGERRRGKGHDGLYQGLSTATKDTYDALHMQALPPR

SEQ ID NO: 29024 - protein, 269 aa, synthetic construct
PKPTIFLPSIAETKLQKAGTYLCLLEKFFPDVIKIHWQEKKSNTILGSQEGNTMKTNDTYMKFSWLTVPEKSLDKEHRCIVRHENNKNGVDQEIIDHVKPKETENTKQPSKSCHKPKAIVHTEKVNMMSLTVLGLRMLFAKTVAVNFLLTAKLFFLRVKFSRSADAPAYQQGQNQLYNELNLGRREEYDVLDKRRGRDPEMGGKPQRRKNPQEGLYNELQKDKMAEAYSEIGMKGERRRGKGHDGLYQGLSTATKDTYDALHMQALPPR

SEQ ID NO: 29025 - protein, 258 aa, synthetic construct
SQPHTKPSVFVMKNGTNVACLVKEFYPKDIRINLVSSKKITEFDPAIVISPSGKYNAVKLGKYEDSNSVTCSVQHDNKTVHSTDFIPEDTFFPSPESSCDVKLVEKSFETDTNLNFQNLSVIGFRILLLKVAGFNLLMTLRLWSSRVKFSRSADAPAYQQGQNQLYNELNLGRREEYDVLDKRRGRDPEMGGKPQRRKNPQEGLYNELQKDKMAEAYSEIGMKGERRRGKGHDGLYQGLSTATKDTYDALHMQALPPR

SEQ ID NO: 29026 - protein, 248 aa, synthetic construct
SQPHTKPSVFVMKNGTNVACLVKEFYPKDIRINLVSSKKITEFDPAIVISPSGKYNAVKLGKYEDSNSVTCSVQHDNKTVHSTDFESSCDVKLVEKSFETDTNLNFQNLSVIGFRILLLKVAGFNLLMTLRLWSSRVKFSRSADAPAYQQGQNQLYNELNLGRREEYDVLDKRRGRDPEMGGKPQRRKNPQEGLYNELQKDKMAEAYSEIGMKGERRRGKGHDGLYQGLSTATKDTYDALHMQALPPR

SEQ ID NO: 29027 - protein, 257 aa, synthetic construct
SQPHTKPSVFVMKNGTNVACLVKEFYPKDIRINLVSSKKITEFDPAIVISPSGKYNAVKLGKYEDSNSVTCSVQHDNKTVHSTDFPEDTFFPSPESSCDVKLVEKSFETDTNLNFQNLSVIGFRILLLKVAGFNLLMTLRLWSSRVKFSRSADAPAYQQGQNQLYNELNLGRREEYDVLDKRRGRDPEMGGKPQRRKNPQEGLYNELQKDKMAEAYSEIGMKGERRRGKGHDGLYQGLSTATKDTYDALHMQALPPR

SEQ ID NO: 29028 - protein, 251 aa, synthetic construct
SQPHTKPSVFVMKNGTNVACLVKEFYPKDIRINLVSSKKITEFDPAIVISPSGKYNAVKLGKYEDSNSVTCSVQHDNKTVHSTDFGRADCGFTSESYQQGVLSATILYEILLGKATLYAVLVSALVLMAMVKRKDSRGRVKFSRSADAPAYQQGQNQLYNELNLGRREEYDVLDKRRGRDPEMGGKPQRRKNPQEGLYNELQKDKMAEAYSEIGMKGERRRGKGHDGLYQGLSTATKDTYDALHMQALPPR

SEQ ID NO: 29029 - protein, 249 aa, synthetic construct
SQPHTKPSVFVMKNGTNVACLVKEFYPKDIRINLVSSKKITEFDPAIVISPSGKYNAVKLGKYEDSNSVTCSVQHDNKTVHSTDFADCGFTSESYQQGVLSATILYEILLGKATLYAVLVSALVLMAMVKRKDSRGRVKFSRSADAPAYQQGQNQLYNELNLGRREEYDVLDKRRGRDPEMGGKPQRRKNPQEGLYNELQKDKMAEAYSEIGMKGERRRGKGHDGLYQGLSTATKDTYDALHMQALPPR

SEQ ID NO: 29030 - protein, 259 aa, synthetic construct
SQPHTKPSVFVMKNGTNVACLVKEFYPKDIRINLVSSKKITEFDPAIVISPSGKYNAVKLGKYEDSNSVTCSVQHDNKTVHSTDFQIVSAEAWGRADCGFTSESYQQGVLSATILYEILLGKATLYAVLVSALVLMAMVKRKDSRGRVKFSRSADAPAYQQGQNQLYNELNLGRREEYDVLDKRRGRDPEMGGKPQRRKNPQEGLYNELQKDKMAEAYSEIGMKGERRRGKGHDGLYQGLSTATKDTYDALHMQALPPR

SEQ ID NO: 29031 - protein, 267 aa, synthetic construct
SQPHTKPSVFVMKNGTNVACLVKEFYPKDIRINLVSSKKITEFDPAIVISPSGKYNAVKLGKYEDSNSVTCSVQHDNKTVHSTDFFPPIKTDVITMDPKDNCSKDANDTLLLQLTNTSAYYMYLLLLLKSVVYFAIITCCLLRRTAFCCNGEKSRVKFSRSADAPAYQQGQNQLYNELNLGRREEYDVLDKRRGRDPEMGGKPQRRKNPQEGLYNELQKDKMAEAYSEIGMKGERRRGKGHDGLYQGLSTATKDTYDALHMQALPPR

SEQ ID NO: 29032 - protein, 265 aa, synthetic construct
SQPHTKPSVFVMKNGTNVACLVKEFYPKDIRINLVSSKKITEFDPAIVISPSGKYNAVKLGKYEDSNSVTCSVQHDNKTVHSTDFPIKTDVITMDPKDNCSKDANDTLLLQLTNTSAYYMYLLLLLKSVVYFAIITCCLLRRTAFCCNGEKSRVKFSRSADAPAYQQGQNQLYNELNLGRREEYDVLDKRRGRDPEMGGKPQRRKNPQEGLYNELQKDKMAEAYSEIGMKGERRRGKGHDGLYQGLSTATKDTYDALHMQALPPR

SEQ ID NO: 29033 - protein, 257 aa, synthetic construct
SQPHTKPSVFVMKNGTNVACLVKEFYPKDIRINLVSSKKITEFDPAIVISPSGKYNAVKLGKYEDSNSVTCSVQHDNKTVHSTDFMDPKDNCSKDANDTLLLQLTNTSAYYMYLLLLLKSVVYFAIITCCLLRRTAFCCNGEKSRVKFSRSADAPAYQQGQNQLYNELNLGRREEYDVLDKRRGRDPEMGGKPQRRKNPQEGLYNELQKDKMAEAYSEIGMKGERRRGKGHDGLYQGLSTATKDTYDALHMQALPPR

SEQ ID NO: 29034 - protein, 266 aa, synthetic construct; identical to SEQ ID NO: 27977

SEQ ID NO: 29035 - protein, 259 aa, synthetic construct
SQPHTKPSVFVMKNGTNVACLVKEFYPKDIRINLVSSKKITEFDPAIVISPSGKYNAVKLGKYEDSNSVTCSVQHDNKTVHSTDFDHVKPKETENTKQPSKSCHKPKAIVHTEKVNMMSLTVLGLRMLFAKTVAVNFLLTAKLFFLRVKFSRSADAPAYQQGQNQLYNELNLGRREEYDVLDKRRGRDPEMGGKPQRRKNPQEGLYNELQKDKMAEAYSEIGMKGERRRGKGHDGLYQGLSTATKDTYDALHMQALPPR

SEQ ID NO: 29036 - protein, 265 aa, synthetic construct
SQPHTKPSVFVMKNGTNVACLVKEFYPKDIRINLVSSKKITEFDPAIVISPSGKYNAVKLGKYEDSNSVTCSVQHDNKTVHSTDFEVKTDSTIPEDTFFPSPESSCDVKLVEKSFETDTNLNFQNLSVIGFRILLLKVAGFNLLMTLRLWSSRVKFSRSADAPAYQQGQNQLYNELNLGRREEYDVLDKRRGRDPEMGGKPQRRKNPQEGLYNELQKDKMAEAYSEIGMKGERRRGKGHDGLYQGLSTATKDTYDALHMQALPPR

SEQ ID NO: 29037 - protein, 255 aa, synthetic construct
SQPHTKPSVFVMKNGTNVACLVKEFYPKDIRINLVSSKKITEFDPAIVISPSGKYNAVKLGKYEDSNSVTCSVQHDNKTVHSTDFEVKTDSTESSCDVKLVEKSFETDTNLNFQNLSVIGFRILLLKVAGFNLLMTLRLWSSRVKFSRSADAPAYQQGQNQLYNELNLGRREEYDVLDKRRGRDPEMGGKPQRRKNPQEGLYNELQKDKMAEAYSEIGMKGERRRGKGHDGLYQGLSTATKDTYDALHMQALPPR

SEQ ID NO: 29038 - protein, 264 aa, synthetic construct
SQPHTKPSVFVMKNGTNVACLVKEFYPKDIRINLVSSKKITEFDPAIVISPSGKYNAVKLGKYEDSNSVTCSVQHDNKTVHSTDFEVKTDSTPEDTFFPSPESSCDVKLVEKSFETDTNLNFQNLSVIGFRILLLKVAGFNLLMTLRLWSSRVKFSRSADAPAYQQGQNQLYNELNLGRREEYDVLDKRRGRDPEMGGKPQRRKNPQEGLYNELQKDKMAEAYSEIGMKGERRRGKGHDGLYQGLSTATKDTYDALHMQALPPR

SEQ ID NO: 29039 - protein, 258 aa, synthetic construct
SQPHTKPSVFVMKNGTNVACLVKEFYPKDIRINLVSSKKITEFDPAIVISPSGKYNAVKLGKYEDSNSVTCSVQHDNKTVHSTDFEVKTDSTGRADCGFTSESYQQGVLSATILYEILLGKATLYAVLVSALVLMAMVKRKDSRGRVKFSRSADAPAYQQGQNQLYNELNLGRREEYDVLDKRRGRDPEMGGKPQRRKNPQEGLYNELQKDKMAEAYSEIGMKGERRRGKGHDGLYQGLSTATKDTYDALHMQALPPR

SEQ ID NO: 29040 - protein, 256 aa, synthetic construct
SQPHTKPSVFVMKNGTNVACLVKEFYPKDIRINLVSSKKITEFDPAIVISPSGKYNAVKLGKYEDSNSVTCSVQHDNKTVHSTDFEVKTDSTADCGFTSESYQQGVLSATILYEILLGKATLYAVLVSALVLMAMVKRKDSRGRVKFSRSADAPAYQQGQNQLYNELNLGRREEYDVLDKRRGRDPEMGGKPQRRKNPQEGLYNELQKDKMAEAYSEIGMKGERRRGKGHDGLYQGLSTATKDTYDALHMQALPPR

SEQ ID NO: 29041 - protein, 266 aa, synthetic construct
SQPHTKPSVFVMKNGTNVACLVKEFYPKDIRINLVSSKKITEFDPAIVISPSGKYNAVKLGKYEDSNSVTCSVQHDNKTVHSTDFEVKTDSTQIVSAEAWGRADCGFTSESYQQGVLSATILYEILLGKATLYAVLVSALVLMAMVKRKDSRGRVKFSRSADAPAYQQGQNQLYNELNLGRREEYDVLDKRRGRDPEMGGKPQRRKNPQEGLYNELQKDKMAEAYSEIGMKGERRRGKGHDGLYQGLSTATKDTYDALHMQALPPR

SEQ ID NO: 29042 - protein, 274 aa, synthetic construct
SQPHTKPSVFVMKNGTNVACLVKEFYPKDIRINLVSSKKITEFDPAIVISPSGKYNAVKLGKYEDSNSVTCSVQHDNKTVHSTDFEVKTDSTFPPIKTDVITMDPKDNCSKDANDTLLLQLTNTSAYYMYLLLLLKSVVYFAIITCCLLRRTAFCCNGEKSRVKFSRSADAPAYQQGQNQLYNELNLGRREEYDVLDKRRGRDPEMGGKPQRRKNPQEGLYNELQKDKMAEAYSEIGMKGERRRGKGHDGLYQGLSTATKDTYDALHMQALPPR

SEQ ID NO: 29043 - protein, 272 aa, synthetic construct
SQPHTKPSVFVMKNGTNVACLVKEFYPKDIRINLVSSKKITEFDPAIVISPSGKYNAVKLGKYEDSNSVTCSVQHDNKTVHSTDFEVKTDSTPIKTDVITMDPKDNCSKDANDTLLLQLTNTSAYYMYLLLLLKSVVYFAIITCCLLRRTAFCCNGEKSRVKFSRSADAPAYQQGQNQLYNELNLGRREEYDVLDKRRGRDPEMGGKPQRRKNPQEGLYNELQKDKMAEAYSEIGMKGERRRGKGHDGLYQGLSTATKDTYDALHMQALPPR

SEQ ID NO: 29044 - protein, 264 aa, synthetic construct
SQPHTKPSVFVMKNGTNVACLVKEFYPKDIRINLVSSKKITEFDPAIVISPSGKYNAVKLGKYEDSNSVTCSVQHDNKTVHSTDFEVKTDSTMDPKDNCSKDANDTLLLQLTNTSAYYMYLLLLLKSVVYFAIITCCLLRRTAFCCNGEKSRVKFSRSADAPAYQQGQNQLYNELNLGRREEYDVLDKRRGRDPEMGGKPQRRKNPQEGLYNELQKDKMAEAYSEIGMKGERRRGKGHDGLYQGLSTATKDTYDALHMQALPPR

SEQ ID NO: 29045 - protein, 272 aa, synthetic construct; identical to SEQ ID NO: 29043

SEQ ID NO: 29046 - protein, 258 aa, synthetic construct
SQPHTKPSVFVMKNGTNVACLVKEFYPKDIRINLVSSKKITEFDPAIVISPSGKYNAVKLGKYEDSNSVTCSVQHDNKTVHSTDFEVKTDSTCSKDANDTLLLQLTNTSAYYMYLLLLLKSVVYFAIITCCLLRRTAFCCNGEKSRVKFSRSADAPAYQQGQNQLYNELNLGRREEYDVLDKRRGRDPEMGGKPQRRKNPQEGLYNELQKDKMAEAYSEIGMKGERRRGKGHDGLYQGLSTATKDTYDALHMQALPPR

SEQ ID NO: 29047 - protein, 258 aa, synthetic construct; identical to SEQ ID NO: 29025

SEQ ID NO: 29048 - protein, 248 aa, synthetic construct; identical to SEQ ID NO: 29026

SEQ ID NO: 29049 - protein, 257 aa, synthetic construct; identical to SEQ ID NO: 29027

SEQ ID NO: 29050 - protein, 251 aa, synthetic construct; identical to SEQ ID NO: 29028

SEQ ID NO: 29051 - protein, 249 aa, synthetic construct; identical to SEQ ID NO: 29029

SEQ ID NO: 29052 - protein, 259 aa, synthetic construct; identical to SEQ ID NO: 29030

SEQ ID NO: 29053 - protein, 267 aa, synthetic construct; identical to SEQ ID NO: 29031

SEQ ID NO: 29054 - protein, 265 aa, synthetic construct; identical to SEQ ID NO: 29032

SEQ ID NO: 29055 - protein, 257 aa, synthetic construct; identical to SEQ ID NO: 29033

SEQ ID NO: 29056 - protein, 265 aa, synthetic construct; identical to SEQ ID NO: 29032

SEQ ID NO: 29057 - protein, 251 aa, synthetic construct
SQPHTKPSVFVMKNGTNVACLVKEFYPKDIRINLVSSKKITEFDPAIVISPSGKYNAVKLGKYEDSNSVTCSVQHDNKTVHSTDFCSKDANDTLLLQLTNTSAYYMYLLLLLKSVVYFAIITCCLLRRTAFCCNGEKSRVKFSRSADAPAYQQGQNQLYNELNLGRREEYDVLDKRRGRDPEMGGKPQRRKNPQEGLYNELQKDKMAEAYSEIGMKGERRRGKGHDGLYQGLSTATKDTYDALHMQALPPR

SEQ ID NO: 29058 - protein, 265 aa, synthetic construct; identical to SEQ ID NO: 29036

SEQ ID NO: 29059 - protein, 255 aa, synthetic construct; identical to SEQ ID NO: 29037

SEQ ID NO: 29060 - protein, 264 aa, synthetic construct; identical to SEQ ID NO: 29038

SEQ ID NO: 29061 - protein, 258 aa, synthetic construct; identical to SEQ ID NO: 29039

SEQ ID NO: 29062 - protein, 256 aa, synthetic construct; identical to SEQ ID NO: 29040

SEQ ID NO: 29063 - protein, 266 aa, synthetic construct; identical to SEQ ID NO: 29041

SEQ ID NO: 29064 - protein, 274 aa, synthetic construct; identical to SEQ ID NO: 29042

SEQ ID NO: 29065 - protein, 272 aa, synthetic construct; identical to SEQ ID NO: 29043

SEQ ID NO: 29066 - protein, 264 aa, synthetic construct; identical to SEQ ID NO: 29044

SEQ ID NO: 29067 - protein, 272 aa, synthetic construct; identical to SEQ ID NO: 29043

SEQ ID NO: 29068 - protein, 258 aa, synthetic construct; identical to SEQ ID NO: 29046

SEQ ID NO: 29069 - protein, 236 aa, synthetic construct
LRDSKSSDKSVCLFTDFDSQTNVSQSKDSDVYITDKTVLDMRSMDFKSNSAVAWSNKSDFACANAFNNSIGRADCGFTSESYQQGVLSATILYEILLGKATLYAVLVSALVLMAMVKRKDSRGRVKFSRSADAPAYQQGQNQLYNELNLGRREEYDVLDKRRGRDPEMGGKPQRRKNPQEGLYNELQKDKMAEAYSEIGMKGERRRGKGHDGLYQGLSTATKDTYDALHMQALPPR

SEQ ID NO: 29070 - protein, 234 aa, synthetic construct
LRDSKSSDKSVCLFTDFDSQTNVSQSKDSDVYITDKTVLDMRSMDFKSNSAVAWSNKSDFACANAFNNSIADCGFTSESYQQGVLSATILYEILLGKATLYAVLVSALVLMAMVKRKDSRGRVKFSRSADAPAYQQGQNQLYNELNLGRREEYDVLDKRRGRDPEMGGKPQRRKNPQEGLYNELQKDKMAEAYSEIGMKGERRRGKGHDGLYQGLSTATKDTYDALHMQALPPR

SEQ ID NO: 29071 - protein, 244 aa, synthetic construct
LRDSKSSDKSVCLFTDFDSQTNVSQSKDSDVYITDKTVLDMRSMDFKSNSAVAWSNKSDFACANAFNNSIQIVSAEAWGRADCGFTSESYQQGVLSATILYEILLGKATLYAVLVSALVLMAMVKRKDSRGRVKFSRSADAPAYQQGQNQLYNELNLGRREEYDVLDKRRGRDPEMGGKPQRRKNPQEGLYNELQKDKMAEAYSEIGMKGERRRGKGHDGLYQGLSTATKDTYDALHMQALPPR

SEQ ID NO: 29072 - protein, 252 aa, synthetic construct
LRDSKSSDKSVCLFTDFDSQTNVSQSKDSDVYITDKTVLDMRSMDFKSNSAVAWSNKSDFACANAFNNSIFPPIKTDVITMDPKDNCSKDANDTLLLQLTNTSAYYMYLLLLLKSVVYFAIITCCLLRRTAFCCNGEKSRVKFSRSADAPAYQQGQNQLYNELNLGRREEYDVLDKRRGRDPEMGGKPQRRKNPQEGLYNELQKDKMAEAYSEIGMKGERRRGKGHDGLYQGLSTATKDTYDALHMQALPPR

SEQ ID NO: 29073 - protein, 250 aa, synthetic construct
LRDSKSSDKSVCLFTDFDSQTNVSQSKDSDVYITDKTVLDMRSMDFKSNSAVAWSNKSDFACANAFNNSIPIKTDVITMDPKDNCSKDANDTLLLQLTNTSAYYMYLLLLLKSVVYFAIITCCLLRRTAFCCNGEKSRVKFSRSADAPAYQQGQNQLYNELNLGRREEYDVLDKRRGRDPEMGGKPQRRKNPQEGLYNELQKDKMAEAYSEIGMKGERRRGKGHDGLYQGLSTATKDTYDALHMQALPPR

SEQ ID NO: 29074 - protein, 242 aa, synthetic construct
LRDSKSSDKSVCLFTDFDSQTNVSQSKDSDVYITDKTVLDMRSMDFKSNSAVAWSNKSDFACANAFNNSIMDPKDNCSKDANDTLLLQLTNTSAYYMYLLLLLKSVVYFAIITCCLLRRTAFCCNGEKSRVKFSRSADAPAYQQGQNQLYNELNLGRREEYDVLDKRRGRDPEMGGKPQRRKNPQEGLYNELQKDKMAEAYSEIGMKGERRRGKGHDGLYQGLSTATKDTYDALHMQALPPR

SEQ ID NO: 29075 - protein, 250 aa, synthetic construct; identical to SEQ ID NO: 29073

SEQ ID NO: 29076 - protein, 236 aa, synthetic construct
LRDSKSSDKSVCLFTDFDSQTNVSQSKDSDVYITDKTVLDMRSMDFKSNSAVAWSNKSDFACANAFNNSICSKDANDTLLLQLTNTSAYYMYLLLLLKSVVYFAIITCCLLRRTAFCCNGEKSRVKFSRSADAPAYQQGQNQLYNELNLGRREEYDVLDKRRGRDPEMGGKPQRRKNPQEGLYNELQKDKMAEAYSEIGMKGERRRGKGHDGLYQGLSTATKDTYDALHMQALPPR

SEQ ID NO: 29077 - protein, 251 aa, synthetic construct
LRDSKSSDKSVCLFTDFDSQTNVSQSKDSDVYITDKTVLDMRSMDFKSNSAVAWSNKSDFACANAFNNSIEVKTDSTDHVKPKETENTKQPSKSCHKPKAIVHTEKVNMMSLTVLGLRMLFAKTVAVNFLLTAKLFFLRVKFSRSADAPAYQQGQNQLYNELNLGRREEYDVLDKRRGRDPEMGGKPQRRKNPQEGLYNELQKDKMAEAYSEIGMKGERRRGKGHDGLYQGLSTATKDTYDALHMQALPPR

SEQ ID NO: 29078 - protein, 244 aa, synthetic construct
LRDSKSSDKSVCLFTDFDSQTNVSQSKDSDVYITDKTVLDMRSMDFKSNSAVAWSNKSDFACANAFNNSIDHVKPKETENTKQPSKSCHKPKAIVHTEKVNMMSLTVLGLRMLFAKTVAVNFLLTAKLFFLRVKFSRSADAPAYQQGQNQLYNELNLGRREEYDVLDKRRGRDPEMGGKPQRRKNPQEGLYNELQKDKMAEAYSEIGMKGERRRGKGHDGLYQGLSTATKDTYDALHMQALPPR

SEQ ID NO: 29079 - protein, 246 aa, synthetic construct
LRDSKSSDKSVCLFTDFDSQTNVSQSKDSDVYITDKTVLDMRSMDFKSNSAVAWSNKSDFACANAFNNSIIPEDTFFPSPGRADCGFTSESYQQGVLSATILYEILLGKATLYAVLVSALVLMAMVKRKDSRGRVKFSRSADAPAYQQGQNQLYNELNLGRREEYDVLDKRRGRDPEMGGKPQRRKNPQEGLYNELQKDKMAEAYSEIGMKGERRRGKGHDGLYQGLSTATKDTYDALHMQALPPR

SEQ ID NO: 29080 - protein, 244 aa, synthetic construct
LRDSKSSDKSVCLFTDFDSQTNVSQSKDSDVYITDKTVLDMRSMDFKSNSAVAWSNKSDFACANAFNNSIIPEDTFFPSPADCGFTSESYQQGVLSATILYEILLGKATLYAVLVSALVLMAMVKRKDSRGRVKFSRSADAPAYQQGQNQLYNELNLGRREEYDVLDKRRGRDPEMGGKPQRRKNPQEGLYNELQKDKMAEAYSEIGMKGERRRGKGHDGLYQGLSTATKDTYDALHMQALPPR

SEQ ID NO: 29081 - protein, 254 aa, synthetic construct
LRDSKSSDKSVCLFTDFDSQTNVSQSKDSDVYITDKTVLDMRSMDFKSNSAVAWSNKSDFACANAFNNSIIPEDTFFPSPQIVSAEAWGRADCGFTSESYQQGVLSATILYEILLGKATLYAVLVSALVLMAMVKRKDSRGRVKFSRSADAPAYQQGQNQLYNELNLGRREEYDVLDKRRGRDPEMGGKPQRRKNPQEGLYNELQKDKMAEAYSEIGMKGERRRGKGHDGLYQGLSTATKDTYDALHMQALPPR

SEQ ID NO: 29082 - protein, 262 aa, synthetic construct
LRDSKSSDKSVCLFTDFDSQTNVSQSKDSDVYITDKTVLDMRSMDFKSNSAVAWSNKSDFACANAFNNSIIPEDTFFPSPFPPIKTDVITMDPKDNCSKDANDTLLLQLTNTSAYYMYLLLLLKSVVYFAIITCCLLRRTAFCCNGEKSRVKFSRSADAPAYQQGQNQLYNELNLGRREEYDVLDKRRGRDPEMGGKPQRRKNPQEGLYNELQKDKMAEAYSEIGMKGERRRGKGHDGLYQGLSTATKDTYDALHMQALPPR

SEQ ID NO: 29083 - protein, 260 aa, synthetic construct
LRDSKSSDKSVCLFTDFDSQTNVSQSKDSDVYITDKTVLDMRSMDFKSNSAVAWSNKSDFACANAFNNSIIPEDTFFPSPPIKTDVITMDPKDNCSKDANDTLLLQLTNTSAYYMYLLLLLKSVVYFAIITCCLLRRTAFCCNGEKSRVKFSRSADAPAYQQGQNQLYNELNLGRREEYDVLDKRRGRDPEMGGKPQRRKNPQEGLYNELQKDKMAEAYSEIGMKGERRRGKGHDGLYQGLSTATKDTYDALHMQALPPR

SEQ ID NO: 29084 - protein, 252 aa, synthetic construct
LRDSKSSDKSVCLFTDFDSQTNVSQSKDSDVYITDKTVLDMRSMDFKSNSAVAWSNKSDFACANAFNNSIIPEDTFFPSPMDPKDNCSKDANDTLLLQLTNTSAYYMYLLLLLKSVVYFAIITCCLLRRTAFCCNGEKSRVKFSRSADAPAYQQGQNQLYNELNLGRREEYDVLDKRRGRDPEMGGKPQRRKNPQEGLYNELQKDKMAEAYSEIGMKGERRRGKGHDGLYQGLSTATKDTYDALHMQALPPR

SEQ ID NO: 29085 - protein, 260 aa, synthetic construct; identical to SEQ ID NO: 29083

SEQ ID NO: 29086 - protein, 246 aa, synthetic construct
LRDSKSSDKSVCLFTDFDSQTNVSQSKDSDVYITDKTVLDMRSMDFKSNSAVAWSNKSDFACANAFNNSIIPEDTFFPSPCSKDANDTLLLQLTNTSAYYMYLLLLLKSVVYFAIITCCLLRRTAFCCNGEKSRVKFSRSADAPAYQQGQNQLYNELNLGRREEYDVLDKRRGRDPEMGGKPQRRKNPQEGLYNELQKDKMAEAYSEIGMKGERRRGKGHDGLYQGLSTATKDTYDALHMQALPPR

SEQ ID NO: 29087 - protein, 261 aa, synthetic construct
LRDSKSSDKSVCLFTDFDSQTNVSQSKDSDVYITDKTVLDMRSMDFKSNSAVAWSNKSDFACANAFNNSIIPEDTFFPSPEVKTDSTDHVKPKETENTKQPSKSCHKPKAIVHTEKVNMMSLTVLGLRMLFAKTVAVNFLLTAKLFFLRVKFSRSADAPAYQQGQNQLYNELNLGRREEYDVLDKRRGRDPEMGGKPQRRKNPQEGLYNELQKDKMAEAYSEIGMKGERRRGKGHDGLYQGLSTATKDTYDALHMQALPPR

SEQ ID NO: 29088 - protein, 254 aa, synthetic construct
LRDSKSSDKSVCLFTDFDSQTNVSQSKDSDVYITDKTVLDMRSMDFKSNSAVAWSNKSDFACANAFNNSIIPEDTFFPSPDHVKPKETENTKQPSKSCHKPKAIVHTEKVNMMSLTVLGLRMLFAKTVAVNFLLTAKLFFLRVKFSRSADAPAYQQGQNQLYNELNLGRREEYDVLDKRRGRDPEMGGKPQRRKNPQEGLYNELQKDKMAEAYSEIGMKGERRRGKGHDGLYQGLSTATKDTYDALHMQALPPR

SEQ ID NO: 29089 - protein, 250 aa, synthetic construct
LRDSKSSDKSVCLFTDFDSQTNVSQSKDSDVYITDKTVLDMRSMDFKSNSAVAWSNKSDFACANAFNNSIIPEDTFFPSPESSCGRADCGFTSESYQQGVLSATILYEILLGKATLYAVLVSALVLMAMVKRKDSRGRVKFSRSADAPAYQQGQNQLYNELNLGRREEYDVLDKRRGRDPEMGGKPQRRKNPQEGLYNELQKDKMAEAYSEIGMKGERRRGKGHDGLYQGLSTATKDTYDALHMQALPPR

SEQ ID NO: 29090 - protein, 248 aa, synthetic construct
LRDSKSSDKSVCLFTDFDSQTNVSQSKDSDVYITDKTVLDMRSMDFKSNSAVAWSNKSDFACANAFNNSIIPEDTFFPSPESSCADCGFTSESYQQGVLSATILYEILLGKATLYAVLVSALVLMAMVKRKDSRGRVKFSRSADAPAYQQGQNQLYNELNLGRREEYDVLDKRRGRDPEMGGKPQRRKNPQEGLYNELQKDKMAEAYSEIGMKGERRRGKGHDGLYQGLSTATKDTYDALHMQALPPR

SEQ ID NO: 29091 - protein, 258 aa, synthetic construct
LRDSKSSDKSVCLFTDFDSQTNVSQSKDSDVYITDKTVLDMRSMDFKSNSAVAWSNKSDFACANAFNNSIIPEDTFFPSPESSCQIVSAEAWGRADCGFTSESYQQGVLSATILYEILLGKATLYAVLVSALVLMAMVKRKDSRGRVKFSRSADAPAYQQGQNQLYNELNLGRREEYDVLDKRRGRDPEMGGKPQRRKNPQEGLYNELQKDKMAEAYSEIGMKGERRRGKGHDGLYQGLSTATKDTYDALHMQALPPR

SEQ ID NO: 29092 - protein, 266 aa, synthetic construct
LRDSKSSDKSVCLFTDFDSQTNVSQSKDSDVYITDKTVLDMRSMDFKSNSAVAWSNKSDFACANAFNNSIIPEDTFFPSPESSCFPPIKTDVITMDPKDNCSKDANDTLLLQLTNTSAYYMYLLLLLKSVVYFAIITCCLLRRTAFCCNGEKSRVKFSRSADAPAYQQGQNQLYNELNLGRREEYDVLDKRRGRDPEMGGKPQRRKNPQEGLYNELQKDKMAEAYSEIGMKGERRRGKGHDGLYQGLSTATKDTYDALHMQALPPR

SEQ ID NO: 29093 - protein, 264 aa, synthetic construct
LRDSKSSDKSVCLFTDFDSQTNVSQSKDSDVYITDKTVLDMRSMDFKSNSAVAWSNKSDFACANAFNNSIIPEDTFFPSPESSCPIKTDVITMDPKDNCSKDANDTLLLQLTNTSAYYMYLLLLLKSVVYFAIITCCLLRRTAFCCNGEKSRVKFSRSADAPAYQQGQNQLYNELNLGRREEYDVLDKRRGRDPEMGGKPQRRKNPQEGLYNELQKDKMAEAYSEIGMKGERRRGKGHDGLYQGLSTATKDTYDALHMQALPPR

SEQ ID NO: 29094 - protein, 256 aa, synthetic construct
LRDSKSSDKSVCLFTDFDSQTNVSQSKDSDVYITDKTVLDMRSMDFKSNSAVAWSNKSDFACANAFNNSIIPEDTFFPSPESSCMDPKDNCSKDANDTLLLQLTNTSAYYMYLLLLLKSVVYFAIITCCLLRRTAFCCNGEKSRVKFSRSADAPAYQQGQNQLYNELNLGRREEYDVLDKRRGRDPEMGGKPQRRKNPQEGLYNELQKDKMAEAYSEIGMKGERRRGKGHDGLYQGLSTATKDTYDALHMQALPPR

SEQ ID NO: 29095 - protein, 264 aa, synthetic construct; identical to SEQ ID NO: 29093

SEQ ID NO: 29096 - protein, 250 aa, synthetic construct
LRDSKSSDKSVCLFTDFDSQTNVSQSKDSDVYITDKTVLDMRSMDFKSNSAVAWSNKSDFACANAFNNSIIPEDTFFPSPESSCCSKDANDTLLLQLTNTSAYYMYLLLLLKSVVYFAIITCCLLRRTAFCCNGEKSRVKFSRSADAPAYQQGQNQLYNELNLGRREEYDVLDKRRGRDPEMGGKPQRRKNPQEGLYNELQKDKMAEAYSEIGMKGERRRGKGHDGLYQGLSTATKDTYDALHMQALPPR

SEQ ID NO: 29097 - protein, 265 aa, synthetic construct
LRDSKSSDKSVCLFTDFDSQTNVSQSKDSDVYITDKTVLDMRSMDFKSNSAVAWSNKSDFACANAFNNSIIPEDTFFPSPESSCEVKTDSTDHVKPKETENTKQPSKSCHKPKAIVHTEKVNMMSLTVLGLRMLFAKTVAVNFLLTAKLFFLRVKFSRSADAPAYQQGQNQLYNELNLGRREEYDVLDKRRGRDPEMGGKPQRRKNPQEGLYNELQKDKMAEAYSEIGMKGERRRGKGHDGLYQGLSTATKDTYDALHMQALPPR

SEQ ID NO: 29098 - protein, 258 aa, synthetic construct
LRDSKSSDKSVCLFTDFDSQTNVSQSKDSDVYITDKTVLDMRSMDFKSNSAVAWSNKSDFACANAFNNSIIPEDTFFPSPESSCDHVKPKETENTKQPSKSCHKPKAIVHTEKVNMMSLTVLGLRMLFAKTVAVNFLLTAKLFFLRVKFSRSADAPAYQQGQNQLYNELNLGRREEYDVLDKRRGRDPEMGGKPQRRKNPQEGLYNELQKDKMAEAYSEIGMKGERRRGKGHDGLYQGLSTATKDTYDALHMQALPPR

SEQ ID NO: 29099 - protein, 237 aa, synthetic construct
LRDSKSSDKSVCLFTDFDSQTNVSQSKDSDVYITDKTVLDMRSMDFKSNSAVAWSNKSDFACANAFNNSIIGRADCGFTSESYQQGVLSATILYEILLGKATLYAVLVSALVLMAMVKRKDSRGRVKFSRSADAPAYQQGQNQLYNELNLGRREEYDVLDKRRGRDPEMGGKPQRRKNPQEGLYNELQKDKMAEAYSEIGMKGERRRGKGHDGLYQGLSTATKDTYDALHMQALPPR

SEQ ID NO: 29100 - protein, 235 aa, synthetic construct
LRDSKSSDKSVCLFTDFDSQTNVSQSKDSDVYITDKTVLDMRSMDFKSNSAVAWSNKSDFACANAFNNSIIADCGFTSESYQQGVLSATILYEILLGKATLYAVLVSALVLMAMVKRKDSRGRVKFSRSADAPAYQQGQNQLYNELNLGRREEYDVLDKRRGRDPEMGGKPQRRKNPQEGLYNELQKDKMAEAYSEIGMKGERRRGKGHDGLYQGLSTATKDTYDALHMQALPPR

SEQ ID NO: 29101 - protein, 245 aa, synthetic construct
LRDSKSSDKSVCLFTDFDSQTNVSQSKDSDVYITDKTVLDMRSMDFKSNSAVAWSNKSDFACANAFNNSIIQIVSAEAWGRADCGFTSESYQQGVLSATILYEILLGKATLYAVLVSALVLMAMVKRKDSRGRVKFSRSADAPAYQQGQNQLYNELNLGRREEYDVLDKRRGRDPEMGGKPQRRKNPQEGLYNELQKDKMAEAYSEIGMKGERRRGKGHDGLYQGLSTATKDTYDALHMQALPPR

SEQ ID NO: 29102 - protein, 253 aa, synthetic construct
LRDSKSSDKSVCLFTDFDSQTNVSQSKDSDVYITDKTVLDMRSMDFKSNSAVAWSNKSDFACANAFNNSIIFPPIKTDVITMDPKDNCSKDANDTLLLQLTNTSAYYMYLLLLLKSVVYFAIITCCLLRRTAFCCNGEKSRVKFSRSADAPAYQQGQNQLYNELNLGRREEYDVLDKRRGRDPEMGGKPQRRKNPQEGLYNELQKDKMAEAYSEIGMKGERRRGKGHDGLYQGLSTATKDTYDALHMQALPPR

SEQ ID NO: 29103 - protein, 251 aa, synthetic construct
LRDSKSSDKSVCLFTDFDSQTNVSQSKDSDVYITDKTVLDMRSMDFKSNSAVAWSNKSDFACANAFNNSIIPIKTDVITMDPKDNCSKDANDTLLLQLTNTSAYYMYLLLLLKSVVYFAIITCCLLRRTAFCCNGEKSRVKFSRSADAPAYQQGQNQLYNELNLGRREEYDVLDKRRGRDPEMGGKPQRRKNPQEGLYNELQKDKMAEAYSEIGMKGERRRGKGHDGLYQGLSTATKDTYDALHMQALPPR

SEQ ID NO: 29104 - protein, 243 aa, synthetic construct
LRDSKSSDKSVCLFTDFDSQTNVSQSKDSDVYITDKTVLDMRSMDFKSNSAVAWSNKSDFACANAFNNSIIMDPKDNCSKDANDTLLLQLTNTSAYYMYLLLLLKSVVYFAIITCCLLRRTAFCCNGEKSRVKFSRSADAPAYQQGQNQLYNELNLGRREEYDVLDKRRGRDPEMGGKPQRRKNPQEGLYNELQKDKMAEAYSEIGMKGERRRGKGHDGLYQGLSTATKDTYDALHMQALPPR

SEQ ID NO: 29105 - protein, 251 aa, synthetic construct; identical to SEQ ID NO: 29103

SEQ ID NO: 29106 - protein, 237 aa, synthetic construct
LRDSKSSDKSVCLFTDFDSQTNVSQSKDSDVYITDKTVLDMRSMDFKSNSAVAWSNKSDFACANAFNNSIICSKDANDTLLLQLTNTSAYYMYLLLLLKSVVYFAIITCCLLRRTAFCCNGEKSRVKFSRSADAPAYQQGQNQLYNELNLGRREEYDVLDKRRGRDPEMGGKPQRRKNPQEGLYNELQKDKMAEAYSEIGMKGERRRGKGHDGLYQGLSTATKDTYDALHMQALPPR

SEQ ID NO: 29107 - protein, 252 aa, synthetic construct
LRDSKSSDKSVCLFTDFDSQTNVSQSKDSDVYITDKTVLDMRSMDFKSNSAVAWSNKSDFACANAFNNSIIEVKTDSTDHVKPKETENTKQPSKSCHKPKAIVHTEKVNMMSLTVLGLRMLFAKTVAVNFLLTAKLFFLRVKFSRSADAPAYQQGQNQLYNELNLGRREEYDVLDKRRGRDPEMGGKPQRRKNPQEGLYNELQKDKMAEAYSEIGMKGERRRGKGHDGLYQGLSTATKDTYDALHMQALPPR

SEQ ID NO: 29108 - protein, 245 aa, synthetic construct
LRDSKSSDKSVCLFTDFDSQTNVSQSKDSDVYITDKTVLDMRSMDFKSNSAVAWSNKSDFACANAFNNSIIDHVKPKETENTKQPSKSCHKPKAIVHTEKVNMMSLTVLGLRMLFAKTVAVNFLLTAKLFFLRVKFSRSADAPAYQQGQNQLYNELNLGRREEYDVLDKRRGRDPEMGGKPQRRKNPQEGLYNELQKDKMAEAYSEIGMKGERRRGKGHDGLYQGLSTATKDTYDALHMQALPPR

SEQ ID NO: 29109 - protein, 250 aa, synthetic construct; identical to SEQ ID NO: 29089

SEQ ID NO: 29110 - protein, 248 aa, synthetic construct; identical to SEQ ID NO: 29090

SEQ ID NO: 29111 - protein, 258 aa, synthetic construct; identical to SEQ ID NO: 29091

SEQ ID NO: 29112 - protein, 266 aa, synthetic construct; identical to SEQ ID NO: 29092

SEQ ID NO: 29113 - protein, 264 aa, synthetic construct; identical to SEQ ID NO: 29093

SEQ ID NO: 29114 - protein, 256 aa, synthetic construct; identical to SEQ ID NO: 29094

SEQ ID NO: 29115 - protein, 264 aa, synthetic construct; identical to SEQ ID NO: 29093

SEQ ID NO: 29116 - protein, 250 aa, synthetic construct; identical to SEQ ID NO: 29096

SEQ ID NO: 29117 - protein, 265 aa, synthetic construct; identical to SEQ ID NO: 29097

SEQ ID NO: 29118 - protein, 258 aa, synthetic construct; identical to SEQ ID NO: 29098

SEQ ID NO: 29119 - protein, 290 aa, synthetic construct
EVAVFEPSEAEISHTQKATLVCLATGFYPDHVELSWWVNGKEVHSGVSTDPQPLKEQPALNDSRYCLSSRLRVSATFWQNPRNHFRCQVQFYGLSENDEWTQDRAKPVTQIVSAEAWIPEDTFFPSPESSCDVKLVEKSFETDTNLNFQNLSVIGFRILLLKVAGFNLLMTLRLWSSRVKFSRSADAPAYQQGQNQLYNELNLGRREEYDVLDKRRGRDPEMGGKPQRRKNPQEGLYNELQKDKMAEAYSEIGMKGERRRGKGHDGLYQGLSTATKDTYDALHMQALPPR

SEQ ID NO: 29120 - protein, 280 aa, synthetic construct
EVAVFEPSEAEISHTQKATLVCLATGFYPDHVELSWWVNGKEVHSGVSTDPQPLKEQPALNDSRYCLSSRLRVSATFWQNPRNHFRCQVQFYGLSENDEWTQDRAKPVTQIVSAEAWESSCDVKLVEKSFETDTNLNFQNLSVIGFRILLLKVAGFNLLMTLRLWSSRVKFSRSADAPAYQQGQNQLYNELNLGRREEYDVLDKRRGRDPEMGGKPQRRKNPQEGLYNELQKDKMAEAYSEIGMKGERRRGKGHDGLYQGLSTATKDTYDALHMQALPPR

SEQ ID NO: 29121 - protein, 289 aa, synthetic construct
EVAVFEPSEAEISHTQKATLVCLATGFYPDHVELSWWVNGKEVHSGVSTDPQPLKEQPALNDSRYCLSSRLRVSATFWQNPRNHFRCQVQFYGLSENDEWTQDRAKPVTQIVSAEAWPEDTFFPSPESSCDVKLVEKSFETDTNLNFQNLSVIGFRILLLKVAGFNLLMTLRLWSSRVKFSRSADAPAYQQGQNQLYNELNLGRREEYDVLDKRRGRDPEMGGKPQRRKNPQEGLYNELQKDKMAEAYSEIGMKGERRRGKGHDGLYQGLSTATKDTYDALHMQALPPR

SEQ ID NO: 29122 - protein, 299 aa, synthetic construct
EVAVFEPSEAEISHTQKATLVCLATGFYPDHVELSWWVNGKEVHSGVSTDPQPLKEQPALNDSRYCLSSRLRVSATFWQNPRNHFRCQVQFYGLSENDEWTQDRAKPVTQIVSAEAWFPPIKTDVITMDPKDNCSKDANDTLLLQLTNTSAYYMYLLLLLKSVVYFAIITCCLLRRTAFCCNGEKSRVKFSRSADAPAYQQGQNQLYNELNLGRREEYDVLDKRRGRDPEMGGKPQRRKNPQEGLYNELQKDKMAEAYSEIGMKGERRRGKGHDGLYQGLSTATKDTYDALHMQALPPR

SEQ ID NO: 29123 - protein, 297 aa, synthetic construct
EVAVFEPSEAEISHTQKATLVCLATGFYPDHVELSWWVNGKEVHSGVSTDPQPLKEQPALNDSRYCLSSRLRVSATFWQNPRNHFRCQVQFYGLSENDEWTQDRAKPVTQIVSAEAWPIKTDVITMDPKDNCSKDANDTLLLQLTNTSAYYMYLLLLLKSVVYFAIITCCLLRRTAFCCNGEKSRVKFSRSADAPAYQQGQNQLYNELNLGRREEYDVLDKRRGRDPEMGGKPQRRKNPQEGLYNELQKDKMAEAYSEIGMKGERRRGKGHDGLYQGLSTATKDTYDALHMQALPPR

SEQ ID NO: 29124 - protein, 289 aa, synthetic construct
EVAVFEPSEAEISHTQKATLVCLATGFYPDHVELSWWVNGKEVHSGVSTDPQPLKEQPALNDSRYCLSSRLRVSATFWQNPRNHFRCQVQFYGLSENDEWTQDRAKPVTQIVSAEAWMDPKDNCSKDANDTLLLQLTNTSAYYMYLLLLLKSVVYFAIITCCLLRRTAFCCNGEKSRVKFSRSADAPAYQQGQNQLYNELNLGRREEYDVLDKRRGRDPEMGGKPQRRKNPQEGLYNELQKDKMAEAYSEIGMKGERRRGKGHDGLYQGLSTATKDTYDALHMQALPPR

SEQ ID NO: 29125 - protein, 297 aa, synthetic construct; identical to SEQ ID NO: 29123

SEQ ID NO: 29126 - protein, 283 aa, synthetic construct
EVAVFEPSEAEISHTQKATLVCLATGFYPDHVELSWWVNGKEVHSGVSTDPQPLKEQPALNDSRYCLSSRLRVSATFWQNPRNHFRCQVQFYGLSENDEWTQDRAKPVTQIVSAEAWCSKDANDTLLLQLTNTSAYYMYLLLLLKSVVYFAIITCCLLRRTAFCCNGEKSRVKFSRSADAPAYQQGQNQLYNELNLGRREEYDVLDKRRGRDPEMGGKPQRRKNPQEGLYNELQKDKMAEAYSEIGMKGERRRGKGHDGLYQGLSTATKDTYDALHMQALPPR

SEQ ID NO: 29127 - protein, 298 aa, synthetic construct
EVAVFEPSEAEISHTQKATLVCLATGFYPDHVELSWWVNGKEVHSGVSTDPQPLKEQPALNDSRYCLSSRLRVSATFWQNPRNHFRCQVQFYGLSENDEWTQDRAKPVTQIVSAEAWEVKTDSTDHVKPKETENTKQPSKSCHKPKAIVHTEKVNMMSLTVLGLRMLFAKTVAVNFLLTAKLFFLRVKFSRSADAPAYQQGQNQLYNELNLGRREEYDVLDKRRGRDPEMGGKPQRRKNPQEGLYNELQKDKMAEAYSEIGMKGERRRGKGHDGLYQGLSTATKDTYDALHMQALPPR

SEQ ID NO: 29128 - protein, 291 aa, synthetic construct
EVAVFEPSEAEISHTQKATLVCLATGFYPDHVELSWWVNGKEVHSGVSTDPQPLKEQPALNDSRYCLSSRLRVSATFWQNPRNHFRCQVQFYGLSENDEWTQDRAKPVTQIVSAEAWDHVKPKETENTKQPSKSCHKPKAIVHTEKVNMMSLTVLGLRMLFAKTVAVNFLLTAKLFFLRVKFSRSADAPAYQQGQNQLYNELNLGRREEYDVLDKRRGRDPEMGGKPQRRKNPQEGLYNELQKDKMAEAYSEIGMKGERRRGKGHDGLYQGLSTATKDTYDALHMQALPPR

SEQ ID NO: 29129 - protein, 292 aa, synthetic construct
EVAVFEPSEAEISHTQKATLVCLATGFYPDHVELSWWVNGKEVHSGVSTDPQPLKEQPALNDSRYCLSSRLRVSATFWQNPRNHFRCQVQFYGLSENDEWTQDRAKPVTQIVSAEAWGRIPEDTFFPSPESSCDVKLVEKSFETDTNLNFQNLSVIGFRILLLKVAGFNLLMTLRLWSSRVKFSRSADAPAYQQGQNQLYNELNLGRREEYDVLDKRRGRDPEMGGKPQRRKNPQEGLYNELQKDKMAEAYSEIGMKGERRRGKGHDGLYQGLSTATKDTYDALHMQALPPR

SEQ ID NO: 29130 - protein, 282 aa, synthetic construct
EVAVFEPSEAEISHTQKATLVCLATGFYPDHVELSWWVNGKEVHSGVSTDPQPLKEQPALNDSRYCLSSRLRVSATFWQNPRNHFRCQVQFYGLSENDEWTQDRAKPVTQIVSAEAWGRESSCDVKLVEKSFETDTNLNFQNLSVIGFRILLLKVAGFNLLMTLRLWSSRVKFSRSADAPAYQQGQNQLYNELNLGRREEYDVLDKRRGRDPEMGGKPQRRKNPQEGLYNELQKDKMAEAYSEIGMKGERRRGKGHDGLYQGLSTATKDTYDALHMQALPPR

SEQ ID NO: 29131 - protein, 291 aa, synthetic construct
EVAVFEPSEAEISHTQKATLVCLATGFYPDHVELSWWVNGKEVHSGVSTDPQPLKEQPALNDSRYCLSSRLRVSATFWQNPRNHFRCQVQFYGLSENDEWTQDRAKPVTQIVSAEAWGRPEDTFFPSPESSCDVKLVEKSFETDTNLNFQNLSVIGFRILLLKVAGFNLLMTLRLWSSRVKFSRSADAPAYQQGQNQLYNELNLGRREEYDVLDKRRGRDPEMGGKPQRRKNPQEGLYNELQKDKMAEAYSEIGMKGERRRGKGHDGLYQGLSTATKDTYDALHMQALPPR

SEQ ID NO: 29132 - protein, 301 aa, synthetic construct
EVAVFEPSEAEISHTQKATLVCLATGFYPDHVELSWWVNGKEVHSGVSTDPQPLKEQPALNDSRYCLSSRLRVSATFWQNPRNHFRCQVQFYGLSENDEWTQDRAKPVTQIVSAEAWGRFPPIKTDVITMDPKDNCSKDANDTLLLQLTNTSAYYMYLLLLLKSVVYFAIITCCLLRRTAFCCNGEKSRVKFSRSADAPAYQQGQNQLYNELNLGRREEYDVLDKRRGRDPEMGGKPQRRKNPQEGLYNELQKDKMAEAYSEIGMKGERRRGKGHDGLYQGLSTATKDTYDALHMQALPPR

SEQ ID NO: 29133 - protein, 299 aa, synthetic construct
EVAVFEPSEAEISHTQKATLVCLATGFYPDHVELSWWVNGKEVHSGVSTDPQPLKEQPALNDSRYCLSSRLRVSATFWQNPRNHFRCQVQFYGLSENDEWTQDRAKPVTQIVSAEAWGRPIKTDVITMDPKDNCSKDANDTLLLQLTNTSAYYMYLLLLLKSVVYFAIITCCLLRRTAFCCNGEKSRVKFSRSADAPAYQQGQNQLYNELNLGRREEYDVLDKRRGRDPEMGGKPQRRKNPQEGLYNELQKDKMAEAYSEIGMKGERRRGKGHDGLYQGLSTATKDTYDALHMQALPPR

SEQ ID NO: 29134 - protein, 291 aa, synthetic construct
EVAVFEPSEAEISHTQKATLVCLATGFYPDHVELSWWVNGKEVHSGVSTDPQPLKEQPALNDSRYCLSSRLRVSATFWQNPRNHFRCQVQFYGLSENDEWTQDRAKPVTQIVSAEAWGRMDPKDNCSKDANDTLLLQLTNTSAYYMYLLLLLKSVVYFAIITCCLLRRTAFCCNGEKSRVKFSRSADAPAYQQGQNQLYNELNLGRREEYDVLDKRRGRDPEMGGKPQRRKNPQEGLYNELQKDKMAEAYSEIGMKGERRRGKGHDGLYQGLSTATKDTYDALHMQALPPR

SEQ ID NO: 29135 - protein, 299 aa, synthetic construct; identical to SEQ ID NO: 29133

SEQ ID NO: 29136 - protein, 285 aa, synthetic construct
EVAVFEPSEAEISHTQKATLVCLATGFYPDHVELSWWVNGKEVHSGVSTDPQPLKEQPALNDSRYCLSSRLRVSATFWQNPRNHFRCQVQFYGLSENDEWTQDRAKPVTQIVSAEAWGRCSKDANDTLLLQLTNTSAYYMYLLLLLKSVVYFAIITCCLLRRTAFCCNGEKSRVKFSRSADAPAYQQGQNQLYNELNLGRREEYDVLDKRRGRDPEMGGKPQRRKNPQEGLYNELQKDKMAEAYSEIGMKGERRRGKGHDGLYQGLSTATKDTYDALHMQALPPR

SEQ ID NO: 29137 - protein, 300 aa, synthetic construct
EVAVFEPSEAEISHTQKATLVCLATGFYPDHVELSWWVNGKEVHSGVSTDPQPLKEQPALNDSRYCLSSRLRVSATFWQNPRNHFRCQVQFYGLSENDEWTQDRAKPVTQIVSAEAWGREVKTDSTDHVKPKETENTKQPSKSCHKPKAIVHTEKVNMMSLTVLGLRMLFAKTVAVNFLLTAKLFFLRVKFSRSADAPAYQQGQNQLYNELNLGRREEYDVLDKRRGRDPEMGGKPQRRKNPQEGLYNELQKDKMAEAYSEIGMKGERRRGKGHDGLYQGLSTATKDTYDALHMQALPPR

SEQ ID NO: 29138 - protein, 293 aa, synthetic construct
EVAVFEPSEAEISHTQKATLVCLATGFYPDHVELSWWVNGKEVHSGVSTDPQPLKEQPALNDSRYCLSSRLRVSATFWQNPRNHFRCQVQFYGLSENDEWTQDRAKPVTQIVSAEAWGRDHVKPKETENTKQPSKSCHKPKAIVHTEKVNMMSLTVLGLRMLFAKTVAVNFLLTAKLFFLRVKFSRSADAPAYQQGQNQLYNELNLGRREEYDVLDKRRGRDPEMGGKPQRRKNPQEGLYNELQKDKMAEAYSEIGMKGERRRGKGHDGLYQGLSTATKDTYDALHMQALPPR

SEQ ID NO: 29139 - protein, 295 aa, synthetic construct
EVAVFEPSEAEISHTQKATLVCLATGFYPDHVELSWWVNGKEVHSGVSTDPQPLKEQPALNDSRYCLSSRLRVSATFWQNPRNHFRCQVQFYGLSENDEWTQDRAKPVTQIVSAEAWGRADCIPEDTFFPSPESSCDVKLVEKSFETDTNLNFQNLSVIGFRILLLKVAGFNLLMTLRLWSSRVKFSRSADAPAYQQGQNQLYNELNLGRREEYDVLDKRRGRDPEMGGKPQRRKNPQEGLYNELQKDKMAEAYSEIGMKGERRRGKGHDGLYQGLSTATKDTYDALHMQALPPR

SEQ ID NO: 29140 - protein, 285 aa, synthetic construct
EVAVFEPSEAEISHTQKATLVCLATGFYPDHVELSWWVNGKEVHSGVSTDPQPLKEQPALNDSRYCLSSRLRVSATFWQNPRNHFRCQVQFYGLSENDEWTQDRAKPVTQIVSAEAWGRADCESSCDVKLVEKSFETDTNLNFQNLSVIGFRILLLKVAGFNLLMTLRLWSSRVKFSRSADAPAYQQGQNQLYNELNLGRREEYDVLDKRRGRDPEMGGKPQRRKNPQEGLYNELQKDKMAEAYSEIGMKGERRRGKGHDGLYQGLSTATKDTYDALHMQALPPR

SEQ ID NO: 29141 - protein, 294 aa, synthetic construct
EVAVFEPSEAEISHTQKATLVCLATGFYPDHVELSWWVNGKEVHSGVSTDPQPLKEQPALNDSRYCLSSRLRVSATFWQNPRNHFRCQVQFYGLSENDEWTQDRAKPVTQIVSAEAWGRADCPEDTFFPSPESSCDVKLVEKSFETDTNLNFQNLSVIGFRILLLKVAGFNLLMTLRLWSSRVKFSRSADAPAYQQGQNQLYNELNLGRREEYDVLDKRRGRDPEMGGKPQRRKNPQEGLYNELQKDKMAEAYSEIGMKGERRRGKGHDGLYQGLSTATKDTYDALHMQALPPR

SEQ ID NO: 29142 - protein, 304 aa, synthetic construct
EVAVFEPSEAEISHTQKATLVCLATGFYPDHVELSWWVNGKEVHSGVSTDPQPLKEQPALNDSRYCLSSRLRVSATFWQNPRNHFRCQVQFYGLSENDEWTQDRAKPVTQIVSAEAWGRADCFPPIKTDVITMDPKDNCSKDANDTLLLQLTNTSAYYMYLLLLLKSVVYFAIITCCLLRRTAFCCNGEKSRVKFSRSADAPAYQQGQNQLYNELNLGRREEYDVLDKRRGRDPEMGGKPQRRKNPQEGLYNELQKDKMAEAYSEIGMKGERRRGKGHDGLYQGLSTATKDTYDALHMQALPPR

SEQ ID NO: 29143 - protein, 302 aa, synthetic construct
EVAVFEPSEAEISHTQKATLVCLATGFYPDHVELSWWVNGKEVHSGVSTDPQPLKEQPALNDSRYCLSSRLRVSATFWQNPRNHFRCQVQFYGLSENDEWTQDRAKPVTQIVSAEAWGRADCPIKTDVITMDPKDNCSKDANDTLLLQLTNTSAYYMYLLLLLKSVVYFAIITCCLLRRTAFCCNGEKSRVKFSRSADAPAYQQGQNQLYNELNLGRREEYDVLDKRRGRDPEMGGKPQRRKNPQEGLYNELQKDKMAEAYSEIGMKGERRRGKGHDGLYQGLSTATKDTYDALHMQALPPR

SEQ ID NO: 29144 - protein, 294 aa, synthetic construct
EVAVFEPSEAEISHTQKATLVCLATGFYPDHVELSWWVNGKEVHSGVSTDPQPLKEQPALNDSRYCLSSRLRVSATFWQNPRNHFRCQVQFYGLSENDEWTQDRAKPVTQIVSAEAWGRADCMDPKDNCSKDANDTLLLQLTNTSAYYMYLLLLLKSVVYFAIITCCLLRRTAFCCNGEKSRVKFSRSADAPAYQQGQNQLYNELNLGRREEYDVLDKRRGRDPEMGGKPQRRKNPQEGLYNELQKDKMAEAYSEIGMKGERRRGKGHDGLYQGLSTATKDTYDALHMQALPPR

SEQ ID NO: 29145 - protein, 302 aa, synthetic construct; identical to SEQ ID NO: 29143

SEQ ID NO: 29146 - protein, 288 aa, synthetic construct
EVAVFEPSEAEISHTQKATLVCLATGFYPDHVELSWWVNGKEVHSGVSTDPQPLKEQPALNDSRYCLSSRLRVSATFWQNPRNHFRCQVQFYGLSENDEWTQDRAKPVTQIVSAEAWGRADCCSKDANDTLLLQLTNTSAYYMYLLLLLKSVVYFAIITCCLLRRTAFCCNGEKSRVKFSRSADAPAYQQGQNQLYNELNLGRREEYDVLDKRRGRDPEMGGKPQRRKNPQEGLYNELQKDKMAEAYSEIGMKGERRRGKGHDGLYQGLSTATKDTYDALHMQALPPR

SEQ ID NO: 29147 - protein, 303 aa, synthetic construct
EVAVFEPSEAEISHTQKATLVCLATGFYPDHVELSWWVNGKEVHSGVSTDPQPLKEQPALNDSRYCLSSRLRVSATFWQNPRNHFRCQVQFYGLSENDEWTQDRAKPVTQIVSAEAWGRADCEVKTDSTDHVKPKETENTKQPSKSCHKPKAIVHTEKVNMMSLTVLGLRMLFAKTVAVNFLLTAKLFFLRVKFSRSADAPAYQQGQNQLYNELNLGRREEYDVLDKRRGRDPEMGGKPQRRKNPQEGLYNELQKDKMAEAYSEIGMKGERRRGKGHDGLYQGLSTATKDTYDALHMQALPPR

SEQ ID NO: 29148 - protein, 296 aa, synthetic construct
EVAVFEPSEAEISHTQKATLVCLATGFYPDHVELSWWVNGKEVHSGVSTDPQPLKEQPALNDSRYCLSSRLRVSATFWQNPRNHFRCQVQFYGLSENDEWTQDRAKPVTQIVSAEAWGRADCDHVKPKETENTKQPSKSCHKPKAIVHTEKVNMMSLTVLGLRMLFAKTVAVNFLLTAKLFFLRVKFSRSADAPAYQQGQNQLYNELNLGRREEYDVLDKRRGRDPEMGGKPQRRKNPQEGLYNELQKDKMAEAYSEIGMKGERRRGKGHDGLYQGLSTATKDTYDALHMQALPPR

SEQ ID NO: 29149 - protein, 282 aa, synthetic construct
EVAVFEPSEAEISHTQKATLVCLATGFYPDHVELSWWVNGKEVHSGVSTDPQPLKEQPALNDSRYCLSSRLRVSATFWQNPRNHFRCQVQFYGLSENDEWTQDRAKPVTIPEDTFFPSPESSCDVKLVEKSFETDTNLNFQNLSVIGFRILLLKVAGFNLLMTLRLWSSRVKFSRSADAPAYQQGQNQLYNELNLGRREEYDVLDKRRGRDPEMGGKPQRRKNPQEGLYNELQKDKMAEAYSEIGMKGERRRGKGHDGLYQGLSTATKDTYDALHMQALPPR

SEQ ID NO: 29150 - protein, 272 aa, synthetic construct
EVAVFEPSEAEISHTQKATLVCLATGFYPDHVELSWWVNGKEVHSGVSTDPQPLKEQPALNDSRYCLSSRLRVSATFWQNPRNHFRCQVQFYGLSENDEWTQDRAKPVTESSCDVKLVEKSFETDTNLNFQNLSVIGFRILLLKVAGFNLLMTLRLWSSRVKFSRSADAPAYQQGQNQLYNELNLGRREEYDVLDKRRGRDPEMGGKPQRRKNPQEGLYNELQKDKMAEAYSEIGMKGERRRGKGHDGLYQGLSTATKDTYDALHMQALPPR

SEQ ID NO: 29151 - protein, 281 aa, synthetic construct
EVAVFEPSEAEISHTQKATLVCLATGFYPDHVELSWWVNGKEVHSGVSTDPQPLKEQPALNDSRYCLSSRLRVSATFWQNPRNHFRCQVQFYGLSENDEWTQDRAKPVTPEDTFFPSPESSCDVKLVEKSFETDTNLNFQNLSVIGFRILLLKVAGFNLLMTLRLWSSRVKFSRSADAPAYQQGQNQLYNELNLGRREEYDVLDKRRGRDPEMGGKPQRRKNPQEGLYNELQKDKMAEAYSEIGMKGERRRGKGHDGLYQGLSTATKDTYDALHMQALPPR

SEQ ID NO: 29152 - protein, 291 aa, synthetic construct
EVAVFEPSEAEISHTQKATLVCLATGFYPDHVELSWWVNGKEVHSGVSTDPQPLKEQPALNDSRYCLSSRLRVSATFWQNPRNHFRCQVQFYGLSENDEWTQDRAKPVTFPPIKTDVITMDPKDNCSKDANDTLLLQLTNTSAYYMYLLLLLKSVVYFAIITCCLLRRTAFCCNGEKSRVKFSRSADAPAYQQGQNQLYNELNLGRREEYDVLDKRRGRDPEMGGKPQRRKNPQEGLYNELQKDKMAEAYSEIGMKGERRRGKGHDGLYQGLSTATKDTYDALHMQALPPR

SEQ ID NO: 29153 - protein, 289 aa, synthetic construct
EVAVFEPSEAEISHTQKATLVCLATGFYPDHVELSWWVNGKEVHSGVSTDPQPLKEQPALNDSRYCLSSRLRVSATFWQNPRNHFRCQVQFYGLSENDEWTQDRAKPVTPIKTDVITMDPKDNCSKDANDTLLLQLTNTSAYYMYLLLLLKSVVYFAIITCCLLRRTAFCCNGEKSRVKFSRSADAPAYQQGQNQLYNELNLGRREEYDVLDKRRGRDPEMGGKPQRRKNPQEGLYNELQKDKMAEAYSEIGMKGERRRGKGHDGLYQGLSTATKDTYDALHMQALPPR

SEQ ID NO: 29154 - protein, 281 aa, synthetic construct
EVAVFEPSEAEISHTQKATLVCLATGFYPDHVELSWWVNGKEVHSGVSTDPQPLKEQPALNDSRYCLSSRLRVSATFWQNPRNHFRCQVQFYGLSENDEWTQDRAKPVTMDPKDNCSKDANDTLLLQLTNTSAYYMYLLLLLKSVVYFAIITCCLLRRTAFCCNGEKSRVKFSRSADAPAYQQGQNQLYNELNLGRREEYDVLDKRRGRDPEMGGKPQRRKNPQEGLYNELQKDKMAEAYSEIGMKGERRRGKGHDGLYQGLSTATKDTYDALHMQALPPR

SEQ ID NO: 29155 - protein, 289 aa, synthetic construct; identical to SEQ ID NO: 29153

SEQ ID NO: 29156 - protein, 275 aa, synthetic construct
EVAVFEPSEAEISHTQKATLVCLATGFYPDHVELSWWVNGKEVHSGVSTDPQPLKEQPALNDSRYCLSSRLRVSATFWQNPRNHFRCQVQFYGLSENDEWTQDRAKPVTCSKDANDTLLLQLTNTSAYYMYLLLLLKSVVYFAIITCCLLRRTAFCCNGEKSRVKFSRSADAPAYQQGQNQLYNELNLGRREEYDVLDKRRGRDPEMGGKPQRRKNPQEGLYNELQKDKMAEAYSEIGMKGERRRGKGHDGLYQGLSTATKDTYDALHMQALPPR

SEQ ID NO: 29157 - protein, 290 aa, synthetic construct
EVAVFEPSEAEISHTQKATLVCLATGFYPDHVELSWWVNGKEVHSGVSTDPQPLKEQPALNDSRYCLSSRLRVSATFWQNPRNHFRCQVQFYGLSENDEWTQDRAKPVTEVKTDSTDHVKPKETENTKQPSKSCHKPKAIVHTEKVNMMSLTVLGLRMLFAKTVAVNFLLTAKLFFLRVKFSRSADAPAYQQGQNQLYNELNLGRREEYDVLDKRRGRDPEMGGKPQRRKNPQEGLYNELQKDKMAEAYSEIGMKGERRRGKGHDGLYQGLSTATKDTYDALHMQALPPR

SEQ ID NO: 29158 - protein, 283 aa, synthetic construct
EVAVFEPSEAEISHTQKATLVCLATGFYPDHVELSWWVNGKEVHSGVSTDPQPLKEQPALNDSRYCLSSRLRVSATFWQNPRNHFRCQVQFYGLSENDEWTQDRAKPVTDHVKPKETENTKQPSKSCHKPKAIVHTEKVNMMSLTVLGLRMLFAKTVAVNFLLTAKLFFLRVKFSRSADAPAYQQGQNQLYNELNLGRREEYDVLDKRRGRDPEMGGKPQRRKNPQEGLYNELQKDKMAEAYSEIGMKGERRRGKGHDGLYQGLSTATKDTYDALHMQALPPR

SEQ ID NO: 29159 - protein, 290 aa, synthetic construct; identical to SEQ ID NO: 29119

SEQ ID NO: 29160 - protein, 280 aa, synthetic construct; identical to SEQ ID NO: 29120

SEQ ID NO: 29161 - protein, 289 aa, synthetic construct; identical to SEQ ID NO: 29121

SEQ ID NO: 29162 - protein, 299 aa, synthetic construct; identical to SEQ ID NO: 29122

SEQ ID NO: 29163 - protein, 297 aa, synthetic construct; identical to SEQ ID NO: 29123

SEQ ID NO: 29164 - protein, 289 aa, synthetic construct; identical to SEQ ID NO: 29124

SEQ ID NO: 29165 - protein, 297 aa, synthetic construct; identical to SEQ ID NO: 29123

SEQ ID NO: 29166 - protein, 283 aa, synthetic construct; identical to SEQ ID NO: 29126

SEQ ID NO: 29167 - protein, 298 aa, synthetic construct; identical to SEQ ID NO: 29127

SEQ ID NO: 29168 - protein, 291 aa, synthetic construct; identical to SEQ ID NO: 29128

SEQ ID NO: 29169 - protein, 283 aa, synthetic construct; identical to SEQ ID NO: 28954

SEQ ID NO: 29170 - protein, 273 aa, synthetic construct; identical to SEQ ID NO: 28955

SEQ ID NO: 29171 - protein, 282 aa, synthetic construct; identical to SEQ ID NO: 28956

SEQ ID NO: 29172 - protein, 292 aa, synthetic construct; identical to SEQ ID NO: 28957

SEQ ID NO: 29173 - protein, 290 aa, synthetic construct; identical to SEQ ID NO: 28958

SEQ ID NO: 29174 - protein, 282 aa, synthetic construct; identical to SEQ ID NO: 28959

SEQ ID NO: 29175 - protein, 290 aa, synthetic construct; identical to SEQ ID NO: 28958

SEQ ID NO: 29176 - protein, 276 aa, synthetic construct; identical to SEQ ID NO: 28961

SEQ ID NO: 29177 - protein, 291 aa, synthetic construct; identical to SEQ ID NO: 28962

SEQ ID NO: 29178 - protein, 284 aa, synthetic construct; identical to SEQ ID NO: 28963

SEQ ID NO: 29179 - protein, 272 aa, synthetic construct
ADVSPKPTIFLPSIAETKLQKAGTYLCLLEKFFPDVIKIHWQEKKSNTILGSQEGNTMKTNDTYMKFSWLTVPEKSLDKEHRCIVRHENNKNGVDQEIIIPEDTFFPSPESSCDVKLVEKSFETDTNLNFQNLSVIGFRILLLKVAGFNLLMTLRLWSSRVKFSRSADAPAYQQGQNQLYNELNLGRREEYDVLDKRRGRDPEMGGKPQRRKNPQEGLYNELQKDKMAEAYSEIGMKGERRRGKGHDGLYQGLSTATKDTYDALHMQALPPR

SEQ ID NO: 29180 - protein, 262 aa, synthetic construct
ADVSPKPTIFLPSIAETKLQKAGTYLCLLEKFFPDVIKIHWQEKKSNTILGSQEGNTMKTNDTYMKFSWLTVPEKSLDKEHRCIVRHENNKNGVDQEIIESSCDVKLVEKSFETDTNLNFQNLSVIGFRILLLKVAGFNLLMTLRLWSSRVKFSRSADAPAYQQGQNQLYNELNLGRREEYDVLDKRRGRDPEMGGKPQRRKNPQEGLYNELQKDKMAEAYSEIGMKGERRRGKGHDGLYQGLSTATKDTYDALHMQALPPR

SEQ ID NO: 29181 - protein, 271 aa, synthetic construct
ADVSPKPTIFLPSIAETKLQKAGTYLCLLEKFFPDVIKIHWQEKKSNTILGSQEGNTMKTNDTYMKFSWLTVPEKSLDKEHRCIVRHENNKNGVDQEIIPEDTFFPSPESSCDVKLVEKSFETDTNLNFQNLSVIGFRILLLKVAGFNLLMTLRLWSSRVKFSRSADAPAYQQGQNQLYNELNLGRREEYDVLDKRRGRDPEMGGKPQRRKNPQEGLYNELQKDKMAEAYSEIGMKGERRRGKGHDGLYQGLSTATKDTYDALHMQALPPR

SEQ ID NO: 29182 - protein, 265 aa, synthetic construct
ADVSPKPTIFLPSIAETKLQKAGTYLCLLEKFFPDVIKIHWQEKKSNTILGSQEGNTMKTNDTYMKFSWLTVPEKSLDKEHRCIVRHENNKNGVDQEIIGRADCGFTSESYQQGVLSATILYEILLGKATLYAVLVSALVLMAMVKRKDSRGRVKFSRSADAPAYQQGQNQLYNELNLGRREEYDVLDKRRGRDPEMGGKPQRRKNPQEGLYNELQKDKMAEAYSEIGMKGERRRGKGHDGLYQGLSTATKDTYDALHMQALPPR

SEQ ID NO: 29183 - protein, 263 aa, synthetic construct
ADVSPKPTIFLPSIAETKLQKAGTYLCLLEKFFPDVIKIHWQEKKSNTILGSQEGNTMKTNDTYMKFSWLTVPEKSLDKEHRCIVRHENNKNGVDQEIIADCGFTSESYQQGVLSATILYEILLGKATLYAVLVSALVLMAMVKRKDSRGRVKFSRSADAPAYQQGQNQLYNELNLGRREEYDVLDKRRGRDPEMGGKPQRRKNPQEGLYNELQKDKMAEAYSEIGMKGERRRGKGHDGLYQGLSTATKDTYDALHMQALPPR

SEQ ID NO: 29184 - protein, 273 aa, synthetic construct
ADVSPKPTIFLPSIAETKLQKAGTYLCLLEKFFPDVIKIHWQEKKSNTILGSQEGNTMKTNDTYMKFSWLTVPEKSLDKEHRCIVRHENNKNGVDQEIIQIVSAEAWGRADCGFTSESYQQGVLSATILYEILLGKATLYAVLVSALVLMAMVKRKDSRGRVKFSRSADAPAYQQGQNQLYNELNLGRREEYDVLDKRRGRDPEMGGKPQRRKNPQEGLYNELQKDKMAEAYSEIGMKGERRRGKGHDGLYQGLSTATKDTYDALHMQALPPR

SEQ ID NO: 29185 - protein, 280 aa, synthetic construct
ADVSPKPTIFLPSIAETKLQKAGTYLCLLEKFFPDVIKIHWQEKKSNTILGSQEGNTMKTNDTYMKFSWLTVPEKSLDKEHRCIVRHENNKNGVDQEIIEVKTDSTDHVKPKETENTKQPSKSCHKPKAIVHTEKVNMMSLTVLGLRMLFAKTVAVNFLLTAKLFFLRVKFSRSADAPAYQQGQNQLYNELNLGRREEYDVLDKRRGRDPEMGGKPQRRKNPQEGLYNELQKDKMAEAYSEIGMKGERRRGKGHDGLYQGLSTATKDTYDALHMQALPPR

SEQ ID NO: 29186 - protein, 273 aa, synthetic construct
ADVSPKPTIFLPSIAETKLQKAGTYLCLLEKFFPDVIKIHWQEKKSNTILGSQEGNTMKTNDTYMKFSWLTVPEKSLDKEHRCIVRHENNKNGVDQEIIDHVKPKETENTKQPSKSCHKPKAIVHTEKVNMMSLTVLGLRMLFAKTVAVNFLLTAKLFFLRVKFSRSADAPAYQQGQNQLYNELNLGRREEYDVLDKRRGRDPEMGGKPQRRKNPQEGLYNELQKDKMAEAYSEIGMKGERRRGKGHDGLYQGLSTATKDTYDALHMQALPPR

SEQ ID NO: 29187 - protein, 274 aa, synthetic construct
ADVSPKPTIFLPSIAETKLQKAGTYLCLLEKFFPDVIKIHWQEKKSNTILGSQEGNTMKTNDTYMKFSWLTVPEKSLDKEHRCIVRHENNKNGVDQEIIFPIPEDTFFPSPESSCDVKLVEKSFETDTNLNFQNLSVIGFRILLLKVAGFNLLMTLRLWSSRVKFSRSADAPAYQQGQNQLYNELNLGRREEYDVLDKRRGRDPEMGGKPQRRKNPQEGLYNELQKDKMAEAYSEIGMKGERRRGKGHDGLYQGLSTATKDTYDALHMQALPPR

SEQ ID NO: 29188 - protein, 264 aa, synthetic construct
ADVSPKPTIFLPSIAETKLQKAGTYLCLLEKFFPDVIKIHWQEKKSNTILGSQEGNTMKTNDTYMKFSWLTVPEKSLDKEHRCIVRHENNKNGVDQEIIFPESSCDVKLVEKSFETDTNLNFQNLSVIGFRILLLKVAGFNLLMTLRLWSSRVKFSRSADAPAYQQGQNQLYNELNLGRREEYDVLDKRRGRDPEMGGKPQRRKNPQEGLYNELQKDKMAEAYSEIGMKGERRRGKGHDGLYQGLSTATKDTYDALHMQALPPR

SEQ ID NO: 29189 - protein, 273 aa, synthetic construct
ADVSPKPTIFLPSIAETKLQKAGTYLCLLEKFFPDVIKIHWQEKKSNTILGSQEGNTMKTNDTYMKFSWLTVPEKSLDKEHRCIVRHENNKNGVDQEIIFPPEDTFFPSPESSCDVKLVEKSFETDTNLNFQNLSVIGFRILLLKVAGFNLLMTLRLWSSRVKFSRSADAPAYQQGQNQLYNELNLGRREEYDVLDKRRGRDPEMGGKPQRRKNPQEGLYNELQKDKMAEAYSEIGMKGERRRGKGHDGLYQGLSTATKDTYDALHMQALPPR

SEQ ID NO: 29190 - protein, 267 aa, synthetic construct
ADVSPKPTIFLPSIAETKLQKAGTYLCLLEKFFPDVIKIHWQEKKSNTILGSQEGNTMKTNDTYMKFSWLTVPEKSLDKEHRCIVRHENNKNGVDQEIIFPGRADCGFTSESYQQGVLSATILYEILLGKATLYAVLVSALVLMAMVKRKDSRGRVKFSRSADAPAYQQGQNQLYNELNLGRREEYDVLDKRRGRDPEMGGKPQRRKNPQEGLYNELQKDKMAEAYSEIGMKGERRRGKGHDGLYQGLSTATKDTYDALHMQALPPR

SEQ ID NO: 29191 - protein, 265 aa, synthetic construct
ADVSPKPTIFLPSIAETKLQKAGTYLCLLEKFFPDVIKIHWQEKKSNTILGSQEGNTMKTNDTYMKFSWLTVPEKSLDKEHRCIVRHENNKNGVDQEIIFPADCGFTSESYQQGVLSATILYEILLGKATLYAVLVSALVLMAMVKRKDSRGRVKFSRSADAPAYQQGQNQLYNELNLGRREEYDVLDKRRGRDPEMGGKPQRRKNPQEGLYNELQKDKMAEAYSEIGMKGERRRGKGHDGLYQGLSTATKDTYDALHMQALPPR

SEQ ID NO: 29192 - protein, 275 aa, synthetic construct
ADVSPKPTIFLPSIAETKLQKAGTYLCLLEKFFPDVIKIHWQEKKSNTILGSQEGNTMKTNDTYMKFSWLTVPEKSLDKEHRCIVRHENNKNGVDQEIIFPQIVSAEAWGRADCGFTSESYQQGVLSATILYEILLGKATLYAVLVSALVLMAMVKRKDSRGRVKFSRSADAPAYQQGQNQLYNELNLGRREEYDVLDKRRGRDPEMGGKPQRRKNPQEGLYNELQKDKMAEAYSEIGMKGERRRGKGHDGLYQGLSTATKDTYDALHMQALPPR

SEQ ID NO: 29193 - protein, 282 aa, synthetic construct
ADVSPKPTIFLPSIAETKLQKAGTYLCLLEKFFPDVIKIHWQEKKSNTILGSQEGNTMKTNDTYMKFSWLTVPEKSLDKEHRCIVRHENNKNGVDQEIIFPEVKTDSTDHVKPKETENTKQPSKSCHKPKAIVHTEKVNMMSLTVLGLRMLFAKTVAVNFLLTAKLFFLRVKFSRSADAPAYQQGQNQLYNELNLGRREEYDVLDKRRGRDPEMGGKPQRRKNPQEGLYNELQKDKMAEAYSEIGMKGERRRGKGHDGLYQGLSTATKDTYDALHMQALPPR

SEQ ID NO: 29194 - protein, 275 aa, synthetic construct
ADVSPKPTIFLPSIAETKLQKAGTYLCLLEKFFPDVIKIHWQEKKSNTILGSQEGNTMKTNDTYMKFSWLTVPEKSLDKEHRCIVRHENNKNGVDQEIIFPDHVKPKETENTKQPSKSCHKPKAIVHTEKVNMMSLTVLGLRMLFAKTVAVNFLLTAKLFFLRVKFSRSADAPAYQQGQNQLYNELNLGRREEYDVLDKRRGRDPEMGGKPQRRKNPQEGLYNELQKDKMAEAYSEIGMKGERRRGKGHDGLYQGLSTATKDTYDALHMQALPPR

SEQ ID NO: 29195 - protein, 282 aa, synthetic construct
ADVSPKPTIFLPSIAETKLQKAGTYLCLLEKFFPDVIKIHWQEKKSNTILGSQEGNTMKTNDTYMKFSWLTVPEKSLDKEHRCIVRHENNKNGVDQEIIFPPIKTDVITIPEDTFFPSPESSCDVKLVEKSFETDTNLNFQNLSVIGFRILLLKVAGFNLLMTLRLWSSRVKFSRSADAPAYQQGQNQLYNELNLGRREEYDVLDKRRGRDPEMGGKPQRRKNPQEGLYNELQKDKMAEAYSEIGMKGERRRGKGHDGLYQGLSTATKDTYDALHMQALPPR

SEQ ID NO: 29196 - protein, 272 aa, synthetic construct
ADVSPKPTIFLPSIAETKLQKAGTYLCLLEKFFPDVIKIHWQEKKSNTILGSQEGNTMKTNDTYMKFSWLTVPEKSLDKEHRCIVRHENNKNGVDQEIIFPPIKTDVITESSCDVKLVEKSFETDTNLNFQNLSVIGFRILLLKVAGFNLLMTLRLWSSRVKFSRSADAPAYQQGQNQLYNELNLGRREEYDVLDKRRGRDPEMGGKPQRRKNPQEGLYNELQKDKMAEAYSEIGMKGERRRGKGHDGLYQGLSTATKDTYDALHMQALPPR

SEQ ID NO: 29197 - protein, 281 aa, synthetic construct
ADVSPKPTIFLPSIAETKLQKAGTYLCLLEKFFPDVIKIHWQEKKSNTILGSQEGNTMKTNDTYMKFSWLTVPEKSLDKEHRCIVRHENNKNGVDQEIIFPPIKTDVITPEDTFFPSPESSCDVKLVEKSFETDTNLNFQNLSVIGFRILLLKVAGFNLLMTLRLWSSRVKFSRSADAPAYQQGQNQLYNELNLGRREEYDVLDKRRGRDPEMGGKPQRRKNPQEGLYNELQKDKMAEAYSEIGMKGERRRGKGHDGLYQGLSTATKDTYDALHMQALPPR

SEQ ID NO: 29198 - protein, 275 aa, synthetic construct
ADVSPKPTIFLPSIAETKLQKAGTYLCLLEKFFPDVIKIHWQEKKSNTILGSQEGNTMKTNDTYMKFSWLTVPEKSLDKEHRCIVRHENNKNGVDQEIIFPPIKTDVITGRADCGFTSESYQQGVLSATILYEILLGKATLYAVLVSALVLMAMVKRKDSRGRVKFSRSADAPAYQQGQNQLYNELNLGRREEYDVLDKRRGRDPEMGGKPQRRKNPQEGLYNELQKDKMAEAYSEIGMKGERRRGKGHDGLYQGLSTATKDTYDALHMQALPPR

SEQ ID NO: 29199 - protein, 273 aa, synthetic construct
ADVSPKPTIFLPSIAETKLQKAGTYLCLLEKFFPDVIKIHWQEKKSNTILGSQEGNTMKTNDTYMKFSWLTVPEKSLDKEHRCIVRHENNKNGVDQEIIFPPIKTDVITADCGFTSESYQQGVLSATILYEILLGKATLYAVLVSALVLMAMVKRKDSRGRVKFSRSADAPAYQQGQNQLYNELNLGRREEYDVLDKRRGRDPEMGGKPQRRKNPQEGLYNELQKDKMAEAYSEIGMKGERRRGKGHDGLYQGLSTATKDTYDALHMQALPPR

SEQ ID NO: 29200 - protein, 283 aa, synthetic construct
ADVSPKPTIFLPSIAETKLQKAGTYLCLLEKFFPDVIKIHWQEKKSNTILGSQEGNTMKTNDTYMKFSWLTVPEKSLDKEHRCIVRHENNKNGVDQEIIFPPIKTDVITQIVSAEAWGRADCGFTSESYQQGVLSATILYEILLGKATLYAVLVSALVLMAMVKRKDSRGRVKFSRSADAPAYQQGQNQLYNELNLGRREEYDVLDKRRGRDPEMGGKPQRRKNPQEGLYNELQKDKMAEAYSEIGMKGERRRGKGHDGLYQGLSTATKDTYDALHMQALPPR

SEQ ID NO: 29201 - protein, 290 aa, synthetic construct
ADVSPKPTIFLPSIAETKLQKAGTYLCLLEKFFPDVIKIHWQEKKSNTILGSQEGNTMKTNDTYMKFSWLTVPEKSLDKEHRCIVRHENNKNGVDQEIIFPPIKTDVITEVKTDSTDHVKPKETENTKQPSKSCHKPKAIVHTEKVNMMSLTVLGLRMLFAKTVAVNFLLTAKLFFLRVKFSRSADAPAYQQGQNQLYNELNLGRREEYDVLDKRRGRDPEMGGKPQRRKNPQEGLYNELQKDKMAEAYSEIGMKGERRRGKGHDGLYQGLSTATKDTYDALHMQALPPR

SEQ ID NO: 29202 - protein, 283 aa, synthetic construct
ADVSPKPTIFLPSIAETKLQKAGTYLCLLEKFFPDVIKIHWQEKKSNTILGSQEGNTMKTNDTYMKFSWLTVPEKSLDKEHRCIVRHENNKNGVDQEIIFPPIKTDVITDHVKPKETENTKQPSKSCHKPKAIVHTEKVNMMSLTVLGLRMLFAKTVAVNFLLTAKLFFLRVKFSRSADAPAYQQGQNQLYNELNLGRREEYDVLDKRRGRDPEMGGKPQRRKNPQEGLYNELQKDKMAEAYSEIGMKGERRRGKGHDGLYQGLSTATKDTYDALHMQALPPR

SEQ ID NO: 29203 - protein, 287 aa, synthetic construct
ADVSPKPTIFLPSIAETKLQKAGTYLCLLEKFFPDVIKIHWQEKKSNTILGSQEGNTMKTNDTYMKFSWLTVPEKSLDKEHRCIVRHENNKNGVDQEIIFPPIKTDVITMDPKDIPEDTFFPSPESSCDVKLVEKSFETDTNLNFQNLSVIGFRILLLKVAGFNLLMTLRLWSSRVKFSRSADAPAYQQGQNQLYNELNLGRREEYDVLDKRRGRDPEMGGKPQRRKNPQEGLYNELQKDKMAEAYSEIGMKGERRRGKGHDGLYQGLSTATKDTYDALHMQALPPR

SEQ ID NO: 29204 - protein, 277 aa, synthetic construct
ADVSPKPTIFLPSIAETKLQKAGTYLCLLEKFFPDVIKIHWQEKKSNTILGSQEGNTMKTNDTYMKFSWLTVPEKSLDKEHRCIVRHENNKNGVDQEIIFPPIKTDVITMDPKDESSCDVKLVEKSFETDTNLNFQNLSVIGFRILLLKVAGFNLLMTLRLWSSRVKFSRSADAPAYQQGQNQLYNELNLGRREEYDVLDKRRGRDPEMGGKPQRRKNPQEGLYNELQKDKMAEAYSEIGMKGERRRGKGHDGLYQGLSTATKDTYDALHMQALPPR

SEQ ID NO: 29205 - protein, 286 aa, synthetic construct
ADVSPKPTIFLPSIAETKLQKAGTYLCLLEKFFPDVIKIHWQEKKSNTILGSQEGNTMKTNDTYMKFSWLTVPEKSLDKEHRCIVRHENNKNGVDQEIIFPPIKTDVITMDPKDPEDTFFPSPESSCDVKLVEKSFETDTNLNFQNLSVIGFRILLLKVAGFNLLMTLRLWSSRVKFSRSADAPAYQQGQNQLYNELNLGRREEYDVLDKRRGRDPEMGGKPQRRKNPQEGLYNELQKDKMAEAYSEIGMKGERRRGKGHDGLYQGLSTATKDTYDALHMQALPPR

SEQ ID NO: 29206 - protein, 280 aa, synthetic construct
ADVSPKPTIFLPSIAETKLQKAGTYLCLLEKFFPDVIKIHWQEKKSNTILGSQEGNTMKTNDTYMKFSWLTVPEKSLDKEHRCIVRHENNKNGVDQEIIFPPIKTDVITMDPKDGRADCGFTSESYQQGVLSATILYEILLGKATLYAVLVSALVLMAMVKRKDSRGRVKFSRSADAPAYQQGQNQLYNELNLGRREEYDVLDKRRGRDPEMGGKPQRRKNPQEGLYNELQKDKMAEAYSEIGMKGERRRGKGHDGLYQGLSTATKDTYDALHMQALPPR

SEQ ID NO: 29207 - protein, 278 aa, synthetic construct
ADVSPKPTIFLPSIAETKLQKAGTYLCLLEKFFPDVIKIHWQEKKSNTILGSQEGNTMKTNDTYMKFSWLTVPEKSLDKEHRCIVRHENNKNGVDQEIIFPPIKTDVITMDPKDADCGFTSESYQQGVLSATILYEILLGKATLYAVLVSALVLMAMVKRKDSRGRVKFSRSADAPAYQQGQNQLYNELNLGRREEYDVLDKRRGRDPEMGGKPQRRKNPQEGLYNELQKDKMAEAYSEIGMKGERRRGKGHDGLYQGLSTATKDTYDALHMQALPPR

SEQ ID NO: 29208 - protein, 288 aa, synthetic construct
ADVSPKPTIFLPSIAETKLQKAGTYLCLLEKFFPDVIKIHWQEKKSNTILGSQEGNTMKTNDTYMKFSWLTVPEKSLDKEHRCIVRHENNKNGVDQEIIFPPIKTDVITMDPKDQIVSAEAWGRADCGFTSESYQQGVLSATILYEILLGKATLYAVLVSALVLMAMVKRKDSRGRVKFSRSADAPAYQQGQNQLYNELNLGRREEYDVLDKRRGRDPEMGGKPQRRKNPQEGLYNELQKDKMAEAYSEIGMKGERRRGKGHDGLYQGLSTATKDTYDALHMQALPPR

SEQ ID NO: 29209 - protein, 295 aa, synthetic construct
ADVSPKPTIFLPSIAETKLQKAGTYLCLLEKFFPDVIKIHWQEKKSNTILGSQEGNTMKTNDTYMKFSWLTVPEKSLDKEHRCIVRHENNKNGVDQEIIFPPIKTDVITMDPKDEVKTDSTDHVKPKETENTKQPSKSCHKPKAIVHTEKVNMMSLTVLGLRMLFAKTVAVNFLLTAKLFFLRVKFSRSADAPAYQQGQNQLYNELNLGRREEYDVLDKRRGRDPEMGGKPQRRKNPQEGLYNELQKDKMAEAYSEIGMKGERRRGKGHDGLYQGLSTATKDTYDALHMQALPPR

SEQ ID NO: 29210 - protein, 288 aa, synthetic construct
ADVSPKPTIFLPSIAETKLQKAGTYLCLLEKFFPDVIKIHWQEKKSNTILGSQEGNTMKTNDTYMKFSWLTVPEKSLDKEHRCIVRHENNKNGVDQEIIFPPIKTDVITMDPKDDHVKPKETENTKQPSKSCHKPKAIVHTEKVNMMSLTVLGLRMLFAKTVAVNFLLTAKLFFLRVKFSRSADAPAYQQGQNQLYNELNLGRREEYDVLDKRRGRDPEMGGKPQRRKNPQEGLYNELQKDKMAEAYSEIGMKGERRRGKGHDGLYQGLSTATKDTYDALHMQALPPR

SEQ ID NO: 29211 - protein, 282 aa, synthetic construct; identical to SEQ ID NO: 29195

SEQ ID NO: 29212 - protein, 272 aa, synthetic construct; identical to SEQ ID NO: 29196

SEQ ID NO: 29213 - protein, 281 aa, synthetic construct; identical to SEQ ID NO: 29197

SEQ ID NO: 29214 - protein, 275 aa, synthetic construct; identical to SEQ ID NO: 29198

SEQ ID NO: 29215 - protein, 273 aa, synthetic construct; identical to SEQ ID NO: 29199

SEQ ID NO: 29216 - protein, 283 aa, synthetic construct; identical to SEQ ID NO: 29200

SEQ ID NO: 29217 - protein, 290 aa, synthetic construct; identical to SEQ ID NO: 29201

SEQ ID NO: 29218 - protein, 283 aa, synthetic construct; identical to SEQ ID NO: 29202

SEQ ID NO: 29219 - protein, 256 aa, synthetic construct
PHTKPSVFVMKNGTNVACLVKEFYPKDIRINLVSSKKITEFDPAIVISPSGKYNAVKLGKYEDSNSVTCSVQHDNKTVHSTDFIPEDTFFPSPESSCDVKLVEKSFETDTNLNFQNLSVIGFRILLLKVAGFNLLMTLRLWSSRVKFSRSADAPAYQQGQNQLYNELNLGRREEYDVLDKRRGRDPEMGGKPQRRKNPQEGLYNELQKDKMAEAYSEIGMKGERRRGKGHDGLYQGLSTATKDTYDALHMQALPPR

SEQ ID NO: 29220 - protein, 246 aa, synthetic construct
PHTKPSVFVMKNGTNVACLVKEFYPKDIRINLVSSKKITEFDPAIVISPSGKYNAVKLGKYEDSNSVTCSVQHDNKTVHSTDFESSCDVKLVEKSFETDTNLNFQNLSVIGFRILLLKVAGFNLLMTLRLWSSRVKFSRSADAPAYQQGQNQLYNELNLGRREEYDVLDKRRGRDPEMGGKPQRRKNPQEGLYNELQKDKMAEAYSEIGMKGERRRGKGHDGLYQGLSTATKDTYDALHMQALPPR

SEQ ID NO: 29221 - protein, 255 aa, synthetic construct
PHTKPSVFVMKNGTNVACLVKEFYPKDIRINLVSSKKITEFDPAIVISPSGKYNAVKLGKYEDSNSVTCSVQHDNKTVHSTDFPEDTFFPSPESSCDVKLVEKSFETDTNLNFQNLSVIGFRILLLKVAGFNLLMTLRLWSSRVKFSRSADAPAYQQGQNQLYNELNLGRREEYDVLDKRRGRDPEMGGKPQRRKNPQEGLYNELQKDKMAEAYSEIGMKGERRRGKGHDGLYQGLSTATKDTYDALHMQALPPR

SEQ ID NO: 29222 - protein, 249 aa, synthetic construct
PHTKPSVFVMKNGTNVACLVKEFYPKDIRINLVSSKKITEFDPAIVISPSGKYNAVKLGKYEDSNSVTCSVQHDNKTVHSTDFGRADCGFTSESYQQGVLSATILYEILLGKATLYAVLVSALVLMAMVKRKDSRGRVKFSRSADAPAYQQGQNQLYNELNLGRREEYDVLDKRRGRDPEMGGKPQRRKNPQEGLYNELQKDKMAEAYSEIGMKGERRRGKGHDGLYQGLSTATKDTYDALHMQALPPR

SEQ ID NO: 29223 - protein, 247 aa, synthetic construct
PHTKPSVFVMKNGTNVACLVKEFYPKDIRINLVSSKKITEFDPAIVISPSGKYNAVKLGKYEDSNSVTCSVQHDNKTVHSTDFADCGFTSESYQQGVLSATILYEILLGKATLYAVLVSALVLMAMVKRKDSRGRVKFSRSADAPAYQQGQNQLYNELNLGRREEYDVLDKRRGRDPEMGGKPQRRKNPQEGLYNELQKDKMAEAYSEIGMKGERRRGKGHDGLYQGLSTATKDTYDALHMQALPPR

SEQ ID NO: 29224 - protein, 257 aa, synthetic construct
PHTKPSVFVMKNGTNVACLVKEFYPKDIRINLVSSKKITEFDPAIVISPSGKYNAVKLGKYEDSNSVTCSVQHDNKTVHSTDFQIVSAEAWGRADCGFTSESYQQGVLSATILYEILLGKATLYAVLVSALVLMAMVKRKDSRGRVKFSRSADAPAYQQGQNQLYNELNLGRREEYDVLDKRRGRDPEMGGKPQRRKNPQEGLYNELQKDKMAEAYSEIGMKGERRRGKGHDGLYQGLSTATKDTYDALHMQALPPR

SEQ ID NO: 29225 - protein, 265 aa, synthetic construct
PHTKPSVFVMKNGTNVACLVKEFYPKDIRINLVSSKKITEFDPAIVISPSGKYNAVKLGKYEDSNSVTCSVQHDNKTVHSTDFFPPIKTDVITMDPKDNCSKDANDTLLLQLTNTSAYYMYLLLLLKSVVYFAIITCCLLRRTAFCCNGEKSRVKFSRSADAPAYQQGQNQLYNELNLGRREEYDVLDKRRGRDPEMGGKPQRRKNPQEGLYNELQKDKMAEAYSEIGMKGERRRGKGHDGLYQGLSTATKDTYDALHMQALPPR

SEQ ID NO: 29226 - protein, 263 aa, synthetic construct
PHTKPSVFVMKNGTNVACLVKEFYPKDIRINLVSSKKITEFDPAIVISPSGKYNAVKLGKYEDSNSVTCSVQHDNKTVHSTDFPIKTDVITMDPKDNCSKDANDTLLLQLTNTSAYYMYLLLLLKSVVYFAIITCCLLRRTAFCCNGEKSRVKFSRSADAPAYQQGQNQLYNELNLGRREEYDVLDKRRGRDPEMGGKPQRRKNPQEGLYNELQKDKMAEAYSEIGMKGERRRGKGHDGLYQGLSTATKDTYDALHMQALPPR

SEQ ID NO: 29227 - protein, 255 aa, synthetic construct
PHTKPSVFVMKNGTNVACLVKEFYPKDIRINLVSSKKITEFDPAIVISPSGKYNAVKLGKYEDSNSVTCSVQHDNKTVHSTDFMDPKDNCSKDANDTLLLQLTNTSAYYMYLLLLLKSVVYFAIITCCLLRRTAFCCNGEKSRVKFSRSADAPAYQQGQNQLYNELNLGRREEYDVLDKRRGRDPEMGGKPQRRKNPQEGLYNELQKDKMAEAYSEIGMKGERRRGKGHDGLYQGLSTATKDTYDALHMQALPPR

SEQ ID NO: 29228 - protein, 264 aa, synthetic construct; identical to SEQ ID NO: 28548

SEQ ID NO: 29229 - protein, 257 aa, synthetic construct
PHTKPSVFVMKNGTNVACLVKEFYPKDIRINLVSSKKITEFDPAIVISPSGKYNAVKLGKYEDSNSVTCSVQHDNKTVHSTDFDHVKPKETENTKQPSKSCHKPKAIVHTEKVNMMSLTVLGLRMLFAKTVAVNFLLTAKLFFLRVKFSRSADAPAYQQGQNQLYNELNLGRREEYDVLDKRRGRDPEMGGKPQRRKNPQEGLYNELQKDKMAEAYSEIGMKGERRRGKGHDGLYQGLSTATKDTYDALHMQALPPR

SEQ ID NO: 29230 - protein, 263 aa, synthetic construct
PHTKPSVFVMKNGTNVACLVKEFYPKDIRINLVSSKKITEFDPAIVISPSGKYNAVKLGKYEDSNSVTCSVQHDNKTVHSTDFEVKTDSTIPEDTFFPSPESSCDVKLVEKSFETDTNLNFQNLSVIGFRILLLKVAGFNLLMTLRLWSSRVKFSRSADAPAYQQGQNQLYNELNLGRREEYDVLDKRRGRDPEMGGKPQRRKNPQEGLYNELQKDKMAEAYSEIGMKGERRRGKGHDGLYQGLSTATKDTYDALHMQALPPR

SEQ ID NO: 29231 - protein, 253 aa, synthetic construct
PHTKPSVFVMKNGTNVACLVKEFYPKDIRINLVSSKKITEFDPAIVISPSGKYNAVKLGKYEDSNSVTCSVQHDNKTVHSTDFEVKTDSTESSCDVKLVEKSFETDTNLNFQNLSVIGFRILLLKVAGFNLLMTLRLWSSRVKFSRSADAPAYQQGQNQLYNELNLGRREEYDVLDKRRGRDPEMGGKPQRRKNPQEGLYNELQKDKMAEAYSEIGMKGERRRGKGHDGLYQGLSTATKDTYDALHMQALPPR

SEQ ID NO: 29232 - protein, 262 aa, synthetic construct
PHTKPSVFVMKNGTNVACLVKEFYPKDIRINLVSSKKITEFDPAIVISPSGKYNAVKLGKYEDSNSVTCSVQHDNKTVHSTDFEVKTDSTPEDTFFPSPESSCDVKLVEKSFETDTNLNFQNLSVIGFRILLLKVAGFNLLMTLRLWSSRVKFSRSADAPAYQQGQNQLYNELNLGRREEYDVLDKRRGRDPEMGGKPQRRKNPQEGLYNELQKDKMAEAYSEIGMKGERRRGKGHDGLYQGLSTATKDTYDALHMQALPPR

SEQ ID NO: 29233 - protein, 256 aa, synthetic construct
PHTKPSVFVMKNGTNVACLVKEFYPKDIRINLVSSKKITEFDPAIVISPSGKYNAVKLGKYEDSNSVTCSVQHDNKTVHSTDFEVKTDSTGRADCGFTSESYQQGVLSATILYEILLGKATLYAVLVSALVLMAMVKRKDSRGRVKFSRSADAPAYQQGQNQLYNELNLGRREEYDVLDKRRGRDPEMGGKPQRRKNPQEGLYNELQKDKMAEAYSEIGMKGERRRGKGHDGLYQGLSTATKDTYDALHMQALPPR

SEQ ID NO: 29234 - protein, 254 aa, synthetic construct
PHTKPSVFVMKNGTNVACLVKEFYPKDIRINLVSSKKITEFDPAIVISPSGKYNAVKLGKYEDSNSVTCSVQHDNKTVHSTDFEVKTDSTADCGFTSESYQQGVLSATILYEILLGKATLYAVLVSALVLMAMVKRKDSRGRVKFSRSADAPAYQQGQNQLYNELNLGRREEYDVLDKRRGRDPEMGGKPQRRKNPQEGLYNELQKDKMAEAYSEIGMKGERRRGKGHDGLYQGLSTATKDTYDALHMQALPPR

SEQ ID NO: 29235 - protein, 264 aa, synthetic construct
PHTKPSVFVMKNGTNVACLVKEFYPKDIRINLVSSKKITEFDPAIVISPSGKYNAVKLGKYEDSNSVTCSVQHDNKTVHSTDFEVKTDSTQIVSAEAWGRADCGFTSESYQQGVLSATILYEILLGKATLYAVLVSALVLMAMVKRKDSRGRVKFSRSADAPAYQQGQNQLYNELNLGRREEYDVLDKRRGRDPEMGGKPQRRKNPQEGLYNELQKDKMAEAYSEIGMKGERRRGKGHDGLYQGLSTATKDTYDALHMQALPPR

SEQ ID NO: 29236 - protein, 272 aa, synthetic construct
PHTKPSVFVMKNGTNVACLVKEFYPKDIRINLVSSKKITEFDPAIVISPSGKYNAVKLGKYEDSNSVTCSVQHDNKTVHSTDFEVKTDSTFPPIKTDVITMDPKDNCSKDANDTLLLQLTNTSAYYMYLLLLLKSVVYFAIITCCLLRRTAFCCNGEKSRVKFSRSADAPAYQQGQNQLYNELNLGRREEYDVLDKRRGRDPEMGGKPQRRKNPQEGLYNELQKDKMAEAYSEIGMKGERRRGKGHDGLYQGLSTATKDTYDALHMQALPPR

SEQ ID NO: 29237 - protein, 270 aa, synthetic construct
PHTKPSVFVMKNGTNVACLVKEFYPKDIRINLVSSKKITEFDPAIVISPSGKYNAVKLGKYEDSNSVTCSVQHDNKTVHSTDFEVKTDSTPIKTDVITMDPKDNCSKDANDTLLLQLTNTSAYYMYLLLLLKSVVYFAIITCCLLRRTAFCCNGEKSRVKFSRSADAPAYQQGQNQLYNELNLGRREEYDVLDKRRGRDPEMGGKPQRRKNPQEGLYNELQKDKMAEAYSEIGMKGERRRGKGHDGLYQGLSTATKDTYDALHMQALPPR

SEQ ID NO: 29238 - protein, 262 aa, synthetic construct
PHTKPSVFVMKNGTNVACLVKEFYPKDIRINLVSSKKITEFDPAIVISPSGKYNAVKLGKYEDSNSVTCSVQHDNKTVHSTDFEVKTDSTMDPKDNCSKDANDTLLLQLTNTSAYYMYLLLLLKSVVYFAIITCCLLRRTAFCCNGEKSRVKFSRSADAPAYQQGQNQLYNELNLGRREEYDVLDKRRGRDPEMGGKPQRRKNPQEGLYNELQKDKMAEAYSEIGMKGERRRGKGHDGLYQGLSTATKDTYDALHMQALPPR

SEQ ID NO: 29239 - protein, 270 aa, synthetic construct; identical to SEQ ID NO: 29237

SEQ ID NO: 29240 - protein, 256 aa, synthetic construct
PHTKPSVFVMKNGTNVACLVKEFYPKDIRINLVSSKKITEFDPAIVISPSGKYNAVKLGKYEDSNSVTCSVQHDNKTVHSTDFEVKTDSTCSKDANDTLLLQLTNTSAYYMYLLLLLKSVVYFAIITCCLLRRTAFCCNGEKSRVKFSRSADAPAYQQGQNQLYNELNLGRREEYDVLDKRRGRDPEMGGKPQRRKNPQEGLYNELQKDKMAEAYSEIGMKGERRRGKGHDGLYQGLSTATKDTYDALHMQALPPR

SEQ ID NO: 29241 - protein, 256 aa, synthetic construct; identical to SEQ ID NO: 29219

SEQ ID NO: 29242 - protein, 246 aa, synthetic construct; identical to SEQ ID NO: 29220

SEQ ID NO: 29243 - protein, 255 aa, synthetic construct; identical to SEQ ID NO: 29221

SEQ ID NO: 29244 - protein, 249 aa, synthetic construct; identical to SEQ ID NO: 29222

SEQ ID NO: 29245 - protein, 247 aa, synthetic construct; identical to SEQ ID NO: 29223

SEQ ID NO: 29246 - protein, 257 aa, synthetic construct; identical to SEQ ID NO: 29224

SEQ ID NO: 29247 - protein, 265 aa, synthetic construct; identical to SEQ ID NO: 29225

SEQ ID NO: 29248 - protein, 263 aa, synthetic construct; identical to SEQ ID NO: 29226

SEQ ID NO: 29249 - protein, 255 aa, synthetic construct; identical to SEQ ID NO: 29227

SEQ ID NO: 29250 - protein, 263 aa, synthetic construct; identical to SEQ ID NO: 29226

SEQ ID NO: 29251 - protein, 249 aa, synthetic construct
PHTKPSVFVMKNGTNVACLVKEFYPKDIRINLVSSKKITEFDPAIVISPSGKYNAVKLGKYEDSNSVTCSVQHDNKTVHSTDFCSKDANDTLLLQLTNTSAYYMYLLLLLKSVVYFAIITCCLLRRTAFCCNGEKSRVKFSRSADAPAYQQGQNQLYNELNLGRREEYDVLDKRRGRDPEMGGKPQRRKNPQEGLYNELQKDKMAEAYSEIGMKGERRRGKGHDGLYQGLSTATKDTYDALHMQALPPR

SEQ ID NO: 29252 - protein, 263 aa, synthetic construct; identical to SEQ ID NO: 29230

SEQ ID NO: 29253 - protein, 253 aa, synthetic construct; identical to SEQ ID NO: 29231

SEQ ID NO: 29254 - protein, 262 aa, synthetic construct; identical to SEQ ID NO: 29232

SEQ ID NO: 29255 - protein, 256 aa, synthetic construct; identical to SEQ ID NO: 29233

SEQ ID NO: 29256 - protein, 254 aa, synthetic construct; identical to SEQ ID NO: 29234

SEQ ID NO: 29257 - protein, 264 aa, synthetic construct; identical to SEQ ID NO: 29235

SEQ ID NO: 29258 - protein, 272 aa, synthetic construct; identical to SEQ ID NO: 29236

SEQ ID NO: 29259 - protein, 270 aa, synthetic construct; identical to SEQ ID NO: 29237

SEQ ID NO: 29260 - protein, 262 aa, synthetic construct; identical to SEQ ID NO: 29238

SEQ ID NO: 29261 - protein, 270 aa, synthetic construct; identical to SEQ ID NO: 29237

SEQ ID NO: 29262 - protein, 256 aa, synthetic construct; identical to SEQ ID NO: 29240

SEQ ID NO: 29263 - protein, 253 aa, synthetic construct
IQNPDPAVYQLRDSKSSDKSVCLFTDFDSQTNVSQSKDSDVYITDKCVLDMRSMDFKSNSAVAWSNKSDFACANAFNNSIIPEDTFFPSPESSCDVKLVEKSFETDTNLNFQNLSVIGLRMLFAKTVAVNFLLTAKLFFLRVKFSRSADAPAYQQGQNQLYNELNLGRREEYDVLDKRRGRDPEMGGKPQRRKNPQEGLYNELQKDKMAEAYSEIGMKGERRRGKGHDGLYQGLSTATKDTYDALHMQALPPR

SEQ ID NO: 29264 - protein, 253 aa, synthetic construct
IQNPDPAVYQLRDSKSSDKSVCLFTDFDSQTNVSQSKDSDVYITDKCVLDMRSMDFKSNSAVAWSNKSDFACANAFNNSIIPEDTFFPSPESSCDVKLVEKSFETDTNLNFQNLSVLGLRMLFAKTVAVNFLLTAKLFFLRVKFSRSADAPAYQQGQNQLYNELNLGRREEYDVLDKRRGRDPEMGGKPQRRKNPQEGLYNELQKDKMAEAYSEIGMKGERRRGKGHDGLYQGLSTATKDTYDALHMQALPPR

SEQ ID NO: 29265 - protein, 253 aa, synthetic construct; identical to SEQ ID NO: 29264

SEQ ID NO: 29266 - protein, 266 aa, synthetic construct
SQPHTKPSVFVMKNGTNVACLVKEFYPKDIRINLVSSKKITEFDPAIVISPSGKYNAVKLGKYEDSNSVTCSVQHDNKTVHSTDFEVKTDSTDHVKPKETENTKQPSKSCHKPKAIVHTEKVNMMSLTVLGFRILLLKVAGFNLLMTLRLWSSRVKFSRSADAPAYQQGQNQLYNELNLGRREEYDVLDKRRGRDPEMGGKPQRRKNPQEGLYNELQKDKMAEAYSEIGMKGERRRGKGHDGLYQGLSTATKDTYDALHMQALPPR

SEQ ID NO: 29267 - protein, 266 aa, synthetic construct
SQPHTKPSVFVMKNGTNVACLVKEFYPKDIRINLVSSKKITEFDPAIVISPSGKYNAVKLGKYEDSNSVTCSVQHDNKTVHSTDFEVKTDSTDHVKPKETENTKQPSKSCHKPKAIVHTEKVNMMSLTVIGFRILLLKVAGFNLLMTLRLWSSRVKFSRSADAPAYQQGQNQLYNELNLGRREEYDVLDKRRGRDPEMGGKPQRRKNPQEGLYNELQKDKMAEAYSEIGMKGERRRGKGHDGLYQGLSTATKDTYDALHMQALPPR

SEQ ID NO: 29268 - protein, 293 aa, synthetic construct
EDLKNVFPPEVAVFEPSEAEISHTQKATLVCLATGFYPDHVELSWWVNGKEVHSGVCTDPQPLKEQPALNDSRYCLSSRLRVSATFWQNPRNHFRCQVQFYGLSENDEWTQDRAKPVTQIVSAEAWGRADCGFTSESYQQGVLSATILYLLLLLKSVVYFAIITCCLLRRTAFCCNGEKSRVKFSRSADAPAYQQGQNQLYNELNLGRREEYDVLDKRRGRDPEMGGKPQRRKNPQEGLYNELQKDKMAEAYSEIGMKGERRRGKGHDGLYQGLSTATKDTYDALHMQALPPR

SEQ ID NO: 29269 - protein, 293 aa, synthetic construct
EDLKNVFPPEVAVFEPSEAEISHTQKATLVCLATGFYPDHVELSWWVNGKEVHSGVCTDPQPLKEQPALNDSRYCLSSRLRVSATFWQNPRNHFRCQVQFYGLSENDEWTQDRAKPVTQIVSAEAWGRADCGFTSESYQQGVLSAYYMYLLLLLKSVVYFAIITCCLLRRTAFCCNGEKSRVKFSRSADAPAYQQGQNQLYNELNLGRREEYDVLDKRRGRDPEMGGKPQRRKNPQEGLYNELQKDKMAEAYSEIGMKGERRRGKGHDGLYQGLSTATKDTYDALHMQALPPR

SEQ ID NO: 29270 - protein, 285 aa, synthetic construct
DKQLDADVSPKPTIFLPSIAETKLQKAGTYLCLLEKFFPDVIKIHWQEKKSNTILGSQEGNTMKTNDTYMKFSWLTVPEKSLDKEHRCIVRHENNKNGVDQEIIFPPIKTDVITMDPKDNCSKDANDTLLLQLTNTSAYYMYEILLGKATLYAVLVSALVLMAMVKRKDSRGRVKFSRSADAPAYQQGQNQLYNELNLGRREEYDVLDKRRGRDPEMGGKPQRRKNPQEGLYNELQKDKMAEAYSEIGMKGERRRGKGHDGLYQGLSTATKDTYDALHMQALPPR

SEQ ID NO: 29271 - protein, 285 aa, synthetic construct
DKQLDADVSPKPTIFLPSIAETKLQKAGTYLCLLEKFFPDVIKIHWQEKKSNTILGSQEGNTMKTNDTYMKFSWLTVPEKSLDKEHRCIVRHENNKNGVDQEIIFPPIKTDVITMDPKDNCSKDANDTLLLQLTNTSATILYEILLGKATLYAVLVSALVLMAMVKRKDSRGRVKFSRSADAPAYQQGQNQLYNELNLGRREEYDVLDKRRGRDPEMGGKPQRRKNPQEGLYNELQKDKMAEAYSEIGMKGERRRGKGHDGLYQGLSTATKDTYDALHMQALPPR

SEQ ID NO: 29272 - protein, 292 aa, synthetic construct
EDLKNVFPPEVAVFEPSEAEISHTQKATLVCLATGFYPDHVELSWWVNGKEVHSGVCTDPQPLKEQPALNDSRYCLSSRLRVSATFWQNPRNHFRCQVQFYGLSENDEWTQDRAKPVTQIVSAEAWGRADSGFTSESYQQGVLSATILYEILLGKATLYAVLVSALVLMAMVKRKDSRGRVKFSRSADAPAYQQGQNQLYNELNLGRREEYDVLDKRRGRDPEMGGKPQRRKNPQEGLYNELQKDKMAEAYSEIGMKGERRRGKGHDGLYQGLSTATKDTYDALHMQALPPR

SEQ ID NO: 29273 - protein, 253 aa, synthetic construct
IQNPDPAVYQLRDSKSSDKSVCLFTDFDSQTNVSQSKDSDVYITDKCVLDMRSMDFKSNSAVAWSNKSDFACANAFNNSIIPEDTFFPSPESSSDVKLVEKSFETDTNLNFQNLSVIGFRILLLKVAGFNLLMTLRLWSSRVKFSRSADAPAYQQGQNQLYNELNLGRREEYDVLDKRRGRDPEMGGKPQRRKNPQEGLYNELQKDKMAEAYSEIGMKGERRRGKGHDGLYQGLSTATKDTYDALHMQALPPR

SEQ ID NO: 29274 - protein, 292 aa, synthetic construct
EDLKNVFPPEVAVFEPSEAEISHTQKATLVCLATGFYPDHVELSWWVNGKEVHSGVCTDPQPLKEQPALNDSRYCLSSRLRVSATFWQNPRNHFRCQVQFYGLSENDEWTQDRAKPVTQIVSAEAWGRADGGFTSESYQQGVLSATILYEILLGKATLYAVLVSALVLMAMVKRKDSRGRVKFSRSADAPAYQQGQNQLYNELNLGRREEYDVLDKRRGRDPEMGGKPQRRKNPQEGLYNELQKDKMAEAYSEIGMKGERRRGKGHDGLYQGLSTATKDTYDALHMQALPPR

SEQ ID NO: 29275 - protein, 253 aa, synthetic construct
IQNPDPAVYQLRDSKSSDKSVCLFTDFDSQTNVSQSKDSDVYITDKCVLDMRSMDFKSNSAVAWSNKSDFACANAFNNSIIPEDTFFPSPESSRDVKLVEKSFETDTNLNFQNLSVIGFRILLLKVAGFNLLMTLRLWSSRVKFSRSADAPAYQQGQNQLYNELNLGRREEYDVLDKRRGRDPEMGGKPQRRKNPQEGLYNELQKDKMAEAYSEIGMKGERRRGKGHDGLYQGLSTATKDTYDALHMQALPPR

SEQ ID NO: 29276 - protein, 295 aa, synthetic construct
DIQNPDPAVYQLRDSKSSDKSVCLFTDFDSQTNVSQSKDSDVYITDKTVLDMRSMDFKSNSAVAWSNKSDFACANAFNNSIIPEDTFFPSPESSCDVKLVEKSFETDTNLNFQNLSVIGFRILLLKVAGFNLLMTLRLWSSRSKRSRLLHSDYMNMTPRRPGPTRKHYQPYAPPRDFAAYRSRVKFSRSADAPAYQQGQNQLYNELNLGRREEYDVLDKRRGRDPEMGGKPQRRKNPQEGLYNELQKDKMAEAYSEIGMKGERRRGKGHDGLYQGLSTATKDTYDALHMQALPPR

SEQ ID NO: 29277 - protein, 294 aa, synthetic construct
IQNPDPAVYQLRDSKSSDKSVCLFTDFDSQTNVSQSKDSDVYITDKTVLDMRSMDFKSNSAVAWSNKSDFACANAFNNSIIPEDTFFPSPESSCDVKLVEKSFETDTNLNFQNLSVIGFRILLLKVAGFNLLMTLRLWSSRSKRSRLLHSDYMNMTPRRPGPTRKHYQPYAPPRDFAAYRSRVKFSRSADAPAYQQGQNQLYNELNLGRREEYDVLDKRRGRDPEMGGKPQRRKNPQEGLYNELQKDKMAEAYSEIGMKGERRRGKGHDGLYQGLSTATKDTYDALHMQALPPR

SEQ ID NO: 29278 - protein, 294 aa, synthetic construct
IQNPDPAVYQLRDSKSSDKSVCLFTDFDSQTNVSQSKDSDVYITDKCVLDMRSMDFKSNSAVAWSNKSDFACANAFNNSIIPEDTFFPSSDVPCDVKLVEKSFETDTNLNFQNLSVIGFRILLLKVAGFNLLMTLRLWSSRSKRSRLLHSDYMNMTPRRPGPTRKHYQPYAPPRDFAAYRSRVKFSRSADAPAYQQGQNQLYNELNLGRREEYDVLDKRRGRDPEMGGKPQRRKNPQEGLYNELQKDKMAEAYSEIGMKGERRRGKGHDGLYQGLSTATKDTYDALHMQALPPR

SEQ ID NO: 29279 - protein, 294 aa, synthetic construct; identical to SEQ ID NO: 29277

SEQ ID NO: 29280 - protein, 291 aa, synthetic construct
PDPAVYQLRDSKSSDKSVCLFTDFDSQTNVSQSKDSDVYITDKTVLDMRSMDFKSNSAVAWSNKSDFACANAFNNSIIPEDTFFPSPESSCDVKLVEKSFETDTNLNFQNLSVIGFRILLLKVAGFNLLMTLRLWSSRSKRSRLLHSDYMNMTPRRPGPTRKHYQPYAPPRDFAAYRSRVKFSRSADAPAYQQGQNQLYNELNLGRREEYDVLDKRRGRDPEMGGKPQRRKNPQEGLYNELQKDKMAEAYSEIGMKGERRRGKGHDGLYQGLSTATKDTYDALHMQALPPR

SEQ ID NO: 29281 - protein, 294 aa, synthetic construct
IQNPDPAVYQLRDSKSSDKSVCLFTDFDSQTNVSQSKDSDVYITDKCVLDMRSMDFKSNSAVAWSNKSDFACANAFNNSIIPEDTFFPSPESSCDVKLVEKSFETDTNLNFQNLSVIGFRILLLKVAGFNLLMTLRLWSSRSKRSRLLHSDYMNMTPRRPGPTRKHYQPYAPPRDFAAYRSRVKFSRSADAPAYQQGQNQLYNELNLGRREEYDVLDKRRGRDPEMGGKPQRRKNPQEGLYNELQKDKMAEAYSEIGMKGERRRGKGHDGLYQGLSTATKDTYDALHMQALPPR

SEQ ID NO: 29282 - protein, 291 aa, synthetic construct
PDPAVYQLRDSKSSDKSVCLFTDFDSQTNVSQSKDSDVYITDKCVLDMRSMDFKSNSAVAWSNKSDFACANAFNNSIIPEDTFFPSPESSCDVKLVEKSFETDTNLNFQNLSVIGFRILLLKVAGFNLLMTLRLWSSRSKRSRLLHSDYMNMTPRRPGPTRKHYQPYAPPRDFAAYRSRVKFSRSADAPAYQQGQNQLYNELNLGRREEYDVLDKRRGRDPEMGGKPQRRKNPQEGLYNELQKDKMAEAYSEIGMKGERRRGKGHDGLYQGLSTATKDTYDALHMQALPPR

SEQ ID NO: 29283 - protein, 294 aa, synthetic construct
IQNPDPAVYQLRDSKSSDKSVCLFTDFDSQTNVSQSKDSDVYITDKTVLDMRSMDFKSNSAVAWSNKSDFACANAFNNSIIPEDTFFPSSDVPCDVKLVEKSFETDTNLNFQNLSVIGFRILLLKVAGFNLLMTLRLWSSRSKRSRLLHSDYMNMTPRRPGPTRKHYQPYAPPRDFAAYRSRVKFSRSADAPAYQQGQNQLYNELNLGRREEYDVLDKRRGRDPEMGGKPQRRKNPQEGLYNELQKDKMAEAYSEIGMKGERRRGKGHDGLYQGLSTATKDTYDALHMQALPPR

SEQ ID NO: 29284 - protein, 294 aa, synthetic construct
IQNPDPAVYQLRDSKSSDKSVCLFTDFDSQTNVSQSKDSDVYITDKTVLDMRSMDFKSNRAVAWSNKSDFACANAFNNSIIPEDTFFPSPESSCDVKLVEKSFETDTNLNFQNLSVIGFRILLLKVAGFNLLMTLRLWSSRSKRSRLLHSDYMNMTPRRPGPTRKHYQPYAPPRDFAAYRSRVKFSRSADAPAYQQGQNQLYNELNLGRREEYDVLDKRRGRDPEMGGKPQRRKNPQEGLYNELQKDKMAEAYSEIGMKGERRRGKGHDGLYQGLSTATKDTYDALHMQALPPR

SEQ ID NO: 29285 - protein, 294 aa, synthetic construct
IQNPDPAVYQLRDSKSSDKSVCLFTDFDSQTNVSQSKDSDVYITDKTVLDMRSMDFKSNRAVAWSNKSDFACANAFNNSIIPEDTFFPSSDVPCDVKLVEKSFETDTNLNFQNLSVIGFRILLLKVAGFNLLMTLRLWSSRSKRSRLLHSDYMNMTPRRPGPTRKHYQPYAPPRDFAAYRSRVKFSRSADAPAYQQGQNQLYNELNLGRREEYDVLDKRRGRDPEMGGKPQRRKNPQEGLYNELQKDKMAEAYSEIGMKGERRRGKGHDGLYQGLSTATKDTYDALHMQALPPR

SEQ ID NO: 29286 - protein, 294 aa, synthetic construct
IQNPDPAVYQLRDSKSSDKSVCLFTDFDSQTNVSQSKDSDVYITDKTVLDMRSMDFKSNSAVAWSNKSDFACANAFNNSIIPEDTFFPSSDSSCDVKLVEKSFETDTNLNFQNLSVIGFRILLLKVAGFNLLMTLRLWSSRSKRSRLLHSDYMNMTPRRPGPTRKHYQPYAPPRDFAAYRSRVKFSRSADAPAYQQGQNQLYNELNLGRREEYDVLDKRRGRDPEMGGKPQRRKNPQEGLYNELQKDKMAEAYSEIGMKGERRRGKGHDGLYQGLSTATKDTYDALHMQALPPR

SEQ ID NO: 29287 - protein, 393 aa, synthetic construct
IQNPDPAVYQLRDSKSSDKSVCLFTDFDSQTNVSQSKDSDVYITDKTVLDMRSMDFKSNSAVAWSNKSDFACANAFNNSIIPEDTFFPSPESSCGTQSFGLLDPKLCYLLDGILFIYGVILTALFLRVKFSRSADAPAYQQGQNQLYNELNLGRREEYDVLDKRRGRDPEMGGKPQRRKNPQEGLYNELQKDKMAEAYSEIGMKGERRRGKGHDGLYQGLSTATKDTYDALHMQALPPRRSKRSRLLHSDYMNMTPRRPGPTRKHYQPYAPPRDFAAYRSRVKFSRSADAPAYQQGQNQLYNELNLGRREEYDVLDKRRGRDPEMGGKPQRRKNPQEGLYNELQKDKMAEAYSEIGMKGERRRGKGHDGLYQGLSTATKDTYDALHMQALPPR

SEQ ID NO: 29288 - protein, 290 aa, synthetic construct
IQNPEPAVYQLKDPRSQDSTLCLFTDFDSQINVPKTMESGTFITDKTVLDMKAMDSKSNGAIAWSNQTSFTCQDIFKETNATYPSSDVPCDATLTEKSFETDMNLNFQNLSVMGLRILLLKVAGFNLLMTLRLWSSRSKRSRLLHSDYMNMTPRRPGPTRKHYQPYAPPRDFAAYRSRVKFSRSADAPAYQQGQNQLYNELNLGRREEYDVLDKRRGRDPEMGGKPQRRKNPQEGLYNELQKDKMAEAYSEIGMKGERRRGKGHDGLYQGLSTATKDTYDALHMQALPPR

SEQ ID NO: 29289 - protein, 287 aa, synthetic construct
VQDPDPSVYQMRSPKTGRTVCLFTDFDSQADFQKPEGATVISLNSTVLDMKVMDSKSNGALTWNSETNIECKENFQQPFYPSSNYSCDAKLIEKSFETDMDLNFYNLLVIGLRILLLKVIGFNLFMTLRLWSCRSKRSRLLHSDYMNMTPRRPGPTRKHYQPYAPPRDFAAYRSRVKFSRSADAPAYQQGQNQLYNELNLGRREEYDVLDKRRGRDPEMGGKPQRRKNPQEGLYNELQKDKMAEAYSEIGMKGERRRGKGHDGLYQGLSTATKDTYDALHMQALPPR

SEQ ID NO: 29290 - protein, 331 aa, synthetic construct
EDLNKVFPPEVAVFEPSEAEISHTQKATLVCLATGFFPDHVELSWWVNGKEVHSGVSTDPQPLKEQPALNDSRYCLSSRLRVSATFWQNPRNHFRCQVQFYGLSENDEWTQDRAKPVTQIVSAEAWGRADCGFTSVSYQQGVLSATILYEILLGKATLYAVLVSALVLMAMVKRKDFRSKRSRLLHSDYMNMTPRRPGPTRKHYQPYAPPRDFAAYRSRVKFSRSADAPAYQQGQNQLYNELNLGRREEYDVLDKRRGRDPEMGGKPQRRKNPQEGLYNELQKDKMAEAYSEIGMKGERRRGKGHDGLYQGLSTATKDTYDALHMQALPPR

SEQ ID NO: 29291 - protein, 333 aa, synthetic construct
EDLKNVFPPEVAVFEPSEAEISHTQKATLVCLATGFYPDHVELSWWVNGKEVHSGVSTDPQPLKEQPALNDSRYCLSSRLRVSATFWQNPRNHFRCQVQFYGLSENDEWTQDRAKPVTQIVSAEAWGRADCGFTSESYQQGVLSATILYEILLGKATLYAVLVSALVLMAMVKRKDSRGRSKRSRLLHSDYMNMTPRRPGPTRKHYQPYAPPRDFAAYRSRVKFSRSADAPAYQQGQNQLYNELNLGRREEYDVLDKRRGRDPEMGGKPQRRKNPQEGLYNELQKDKMAEAYSEIGMKGERRRGKGHDGLYQGLSTATKDTYDALHMQALPPR

SEQ ID NO: 29292 - protein, 333 aa, synthetic construct; identical to SEQ ID NO: 29291

SEQ ID NO: 29293 - protein, 333 aa, synthetic construct
EDLKNVFPPEVAVFEPSEAEISHTQKATLVCLATGFYPDHVELSWWVNGKEVHSGVCTDPQPLKEQPALNDSRYCLSSRLRVSATFWQNPRNHFRCQVQFYGLSENDEWTQDRAKPVTQIVSAEAWGRADCGFTSESYQQGVLSATILYEILLGKATLYAVLVSALVLMAMVKRKDSRGRSKRSRLLHSDYMNMTPRRPGPTRKHYQPYAPPRDFAAYRSRVKFSRSADAPAYQQGQNQLYNELNLGRREEYDVLDKRRGRDPEMGGKPQRRKNPQEGLYNELQKDKMAEAYSEIGMKGERRRGKGHDGLYQGLSTATKDTYDALHMQALPPR

SEQ ID NO: 29294 - protein, 333 aa, synthetic construct
EDLKNVFPPEVAVFEPSKAEIAHTQKATLVCLATGFYPDHVELSWWVNGKEVHSGVCTDPQPLKEQPALNDSRYCLSSRLRVSATFWQNPRNHFRCQVQFYGLSENDEWTQDRAKPVTQIVSAEAWGRADCGITSASYHQGVLSATILYEILLGKATLYAVLVSALVLMAMVKRKDSRGRSKRSRLLHSDYMNMTPRRPGPTRKHYQPYAPPRDFAAYRSRVKFSRSADAPAYQQGQNQLYNELNLGRREEYDVLDKRRGRDPEMGGKPQRRKNPQEGLYNELQKDKMAEAYSEIGMKGERRRGKGHDGLYQGLSTATKDTYDALHMQALPPR

SEQ ID NO: 29295 - protein, 333 aa, synthetic construct; identical to SEQ ID NO: 29291

SEQ ID NO: 29296 - protein, 332 aa, synthetic construct
DLKNVFPPEVAVFEPSEAEISHTQKATLVCLATGFYPDHVELSWWVNGKEVHSGVSTDPQPLKEQPALNDSRYCLSSRLRVSATFWQNPRNHFRCQVQFYGLSENDEWTQDRAKPVTQIVSAEAWGRADCGFTSESYQQGVLSATILYEILLGKATLYAVLVSALVLMAMVKRKDSRGRSKRSRLLHSDYMNMTPRRPGPTRKHYQPYAPPRDFAAYRSRVKFSRSADAPAYQQGQNQLYNELNLGRREEYDVLDKRRGRDPEMGGKPQRRKNPQEGLYNELQKDKMAEAYSEIGMKGERRRGKGHDGLYQGLSTATKDTYDALHMQALPPR

SEQ ID NO: 29297 - protein, 331 aa, synthetic construct
EDLKNVFPPEVAVFEPSEAEISHTQKATLVCLATGFFPDHVELSWWVNGKEVHSGVSTDPQPLKEQPALNDSRYCLSSRLRVSATFWQNPRNHFRCQVQFYGLSENDEWTQDRAKPVTQIVSAEAWGRADCGFTSESYQQGVLSATILYEILLGKATLYAVLVSALVLMAMVKRKDFRSKRSRLLHSDYMNMTPRRPGPTRKHYQPYAPPRDFAAYRSRVKFSRSADAPAYQQGQNQLYNELNLGRREEYDVLDKRRGRDPEMGGKPQRRKNPQEGLYNELQKDKMAEAYSEIGMKGERRRGKGHDGLYQGLSTATKDTYDALHMQALPPR

SEQ ID NO: 29298 - protein, 331 aa, synthetic construct; identical to SEQ ID NO: 29290

SEQ ID NO: 29299 - protein, 333 aa, synthetic construct
EDLKNVFPPEVAVFEPSKAEIAHTQKATLVCLATGFYPDHVELSWWVNGKEVHSGVSTDPQPLKEQPALNDSRYCLSSRLRVSATFWQNPRNHFRCQVQFYGLSENDEWTQDRAKPVTQIVSAEAWGRADCGITSASYHQGVLSATILYEILLGKATLYAVLVSALVLMAMVKRKDSRGRSKRSRLLHSDYMNMTPRRPGPTRKHYQPYAPPRDFAAYRSRVKFSRSADAPAYQQGQNQLYNELNLGRREEYDVLDKRRGRDPEMGGKPQRRKNPQEGLYNELQKDKMAEAYSEIGMKGERRRGKGHDGLYQGLSTATKDTYDALHMQALPPR

SEQ ID NO: 29300 - protein, 333 aa, synthetic construct
EDLKNVFPPEVAVFEPSKAEIAHTQKATLVCLATGFYPDHVELSWWVNGKEVHSGVSTDPQPLKEQPALNDSRYCLSSRLRVSATFWQNPRNHFRCQVQFYGLSENDEWTQDRAKPVTQIVSAEAWGRADCGFTSESYQQGVLSATILYEILLGKATLYAVLVSALVLMAMVKRKDSRGRSKRSRLLHSDYMNMTPRRPGPTRKHYQPYAPPRDFAAYRSRVKFSRSADAPAYQQGQNQLYNELNLGRREEYDVLDKRRGRDPEMGGKPQRRKNPQEGLYNELQKDKMAEAYSEIGMKGERRRGKGHDGLYQGLSTATKDTYDALHMQALPPR

SEQ ID NO: 29301 - protein, 333 aa, synthetic construct
EDLKNVFPPEVAVFEPSKAEISHTQKATLVCLATGFYPDHVELSWWVNGKEVHSGVSTDPQPLKEQPALNDSRYCLSSRLRVSATFWQNPRNHFRCQVQFYGLSENDEWTQDRAKPVTQIVSAEAWGRADCGITSESYQQGVLSATILYEILLGKATLYAVLVSALVLMAMVKRKDSRGRSKRSRLLHSDYMNMTPRRPGPTRKHYQPYAPPRDFAAYRSRVKFSRSADAPAYQQGQNQLYNELNLGRREEYDVLDKRRGRDPEMGGKPQRRKNPQEGLYNELQKDKMAEAYSEIGMKGERRRGKGHDGLYQGLSTATKDTYDALHMQALPPR

SEQ ID NO: 29302 - protein, 333 aa, synthetic construct
EDLKNVFPPEVAVFEPSKAEISHTQKATLVCLATGFYPDHVELSWWVNGKEVHSGVSTDPQPLKEQPALNDSRYCLSSRLRVSATFWQNPRNHFRCQVQFYGLSENDEWTQDRAKPVTQIVSAEAWGRADCGFTSASYQQGVLSATILYEILLGKATLYAVLVSALVLMAMVKRKDSRGRSKRSRLLHSDYMNMTPRRPGPTRKHYQPYAPPRDFAAYRSRVKFSRSADAPAYQQGQNQLYNELNLGRREEYDVLDKRRGRDPEMGGKPQRRKNPQEGLYNELQKDKMAEAYSEIGMKGERRRGKGHDGLYQGLSTATKDTYDALHMQALPPR

SEQ ID NO: 29303 - protein, 333 aa, synthetic construct
EDLKNVFPPEVAVFEPSKAEISHTQKATLVCLATGFYPDHVELSWWVNGKEVHSGVSTDPQPLKEQPALNDSRYCLSSRLRVSATFWQNPRNHFRCQVQFYGLSENDEWTQDRAKPVTQIVSAEAWGRADCGFTSESYHQGVLSATILYEILLGKATLYAVLVSALVLMAMVKRKDSRGRSKRSRLLHSDYMNMTPRRPGPTRKHYQPYAPPRDFAAYRSRVKFSRSADAPAYQQGQNQLYNELNLGRREEYDVLDKRRGRDPEMGGKPQRRKNPQEGLYNELQKDKMAEAYSEIGMKGERRRGKGHDGLYQGLSTATKDTYDALHMQALPPR

SEQ ID NO: 29304 - protein, 333 aa, synthetic construct
EDLKNVFPPEVAVFEPSRAEIAHTQKATLVCLATGFYPDHVELSWWVNGKEVHSGVSTDPQPLKEQPALNDSRYCLSSRLRVSATFWQNPRNHFRCQVQFYGLSENDEWTQDRAKPVTQIVSAEAWGRADCGFTSESYQQGVLSATILYEILLGKATLYAVLVSALVLMAMVKRKDSRGRSKRSRLLHSDYMNMTPRRPGPTRKHYQPYAPPRDFAAYRSRVKFSRSADAPAYQQGQNQLYNELNLGRREEYDVLDKRRGRDPEMGGKPQRRKNPQEGLYNELQKDKMAEAYSEIGMKGERRRGKGHDGLYQGLSTATKDTYDALHMQALPPR

SEQ ID NO: 29305 - protein, 333 aa, synthetic construct
EDLKNVFPPEVAVFEPSRAEISHTQKATLVCLATGFYPDHVELSWWVNGKEVHSGVSTDPQPLKEQPALNDSRYCLSSRLRVSATFWQNPRNHFRCQVQFYGLSENDEWTQDRAKPVTQIVSAEAWGRADCGFTSESYQQGVLSATILYEILLGKATLYAVLVSALVLMAMVKRKDSRGRSKRSRLLHSDYMNMTPRRPGPTRKHYQPYAPPRDFAAYRSRVKFSRSADAPAYQQGQNQLYNELNLGRREEYDVLDKRRGRDPEMGGKPQRRKNPQEGLYNELQKDKMAEAYSEIGMKGERRRGKGHDGLYQGLSTATKDTYDALHMQALPPR

SEQ ID NO: 29306 - protein, 333 aa, synthetic construct
EDLKNVFPPEVAVFEPSKAEIAHTQKATLVCLATGFYPDHVELSWWVNGKEVHSGVSTDPQPLKEQPALNDSRYCLSSGLRVSATFWQNPRNHFRCQVQFYGLSENDEWTQDRAKPVTQIVSAEAWGRADCGITSASYHQGVLSATILYEILLGKATLYAVLVSALVLMAMVKRKDSRGRSKRSRLLHSDYMNMTPRRPGPTRKHYQPYAPPRDFAAYRSRVKFSRSADAPAYQQGQNQLYNELNLGRREEYDVLDKRRGRDPEMGGKPQRRKNPQEGLYNELQKDKMAEAYSEIGMKGERRRGKGHDGLYQGLSTATKDTYDALHMQALPPR

SEQ ID NO: 29307 - protein, 333 aa, synthetic construct
EDLKNVFPPEVAVFEPSKAEIAHTQKATLVCLATGFYPDHVELSWWVNGKEVHSGVSTDPQPLKEQPALNDSRYCLSSGLRVSATFWQNPRNHFRCQVQFYGLSENDEWTQDRAKPVTQIVSAEAWGRADCGFTSESYQQGVLSATILYEILLGKATLYAVLVSALVLMAMVKRKDSRGRSKRSRLLHSDYMNMTPRRPGPTRKHYQPYAPPRDFAAYRSRVKFSRSADAPAYQQGQNQLYNELNLGRREEYDVLDKRRGRDPEMGGKPQRRKNPQEGLYNELQKDKMAEAYSEIGMKGERRRGKGHDGLYQGLSTATKDTYDALHMQALPPR

SEQ ID NO: 29308 - protein, 333 aa, synthetic construct
EDLKNVFPPEVAVFEPSEAEISHTQKATLVCLATGFYPDHVELSWWVNGKEVHSGVSTDPQPLKEQPALNDSRYCLSSGLRVSATFWQNPRNHFRCQVQFYGLSENDEWTQDRAKPVTQIVSAEAWGRADCGFTSESYQQGVLSATILYEILLGKATLYAVLVSALVLMAMVKRKDSRGRSKRSRLLHSDYMNMTPRRPGPTRKHYQPYAPPRDFAAYRSRVKFSRSADAPAYQQGQNQLYNELNLGRREEYDVLDKRRGRDPEMGGKPQRRKNPQEGLYNELQKDKMAEAYSEIGMKGERRRGKGHDGLYQGLSTATKDTYDALHMQALPPR

SEQ ID NO: 29309 - protein, 325 aa, synthetic construct
EDLRNVTPPKVSLFEPSKAEIANKQKATLVCLARGFFPDHVELSWWVNGKEVHSGVSTDPQAYKESNYSYCLSSRLRVSATFWHNPRNHFRCQVQFHGLSEEDKWPEGSPKPVTQNISAEAWGRACGITSSYQQGVLSATILYEILLGKATLYAVLVSTLVVMAMVKRKNSRSKRSRLLHSDYMNMTPRRPGPTRKHYQPYAPPRDFAAYRSRVKFSRSADAPAYQQGQNQLYNELNLGRREEYDVLDKRRGRDPEMGGKPQRRKNPQEGLYNELQKDKMAEAYSEIGMKGERRRGKGHDGLYQGLSTATKDTYDALHMQALPPR

SEQ ID NO: 29310 - protein, 331 aa, synthetic construct
EDLQKVTPPTVTVFEPSEAEISRTQKATLVCLARGFYPDHVELSWWVNGKEVTSGFSTDPQPDKERPSENDSSYCLSSRLRVSASFWHNPRNHFRCQVQFYGLGDDDEWKYDRVKPITQNISAEAWGRADCGFTSVSYHQGVLSATILYEILLGKATLYAVLVSILVLMAKVKRKGSRSKRSRLLHSDYMNMTPRRPGPTRKHYQPYAPPRDFAAYRSRVKFSRSADAPAYQQGQNQLYNELNLGRREEYDVLDKRRGRDPEMGGKPQRRKNPQEGLYNELQKDKMAEAYSEIGMKGERRRGKGHDGLYQGLSTATKDTYDALHMQALPPR

SEQ ID NO: 29311 - protein, 430 aa, synthetic construct
EDLKNVFPPEVAVFEPSEAEISHTQKATLVCLATGFYPDHVELSWWVNGKEVHSGVSTDPQPLKEQPALNDSRYCLSSRLRVSATFWQNPRNHFRCQVQFYGLSENDEWTQDRAKPVTQIVSAEAWGRADCGSQSFGLLDPKLCYLLDGILFIYGVILTALFLRVKFSRSADAPAYQQGQNQLYNELNLGRREEYDVLDKRRGRDPEMGGKPQRRKNPQEGLYNELQKDKMAEAYSEIGMKGERRRGKGHDGLYQGLSTATKDTYDALHMQALPPRRSKRSRLLHSDYMNMTPRRPGPTRKHYQPYAPPRDFAAYRSRVKFSRSADAPAYQQGQNQLYNELNLGRREEYDVLDKRRGRDPEMGGKPQRRKNPQEGLYNELQKDKMAEAYSEIGMKGERRRGKGHDGLYQGLSTATKDTYDALHMQALPPR

SEQ ID NO: 29312 - protein, 423 aa, synthetic construct
GCPALPTGVGGTPFPSLAPPIMLLVDGKQQMVVVCLVLDVAPPGLDSPIWFSAGNGSALDAFTYGPSPATDGTWTNLAHLSLPSEELASWEPLVCHTGPGAEGHSRSTQPMHLSGEASTARTCPQEPLRGTPGGALWLGVLRLLLFKLLLFDLLLTCSCLCDPAGPLPSPATTTRLRALGSHRLHPATETGGREATSSPRPQPRDRRWGDTPPGRKPGSPVWGEGSYLSSYPTCPAQAWCSRSRLRAPSSSLGAFFAGDLPPPLQAGAARSKRSRLLHSDYMNMTPRRPGPTRKHYQPYAPPRDFAAYRSRVKFSRSADAPAYQQGQNQLYNELNLGRREEYDVLDKRRGRDPEMGGKPQRRKNPQEGLYNELQKDKMAEAYSEIGMKGERRRGKGHDGLYQGLSTATKDTYDALHMQALPPR

SEQ ID NO: 29313 - protein, 412 aa, synthetic construct
TPFPSLAPPIMLLVDGKQQMVVVCLVLDVAPPGLDSPIWFSAGNGSALDAFTYGPSPATDGTWTNLAHLSLPSEELASWEPLVCHTGPGAEGHSRSTQPMHLSGEASTARTCPQEPLRGTPGGALWLGVLRLLLFKLLLFDLLLTCSCLCDPAGPLPSPATTTRLRALGSHRLHPATETGGREATSSPRPQPRDRRWGDTPPGRKPGSPVWGEGSYLSSYPTCPAQAWCSRSALRAPSSSLGAFFAGDLPPPLQAGAARSKRSRLLHSDYMNMTPRRPGPTRKHYQPYAPPRDFAAYRSRVKFSRSADAPAYQQGQNQLYNELNLGRREEYDVLDKRRGRDPEMGGKPQRRKNPQEGLYNELQKDKMAEAYSEIGMKGERRRGKGHDGLYQGLSTATKDTYDALHMQALPPR

SEQ ID NO: 29314 - protein, 364 aa, synthetic construct
TPFPSLAPPIMLLVDGKQQMVVVCLVLDVAPPGLDSPIWFSAGNGSALDAFTYGPSPATDGTWTNLAHLSLPSEELASWEPLVCHTGPGAEGHSRSTQPMHLSGEASTARTCPQEPLRGTPGGALWLGVLRLLLFKLLLFDLLLTCSCLCDPAGPLPSPATTTRLRALGSHRLHPATETGGREATSSPRPQPRDRRWGDTPPGRKPGSPVRSKRSRLLHSDYMNMTPRRPGPTRKHYQPYAPPRDFAAYRSRVKFSRSADAPAYQQGQNQLYNELNLGRREEYDVLDKRRGRDPEMGGKPQRRKNPQEGLYNELQKDKMAEAYSEIGMKGERRRGKGHDGLYQGLSTATKDTYDALHMQALPPR

SEQ ID NO: 29315 - protein, 343 aa, synthetic construct
DKQLDADVSPKPTIFLPSIAETKLQKAGTYLCLLEKFFPDIIKIHWQEKKSNTILGSQEGNTMKTNDTYMKFSWLTVPEESLDKEHRCIVRHENNKNGIDQEIIFPPIKTDVTTVDPKYNYSKDANDVITMDPKDNWSKDANDTLLLQLTNTSAYYMYLLLLLKSVVYFAIITCCLLGRTAFCCNGEKSRSKRSRLLHSDYMNMTPRRPGPTRKHYQPYAPPRDFAAYRSRVKFSRSADAPAYQQGQNQLYNELNLGRREEYDVLDKRRGRDPEMGGKPQRRKNPQEGLYNELQKDKMAEAYSEIGMKGERRRGKGHDGLYQGLSTATKDTYDALHMQALPPR

SEQ ID NO: 29316 - protein, 327 aa, synthetic construct
DKQLDADVSPKPTIFLPSIAETKLQKAGTYLCLLEKFFPDVIKIHWQEKKSNTILGSQEGNTMKTNDTYMKFSWLTVPEKSLDKEHRCIVRHENNKNGVDQEIIFPPIKTDVITMDPKDNCSKDANDTLLLQLTNTSAYYMYLLLLLKSVVYFAIITCCLLRRTAFCCNGEKSRSKRSRLLHSDYMNMTPRRPGPTRKHYQPYAPPRDFAAYRSRVKFSRSADAPAYQQGQNQLYNELNLGRREEYDVLDKRRGRDPEMGGKPQRRKNPQEGLYNELQKDKMAEAYSEIGMKGERRRGKGHDGLYQGLSTATKDTYDALHMQALPPR

SEQ ID NO: 29317 - protein, 307 aa, synthetic construct
SQPHTKPSVFVMKNGTNVACLVKEFYPKDIRINLVSSKKITEFDPAIVISPSGKYNAVKLGKYEDSNSVTCSVQHDNKTVHSTDFEVKTDSTDHVKPKETENTKQPSKSCHKPKAIVHTEKVNMMSLTVLGLRMLFAKTVAVNFLLTAKLFFLRSKRSRLLHSDYMNMTPRRPGPTRKHYQPYAPPRDFAAYRSRVKFSRSADAPAYQQGQNQLYNELNLGRREEYDVLDKRRGRDPEMGGKPQRRKNPQEGLYNELQKDKMAEAYSEIGMKGERRRGKGHDGLYQGLSTATKDTYDALHMQALPPR

SEQ ID NO: 29318 - protein, 307 aa, synthetic construct; identical to SEQ ID NO: 29317

SEQ ID NO: 29319 - protein, 261 aa, synthetic construct
IQNPDPAVYITDKTVLDMRSMDFKSNSAVAWSNKSDFACANAFNNSIIPEDTFFPSPESSCDVKLVEKSFETDTNLNFQNLSVIGFRILLLKVAGFNLLMTLRLWSSRSKRSRLLHSDYMNMTPRRPGPTRKHYQPYAPPRDFAAYRSRVKFSRSADAPAYQQGQNQLYNELNLGRREEYDVLDKRRGRDPEMGGKPQRRKNPQEGLYNELQKDKMAEAYSEIGMKGERRRGKGHDGLYQGLSTATKDTYDALHMQALPPR

SEQ ID NO: 29320 - protein, 333 aa, synthetic construct
EDLKNVFPPEVAVFEPSRAEISHTQKATLVCLATGFYPDHVELSWWVNGKEVHSGVCTDPQPLKEQPALNDSRYCLSSRLRVSATFWQNPRNHFRCQVQFYGLSENDEWTQDRAKPVTQIVSAEAWGRADCGFTSESYQQGVLSATILYEILLGKATLYAVLVSALVLMAMVKRKDSRGRSKRSRLLHSDYMNMTPRRPGPTRKHYQPYAPPRDFAAYRSRVKFSRSADAPAYQQGQNQLYNELNLGRREEYDVLDKRRGRDPEMGGKPQRRKNPQEGLYNELQKDKMAEAYSEIGMKGERRRGKGHDGLYQGLSTATKDTYDALHMQALPPR

SEQ ID NO: 29321 - protein, 333 aa, synthetic construct
EDLKNVFPPEVAVFEPSRAEIAHTQKATLVCLATGFYPDHVELSWWVNGKEVHSGVCTDPQPLKEQPALNDSRYCLSSRLRVSATFWQNPRNHFRCQVQFYGLSENDEWTQDRAKPVTQIVSAEAWGRADCGFTSESYQQGVLSATILYEILLGKATLYAVLVSALVLMAMVKRKDSRGRSKRSRLLHSDYMNMTPRRPGPTRKHYQPYAPPRDFAAYRSRVKFSRSADAPAYQQGQNQLYNELNLGRREEYDVLDKRRGRDPEMGGKPQRRKNPQEGLYNELQKDKMAEAYSEIGMKGERRRGKGHDGLYQGLSTATKDTYDALHMQALPPR

SEQ ID NO: 29322 - protein, 214 aa, synthetic construct
IPEDTFFPSPESSCDVKLVEKSFETDTNLNFQNLSVIGFRILLLKVAGFNLLMTLRLWSSRSKRSRLLHSDYMNMTPRRPGPTRKHYQPYAPPRDFAAYRSRVKFSRSADAPAYQQGQNQLYNELNLGRREEYDVLDKRRGRDPEMGGKPQRRKNPQEGLYNELQKDKMAEAYSEIGMKGERRRGKGHDGLYQGLSTATKDTYDALHMQALPPR

SEQ ID NO: 29323 - protein, 204 aa, synthetic construct
ESSCDVKLVEKSFETDTNLNFQNLSVIGFRILLLKVAGFNLLMTLRLWSSRSKRSRLLHSDYMNMTPRRPGPTRKHYQPYAPPRDFAAYRSRVKFSRSADAPAYQQGQNQLYNELNLGRREEYDVLDKRRGRDPEMGGKPQRRKNPQEGLYNELQKDKMAEAYSEIGMKGERRRGKGHDGLYQGLSTATKDTYDALHMQALPPR

SEQ ID NO: 29324 - protein, 333 aa, synthetic construct; identical to SEQ ID NO: 29293

SEQ ID NO: 29325 - protein, 269 aa, synthetic construct
EQPALNDSRYCLSSRLRVSATFWQNPRNHFRCQVQFYGLSENDEWTQDRAKPVTQIVSAEAWGRADCGFTSESYQQGVLSATILYEILLGKATLYAVLVSALVLMAMVKRKDSRGRSKRSRLLHSDYMNMTPRRPGPTRKHYQPYAPPRDFAAYRSRVKFSRSADAPAYQQGQNQLYNELNLGRREEYDVLDKRRGRDPEMGGKPQRRKNPQEGLYNELQKDKMAEAYSEIGMKGERRRGKGHDGLYQGLSTATKDTYDALHMQALPPR

SEQ ID NO: 29326 - protein, 207 aa, synthetic construct
GRADCGFTSESYQQGVLSATILYEILLGKATLYAVLVSALVLMAMVKRKDSRGRSKRSRLLHSDYMNMTPRRPGPTRKHYQPYAPPRDFAAYRSRVKFSRSADAPAYQQGQNQLYNELNLGRREEYDVLDKRRGRDPEMGGKPQRRKNPQEGLYNELQKDKMAEAYSEIGMKGERRRGKGHDGLYQGLSTATKDTYDALHMQALPPR

SEQ ID NO: 29327 - protein, 205 aa, synthetic construct
ADCGFTSESYQQGVLSATILYEILLGKATLYAVLVSALVLMAMVKRKDSRGRSKRSRLLHSDYMNMTPRRPGPTRKHYQPYAPPRDFAAYRSRVKFSRSADAPAYQQGQNQLYNELNLGRREEYDVLDKRRGRDPEMGGKPQRRKNPQEGLYNELQKDKMAEAYSEIGMKGERRRGKGHDGLYQGLSTATKDTYDALHMQALPPR

SEQ ID NO: 29328 - protein, 327 aa, synthetic construct; identical to SEQ ID NO: 29316

SEQ ID NO: 29329 - protein, 322 aa, synthetic construct
ADVSPKPTIFLPSIAETKLQKAGTYLCLLEKFFPDVIKIHWQEKKSNTILGSQEGNTMKTNDTYMKFSWLTVPEKSLDKEHRCIVRHENNKNGVDQEIIFPPIKTDVITMDPKDNCSKDANDTLLLQLTNTSAYYMYLLLLLKSVVYFAIITCCLLRRTAFCCNGEKSRSKRSRLLHSDYMNMTPRRPGPTRKHYQPYAPPRDFAAYRSRVKFSRSADAPAYQQGQNQLYNELNLGRREEYDVLDKRRGRDPEMGGKPQRRKNPQEGLYNELQKDKMAEAYSEIGMKGERRRGKGHDGLYQGLSTATKDTYDALHMQALPPR

SEQ ID NO: 29330 - protein, 320 aa, synthetic construct
VSPKPTIFLPSIAETKLQKAGTYLCLLEKFFPDVIKIHWQEKKSNTILGSQEGNTMKTNDTYMKFSWLTVPEKSLDKEHRCIVRHENNKNGVDQEIIFPPIKTDVITMDPKDNCSKDANDTLLLQLTNTSAYYMYLLLLLKSVVYFAIITCCLLRRTAFCCNGEKSRSKRSRLLHSDYMNMTPRRPGPTRKHYQPYAPPRDFAAYRSRVKFSRSADAPAYQQGQNQLYNELNLGRREEYDVLDKRRGRDPEMGGKPQRRKNPQEGLYNELQKDKMAEAYSEIGMKGERRRGKGHDGLYQGLSTATKDTYDALHMQALPPR

SEQ ID NO: 29331 - protein, 315 aa, synthetic construct
TIFLPSIAETKLQKAGTYLCLLEKFFPDVIKIHWQEKKSNTILGSQEGNTMKTNDTYMKFSWLTVPEKSLDKEHRCIVRHENNKNGVDQEIIFPPIKTDVITMDPKDNCSKDANDTLLLQLTNTSAYYMYLLLLLKSVVYFAIITCCLLRRTAFCCNGEKSRSKRSRLLHSDYMNMTPRRPGPTRKHYQPYAPPRDFAAYRSRVKFSRSADAPAYQQGQNQLYNELNLGRREEYDVLDKRRGRDPEMGGKPQRRKNPQEGLYNELQKDKMAEAYSEIGMKGERRRGKGHDGLYQGLSTATKDTYDALHMQALPPR

SEQ ID NO: 29332 - protein, 221 aa, synthetic construct
PIKTDVITMDPKDNCSKDANDTLLLQLTNTSAYYMYLLLLLKSVVYFAIITCCLLRRTAFCCNGEKSRSKRSRLLHSDYMNMTPRRPGPTRKHYQPYAPPRDFAAYRSRVKFSRSADAPAYQQGQNQLYNELNLGRREEYDVLDKRRGRDPEMGGKPQRRKNPQEGLYNELQKDKMAEAYSEIGMKGERRRGKGHDGLYQGLSTATKDTYDALHMQALPPR

SEQ ID NO: 29333 - protein, 213 aa, synthetic construct
MDPKDNCSKDANDTLLLQLTNTSAYYMYLLLLLKSVVYFAIITCCLLRRTAFCCNGEKSRSKRSRLLHSDYMNMTPRRPGPTRKHYQPYAPPRDFAAYRSRVKFSRSADAPAYQQGQNQLYNELNLGRREEYDVLDKRRGRDPEMGGKPQRRKNPQEGLYNELQKDKMAEAYSEIGMKGERRRGKGHDGLYQGLSTATKDTYDALHMQALPPR

SEQ ID NO: 29334 - protein, 307 aa, synthetic construct; identical to SEQ ID NO: 29317

SEQ ID NO: 29335 - protein, 222 aa, synthetic construct
EVKTDSTDHVKPKETENTKQPSKSCHKPKAIVHTEKVNMMSLTVLGLRMLFAKTVAVNFLLTAKLFFLRSKRSRLLHSDYMNMTPRRPGPTRKHYQPYAPPRDFAAYRSRVKFSRSADAPAYQQGQNQLYNELNLGRREEYDVLDKRRGRDPEMGGKPQRRKNPQEGLYNELQKDKMAEAYSEIGMKGERRRGKGHDGLYQGLSTATKDTYDALHMQALPPR

SEQ ID NO: 29336 - protein, 215 aa, synthetic construct
DHVKPKETENTKQPSKSCHKPKAIVHTEKVNMMSLTVLGLRMLFAKTVAVNFLLTAKLFFLRSKRSRLLHSDYMNMTPRRPGPTRKHYQPYAPPRDFAAYRSRVKFSRSADAPAYQQGQNQLYNELNLGRREEYDVLDKRRGRDPEMGGKPQRRKNPQEGLYNELQKDKMAEAYSEIGMKGERRRGKGHDGLYQGLSTATKDTYDALHMQALPPR

SEQ ID NO: 29337 - protein, 331 aa, synthetic construct
EDLKNVFPPEVAVFEPSEAEISHTQKATLVCLATGFYPDHVELSWWVNGKEVHSGVCTDPQPLKEQPALNDSRYCLSSRLRVSATFWQNPRNHFRCQVQFYGLSENDEWTQDRAKPVTQIVSAEAWGRADCDVKLVEKSFETDTNLNFQNLSVIGFRILLLKVAGFNLLMTLRLWSSRSKRSRLLHSDYMNMTPRRPGPTRKHYQPYAPPRDFAAYRSRVKFSRSADAPAYQQGQNQLYNELNLGRREEYDVLDKRRGRDPEMGGKPQRRKNPQEGLYNELQKDKMAEAYSEIGMKGERRRGKGHDGLYQGLSTATKDTYDALHMQALPPR

SEQ ID NO: 29338 - protein, 296 aa, synthetic construct
IQNPDPAVYQLRDSKSSDKSVCLFTDFDSQTNVSQSKDSDVYITDKCVLDMRSMDFKSNSAVAWSNKSDFACANAFNNSIIPEDTFFPSPESSCGFTSESYQQGVLSATILYEILLGKATLYAVLVSALVLMAMVKRKDSRGRSKRSRLLHSDYMNMTPRRPGPTRKHYQPYAPPRDFAAYRSRVKFSRSADAPAYQQGQNQLYNELNLGRREEYDVLDKRRGRDPEMGGKPQRRKNPQEGLYNELQKDKMAEAYSEIGMKGERRRGKGHDGLYQGLSTATKDTYDALHMQALPPR

SEQ ID NO: 29339 - protein, 328 aa, synthetic construct
EDLKNVFPPEVAVFEPSEAEISHTQKATLVCLATGFYPDHVELSWWVNGKEVHSGVCTDPQPLKEQPALNDSRYCLSSRLRVSATFWQNPRNHFRCQVQFYGLSENDEWTQDRAKPVTQIVSAEAWGRADCGFTSESYQQGVLSATNLSVIGFRILLLKVAGFNLLMTLRLWSSRSKRSRLLHSDYMNMTPRRPGPTRKHYQPYAPPRDFAAYRSRVKFSRSADAPAYQQGQNQLYNELNLGRREEYDVLDKRRGRDPEMGGKPQRRKNPQEGLYNELQKDKMAEAYSEIGMKGERRRGKGHDGLYQGLSTATKDTYDALHMQALPPR

SEQ ID NO: 29340 - protein, 299 aa, synthetic construct
IQNPDPAVYQLRDSKSSDKSVCLFTDFDSQTNVSQSKDSDVYITDKCVLDMRSMDFKSNSAVAWSNKSDFACANAFNNSIIPEDTFFPSPESSCDVKLVEKSFETDTNLNFQILYEILLGKATLYAVLVSALVLMAMVKRKDSRGRSKRSRLLHSDYMNMTPRRPGPTRKHYQPYAPPRDFAAYRSRVKFSRSADAPAYQQGQNQLYNELNLGRREEYDVLDKRRGRDPEMGGKPQRRKNPQEGLYNELQKDKMAEAYSEIGMKGERRRGKGHDGLYQGLSTATKDTYDALHMQALPPR

SEQ ID NO: 29341 - protein, 314 aa, synthetic construct
IQNPDPAVYQLRDSKSSDKSVCLFTDFDSQTNVSQSKDSDVYITDKCVLDMRSMDFKSNSAVAWSNKSDFACANAFNNSIIPEDTFFPSPESSDSTDHVKPKETENTKQPSKSCHKPKAIVHTEKVNMMSLTVLGLRMLFAKTVAVNFLLTAKLFFLLTARSKRSRLLHSDYMNMTPRRPGPTRKHYQPYAPPRDFAAYRSRVKFSRSADAPAYQQGQNQLYNELNLGRREEYDVLDKRRGRDPEMGGKPQRRKNPQEGLYNELQKDKMAEAYSEIGMKGERRRGKGHDGLYQGLSTATKDTYDALHMQALPPR

SEQ ID NO: 29342 - protein, 417 aa, synthetic construct
EDLKNVFPPEVAVFEPSEAEISHTQKATLVCLATGFYPDHVELSWWVNGKEVHSGVCTDPQPLKEQPALNDSRYCLSSRLRVSATFWQNPRNHFRCQVQFYGLSENDEWTQDRAKPVTQIVSAEAWGRADDVIKIHWQEKKSNTILGSQEGNTMKTNDTYMKFSWLTVPEKSLDKEHRCIVRHENNKNGVDQEIIFPPIKTDVITMDPKDNCSKDANDTLLLQLTNTSAYYMYLLLLLKSVVYFAIITCCLLMAMVKRKDSRGRSKRSRLLHSDYMNMTPRRPGPTRKHYQPYAPPRDFAAYRSRVKFSRSADAPAYQQGQNQLYNELNLGRREEYDVLDKRRGRDPEMGGKPQRRKNPQEGLYNELQKDKMAEAYSEIGMKGERRRGKGHDGLYQGLSTATKDTYDALHMQALPPR

SEQ ID NO: 29343 - protein, 331 aa, synthetic construct
EDLKNVFPPEVAVFEPSEAEISHTQKATLVCLATGFYPDHVELSWWVNGKEVHSGVSTDPQPLKEQPALNDSRYCLSSRLRVSATFWQNPRNHFRCQVQFYGLSENDEWTQDRAKPVTQIVSAEAWGRADCDVKLVEKSFETDTNLNFQNLSVIGFRILLLKVAGFNLLMTLRLWSSRSKRSRLLHSDYMNMTPRRPGPTRKHYQPYAPPRDFAAYRSRVKFSRSADAPAYQQGQNQLYNELNLGRREEYDVLDKRRGRDPEMGGKPQRRKNPQEGLYNELQKDKMAEAYSEIGMKGERRRGKGHDGLYQGLSTATKDTYDALHMQALPPR

SEQ ID NO: 29344 - protein, 296 aa, synthetic construct
IQNPDPAVYQLRDSKSSDKSVCLFTDFDSQTNVSQSKDSDVYITDKTVLDMRSMDFKSNSAVAWSNKSDFACANAFNNSIIPEDTFFPSPESSCGFTSESYQQGVLSATILYEILLGKATLYAVLVSALVLMAMVKRKDSRGRSKRSRLLHSDYMNMTPRRPGPTRKHYQPYAPPRDFAAYRSRVKFSRSADAPAYQQGQNQLYNELNLGRREEYDVLDKRRGRDPEMGGKPQRRKNPQEGLYNELQKDKMAEAYSEIGMKGERRRGKGHDGLYQGLSTATKDTYDALHMQALPPR

SEQ ID NO: 29345 - protein, 328 aa, synthetic construct
EDLKNVFPPEVAVFEPSEAEISHTQKATLVCLATGFYPDHVELSWWVNGKEVHSGVSTDPQPLKEQPALNDSRYCLSSRLRVSATFWQNPRNHFRCQVQFYGLSENDEWTQDRAKPVTQIVSAEAWGRADCGFTSESYQQGVLSATNLSVIGFRILLLKVAGFNLLMTLRLWSSRSKRSRLLHSDYMNMTPRRPGPTRKHYQPYAPPRDFAAYRSRVKFSRSADAPAYQQGQNQLYNELNLGRREEYDVLDKRRGRDPEMGGKPQRRKNPQEGLYNELQKDKMAEAYSEIGMKGERRRGKGHDGLYQGLSTATKDTYDALHMQALPPR

SEQ ID NO: 29346 - protein, 299 aa, synthetic construct
IQNPDPAVYQLRDSKSSDKSVCLFTDFDSQTNVSQSKDSDVYITDKTVLDMRSMDFKSNSAVAWSNKSDFACANAFNNSIIPEDTFFPSPESSCDVKLVEKSFETDTNLNFQILYEILLGKATLYAVLVSALVLMAMVKRKDSRGRSKRSRLLHSDYMNMTPRRPGPTRKHYQPYAPPRDFAAYRSRVKFSRSADAPAYQQGQNQLYNELNLGRREEYDVLDKRRGRDPEMGGKPQRRKNPQEGLYNELQKDKMAEAYSEIGMKGERRRGKGHDGLYQGLSTATKDTYDALHMQALPPR

SEQ ID NO: 29347 - protein, 314 aa, synthetic construct
IQNPDPAVYQLRDSKSSDKSVCLFTDFDSQTNVSQSKDSDVYITDKTVLDMRSMDFKSNSAVAWSNKSDFACANAFNNSIIPEDTFFPSPESSDSTDHVKPKETENTKQPSKSCHKPKAIVHTEKVNMMSLTVLGLRMLFAKTVAVNFLLTAKLFFLLTARSKRSRLLHSDYMNMTPRRPGPTRKHYQPYAPPRDFAAYRSRVKFSRSADAPAYQQGQNQLYNELNLGRREEYDVLDKRRGRDPEMGGKPQRRKNPQEGLYNELQKDKMAEAYSEIGMKGERRRGKGHDGLYQGLSTATKDTYDALHMQALPPR

SEQ ID NO: 29348 - protein, 417 aa, synthetic construct
EDLKNVFPPEVAVFEPSEAEISHTQKATLVCLATGFYPDHVELSWWVNGKEVHSGVSTDPQPLKEQPALNDSRYCLSSRLRVSATFWQNPRNHFRCQVQFYGLSENDEWTQDRAKPVTQIVSAEAWGRADDVIKIHWQEKKSNTILGSQEGNTMKTNDTYMKFSWLTVPEKSLDKEHRCIVRHENNKNGVDQEIIFPPIKTDVITMDPKDNCSKDANDTLLLQLTNTSAYYMYLLLLLKSVVYFAIITCCLLMAMVKRKDSRGRSKRSRLLHSDYMNMTPRRPGPTRKHYQPYAPPRDFAAYRSRVKFSRSADAPAYQQGQNQLYNELNLGRREEYDVLDKRRGRDPEMGGKPQRRKNPQEGLYNELQKDKMAEAYSEIGMKGERRRGKGHDGLYQGLSTATKDTYDALHMQALPPR

SEQ ID NO: 29349 - protein, 311 aa, synthetic construct
IQNPDPAVYQLRDSKSSDKSVCLFTDFDSQTNVSQSKDSDVYITDKCVLDMRSMDFKSNSAVAWSNKSDFACANAFNNSIIPEDTFFPSPESSDSTDHVKPKETENTKQPSKSCHKPKAIVHTEKVNMMSLTVLGLRMLFAKTVAVNFLLTAKLFFLRSKRSRLLHSDYMNMTPRRPGPTRKHYQPYAPPRDFAAYRSRVKFSRSADAPAYQQGQNQLYNELNLGRREEYDVLDKRRGRDPEMGGKPQRRKNPQEGLYNELQKDKMAEAYSEIGMKGERRRGKGHDGLYQGLSTATKDTYDALHMQALPPR

SEQ ID NO: 29350 - protein, 418 aa, synthetic construct
EDLKNVFPPEVAVFEPSEAEISHTQKATLVCLATGFYPDHVELSWWVNGKEVHSGVCTDPQPLKEQPALNDSRYCLSSRLRVSATFWQNPRNHFRCQVQFYGLSENDEWTQDRAKPVTQIVSAEAWGRADDVIKIHWQEKKSNTILGSQEGNTMKTNDTYMKFSWLTVPEKSLDKEHRCIVRHENNKNGVDQEIIFPPIKTDVITMDPKDNCSKDANDTLLLQLTNTSAYYMYLLLLLKSVVYFAIITCCLLRRTAFCCNGEKSRSKRSRLLHSDYMNMTPRRPGPTRKHYQPYAPPRDFAAYRSRVKFSRSADAPAYQQGQNQLYNELNLGRREEYDVLDKRRGRDPEMGGKPQRRKNPQEGLYNELQKDKMAEAYSEIGMKGERRRGKGHDGLYQGLSTATKDTYDALHMQALPPR

SEQ ID NO: 29351 - protein, 311 aa, synthetic construct
IQNPDPAVYQLRDSKSSDKSVCLFTDFDSQTNVSQSKDSDVYITDKTVLDMRSMDFKSNSAVAWSNKSDFACANAFNNSIIPEDTFFPSPESSDSTDHVKPKETENTKQPSKSCHKPKAIVHTEKVNMMSLTVLGLRMLFAKTVAVNFLLTAKLFFLRSKRSRLLHSDYMNMTPRRPGPTRKHYQPYAPPRDFAAYRSRVKFSRSADAPAYQQGQNQLYNELNLGRREEYDVLDKRRGRDPEMGGKPQRRKNPQEGLYNELQKDKMAEAYSEIGMKGERRRGKGHDGLYQGLSTATKDTYDALHMQALPPR

SEQ ID NO: 29352 - protein, 418 aa, synthetic construct
EDLKNVFPPEVAVFEPSEAEISHTQKATLVCLATGFYPDHVELSWWVNGKEVHSGVSTDPQPLKEQPALNDSRYCLSSRLRVSATFWQNPRNHFRCQVQFYGLSENDEWTQDRAKPVTQIVSAEAWGRADDVIKIHWQEKKSNTILGSQEGNTMKTNDTYMKFSWLTVPEKSLDKEHRCIVRHENNKNGVDQEIIFPPIKTDVITMDPKDNCSKDANDTLLLQLTNTSAYYMYLLLLLKSVVYFAIITCCLLRRTAFCCNGEKSRSKRSRLLHSDYMNMTPRRPGPTRKHYQPYAPPRDFAAYRSRVKFSRSADAPAYQQGQNQLYNELNLGRREEYDVLDKRRGRDPEMGGKPQRRKNPQEGLYNELQKDKMAEAYSEIGMKGERRRGKGHDGLYQGLSTATKDTYDALHMQALPPR

SEQ ID NO: 29353 - protein, 296 aa, synthetic construct; identical to SEQ ID NO: 29338

SEQ ID NO: 29354 - protein, 295 aa, synthetic construct
QNPDPAVYQLRDSKSSDKSVCLFTDFDSQTNVSQSKDSDVYITDKCVLDMRSMDFKSNSAVAWSNKSDFACANAFNNSIIPEDTFFPSPESSCGFTSESYQQGVLSATILYEILLGKATLYAVLVSALVLMAMVKRKDSRGRSKRSRLLHSDYMNMTPRRPGPTRKHYQPYAPPRDFAAYRSRVKFSRSADAPAYQQGQNQLYNELNLGRREEYDVLDKRRGRDPEMGGKPQRRKNPQEGLYNELQKDKMAEAYSEIGMKGERRRGKGHDGLYQGLSTATKDTYDALHMQALPPR

SEQ ID NO: 29355 - protein, 294 aa, synthetic construct
NPDPAVYQLRDSKSSDKSVCLFTDFDSQTNVSQSKDSDVYITDKCVLDMRSMDFKSNSAVAWSNKSDFACANAFNNSIIPEDTFFPSPESSCGFTSESYQQGVLSATILYEILLGKATLYAVLVSALVLMAMVKRKDSRGRSKRSRLLHSDYMNMTPRRPGPTRKHYQPYAPPRDFAAYRSRVKFSRSADAPAYQQGQNQLYNELNLGRREEYDVLDKRRGRDPEMGGKPQRRKNPQEGLYNELQKDKMAEAYSEIGMKGERRRGKGHDGLYQGLSTATKDTYDALHMQALPPR

SEQ ID NO: 29356 - protein, 293 aa, synthetic construct
PDPAVYQLRDSKSSDKSVCLFTDFDSQTNVSQSKDSDVYITDKCVLDMRSMDFKSNSAVAWSNKSDFACANAFNNSIIPEDTFFPSPESSCGFTSESYQQGVLSATILYEILLGKATLYAVLVSALVLMAMVKRKDSRGRSKRSRLLHSDYMNMTPRRPGPTRKHYQPYAPPRDFAAYRSRVKFSRSADAPAYQQGQNQLYNELNLGRREEYDVLDKRRGRDPEMGGKPQRRKNPQEGLYNELQKDKMAEAYSEIGMKGERRRGKGHDGLYQGLSTATKDTYDALHMQALPPR

SEQ ID NO: 29357 - protein, 292 aa, synthetic construct
DPAVYQLRDSKSSDKSVCLFTDFDSQTNVSQSKDSDVYITDKCVLDMRSMDFKSNSAVAWSNKSDFACANAFNNSIIPEDTFFPSPESSCGFTSESYQQGVLSATILYEILLGKATLYAVLVSALVLMAMVKRKDSRGRSKRSRLLHSDYMNMTPRRPGPTRKHYQPYAPPRDFAAYRSRVKFSRSADAPAYQQGQNQLYNELNLGRREEYDVLDKRRGRDPEMGGKPQRRKNPQEGLYNELQKDKMAEAYSEIGMKGERRRGKGHDGLYQGLSTATKDTYDALHMQALPPR

SEQ ID NO: 29358 - protein, 291 aa, synthetic construct
PAVYQLRDSKSSDKSVCLFTDFDSQTNVSQSKDSDVYITDKCVLDMRSMDFKSNSAVAWSNKSDFACANAFNNSIIPEDTFFPSPESSCGFTSESYQQGVLSATILYEILLGKATLYAVLVSALVLMAMVKRKDSRGRSKRSRLLHSDYMNMTPRRPGPTRKHYQPYAPPRDFAAYRSRVKFSRSADAPAYQQGQNQLYNELNLGRREEYDVLDKRRGRDPEMGGKPQRRKNPQEGLYNELQKDKMAEAYSEIGMKGERRRGKGHDGLYQGLSTATKDTYDALHMQALPPR

SEQ ID NO: 29359 - protein, 290 aa, synthetic construct
AVYQLRDSKSSDKSVCLFTDFDSQTNVSQSKDSDVYITDKCVLDMRSMDFKSNSAVAWSNKSDFACANAFNNSIIPEDTFFPSPESSCGFTSESYQQGVLSATILYEILLGKATLYAVLVSALVLMAMVKRKDSRGRSKRSRLLHSDYMNMTPRRPGPTRKHYQPYAPPRDFAAYRSRVKFSRSADAPAYQQGQNQLYNELNLGRREEYDVLDKRRGRDPEMGGKPQRRKNPQEGLYNELQKDKMAEAYSEIGMKGERRRGKGHDGLYQGLSTATKDTYDALHMQALPPR

SEQ ID NO: 29360 - protein, 289 aa, synthetic construct
VYQLRDSKSSDKSVCLFTDFDSQTNVSQSKDSDVYITDKCVLDMRSMDFKSNSAVAWSNKSDFACANAFNNSIIPEDTFFPSPESSCGFTSESYQQGVLSATILYEILLGKATLYAVLVSALVLMAMVKRKDSRGRSKRSRLLHSDYMNMTPRRPGPTRKHYQPYAPPRDFAAYRSRVKFSRSADAPAYQQGQNQLYNELNLGRREEYDVLDKRRGRDPEMGGKPQRRKNPQEGLYNELQKDKMAEAYSEIGMKGERRRGKGHDGLYQGLSTATKDTYDALHMQALPPR

SEQ ID NO: 29361 - protein, 288 aa, synthetic construct
YQLRDSKSSDKSVCLFTDFDSQTNVSQSKDSDVYITDKCVLDMRSMDFKSNSAVAWSNKSDFACANAFNNSIIPEDTFFPSPESSCGFTSESYQQGVLSATILYEILLGKATLYAVLVSALVLMAMVKRKDSRGRSKRSRLLHSDYMNMTPRRPGPTRKHYQPYAPPRDFAAYRSRVKFSRSADAPAYQQGQNQLYNELNLGRREEYDVLDKRRGRDPEMGGKPQRRKNPQEGLYNELQKDKMAEAYSEIGMKGERRRGKGHDGLYQGLSTATKDTYDALHMQALPPR

SEQ ID NO: 29362 - protein, 287 aa, synthetic construct
QLRDSKSSDKSVCLFTDFDSQTNVSQSKDSDVYITDKCVLDMRSMDFKSNSAVAWSNKSDFACANAFNNSIIPEDTFFPSPESSCGFTSESYQQGVLSATILYEILLGKATLYAVLVSALVLMAMVKRKDSRGRSKRSRLLHSDYMNMTPRRPGPTRKHYQPYAPPRDFAAYRSRVKFSRSADAPAYQQGQNQLYNELNLGRREEYDVLDKRRGRDPEMGGKPQRRKNPQEGLYNELQKDKMAEAYSEIGMKGERRRGKGHDGLYQGLSTATKDTYDALHMQALPPR

SEQ ID NO: 29363 - protein, 286 aa, synthetic construct
LRDSKSSDKSVCLFTDFDSQTNVSQSKDSDVYITDKCVLDMRSMDFKSNSAVAWSNKSDFACANAFNNSIIPEDTFFPSPESSCGFTSESYQQGVLSATILYEILLGKATLYAVLVSALVLMAMVKRKDSRGRSKRSRLLHSDYMNMTPRRPGPTRKHYQPYAPPRDFAAYRSRVKFSRSADAPAYQQGQNQLYNELNLGRREEYDVLDKRRGRDPEMGGKPQRRKNPQEGLYNELQKDKMAEAYSEIGMKGERRRGKGHDGLYQGLSTATKDTYDALHMQALPPR

SEQ ID NO: 29364 - protein, 285 aa, synthetic construct
RDSKSSDKSVCLFTDFDSQTNVSQSKDSDVYITDKCVLDMRSMDFKSNSAVAWSNKSDFACANAFNNSIIPEDTFFPSPESSCGFTSESYQQGVLSATILYEILLGKATLYAVLVSALVLMAMVKRKDSRGRSKRSRLLHSDYMNMTPRRPGPTRKHYQPYAPPRDFAAYRSRVKFSRSADAPAYQQGQNQLYNELNLGRREEYDVLDKRRGRDPEMGGKPQRRKNPQEGLYNELQKDKMAEAYSEIGMKGERRRGKGHDGLYQGLSTATKDTYDALHMQALPPR

SEQ ID NO: 29365 - protein, 284 aa, synthetic construct
DSKSSDKSVCLFTDFDSQTNVSQSKDSDVYITDKCVLDMRSMDFKSNSAVAWSNKSDFACANAFNNSIIPEDTFFPSPESSCGFTSESYQQGVLSATILYEILLGKATLYAVLVSALVLMAMVKRKDSRGRSKRSRLLHSDYMNMTPRRPGPTRKHYQPYAPPRDFAAYRSRVKFSRSADAPAYQQGQNQLYNELNLGRREEYDVLDKRRGRDPEMGGKPQRRKNPQEGLYNELQKDKMAEAYSEIGMKGERRRGKGHDGLYQGLSTATKDTYDALHMQALPPR

SEQ ID NO: 29366 - protein, 283 aa, synthetic construct
SKSSDKSVCLFTDFDSQTNVSQSKDSDVYITDKCVLDMRSMDFKSNSAVAWSNKSDFACANAFNNSIIPEDTFFPSPESSCGFTSESYQQGVLSATILYEILLGKATLYAVLVSALVLMAMVKRKDSRGRSKRSRLLHSDYMNMTPRRPGPTRKHYQPYAPPRDFAAYRSRVKFSRSADAPAYQQGQNQLYNELNLGRREEYDVLDKRRGRDPEMGGKPQRRKNPQEGLYNELQKDKMAEAYSEIGMKGERRRGKGHDGLYQGLSTATKDTYDALHMQALPPR

SEQ ID NO: 29367 - protein, 282 aa, synthetic construct
KSSDKSVCLFTDFDSQTNVSQSKDSDVYITDKCVLDMRSMDFKSNSAVAWSNKSDFACANAFNNSIIPEDTFFPSPESSCGFTSESYQQGVLSATILYEILLGKATLYAVLVSALVLMAMVKRKDSRGRSKRSRLLHSDYMNMTPRRPGPTRKHYQPYAPPRDFAAYRSRVKFSRSADAPAYQQGQNQLYNELNLGRREEYDVLDKRRGRDPEMGGKPQRRKNPQEGLYNELQKDKMAEAYSEIGMKGERRRGKGHDGLYQGLSTATKDTYDALHMQALPPR

SEQ ID NO: 29368 - protein, 281 aa, synthetic construct
SSDKSVCLFTDFDSQTNVSQSKDSDVYITDKCVLDMRSMDFKSNSAVAWSNKSDFACANAFNNSIIPEDTFFPSPESSCGFTSESYQQGVLSATILYEILLGKATLYAVLVSALVLMAMVKRKDSRGRSKRSRLLHSDYMNMTPRRPGPTRKHYQPYAPPRDFAAYRSRVKFSRSADAPAYQQGQNQLYNELNLGRREEYDVLDKRRGRDPEMGGKPQRRKNPQEGLYNELQKDKMAEAYSEIGMKGERRRGKGHDGLYQGLSTATKDTYDALHMQALPPR

SEQ ID NO: 29369 - protein, 280 aa, synthetic construct
SDKSVCLFTDFDSQTNVSQSKDSDVYITDKCVLDMRSMDFKSNSAVAWSNKSDFACANAFNNSIIPEDTFFPSPESSCGFTSESYQQGVLSATILYEILLGKATLYAVLVSALVLMAMVKRKDSRGRSKRSRLLHSDYMNMTPRRPGPTRKHYQPYAPPRDFAAYRSRVKFSRSADAPAYQQGQNQLYNELNLGRREEYDVLDKRRGRDPEMGGKPQRRKNPQEGLYNELQKDKMAEAYSEIGMKGERRRGKGHDGLYQGLSTATKDTYDALHMQALPPR

SEQ ID NO: 29370 - protein, 279 aa, synthetic construct
DKSVCLFTDFDSQTNVSQSKDSDVYITDKCVLDMRSMDFKSNSAVAWSNKSDFACANAFNNSIIPEDTFFPSPESSCGFTSESYQQGVLSATILYEILLGKATLYAVLVSALVLMAMVKRKDSRGRSKRSRLLHSDYMNMTPRRPGPTRKHYQPYAPPRDFAAYRSRVKFSRSADAPAYQQGQNQLYNELNLGRREEYDVLDKRRGRDPEMGGKPQRRKNPQEGLYNELQKDKMAEAYSEIGMKGERRRGKGHDGLYQGLSTATKDTYDALHMQALPPR

SEQ ID NO: 29371 - protein, 278 aa, synthetic construct
KSVCLFTDFDSQTNVSQSKDSDVYITDKCVLDMRSMDFKSNSAVAWSNKSDFACANAFNNSIIPEDTFFPSPESSCGFTSESYQQGVLSATILYEILLGKATLYAVLVSALVLMAMVKRKDSRGRSKRSRLLHSDYMNMTPRRPGPTRKHYQPYAPPRDFAAYRSRVKFSRSADAPAYQQGQNQLYNELNLGRREEYDVLDKRRGRDPEMGGKPQRRKNPQEGLYNELQKDKMAEAYSEIGMKGERRRGKGHDGLYQGLSTATKDTYDALHMQALPPR

SEQ ID NO: 29372 - protein, 277 aa, synthetic construct
SVCLFTDFDSQTNVSQSKDSDVYITDKCVLDMRSMDFKSNSAVAWSNKSDFACANAFNNSIIPEDTFFPSPESSCGFTSESYQQGVLSATILYEILLGKATLYAVLVSALVLMAMVKRKDSRGRSKRSRLLHSDYMNMTPRRPGPTRKHYQPYAPPRDFAAYRSRVKFSRSADAPAYQQGQNQLYNELNLGRREEYDVLDKRRGRDPEMGGKPQRRKNPQEGLYNELQKDKMAEAYSEIGMKGERRRGKGHDGLYQGLSTATKDTYDALHMQALPPR

SEQ ID NO: 29373 - protein, 276 aa, synthetic construct
VCLFTDFDSQTNVSQSKDSDVYITDKCVLDMRSMDFKSNSAVAWSNKSDFACANAFNNSIIPEDTFFPSPESSCGFTSESYQQGVLSATILYEILLGKATLYAVLVSALVLMAMVKRKDSRGRSKRSRLLHSDYMNMTPRRPGPTRKHYQPYAPPRDFAAYRSRVKFSRSADAPAYQQGQNQLYNELNLGRREEYDVLDKRRGRDPEMGGKPQRRKNPQEGLYNELQKDKMAEAYSEIGMKGERRRGKGHDGLYQGLSTATKDTYDALHMQALPPR

SEQ ID NO: 29374 - protein, 271 aa, synthetic construct
DFDSQTNVSQSKDSDVYITDKCVLDMRSMDFKSNSAVAWSNKSDFACANAFNNSIIPEDTFFPSPESSCGFTSESYQQGVLSATILYEILLGKATLYAVLVSALVLMAMVKRKDSRGRSKRSRLLHSDYMNMTPRRPGPTRKHYQPYAPPRDFAAYRSRVKFSRSADAPAYQQGQNQLYNELNLGRREEYDVLDKRRGRDPEMGGKPQRRKNPQEGLYNELQKDKMAEAYSEIGMKGERRRGKGHDGLYQGLSTATKDTYDALHMQALPPR

SEQ ID NO: 29375 - protein, 266 aa, synthetic construct
TNVSQSKDSDVYITDKCVLDMRSMDFKSNSAVAWSNKSDFACANAFNNSIIPEDTFFPSPESSCGFTSESYQQGVLSATILYEILLGKATLYAVLVSALVLMAMVKRKDSRGRSKRSRLLHSDYMNMTPRRPGPTRKHYQPYAPPRDFAAYRSRVKFSRSADAPAYQQGQNQLYNELNLGRREEYDVLDKRRGRDPEMGGKPQRRKNPQEGLYNELQKDKMAEAYSEIGMKGERRRGKGHDGLYQGLSTATKDTYDALHMQALPPR

SEQ ID NO: 29376 - protein, 299 aa, synthetic construct; identical to SEQ ID NO: 29340

SEQ ID NO: 29377 - protein, 298 aa, synthetic construct
QNPDPAVYQLRDSKSSDKSVCLFTDFDSQTNVSQSKDSDVYITDKCVLDMRSMDFKSNSAVAWSNKSDFACANAFNNSIIPEDTFFPSPESSCDVKLVEKSFETDTNLNFQILYEILLGKATLYAVLVSALVLMAMVKRKDSRGRSKRSRLLHSDYMNMTPRRPGPTRKHYQPYAPPRDFAAYRSRVKFSRSADAPAYQQGQNQLYNELNLGRREEYDVLDKRRGRDPEMGGKPQRRKNPQEGLYNELQKDKMAEAYSEIGMKGERRRGKGHDGLYQGLSTATKDTYDALHMQALPPR

SEQ ID NO: 29378 - protein, 297 aa, synthetic construct
NPDPAVYQLRDSKSSDKSVCLFTDFDSQTNVSQSKDSDVYITDKCVLDMRSMDFKSNSAVAWSNKSDFACANAFNNSIIPEDTFFPSPESSCDVKLVEKSFETDTNLNFQILYEILLGKATLYAVLVSALVLMAMVKRKDSRGRSKRSRLLHSDYMNMTPRRPGPTRKHYQPYAPPRDFAAYRSRVKFSRSADAPAYQQGQNQLYNELNLGRREEYDVLDKRRGRDPEMGGKPQRRKNPQEGLYNELQKDKMAEAYSEIGMKGERRRGKGHDGLYQGLSTATKDTYDALHMQALPPR

SEQ ID NO: 29379 - protein, 296 aa, synthetic construct
PDPAVYQLRDSKSSDKSVCLFTDFDSQTNVSQSKDSDVYITDKCVLDMRSMDFKSNSAVAWSNKSDFACANAFNNSIIPEDTFFPSPESSCDVKLVEKSFETDTNLNFQILYEILLGKATLYAVLVSALVLMAMVKRKDSRGRSKRSRLLHSDYMNMTPRRPGPTRKHYQPYAPPRDFAAYRSRVKFSRSADAPAYQQGQNQLYNELNLGRREEYDVLDKRRGRDPEMGGKPQRRKNPQEGLYNELQKDKMAEAYSEIGMKGERRRGKGHDGLYQGLSTATKDTYDALHMQALPPR

SEQ ID NO: 29380 - protein, 295 aa, synthetic construct
DPAVYQLRDSKSSDKSVCLFTDFDSQTNVSQSKDSDVYITDKCVLDMRSMDFKSNSAVAWSNKSDFACANAFNNSIIPEDTFFPSPESSCDVKLVEKSFETDTNLNFQILYEILLGKATLYAVLVSALVLMAMVKRKDSRGRSKRSRLLHSDYMNMTPRRPGPTRKHYQPYAPPRDFAAYRSRVKFSRSADAPAYQQGQNQLYNELNLGRREEYDVLDKRRGRDPEMGGKPQRRKNPQEGLYNELQKDKMAEAYSEIGMKGERRRGKGHDGLYQGLSTATKDTYDALHMQALPPR

SEQ ID NO: 29381 - protein, 294 aa, synthetic construct
PAVYQLRDSKSSDKSVCLFTDFDSQTNVSQSKDSDVYITDKCVLDMRSMDFKSNSAVAWSNKSDFACANAFNNSIIPEDTFFPSPESSCDVKLVEKSFETDTNLNFQILYEILLGKATLYAVLVSALVLMAMVKRKDSRGRSKRSRLLHSDYMNMTPRRPGPTRKHYQPYAPPRDFAAYRSRVKFSRSADAPAYQQGQNQLYNELNLGRREEYDVLDKRRGRDPEMGGKPQRRKNPQEGLYNELQKDKMAEAYSEIGMKGERRRGKGHDGLYQGLSTATKDTYDALHMQALPPR

SEQ ID NO: 29382 - protein, 293 aa, synthetic construct
AVYQLRDSKSSDKSVCLFTDFDSQTNVSQSKDSDVYITDKCVLDMRSMDFKSNSAVAWSNKSDFACANAFNNSIIPEDTFFPSPESSCDVKLVEKSFETDTNLNFQILYEILLGKATLYAVLVSALVLMAMVKRKDSRGRSKRSRLLHSDYMNMTPRRPGPTRKHYQPYAPPRDFAAYRSRVKFSRSADAPAYQQGQNQLYNELNLGRREEYDVLDKRRGRDPEMGGKPQRRKNPQEGLYNELQKDKMAEAYSEIGMKGERRRGKGHDGLYQGLSTATKDTYDALHMQALPPR

SEQ ID NO: 29383 - protein, 292 aa, synthetic construct
VYQLRDSKSSDKSVCLFTDFDSQTNVSQSKDSDVYITDKCVLDMRSMDFKSNSAVAWSNKSDFACANAFNNSIIPEDTFFPSPESSCDVKLVEKSFETDTNLNFQILYEILLGKATLYAVLVSALVLMAMVKRKDSRGRSKRSRLLHSDYMNMTPRRPGPTRKHYQPYAPPRDFAAYRSRVKFSRSADAPAYQQGQNQLYNELNLGRREEYDVLDKRRGRDPEMGGKPQRRKNPQEGLYNELQKDKMAEAYSEIGMKGERRRGKGHDGLYQGLSTATKDTYDALHMQALPPR

SEQ ID NO: 29384 - protein, 291 aa, synthetic construct
YQLRDSKSSDKSVCLFTDFDSQTNVSQSKDSDVYITDKCVLDMRSMDFKSNSAVAWSNKSDFACANAFNNSIIPEDTFFPSPESSCDVKLVEKSFETDTNLNFQILYEILLGKATLYAVLVSALVLMAMVKRKDSRGRSKRSRLLHSDYMNMTPRRPGPTRKHYQPYAPPRDFAAYRSRVKFSRSADAPAYQQGQNQLYNELNLGRREEYDVLDKRRGRDPEMGGKPQRRKNPQEGLYNELQKDKMAEAYSEIGMKGERRRGKGHDGLYQGLSTATKDTYDALHMQALPPR

SEQ ID NO: 29385 - protein, 290 aa, synthetic construct
QLRDSKSSDKSVCLFTDFDSQTNVSQSKDSDVYITDKCVLDMRSMDFKSNSAVAWSNKSDFACANAFNNSIIPEDTFFPSPESSCDVKLVEKSFETDTNLNFQILYEILLGKATLYAVLVSALVLMAMVKRKDSRGRSKRSRLLHSDYMNMTPRRPGPTRKHYQPYAPPRDFAAYRSRVKFSRSADAPAYQQGQNQLYNELNLGRREEYDVLDKRRGRDPEMGGKPQRRKNPQEGLYNELQKDKMAEAYSEIGMKGERRRGKGHDGLYQGLSTATKDTYDALHMQALPPR

SEQ ID NO: 29386 - protein, 289 aa, synthetic construct
LRDSKSSDKSVCLFTDFDSQTNVSQSKDSDVYITDKCVLDMRSMDFKSNSAVAWSNKSDFACANAFNNSIIPEDTFFPSPESSCDVKLVEKSFETDTNLNFQILYEILLGKATLYAVLVSALVLMAMVKRKDSRGRSKRSRLLHSDYMNMTPRRPGPTRKHYQPYAPPRDFAAYRSRVKFSRSADAPAYQQGQNQLYNELNLGRREEYDVLDKRRGRDPEMGGKPQRRKNPQEGLYNELQKDKMAEAYSEIGMKGERRRGKGHDGLYQGLSTATKDTYDALHMQALPPR

SEQ ID NO: 29387 - protein, 288 aa, synthetic construct
RDSKSSDKSVCLFTDFDSQTNVSQSKDSDVYITDKCVLDMRSMDFKSNSAVAWSNKSDFACANAFNNSIIPEDTFFPSPESSCDVKLVEKSFETDTNLNFQILYEILLGKATLYAVLVSALVLMAMVKRKDSRGRSKRSRLLHSDYMNMTPRRPGPTRKHYQPYAPPRDFAAYRSRVKFSRSADAPAYQQGQNQLYNELNLGRREEYDVLDKRRGRDPEMGGKPQRRKNPQEGLYNELQKDKMAEAYSEIGMKGERRRGKGHDGLYQGLSTATKDTYDALHMQALPPR

SEQ ID NO: 29388 - protein, 287 aa, synthetic construct
DSKSSDKSVCLFTDFDSQTNVSQSKDSDVYITDKCVLDMRSMDFKSNSAVAWSNKSDFACANAFNNSIIPEDTFFPSPESSCDVKLVEKSFETDTNLNFQILYEILLGKATLYAVLVSALVLMAMVKRKDSRGRSKRSRLLHSDYMNMTPRRPGPTRKHYQPYAPPRDFAAYRSRVKFSRSADAPAYQQGQNQLYNELNLGRREEYDVLDKRRGRDPEMGGKPQRRKNPQEGLYNELQKDKMAEAYSEIGMKGERRRGKGHDGLYQGLSTATKDTYDALHMQALPPR

SEQ ID NO: 29389 - protein, 286 aa, synthetic construct
SKSSDKSVCLFTDFDSQTNVSQSKDSDVYITDKCVLDMRSMDFKSNSAVAWSNKSDFACANAFNNSIIPEDTFFPSPESSCDVKLVEKSFETDTNLNFQILYEILLGKATLYAVLVSALVLMAMVKRKDSRGRSKRSRLLHSDYMNMTPRRPGPTRKHYQPYAPPRDFAAYRSRVKFSRSADAPAYQQGQNQLYNELNLGRREEYDVLDKRRGRDPEMGGKPQRRKNPQEGLYNELQKDKMAEAYSEIGMKGERRRGKGHDGLYQGLSTATKDTYDALHMQALPPR

SEQ ID NO: 29390 - protein, 285 aa, synthetic construct
KSSDKSVCLFTDFDSQTNVSQSKDSDVYITDKCVLDMRSMDFKSNSAVAWSNKSDFACANAFNNSIIPEDTFFPSPESSCDVKLVEKSFETDTNLNFQILYEILLGKATLYAVLVSALVLMAMVKRKDSRGRSKRSRLLHSDYMNMTPRRPGPTRKHYQPYAPPRDFAAYRSRVKFSRSADAPAYQQGQNQLYNELNLGRREEYDVLDKRRGRDPEMGGKPQRRKNPQEGLYNELQKDKMAEAYSEIGMKGERRRGKGHDGLYQGLSTATKDTYDALHMQALPPR

SEQ ID NO: 29391 - protein, 284 aa, synthetic construct
SSDKSVCLFTDFDSQTNVSQSKDSDVYITDKCVLDMRSMDFKSNSAVAWSNKSDFACANAFNNSIIPEDTFFPSPESSCDVKLVEKSFETDTNLNFQILYEILLGKATLYAVLVSALVLMAMVKRKDSRGRSKRSRLLHSDYMNMTPRRPGPTRKHYQPYAPPRDFAAYRSRVKFSRSADAPAYQQGQNQLYNELNLGRREEYDVLDKRRGRDPEMGGKPQRRKNPQEGLYNELQKDKMAEAYSEIGMKGERRRGKGHDGLYQGLSTATKDTYDALHMQALPPR

SEQ ID NO: 29392 - protein, 283 aa, synthetic construct
SDKSVCLFTDFDSQTNVSQSKDSDVYITDKCVLDMRSMDFKSNSAVAWSNKSDFACANAFNNSIIPEDTFFPSPESSCDVKLVEKSFETDTNLNFQILYEILLGKATLYAVLVSALVLMAMVKRKDSRGRSKRSRLLHSDYMNMTPRRPGPTRKHYQPYAPPRDFAAYRSRVKFSRSADAPAYQQGQNQLYNELNLGRREEYDVLDKRRGRDPEMGGKPQRRKNPQEGLYNELQKDKMAEAYSEIGMKGERRRGKGHDGLYQGLSTATKDTYDALHMQALPPR

SEQ ID NO: 29393 - protein, 282 aa, synthetic construct
DKSVCLFTDFDSQTNVSQSKDSDVYITDKCVLDMRSMDFKSNSAVAWSNKSDFACANAFNNSIIPEDTFFPSPESSCDVKLVEKSFETDTNLNFQILYEILLGKATLYAVLVSALVLMAMVKRKDSRGRSKRSRLLHSDYMNMTPRRPGPTRKHYQPYAPPRDFAAYRSRVKFSRSADAPAYQQGQNQLYNELNLGRREEYDVLDKRRGRDPEMGGKPQRRKNPQEGLYNELQKDKMAEAYSEIGMKGERRRGKGHDGLYQGLSTATKDTYDALHMQALPPR

SEQ ID NO: 29394 - protein, 281 aa, synthetic construct
KSVCLFTDFDSQTNVSQSKDSDVYITDKCVLDMRSMDFKSNSAVAWSNKSDFACANAFNNSIIPEDTFFPSPESSCDVKLVEKSFETDTNLNFQILYEILLGKATLYAVLVSALVLMAMVKRKDSRGRSKRSRLLHSDYMNMTPRRPGPTRKHYQPYAPPRDFAAYRSRVKFSRSADAPAYQQGQNQLYNELNLGRREEYDVLDKRRGRDPEMGGKPQRRKNPQEGLYNELQKDKMAEAYSEIGMKGERRRGKGHDGLYQGLSTATKDTYDALHMQALPPR

SEQ ID NO: 29395 - protein, 280 aa, synthetic construct
SVCLFTDFDSQTNVSQSKDSDVYITDKCVLDMRSMDFKSNSAVAWSNKSDFACANAFNNSIIPEDTFFPSPESSCDVKLVEKSFETDTNLNFQILYEILLGKATLYAVLVSALVLMAMVKRKDSRGRSKRSRLLHSDYMNMTPRRPGPTRKHYQPYAPPRDFAAYRSRVKFSRSADAPAYQQGQNQLYNELNLGRREEYDVLDKRRGRDPEMGGKPQRRKNPQEGLYNELQKDKMAEAYSEIGMKGERRRGKGHDGLYQGLSTATKDTYDALHMQALPPR

SEQ ID NO: 29396 - protein, 279 aa, synthetic construct
VCLFTDFDSQTNVSQSKDSDVYITDKCVLDMRSMDFKSNSAVAWSNKSDFACANAFNNSIIPEDTFFPSPESSCDVKLVEKSFETDTNLNFQILYEILLGKATLYAVLVSALVLMAMVKRKDSRGRSKRSRLLHSDYMNMTPRRPGPTRKHYQPYAPPRDFAAYRSRVKFSRSADAPAYQQGQNQLYNELNLGRREEYDVLDKRRGRDPEMGGKPQRRKNPQEGLYNELQKDKMAEAYSEIGMKGERRRGKGHDGLYQGLSTATKDTYDALHMQALPPR

SEQ ID NO: 29397 - protein, 274 aa, synthetic construct
DFDSQTNVSQSKDSDVYITDKCVLDMRSMDFKSNSAVAWSNKSDFACANAFNNSIIPEDTFFPSPESSCDVKLVEKSFETDTNLNFQILYEILLGKATLYAVLVSALVLMAMVKRKDSRGRSKRSRLLHSDYMNMTPRRPGPTRKHYQPYAPPRDFAAYRSRVKFSRSADAPAYQQGQNQLYNELNLGRREEYDVLDKRRGRDPEMGGKPQRRKNPQEGLYNELQKDKMAEAYSEIGMKGERRRGKGHDGLYQGLSTATKDTYDALHMQALPPR

SEQ ID NO: 29398 - protein, 269 aa, synthetic construct
TNVSQSKDSDVYITDKCVLDMRSMDFKSNSAVAWSNKSDFACANAFNNSIIPEDTFFPSPESSCDVKLVEKSFETDTNLNFQILYEILLGKATLYAVLVSALVLMAMVKRKDSRGRSKRSRLLHSDYMNMTPRRPGPTRKHYQPYAPPRDFAAYRSRVKFSRSADAPAYQQGQNQLYNELNLGRREEYDVLDKRRGRDPEMGGKPQRRKNPQEGLYNELQKDKMAEAYSEIGMKGERRRGKGHDGLYQGLSTATKDTYDALHMQALPPR

SEQ ID NO: 29399 - protein, 314 aa, synthetic construct; identical to SEQ ID NO: 29341

SEQ ID NO: 29400 - protein, 313 aa, synthetic construct
QNPDPAVYQLRDSKSSDKSVCLFTDFDSQTNVSQSKDSDVYITDKCVLDMRSMDFKSNSAVAWSNKSDFACANAFNNSIIPEDTFFPSPESSDSTDHVKPKETENTKQPSKSCHKPKAIVHTEKVNMMSLTVLGLRMLFAKTVAVNFLLTAKLFFLLTARSKRSRLLHSDYMNMTPRRPGPTRKHYQPYAPPRDFAAYRSRVKFSRSADAPAYQQGQNQLYNELNLGRREEYDVLDKRRGRDPEMGGKPQRRKNPQEGLYNELQKDKMAEAYSEIGMKGERRRGKGHDGLYQGLSTATKDTYDALHMQALPPR

SEQ ID NO: 29401 - protein, 312 aa, synthetic construct
NPDPAVYQLRDSKSSDKSVCLFTDFDSQTNVSQSKDSDVYITDKCVLDMRSMDFKSNSAVAWSNKSDFACANAFNNSIIPEDTFFPSPESSDSTDHVKPKETENTKQPSKSCHKPKAIVHTEKVNMMSLTVLGLRMLFAKTVAVNFLLTAKLFFLLTARSKRSRLLHSDYMNMTPRRPGPTRKHYQPYAPPRDFAAYRSRVKFSRSADAPAYQQGQNQLYNELNLGRREEYDVLDKRRGRDPEMGGKPQRRKNPQEGLYNELQKDKMAEAYSEIGMKGERRRGKGHDGLYQGLSTATKDTYDALHMQALPPR

SEQ ID NO: 29402 - protein, 311 aa, synthetic construct
PDPAVYQLRDSKSSDKSVCLFTDFDSQTNVSQSKDSDVYITDKCVLDMRSMDFKSNSAVAWSNKSDFACANAFNNSIIPEDTFFPSPESSDSTDHVKPKETENTKQPSKSCHKPKAIVHTEKVNMMSLTVLGLRMLFAKTVAVNFLLTAKLFFLLTARSKRSRLLHSDYMNMTPRRPGPTRKHYQPYAPPRDFAAYRSRVKFSRSADAPAYQQGQNQLYNELNLGRREEYDVLDKRRGRDPEMGGKPQRRKNPQEGLYNELQKDKMAEAYSEIGMKGERRRGKGHDGLYQGLSTATKDTYDALHMQALPPR

SEQ ID NO: 29403 - protein, 310 aa, synthetic construct
DPAVYQLRDSKSSDKSVCLFTDFDSQTNVSQSKDSDVYITDKCVLDMRSMDFKSNSAVAWSNKSDFACANAFNNSIIPEDTFFPSPESSDSTDHVKPKETENTKQPSKSCHKPKAIVHTEKVNMMSLTVLGLRMLFAKTVAVNFLLTAKLFFLLTARSKRSRLLHSDYMNMTPRRPGPTRKHYQPYAPPRDFAAYRSRVKFSRSADAPAYQQGQNQLYNELNLGRREEYDVLDKRRGRDPEMGGKPQRRKNPQEGLYNELQKDKMAEAYSEIGMKGERRRGKGHDGLYQGLSTATKDTYDALHMQALPPR

SEQ ID NO: 29404 - protein, 309 aa, synthetic construct
PAVYQLRDSKSSDKSVCLFTDFDSQTNVSQSKDSDVYITDKCVLDMRSMDFKSNSAVAWSNKSDFACANAFNNSIIPEDTFFPSPESSDSTDHVKPKETENTKQPSKSCHKPKAIVHTEKVNMMSLTVLGLRMLFAKTVAVNFLLTAKLFFLLTARSKRSRLLHSDYMNMTPRRPGPTRKHYQPYAPPRDFAAYRSRVKFSRSADAPAYQQGQNQLYNELNLGRREEYDVLDKRRGRDPEMGGKPQRRKNPQEGLYNELQKDKMAEAYSEIGMKGERRRGKGHDGLYQGLSTATKDTYDALHMQALPPR

SEQ ID NO: 29405 - protein, 308 aa, synthetic construct
AVYQLRDSKSSDKSVCLFTDFDSQTNVSQSKDSDVYITDKCVLDMRSMDFKSNSAVAWSNKSDFACANAFNNSIIPEDTFFPSPESSDSTDHVKPKETENTKQPSKSCHKPKAIVHTEKVNMMSLTVLGLRMLFAKTVAVNFLLTAKLFFLLTARSKRSRLLHSDYMNMTPRRPGPTRKHYQPYAPPRDFAAYRSRVKFSRSADAPAYQQGQNQLYNELNLGRREEYDVLDKRRGRDPEMGGKPQRRKNPQEGLYNELQKDKMAEAYSEIGMKGERRRGKGHDGLYQGLSTATKDTYDALHMQALPPR

SEQ ID NO: 29406 - protein, 307 aa, synthetic construct
VYQLRDSKSSDKSVCLFTDFDSQTNVSQSKDSDVYITDKCVLDMRSMDFKSNSAVAWSNKSDFACANAFNNSIIPEDTFFPSPESSDSTDHVKPKETENTKQPSKSCHKPKAIVHTEKVNMMSLTVLGLRMLFAKTVAVNFLLTAKLFFLLTARSKRSRLLHSDYMNMTPRRPGPTRKHYQPYAPPRDFAAYRSRVKFSRSADAPAYQQGQNQLYNELNLGRREEYDVLDKRRGRDPEMGGKPQRRKNPQEGLYNELQKDKMAEAYSEIGMKGERRRGKGHDGLYQGLSTATKDTYDALHMQALPPR

SEQ ID NO: 29407 - protein, 306 aa, synthetic construct
YQLRDSKSSDKSVCLFTDFDSQTNVSQSKDSDVYITDKCVLDMRSMDFKSNSAVAWSNKSDFACANAFNNSIIPEDTFFPSPESSDSTDHVKPKETENTKQPSKSCHKPKAIVHTEKVNMMSLTVLGLRMLFAKTVAVNFLLTAKLFFLLTARSKRSRLLHSDYMNMTPRRPGPTRKHYQPYAPPRDFAAYRSRVKFSRSADAPAYQQGQNQLYNELNLGRREEYDVLDKRRGRDPEMGGKPQRRKNPQEGLYNELQKDKMAEAYSEIGMKGERRRGKGHDGLYQGLSTATKDTYDALHMQALPPR

SEQ ID NO: 29408 - protein, 305 aa, synthetic construct
QLRDSKSSDKSVCLFTDFDSQTNVSQSKDSDVYITDKCVLDMRSMDFKSNSAVAWSNKSDFACANAFNNSIIPEDTFFPSPESSDSTDHVKPKETENTKQPSKSCHKPKAIVHTEKVNMMSLTVLGLRMLFAKTVAVNFLLTAKLFFLLTARSKRSRLLHSDYMNMTPRRPGPTRKHYQPYAPPRDFAAYRSRVKFSRSADAPAYQQGQNQLYNELNLGRREEYDVLDKRRGRDPEMGGKPQRRKNPQEGLYNELQKDKMAEAYSEIGMKGERRRGKGHDGLYQGLSTATKDTYDALHMQALPPR

SEQ ID NO: 29409 - protein, 304 aa, synthetic construct
LRDSKSSDKSVCLFTDFDSQTNVSQSKDSDVYITDKCVLDMRSMDFKSNSAVAWSNKSDFACANAFNNSIIPEDTFFPSPESSDSTDHVKPKETENTKQPSKSCHKPKAIVHTEKVNMMSLTVLGLRMLFAKTVAVNFLLTAKLFFLLTARSKRSRLLHSDYMNMTPRRPGPTRKHYQPYAPPRDFAAYRSRVKFSRSADAPAYQQGQNQLYNELNLGRREEYDVLDKRRGRDPEMGGKPQRRKNPQEGLYNELQKDKMAEAYSEIGMKGERRRGKGHDGLYQGLSTATKDTYDALHMQALPPR

SEQ ID NO: 29410 - protein, 303 aa, synthetic construct
RDSKSSDKSVCLFTDFDSQTNVSQSKDSDVYITDKCVLDMRSMDFKSNSAVAWSNKSDFACANAFNNSIIPEDTFFPSPESSDSTDHVKPKETENTKQPSKSCHKPKAIVHTEKVNMMSLTVLGLRMLFAKTVAVNFLLTAKLFFLLTARSKRSRLLHSDYMNMTPRRPGPTRKHYQPYAPPRDFAAYRSRVKFSRSADAPAYQQGQNQLYNELNLGRREEYDVLDKRRGRDPEMGGKPQRRKNPQEGLYNELQKDKMAEAYSEIGMKGERRRGKGHDGLYQGLSTATKDTYDALHMQALPPR

SEQ ID NO: 29411 - protein, 302 aa, synthetic construct
DSKSSDKSVCLFTDFDSQTNVSQSKDSDVYITDKCVLDMRSMDFKSNSAVAWSNKSDFACANAFNNSIIPEDTFFPSPESSDSTDHVKPKETENTKQPSKSCHKPKAIVHTEKVNMMSLTVLGLRMLFAKTVAVNFLLTAKLFFLLTARSKRSRLLHSDYMNMTPRRPGPTRKHYQPYAPPRDFAAYRSRVKFSRSADAPAYQQGQNQLYNELNLGRREEYDVLDKRRGRDPEMGGKPQRRKNPQEGLYNELQKDKMAEAYSEIGMKGERRRGKGHDGLYQGLSTATKDTYDALHMQALPPR

SEQ ID NO: 29412 - protein, 301 aa, synthetic construct
SKSSDKSVCLFTDFDSQTNVSQSKDSDVYITDKCVLDMRSMDFKSNSAVAWSNKSDFACANAFNNSIIPEDTFFPSPESSDSTDHVKPKETENTKQPSKSCHKPKAIVHTEKVNMMSLTVLGLRMLFAKTVAVNFLLTAKLFFLLTARSKRSRLLHSDYMNMTPRRPGPTRKHYQPYAPPRDFAAYRSRVKFSRSADAPAYQQGQNQLYNELNLGRREEYDVLDKRRGRDPEMGGKPQRRKNPQEGLYNELQKDKMAEAYSEIGMKGERRRGKGHDGLYQGLSTATKDTYDALHMQALPPR

SEQ ID NO: 29413 - protein, 300 aa, synthetic construct
KSSDKSVCLFTDFDSQTNVSQSKDSDVYITDKCVLDMRSMDFKSNSAVAWSNKSDFACANAFNNSIIPEDTFFPSPESSDSTDHVKPKETENTKQPSKSCHKPKAIVHTEKVNMMSLTVLGLRMLFAKTVAVNFLLTAKLFFLLTARSKRSRLLHSDYMNMTPRRPGPTRKHYQPYAPPRDFAAYRSRVKFSRSADAPAYQQGQNQLYNELNLGRREEYDVLDKRRGRDPEMGGKPQRRKNPQEGLYNELQKDKMAEAYSEIGMKGERRRGKGHDGLYQGLSTATKDTYDALHMQALPPR

SEQ ID NO: 29414 - protein, 299 aa, synthetic construct
SSDKSVCLFTDFDSQTNVSQSKDSDVYITDKCVLDMRSMDFKSNSAVAWSNKSDFACANAFNNSIIPEDTFFPSPESSDSTDHVKPKETENTKQPSKSCHKPKAIVHTEKVNMMSLTVLGLRMLFAKTVAVNFLLTAKLFFLLTARSKRSRLLHSDYMNMTPRRPGPTRKHYQPYAPPRDFAAYRSRVKFSRSADAPAYQQGQNQLYNELNLGRREEYDVLDKRRGRDPEMGGKPQRRKNPQEGLYNELQKDKMAEAYSEIGMKGERRRGKGHDGLYQGLSTATKDTYDALHMQALPPR

SEQ ID NO: 29415 - protein, 298 aa, synthetic construct
SDKSVCLFTDFDSQTNVSQSKDSDVYITDKCVLDMRSMDFKSNSAVAWSNKSDFACANAFNNSIIPEDTFFPSPESSDSTDHVKPKETENTKQPSKSCHKPKAIVHTEKVNMMSLTVLGLRMLFAKTVAVNFLLTAKLFFLLTARSKRSRLLHSDYMNMTPRRPGPTRKHYQPYAPPRDFAAYRSRVKFSRSADAPAYQQGQNQLYNELNLGRREEYDVLDKRRGRDPEMGGKPQRRKNPQEGLYNELQKDKMAEAYSEIGMKGERRRGKGHDGLYQGLSTATKDTYDALHMQALPPR

SEQ ID NO: 29416 - protein, 297 aa, synthetic construct
DKSVCLFTDFDSQTNVSQSKDSDVYITDKCVLDMRSMDFKSNSAVAWSNKSDFACANAFNNSIIPEDTFFPSPESSDSTDHVKPKETENTKQPSKSCHKPKAIVHTEKVNMMSLTVLGLRMLFAKTVAVNFLLTAKLFFLLTARSKRSRLLHSDYMNMTPRRPGPTRKHYQPYAPPRDFAAYRSRVKFSRSADAPAYQQGQNQLYNELNLGRREEYDVLDKRRGRDPEMGGKPQRRKNPQEGLYNELQKDKMAEAYSEIGMKGERRRGKGHDGLYQGLSTATKDTYDALHMQALPPR

SEQ ID NO: 29417 - protein, 296 aa, synthetic construct
KSVCLFTDFDSQTNVSQSKDSDVYITDKCVLDMRSMDFKSNSAVAWSNKSDFACANAFNNSIIPEDTFFPSPESSDSTDHVKPKETENTKQPSKSCHKPKAIVHTEKVNMMSLTVLGLRMLFAKTVAVNFLLTAKLFFLLTARSKRSRLLHSDYMNMTPRRPGPTRKHYQPYAPPRDFAAYRSRVKFSRSADAPAYQQGQNQLYNELNLGRREEYDVLDKRRGRDPEMGGKPQRRKNPQEGLYNELQKDKMAEAYSEIGMKGERRRGKGHDGLYQGLSTATKDTYDALHMQALPPR

SEQ ID NO: 29418 - protein, 295 aa, synthetic construct
SVCLFTDFDSQTNVSQSKDSDVYITDKCVLDMRSMDFKSNSAVAWSNKSDFACANAFNNSIIPEDTFFPSPESSDSTDHVKPKETENTKQPSKSCHKPKAIVHTEKVNMMSLTVLGLRMLFAKTVAVNFLLTAKLFFLLTARSKRSRLLHSDYMNMTPRRPGPTRKHYQPYAPPRDFAAYRSRVKFSRSADAPAYQQGQNQLYNELNLGRREEYDVLDKRRGRDPEMGGKPQRRKNPQEGLYNELQKDKMAEAYSEIGMKGERRRGKGHDGLYQGLSTATKDTYDALHMQALPPR

SEQ ID NO: 29419 - protein, 294 aa, synthetic construct
VCLFTDFDSQTNVSQSKDSDVYITDKCVLDMRSMDFKSNSAVAWSNKSDFACANAFNNSIIPEDTFFPSPESSDSTDHVKPKETENTKQPSKSCHKPKAIVHTEKVNMMSLTVLGLRMLFAKTVAVNFLLTAKLFFLLTARSKRSRLLHSDYMNMTPRRPGPTRKHYQPYAPPRDFAAYRSRVKFSRSADAPAYQQGQNQLYNELNLGRREEYDVLDKRRGRDPEMGGKPQRRKNPQEGLYNELQKDKMAEAYSEIGMKGERRRGKGHDGLYQGLSTATKDTYDALHMQALPPR

SEQ ID NO: 29420 - protein, 289 aa, synthetic construct
DFDSQTNVSQSKDSDVYITDKCVLDMRSMDFKSNSAVAWSNKSDFACANAFNNSIIPEDTFFPSPESSDSTDHVKPKETENTKQPSKSCHKPKAIVHTEKVNMMSLTVLGLRMLFAKTVAVNFLLTAKLFFLLTARSKRSRLLHSDYMNMTPRRPGPTRKHYQPYAPPRDFAAYRSRVKFSRSADAPAYQQGQNQLYNELNLGRREEYDVLDKRRGRDPEMGGKPQRRKNPQEGLYNELQKDKMAEAYSEIGMKGERRRGKGHDGLYQGLSTATKDTYDALHMQALPPR

SEQ ID NO: 29421 - protein, 284 aa, synthetic construct
TNVSQSKDSDVYITDKCVLDMRSMDFKSNSAVAWSNKSDFACANAFNNSIIPEDTFFPSPESSDSTDHVKPKETENTKQPSKSCHKPKAIVHTEKVNMMSLTVLGLRMLFAKTVAVNFLLTAKLFFLLTARSKRSRLLHSDYMNMTPRRPGPTRKHYQPYAPPRDFAAYRSRVKFSRSADAPAYQQGQNQLYNELNLGRREEYDVLDKRRGRDPEMGGKPQRRKNPQEGLYNELQKDKMAEAYSEIGMKGERRRGKGHDGLYQGLSTATKDTYDALHMQALPPR

SEQ ID NO: 29422 - protein, 311 aa, synthetic construct; identical to SEQ ID NO: 29349

SEQ ID NO: 29423 - protein, 310 aa, synthetic construct
QNPDPAVYQLRDSKSSDKSVCLFTDFDSQTNVSQSKDSDVYITDKCVLDMRSMDFKSNSAVAWSNKSDFACANAFNNSIIPEDTFFPSPESSDSTDHVKPKETENTKQPSKSCHKPKAIVHTEKVNMMSLTVLGLRMLFAKTVAVNFLLTAKLFFLRSKRSRLLHSDYMNMTPRRPGPTRKHYQPYAPPRDFAAYRSRVKFSRSADAPAYQQGQNQLYNELNLGRREEYDVLDKRRGRDPEMGGKPQRRKNPQEGLYNELQKDKMAEAYSEIGMKGERRRGKGHDGLYQGLSTATKDTYDALHMQALPPR

SEQ ID NO: 29424 - protein, 309 aa, synthetic construct
NPDPAVYQLRDSKSSDKSVCLFTDFDSQTNVSQSKDSDVYITDKCVLDMRSMDFKSNSAVAWSNKSDFACANAFNNSIIPEDTFFPSPESSDSTDHVKPKETENTKQPSKSCHKPKAIVHTEKVNMMSLTVLGLRMLFAKTVAVNFLLTAKLFFLRSKRSRLLHSDYMNMTPRRPGPTRKHYQPYAPPRDFAAYRSRVKFSRSADAPAYQQGQNQLYNELNLGRREEYDVLDKRRGRDPEMGGKPQRRKNPQEGLYNELQKDKMAEAYSEIGMKGERRRGKGHDGLYQGLSTATKDTYDALHMQALPPR

SEQ ID NO: 29425 - protein, 308 aa, synthetic construct
PDPAVYQLRDSKSSDKSVCLFTDFDSQTNVSQSKDSDVYITDKCVLDMRSMDFKSNSAVAWSNKSDFACANAFNNSIIPEDTFFPSPESSDSTDHVKPKETENTKQPSKSCHKPKAIVHTEKVNMMSLTVLGLRMLFAKTVAVNFLLTAKLFFLRSKRSRLLHSDYMNMTPRRPGPTRKHYQPYAPPRDFAAYRSRVKFSRSADAPAYQQGQNQLYNELNLGRREEYDVLDKRRGRDPEMGGKPQRRKNPQEGLYNELQKDKMAEAYSEIGMKGERRRGKGHDGLYQGLSTATKDTYDALHMQALPPR

SEQ ID NO: 29426 - protein, 307 aa, synthetic construct
DPAVYQLRDSKSSDKSVCLFTDFDSQTNVSQSKDSDVYITDKCVLDMRSMDFKSNSAVAWSNKSDFACANAFNNSIIPEDTFFPSPESSDSTDHVKPKETENTKQPSKSCHKPKAIVHTEKVNMMSLTVLGLRMLFAKTVAVNFLLTAKLFFLRSKRSRLLHSDYMNMTPRRPGPTRKHYQPYAPPRDFAAYRSRVKFSRSADAPAYQQGQNQLYNELNLGRREEYDVLDKRRGRDPEMGGKPQRRKNPQEGLYNELQKDKMAEAYSEIGMKGERRRGKGHDGLYQGLSTATKDTYDALHMQALPPR

SEQ ID NO: 29427 - protein, 306 aa, synthetic construct
PAVYQLRDSKSSDKSVCLFTDFDSQTNVSQSKDSDVYITDKCVLDMRSMDFKSNSAVAWSNKSDFACANAFNNSIIPEDTFFPSPESSDSTDHVKPKETENTKQPSKSCHKPKAIVHTEKVNMMSLTVLGLRMLFAKTVAVNFLLTAKLFFLRSKRSRLLHSDYMNMTPRRPGPTRKHYQPYAPPRDFAAYRSRVKFSRSADAPAYQQGQNQLYNELNLGRREEYDVLDKRRGRDPEMGGKPQRRKNPQEGLYNELQKDKMAEAYSEIGMKGERRRGKGHDGLYQGLSTATKDTYDALHMQALPPR

SEQ ID NO: 29428 - protein, 305 aa, synthetic construct
AVYQLRDSKSSDKSVCLFTDFDSQTNVSQSKDSDVYITDKCVLDMRSMDFKSNSAVAWSNKSDFACANAFNNSIIPEDTFFPSPESSDSTDHVKPKETENTKQPSKSCHKPKAIVHTEKVNMMSLTVLGLRMLFAKTVAVNFLLTAKLFFLRSKRSRLLHSDYMNMTPRRPGPTRKHYQPYAPPRDFAAYRSRVKFSRSADAPAYQQGQNQLYNELNLGRREEYDVLDKRRGRDPEMGGKPQRRKNPQEGLYNELQKDKMAEAYSEIGMKGERRRGKGHDGLYQGLSTATKDTYDALHMQALPPR

SEQ ID NO: 29429 - protein, 304 aa, synthetic construct
VYQLRDSKSSDKSVCLFTDFDSQTNVSQSKDSDVYITDKCVLDMRSMDFKSNSAVAWSNKSDFACANAFNNSIIPEDTFFPSPESSDSTDHVKPKETENTKQPSKSCHKPKAIVHTEKVNMMSLTVLGLRMLFAKTVAVNFLLTAKLFFLRSKRSRLLHSDYMNMTPRRPGPTRKHYQPYAPPRDFAAYRSRVKFSRSADAPAYQQGQNQLYNELNLGRREEYDVLDKRRGRDPEMGGKPQRRKNPQEGLYNELQKDKMAEAYSEIGMKGERRRGKGHDGLYQGLSTATKDTYDALHMQALPPR

SEQ ID NO: 29430 - protein, 303 aa, synthetic construct
YQLRDSKSSDKSVCLFTDFDSQTNVSQSKDSDVYITDKCVLDMRSMDFKSNSAVAWSNKSDFACANAFNNSIIPEDTFFPSPESSDSTDHVKPKETENTKQPSKSCHKPKAIVHTEKVNMMSLTVLGLRMLFAKTVAVNFLLTAKLFFLRSKRSRLLHSDYMNMTPRRPGPTRKHYQPYAPPRDFAAYRSRVKFSRSADAPAYQQGQNQLYNELNLGRREEYDVLDKRRGRDPEMGGKPQRRKNPQEGLYNELQKDKMAEAYSEIGMKGERRRGKGHDGLYQGLSTATKDTYDALHMQALPPR

SEQ ID NO: 29431 - protein, 302 aa, synthetic construct
QLRDSKSSDKSVCLFTDFDSQTNVSQSKDSDVYITDKCVLDMRSMDFKSNSAVAWSNKSDFACANAFNNSIIPEDTFFPSPESSDSTDHVKPKETENTKQPSKSCHKPKAIVHTEKVNMMSLTVLGLRMLFAKTVAVNFLLTAKLFFLRSKRSRLLHSDYMNMTPRRPGPTRKHYQPYAPPRDFAAYRSRVKFSRSADAPAYQQGQNQLYNELNLGRREEYDVLDKRRGRDPEMGGKPQRRKNPQEGLYNELQKDKMAEAYSEIGMKGERRRGKGHDGLYQGLSTATKDTYDALHMQALPPR

SEQ ID NO: 29432 - protein, 301 aa, synthetic construct
LRDSKSSDKSVCLFTDFDSQTNVSQSKDSDVYITDKCVLDMRSMDFKSNSAVAWSNKSDFACANAFNNSIIPEDTFFPSPESSDSTDHVKPKETENTKQPSKSCHKPKAIVHTEKVNMMSLTVLGLRMLFAKTVAVNFLLTAKLFFLRSKRSRLLHSDYMNMTPRRPGPTRKHYQPYAPPRDFAAYRSRVKFSRSADAPAYQQGQNQLYNELNLGRREEYDVLDKRRGRDPEMGGKPQRRKNPQEGLYNELQKDKMAEAYSEIGMKGERRRGKGHDGLYQGLSTATKDTYDALHMQALPPR

SEQ ID NO: 29433 - protein, 300 aa, synthetic construct
RDSKSSDKSVCLFTDFDSQTNVSQSKDSDVYITDKCVLDMRSMDFKSNSAVAWSNKSDFACANAFNNSIIPEDTFFPSPESSDSTDHVKPKETENTKQPSKSCHKPKAIVHTEKVNMMSLTVLGLRMLFAKTVAVNFLLTAKLFFLRSKRSRLLHSDYMNMTPRRPGPTRKHYQPYAPPRDFAAYRSRVKFSRSADAPAYQQGQNQLYNELNLGRREEYDVLDKRRGRDPEMGGKPQRRKNPQEGLYNELQKDKMAEAYSEIGMKGERRRGKGHDGLYQGLSTATKDTYDALHMQALPPR

SEQ ID NO: 29434 - protein, 299 aa, synthetic construct
DSKSSDKSVCLFTDFDSQTNVSQSKDSDVYITDKCVLDMRSMDFKSNSAVAWSNKSDFACANAFNNSIIPEDTFFPSPESSDSTDHVKPKETENTKQPSKSCHKPKAIVHTEKVNMMSLTVLGLRMLFAKTVAVNFLLTAKLFFLRSKRSRLLHSDYMNMTPRRPGPTRKHYQPYAPPRDFAAYRSRVKFSRSADAPAYQQGQNQLYNELNLGRREEYDVLDKRRGRDPEMGGKPQRRKNPQEGLYNELQKDKMAEAYSEIGMKGERRRGKGHDGLYQGLSTATKDTYDALHMQALPPR

SEQ ID NO: 29435 - protein, 298 aa, synthetic construct
SKSSDKSVCLFTDFDSQTNVSQSKDSDVYITDKCVLDMRSMDFKSNSAVAWSNKSDFACANAFNNSIIPEDTFFPSPESSDSTDHVKPKETENTKQPSKSCHKPKAIVHTEKVNMMSLTVLGLRMLFAKTVAVNFLLTAKLFFLRSKRSRLLHSDYMNMTPRRPGPTRKHYQPYAPPRDFAAYRSRVKFSRSADAPAYQQGQNQLYNELNLGRREEYDVLDKRRGRDPEMGGKPQRRKNPQEGLYNELQKDKMAEAYSEIGMKGERRRGKGHDGLYQGLSTATKDTYDALHMQALPPR

SEQ ID NO: 29436 - protein, 297 aa, synthetic construct
KSSDKSVCLFTDFDSQTNVSQSKDSDVYITDKCVLDMRSMDFKSNSAVAWSNKSDFACANAFNNSIIPEDTFFPSPESSDSTDHVKPKETENTKQPSKSCHKPKAIVHTEKVNMMSLTVLGLRMLFAKTVAVNFLLTAKLFFLRSKRSRLLHSDYMNMTPRRPGPTRKHYQPYAPPRDFAAYRSRVKFSRSADAPAYQQGQNQLYNELNLGRREEYDVLDKRRGRDPEMGGKPQRRKNPQEGLYNELQKDKMAEAYSEIGMKGERRRGKGHDGLYQGLSTATKDTYDALHMQALPPR

SEQ ID NO: 29437 - protein, 296 aa, synthetic construct
SSDKSVCLFTDFDSQTNVSQSKDSDVYITDKCVLDMRSMDFKSNSAVAWSNKSDFACANAFNNSIIPEDTFFPSPESSDSTDHVKPKETENTKQPSKSCHKPKAIVHTEKVNMMSLTVLGLRMLFAKTVAVNFLLTAKLFFLRSKRSRLLHSDYMNMTPRRPGPTRKHYQPYAPPRDFAAYRSRVKFSRSADAPAYQQGQNQLYNELNLGRREEYDVLDKRRGRDPEMGGKPQRRKNPQEGLYNELQKDKMAEAYSEIGMKGERRRGKGHDGLYQGLSTATKDTYDALHMQALPPR

SEQ ID NO: 29438 - protein, 295 aa, synthetic construct
SDKSVCLFTDFDSQTNVSQSKDSDVYITDKCVLDMRSMDFKSNSAVAWSNKSDFACANAFNNSIIPEDTFFPSPESSDSTDHVKPKETENTKQPSKSCHKPKAIVHTEKVNMMSLTVLGLRMLFAKTVAVNFLLTAKLFFLRSKRSRLLHSDYMNMTPRRPGPTRKHYQPYAPPRDFAAYRSRVKFSRSADAPAYQQGQNQLYNELNLGRREEYDVLDKRRGRDPEMGGKPQRRKNPQEGLYNELQKDKMAEAYSEIGMKGERRRGKGHDGLYQGLSTATKDTYDALHMQALPPR

SEQ ID NO: 29439 - protein, 294 aa, synthetic construct
DKSVCLFTDFDSQTNVSQSKDSDVYITDKCVLDMRSMDFKSNSAVAWSNKSDFACANAFNNSIIPEDTFFPSPESSDSTDHVKPKETENTKQPSKSCHKPKAIVHTEKVNMMSLTVLGLRMLFAKTVAVNFLLTAKLFFLRSKRSRLLHSDYMNMTPRRPGPTRKHYQPYAPPRDFAAYRSRVKFSRSADAPAYQQGQNQLYNELNLGRREEYDVLDKRRGRDPEMGGKPQRRKNPQEGLYNELQKDKMAEAYSEIGMKGERRRGKGHDGLYQGLSTATKDTYDALHMQALPPR

SEQ ID NO: 29440 - protein, 293 aa, synthetic construct
KSVCLFTDFDSQTNVSQSKDSDVYITDKCVLDMRSMDFKSNSAVAWSNKSDFACANAFNNSIIPEDTFFPSPESSDSTDHVKPKETENTKQPSKSCHKPKAIVHTEKVNMMSLTVLGLRMLFAKTVAVNFLLTAKLFFLRSKRSRLLHSDYMNMTPRRPGPTRKHYQPYAPPRDFAAYRSRVKFSRSADAPAYQQGQNQLYNELNLGRREEYDVLDKRRGRDPEMGGKPQRRKNPQEGLYNELQKDKMAEAYSEIGMKGERRRGKGHDGLYQGLSTATKDTYDALHMQALPPR

SEQ ID NO: 29441 - protein, 292 aa, synthetic construct
SVCLFTDFDSQTNVSQSKDSDVYITDKCVLDMRSMDFKSNSAVAWSNKSDFACANAFNNSIIPEDTFFPSPESSDSTDHVKPKETENTKQPSKSCHKPKAIVHTEKVNMMSLTVLGLRMLFAKTVAVNFLLTAKLFFLRSKRSRLLHSDYMNMTPRRPGPTRKHYQPYAPPRDFAAYRSRVKFSRSADAPAYQQGQNQLYNELNLGRREEYDVLDKRRGRDPEMGGKPQRRKNPQEGLYNELQKDKMAEAYSEIGMKGERRRGKGHDGLYQGLSTATKDTYDALHMQALPPR

SEQ ID NO: 29442 - protein, 291 aa, synthetic construct
VCLFTDFDSQTNVSQSKDSDVYITDKCVLDMRSMDFKSNSAVAWSNKSDFACANAFNNSIIPEDTFFPSPESSDSTDHVKPKETENTKQPSKSCHKPKAIVHTEKVNMMSLTVLGLRMLFAKTVAVNFLLTAKLFFLRSKRSRLLHSDYMNMTPRRPGPTRKHYQPYAPPRDFAAYRSRVKFSRSADAPAYQQGQNQLYNELNLGRREEYDVLDKRRGRDPEMGGKPQRRKNPQEGLYNELQKDKMAEAYSEIGMKGERRRGKGHDGLYQGLSTATKDTYDALHMQALPPR

SEQ ID NO: 29443 - protein, 286 aa, synthetic construct
DFDSQTNVSQSKDSDVYITDKCVLDMRSMDFKSNSAVAWSNKSDFACANAFNNSIIPEDTFFPSPESSDSTDHVKPKETENTKQPSKSCHKPKAIVHTEKVNMMSLTVLGLRMLFAKTVAVNFLLTAKLFFLRSKRSRLLHSDYMNMTPRRPGPTRKHYQPYAPPRDFAAYRSRVKFSRSADAPAYQQGQNQLYNELNLGRREEYDVLDKRRGRDPEMGGKPQRRKNPQEGLYNELQKDKMAEAYSEIGMKGERRRGKGHDGLYQGLSTATKDTYDALHMQALPPR

SEQ ID NO: 29444 - protein, 281 aa, synthetic construct
TNVSQSKDSDVYITDKCVLDMRSMDFKSNSAVAWSNKSDFACANAFNNSIIPEDTFFPSPESSDSTDHVKPKETENTKQPSKSCHKPKAIVHTEKVNMMSLTVLGLRMLFAKTVAVNFLLTAKLFFLRSKRSRLLHSDYMNMTPRRPGPTRKHYQPYAPPRDFAAYRSRVKFSRSADAPAYQQGQNQLYNELNLGRREEYDVLDKRRGRDPEMGGKPQRRKNPQEGLYNELQKDKMAEAYSEIGMKGERRRGKGHDGLYQGLSTATKDTYDALHMQALPPR

SEQ ID NO: 29445 - protein, 327 aa, synthetic construct
GQPKANPTVTLFPPSSEELQANKATLVCLISDFYPGAVTVAWKADGSPVKAGVETTKPSKQSNNKYAASSYLSLTPEQWKSHRSYSCQVTHEGSTVEKTVAPTECSPIKTDVITMDPKDNCSKDANDTLLLQLTNTSAYYMYLLLLLKSVVYFAIITCCLLRRTAFCCNGEKSRSKRSRLLHSDYMNMTPRRPGPTRKHYQPYAPPRDFAAYRSRVKFSRSADAPAYQQGQNQLYNELNLGRREEYDVLDKRRGRDPEMGGKPQRRKNPQEGLYNELQKDKMAEAYSEIGMKGERRRGKGHDGLYQGLSTATKDTYDALHMQALPPR

SEQ ID NO: 29446 - protein, 326 aa, synthetic construct
QPKANPTVTLFPPSSEELQANKATLVCLISDFYPGAVTVAWKADGSPVKAGVETTKPSKQSNNKYAASSYLSLTPEQWKSHRSYSCQVTHEGSTVEKTVAPTECSPIKTDVITMDPKDNCSKDANDTLLLQLTNTSAYYMYLLLLLKSVVYFAIITCCLLRRTAFCCNGEKSRSKRSRLLHSDYMNMTPRRPGPTRKHYQPYAPPRDFAAYRSRVKFSRSADAPAYQQGQNQLYNELNLGRREEYDVLDKRRGRDPEMGGKPQRRKNPQEGLYNELQKDKMAEAYSEIGMKGERRRGKGHDGLYQGLSTATKDTYDALHMQALPPR

SEQ ID NO: 29447 - protein, 325 aa, synthetic construct
PKANPTVTLFPPSSEELQANKATLVCLISDFYPGAVTVAWKADGSPVKAGVETTKPSKQSNNKYAASSYLSLTPEQWKSHRSYSCQVTHEGSTVEKTVAPTECSPIKTDVITMDPKDNCSKDANDTLLLQLTNTSAYYMYLLLLLKSVVYFAIITCCLLRRTAFCCNGEKSRSKRSRLLHSDYMNMTPRRPGPTRKHYQPYAPPRDFAAYRSRVKFSRSADAPAYQQGQNQLYNELNLGRREEYDVLDKRRGRDPEMGGKPQRRKNPQEGLYNELQKDKMAEAYSEIGMKGERRRGKGHDGLYQGLSTATKDTYDALHMQALPPR

SEQ ID NO: 29448 - protein, 324 aa, synthetic construct
KANPTVTLFPPSSEELQANKATLVCLISDFYPGAVTVAWKADGSPVKAGVETTKPSKQSNNKYAASSYLSLTPEQWKSHRSYSCQVTHEGSTVEKTVAPTECSPIKTDVITMDPKDNCSKDANDTLLLQLTNTSAYYMYLLLLLKSVVYFAIITCCLLRRTAFCCNGEKSRSKRSRLLHSDYMNMTPRRPGPTRKHYQPYAPPRDFAAYRSRVKFSRSADAPAYQQGQNQLYNELNLGRREEYDVLDKRRGRDPEMGGKPQRRKNPQEGLYNELQKDKMAEAYSEIGMKGERRRGKGHDGLYQGLSTATKDTYDALHMQALPPR

SEQ ID NO: 29449 - protein, 323 aa, synthetic construct
ANPTVTLFPPSSEELQANKATLVCLISDFYPGAVTVAWKADGSPVKAGVETTKPSKQSNNKYAASSYLSLTPEQWKSHRSYSCQVTHEGSTVEKTVAPTECSPIKTDVITMDPKDNCSKDANDTLLLQLTNTSAYYMYLLLLLKSVVYFAIITCCLLRRTAFCCNGEKSRSKRSRLLHSDYMNMTPRRPGPTRKHYQPYAPPRDFAAYRSRVKFSRSADAPAYQQGQNQLYNELNLGRREEYDVLDKRRGRDPEMGGKPQRRKNPQEGLYNELQKDKMAEAYSEIGMKGERRRGKGHDGLYQGLSTATKDTYDALHMQALPPR

SEQ ID NO: 29450 - protein, 322 aa, synthetic construct
NPTVTLFPPSSEELQANKATLVCLISDFYPGAVTVAWKADGSPVKAGVETTKPSKQSNNKYAASSYLSLTPEQWKSHRSYSCQVTHEGSTVEKTVAPTECSPIKTDVITMDPKDNCSKDANDTLLLQLTNTSAYYMYLLLLLKSVVYFAIITCCLLRRTAFCCNGEKSRSKRSRLLHSDYMNMTPRRPGPTRKHYQPYAPPRDFAAYRSRVKFSRSADAPAYQQGQNQLYNELNLGRREEYDVLDKRRGRDPEMGGKPQRRKNPQEGLYNELQKDKMAEAYSEIGMKGERRRGKGHDGLYQGLSTATKDTYDALHMQALPPR

SEQ ID NO: 29451 - protein, 321 aa, synthetic construct
PTVTLFPPSSEELQANKATLVCLISDFYPGAVTVAWKADGSPVKAGVETTKPSKQSNNKYAASSYLSLTPEQWKSHRSYSCQVTHEGSTVEKTVAPTECSPIKTDVITMDPKDNCSKDANDTLLLQLTNTSAYYMYLLLLLKSVVYFAIITCCLLRRTAFCCNGEKSRSKRSRLLHSDYMNMTPRRPGPTRKHYQPYAPPRDFAAYRSRVKFSRSADAPAYQQGQNQLYNELNLGRREEYDVLDKRRGRDPEMGGKPQRRKNPQEGLYNELQKDKMAEAYSEIGMKGERRRGKGHDGLYQGLSTATKDTYDALHMQALPPR

SEQ ID NO: 29452 - protein, 320 aa, synthetic construct
TVTLFPPSSEELQANKATLVCLISDFYPGAVTVAWKADGSPVKAGVETTKPSKQSNNKYAASSYLSLTPEQWKSHRSYSCQVTHEGSTVEKTVAPTECSPIKTDVITMDPKDNCSKDANDTLLLQLTNTSAYYMYLLLLLKSVVYFAIITCCLLRRTAFCCNGEKSRSKRSRLLHSDYMNMTPRRPGPTRKHYQPYAPPRDFAAYRSRVKFSRSADAPAYQQGQNQLYNELNLGRREEYDVLDKRRGRDPEMGGKPQRRKNPQEGLYNELQKDKMAEAYSEIGMKGERRRGKGHDGLYQGLSTATKDTYDALHMQALPPR

SEQ ID NO: 29453 - protein, 319 aa, synthetic construct
VTLFPPSSEELQANKATLVCLISDFYPGAVTVAWKADGSPVKAGVETTKPSKQSNNKYAASSYLSLTPEQWKSHRSYSCQVTHEGSTVEKTVAPTECSPIKTDVITMDPKDNCSKDANDTLLLQLTNTSAYYMYLLLLLKSVVYFAIITCCLLRRTAFCCNGEKSRSKRSRLLHSDYMNMTPRRPGPTRKHYQPYAPPRDFAAYRSRVKFSRSADAPAYQQGQNQLYNELNLGRREEYDVLDKRRGRDPEMGGKPQRRKNPQEGLYNELQKDKMAEAYSEIGMKGERRRGKGHDGLYQGLSTATKDTYDALHMQALPPR

SEQ ID NO: 29454 - protein, 318 aa, synthetic construct
TLFPPSSEELQANKATLVCLISDFYPGAVTVAWKADGSPVKAGVETTKPSKQSNNKYAASSYLSLTPEQWKSHRSYSCQVTHEGSTVEKTVAPTECSPIKTDVITMDPKDNCSKDANDTLLLQLTNTSAYYMYLLLLLKSVVYFAIITCCLLRRTAFCCNGEKSRSKRSRLLHSDYMNMTPRRPGPTRKHYQPYAPPRDFAAYRSRVKFSRSADAPAYQQGQNQLYNELNLGRREEYDVLDKRRGRDPEMGGKPQRRKNPQEGLYNELQKDKMAEAYSEIGMKGERRRGKGHDGLYQGLSTATKDTYDALHMQALPPR

SEQ ID NO: 29455 - protein, 317 aa, synthetic construct
LFPPSSEELQANKATLVCLISDFYPGAVTVAWKADGSPVKAGVETTKPSKQSNNKYAASSYLSLTPEQWKSHRSYSCQVTHEGSTVEKTVAPTECSPIKTDVITMDPKDNCSKDANDTLLLQLTNTSAYYMYLLLLLKSVVYFAIITCCLLRRTAFCCNGEKSRSKRSRLLHSDYMNMTPRRPGPTRKHYQPYAPPRDFAAYRSRVKFSRSADAPAYQQGQNQLYNELNLGRREEYDVLDKRRGRDPEMGGKPQRRKNPQEGLYNELQKDKMAEAYSEIGMKGERRRGKGHDGLYQGLSTATKDTYDALHMQALPPR

SEQ ID NO: 29456 - protein, 328 aa, synthetic construct
GQPKANPTVTLFPPSSEELQANKATLVCLISDFYPGAVTVAWKADGSPVKAGVETTKPSKQSNNKYAASSYLSLTPEQWKSHRSYSCQVTHEGSTVEKTVAPTECSEVKTDSTDHVKPKETENTKQPSKSCHKPKAIVHTEKVNMMSLTVLGLRMLFAKTVAVNFLLTAKLFFLRSKRSRLLHSDYMNMTPRRPGPTRKHYQPYAPPRDFAAYRSRVKFSRSADAPAYQQGQNQLYNELNLGRREEYDVLDKRRGRDPEMGGKPQRRKNPQEGLYNELQKDKMAEAYSEIGMKGERRRGKGHDGLYQGLSTATKDTYDALHMQALPPR

SEQ ID NO: 29457 - protein, 327 aa, synthetic construct
QPKANPTVTLFPPSSEELQANKATLVCLISDFYPGAVTVAWKADGSPVKAGVETTKPSKQSNNKYAASSYLSLTPEQWKSHRSYSCQVTHEGSTVEKTVAPTECSEVKTDSTDHVKPKETENTKQPSKSCHKPKAIVHTEKVNMMSLTVLGLRMLFAKTVAVNFLLTAKLFFLRSKRSRLLHSDYMNMTPRRPGPTRKHYQPYAPPRDFAAYRSRVKFSRSADAPAYQQGQNQLYNELNLGRREEYDVLDKRRGRDPEMGGKPQRRKNPQEGLYNELQKDKMAEAYSEIGMKGERRRGKGHDGLYQGLSTATKDTYDALHMQALPPR

SEQ ID NO: 29458 - protein, 326 aa, synthetic construct
PKANPTVTLFPPSSEELQANKATLVCLISDFYPGAVTVAWKADGSPVKAGVETTKPSKQSNNKYAASSYLSLTPEQWKSHRSYSCQVTHEGSTVEKTVAPTECSEVKTDSTDHVKPKETENTKQPSKSCHKPKAIVHTEKVNMMSLTVLGLRMLFAKTVAVNFLLTAKLFFLRSKRSRLLHSDYMNMTPRRPGPTRKHYQPYAPPRDFAAYRSRVKFSRSADAPAYQQGQNQLYNELNLGRREEYDVLDKRRGRDPEMGGKPQRRKNPQEGLYNELQKDKMAEAYSEIGMKGERRRGKGHDGLYQGLSTATKDTYDALHMQALPPR

SEQ ID NO: 29459 - protein, 325 aa, synthetic construct
KANPTVTLFPPSSEELQANKATLVCLISDFYPGAVTVAWKADGSPVKAGVETTKPSKQSNNKYAASSYLSLTPEQWKSHRSYSCQVTHEGSTVEKTVAPTECSEVKTDSTDHVKPKETENTKQPSKSCHKPKAIVHTEKVNMMSLTVLGLRMLFAKTVAVNFLLTAKLFFLRSKRSRLLHSDYMNMTPRRPGPTRKHYQPYAPPRDFAAYRSRVKFSRSADAPAYQQGQNQLYNELNLGRREEYDVLDKRRGRDPEMGGKPQRRKNPQEGLYNELQKDKMAEAYSEIGMKGERRRGKGHDGLYQGLSTATKDTYDALHMQALPPR

SEQ ID NO: 29460 - protein, 324 aa, synthetic construct
ANPTVTLFPPSSEELQANKATLVCLISDFYPGAVTVAWKADGSPVKAGVETTKPSKQSNNKYAASSYLSLTPEQWKSHRSYSCQVTHEGSTVEKTVAPTECSEVKTDSTDHVKPKETENTKQPSKSCHKPKAIVHTEKVNMMSLTVLGLRMLFAKTVAVNFLLTAKLFFLRSKRSRLLHSDYMNMTPRRPGPTRKHYQPYAPPRDFAAYRSRVKFSRSADAPAYQQGQNQLYNELNLGRREEYDVLDKRRGRDPEMGGKPQRRKNPQEGLYNELQKDKMAEAYSEIGMKGERRRGKGHDGLYQGLSTATKDTYDALHMQALPPR

SEQ ID NO: 29461 - protein, 323 aa, synthetic construct
NPTVTLFPPSSEELQANKATLVCLISDFYPGAVTVAWKADGSPVKAGVETTKPSKQSNNKYAASSYLSLTPEQWKSHRSYSCQVTHEGSTVEKTVAPTECSEVKTDSTDHVKPKETENTKQPSKSCHKPKAIVHTEKVNMMSLTVLGLRMLFAKTVAVNFLLTAKLFFLRSKRSRLLHSDYMNMTPRRPGPTRKHYQPYAPPRDFAAYRSRVKFSRSADAPAYQQGQNQLYNELNLGRREEYDVLDKRRGRDPEMGGKPQRRKNPQEGLYNELQKDKMAEAYSEIGMKGERRRGKGHDGLYQGLSTATKDTYDALHMQALPPR

SEQ ID NO: 29462 - protein, 322 aa, synthetic construct
PTVTLFPPSSEELQANKATLVCLISDFYPGAVTVAWKADGSPVKAGVETTKPSKQSNNKYAASSYLSLTPEQWKSHRSYSCQVTHEGSTVEKTVAPTECSEVKTDSTDHVKPKETENTKQPSKSCHKPKAIVHTEKVNMMSLTVLGLRMLFAKTVAVNFLLTAKLFFLRSKRSRLLHSDYMNMTPRRPGPTRKHYQPYAPPRDFAAYRSRVKFSRSADAPAYQQGQNQLYNELNLGRREEYDVLDKRRGRDPEMGGKPQRRKNPQEGLYNELQKDKMAEAYSEIGMKGERRRGKGHDGLYQGLSTATKDTYDALHMQALPPR

SEQ ID NO: 29463 - protein, 321 aa, synthetic construct
TVTLFPPSSEELQANKATLVCLISDFYPGAVTVAWKADGSPVKAGVETTKPSKQSNNKYAASSYLSLTPEQWKSHRSYSCQVTHEGSTVEKTVAPTECSEVKTDSTDHVKPKETENTKQPSKSCHKPKAIVHTEKVNMMSLTVLGLRMLFAKTVAVNFLLTAKLFFLRSKRSRLLHSDYMNMTPRRPGPTRKHYQPYAPPRDFAAYRSRVKFSRSADAPAYQQGQNQLYNELNLGRREEYDVLDKRRGRDPEMGGKPQRRKNPQEGLYNELQKDKMAEAYSEIGMKGERRRGKGHDGLYQGLSTATKDTYDALHMQALPPR

SEQ ID NO: 29464 - protein, 320 aa, synthetic construct
VTLFPPSSEELQANKATLVCLISDFYPGAVTVAWKADGSPVKAGVETTKPSKQSNNKYAASSYLSLTPEQWKSHRSYSCQVTHEGSTVEKTVAPTECSEVKTDSTDHVKPKETENTKQPSKSCHKPKAIVHTEKVNMMSLTVLGLRMLFAKTVAVNFLLTAKLFFLRSKRSRLLHSDYMNMTPRRPGPTRKHYQPYAPPRDFAAYRSRVKFSRSADAPAYQQGQNQLYNELNLGRREEYDVLDKRRGRDPEMGGKPQRRKNPQEGLYNELQKDKMAEAYSEIGMKGERRRGKGHDGLYQGLSTATKDTYDALHMQALPPR

SEQ ID NO: 29465 - protein, 319 aa, synthetic construct
TLFPPSSEELQANKATLVCLISDFYPGAVTVAWKADGSPVKAGVETTKPSKQSNNKYAASSYLSLTPEQWKSHRSYSCQVTHEGSTVEKTVAPTECSEVKTDSTDHVKPKETENTKQPSKSCHKPKAIVHTEKVNMMSLTVLGLRMLFAKTVAVNFLLTAKLFFLRSKRSRLLHSDYMNMTPRRPGPTRKHYQPYAPPRDFAAYRSRVKFSRSADAPAYQQGQNQLYNELNLGRREEYDVLDKRRGRDPEMGGKPQRRKNPQEGLYNELQKDKMAEAYSEIGMKGERRRGKGHDGLYQGLSTATKDTYDALHMQALPPR

SEQ ID NO: 29466 - protein, 318 aa, synthetic construct
LFPPSSEELQANKATLVCLISDFYPGAVTVAWKADGSPVKAGVETTKPSKQSNNKYAASSYLSLTPEQWKSHRSYSCQVTHEGSTVEKTVAPTECSEVKTDSTDHVKPKETENTKQPSKSCHKPKAIVHTEKVNMMSLTVLGLRMLFAKTVAVNFLLTAKLFFLRSKRSRLLHSDYMNMTPRRPGPTRKHYQPYAPPRDFAAYRSRVKFSRSADAPAYQQGQNQLYNELNLGRREEYDVLDKRRGRDPEMGGKPQRRKNPQEGLYNELQKDKMAEAYSEIGMKGERRRGKGHDGLYQGLSTATKDTYDALHMQALPPR

SEQ ID NO: 29467 - protein, 313 aa, synthetic construct
GQPKANPTVTLFPPSSEELQANKATLVCLISDFYPGAVTVAWKADGSPVKAGVETTKPSKQSNNKYAASSYLSLTPEQWKSHRSYSCQVTHEGSTVEKTVAPTECSGRADCGFTSESYQQGVLSATILYEILLGKATLYAVLVSALVLMAMVKRKDSRGRSKRSRLLHSDYMNMTPRRPGPTRKHYQPYAPPRDFAAYRSRVKFSRSADAPAYQQGQNQLYNELNLGRREEYDVLDKRRGRDPEMGGKPQRRKNPQEGLYNELQKDKMAEAYSEIGMKGERRRGKGHDGLYQGLSTATKDTYDALHMQALPPR

SEQ ID NO: 29468 - protein, 312 aa, synthetic construct
QPKANPTVTLFPPSSEELQANKATLVCLISDFYPGAVTVAWKADGSPVKAGVETTKPSKQSNNKYAASSYLSLTPEQWKSHRSYSCQVTHEGSTVEKTVAPTECSGRADCGFTSESYQQGVLSATILYEILLGKATLYAVLVSALVLMAMVKRKDSRGRSKRSRLLHSDYMNMTPRRPGPTRKHYQPYAPPRDFAAYRSRVKFSRSADAPAYQQGQNQLYNELNLGRREEYDVLDKRRGRDPEMGGKPQRRKNPQEGLYNELQKDKMAEAYSEIGMKGERRRGKGHDGLYQGLSTATKDTYDALHMQALPPR

SEQ ID NO: 29469 - protein, 311 aa, synthetic construct
PKANPTVTLFPPSSEELQANKATLVCLISDFYPGAVTVAWKADGSPVKAGVETTKPSKQSNNKYAASSYLSLTPEQWKSHRSYSCQVTHEGSTVEKTVAPTECSGRADCGFTSESYQQGVLSATILYEILLGKATLYAVLVSALVLMAMVKRKDSRGRSKRSRLLHSDYMNMTPRRPGPTRKHYQPYAPPRDFAAYRSRVKFSRSADAPAYQQGQNQLYNELNLGRREEYDVLDKRRGRDPEMGGKPQRRKNPQEGLYNELQKDKMAEAYSEIGMKGERRRGKGHDGLYQGLSTATKDTYDALHMQALPPR

SEQ ID NO: 29470 - protein, 310 aa, synthetic construct
KANPTVTLFPPSSEELQANKATLVCLISDFYPGAVTVAWKADGSPVKAGVETTKPSKQSNNKYAASSYLSLTPEQWKSHRSYSCQVTHEGSTVEKTVAPTECSGRADCGFTSESYQQGVLSATILYEILLGKATLYAVLVSALVLMAMVKRKDSRGRSKRSRLLHSDYMNMTPRRPGPTRKHYQPYAPPRDFAAYRSRVKFSRSADAPAYQQGQNQLYNELNLGRREEYDVLDKRRGRDPEMGGKPQRRKNPQEGLYNELQKDKMAEAYSEIGMKGERRRGKGHDGLYQGLSTATKDTYDALHMQALPPR

SEQ ID NO: 29471 - protein, 309 aa, synthetic construct
ANPTVTLFPPSSEELQANKATLVCLISDFYPGAVTVAWKADGSPVKAGVETTKPSKQSNNKYAASSYLSLTPEQWKSHRSYSCQVTHEGSTVEKTVAPTECSGRADCGFTSESYQQGVLSATILYEILLGKATLYAVLVSALVLMAMVKRKDSRGRSKRSRLLHSDYMNMTPRRPGPTRKHYQPYAPPRDFAAYRSRVKFSRSADAPAYQQGQNQLYNELNLGRREEYDVLDKRRGRDPEMGGKPQRRKNPQEGLYNELQKDKMAEAYSEIGMKGERRRGKGHDGLYQGLSTATKDTYDALHMQALPPR

SEQ ID NO: 29472 - protein, 308 aa, synthetic construct
NPTVTLFPPSSEELQANKATLVCLISDFYPGAVTVAWKADGSPVKAGVETTKPSKQSNNKYAASSYLSLTPEQWKSHRSYSCQVTHEGSTVEKTVAPTECSGRADCGFTSESYQQGVLSATILYEILLGKATLYAVLVSALVLMAMVKRKDSRGRSKRSRLLHSDYMNMTPRRPGPTRKHYQPYAPPRDFAAYRSRVKFSRSADAPAYQQGQNQLYNELNLGRREEYDVLDKRRGRDPEMGGKPQRRKNPQEGLYNELQKDKMAEAYSEIGMKGERRRGKGHDGLYQGLSTATKDTYDALHMQALPPR

SEQ ID NO: 29473 - protein, 307 aa, synthetic construct
PTVTLFPPSSEELQANKATLVCLISDFYPGAVTVAWKADGSPVKAGVETTKPSKQSNNKYAASSYLSLTPEQWKSHRSYSCQVTHEGSTVEKTVAPTECSGRADCGFTSESYQQGVLSATILYEILLGKATLYAVLVSALVLMAMVKRKDSRGRSKRSRLLHSDYMNMTPRRPGPTRKHYQPYAPPRDFAAYRSRVKFSRSADAPAYQQGQNQLYNELNLGRREEYDVLDKRRGRDPEMGGKPQRRKNPQEGLYNELQKDKMAEAYSEIGMKGERRRGKGHDGLYQGLSTATKDTYDALHMQALPPR

SEQ ID NO: 29474 - protein, 306 aa, synthetic construct
TVTLFPPSSEELQANKATLVCLISDFYPGAVTVAWKADGSPVKAGVETTKPSKQSNNKYAASSYLSLTPEQWKSHRSYSCQVTHEGSTVEKTVAPTECSGRADCGFTSESYQQGVLSATILYEILLGKATLYAVLVSALVLMAMVKRKDSRGRSKRSRLLHSDYMNMTPRRPGPTRKHYQPYAPPRDFAAYRSRVKFSRSADAPAYQQGQNQLYNELNLGRREEYDVLDKRRGRDPEMGGKPQRRKNPQEGLYNELQKDKMAEAYSEIGMKGERRRGKGHDGLYQGLSTATKDTYDALHMQALPPR

SEQ ID NO: 29475 - protein, 305 aa, synthetic construct
VTLFPPSSEELQANKATLVCLISDFYPGAVTVAWKADGSPVKAGVETTKPSKQSNNKYAASSYLSLTPEQWKSHRSYSCQVTHEGSTVEKTVAPTECSGRADCGFTSESYQQGVLSATILYEILLGKATLYAVLVSALVLMAMVKRKDSRGRSKRSRLLHSDYMNMTPRRPGPTRKHYQPYAPPRDFAAYRSRVKFSRSADAPAYQQGQNQLYNELNLGRREEYDVLDKRRGRDPEMGGKPQRRKNPQEGLYNELQKDKMAEAYSEIGMKGERRRGKGHDGLYQGLSTATKDTYDALHMQALPPR

SEQ ID NO: 29476 - protein, 304 aa, synthetic construct
TLFPPSSEELQANKATLVCLISDFYPGAVTVAWKADGSPVKAGVETTKPSKQSNNKYAASSYLSLTPEQWKSHRSYSCQVTHEGSTVEKTVAPTECSGRADCGFTSESYQQGVLSATILYEILLGKATLYAVLVSALVLMAMVKRKDSRGRSKRSRLLHSDYMNMTPRRPGPTRKHYQPYAPPRDFAAYRSRVKFSRSADAPAYQQGQNQLYNELNLGRREEYDVLDKRRGRDPEMGGKPQRRKNPQEGLYNELQKDKMAEAYSEIGMKGERRRGKGHDGLYQGLSTATKDTYDALHMQALPPR

SEQ ID NO: 29477 - protein, 303 aa, synthetic construct
LFPPSSEELQANKATLVCLISDFYPGAVTVAWKADGSPVKAGVETTKPSKQSNNKYAASSYLSLTPEQWKSHRSYSCQVTHEGSTVEKTVAPTECSGRADCGFTSESYQQGVLSATILYEILLGKATLYAVLVSALVLMAMVKRKDSRGRSKRSRLLHSDYMNMTPRRPGPTRKHYQPYAPPRDFAAYRSRVKFSRSADAPAYQQGQNQLYNELNLGRREEYDVLDKRRGRDPEMGGKPQRRKNPQEGLYNELQKDKMAEAYSEIGMKGERRRGKGHDGLYQGLSTATKDTYDALHMQALPPR

SEQ ID NO: 29478 - protein, 320 aa, synthetic construct
GQPKANPTVTLFPPSSEELQANKATLVCLISDFYPGAVTVAWKADGSPVKAGVETTKPSKQSNNKYAASSYLSLTPEQWKSHRSYSCQVTHEGSTVEKTVAPTECSIPEDTFFPSPESSCDVKLVEKSFETDTNLNFQNLSVIGFRILLLKVAGFNLLMTLRLWSSRSKRSRLLHSDYMNMTPRRPGPTRKHYQPYAPPRDFAAYRSRVKFSRSADAPAYQQGQNQLYNELNLGRREEYDVLDKRRGRDPEMGGKPQRRKNPQEGLYNELQKDKMAEAYSEIGMKGERRRGKGHDGLYQGLSTATKDTYDALHMQALPPR

SEQ ID NO: 29479 - protein, 319 aa, synthetic construct
QPKANPTVTLFPPSSEELQANKATLVCLISDFYPGAVTVAWKADGSPVKAGVETTKPSKQSNNKYAASSYLSLTPEQWKSHRSYSCQVTHEGSTVEKTVAPTECSIPEDTFFPSPESSCDVKLVEKSFETDTNLNFQNLSVIGFRILLLKVAGFNLLMTLRLWSSRSKRSRLLHSDYMNMTPRRPGPTRKHYQPYAPPRDFAAYRSRVKFSRSADAPAYQQGQNQLYNELNLGRREEYDVLDKRRGRDPEMGGKPQRRKNPQEGLYNELQKDKMAEAYSEIGMKGERRRGKGHDGLYQGLSTATKDTYDALHMQALPPR

SEQ ID NO: 29480 - protein, 318 aa, synthetic construct
PKANPTVTLFPPSSEELQANKATLVCLISDFYPGAVTVAWKADGSPVKAGVETTKPSKQSNNKYAASSYLSLTPEQWKSHRSYSCQVTHEGSTVEKTVAPTECSIPEDTFFPSPESSCDVKLVEKSFETDTNLNFQNLSVIGFRILLLKVAGFNLLMTLRLWSSRSKRSRLLHSDYMNMTPRRPGPTRKHYQPYAPPRDFAAYRSRVKFSRSADAPAYQQGQNQLYNELNLGRREEYDVLDKRRGRDPEMGGKPQRRKNPQEGLYNELQKDKMAEAYSEIGMKGERRRGKGHDGLYQGLSTATKDTYDALHMQALPPR

SEQ ID NO: 29481 - protein, 317 aa, synthetic construct
KANPTVTLFPPSSEELQANKATLVCLISDFYPGAVTVAWKADGSPVKAGVETTKPSKQSNNKYAASSYLSLTPEQWKSHRSYSCQVTHEGSTVEKTVAPTECSIPEDTFFPSPESSCDVKLVEKSFETDTNLNFQNLSVIGFRILLLKVAGFNLLMTLRLWSSRSKRSRLLHSDYMNMTPRRPGPTRKHYQPYAPPRDFAAYRSRVKFSRSADAPAYQQGQNQLYNELNLGRREEYDVLDKRRGRDPEMGGKPQRRKNPQEGLYNELQKDKMAEAYSEIGMKGERRRGKGHDGLYQGLSTATKDTYDALHMQALPPR

SEQ ID NO: 29482 - protein, 316 aa, synthetic construct
ANPTVTLFPPSSEELQANKATLVCLISDFYPGAVTVAWKADGSPVKAGVETTKPSKQSNNKYAASSYLSLTPEQWKSHRSYSCQVTHEGSTVEKTVAPTECSIPEDTFFPSPESSCDVKLVEKSFETDTNLNFQNLSVIGFRILLLKVAGFNLLMTLRLWSSRSKRSRLLHSDYMNMTPRRPGPTRKHYQPYAPPRDFAAYRSRVKFSRSADAPAYQQGQNQLYNELNLGRREEYDVLDKRRGRDPEMGGKPQRRKNPQEGLYNELQKDKMAEAYSEIGMKGERRRGKGHDGLYQGLSTATKDTYDALHMQALPPR

SEQ ID NO: 29483 - protein, 315 aa, synthetic construct
NPTVTLFPPSSEELQANKATLVCLISDFYPGAVTVAWKADGSPVKAGVETTKPSKQSNNKYAASSYLSLTPEQWKSHRSYSCQVTHEGSTVEKTVAPTECSIPEDTFFPSPESSCDVKLVEKSFETDTNLNFQNLSVIGFRILLLKVAGFNLLMTLRLWSSRSKRSRLLHSDYMNMTPRRPGPTRKHYQPYAPPRDFAAYRSRVKFSRSADAPAYQQGQNQLYNELNLGRREEYDVLDKRRGRDPEMGGKPQRRKNPQEGLYNELQKDKMAEAYSEIGMKGERRRGKGHDGLYQGLSTATKDTYDALHMQALPPR

SEQ ID NO: 29484 - protein, 314 aa, synthetic construct
PTVTLFPPSSEELQANKATLVCLISDFYPGAVTVAWKADGSPVKAGVETTKPSKQSNNKYAASSYLSLTPEQWKSHRSYSCQVTHEGSTVEKTVAPTECSIPEDTFFPSPESSCDVKLVEKSFETDTNLNFQNLSVIGFRILLLKVAGFNLLMTLRLWSSRSKRSRLLHSDYMNMTPRRPGPTRKHYQPYAPPRDFAAYRSRVKFSRSADAPAYQQGQNQLYNELNLGRREEYDVLDKRRGRDPEMGGKPQRRKNPQEGLYNELQKDKMAEAYSEIGMKGERRRGKGHDGLYQGLSTATKDTYDALHMQALPPR

SEQ ID NO: 29485 - protein, 313 aa, synthetic construct
TVTLFPPSSEELQANKATLVCLISDFYPGAVTVAWKADGSPVKAGVETTKPSKQSNNKYAASSYLSLTPEQWKSHRSYSCQVTHEGSTVEKTVAPTECSIPEDTFFPSPESSCDVKLVEKSFETDTNLNFQNLSVIGFRILLLKVAGFNLLMTLRLWSSRSKRSRLLHSDYMNMTPRRPGPTRKHYQPYAPPRDFAAYRSRVKFSRSADAPAYQQGQNQLYNELNLGRREEYDVLDKRRGRDPEMGGKPQRRKNPQEGLYNELQKDKMAEAYSEIGMKGERRRGKGHDGLYQGLSTATKDTYDALHMQALPPR

SEQ ID NO: 29486 - protein, 312 aa, synthetic construct
VTLFPPSSEELQANKATLVCLISDFYPGAVTVAWKADGSPVKAGVETTKPSKQSNNKYAASSYLSLTPEQWKSHRSYSCQVTHEGSTVEKTVAPTECSIPEDTFFPSPESSCDVKLVEKSFETDTNLNFQNLSVIGFRILLLKVAGFNLLMTLRLWSSRSKRSRLLHSDYMNMTPRRPGPTRKHYQPYAPPRDFAAYRSRVKFSRSADAPAYQQGQNQLYNELNLGRREEYDVLDKRRGRDPEMGGKPQRRKNPQEGLYNELQKDKMAEAYSEIGMKGERRRGKGHDGLYQGLSTATKDTYDALHMQALPPR

SEQ ID NO: 29487 - protein, 311 aa, synthetic construct
TLFPPSSEELQANKATLVCLISDFYPGAVTVAWKADGSPVKAGVETTKPSKQSNNKYAASSYLSLTPEQWKSHRSYSCQVTHEGSTVEKTVAPTECSIPEDTFFPSPESSCDVKLVEKSFETDTNLNFQNLSVIGFRILLLKVAGFNLLMTLRLWSSRSKRSRLLHSDYMNMTPRRPGPTRKHYQPYAPPRDFAAYRSRVKFSRSADAPAYQQGQNQLYNELNLGRREEYDVLDKRRGRDPEMGGKPQRRKNPQEGLYNELQKDKMAEAYSEIGMKGERRRGKGHDGLYQGLSTATKDTYDALHMQALPPR

SEQ ID NO: 29488 - protein, 310 aa, synthetic construct
LFPPSSEELQANKATLVCLISDFYPGAVTVAWKADGSPVKAGVETTKPSKQSNNKYAASSYLSLTPEQWKSHRSYSCQVTHEGSTVEKTVAPTECSIPEDTFFPSPESSCDVKLVEKSFETDTNLNFQNLSVIGFRILLLKVAGFNLLMTLRLWSSRSKRSRLLHSDYMNMTPRRPGPTRKHYQPYAPPRDFAAYRSRVKFSRSADAPAYQQGQNQLYNELNLGRREEYDVLDKRRGRDPEMGGKPQRRKNPQEGLYNELQKDKMAEAYSEIGMKGERRRGKGHDGLYQGLSTATKDTYDALHMQALPPR

SEQ ID NO: 29489 - protein, 330 aa, synthetic construct
DLKNVFPPEVAVFEPSEAEISHTQKATLVCLATGFYPDHVELSWWVNGKEVHSGVCTDPQPLKEQPALNDSRYCLSSRLRVSATFWQNPRNHFRCQVQFYGLSENDEWTQDRAKPVTQIVSAEAWGRADCDVKLVEKSFETDTNLNFQNLSVIGFRILLLKVAGFNLLMTLRLWSSRSKRSRLLHSDYMNMTPRRPGPTRKHYQPYAPPRDFAAYRSRVKFSRSADAPAYQQGQNQLYNELNLGRREEYDVLDKRRGRDPEMGGKPQRRKNPQEGLYNELQKDKMAEAYSEIGMKGERRRGKGHDGLYQGLSTATKDTYDALHMQALPPR

SEQ ID NO: 29490 - protein, 329 aa, synthetic construct
LKNVFPPEVAVFEPSEAEISHTQKATLVCLATGFYPDHVELSWWVNGKEVHSGVCTDPQPLKEQPALNDSRYCLSSRLRVSATFWQNPRNHFRCQVQFYGLSENDEWTQDRAKPVTQIVSAEAWGRADCDVKLVEKSFETDTNLNFQNLSVIGFRILLLKVAGFNLLMTLRLWSSRSKRSRLLHSDYMNMTPRRPGPTRKHYQPYAPPRDFAAYRSRVKFSRSADAPAYQQGQNQLYNELNLGRREEYDVLDKRRGRDPEMGGKPQRRKNPQEGLYNELQKDKMAEAYSEIGMKGERRRGKGHDGLYQGLSTATKDTYDALHMQALPPR

SEQ ID NO: 29491 - protein, 328 aa, synthetic construct
KNVFPPEVAVFEPSEAEISHTQKATLVCLATGFYPDHVELSWWVNGKEVHSGVCTDPQPLKEQPALNDSRYCLSSRLRVSATFWQNPRNHFRCQVQFYGLSENDEWTQDRAKPVTQIVSAEAWGRADCDVKLVEKSFETDTNLNFQNLSVIGFRILLLKVAGFNLLMTLRLWSSRSKRSRLLHSDYMNMTPRRPGPTRKHYQPYAPPRDFAAYRSRVKFSRSADAPAYQQGQNQLYNELNLGRREEYDVLDKRRGRDPEMGGKPQRRKNPQEGLYNELQKDKMAEAYSEIGMKGERRRGKGHDGLYQGLSTATKDTYDALHMQALPPR

SEQ ID NO: 29492 - protein, 327 aa, synthetic construct
NVFPPEVAVFEPSEAEISHTQKATLVCLATGFYPDHVELSWWVNGKEVHSGVCTDPQPLKEQPALNDSRYCLSSRLRVSATFWQNPRNHFRCQVQFYGLSENDEWTQDRAKPVTQIVSAEAWGRADCDVKLVEKSFETDTNLNFQNLSVIGFRILLLKVAGFNLLMTLRLWSSRSKRSRLLHSDYMNMTPRRPGPTRKHYQPYAPPRDFAAYRSRVKFSRSADAPAYQQGQNQLYNELNLGRREEYDVLDKRRGRDPEMGGKPQRRKNPQEGLYNELQKDKMAEAYSEIGMKGERRRGKGHDGLYQGLSTATKDTYDALHMQALPPR

SEQ ID NO: 29493 - protein, 326 aa, synthetic construct
VFPPEVAVFEPSEAEISHTQKATLVCLATGFYPDHVELSWWVNGKEVHSGVCTDPQPLKEQPALNDSRYCLSSRLRVSATFWQNPRNHFRCQVQFYGLSENDEWTQDRAKPVTQIVSAEAWGRADCDVKLVEKSFETDTNLNFQNLSVIGFRILLLKVAGFNLLMTLRLWSSRSKRSRLLHSDYMNMTPRRPGPTRKHYQPYAPPRDFAAYRSRVKFSRSADAPAYQQGQNQLYNELNLGRREEYDVLDKRRGRDPEMGGKPQRRKNPQEGLYNELQKDKMAEAYSEIGMKGERRRGKGHDGLYQGLSTATKDTYDALHMQALPPR

SEQ ID NO: 29494 - protein, 325 aa, synthetic construct
FPPEVAVFEPSEAEISHTQKATLVCLATGFYPDHVELSWWVNGKEVHSGVCTDPQPLKEQPALNDSRYCLSSRLRVSATFWQNPRNHFRCQVQFYGLSENDEWTQDRAKPVTQIVSAEAWGRADCDVKLVEKSFETDTNLNFQNLSVIGFRILLLKVAGFNLLMTLRLWSSRSKRSRLLHSDYMNMTPRRPGPTRKHYQPYAPPRDFAAYRSRVKFSRSADAPAYQQGQNQLYNELNLGRREEYDVLDKRRGRDPEMGGKPQRRKNPQEGLYNELQKDKMAEAYSEIGMKGERRRGKGHDGLYQGLSTATKDTYDALHMQALPPR

SEQ ID NO: 29495 - protein, 324 aa, synthetic construct
PPEVAVFEPSEAEISHTQKATLVCLATGFYPDHVELSWWVNGKEVHSGVCTDPQPLKEQPALNDSRYCLSSRLRVSATFWQNPRNHFRCQVQFYGLSENDEWTQDRAKPVTQIVSAEAWGRADCDVKLVEKSFETDTNLNFQNLSVIGFRILLLKVAGFNLLMTLRLWSSRSKRSRLLHSDYMNMTPRRPGPTRKHYQPYAPPRDFAAYRSRVKFSRSADAPAYQQGQNQLYNELNLGRREEYDVLDKRRGRDPEMGGKPQRRKNPQEGLYNELQKDKMAEAYSEIGMKGERRRGKGHDGLYQGLSTATKDTYDALHMQALPPR

SEQ ID NO: 29496 - protein, 323 aa, synthetic construct
PEVAVFEPSEAEISHTQKATLVCLATGFYPDHVELSWWVNGKEVHSGVCTDPQPLKEQPALNDSRYCLSSRLRVSATFWQNPRNHFRCQVQFYGLSENDEWTQDRAKPVTQIVSAEAWGRADCDVKLVEKSFETDTNLNFQNLSVIGFRILLLKVAGFNLLMTLRLWSSRSKRSRLLHSDYMNMTPRRPGPTRKHYQPYAPPRDFAAYRSRVKFSRSADAPAYQQGQNQLYNELNLGRREEYDVLDKRRGRDPEMGGKPQRRKNPQEGLYNELQKDKMAEAYSEIGMKGERRRGKGHDGLYQGLSTATKDTYDALHMQALPPR

SEQ ID NO: 29497 - protein, 322 aa, synthetic construct
EVAVFEPSEAEISHTQKATLVCLATGFYPDHVELSWWVNGKEVHSGVCTDPQPLKEQPALNDSRYCLSSRLRVSATFWQNPRNHFRCQVQFYGLSENDEWTQDRAKPVTQIVSAEAWGRADCDVKLVEKSFETDTNLNFQNLSVIGFRILLLKVAGFNLLMTLRLWSSRSKRSRLLHSDYMNMTPRRPGPTRKHYQPYAPPRDFAAYRSRVKFSRSADAPAYQQGQNQLYNELNLGRREEYDVLDKRRGRDPEMGGKPQRRKNPQEGLYNELQKDKMAEAYSEIGMKGERRRGKGHDGLYQGLSTATKDTYDALHMQALPPR

SEQ ID NO: 29498 - protein, 321 aa, synthetic construct
VAVFEPSEAEISHTQKATLVCLATGFYPDHVELSWWVNGKEVHSGVCTDPQPLKEQPALNDSRYCLSSRLRVSATFWQNPRNHFRCQVQFYGLSENDEWTQDRAKPVTQIVSAEAWGRADCDVKLVEKSFETDTNLNFQNLSVIGFRILLLKVAGFNLLMTLRLWSSRSKRSRLLHSDYMNMTPRRPGPTRKHYQPYAPPRDFAAYRSRVKFSRSADAPAYQQGQNQLYNELNLGRREEYDVLDKRRGRDPEMGGKPQRRKNPQEGLYNELQKDKMAEAYSEIGMKGERRRGKGHDGLYQGLSTATKDTYDALHMQALPPR

SEQ ID NO: 29499 - protein, 320 aa, synthetic construct
AVFEPSEAEISHTQKATLVCLATGFYPDHVELSWWVNGKEVHSGVCTDPQPLKEQPALNDSRYCLSSRLRVSATFWQNPRNHFRCQVQFYGLSENDEWTQDRAKPVTQIVSAEAWGRADCDVKLVEKSFETDTNLNFQNLSVIGFRILLLKVAGFNLLMTLRLWSSRSKRSRLLHSDYMNMTPRRPGPTRKHYQPYAPPRDFAAYRSRVKFSRSADAPAYQQGQNQLYNELNLGRREEYDVLDKRRGRDPEMGGKPQRRKNPQEGLYNELQKDKMAEAYSEIGMKGERRRGKGHDGLYQGLSTATKDTYDALHMQALPPR

SEQ ID NO: 29500 - protein, 319 aa, synthetic construct
VFEPSEAEISHTQKATLVCLATGFYPDHVELSWWVNGKEVHSGVCTDPQPLKEQPALNDSRYCLSSRLRVSATFWQNPRNHFRCQVQFYGLSENDEWTQDRAKPVTQIVSAEAWGRADCDVKLVEKSFETDTNLNFQNLSVIGFRILLLKVAGFNLLMTLRLWSSRSKRSRLLHSDYMNMTPRRPGPTRKHYQPYAPPRDFAAYRSRVKFSRSADAPAYQQGQNQLYNELNLGRREEYDVLDKRRGRDPEMGGKPQRRKNPQEGLYNELQKDKMAEAYSEIGMKGERRRGKGHDGLYQGLSTATKDTYDALHMQALPPR

SEQ ID NO: 29501 - protein, 318 aa, synthetic construct
FEPSEAEISHTQKATLVCLATGFYPDHVELSWWVNGKEVHSGVCTDPQPLKEQPALNDSRYCLSSRLRVSATFWQNPRNHFRCQVQFYGLSENDEWTQDRAKPVTQIVSAEAWGRADCDVKLVEKSFETDTNLNFQNLSVIGFRILLLKVAGFNLLMTLRLWSSRSKRSRLLHSDYMNMTPRRPGPTRKHYQPYAPPRDFAAYRSRVKFSRSADAPAYQQGQNQLYNELNLGRREEYDVLDKRRGRDPEMGGKPQRRKNPQEGLYNELQKDKMAEAYSEIGMKGERRRGKGHDGLYQGLSTATKDTYDALHMQALPPR

SEQ ID NO: 29502 - protein, 317 aa, synthetic construct
EPSEAEISHTQKATLVCLATGFYPDHVELSWWVNGKEVHSGVCTDPQPLKEQPALNDSRYCLSSRLRVSATFWQNPRNHFRCQVQFYGLSENDEWTQDRAKPVTQIVSAEAWGRADCDVKLVEKSFETDTNLNFQNLSVIGFRILLLKVAGFNLLMTLRLWSSRSKRSRLLHSDYMNMTPRRPGPTRKHYQPYAPPRDFAAYRSRVKFSRSADAPAYQQGQNQLYNELNLGRREEYDVLDKRRGRDPEMGGKPQRRKNPQEGLYNELQKDKMAEAYSEIGMKGERRRGKGHDGLYQGLSTATKDTYDALHMQALPPR

SEQ ID NO: 29503 - protein, 316 aa, synthetic construct
PSEAEISHTQKATLVCLATGFYPDHVELSWWVNGKEVHSGVCTDPQPLKEQPALNDSRYCLSSRLRVSATFWQNPRNHFRCQVQFYGLSENDEWTQDRAKPVTQIVSAEAWGRADCDVKLVEKSFETDTNLNFQNLSVIGFRILLLKVAGFNLLMTLRLWSSRSKRSRLLHSDYMNMTPRRPGPTRKHYQPYAPPRDFAAYRSRVKFSRSADAPAYQQGQNQLYNELNLGRREEYDVLDKRRGRDPEMGGKPQRRKNPQEGLYNELQKDKMAEAYSEIGMKGERRRGKGHDGLYQGLSTATKDTYDALHMQALPPR

SEQ ID NO: 29504 - protein, 315 aa, synthetic construct
SEAEISHTQKATLVCLATGFYPDHVELSWWVNGKEVHSGVCTDPQPLKEQPALNDSRYCLSSRLRVSATFWQNPRNHFRCQVQFYGLSENDEWTQDRAKPVTQIVSAEAWGRADCDVKLVEKSFETDTNLNFQNLSVIGFRILLLKVAGFNLLMTLRLWSSRSKRSRLLHSDYMNMTPRRPGPTRKHYQPYAPPRDFAAYRSRVKFSRSADAPAYQQGQNQLYNELNLGRREEYDVLDKRRGRDPEMGGKPQRRKNPQEGLYNELQKDKMAEAYSEIGMKGERRRGKGHDGLYQGLSTATKDTYDALHMQALPPR

SEQ ID NO: 29505 - protein, 314 aa, synthetic construct
EAEISHTQKATLVCLATGFYPDHVELSWWVNGKEVHSGVCTDPQPLKEQPALNDSRYCLSSRLRVSATFWQNPRNHFRCQVQFYGLSENDEWTQDRAKPVTQIVSAEAWGRADCDVKLVEKSFETDTNLNFQNLSVIGFRILLLKVAGFNLLMTLRLWSSRSKRSRLLHSDYMNMTPRRPGPTRKHYQPYAPPRDFAAYRSRVKFSRSADAPAYQQGQNQLYNELNLGRREEYDVLDKRRGRDPEMGGKPQRRKNPQEGLYNELQKDKMAEAYSEIGMKGERRRGKGHDGLYQGLSTATKDTYDALHMQALPPR

SEQ ID NO: 29506 - protein, 313 aa, synthetic construct
AEISHTQKATLVCLATGFYPDHVELSWWVNGKEVHSGVCTDPQPLKEQPALNDSRYCLSSRLRVSATFWQNPRNHFRCQVQFYGLSENDEWTQDRAKPVTQIVSAEAWGRADCDVKLVEKSFETDTNLNFQNLSVIGFRILLLKVAGFNLLMTLRLWSSRSKRSRLLHSDYMNMTPRRPGPTRKHYQPYAPPRDFAAYRSRVKFSRSADAPAYQQGQNQLYNELNLGRREEYDVLDKRRGRDPEMGGKPQRRKNPQEGLYNELQKDKMAEAYSEIGMKGERRRGKGHDGLYQGLSTATKDTYDALHMQALPPR

SEQ ID NO: 29507 - protein, 312 aa, synthetic construct
EISHTQKATLVCLATGFYPDHVELSWWVNGKEVHSGVCTDPQPLKEQPALNDSRYCLSSRLRVSATFWQNPRNHFRCQVQFYGLSENDEWTQDRAKPVTQIVSAEAWGRADCDVKLVEKSFETDTNLNFQNLSVIGFRILLLKVAGFNLLMTLRLWSSRSKRSRLLHSDYMNMTPRRPGPTRKHYQPYAPPRDFAAYRSRVKFSRSADAPAYQQGQNQLYNELNLGRREEYDVLDKRRGRDPEMGGKPQRRKNPQEGLYNELQKDKMAEAYSEIGMKGERRRGKGHDGLYQGLSTATKDTYDALHMQALPPR

SEQ ID NO: 29508 - protein, 311 aa, synthetic construct
ISHTQKATLVCLATGFYPDHVELSWWVNGKEVHSGVCTDPQPLKEQPALNDSRYCLSSRLRVSATFWQNPRNHFRCQVQFYGLSENDEWTQDRAKPVTQIVSAEAWGRADCDVKLVEKSFETDTNLNFQNLSVIGFRILLLKVAGFNLLMTLRLWSSRSKRSRLLHSDYMNMTPRRPGPTRKHYQPYAPPRDFAAYRSRVKFSRSADAPAYQQGQNQLYNELNLGRREEYDVLDKRRGRDPEMGGKPQRRKNPQEGLYNELQKDKMAEAYSEIGMKGERRRGKGHDGLYQGLSTATKDTYDALHMQALPPR

SEQ ID NO: 29509 - protein, 310 aa, synthetic construct
SHTQKATLVCLATGFYPDHVELSWWVNGKEVHSGVCTDPQPLKEQPALNDSRYCLSSRLRVSATFWQNPRNHFRCQVQFYGLSENDEWTQDRAKPVTQIVSAEAWGRADCDVKLVEKSFETDTNLNFQNLSVIGFRILLLKVAGFNLLMTLRLWSSRSKRSRLLHSDYMNMTPRRPGPTRKHYQPYAPPRDFAAYRSRVKFSRSADAPAYQQGQNQLYNELNLGRREEYDVLDKRRGRDPEMGGKPQRRKNPQEGLYNELQKDKMAEAYSEIGMKGERRRGKGHDGLYQGLSTATKDTYDALHMQALPPR

SEQ ID NO: 29510 - protein, 305 aa, synthetic construct
ATLVCLATGFYPDHVELSWWVNGKEVHSGVCTDPQPLKEQPALNDSRYCLSSRLRVSATFWQNPRNHFRCQVQFYGLSENDEWTQDRAKPVTQIVSAEAWGRADCDVKLVEKSFETDTNLNFQNLSVIGFRILLLKVAGFNLLMTLRLWSSRSKRSRLLHSDYMNMTPRRPGPTRKHYQPYAPPRDFAAYRSRVKFSRSADAPAYQQGQNQLYNELNLGRREEYDVLDKRRGRDPEMGGKPQRRKNPQEGLYNELQKDKMAEAYSEIGMKGERRRGKGHDGLYQGLSTATKDTYDALHMQALPPR

SEQ ID NO: 29511 - protein, 300 aa, synthetic construct
LATGFYPDHVELSWWVNGKEVHSGVCTDPQPLKEQPALNDSRYCLSSRLRVSATFWQNPRNHFRCQVQFYGLSENDEWTQDRAKPVTQIVSAEAWGRADCDVKLVEKSFETDTNLNFQNLSVIGFRILLLKVAGFNLLMTLRLWSSRSKRSRLLHSDYMNMTPRRPGPTRKHYQPYAPPRDFAAYRSRVKFSRSADAPAYQQGQNQLYNELNLGRREEYDVLDKRRGRDPEMGGKPQRRKNPQEGLYNELQKDKMAEAYSEIGMKGERRRGKGHDGLYQGLSTATKDTYDALHMQALPPR

SEQ ID NO: 29512 - protein, 327 aa, synthetic construct
DLKNVFPPEVAVFEPSEAEISHTQKATLVCLATGFYPDHVELSWWVNGKEVHSGVCTDPQPLKEQPALNDSRYCLSSRLRVSATFWQNPRNHFRCQVQFYGLSENDEWTQDRAKPVTQIVSAEAWGRADCGFTSESYQQGVLSATNLSVIGFRILLLKVAGFNLLMTLRLWSSRSKRSRLLHSDYMNMTPRRPGPTRKHYQPYAPPRDFAAYRSRVKFSRSADAPAYQQGQNQLYNELNLGRREEYDVLDKRRGRDPEMGGKPQRRKNPQEGLYNELQKDKMAEAYSEIGMKGERRRGKGHDGLYQGLSTATKDTYDALHMQALPPR

SEQ ID NO: 29513 - protein, 326 aa, synthetic construct
LKNVFPPEVAVFEPSEAEISHTQKATLVCLATGFYPDHVELSWWVNGKEVHSGVCTDPQPLKEQPALNDSRYCLSSRLRVSATFWQNPRNHFRCQVQFYGLSENDEWTQDRAKPVTQIVSAEAWGRADCGFTSESYQQGVLSATNLSVIGFRILLLKVAGFNLLMTLRLWSSRSKRSRLLHSDYMNMTPRRPGPTRKHYQPYAPPRDFAAYRSRVKFSRSADAPAYQQGQNQLYNELNLGRREEYDVLDKRRGRDPEMGGKPQRRKNPQEGLYNELQKDKMAEAYSEIGMKGERRRGKGHDGLYQGLSTATKDTYDALHMQALPPR

SEQ ID NO: 29514 - protein, 325 aa, synthetic construct
KNVFPPEVAVFEPSEAEISHTQKATLVCLATGFYPDHVELSWWVNGKEVHSGVCTDPQPLKEQPALNDSRYCLSSRLRVSATFWQNPRNHFRCQVQFYGLSENDEWTQDRAKPVTQIVSAEAWGRADCGFTSESYQQGVLSATNLSVIGFRILLLKVAGFNLLMTLRLWSSRSKRSRLLHSDYMNMTPRRPGPTRKHYQPYAPPRDFAAYRSRVKFSRSADAPAYQQGQNQLYNELNLGRREEYDVLDKRRGRDPEMGGKPQRRKNPQEGLYNELQKDKMAEAYSEIGMKGERRRGKGHDGLYQGLSTATKDTYDALHMQALPPR

SEQ ID NO: 29515 - protein, 324 aa, synthetic construct
NVFPPEVAVFEPSEAEISHTQKATLVCLATGFYPDHVELSWWVNGKEVHSGVCTDPQPLKEQPALNDSRYCLSSRLRVSATFWQNPRNHFRCQVQFYGLSENDEWTQDRAKPVTQIVSAEAWGRADCGFTSESYQQGVLSATNLSVIGFRILLLKVAGFNLLMTLRLWSSRSKRSRLLHSDYMNMTPRRPGPTRKHYQPYAPPRDFAAYRSRVKFSRSADAPAYQQGQNQLYNELNLGRREEYDVLDKRRGRDPEMGGKPQRRKNPQEGLYNELQKDKMAEAYSEIGMKGERRRGKGHDGLYQGLSTATKDTYDALHMQALPPR

SEQ ID NO: 29516 - protein, 323 aa, synthetic construct
VFPPEVAVFEPSEAEISHTQKATLVCLATGFYPDHVELSWWVNGKEVHSGVCTDPQPLKEQPALNDSRYCLSSRLRVSATFWQNPRNHFRCQVQFYGLSENDEWTQDRAKPVTQIVSAEAWGRADCGFTSESYQQGVLSATNLSVIGFRILLLKVAGFNLLMTLRLWSSRSKRSRLLHSDYMNMTPRRPGPTRKHYQPYAPPRDFAAYRSRVKFSRSADAPAYQQGQNQLYNELNLGRREEYDVLDKRRGRDPEMGGKPQRRKNPQEGLYNELQKDKMAEAYSEIGMKGERRRGKGHDGLYQGLSTATKDTYDALHMQALPPR

SEQ ID NO: 29517 - protein, 322 aa, synthetic construct
FPPEVAVFEPSEAEISHTQKATLVCLATGFYPDHVELSWWVNGKEVHSGVCTDPQPLKEQPALNDSRYCLSSRLRVSATFWQNPRNHFRCQVQFYGLSENDEWTQDRAKPVTQIVSAEAWGRADCGFTSESYQQGVLSATNLSVIGFRILLLKVAGFNLLMTLRLWSSRSKRSRLLHSDYMNMTPRRPGPTRKHYQPYAPPRDFAAYRSRVKFSRSADAPAYQQGQNQLYNELNLGRREEYDVLDKRRGRDPEMGGKPQRRKNPQEGLYNELQKDKMAEAYSEIGMKGERRRGKGHDGLYQGLSTATKDTYDALHMQALPPR

SEQ ID NO: 29518 - protein, 321 aa, synthetic construct
PPEVAVFEPSEAEISHTQKATLVCLATGFYPDHVELSWWVNGKEVHSGVCTDPQPLKEQPALNDSRYCLSSRLRVSATFWQNPRNHFRCQVQFYGLSENDEWTQDRAKPVTQIVSAEAWGRADCGFTSESYQQGVLSATNLSVIGFRILLLKVAGFNLLMTLRLWSSRSKRSRLLHSDYMNMTPRRPGPTRKHYQPYAPPRDFAAYRSRVKFSRSADAPAYQQGQNQLYNELNLGRREEYDVLDKRRGRDPEMGGKPQRRKNPQEGLYNELQKDKMAEAYSEIGMKGERRRGKGHDGLYQGLSTATKDTYDALHMQALPPR

SEQ ID NO: 29519 - protein, 320 aa, synthetic construct
PEVAVFEPSEAEISHTQKATLVCLATGFYPDHVELSWWVNGKEVHSGVCTDPQPLKEQPALNDSRYCLSSRLRVSATFWQNPRNHFRCQVQFYGLSENDEWTQDRAKPVTQIVSAEAWGRADCGFTSESYQQGVLSATNLSVIGFRILLLKVAGFNLLMTLRLWSSRSKRSRLLHSDYMNMTPRRPGPTRKHYQPYAPPRDFAAYRSRVKFSRSADAPAYQQGQNQLYNELNLGRREEYDVLDKRRGRDPEMGGKPQRRKNPQEGLYNELQKDKMAEAYSEIGMKGERRRGKGHDGLYQGLSTATKDTYDALHMQALPPR

SEQ ID NO: 29520 - protein, 319 aa, synthetic construct
EVAVFEPSEAEISHTQKATLVCLATGFYPDHVELSWWVNGKEVHSGVCTDPQPLKEQPALNDSRYCLSSRLRVSATFWQNPRNHFRCQVQFYGLSENDEWTQDRAKPVTQIVSAEAWGRADCGFTSESYQQGVLSATNLSVIGFRILLLKVAGFNLLMTLRLWSSRSKRSRLLHSDYMNMTPRRPGPTRKHYQPYAPPRDFAAYRSRVKFSRSADAPAYQQGQNQLYNELNLGRREEYDVLDKRRGRDPEMGGKPQRRKNPQEGLYNELQKDKMAEAYSEIGMKGERRRGKGHDGLYQGLSTATKDTYDALHMQALPPR

SEQ ID NO: 29521 - protein, 318 aa, synthetic construct
VAVFEPSEAEISHTQKATLVCLATGFYPDHVELSWWVNGKEVHSGVCTDPQPLKEQPALNDSRYCLSSRLRVSATFWQNPRNHFRCQVQFYGLSENDEWTQDRAKPVTQIVSAEAWGRADCGFTSESYQQGVLSATNLSVIGFRILLLKVAGFNLLMTLRLWSSRSKRSRLLHSDYMNMTPRRPGPTRKHYQPYAPPRDFAAYRSRVKFSRSADAPAYQQGQNQLYNELNLGRREEYDVLDKRRGRDPEMGGKPQRRKNPQEGLYNELQKDKMAEAYSEIGMKGERRRGKGHDGLYQGLSTATKDTYDALHMQALPPR

SEQ ID NO: 29522 - protein, 317 aa, synthetic construct
AVFEPSEAEISHTQKATLVCLATGFYPDHVELSWWVNGKEVHSGVCTDPQPLKEQPALNDSRYCLSSRLRVSATFWQNPRNHFRCQVQFYGLSENDEWTQDRAKPVTQIVSAEAWGRADCGFTSESYQQGVLSATNLSVIGFRILLLKVAGFNLLMTLRLWSSRSKRSRLLHSDYMNMTPRRPGPTRKHYQPYAPPRDFAAYRSRVKFSRSADAPAYQQGQNQLYNELNLGRREEYDVLDKRRGRDPEMGGKPQRRKNPQEGLYNELQKDKMAEAYSEIGMKGERRRGKGHDGLYQGLSTATKDTYDALHMQALPPR

SEQ ID NO: 29523 - protein, 316 aa, synthetic construct
VFEPSEAEISHTQKATLVCLATGFYPDHVELSWWVNGKEVHSGVCTDPQPLKEQPALNDSRYCLSSRLRVSATFWQNPRNHFRCQVQFYGLSENDEWTQDRAKPVTQIVSAEAWGRADCGFTSESYQQGVLSATNLSVIGFRILLLKVAGFNLLMTLRLWSSRSKRSRLLHSDYMNMTPRRPGPTRKHYQPYAPPRDFAAYRSRVKFSRSADAPAYQQGQNQLYNELNLGRREEYDVLDKRRGRDPEMGGKPQRRKNPQEGLYNELQKDKMAEAYSEIGMKGERRRGKGHDGLYQGLSTATKDTYDALHMQALPPR

SEQ ID NO: 29524 - protein, 315 aa, synthetic construct
FEPSEAEISHTQKATLVCLATGFYPDHVELSWWVNGKEVHSGVCTDPQPLKEQPALNDSRYCLSSRLRVSATFWQNPRNHFRCQVQFYGLSENDEWTQDRAKPVTQIVSAEAWGRADCGFTSESYQQGVLSATNLSVIGFRILLLKVAGFNLLMTLRLWSSRSKRSRLLHSDYMNMTPRRPGPTRKHYQPYAPPRDFAAYRSRVKFSRSADAPAYQQGQNQLYNELNLGRREEYDVLDKRRGRDPEMGGKPQRRKNPQEGLYNELQKDKMAEAYSEIGMKGERRRGKGHDGLYQGLSTATKDTYDALHMQALPPR

SEQ ID NO: 29525 - protein, 314 aa, synthetic construct
EPSEAEISHTQKATLVCLATGFYPDHVELSWWVNGKEVHSGVCTDPQPLKEQPALNDSRYCLSSRLRVSATFWQNPRNHFRCQVQFYGLSENDEWTQDRAKPVTQIVSAEAWGRADCGFTSESYQQGVLSATNLSVIGFRILLLKVAGFNLLMTLRLWSSRSKRSRLLHSDYMNMTPRRPGPTRKHYQPYAPPRDFAAYRSRVKFSRSADAPAYQQGQNQLYNELNLGRREEYDVLDKRRGRDPEMGGKPQRRKNPQEGLYNELQKDKMAEAYSEIGMKGERRRGKGHDGLYQGLSTATKDTYDALHMQALPPR

SEQ ID NO: 29526 - protein, 313 aa, synthetic construct
PSEAEISHTQKATLVCLATGFYPDHVELSWWVNGKEVHSGVCTDPQPLKEQPALNDSRYCLSSRLRVSATFWQNPRNHFRCQVQFYGLSENDEWTQDRAKPVTQIVSAEAWGRADCGFTSESYQQGVLSATNLSVIGFRILLLKVAGFNLLMTLRLWSSRSKRSRLLHSDYMNMTPRRPGPTRKHYQPYAPPRDFAAYRSRVKFSRSADAPAYQQGQNQLYNELNLGRREEYDVLDKRRGRDPEMGGKPQRRKNPQEGLYNELQKDKMAEAYSEIGMKGERRRGKGHDGLYQGLSTATKDTYDALHMQALPPR

SEQ ID NO: 29527 - protein, 312 aa, synthetic construct
SEAEISHTQKATLVCLATGFYPDHVELSWWVNGKEVHSGVCTDPQPLKEQPALNDSRYCLSSRLRVSATFWQNPRNHFRCQVQFYGLSENDEWTQDRAKPVTQIVSAEAWGRADCGFTSESYQQGVLSATNLSVIGFRILLLKVAGFNLLMTLRLWSSRSKRSRLLHSDYMNMTPRRPGPTRKHYQPYAPPRDFAAYRSRVKFSRSADAPAYQQGQNQLYNELNLGRREEYDVLDKRRGRDPEMGGKPQRRKNPQEGLYNELQKDKMAEAYSEIGMKGERRRGKGHDGLYQGLSTATKDTYDALHMQALPPR

SEQ ID NO: 29528 - protein, 311 aa, synthetic construct
EAEISHTQKATLVCLATGFYPDHVELSWWVNGKEVHSGVCTDPQPLKEQPALNDSRYCLSSRLRVSATFWQNPRNHFRCQVQFYGLSENDEWTQDRAKPVTQIVSAEAWGRADCGFTSESYQQGVLSATNLSVIGFRILLLKVAGFNLLMTLRLWSSRSKRSRLLHSDYMNMTPRRPGPTRKHYQPYAPPRDFAAYRSRVKFSRSADAPAYQQGQNQLYNELNLGRREEYDVLDKRRGRDPEMGGKPQRRKNPQEGLYNELQKDKMAEAYSEIGMKGERRRGKGHDGLYQGLSTATKDTYDALHMQALPPR

SEQ ID NO: 29529 - protein, 310 aa, synthetic construct
AEISHTQKATLVCLATGFYPDHVELSWWVNGKEVHSGVCTDPQPLKEQPALNDSRYCLSSRLRVSATFWQNPRNHFRCQVQFYGLSENDEWTQDRAKPVTQIVSAEAWGRADCGFTSESYQQGVLSATNLSVIGFRILLLKVAGFNLLMTLRLWSSRSKRSRLLHSDYMNMTPRRPGPTRKHYQPYAPPRDFAAYRSRVKFSRSADAPAYQQGQNQLYNELNLGRREEYDVLDKRRGRDPEMGGKPQRRKNPQEGLYNELQKDKMAEAYSEIGMKGERRRGKGHDGLYQGLSTATKDTYDALHMQALPPR

SEQ ID NO: 29530 - protein, 309 aa, synthetic construct
EISHTQKATLVCLATGFYPDHVELSWWVNGKEVHSGVCTDPQPLKEQPALNDSRYCLSSRLRVSATFWQNPRNHFRCQVQFYGLSENDEWTQDRAKPVTQIVSAEAWGRADCGFTSESYQQGVLSATNLSVIGFRILLLKVAGFNLLMTLRLWSSRSKRSRLLHSDYMNMTPRRPGPTRKHYQPYAPPRDFAAYRSRVKFSRSADAPAYQQGQNQLYNELNLGRREEYDVLDKRRGRDPEMGGKPQRRKNPQEGLYNELQKDKMAEAYSEIGMKGERRRGKGHDGLYQGLSTATKDTYDALHMQALPPR

SEQ ID NO: 29531 - protein, 308 aa, synthetic construct
ISHTQKATLVCLATGFYPDHVELSWWVNGKEVHSGVCTDPQPLKEQPALNDSRYCLSSRLRVSATFWQNPRNHFRCQVQFYGLSENDEWTQDRAKPVTQIVSAEAWGRADCGFTSESYQQGVLSATNLSVIGFRILLLKVAGFNLLMTLRLWSSRSKRSRLLHSDYMNMTPRRPGPTRKHYQPYAPPRDFAAYRSRVKFSRSADAPAYQQGQNQLYNELNLGRREEYDVLDKRRGRDPEMGGKPQRRKNPQEGLYNELQKDKMAEAYSEIGMKGERRRGKGHDGLYQGLSTATKDTYDALHMQALPPR

SEQ ID NO: 29532 - protein, 307 aa, synthetic construct
SHTQKATLVCLATGFYPDHVELSWWVNGKEVHSGVCTDPQPLKEQPALNDSRYCLSSRLRVSATFWQNPRNHFRCQVQFYGLSENDEWTQDRAKPVTQIVSAEAWGRADCGFTSESYQQGVLSATNLSVIGFRILLLKVAGFNLLMTLRLWSSRSKRSRLLHSDYMNMTPRRPGPTRKHYQPYAPPRDFAAYRSRVKFSRSADAPAYQQGQNQLYNELNLGRREEYDVLDKRRGRDPEMGGKPQRRKNPQEGLYNELQKDKMAEAYSEIGMKGERRRGKGHDGLYQGLSTATKDTYDALHMQALPPR

SEQ ID NO: 29533 - protein, 302 aa, synthetic construct
ATLVCLATGFYPDHVELSWWVNGKEVHSGVCTDPQPLKEQPALNDSRYCLSSRLRVSATFWQNPRNHFRCQVQFYGLSENDEWTQDRAKPVTQIVSAEAWGRADCGFTSESYQQGVLSATNLSVIGFRILLLKVAGFNLLMTLRLWSSRSKRSRLLHSDYMNMTPRRPGPTRKHYQPYAPPRDFAAYRSRVKFSRSADAPAYQQGQNQLYNELNLGRREEYDVLDKRRGRDPEMGGKPQRRKNPQEGLYNELQKDKMAEAYSEIGMKGERRRGKGHDGLYQGLSTATKDTYDALHMQALPPR

SEQ ID NO: 29534 - protein, 297 aa, synthetic construct
LATGFYPDHVELSWWVNGKEVHSGVCTDPQPLKEQPALNDSRYCLSSRLRVSATFWQNPRNHFRCQVQFYGLSENDEWTQDRAKPVTQIVSAEAWGRADCGFTSESYQQGVLSATNLSVIGFRILLLKVAGFNLLMTLRLWSSRSKRSRLLHSDYMNMTPRRPGPTRKHYQPYAPPRDFAAYRSRVKFSRSADAPAYQQGQNQLYNELNLGRREEYDVLDKRRGRDPEMGGKPQRRKNPQEGLYNELQKDKMAEAYSEIGMKGERRRGKGHDGLYQGLSTATKDTYDALHMQALPPR

SEQ ID NO: 29535 - protein, 416 aa, synthetic construct
DLKNVFPPEVAVFEPSEAEISHTQKATLVCLATGFYPDHVELSWWVNGKEVHSGVCTDPQPLKEQPALNDSRYCLSSRLRVSATFWQNPRNHFRCQVQFYGLSENDEWTQDRAKPVTQIVSAEAWGRADDVIKIHWQEKKSNTILGSQEGNTMKTNDTYMKFSWLTVPEKSLDKEHRCIVRHENNKNGVDQEIIFPPIKTDVITMDPKDNCSKDANDTLLLQLTNTSAYYMYLLLLLKSVVYFAIITCCLLMAMVKRKDSRGRSKRSRLLHSDYMNMTPRRPGPTRKHYQPYAPPRDFAAYRSRVKFSRSADAPAYQQGQNQLYNELNLGRREEYDVLDKRRGRDPEMGGKPQRRKNPQEGLYNELQKDKMAEAYSEIGMKGERRRGKGHDGLYQGLSTATKDTYDALHMQALPPR

SEQ ID NO: 29536 - protein, 415 aa, synthetic construct
LKNVFPPEVAVFEPSEAEISHTQKATLVCLATGFYPDHVELSWWVNGKEVHSGVCTDPQPLKEQPALNDSRYCLSSRLRVSATFWQNPRNHFRCQVQFYGLSENDEWTQDRAKPVTQIVSAEAWGRADDVIKIHWQEKKSNTILGSQEGNTMKTNDTYMKFSWLTVPEKSLDKEHRCIVRHENNKNGVDQEIIFPPIKTDVITMDPKDNCSKDANDTLLLQLTNTSAYYMYLLLLLKSVVYFAIITCCLLMAMVKRKDSRGRSKRSRLLHSDYMNMTPRRPGPTRKHYQPYAPPRDFAAYRSRVKFSRSADAPAYQQGQNQLYNELNLGRREEYDVLDKRRGRDPEMGGKPQRRKNPQEGLYNELQKDKMAEAYSEIGMKGERRRGKGHDGLYQGLSTATKDTYDALHMQALPPR

SEQ ID NO: 29537 - protein, 414 aa, synthetic construct
KNVFPPEVAVFEPSEAEISHTQKATLVCLATGFYPDHVELSWWVNGKEVHSGVCTDPQPLKEQPALNDSRYCLSSRLRVSATFWQNPRNHFRCQVQFYGLSENDEWTQDRAKPVTQIVSAEAWGRADDVIKIHWQEKKSNTILGSQEGNTMKTNDTYMKFSWLTVPEKSLDKEHRCIVRHENNKNGVDQEIIFPPIKTDVITMDPKDNCSKDANDTLLLQLTNTSAYYMYLLLLLKSVVYFAIITCCLLMAMVKRKDSRGRSKRSRLLHSDYMNMTPRRPGPTRKHYQPYAPPRDFAAYRSRVKFSRSADAPAYQQGQNQLYNELNLGRREEYDVLDKRRGRDPEMGGKPQRRKNPQEGLYNELQKDKMAEAYSEIGMKGERRRGKGHDGLYQGLSTATKDTYDALHMQALPPR

SEQ ID NO: 29538 - protein, 413 aa, synthetic construct
NVFPPEVAVFEPSEAEISHTQKATLVCLATGFYPDHVELSWWVNGKEVHSGVCTDPQPLKEQPALNDSRYCLSSRLRVSATFWQNPRNHFRCQVQFYGLSENDEWTQDRAKPVTQIVSAEAWGRADDVIKIHWQEKKSNTILGSQEGNTMKTNDTYMKFSWLTVPEKSLDKEHRCIVRHENNKNGVDQEIIFPPIKTDVITMDPKDNCSKDANDTLLLQLTNTSAYYMYLLLLLKSVVYFAIITCCLLMAMVKRKDSRGRSKRSRLLHSDYMNMTPRRPGPTRKHYQPYAPPRDFAAYRSRVKFSRSADAPAYQQGQNQLYNELNLGRREEYDVLDKRRGRDPEMGGKPQRRKNPQEGLYNELQKDKMAEAYSEIGMKGERRRGKGHDGLYQGLSTATKDTYDALHMQALPPR

SEQ ID NO: 29539 - protein, 412 aa, synthetic construct
VFPPEVAVFEPSEAEISHTQKATLVCLATGFYPDHVELSWWVNGKEVHSGVCTDPQPLKEQPALNDSRYCLSSRLRVSATFWQNPRNHFRCQVQFYGLSENDEWTQDRAKPVTQIVSAEAWGRADDVIKIHWQEKKSNTILGSQEGNTMKTNDTYMKFSWLTVPEKSLDKEHRCIVRHENNKNGVDQEIIFPPIKTDVITMDPKDNCSKDANDTLLLQLTNTSAYYMYLLLLLKSVVYFAIITCCLLMAMVKRKDSRGRSKRSRLLHSDYMNMTPRRPGPTRKHYQPYAPPRDFAAYRSRVKFSRSADAPAYQQGQNQLYNELNLGRREEYDVLDKRRGRDPEMGGKPQRRKNPQEGLYNELQKDKMAEAYSEIGMKGERRRGKGHDGLYQGLSTATKDTYDALHMQALPPR

SEQ ID NO: 29540 - protein, 411 aa, synthetic construct
FPPEVAVFEPSEAEISHTQKATLVCLATGFYPDHVELSWWVNGKEVHSGVCTDPQPLKEQPALNDSRYCLSSRLRVSATFWQNPRNHFRCQVQFYGLSENDEWTQDRAKPVTQIVSAEAWGRADDVIKIHWQEKKSNTILGSQEGNTMKTNDTYMKFSWLTVPEKSLDKEHRCIVRHENNKNGVDQEIIFPPIKTDVITMDPKDNCSKDANDTLLLQLTNTSAYYMYLLLLLKSVVYFAIITCCLLMAMVKRKDSRGRSKRSRLLHSDYMNMTPRRPGPTRKHYQPYAPPRDFAAYRSRVKFSRSADAPAYQQGQNQLYNELNLGRREEYDVLDKRRGRDPEMGGKPQRRKNPQEGLYNELQKDKMAEAYSEIGMKGERRRGKGHDGLYQGLSTATKDTYDALHMQALPPR

SEQ ID NO: 29541 - protein, 410 aa, synthetic construct
PPEVAVFEPSEAEISHTQKATLVCLATGFYPDHVELSWWVNGKEVHSGVCTDPQPLKEQPALNDSRYCLSSRLRVSATFWQNPRNHFRCQVQFYGLSENDEWTQDRAKPVTQIVSAEAWGRADDVIKIHWQEKKSNTILGSQEGNTMKTNDTYMKFSWLTVPEKSLDKEHRCIVRHENNKNGVDQEIIFPPIKTDVITMDPKDNCSKDANDTLLLQLTNTSAYYMYLLLLLKSVVYFAIITCCLLMAMVKRKDSRGRSKRSRLLHSDYMNMTPRRPGPTRKHYQPYAPPRDFAAYRSRVKFSRSADAPAYQQGQNQLYNELNLGRREEYDVLDKRRGRDPEMGGKPQRRKNPQEGLYNELQKDKMAEAYSEIGMKGERRRGKGHDGLYQGLSTATKDTYDALHMQALPPR

SEQ ID NO: 29542 - protein, 409 aa, synthetic construct
PEVAVFEPSEAEISHTQKATLVCLATGFYPDHVELSWWVNGKEVHSGVCTDPQPLKEQPALNDSRYCLSSRLRVSATFWQNPRNHFRCQVQFYGLSENDEWTQDRAKPVTQIVSAEAWGRADDVIKIHWQEKKSNTILGSQEGNTMKTNDTYMKFSWLTVPEKSLDKEHRCIVRHENNKNGVDQEIIFPPIKTDVITMDPKDNCSKDANDTLLLQLTNTSAYYMYLLLLLKSVVYFAIITCCLLMAMVKRKDSRGRSKRSRLLHSDYMNMTPRRPGPTRKHYQPYAPPRDFAAYRSRVKFSRSADAPAYQQGQNQLYNELNLGRREEYDVLDKRRGRDPEMGGKPQRRKNPQEGLYNELQKDKMAEAYSEIGMKGERRRGKGHDGLYQGLSTATKDTYDALHMQALPPR

SEQ ID NO: 29543 - protein, 408 aa, synthetic construct
EVAVFEPSEAEISHTQKATLVCLATGFYPDHVELSWWVNGKEVHSGVCTDPQPLKEQPALNDSRYCLSSRLRVSATFWQNPRNHFRCQVQFYGLSENDEWTQDRAKPVTQIVSAEAWGRADDVIKIHWQEKKSNTILGSQEGNTMKTNDTYMKFSWLTVPEKSLDKEHRCIVRHENNKNGVDQEIIFPPIKTDVITMDPKDNCSKDANDTLLLQLTNTSAYYMYLLLLLKSVVYFAIITCCLLMAMVKRKDSRGRSKRSRLLHSDYMNMTPRRPGPTRKHYQPYAPPRDFAAYRSRVKFSRSADAPAYQQGQNQLYNELNLGRREEYDVLDKRRGRDPEMGGKPQRRKNPQEGLYNELQKDKMAEAYSEIGMKGERRRGKGHDGLYQGLSTATKDTYDALHMQALPPR

SEQ ID NO: 29544 - protein, 407 aa, synthetic construct
VAVFEPSEAEISHTQKATLVCLATGFYPDHVELSWWVNGKEVHSGVCTDPQPLKEQPALNDSRYCLSSRLRVSATFWQNPRNHFRCQVQFYGLSENDEWTQDRAKPVTQIVSAEAWGRADDVIKIHWQEKKSNTILGSQEGNTMKTNDTYMKFSWLTVPEKSLDKEHRCIVRHENNKNGVDQEIIFPPIKTDVITMDPKDNCSKDANDTLLLQLTNTSAYYMYLLLLLKSVVYFAIITCCLLMAMVKRKDSRGRSKRSRLLHSDYMNMTPRRPGPTRKHYQPYAPPRDFAAYRSRVKFSRSADAPAYQQGQNQLYNELNLGRREEYDVLDKRRGRDPEMGGKPQRRKNPQEGLYNELQKDKMAEAYSEIGMKGERRRGKGHDGLYQGLSTATKDTYDALHMQALPPR

SEQ ID NO: 29545 - protein, 406 aa, synthetic construct
AVFEPSEAEISHTQKATLVCLATGFYPDHVELSWWVNGKEVHSGVCTDPQPLKEQPALNDSRYCLSSRLRVSATFWQNPRNHFRCQVQFYGLSENDEWTQDRAKPVTQIVSAEAWGRADDVIKIHWQEKKSNTILGSQEGNTMKTNDTYMKFSWLTVPEKSLDKEHRCIVRHENNKNGVDQEIIFPPIKTDVITMDPKDNCSKDANDTLLLQLTNTSAYYMYLLLLLKSVVYFAIITCCLLMAMVKRKDSRGRSKRSRLLHSDYMNMTPRRPGPTRKHYQPYAPPRDFAAYRSRVKFSRSADAPAYQQGQNQLYNELNLGRREEYDVLDKRRGRDPEMGGKPQRRKNPQEGLYNELQKDKMAEAYSEIGMKGERRRGKGHDGLYQGLSTATKDTYDALHMQALPPR

SEQ ID NO: 29546 - protein, 418 aa, synthetic construct; identical to SEQ ID NO: 29350

SEQ ID NO: 29547 - protein, 417 aa, synthetic construct
DLKNVFPPEVAVFEPSEAEISHTQKATLVCLATGFYPDHVELSWWVNGKEVHSGVCTDPQPLKEQPALNDSRYCLSSRLRVSATFWQNPRNHFRCQVQFYGLSENDEWTQDRAKPVTQIVSAEAWGRADDVIKIHWQEKKSNTILGSQEGNTMKTNDTYMKFSWLTVPEKSLDKEHRCIVRHENNKNGVDQEIIFPPIKTDVITMDPKDNCSKDANDTLLLQLTNTSAYYMYLLLLLKSVVYFAIITCCLLRRTAFCCNGEKSRSKRSRLLHSDYMNMTPRRPGPTRKHYQPYAPPRDFAAYRSRVKFSRSADAPAYQQGQNQLYNELNLGRREEYDVLDKRRGRDPEMGGKPQRRKNPQEGLYNELQKDKMAEAYSEIGMKGERRRGKGHDGLYQGLSTATKDTYDALHMQALPPR

SEQ ID NO: 29548 - protein, 416 aa, synthetic construct
LKNVFPPEVAVFEPSEAEISHTQKATLVCLATGFYPDHVELSWWVNGKEVHSGVCTDPQPLKEQPALNDSRYCLSSRLRVSATFWQNPRNHFRCQVQFYGLSENDEWTQDRAKPVTQIVSAEAWGRADDVIKIHWQEKKSNTILGSQEGNTMKTNDTYMKFSWLTVPEKSLDKEHRCIVRHENNKNGVDQEIIFPPIKTDVITMDPKDNCSKDANDTLLLQLTNTSAYYMYLLLLLKSVVYFAIITCCLLRRTAFCCNGEKSRSKRSRLLHSDYMNMTPRRPGPTRKHYQPYAPPRDFAAYRSRVKFSRSADAPAYQQGQNQLYNELNLGRREEYDVLDKRRGRDPEMGGKPQRRKNPQEGLYNELQKDKMAEAYSEIGMKGERRRGKGHDGLYQGLSTATKDTYDALHMQALPPR

SEQ ID NO: 29549 - protein, 415 aa, synthetic construct
KNVFPPEVAVFEPSEAEISHTQKATLVCLATGFYPDHVELSWWVNGKEVHSGVCTDPQPLKEQPALNDSRYCLSSRLRVSATFWQNPRNHFRCQVQFYGLSENDEWTQDRAKPVTQIVSAEAWGRADDVIKIHWQEKKSNTILGSQEGNTMKTNDTYMKFSWLTVPEKSLDKEHRCIVRHENNKNGVDQEIIFPPIKTDVITMDPKDNCSKDANDTLLLQLTNTSAYYMYLLLLLKSVVYFAIITCCLLRRTAFCCNGEKSRSKRSRLLHSDYMNMTPRRPGPTRKHYQPYAPPRDFAAYRSRVKFSRSADAPAYQQGQNQLYNELNLGRREEYDVLDKRRGRDPEMGGKPQRRKNPQEGLYNELQKDKMAEAYSEIGMKGERRRGKGHDGLYQGLSTATKDTYDALHMQALPPR

SEQ ID NO: 29550 - protein, 414 aa, synthetic construct
NVFPPEVAVFEPSEAEISHTQKATLVCLATGFYPDHVELSWWVNGKEVHSGVCTDPQPLKEQPALNDSRYCLSSRLRVSATFWQNPRNHFRCQVQFYGLSENDEWTQDRAKPVTQIVSAEAWGRADDVIKIHWQEKKSNTILGSQEGNTMKTNDTYMKFSWLTVPEKSLDKEHRCIVRHENNKNGVDQEIIFPPIKTDVITMDPKDNCSKDANDTLLLQLTNTSAYYMYLLLLLKSVVYFAIITCCLLRRTAFCCNGEKSRSKRSRLLHSDYMNMTPRRPGPTRKHYQPYAPPRDFAAYRSRVKFSRSADAPAYQQGQNQLYNELNLGRREEYDVLDKRRGRDPEMGGKPQRRKNPQEGLYNELQKDKMAEAYSEIGMKGERRRGKGHDGLYQGLSTATKDTYDALHMQALPPR

SEQ ID NO: 29551 - protein, 413 aa, synthetic construct
VFPPEVAVFEPSEAEISHTQKATLVCLATGFYPDHVELSWWVNGKEVHSGVCTDPQPLKEQPALNDSRYCLSSRLRVSATFWQNPRNHFRCQVQFYGLSENDEWTQDRAKPVTQIVSAEAWGRADDVIKIHWQEKKSNTILGSQEGNTMKTNDTYMKFSWLTVPEKSLDKEHRCIVRHENNKNGVDQEIIFPPIKTDVITMDPKDNCSKDANDTLLLQLTNTSAYYMYLLLLLKSVVYFAIITCCLLRRTAFCCNGEKSRSKRSRLLHSDYMNMTPRRPGPTRKHYQPYAPPRDFAAYRSRVKFSRSADAPAYQQGQNQLYNELNLGRREEYDVLDKRRGRDPEMGGKPQRRKNPQEGLYNELQKDKMAEAYSEIGMKGERRRGKGHDGLYQGLSTATKDTYDALHMQALPPR

SEQ ID NO: 29552 - protein, 412 aa, synthetic construct
FPPEVAVFEPSEAEISHTQKATLVCLATGFYPDHVELSWWVNGKEVHSGVCTDPQPLKEQPALNDSRYCLSSRLRVSATFWQNPRNHFRCQVQFYGLSENDEWTQDRAKPVTQIVSAEAWGRADDVIKIHWQEKKSNTILGSQEGNTMKTNDTYMKFSWLTVPEKSLDKEHRCIVRHENNKNGVDQEIIFPPIKTDVITMDPKDNCSKDANDTLLLQLTNTSAYYMYLLLLLKSVVYFAIITCCLLRRTAFCCNGEKSRSKRSRLLHSDYMNMTPRRPGPTRKHYQPYAPPRDFAAYRSRVKFSRSADAPAYQQGQNQLYNELNLGRREEYDVLDKRRGRDPEMGGKPQRRKNPQEGLYNELQKDKMAEAYSEIGMKGERRRGKGHDGLYQGLSTATKDTYDALHMQALPPR

SEQ ID NO: 29553 - protein, 411 aa, synthetic construct
PPEVAVFEPSEAEISHTQKATLVCLATGFYPDHVELSWWVNGKEVHSGVCTDPQPLKEQPALNDSRYCLSSRLRVSATFWQNPRNHFRCQVQFYGLSENDEWTQDRAKPVTQIVSAEAWGRADDVIKIHWQEKKSNTILGSQEGNTMKTNDTYMKFSWLTVPEKSLDKEHRCIVRHENNKNGVDQEIIFPPIKTDVITMDPKDNCSKDANDTLLLQLTNTSAYYMYLLLLLKSVVYFAIITCCLLRRTAFCCNGEKSRSKRSRLLHSDYMNMTPRRPGPTRKHYQPYAPPRDFAAYRSRVKFSRSADAPAYQQGQNQLYNELNLGRREEYDVLDKRRGRDPEMGGKPQRRKNPQEGLYNELQKDKMAEAYSEIGMKGERRRGKGHDGLYQGLSTATKDTYDALHMQALPPR

SEQ ID NO: 29554 - protein, 410 aa, synthetic construct
PEVAVFEPSEAEISHTQKATLVCLATGFYPDHVELSWWVNGKEVHSGVCTDPQPLKEQPALNDSRYCLSSRLRVSATFWQNPRNHFRCQVQFYGLSENDEWTQDRAKPVTQIVSAEAWGRADDVIKIHWQEKKSNTILGSQEGNTMKTNDTYMKFSWLTVPEKSLDKEHRCIVRHENNKNGVDQEIIFPPIKTDVITMDPKDNCSKDANDTLLLQLTNTSAYYMYLLLLLKSVVYFAIITCCLLRRTAFCCNGEKSRSKRSRLLHSDYMNMTPRRPGPTRKHYQPYAPPRDFAAYRSRVKFSRSADAPAYQQGQNQLYNELNLGRREEYDVLDKRRGRDPEMGGKPQRRKNPQEGLYNELQKDKMAEAYSEIGMKGERRRGKGHDGLYQGLSTATKDTYDALHMQALPPR

SEQ ID NO: 29555 - protein, 409 aa, synthetic construct
EVAVFEPSEAEISHTQKATLVCLATGFYPDHVELSWWVNGKEVHSGVCTDPQPLKEQPALNDSRYCLSSRLRVSATFWQNPRNHFRCQVQFYGLSENDEWTQDRAKPVTQIVSAEAWGRADDVIKIHWQEKKSNTILGSQEGNTMKTNDTYMKFSWLTVPEKSLDKEHRCIVRHENNKNGVDQEIIFPPIKTDVITMDPKDNCSKDANDTLLLQLTNTSAYYMYLLLLLKSVVYFAIITCCLLRRTAFCCNGEKSRSKRSRLLHSDYMNMTPRRPGPTRKHYQPYAPPRDFAAYRSRVKFSRSADAPAYQQGQNQLYNELNLGRREEYDVLDKRRGRDPEMGGKPQRRKNPQEGLYNELQKDKMAEAYSEIGMKGERRRGKGHDGLYQGLSTATKDTYDALHMQALPPR

SEQ ID NO: 29556 - protein, 408 aa, synthetic construct
VAVFEPSEAEISHTQKATLVCLATGFYPDHVELSWWVNGKEVHSGVCTDPQPLKEQPALNDSRYCLSSRLRVSATFWQNPRNHFRCQVQFYGLSENDEWTQDRAKPVTQIVSAEAWGRADDVIKIHWQEKKSNTILGSQEGNTMKTNDTYMKFSWLTVPEKSLDKEHRCIVRHENNKNGVDQEIIFPPIKTDVITMDPKDNCSKDANDTLLLQLTNTSAYYMYLLLLLKSVVYFAIITCCLLRRTAFCCNGEKSRSKRSRLLHSDYMNMTPRRPGPTRKHYQPYAPPRDFAAYRSRVKFSRSADAPAYQQGQNQLYNELNLGRREEYDVLDKRRGRDPEMGGKPQRRKNPQEGLYNELQKDKMAEAYSEIGMKGERRRGKGHDGLYQGLSTATKDTYDALHMQALPPR

SEQ ID NO: 29557 - protein, 294 aa, synthetic construct; identical to SEQ ID NO: 29281

SEQ ID NO: 29558 - protein, 293 aa, synthetic construct
QNPDPAVYQLRDSKSSDKSVCLFTDFDSQTNVSQSKDSDVYITDKCVLDMRSMDFKSNSAVAWSNKSDFACANAFNNSIIPEDTFFPSPESSCDVKLVEKSFETDTNLNFQNLSVIGFRILLLKVAGFNLLMTLRLWSSRSKRSRLLHSDYMNMTPRRPGPTRKHYQPYAPPRDFAAYRSRVKFSRSADAPAYQQGQNQLYNELNLGRREEYDVLDKRRGRDPEMGGKPQRRKNPQEGLYNELQKDKMAEAYSEIGMKGERRRGKGHDGLYQGLSTATKDTYDALHMQALPPR

SEQ ID NO: 29559 - protein, 292 aa, synthetic construct
NPDPAVYQLRDSKSSDKSVCLFTDFDSQTNVSQSKDSDVYITDKCVLDMRSMDFKSNSAVAWSNKSDFACANAFNNSIIPEDTFFPSPESSCDVKLVEKSFETDTNLNFQNLSVIGFRILLLKVAGFNLLMTLRLWSSRSKRSRLLHSDYMNMTPRRPGPTRKHYQPYAPPRDFAAYRSRVKFSRSADAPAYQQGQNQLYNELNLGRREEYDVLDKRRGRDPEMGGKPQRRKNPQEGLYNELQKDKMAEAYSEIGMKGERRRGKGHDGLYQGLSTATKDTYDALHMQALPPR

SEQ ID NO: 29560 - protein, 291 aa, synthetic construct; identical to SEQ ID NO: 29282

SEQ ID NO: 29561 - protein, 290 aa, synthetic construct
DPAVYQLRDSKSSDKSVCLFTDFDSQTNVSQSKDSDVYITDKCVLDMRSMDFKSNSAVAWSNKSDFACANAFNNSIIPEDTFFPSPESSCDVKLVEKSFETDTNLNFQNLSVIGFRILLLKVAGFNLLMTLRLWSSRSKRSRLLHSDYMNMTPRRPGPTRKHYQPYAPPRDFAAYRSRVKFSRSADAPAYQQGQNQLYNELNLGRREEYDVLDKRRGRDPEMGGKPQRRKNPQEGLYNELQKDKMAEAYSEIGMKGERRRGKGHDGLYQGLSTATKDTYDALHMQALPPR

SEQ ID NO: 29562 - protein, 289 aa, synthetic construct
PAVYQLRDSKSSDKSVCLFTDFDSQTNVSQSKDSDVYITDKCVLDMRSMDFKSNSAVAWSNKSDFACANAFNNSIIPEDTFFPSPESSCDVKLVEKSFETDTNLNFQNLSVIGFRILLLKVAGFNLLMTLRLWSSRSKRSRLLHSDYMNMTPRRPGPTRKHYQPYAPPRDFAAYRSRVKFSRSADAPAYQQGQNQLYNELNLGRREEYDVLDKRRGRDPEMGGKPQRRKNPQEGLYNELQKDKMAEAYSEIGMKGERRRGKGHDGLYQGLSTATKDTYDALHMQALPPR

SEQ ID NO: 29563 - protein, 288 aa, synthetic construct
AVYQLRDSKSSDKSVCLFTDFDSQTNVSQSKDSDVYITDKCVLDMRSMDFKSNSAVAWSNKSDFACANAFNNSIIPEDTFFPSPESSCDVKLVEKSFETDTNLNFQNLSVIGFRILLLKVAGFNLLMTLRLWSSRSKRSRLLHSDYMNMTPRRPGPTRKHYQPYAPPRDFAAYRSRVKFSRSADAPAYQQGQNQLYNELNLGRREEYDVLDKRRGRDPEMGGKPQRRKNPQEGLYNELQKDKMAEAYSEIGMKGERRRGKGHDGLYQGLSTATKDTYDALHMQALPPR

SEQ ID NO: 29564 - protein, 287 aa, synthetic construct
VYQLRDSKSSDKSVCLFTDFDSQTNVSQSKDSDVYITDKCVLDMRSMDFKSNSAVAWSNKSDFACANAFNNSIIPEDTFFPSPESSCDVKLVEKSFETDTNLNFQNLSVIGFRILLLKVAGFNLLMTLRLWSSRSKRSRLLHSDYMNMTPRRPGPTRKHYQPYAPPRDFAAYRSRVKFSRSADAPAYQQGQNQLYNELNLGRREEYDVLDKRRGRDPEMGGKPQRRKNPQEGLYNELQKDKMAEAYSEIGMKGERRRGKGHDGLYQGLSTATKDTYDALHMQALPPR

SEQ ID NO: 29565 - protein, 286 aa, synthetic construct
YQLRDSKSSDKSVCLFTDFDSQTNVSQSKDSDVYITDKCVLDMRSMDFKSNSAVAWSNKSDFACANAFNNSIIPEDTFFPSPESSCDVKLVEKSFETDTNLNFQNLSVIGFRILLLKVAGFNLLMTLRLWSSRSKRSRLLHSDYMNMTPRRPGPTRKHYQPYAPPRDFAAYRSRVKFSRSADAPAYQQGQNQLYNELNLGRREEYDVLDKRRGRDPEMGGKPQRRKNPQEGLYNELQKDKMAEAYSEIGMKGERRRGKGHDGLYQGLSTATKDTYDALHMQALPPR

SEQ ID NO: 29566 - protein, 285 aa, synthetic construct
QLRDSKSSDKSVCLFTDFDSQTNVSQSKDSDVYITDKCVLDMRSMDFKSNSAVAWSNKSDFACANAFNNSIIPEDTFFPSPESSCDVKLVEKSFETDTNLNFQNLSVIGFRILLLKVAGFNLLMTLRLWSSRSKRSRLLHSDYMNMTPRRPGPTRKHYQPYAPPRDFAAYRSRVKFSRSADAPAYQQGQNQLYNELNLGRREEYDVLDKRRGRDPEMGGKPQRRKNPQEGLYNELQKDKMAEAYSEIGMKGERRRGKGHDGLYQGLSTATKDTYDALHMQALPPR

SEQ ID NO: 29567 - protein, 284 aa, synthetic construct
LRDSKSSDKSVCLFTDFDSQTNVSQSKDSDVYITDKCVLDMRSMDFKSNSAVAWSNKSDFACANAFNNSIIPEDTFFPSPESSCDVKLVEKSFETDTNLNFQNLSVIGFRILLLKVAGFNLLMTLRLWSSRSKRSRLLHSDYMNMTPRRPGPTRKHYQPYAPPRDFAAYRSRVKFSRSADAPAYQQGQNQLYNELNLGRREEYDVLDKRRGRDPEMGGKPQRRKNPQEGLYNELQKDKMAEAYSEIGMKGERRRGKGHDGLYQGLSTATKDTYDALHMQALPPR

SEQ ID NO: 29568 - protein, 283 aa, synthetic construct
RDSKSSDKSVCLFTDFDSQTNVSQSKDSDVYITDKCVLDMRSMDFKSNSAVAWSNKSDFACANAFNNSIIPEDTFFPSPESSCDVKLVEKSFETDTNLNFQNLSVIGFRILLLKVAGFNLLMTLRLWSSRSKRSRLLHSDYMNMTPRRPGPTRKHYQPYAPPRDFAAYRSRVKFSRSADAPAYQQGQNQLYNELNLGRREEYDVLDKRRGRDPEMGGKPQRRKNPQEGLYNELQKDKMAEAYSEIGMKGERRRGKGHDGLYQGLSTATKDTYDALHMQALPPR

SEQ ID NO: 29569 - protein, 282 aa, synthetic construct
DSKSSDKSVCLFTDFDSQTNVSQSKDSDVYITDKCVLDMRSMDFKSNSAVAWSNKSDFACANAFNNSIIPEDTFFPSPESSCDVKLVEKSFETDTNLNFQNLSVIGFRILLLKVAGFNLLMTLRLWSSRSKRSRLLHSDYMNMTPRRPGPTRKHYQPYAPPRDFAAYRSRVKFSRSADAPAYQQGQNQLYNELNLGRREEYDVLDKRRGRDPEMGGKPQRRKNPQEGLYNELQKDKMAEAYSEIGMKGERRRGKGHDGLYQGLSTATKDTYDALHMQALPPR

SEQ ID NO: 29570 - protein, 281 aa, synthetic construct
SKSSDKSVCLFTDFDSQTNVSQSKDSDVYITDKCVLDMRSMDFKSNSAVAWSNKSDFACANAFNNSIIPEDTFFPSPESSCDVKLVEKSFETDTNLNFQNLSVIGFRILLLKVAGFNLLMTLRLWSSRSKRSRLLHSDYMNMTPRRPGPTRKHYQPYAPPRDFAAYRSRVKFSRSADAPAYQQGQNQLYNELNLGRREEYDVLDKRRGRDPEMGGKPQRRKNPQEGLYNELQKDKMAEAYSEIGMKGERRRGKGHDGLYQGLSTATKDTYDALHMQALPPR

SEQ ID NO: 29571 - protein, 280 aa, synthetic construct
KSSDKSVCLFTDFDSQTNVSQSKDSDVYITDKCVLDMRSMDFKSNSAVAWSNKSDFACANAFNNSIIPEDTFFPSPESSCDVKLVEKSFETDTNLNFQNLSVIGFRILLLKVAGFNLLMTLRLWSSRSKRSRLLHSDYMNMTPRRPGPTRKHYQPYAPPRDFAAYRSRVKFSRSADAPAYQQGQNQLYNELNLGRREEYDVLDKRRGRDPEMGGKPQRRKNPQEGLYNELQKDKMAEAYSEIGMKGERRRGKGHDGLYQGLSTATKDTYDALHMQALPPR

SEQ ID NO: 29572 - protein, 279 aa, synthetic construct
SSDKSVCLFTDFDSQTNVSQSKDSDVYITDKCVLDMRSMDFKSNSAVAWSNKSDFACANAFNNSIIPEDTFFPSPESSCDVKLVEKSFETDTNLNFQNLSVIGFRILLLKVAGFNLLMTLRLWSSRSKRSRLLHSDYMNMTPRRPGPTRKHYQPYAPPRDFAAYRSRVKFSRSADAPAYQQGQNQLYNELNLGRREEYDVLDKRRGRDPEMGGKPQRRKNPQEGLYNELQKDKMAEAYSEIGMKGERRRGKGHDGLYQGLSTATKDTYDALHMQALPPR

SEQ ID NO: 29573 - protein, 278 aa, synthetic construct
SDKSVCLFTDFDSQTNVSQSKDSDVYITDKCVLDMRSMDFKSNSAVAWSNKSDFACANAFNNSIIPEDTFFPSPESSCDVKLVEKSFETDTNLNFQNLSVIGFRILLLKVAGFNLLMTLRLWSSRSKRSRLLHSDYMNMTPRRPGPTRKHYQPYAPPRDFAAYRSRVKFSRSADAPAYQQGQNQLYNELNLGRREEYDVLDKRRGRDPEMGGKPQRRKNPQEGLYNELQKDKMAEAYSEIGMKGERRRGKGHDGLYQGLSTATKDTYDALHMQALPPR

SEQ ID NO: 29574 - protein, 277 aa, synthetic construct
DKSVCLFTDFDSQTNVSQSKDSDVYITDKCVLDMRSMDFKSNSAVAWSNKSDFACANAFNNSIIPEDTFFPSPESSCDVKLVEKSFETDTNLNFQNLSVIGFRILLLKVAGFNLLMTLRLWSSRSKRSRLLHSDYMNMTPRRPGPTRKHYQPYAPPRDFAAYRSRVKFSRSADAPAYQQGQNQLYNELNLGRREEYDVLDKRRGRDPEMGGKPQRRKNPQEGLYNELQKDKMAEAYSEIGMKGERRRGKGHDGLYQGLSTATKDTYDALHMQALPPR

SEQ ID NO: 29575 - protein, 276 aa, synthetic construct
KSVCLFTDFDSQTNVSQSKDSDVYITDKCVLDMRSMDFKSNSAVAWSNKSDFACANAFNNSIIPEDTFFPSPESSCDVKLVEKSFETDTNLNFQNLSVIGFRILLLKVAGFNLLMTLRLWSSRSKRSRLLHSDYMNMTPRRPGPTRKHYQPYAPPRDFAAYRSRVKFSRSADAPAYQQGQNQLYNELNLGRREEYDVLDKRRGRDPEMGGKPQRRKNPQEGLYNELQKDKMAEAYSEIGMKGERRRGKGHDGLYQGLSTATKDTYDALHMQALPPR

SEQ ID NO: 29576 - protein, 275 aa, synthetic construct
SVCLFTDFDSQTNVSQSKDSDVYITDKCVLDMRSMDFKSNSAVAWSNKSDFACANAFNNSIIPEDTFFPSPESSCDVKLVEKSFETDTNLNFQNLSVIGFRILLLKVAGFNLLMTLRLWSSRSKRSRLLHSDYMNMTPRRPGPTRKHYQPYAPPRDFAAYRSRVKFSRSADAPAYQQGQNQLYNELNLGRREEYDVLDKRRGRDPEMGGKPQRRKNPQEGLYNELQKDKMAEAYSEIGMKGERRRGKGHDGLYQGLSTATKDTYDALHMQALPPR

SEQ ID NO: 29577 - protein, 274 aa, synthetic construct
VCLFTDFDSQTNVSQSKDSDVYITDKCVLDMRSMDFKSNSAVAWSNKSDFACANAFNNSIIPEDTFFPSPESSCDVKLVEKSFETDTNLNFQNLSVIGFRILLLKVAGFNLLMTLRLWSSRSKRSRLLHSDYMNMTPRRPGPTRKHYQPYAPPRDFAAYRSRVKFSRSADAPAYQQGQNQLYNELNLGRREEYDVLDKRRGRDPEMGGKPQRRKNPQEGLYNELQKDKMAEAYSEIGMKGERRRGKGHDGLYQGLSTATKDTYDALHMQALPPR

SEQ ID NO: 29578 - protein, 273 aa, synthetic construct
CLFTDFDSQTNVSQSKDSDVYITDKCVLDMRSMDFKSNSAVAWSNKSDFACANAFNNSIIPEDTFFPSPESSCDVKLVEKSFETDTNLNFQNLSVIGFRILLLKVAGFNLLMTLRLWSSRSKRSRLLHSDYMNMTPRRPGPTRKHYQPYAPPRDFAAYRSRVKFSRSADAPAYQQGQNQLYNELNLGRREEYDVLDKRRGRDPEMGGKPQRRKNPQEGLYNELQKDKMAEAYSEIGMKGERRRGKGHDGLYQGLSTATKDTYDALHMQALPPR

SEQ ID NO: 29579 - protein, 272 aa, synthetic construct
LFTDFDSQTNVSQSKDSDVYITDKCVLDMRSMDFKSNSAVAWSNKSDFACANAFNNSIIPEDTFFPSPESSCDVKLVEKSFETDTNLNFQNLSVIGFRILLLKVAGFNLLMTLRLWSSRSKRSRLLHSDYMNMTPRRPGPTRKHYQPYAPPRDFAAYRSRVKFSRSADAPAYQQGQNQLYNELNLGRREEYDVLDKRRGRDPEMGGKPQRRKNPQEGLYNELQKDKMAEAYSEIGMKGERRRGKGHDGLYQGLSTATKDTYDALHMQALPPR

SEQ ID NO: 29580 - protein, 271 aa, synthetic construct
FTDFDSQTNVSQSKDSDVYITDKCVLDMRSMDFKSNSAVAWSNKSDFACANAFNNSIIPEDTFFPSPESSCDVKLVEKSFETDTNLNFQNLSVIGFRILLLKVAGFNLLMTLRLWSSRSKRSRLLHSDYMNMTPRRPGPTRKHYQPYAPPRDFAAYRSRVKFSRSADAPAYQQGQNQLYNELNLGRREEYDVLDKRRGRDPEMGGKPQRRKNPQEGLYNELQKDKMAEAYSEIGMKGERRRGKGHDGLYQGLSTATKDTYDALHMQALPPR

SEQ ID NO: 29581 - protein, 270 aa, synthetic construct
TDFDSQTNVSQSKDSDVYITDKCVLDMRSMDFKSNSAVAWSNKSDFACANAFNNSIIPEDTFFPSPESSCDVKLVEKSFETDTNLNFQNLSVIGFRILLLKVAGFNLLMTLRLWSSRSKRSRLLHSDYMNMTPRRPGPTRKHYQPYAPPRDFAAYRSRVKFSRSADAPAYQQGQNQLYNELNLGRREEYDVLDKRRGRDPEMGGKPQRRKNPQEGLYNELQKDKMAEAYSEIGMKGERRRGKGHDGLYQGLSTATKDTYDALHMQALPPR

SEQ ID NO: 29582 - protein, 269 aa, synthetic construct
DFDSQTNVSQSKDSDVYITDKCVLDMRSMDFKSNSAVAWSNKSDFACANAFNNSIIPEDTFFPSPESSCDVKLVEKSFETDTNLNFQNLSVIGFRILLLKVAGFNLLMTLRLWSSRSKRSRLLHSDYMNMTPRRPGPTRKHYQPYAPPRDFAAYRSRVKFSRSADAPAYQQGQNQLYNELNLGRREEYDVLDKRRGRDPEMGGKPQRRKNPQEGLYNELQKDKMAEAYSEIGMKGERRRGKGHDGLYQGLSTATKDTYDALHMQALPPR

SEQ ID NO: 29583 - protein, 268 aa, synthetic construct
FDSQTNVSQSKDSDVYITDKCVLDMRSMDFKSNSAVAWSNKSDFACANAFNNSIIPEDTFFPSPESSCDVKLVEKSFETDTNLNFQNLSVIGFRILLLKVAGFNLLMTLRLWSSRSKRSRLLHSDYMNMTPRRPGPTRKHYQPYAPPRDFAAYRSRVKFSRSADAPAYQQGQNQLYNELNLGRREEYDVLDKRRGRDPEMGGKPQRRKNPQEGLYNELQKDKMAEAYSEIGMKGERRRGKGHDGLYQGLSTATKDTYDALHMQALPPR

SEQ ID NO: 29584 - protein, 267 aa, synthetic construct
DSQTNVSQSKDSDVYITDKCVLDMRSMDFKSNSAVAWSNKSDFACANAFNNSIIPEDTFFPSPESSCDVKLVEKSFETDTNLNFQNLSVIGFRILLLKVAGFNLLMTLRLWSSRSKRSRLLHSDYMNMTPRRPGPTRKHYQPYAPPRDFAAYRSRVKFSRSADAPAYQQGQNQLYNELNLGRREEYDVLDKRRGRDPEMGGKPQRRKNPQEGLYNELQKDKMAEAYSEIGMKGERRRGKGHDGLYQGLSTATKDTYDALHMQALPPR

SEQ ID NO: 29585 - protein, 266 aa, synthetic construct
SQTNVSQSKDSDVYITDKCVLDMRSMDFKSNSAVAWSNKSDFACANAFNNSIIPEDTFFPSPESSCDVKLVEKSFETDTNLNFQNLSVIGFRILLLKVAGFNLLMTLRLWSSRSKRSRLLHSDYMNMTPRRPGPTRKHYQPYAPPRDFAAYRSRVKFSRSADAPAYQQGQNQLYNELNLGRREEYDVLDKRRGRDPEMGGKPQRRKNPQEGLYNELQKDKMAEAYSEIGMKGERRRGKGHDGLYQGLSTATKDTYDALHMQALPPR

SEQ ID NO: 29586 - protein, 265 aa, synthetic construct
QTNVSQSKDSDVYITDKCVLDMRSMDFKSNSAVAWSNKSDFACANAFNNSIIPEDTFFPSPESSCDVKLVEKSFETDTNLNFQNLSVIGFRILLLKVAGFNLLMTLRLWSSRSKRSRLLHSDYMNMTPRRPGPTRKHYQPYAPPRDFAAYRSRVKFSRSADAPAYQQGQNQLYNELNLGRREEYDVLDKRRGRDPEMGGKPQRRKNPQEGLYNELQKDKMAEAYSEIGMKGERRRGKGHDGLYQGLSTATKDTYDALHMQALPPR

SEQ ID NO: 29587 - protein, 264 aa, synthetic construct
TNVSQSKDSDVYITDKCVLDMRSMDFKSNSAVAWSNKSDFACANAFNNSIIPEDTFFPSPESSCDVKLVEKSFETDTNLNFQNLSVIGFRILLLKVAGFNLLMTLRLWSSRSKRSRLLHSDYMNMTPRRPGPTRKHYQPYAPPRDFAAYRSRVKFSRSADAPAYQQGQNQLYNELNLGRREEYDVLDKRRGRDPEMGGKPQRRKNPQEGLYNELQKDKMAEAYSEIGMKGERRRGKGHDGLYQGLSTATKDTYDALHMQALPPR

SEQ ID NO: 29588 - protein, 263 aa, synthetic construct
NVSQSKDSDVYITDKCVLDMRSMDFKSNSAVAWSNKSDFACANAFNNSIIPEDTFFPSPESSCDVKLVEKSFETDTNLNFQNLSVIGFRILLLKVAGFNLLMTLRLWSSRSKRSRLLHSDYMNMTPRRPGPTRKHYQPYAPPRDFAAYRSRVKFSRSADAPAYQQGQNQLYNELNLGRREEYDVLDKRRGRDPEMGGKPQRRKNPQEGLYNELQKDKMAEAYSEIGMKGERRRGKGHDGLYQGLSTATKDTYDALHMQALPPR

SEQ ID NO: 29589 - protein, 262 aa, synthetic construct
VSQSKDSDVYITDKCVLDMRSMDFKSNSAVAWSNKSDFACANAFNNSIIPEDTFFPSPESSCDVKLVEKSFETDTNLNFQNLSVIGFRILLLKVAGFNLLMTLRLWSSRSKRSRLLHSDYMNMTPRRPGPTRKHYQPYAPPRDFAAYRSRVKFSRSADAPAYQQGQNQLYNELNLGRREEYDVLDKRRGRDPEMGGKPQRRKNPQEGLYNELQKDKMAEAYSEIGMKGERRRGKGHDGLYQGLSTATKDTYDALHMQALPPR

SEQ ID NO: 29590 - protein, 261 aa, synthetic construct
SQSKDSDVYITDKCVLDMRSMDFKSNSAVAWSNKSDFACANAFNNSIIPEDTFFPSPESSCDVKLVEKSFETDTNLNFQNLSVIGFRILLLKVAGFNLLMTLRLWSSRSKRSRLLHSDYMNMTPRRPGPTRKHYQPYAPPRDFAAYRSRVKFSRSADAPAYQQGQNQLYNELNLGRREEYDVLDKRRGRDPEMGGKPQRRKNPQEGLYNELQKDKMAEAYSEIGMKGERRRGKGHDGLYQGLSTATKDTYDALHMQALPPR

SEQ ID NO: 29591 - protein, 260 aa, synthetic construct
QSKDSDVYITDKCVLDMRSMDFKSNSAVAWSNKSDFACANAFNNSIIPEDTFFPSPESSCDVKLVEKSFETDTNLNFQNLSVIGFRILLLKVAGFNLLMTLRLWSSRSKRSRLLHSDYMNMTPRRPGPTRKHYQPYAPPRDFAAYRSRVKFSRSADAPAYQQGQNQLYNELNLGRREEYDVLDKRRGRDPEMGGKPQRRKNPQEGLYNELQKDKMAEAYSEIGMKGERRRGKGHDGLYQGLSTATKDTYDALHMQALPPR

SEQ ID NO: 29592 - protein, 259 aa, synthetic construct
SKDSDVYITDKCVLDMRSMDFKSNSAVAWSNKSDFACANAFNNSIIPEDTFFPSPESSCDVKLVEKSFETDTNLNFQNLSVIGFRILLLKVAGFNLLMTLRLWSSRSKRSRLLHSDYMNMTPRRPGPTRKHYQPYAPPRDFAAYRSRVKFSRSADAPAYQQGQNQLYNELNLGRREEYDVLDKRRGRDPEMGGKPQRRKNPQEGLYNELQKDKMAEAYSEIGMKGERRRGKGHDGLYQGLSTATKDTYDALHMQALPPR

SEQ ID NO: 29593 - protein, 258 aa, synthetic construct
KDSDVYITDKCVLDMRSMDFKSNSAVAWSNKSDFACANAFNNSIIPEDTFFPSPESSCDVKLVEKSFETDTNLNFQNLSVIGFRILLLKVAGFNLLMTLRLWSSRSKRSRLLHSDYMNMTPRRPGPTRKHYQPYAPPRDFAAYRSRVKFSRSADAPAYQQGQNQLYNELNLGRREEYDVLDKRRGRDPEMGGKPQRRKNPQEGLYNELQKDKMAEAYSEIGMKGERRRGKGHDGLYQGLSTATKDTYDALHMQALPPR

SEQ ID NO: 29594 - protein, 257 aa, synthetic construct
DSDVYITDKCVLDMRSMDFKSNSAVAWSNKSDFACANAFNNSIIPEDTFFPSPESSCDVKLVEKSFETDTNLNFQNLSVIGFRILLLKVAGFNLLMTLRLWSSRSKRSRLLHSDYMNMTPRRPGPTRKHYQPYAPPRDFAAYRSRVKFSRSADAPAYQQGQNQLYNELNLGRREEYDVLDKRRGRDPEMGGKPQRRKNPQEGLYNELQKDKMAEAYSEIGMKGERRRGKGHDGLYQGLSTATKDTYDALHMQALPPR

SEQ ID NO: 29595 - protein, 256 aa, synthetic construct
SDVYITDKCVLDMRSMDFKSNSAVAWSNKSDFACANAFNNSIIPEDTFFPSPESSCDVKLVEKSFETDTNLNFQNLSVIGFRILLLKVAGFNLLMTLRLWSSRSKRSRLLHSDYMNMTPRRPGPTRKHYQPYAPPRDFAAYRSRVKFSRSADAPAYQQGQNQLYNELNLGRREEYDVLDKRRGRDPEMGGKPQRRKNPQEGLYNELQKDKMAEAYSEIGMKGERRRGKGHDGLYQGLSTATKDTYDALHMQALPPR

SEQ ID NO: 29596 - protein, 255 aa, synthetic construct
DVYITDKCVLDMRSMDFKSNSAVAWSNKSDFACANAFNNSIIPEDTFFPSPESSCDVKLVEKSFETDTNLNFQNLSVIGFRILLLKVAGFNLLMTLRLWSSRSKRSRLLHSDYMNMTPRRPGPTRKHYQPYAPPRDFAAYRSRVKFSRSADAPAYQQGQNQLYNELNLGRREEYDVLDKRRGRDPEMGGKPQRRKNPQEGLYNELQKDKMAEAYSEIGMKGERRRGKGHDGLYQGLSTATKDTYDALHMQALPPR

SEQ ID NO: 29597 - protein, 254 aa, synthetic construct
VYITDKCVLDMRSMDFKSNSAVAWSNKSDFACANAFNNSIIPEDTFFPSPESSCDVKLVEKSFETDTNLNFQNLSVIGFRILLLKVAGFNLLMTLRLWSSRSKRSRLLHSDYMNMTPRRPGPTRKHYQPYAPPRDFAAYRSRVKFSRSADAPAYQQGQNQLYNELNLGRREEYDVLDKRRGRDPEMGGKPQRRKNPQEGLYNELQKDKMAEAYSEIGMKGERRRGKGHDGLYQGLSTATKDTYDALHMQALPPR

SEQ ID NO: 29598 - protein, 253 aa, synthetic construct
YITDKCVLDMRSMDFKSNSAVAWSNKSDFACANAFNNSIIPEDTFFPSPESSCDVKLVEKSFETDTNLNFQNLSVIGFRILLLKVAGFNLLMTLRLWSSRSKRSRLLHSDYMNMTPRRPGPTRKHYQPYAPPRDFAAYRSRVKFSRSADAPAYQQGQNQLYNELNLGRREEYDVLDKRRGRDPEMGGKPQRRKNPQEGLYNELQKDKMAEAYSEIGMKGERRRGKGHDGLYQGLSTATKDTYDALHMQALPPR

SEQ ID NO: 29599 - protein, 252 aa, synthetic construct
ITDKCVLDMRSMDFKSNSAVAWSNKSDFACANAFNNSIIPEDTFFPSPESSCDVKLVEKSFETDTNLNFQNLSVIGFRILLLKVAGFNLLMTLRLWSSRSKRSRLLHSDYMNMTPRRPGPTRKHYQPYAPPRDFAAYRSRVKFSRSADAPAYQQGQNQLYNELNLGRREEYDVLDKRRGRDPEMGGKPQRRKNPQEGLYNELQKDKMAEAYSEIGMKGERRRGKGHDGLYQGLSTATKDTYDALHMQALPPR

SEQ ID NO: 29600 - protein, 251 aa, synthetic construct
TDKCVLDMRSMDFKSNSAVAWSNKSDFACANAFNNSIIPEDTFFPSPESSCDVKLVEKSFETDTNLNFQNLSVIGFRILLLKVAGFNLLMTLRLWSSRSKRSRLLHSDYMNMTPRRPGPTRKHYQPYAPPRDFAAYRSRVKFSRSADAPAYQQGQNQLYNELNLGRREEYDVLDKRRGRDPEMGGKPQRRKNPQEGLYNELQKDKMAEAYSEIGMKGERRRGKGHDGLYQGLSTATKDTYDALHMQALPPR

SEQ ID NO: 29601 - protein, 250 aa, synthetic construct
DKCVLDMRSMDFKSNSAVAWSNKSDFACANAFNNSIIPEDTFFPSPESSCDVKLVEKSFETDTNLNFQNLSVIGFRILLLKVAGFNLLMTLRLWSSRSKRSRLLHSDYMNMTPRRPGPTRKHYQPYAPPRDFAAYRSRVKFSRSADAPAYQQGQNQLYNELNLGRREEYDVLDKRRGRDPEMGGKPQRRKNPQEGLYNELQKDKMAEAYSEIGMKGERRRGKGHDGLYQGLSTATKDTYDALHMQALPPR

SEQ ID NO: 29602 - protein, 248 aa, synthetic construct
CVLDMRSMDFKSNSAVAWSNKSDFACANAFNNSIIPEDTFFPSPESSCDVKLVEKSFETDTNLNFQNLSVIGFRILLLKVAGFNLLMTLRLWSSRSKRSRLLHSDYMNMTPRRPGPTRKHYQPYAPPRDFAAYRSRVKFSRSADAPAYQQGQNQLYNELNLGRREEYDVLDKRRGRDPEMGGKPQRRKNPQEGLYNELQKDKMAEAYSEIGMKGERRRGKGHDGLYQGLSTATKDTYDALHMQALPPR

SEQ ID NO: 29603 - protein, 247 aa, synthetic construct
VLDMRSMDFKSNSAVAWSNKSDFACANAFNNSIIPEDTFFPSPESSCDVKLVEKSFETDTNLNFQNLSVIGFRILLLKVAGFNLLMTLRLWSSRSKRSRLLHSDYMNMTPRRPGPTRKHYQPYAPPRDFAAYRSRVKFSRSADAPAYQQGQNQLYNELNLGRREEYDVLDKRRGRDPEMGGKPQRRKNPQEGLYNELQKDKMAEAYSEIGMKGERRRGKGHDGLYQGLSTATKDTYDALHMQALPPR

SEQ ID NO: 29604 - protein, 246 aa, synthetic construct
LDMRSMDFKSNSAVAWSNKSDFACANAFNNSIIPEDTFFPSPESSCDVKLVEKSFETDTNLNFQNLSVIGFRILLLKVAGFNLLMTLRLWSSRSKRSRLLHSDYMNMTPRRPGPTRKHYQPYAPPRDFAAYRSRVKFSRSADAPAYQQGQNQLYNELNLGRREEYDVLDKRRGRDPEMGGKPQRRKNPQEGLYNELQKDKMAEAYSEIGMKGERRRGKGHDGLYQGLSTATKDTYDALHMQALPPR

SEQ ID NO: 29605 - protein, 245 aa, synthetic construct
DMRSMDFKSNSAVAWSNKSDFACANAFNNSIIPEDTFFPSPESSCDVKLVEKSFETDTNLNFQNLSVIGFRILLLKVAGFNLLMTLRLWSSRSKRSRLLHSDYMNMTPRRPGPTRKHYQPYAPPRDFAAYRSRVKFSRSADAPAYQQGQNQLYNELNLGRREEYDVLDKRRGRDPEMGGKPQRRKNPQEGLYNELQKDKMAEAYSEIGMKGERRRGKGHDGLYQGLSTATKDTYDALHMQALPPR

SEQ ID NO: 29606 - protein, 244 aa, synthetic construct
MRSMDFKSNSAVAWSNKSDFACANAFNNSIIPEDTFFPSPESSCDVKLVEKSFETDTNLNFQNLSVIGFRILLLKVAGFNLLMTLRLWSSRSKRSRLLHSDYMNMTPRRPGPTRKHYQPYAPPRDFAAYRSRVKFSRSADAPAYQQGQNQLYNELNLGRREEYDVLDKRRGRDPEMGGKPQRRKNPQEGLYNELQKDKMAEAYSEIGMKGERRRGKGHDGLYQGLSTATKDTYDALHMQALPPR

SEQ ID NO: 29607 - protein, 243 aa, synthetic construct
RSMDFKSNSAVAWSNKSDFACANAFNNSIIPEDTFFPSPESSCDVKLVEKSFETDTNLNFQNLSVIGFRILLLKVAGFNLLMTLRLWSSRSKRSRLLHSDYMNMTPRRPGPTRKHYQPYAPPRDFAAYRSRVKFSRSADAPAYQQGQNQLYNELNLGRREEYDVLDKRRGRDPEMGGKPQRRKNPQEGLYNELQKDKMAEAYSEIGMKGERRRGKGHDGLYQGLSTATKDTYDALHMQALPPR

SEQ ID NO: 29608 - protein, 242 aa, synthetic construct
SMDFKSNSAVAWSNKSDFACANAFNNSIIPEDTFFPSPESSCDVKLVEKSFETDTNLNFQNLSVIGFRILLLKVAGFNLLMTLRLWSSRSKRSRLLHSDYMNMTPRRPGPTRKHYQPYAPPRDFAAYRSRVKFSRSADAPAYQQGQNQLYNELNLGRREEYDVLDKRRGRDPEMGGKPQRRKNPQEGLYNELQKDKMAEAYSEIGMKGERRRGKGHDGLYQGLSTATKDTYDALHMQALPPR

SEQ ID NO: 29609 - protein, 241 aa, synthetic construct
MDFKSNSAVAWSNKSDFACANAFNNSIIPEDTFFPSPESSCDVKLVEKSFETDTNLNFQNLSVIGFRILLLKVAGFNLLMTLRLWSSRSKRSRLLHSDYMNMTPRRPGPTRKHYQPYAPPRDFAAYRSRVKFSRSADAPAYQQGQNQLYNELNLGRREEYDVLDKRRGRDPEMGGKPQRRKNPQEGLYNELQKDKMAEAYSEIGMKGERRRGKGHDGLYQGLSTATKDTYDALHMQALPPR

SEQ ID NO: 29610 - protein, 240 aa, synthetic construct
DFKSNSAVAWSNKSDFACANAFNNSIIPEDTFFPSPESSCDVKLVEKSFETDTNLNFQNLSVIGFRILLLKVAGFNLLMTLRLWSSRSKRSRLLHSDYMNMTPRRPGPTRKHYQPYAPPRDFAAYRSRVKFSRSADAPAYQQGQNQLYNELNLGRREEYDVLDKRRGRDPEMGGKPQRRKNPQEGLYNELQKDKMAEAYSEIGMKGERRRGKGHDGLYQGLSTATKDTYDALHMQALPPR

SEQ ID NO: 29611 - protein, 239 aa, synthetic construct
FKSNSAVAWSNKSDFACANAFNNSIIPEDTFFPSPESSCDVKLVEKSFETDTNLNFQNLSVIGFRILLLKVAGFNLLMTLRLWSSRSKRSRLLHSDYMNMTPRRPGPTRKHYQPYAPPRDFAAYRSRVKFSRSADAPAYQQGQNQLYNELNLGRREEYDVLDKRRGRDPEMGGKPQRRKNPQEGLYNELQKDKMAEAYSEIGMKGERRRGKGHDGLYQGLSTATKDTYDALHMQALPPR

SEQ ID NO: 29612 - protein, 238 aa, synthetic construct
KSNSAVAWSNKSDFACANAFNNSIIPEDTFFPSPESSCDVKLVEKSFETDTNLNFQNLSVIGFRILLLKVAGFNLLMTLRLWSSRSKRSRLLHSDYMNMTPRRPGPTRKHYQPYAPPRDFAAYRSRVKFSRSADAPAYQQGQNQLYNELNLGRREEYDVLDKRRGRDPEMGGKPQRRKNPQEGLYNELQKDKMAEAYSEIGMKGERRRGKGHDGLYQGLSTATKDTYDALHMQALPPR

SEQ ID NO: 29613 - protein, 237 aa, synthetic construct
SNSAVAWSNKSDFACANAFNNSIIPEDTFFPSPESSCDVKLVEKSFETDTNLNFQNLSVIGFRILLLKVAGFNLLMTLRLWSSRSKRSRLLHSDYMNMTPRRPGPTRKHYQPYAPPRDFAAYRSRVKFSRSADAPAYQQGQNQLYNELNLGRREEYDVLDKRRGRDPEMGGKPQRRKNPQEGLYNELQKDKMAEAYSEIGMKGERRRGKGHDGLYQGLSTATKDTYDALHMQALPPR

SEQ ID NO: 29614 - protein, 236 aa, synthetic construct
NSAVAWSNKSDFACANAFNNSIIPEDTFFPSPESSCDVKLVEKSFETDTNLNFQNLSVIGFRILLLKVAGFNLLMTLRLWSSRSKRSRLLHSDYMNMTPRRPGPTRKHYQPYAPPRDFAAYRSRVKFSRSADAPAYQQGQNQLYNELNLGRREEYDVLDKRRGRDPEMGGKPQRRKNPQEGLYNELQKDKMAEAYSEIGMKGERRRGKGHDGLYQGLSTATKDTYDALHMQALPPR

SEQ ID NO: 29615 - protein, 235 aa, synthetic construct
SAVAWSNKSDFACANAFNNSIIPEDTFFPSPESSCDVKLVEKSFETDTNLNFQNLSVIGFRILLLKVAGFNLLMTLRLWSSRSKRSRLLHSDYMNMTPRRPGPTRKHYQPYAPPRDFAAYRSRVKFSRSADAPAYQQGQNQLYNELNLGRREEYDVLDKRRGRDPEMGGKPQRRKNPQEGLYNELQKDKMAEAYSEIGMKGERRRGKGHDGLYQGLSTATKDTYDALHMQALPPR

SEQ ID NO: 29616 - protein, 234 aa, synthetic construct
AVAWSNKSDFACANAFNNSIIPEDTFFPSPESSCDVKLVEKSFETDTNLNFQNLSVIGFRILLLKVAGFNLLMTLRLWSSRSKRSRLLHSDYMNMTPRRPGPTRKHYQPYAPPRDFAAYRSRVKFSRSADAPAYQQGQNQLYNELNLGRREEYDVLDKRRGRDPEMGGKPQRRKNPQEGLYNELQKDKMAEAYSEIGMKGERRRGKGHDGLYQGLSTATKDTYDALHMQALPPR

SEQ ID NO: 29617 - protein, 233 aa, synthetic construct
VAWSNKSDFACANAFNNSIIPEDTFFPSPESSCDVKLVEKSFETDTNLNFQNLSVIGFRILLLKVAGFNLLMTLRLWSSRSKRSRLLHSDYMNMTPRRPGPTRKHYQPYAPPRDFAAYRSRVKFSRSADAPAYQQGQNQLYNELNLGRREEYDVLDKRRGRDPEMGGKPQRRKNPQEGLYNELQKDKMAEAYSEIGMKGERRRGKGHDGLYQGLSTATKDTYDALHMQALPPR

SEQ ID NO: 29618 - protein, 232 aa, synthetic construct
AWSNKSDFACANAFNNSIIPEDTFFPSPESSCDVKLVEKSFETDTNLNFQNLSVIGFRILLLKVAGFNLLMTLRLWSSRSKRSRLLHSDYMNMTPRRPGPTRKHYQPYAPPRDFAAYRSRVKFSRSADAPAYQQGQNQLYNELNLGRREEYDVLDKRRGRDPEMGGKPQRRKNPQEGLYNELQKDKMAEAYSEIGMKGERRRGKGHDGLYQGLSTATKDTYDALHMQALPPR

SEQ ID NO: 29619 - protein, 231 aa, synthetic construct
WSNKSDFACANAFNNSIIPEDTFFPSPESSCDVKLVEKSFETDTNLNFQNLSVIGFRILLLKVAGFNLLMTLRLWSSRSKRSRLLHSDYMNMTPRRPGPTRKHYQPYAPPRDFAAYRSRVKFSRSADAPAYQQGQNQLYNELNLGRREEYDVLDKRRGRDPEMGGKPQRRKNPQEGLYNELQKDKMAEAYSEIGMKGERRRGKGHDGLYQGLSTATKDTYDALHMQALPPR

SEQ ID NO: 29620 - protein, 230 aa, synthetic construct
SNKSDFACANAFNNSIIPEDTFFPSPESSCDVKLVEKSFETDTNLNFQNLSVIGFRILLLKVAGFNLLMTLRLWSSRSKRSRLLHSDYMNMTPRRPGPTRKHYQPYAPPRDFAAYRSRVKFSRSADAPAYQQGQNQLYNELNLGRREEYDVLDKRRGRDPEMGGKPQRRKNPQEGLYNELQKDKMAEAYSEIGMKGERRRGKGHDGLYQGLSTATKDTYDALHMQALPPR

SEQ ID NO: 29621 - protein, 229 aa, synthetic construct
NKSDFACANAFNNSIIPEDTFFPSPESSCDVKLVEKSFETDTNLNFQNLSVIGFRILLLKVAGFNLLMTLRLWSSRSKRSRLLHSDYMNMTPRRPGPTRKHYQPYAPPRDFAAYRSRVKFSRSADAPAYQQGQNQLYNELNLGRREEYDVLDKRRGRDPEMGGKPQRRKNPQEGLYNELQKDKMAEAYSEIGMKGERRRGKGHDGLYQGLSTATKDTYDALHMQALPPR

SEQ ID NO: 29622 - protein, 228 aa, synthetic construct
KSDFACANAFNNSIIPEDTFFPSPESSCDVKLVEKSFETDTNLNFQNLSVIGFRILLLKVAGFNLLMTLRLWSSRSKRSRLLHSDYMNMTPRRPGPTRKHYQPYAPPRDFAAYRSRVKFSRSADAPAYQQGQNQLYNELNLGRREEYDVLDKRRGRDPEMGGKPQRRKNPQEGLYNELQKDKMAEAYSEIGMKGERRRGKGHDGLYQGLSTATKDTYDALHMQALPPR

SEQ ID NO: 29623 - protein, 227 aa, synthetic construct
SDFACANAFNNSIIPEDTFFPSPESSCDVKLVEKSFETDTNLNFQNLSVIGFRILLLKVAGFNLLMTLRLWSSRSKRSRLLHSDYMNMTPRRPGPTRKHYQPYAPPRDFAAYRSRVKFSRSADAPAYQQGQNQLYNELNLGRREEYDVLDKRRGRDPEMGGKPQRRKNPQEGLYNELQKDKMAEAYSEIGMKGERRRGKGHDGLYQGLSTATKDTYDALHMQALPPR

SEQ ID NO: 29624 - protein, 226 aa, synthetic construct
DFACANAFNNSIIPEDTFFPSPESSCDVKLVEKSFETDTNLNFQNLSVIGFRILLLKVAGFNLLMTLRLWSSRSKRSRLLHSDYMNMTPRRPGPTRKHYQPYAPPRDFAAYRSRVKFSRSADAPAYQQGQNQLYNELNLGRREEYDVLDKRRGRDPEMGGKPQRRKNPQEGLYNELQKDKMAEAYSEIGMKGERRRGKGHDGLYQGLSTATKDTYDALHMQALPPR

SEQ ID NO: 29625 - protein, 225 aa, synthetic construct
FACANAFNNSIIPEDTFFPSPESSCDVKLVEKSFETDTNLNFQNLSVIGFRILLLKVAGFNLLMTLRLWSSRSKRSRLLHSDYMNMTPRRPGPTRKHYQPYAPPRDFAAYRSRVKFSRSADAPAYQQGQNQLYNELNLGRREEYDVLDKRRGRDPEMGGKPQRRKNPQEGLYNELQKDKMAEAYSEIGMKGERRRGKGHDGLYQGLSTATKDTYDALHMQALPPR

SEQ ID NO: 29626 - protein, 224 aa, synthetic construct
ACANAFNNSIIPEDTFFPSPESSCDVKLVEKSFETDTNLNFQNLSVIGFRILLLKVAGFNLLMTLRLWSSRSKRSRLLHSDYMNMTPRRPGPTRKHYQPYAPPRDFAAYRSRVKFSRSADAPAYQQGQNQLYNELNLGRREEYDVLDKRRGRDPEMGGKPQRRKNPQEGLYNELQKDKMAEAYSEIGMKGERRRGKGHDGLYQGLSTATKDTYDALHMQALPPR

SEQ ID NO: 29627 - protein, 223 aa, synthetic construct
CANAFNNSIIPEDTFFPSPESSCDVKLVEKSFETDTNLNFQNLSVIGFRILLLKVAGFNLLMTLRLWSSRSKRSRLLHSDYMNMTPRRPGPTRKHYQPYAPPRDFAAYRSRVKFSRSADAPAYQQGQNQLYNELNLGRREEYDVLDKRRGRDPEMGGKPQRRKNPQEGLYNELQKDKMAEAYSEIGMKGERRRGKGHDGLYQGLSTATKDTYDALHMQALPPR

SEQ ID NO: 29628 - protein, 222 aa, synthetic construct
ANAFNNSIIPEDTFFPSPESSCDVKLVEKSFETDTNLNFQNLSVIGFRILLLKVAGFNLLMTLRLWSSRSKRSRLLHSDYMNMTPRRPGPTRKHYQPYAPPRDFAAYRSRVKFSRSADAPAYQQGQNQLYNELNLGRREEYDVLDKRRGRDPEMGGKPQRRKNPQEGLYNELQKDKMAEAYSEIGMKGERRRGKGHDGLYQGLSTATKDTYDALHMQALPPR

SEQ ID NO: 29629 - protein, 221 aa, synthetic construct
NAFNNSIIPEDTFFPSPESSCDVKLVEKSFETDTNLNFQNLSVIGFRILLLKVAGFNLLMTLRLWSSRSKRSRLLHSDYMNMTPRRPGPTRKHYQPYAPPRDFAAYRSRVKFSRSADAPAYQQGQNQLYNELNLGRREEYDVLDKRRGRDPEMGGKPQRRKNPQEGLYNELQKDKMAEAYSEIGMKGERRRGKGHDGLYQGLSTATKDTYDALHMQALPPR

SEQ ID NO: 29630 - protein, 220 aa, synthetic construct
AFNNSIIPEDTFFPSPESSCDVKLVEKSFETDTNLNFQNLSVIGFRILLLKVAGFNLLMTLRLWSSRSKRSRLLHSDYMNMTPRRPGPTRKHYQPYAPPRDFAAYRSRVKFSRSADAPAYQQGQNQLYNELNLGRREEYDVLDKRRGRDPEMGGKPQRRKNPQEGLYNELQKDKMAEAYSEIGMKGERRRGKGHDGLYQGLSTATKDTYDALHMQALPPR

SEQ ID NO: 29631 - protein, 219 aa, synthetic construct
FNNSIIPEDTFFPSPESSCDVKLVEKSFETDTNLNFQNLSVIGFRILLLKVAGFNLLMTLRLWSSRSKRSRLLHSDYMNMTPRRPGPTRKHYQPYAPPRDFAAYRSRVKFSRSADAPAYQQGQNQLYNELNLGRREEYDVLDKRRGRDPEMGGKPQRRKNPQEGLYNELQKDKMAEAYSEIGMKGERRRGKGHDGLYQGLSTATKDTYDALHMQALPPR

SEQ ID NO: 29632 - protein, 218 aa, synthetic construct
NNSIIPEDTFFPSPESSCDVKLVEKSFETDTNLNFQNLSVIGFRILLLKVAGFNLLMTLRLWSSRSKRSRLLHSDYMNMTPRRPGPTRKHYQPYAPPRDFAAYRSRVKFSRSADAPAYQQGQNQLYNELNLGRREEYDVLDKRRGRDPEMGGKPQRRKNPQEGLYNELQKDKMAEAYSEIGMKGERRRGKGHDGLYQGLSTATKDTYDALHMQALPPR

SEQ ID NO: 29633 - protein, 217 aa, synthetic construct
NSIIPEDTFFPSPESSCDVKLVEKSFETDTNLNFQNLSVIGFRILLLKVAGFNLLMTLRLWSSRSKRSRLLHSDYMNMTPRRPGPTRKHYQPYAPPRDFAAYRSRVKFSRSADAPAYQQGQNQLYNELNLGRREEYDVLDKRRGRDPEMGGKPQRRKNPQEGLYNELQKDKMAEAYSEIGMKGERRRGKGHDGLYQGLSTATKDTYDALHMQALPPR

SEQ ID NO: 29634 - protein, 216 aa, synthetic construct
SIIPEDTFFPSPESSCDVKLVEKSFETDTNLNFQNLSVIGFRILLLKVAGFNLLMTLRLWSSRSKRSRLLHSDYMNMTPRRPGPTRKHYQPYAPPRDFAAYRSRVKFSRSADAPAYQQGQNQLYNELNLGRREEYDVLDKRRGRDPEMGGKPQRRKNPQEGLYNELQKDKMAEAYSEIGMKGERRRGKGHDGLYQGLSTATKDTYDALHMQALPPR

SEQ ID NO: 29635 - protein, 215 aa, synthetic construct
IIPEDTFFPSPESSCDVKLVEKSFETDTNLNFQNLSVIGFRILLLKVAGFNLLMTLRLWSSRSKRSRLLHSDYMNMTPRRPGPTRKHYQPYAPPRDFAAYRSRVKFSRSADAPAYQQGQNQLYNELNLGRREEYDVLDKRRGRDPEMGGKPQRRKNPQEGLYNELQKDKMAEAYSEIGMKGERRRGKGHDGLYQGLSTATKDTYDALHMQALPPR

SEQ ID NO: 29636 - protein, 214 aa, synthetic construct; identical to SEQ ID NO: 29322

SEQ ID NO: 29637 - protein, 213 aa, synthetic construct
PEDTFFPSPESSCDVKLVEKSFETDTNLNFQNLSVIGFRILLLKVAGFNLLMTLRLWSSRSKRSRLLHSDYMNMTPRRPGPTRKHYQPYAPPRDFAAYRSRVKFSRSADAPAYQQGQNQLYNELNLGRREEYDVLDKRRGRDPEMGGKPQRRKNPQEGLYNELQKDKMAEAYSEIGMKGERRRGKGHDGLYQGLSTATKDTYDALHMQALPPR

SEQ ID NO: 29638 - protein, 212 aa, synthetic construct
EDTFFPSPESSCDVKLVEKSFETDTNLNFQNLSVIGFRILLLKVAGFNLLMTLRLWSSRSKRSRLLHSDYMNMTPRRPGPTRKHYQPYAPPRDFAAYRSRVKFSRSADAPAYQQGQNQLYNELNLGRREEYDVLDKRRGRDPEMGGKPQRRKNPQEGLYNELQKDKMAEAYSEIGMKGERRRGKGHDGLYQGLSTATKDTYDALHMQALPPR

SEQ ID NO: 29639 - protein, 211 aa, synthetic construct
DTFFPSPESSCDVKLVEKSFETDTNLNFQNLSVIGFRILLLKVAGFNLLMTLRLWSSRSKRSRLLHSDYMNMTPRRPGPTRKHYQPYAPPRDFAAYRSRVKFSRSADAPAYQQGQNQLYNELNLGRREEYDVLDKRRGRDPEMGGKPQRRKNPQEGLYNELQKDKMAEAYSEIGMKGERRRGKGHDGLYQGLSTATKDTYDALHMQALPPR

SEQ ID NO: 29640 - protein, 210 aa, synthetic construct
TFFPSPESSCDVKLVEKSFETDTNLNFQNLSVIGFRILLLKVAGFNLLMTLRLWSSRSKRSRLLHSDYMNMTPRRPGPTRKHYQPYAPPRDFAAYRSRVKFSRSADAPAYQQGQNQLYNELNLGRREEYDVLDKRRGRDPEMGGKPQRRKNPQEGLYNELQKDKMAEAYSEIGMKGERRRGKGHDGLYQGLSTATKDTYDALHMQALPPR

SEQ ID NO: 29641 - protein, 209 aa, synthetic construct
FFPSPESSCDVKLVEKSFETDTNLNFQNLSVIGFRILLLKVAGFNLLMTLRLWSSRSKRSRLLHSDYMNMTPRRPGPTRKHYQPYAPPRDFAAYRSRVKFSRSADAPAYQQGQNQLYNELNLGRREEYDVLDKRRGRDPEMGGKPQRRKNPQEGLYNELQKDKMAEAYSEIGMKGERRRGKGHDGLYQGLSTATKDTYDALHMQALPPR

SEQ ID NO: 29642 - protein, 208 aa, synthetic construct
FPSPESSCDVKLVEKSFETDTNLNFQNLSVIGFRILLLKVAGFNLLMTLRLWSSRSKRSRLLHSDYMNMTPRRPGPTRKHYQPYAPPRDFAAYRSRVKFSRSADAPAYQQGQNQLYNELNLGRREEYDVLDKRRGRDPEMGGKPQRRKNPQEGLYNELQKDKMAEAYSEIGMKGERRRGKGHDGLYQGLSTATKDTYDALHMQALPPR

SEQ ID NO: 29643 - protein, 207 aa, synthetic construct
PSPESSCDVKLVEKSFETDTNLNFQNLSVIGFRILLLKVAGFNLLMTLRLWSSRSKRSRLLHSDYMNMTPRRPGPTRKHYQPYAPPRDFAAYRSRVKFSRSADAPAYQQGQNQLYNELNLGRREEYDVLDKRRGRDPEMGGKPQRRKNPQEGLYNELQKDKMAEAYSEIGMKGERRRGKGHDGLYQGLSTATKDTYDALHMQALPPR

SEQ ID NO: 29644 - protein, 206 aa, synthetic construct
SPESSCDVKLVEKSFETDTNLNFQNLSVIGFRILLLKVAGFNLLMTLRLWSSRSKRSRLLHSDYMNMTPRRPGPTRKHYQPYAPPRDFAAYRSRVKFSRSADAPAYQQGQNQLYNELNLGRREEYDVLDKRRGRDPEMGGKPQRRKNPQEGLYNELQKDKMAEAYSEIGMKGERRRGKGHDGLYQGLSTATKDTYDALHMQALPPR

SEQ ID NO: 29645 - protein, 205 aa, synthetic construct
PESSCDVKLVEKSFETDTNLNFQNLSVIGFRILLLKVAGFNLLMTLRLWSSRSKRSRLLHSDYMNMTPRRPGPTRKHYQPYAPPRDFAAYRSRVKFSRSADAPAYQQGQNQLYNELNLGRREEYDVLDKRRGRDPEMGGKPQRRKNPQEGLYNELQKDKMAEAYSEIGMKGERRRGKGHDGLYQGLSTATKDTYDALHMQALPPR

SEQ ID NO: 29646 - protein, 204 aa, synthetic construct; identical to SEQ ID NO: 29323

SEQ ID NO: 29647 - protein, 203 aa, synthetic construct
SSCDVKLVEKSFETDTNLNFQNLSVIGFRILLLKVAGFNLLMTLRLWSSRSKRSRLLHSDYMNMTPRRPGPTRKHYQPYAPPRDFAAYRSRVKFSRSADAPAYQQGQNQLYNELNLGRREEYDVLDKRRGRDPEMGGKPQRRKNPQEGLYNELQKDKMAEAYSEIGMKGERRRGKGHDGLYQGLSTATKDTYDALHMQALPPR

SEQ ID NO: 29648 - protein, 202 aa, synthetic construct
SCDVKLVEKSFETDTNLNFQNLSVIGFRILLLKVAGFNLLMTLRLWSSRSKRSRLLHSDYMNMTPRRPGPTRKHYQPYAPPRDFAAYRSRVKFSRSADAPAYQQGQNQLYNELNLGRREEYDVLDKRRGRDPEMGGKPQRRKNPQEGLYNELQKDKMAEAYSEIGMKGERRRGKGHDGLYQGLSTATKDTYDALHMQALPPR

SEQ ID NO: 29649 - protein, 201 aa, synthetic construct
CDVKLVEKSFETDTNLNFQNLSVIGFRILLLKVAGFNLLMTLRLWSSRSKRSRLLHSDYMNMTPRRPGPTRKHYQPYAPPRDFAAYRSRVKFSRSADAPAYQQGQNQLYNELNLGRREEYDVLDKRRGRDPEMGGKPQRRKNPQEGLYNELQKDKMAEAYSEIGMKGERRRGKGHDGLYQGLSTATKDTYDALHMQALPPR

SEQ ID NO: 29650 - protein, 200 aa, synthetic construct
DVKLVEKSFETDTNLNFQNLSVIGFRILLLKVAGFNLLMTLRLWSSRSKRSRLLHSDYMNMTPRRPGPTRKHYQPYAPPRDFAAYRSRVKFSRSADAPAYQQGQNQLYNELNLGRREEYDVLDKRRGRDPEMGGKPQRRKNPQEGLYNELQKDKMAEAYSEIGMKGERRRGKGHDGLYQGLSTATKDTYDALHMQALPPR

SEQ ID NO: 29651 - protein, 199 aa, synthetic construct
VKLVEKSFETDTNLNFQNLSVIGFRILLLKVAGFNLLMTLRLWSSRSKRSRLLHSDYMNMTPRRPGPTRKHYQPYAPPRDFAAYRSRVKFSRSADAPAYQQGQNQLYNELNLGRREEYDVLDKRRGRDPEMGGKPQRRKNPQEGLYNELQKDKMAEAYSEIGMKGERRRGKGHDGLYQGLSTATKDTYDALHMQALPPR

SEQ ID NO: 29652 - protein, 198 aa, synthetic construct
KLVEKSFETDTNLNFQNLSVIGFRILLLKVAGFNLLMTLRLWSSRSKRSRLLHSDYMNMTPRRPGPTRKHYQPYAPPRDFAAYRSRVKFSRSADAPAYQQGQNQLYNELNLGRREEYDVLDKRRGRDPEMGGKPQRRKNPQEGLYNELQKDKMAEAYSEIGMKGERRRGKGHDGLYQGLSTATKDTYDALHMQALPPR

SEQ ID NO: 29653 - protein, 197 aa, synthetic construct
LVEKSFETDTNLNFQNLSVIGFRILLLKVAGFNLLMTLRLWSSRSKRSRLLHSDYMNMTPRRPGPTRKHYQPYAPPRDFAAYRSRVKFSRSADAPAYQQGQNQLYNELNLGRREEYDVLDKRRGRDPEMGGKPQRRKNPQEGLYNELQKDKMAEAYSEIGMKGERRRGKGHDGLYQGLSTATKDTYDALHMQALPPR

SEQ ID NO: 29654 - protein, 196 aa, synthetic construct
VEKSFETDTNLNFQNLSVIGFRILLLKVAGFNLLMTLRLWSSRSKRSRLLHSDYMNMTPRRPGPTRKHYQPYAPPRDFAAYRSRVKFSRSADAPAYQQGQNQLYNELNLGRREEYDVLDKRRGRDPEMGGKPQRRKNPQEGLYNELQKDKMAEAYSEIGMKGERRRGKGHDGLYQGLSTATKDTYDALHMQALPPR

SEQ ID NO: 29655 - protein, 195 aa, synthetic construct
EKSFETDTNLNFQNLSVIGFRILLLKVAGFNLLMTLRLWSSRSKRSRLLHSDYMNMTPRRPGPTRKHYQPYAPPRDFAAYRSRVKFSRSADAPAYQQGQNQLYNELNLGRREEYDVLDKRRGRDPEMGGKPQRRKNPQEGLYNELQKDKMAEAYSEIGMKGERRRGKGHDGLYQGLSTATKDTYDALHMQALPPR

SEQ ID NO: 29656 - protein, 194 aa, synthetic construct
KSFETDTNLNFQNLSVIGFRILLLKVAGFNLLMTLRLWSSRSKRSRLLHSDYMNMTPRRPGPTRKHYQPYAPPRDFAAYRSRVKFSRSADAPAYQQGQNQLYNELNLGRREEYDVLDKRRGRDPEMGGKPQRRKNPQEGLYNELQKDKMAEAYSEIGMKGERRRGKGHDGLYQGLSTATKDTYDALHMQALPPR

SEQ ID NO: 29657 - protein, 193 aa, synthetic construct
SFETDTNLNFQNLSVIGFRILLLKVAGFNLLMTLRLWSSRSKRSRLLHSDYMNMTPRRPGPTRKHYQPYAPPRDFAAYRSRVKFSRSADAPAYQQGQNQLYNELNLGRREEYDVLDKRRGRDPEMGGKPQRRKNPQEGLYNELQKDKMAEAYSEIGMKGERRRGKGHDGLYQGLSTATKDTYDALHMQALPPR

SEQ ID NO: 29658 - protein, 333 aa, synthetic construct; identical to SEQ ID NO: 29293

SEQ ID NO: 29659 - protein, 332 aa, synthetic construct
DLKNVFPPEVAVFEPSEAEISHTQKATLVCLATGFYPDHVELSWWVNGKEVHSGVCTDPQPLKEQPALNDSRYCLSSRLRVSATFWQNPRNHFRCQVQFYGLSENDEWTQDRAKPVTQIVSAEAWGRADCGFTSESYQQGVLSATILYEILLGKATLYAVLVSALVLMAMVKRKDSRGRSKRSRLLHSDYMNMTPRRPGPTRKHYQPYAPPRDFAAYRSRVKFSRSADAPAYQQGQNQLYNELNLGRREEYDVLDKRRGRDPEMGGKPQRRKNPQEGLYNELQKDKMAEAYSEIGMKGERRRGKGHDGLYQGLSTATKDTYDALHMQALPPR

SEQ ID NO: 29660 - protein, 331 aa, synthetic construct
LKNVFPPEVAVFEPSEAEISHTQKATLVCLATGFYPDHVELSWWVNGKEVHSGVCTDPQPLKEQPALNDSRYCLSSRLRVSATFWQNPRNHFRCQVQFYGLSENDEWTQDRAKPVTQIVSAEAWGRADCGFTSESYQQGVLSATILYEILLGKATLYAVLVSALVLMAMVKRKDSRGRSKRSRLLHSDYMNMTPRRPGPTRKHYQPYAPPRDFAAYRSRVKFSRSADAPAYQQGQNQLYNELNLGRREEYDVLDKRRGRDPEMGGKPQRRKNPQEGLYNELQKDKMAEAYSEIGMKGERRRGKGHDGLYQGLSTATKDTYDALHMQALPPR

SEQ ID NO: 29661 - protein, 330 aa, synthetic construct
KNVFPPEVAVFEPSEAEISHTQKATLVCLATGFYPDHVELSWWVNGKEVHSGVCTDPQPLKEQPALNDSRYCLSSRLRVSATFWQNPRNHFRCQVQFYGLSENDEWTQDRAKPVTQIVSAEAWGRADCGFTSESYQQGVLSATILYEILLGKATLYAVLVSALVLMAMVKRKDSRGRSKRSRLLHSDYMNMTPRRPGPTRKHYQPYAPPRDFAAYRSRVKFSRSADAPAYQQGQNQLYNELNLGRREEYDVLDKRRGRDPEMGGKPQRRKNPQEGLYNELQKDKMAEAYSEIGMKGERRRGKGHDGLYQGLSTATKDTYDALHMQALPPR

SEQ ID NO: 29662 - protein, 329 aa, synthetic construct
NVFPPEVAVFEPSEAEISHTQKATLVCLATGFYPDHVELSWWVNGKEVHSGVCTDPQPLKEQPALNDSRYCLSSRLRVSATFWQNPRNHFRCQVQFYGLSENDEWTQDRAKPVTQIVSAEAWGRADCGFTSESYQQGVLSATILYEILLGKATLYAVLVSALVLMAMVKRKDSRGRSKRSRLLHSDYMNMTPRRPGPTRKHYQPYAPPRDFAAYRSRVKFSRSADAPAYQQGQNQLYNELNLGRREEYDVLDKRRGRDPEMGGKPQRRKNPQEGLYNELQKDKMAEAYSEIGMKGERRRGKGHDGLYQGLSTATKDTYDALHMQALPPR

SEQ ID NO: 29663 - protein, 328 aa, synthetic construct
VFPPEVAVFEPSEAEISHTQKATLVCLATGFYPDHVELSWWVNGKEVHSGVCTDPQPLKEQPALNDSRYCLSSRLRVSATFWQNPRNHFRCQVQFYGLSENDEWTQDRAKPVTQIVSAEAWGRADCGFTSESYQQGVLSATILYEILLGKATLYAVLVSALVLMAMVKRKDSRGRSKRSRLLHSDYMNMTPRRPGPTRKHYQPYAPPRDFAAYRSRVKFSRSADAPAYQQGQNQLYNELNLGRREEYDVLDKRRGRDPEMGGKPQRRKNPQEGLYNELQKDKMAEAYSEIGMKGERRRGKGHDGLYQGLSTATKDTYDALHMQALPPR

SEQ ID NO: 29664 - protein, 327 aa, synthetic construct
FPPEVAVFEPSEAEISHTQKATLVCLATGFYPDHVELSWWVNGKEVHSGVCTDPQPLKEQPALNDSRYCLSSRLRVSATFWQNPRNHFRCQVQFYGLSENDEWTQDRAKPVTQIVSAEAWGRADCGFTSESYQQGVLSATILYEILLGKATLYAVLVSALVLMAMVKRKDSRGRSKRSRLLHSDYMNMTPRRPGPTRKHYQPYAPPRDFAAYRSRVKFSRSADAPAYQQGQNQLYNELNLGRREEYDVLDKRRGRDPEMGGKPQRRKNPQEGLYNELQKDKMAEAYSEIGMKGERRRGKGHDGLYQGLSTATKDTYDALHMQALPPR

SEQ ID NO: 29665 - protein, 326 aa, synthetic construct
PPEVAVFEPSEAEISHTQKATLVCLATGFYPDHVELSWWVNGKEVHSGVCTDPQPLKEQPALNDSRYCLSSRLRVSATFWQNPRNHFRCQVQFYGLSENDEWTQDRAKPVTQIVSAEAWGRADCGFTSESYQQGVLSATILYEILLGKATLYAVLVSALVLMAMVKRKDSRGRSKRSRLLHSDYMNMTPRRPGPTRKHYQPYAPPRDFAAYRSRVKFSRSADAPAYQQGQNQLYNELNLGRREEYDVLDKRRGRDPEMGGKPQRRKNPQEGLYNELQKDKMAEAYSEIGMKGERRRGKGHDGLYQGLSTATKDTYDALHMQALPPR

SEQ ID NO: 29666 - protein, 325 aa, synthetic construct
PEVAVFEPSEAEISHTQKATLVCLATGFYPDHVELSWWVNGKEVHSGVCTDPQPLKEQPALNDSRYCLSSRLRVSATFWQNPRNHFRCQVQFYGLSENDEWTQDRAKPVTQIVSAEAWGRADCGFTSESYQQGVLSATILYEILLGKATLYAVLVSALVLMAMVKRKDSRGRSKRSRLLHSDYMNMTPRRPGPTRKHYQPYAPPRDFAAYRSRVKFSRSADAPAYQQGQNQLYNELNLGRREEYDVLDKRRGRDPEMGGKPQRRKNPQEGLYNELQKDKMAEAYSEIGMKGERRRGKGHDGLYQGLSTATKDTYDALHMQALPPR

SEQ ID NO: 29667 - protein, 324 aa, synthetic construct
EVAVFEPSEAEISHTQKATLVCLATGFYPDHVELSWWVNGKEVHSGVCTDPQPLKEQPALNDSRYCLSSRLRVSATFWQNPRNHFRCQVQFYGLSENDEWTQDRAKPVTQIVSAEAWGRADCGFTSESYQQGVLSATILYEILLGKATLYAVLVSALVLMAMVKRKDSRGRSKRSRLLHSDYMNMTPRRPGPTRKHYQPYAPPRDFAAYRSRVKFSRSADAPAYQQGQNQLYNELNLGRREEYDVLDKRRGRDPEMGGKPQRRKNPQEGLYNELQKDKMAEAYSEIGMKGERRRGKGHDGLYQGLSTATKDTYDALHMQALPPR

SEQ ID NO: 29668 - protein, 323 aa, synthetic construct
VAVFEPSEAEISHTQKATLVCLATGFYPDHVELSWWVNGKEVHSGVCTDPQPLKEQPALNDSRYCLSSRLRVSATFWQNPRNHFRCQVQFYGLSENDEWTQDRAKPVTQIVSAEAWGRADCGFTSESYQQGVLSATILYEILLGKATLYAVLVSALVLMAMVKRKDSRGRSKRSRLLHSDYMNMTPRRPGPTRKHYQPYAPPRDFAAYRSRVKFSRSADAPAYQQGQNQLYNELNLGRREEYDVLDKRRGRDPEMGGKPQRRKNPQEGLYNELQKDKMAEAYSEIGMKGERRRGKGHDGLYQGLSTATKDTYDALHMQALPPR

SEQ ID NO: 29669 - protein, 322 aa, synthetic construct
AVFEPSEAEISHTQKATLVCLATGFYPDHVELSWWVNGKEVHSGVCTDPQPLKEQPALNDSRYCLSSRLRVSATFWQNPRNHFRCQVQFYGLSENDEWTQDRAKPVTQIVSAEAWGRADCGFTSESYQQGVLSATILYEILLGKATLYAVLVSALVLMAMVKRKDSRGRSKRSRLLHSDYMNMTPRRPGPTRKHYQPYAPPRDFAAYRSRVKFSRSADAPAYQQGQNQLYNELNLGRREEYDVLDKRRGRDPEMGGKPQRRKNPQEGLYNELQKDKMAEAYSEIGMKGERRRGKGHDGLYQGLSTATKDTYDALHMQALPPR

SEQ ID NO: 29670 - protein, 321 aa, synthetic construct
VFEPSEAEISHTQKATLVCLATGFYPDHVELSWWVNGKEVHSGVCTDPQPLKEQPALNDSRYCLSSRLRVSATFWQNPRNHFRCQVQFYGLSENDEWTQDRAKPVTQIVSAEAWGRADCGFTSESYQQGVLSATILYEILLGKATLYAVLVSALVLMAMVKRKDSRGRSKRSRLLHSDYMNMTPRRPGPTRKHYQPYAPPRDFAAYRSRVKFSRSADAPAYQQGQNQLYNELNLGRREEYDVLDKRRGRDPEMGGKPQRRKNPQEGLYNELQKDKMAEAYSEIGMKGERRRGKGHDGLYQGLSTATKDTYDALHMQALPPR

SEQ ID NO: 29671 - protein, 320 aa, synthetic construct
FEPSEAEISHTQKATLVCLATGFYPDHVELSWWVNGKEVHSGVCTDPQPLKEQPALNDSRYCLSSRLRVSATFWQNPRNHFRCQVQFYGLSENDEWTQDRAKPVTQIVSAEAWGRADCGFTSESYQQGVLSATILYEILLGKATLYAVLVSALVLMAMVKRKDSRGRSKRSRLLHSDYMNMTPRRPGPTRKHYQPYAPPRDFAAYRSRVKFSRSADAPAYQQGQNQLYNELNLGRREEYDVLDKRRGRDPEMGGKPQRRKNPQEGLYNELQKDKMAEAYSEIGMKGERRRGKGHDGLYQGLSTATKDTYDALHMQALPPR

SEQ ID NO: 29672 - protein, 319 aa, synthetic construct
EPSEAEISHTQKATLVCLATGFYPDHVELSWWVNGKEVHSGVCTDPQPLKEQPALNDSRYCLSSRLRVSATFWQNPRNHFRCQVQFYGLSENDEWTQDRAKPVTQIVSAEAWGRADCGFTSESYQQGVLSATILYEILLGKATLYAVLVSALVLMAMVKRKDSRGRSKRSRLLHSDYMNMTPRRPGPTRKHYQPYAPPRDFAAYRSRVKFSRSADAPAYQQGQNQLYNELNLGRREEYDVLDKRRGRDPEMGGKPQRRKNPQEGLYNELQKDKMAEAYSEIGMKGERRRGKGHDGLYQGLSTATKDTYDALHMQALPPR

SEQ ID NO: 29673 - protein, 318 aa, synthetic construct
PSEAEISHTQKATLVCLATGFYPDHVELSWWVNGKEVHSGVCTDPQPLKEQPALNDSRYCLSSRLRVSATFWQNPRNHFRCQVQFYGLSENDEWTQDRAKPVTQIVSAEAWGRADCGFTSESYQQGVLSATILYEILLGKATLYAVLVSALVLMAMVKRKDSRGRSKRSRLLHSDYMNMTPRRPGPTRKHYQPYAPPRDFAAYRSRVKFSRSADAPAYQQGQNQLYNELNLGRREEYDVLDKRRGRDPEMGGKPQRRKNPQEGLYNELQKDKMAEAYSEIGMKGERRRGKGHDGLYQGLSTATKDTYDALHMQALPPR

SEQ ID NO: 29674 - protein, 317 aa, synthetic construct
SEAEISHTQKATLVCLATGFYPDHVELSWWVNGKEVHSGVCTDPQPLKEQPALNDSRYCLSSRLRVSATFWQNPRNHFRCQVQFYGLSENDEWTQDRAKPVTQIVSAEAWGRADCGFTSESYQQGVLSATILYEILLGKATLYAVLVSALVLMAMVKRKDSRGRSKRSRLLHSDYMNMTPRRPGPTRKHYQPYAPPRDFAAYRSRVKFSRSADAPAYQQGQNQLYNELNLGRREEYDVLDKRRGRDPEMGGKPQRRKNPQEGLYNELQKDKMAEAYSEIGMKGERRRGKGHDGLYQGLSTATKDTYDALHMQALPPR

SEQ ID NO: 29675 - protein, 316 aa, synthetic construct
EAEISHTQKATLVCLATGFYPDHVELSWWVNGKEVHSGVCTDPQPLKEQPALNDSRYCLSSRLRVSATFWQNPRNHFRCQVQFYGLSENDEWTQDRAKPVTQIVSAEAWGRADCGFTSESYQQGVLSATILYEILLGKATLYAVLVSALVLMAMVKRKDSRGRSKRSRLLHSDYMNMTPRRPGPTRKHYQPYAPPRDFAAYRSRVKFSRSADAPAYQQGQNQLYNELNLGRREEYDVLDKRRGRDPEMGGKPQRRKNPQEGLYNELQKDKMAEAYSEIGMKGERRRGKGHDGLYQGLSTATKDTYDALHMQALPPR

SEQ ID NO: 29676 - protein, 315 aa, synthetic construct
AEISHTQKATLVCLATGFYPDHVELSWWVNGKEVHSGVCTDPQPLKEQPALNDSRYCLSSRLRVSATFWQNPRNHFRCQVQFYGLSENDEWTQDRAKPVTQIVSAEAWGRADCGFTSESYQQGVLSATILYEILLGKATLYAVLVSALVLMAMVKRKDSRGRSKRSRLLHSDYMNMTPRRPGPTRKHYQPYAPPRDFAAYRSRVKFSRSADAPAYQQGQNQLYNELNLGRREEYDVLDKRRGRDPEMGGKPQRRKNPQEGLYNELQKDKMAEAYSEIGMKGERRRGKGHDGLYQGLSTATKDTYDALHMQALPPR

SEQ ID NO: 29677 - protein, 314 aa, synthetic construct
EISHTQKATLVCLATGFYPDHVELSWWVNGKEVHSGVCTDPQPLKEQPALNDSRYCLSSRLRVSATFWQNPRNHFRCQVQFYGLSENDEWTQDRAKPVTQIVSAEAWGRADCGFTSESYQQGVLSATILYEILLGKATLYAVLVSALVLMAMVKRKDSRGRSKRSRLLHSDYMNMTPRRPGPTRKHYQPYAPPRDFAAYRSRVKFSRSADAPAYQQGQNQLYNELNLGRREEYDVLDKRRGRDPEMGGKPQRRKNPQEGLYNELQKDKMAEAYSEIGMKGERRRGKGHDGLYQGLSTATKDTYDALHMQALPPR

SEQ ID NO: 29678 - protein, 313 aa, synthetic construct
ISHTQKATLVCLATGFYPDHVELSWWVNGKEVHSGVCTDPQPLKEQPALNDSRYCLSSRLRVSATFWQNPRNHFRCQVQFYGLSENDEWTQDRAKPVTQIVSAEAWGRADCGFTSESYQQGVLSATILYEILLGKATLYAVLVSALVLMAMVKRKDSRGRSKRSRLLHSDYMNMTPRRPGPTRKHYQPYAPPRDFAAYRSRVKFSRSADAPAYQQGQNQLYNELNLGRREEYDVLDKRRGRDPEMGGKPQRRKNPQEGLYNELQKDKMAEAYSEIGMKGERRRGKGHDGLYQGLSTATKDTYDALHMQALPPR

SEQ ID NO: 29679 - protein, 312 aa, synthetic construct
SHTQKATLVCLATGFYPDHVELSWWVNGKEVHSGVCTDPQPLKEQPALNDSRYCLSSRLRVSATFWQNPRNHFRCQVQFYGLSENDEWTQDRAKPVTQIVSAEAWGRADCGFTSESYQQGVLSATILYEILLGKATLYAVLVSALVLMAMVKRKDSRGRSKRSRLLHSDYMNMTPRRPGPTRKHYQPYAPPRDFAAYRSRVKFSRSADAPAYQQGQNQLYNELNLGRREEYDVLDKRRGRDPEMGGKPQRRKNPQEGLYNELQKDKMAEAYSEIGMKGERRRGKGHDGLYQGLSTATKDTYDALHMQALPPR

SEQ ID NO: 29680 - protein, 311 aa, synthetic construct
HTQKATLVCLATGFYPDHVELSWWVNGKEVHSGVCTDPQPLKEQPALNDSRYCLSSRLRVSATFWQNPRNHFRCQVQFYGLSENDEWTQDRAKPVTQIVSAEAWGRADCGFTSESYQQGVLSATILYEILLGKATLYAVLVSALVLMAMVKRKDSRGRSKRSRLLHSDYMNMTPRRPGPTRKHYQPYAPPRDFAAYRSRVKFSRSADAPAYQQGQNQLYNELNLGRREEYDVLDKRRGRDPEMGGKPQRRKNPQEGLYNELQKDKMAEAYSEIGMKGERRRGKGHDGLYQGLSTATKDTYDALHMQALPPR

SEQ ID NO: 29681 - protein, 310 aa, synthetic construct
TQKATLVCLATGFYPDHVELSWWVNGKEVHSGVCTDPQPLKEQPALNDSRYCLSSRLRVSATFWQNPRNHFRCQVQFYGLSENDEWTQDRAKPVTQIVSAEAWGRADCGFTSESYQQGVLSATILYEILLGKATLYAVLVSALVLMAMVKRKDSRGRSKRSRLLHSDYMNMTPRRPGPTRKHYQPYAPPRDFAAYRSRVKFSRSADAPAYQQGQNQLYNELNLGRREEYDVLDKRRGRDPEMGGKPQRRKNPQEGLYNELQKDKMAEAYSEIGMKGERRRGKGHDGLYQGLSTATKDTYDALHMQALPPR

SEQ ID NO: 29682 - protein, 309 aa, synthetic construct
QKATLVCLATGFYPDHVELSWWVNGKEVHSGVCTDPQPLKEQPALNDSRYCLSSRLRVSATFWQNPRNHFRCQVQFYGLSENDEWTQDRAKPVTQIVSAEAWGRADCGFTSESYQQGVLSATILYEILLGKATLYAVLVSALVLMAMVKRKDSRGRSKRSRLLHSDYMNMTPRRPGPTRKHYQPYAPPRDFAAYRSRVKFSRSADAPAYQQGQNQLYNELNLGRREEYDVLDKRRGRDPEMGGKPQRRKNPQEGLYNELQKDKMAEAYSEIGMKGERRRGKGHDGLYQGLSTATKDTYDALHMQALPPR

SEQ ID NO: 29683 - protein, 308 aa, synthetic construct
KATLVCLATGFYPDHVELSWWVNGKEVHSGVCTDPQPLKEQPALNDSRYCLSSRLRVSATFWQNPRNHFRCQVQFYGLSENDEWTQDRAKPVTQIVSAEAWGRADCGFTSESYQQGVLSATILYEILLGKATLYAVLVSALVLMAMVKRKDSRGRSKRSRLLHSDYMNMTPRRPGPTRKHYQPYAPPRDFAAYRSRVKFSRSADAPAYQQGQNQLYNELNLGRREEYDVLDKRRGRDPEMGGKPQRRKNPQEGLYNELQKDKMAEAYSEIGMKGERRRGKGHDGLYQGLSTATKDTYDALHMQALPPR

SEQ ID NO: 29684 - protein, 307 aa, synthetic construct
ATLVCLATGFYPDHVELSWWVNGKEVHSGVCTDPQPLKEQPALNDSRYCLSSRLRVSATFWQNPRNHFRCQVQFYGLSENDEWTQDRAKPVTQIVSAEAWGRADCGFTSESYQQGVLSATILYEILLGKATLYAVLVSALVLMAMVKRKDSRGRSKRSRLLHSDYMNMTPRRPGPTRKHYQPYAPPRDFAAYRSRVKFSRSADAPAYQQGQNQLYNELNLGRREEYDVLDKRRGRDPEMGGKPQRRKNPQEGLYNELQKDKMAEAYSEIGMKGERRRGKGHDGLYQGLSTATKDTYDALHMQALPPR

SEQ ID NO: 29685 - protein, 306 aa, synthetic construct
TLVCLATGFYPDHVELSWWVNGKEVHSGVCTDPQPLKEQPALNDSRYCLSSRLRVSATFWQNPRNHFRCQVQFYGLSENDEWTQDRAKPVTQIVSAEAWGRADCGFTSESYQQGVLSATILYEILLGKATLYAVLVSALVLMAMVKRKDSRGRSKRSRLLHSDYMNMTPRRPGPTRKHYQPYAPPRDFAAYRSRVKFSRSADAPAYQQGQNQLYNELNLGRREEYDVLDKRRGRDPEMGGKPQRRKNPQEGLYNELQKDKMAEAYSEIGMKGERRRGKGHDGLYQGLSTATKDTYDALHMQALPPR

SEQ ID NO: 29686 - protein, 305 aa, synthetic construct
LVCLATGFYPDHVELSWWVNGKEVHSGVCTDPQPLKEQPALNDSRYCLSSRLRVSATFWQNPRNHFRCQVQFYGLSENDEWTQDRAKPVTQIVSAEAWGRADCGFTSESYQQGVLSATILYEILLGKATLYAVLVSALVLMAMVKRKDSRGRSKRSRLLHSDYMNMTPRRPGPTRKHYQPYAPPRDFAAYRSRVKFSRSADAPAYQQGQNQLYNELNLGRREEYDVLDKRRGRDPEMGGKPQRRKNPQEGLYNELQKDKMAEAYSEIGMKGERRRGKGHDGLYQGLSTATKDTYDALHMQALPPR

SEQ ID NO: 29687 - protein, 304 aa, synthetic construct
VCLATGFYPDHVELSWWVNGKEVHSGVCTDPQPLKEQPALNDSRYCLSSRLRVSATFWQNPRNHFRCQVQFYGLSENDEWTQDRAKPVTQIVSAEAWGRADCGFTSESYQQGVLSATILYEILLGKATLYAVLVSALVLMAMVKRKDSRGRSKRSRLLHSDYMNMTPRRPGPTRKHYQPYAPPRDFAAYRSRVKFSRSADAPAYQQGQNQLYNELNLGRREEYDVLDKRRGRDPEMGGKPQRRKNPQEGLYNELQKDKMAEAYSEIGMKGERRRGKGHDGLYQGLSTATKDTYDALHMQALPPR

SEQ ID NO: 29688 - protein, 303 aa, synthetic construct
CLATGFYPDHVELSWWVNGKEVHSGVCTDPQPLKEQPALNDSRYCLSSRLRVSATFWQNPRNHFRCQVQFYGLSENDEWTQDRAKPVTQIVSAEAWGRADCGFTSESYQQGVLSATILYEILLGKATLYAVLVSALVLMAMVKRKDSRGRSKRSRLLHSDYMNMTPRRPGPTRKHYQPYAPPRDFAAYRSRVKFSRSADAPAYQQGQNQLYNELNLGRREEYDVLDKRRGRDPEMGGKPQRRKNPQEGLYNELQKDKMAEAYSEIGMKGERRRGKGHDGLYQGLSTATKDTYDALHMQALPPR

SEQ ID NO: 29689 - protein, 302 aa, synthetic construct
LATGFYPDHVELSWWVNGKEVHSGVCTDPQPLKEQPALNDSRYCLSSRLRVSATFWQNPRNHFRCQVQFYGLSENDEWTQDRAKPVTQIVSAEAWGRADCGFTSESYQQGVLSATILYEILLGKATLYAVLVSALVLMAMVKRKDSRGRSKRSRLLHSDYMNMTPRRPGPTRKHYQPYAPPRDFAAYRSRVKFSRSADAPAYQQGQNQLYNELNLGRREEYDVLDKRRGRDPEMGGKPQRRKNPQEGLYNELQKDKMAEAYSEIGMKGERRRGKGHDGLYQGLSTATKDTYDALHMQALPPR

SEQ ID NO: 29690 - protein, 301 aa, synthetic construct
ATGFYPDHVELSWWVNGKEVHSGVCTDPQPLKEQPALNDSRYCLSSRLRVSATFWQNPRNHFRCQVQFYGLSENDEWTQDRAKPVTQIVSAEAWGRADCGFTSESYQQGVLSATILYEILLGKATLYAVLVSALVLMAMVKRKDSRGRSKRSRLLHSDYMNMTPRRPGPTRKHYQPYAPPRDFAAYRSRVKFSRSADAPAYQQGQNQLYNELNLGRREEYDVLDKRRGRDPEMGGKPQRRKNPQEGLYNELQKDKMAEAYSEIGMKGERRRGKGHDGLYQGLSTATKDTYDALHMQALPPR

SEQ ID NO: 29691 - protein, 300 aa, synthetic construct
TGFYPDHVELSWWVNGKEVHSGVCTDPQPLKEQPALNDSRYCLSSRLRVSATFWQNPRNHFRCQVQFYGLSENDEWTQDRAKPVTQIVSAEAWGRADCGFTSESYQQGVLSATILYEILLGKATLYAVLVSALVLMAMVKRKDSRGRSKRSRLLHSDYMNMTPRRPGPTRKHYQPYAPPRDFAAYRSRVKFSRSADAPAYQQGQNQLYNELNLGRREEYDVLDKRRGRDPEMGGKPQRRKNPQEGLYNELQKDKMAEAYSEIGMKGERRRGKGHDGLYQGLSTATKDTYDALHMQALPPR

SEQ ID NO: 29692 - protein, 299 aa, synthetic construct
GFYPDHVELSWWVNGKEVHSGVCTDPQPLKEQPALNDSRYCLSSRLRVSATFWQNPRNHFRCQVQFYGLSENDEWTQDRAKPVTQIVSAEAWGRADCGFTSESYQQGVLSATILYEILLGKATLYAVLVSALVLMAMVKRKDSRGRSKRSRLLHSDYMNMTPRRPGPTRKHYQPYAPPRDFAAYRSRVKFSRSADAPAYQQGQNQLYNELNLGRREEYDVLDKRRGRDPEMGGKPQRRKNPQEGLYNELQKDKMAEAYSEIGMKGERRRGKGHDGLYQGLSTATKDTYDALHMQALPPR

SEQ ID NO: 29693 - protein, 298 aa, synthetic construct
FYPDHVELSWWVNGKEVHSGVCTDPQPLKEQPALNDSRYCLSSRLRVSATFWQNPRNHFRCQVQFYGLSENDEWTQDRAKPVTQIVSAEAWGRADCGFTSESYQQGVLSATILYEILLGKATLYAVLVSALVLMAMVKRKDSRGRSKRSRLLHSDYMNMTPRRPGPTRKHYQPYAPPRDFAAYRSRVKFSRSADAPAYQQGQNQLYNELNLGRREEYDVLDKRRGRDPEMGGKPQRRKNPQEGLYNELQKDKMAEAYSEIGMKGERRRGKGHDGLYQGLSTATKDTYDALHMQALPPR

SEQ ID NO: 29694 - protein, 297 aa, synthetic construct
YPDHVELSWWVNGKEVHSGVCTDPQPLKEQPALNDSRYCLSSRLRVSATFWQNPRNHFRCQVQFYGLSENDEWTQDRAKPVTQIVSAEAWGRADCGFTSESYQQGVLSATILYEILLGKATLYAVLVSALVLMAMVKRKDSRGRSKRSRLLHSDYMNMTPRRPGPTRKHYQPYAPPRDFAAYRSRVKFSRSADAPAYQQGQNQLYNELNLGRREEYDVLDKRRGRDPEMGGKPQRRKNPQEGLYNELQKDKMAEAYSEIGMKGERRRGKGHDGLYQGLSTATKDTYDALHMQALPPR

SEQ ID NO: 29695 - protein, 296 aa, synthetic construct
PDHVELSWWVNGKEVHSGVCTDPQPLKEQPALNDSRYCLSSRLRVSATFWQNPRNHFRCQVQFYGLSENDEWTQDRAKPVTQIVSAEAWGRADCGFTSESYQQGVLSATILYEILLGKATLYAVLVSALVLMAMVKRKDSRGRSKRSRLLHSDYMNMTPRRPGPTRKHYQPYAPPRDFAAYRSRVKFSRSADAPAYQQGQNQLYNELNLGRREEYDVLDKRRGRDPEMGGKPQRRKNPQEGLYNELQKDKMAEAYSEIGMKGERRRGKGHDGLYQGLSTATKDTYDALHMQALPPR

SEQ ID NO: 29696 - protein, 295 aa, synthetic construct
DHVELSWWVNGKEVHSGVCTDPQPLKEQPALNDSRYCLSSRLRVSATFWQNPRNHFRCQVQFYGLSENDEWTQDRAKPVTQIVSAEAWGRADCGFTSESYQQGVLSATILYEILLGKATLYAVLVSALVLMAMVKRKDSRGRSKRSRLLHSDYMNMTPRRPGPTRKHYQPYAPPRDFAAYRSRVKFSRSADAPAYQQGQNQLYNELNLGRREEYDVLDKRRGRDPEMGGKPQRRKNPQEGLYNELQKDKMAEAYSEIGMKGERRRGKGHDGLYQGLSTATKDTYDALHMQALPPR

SEQ ID NO: 29697 - protein, 294 aa, synthetic construct
HVELSWWVNGKEVHSGVCTDPQPLKEQPALNDSRYCLSSRLRVSATFWQNPRNHFRCQVQFYGLSENDEWTQDRAKPVTQIVSAEAWGRADCGFTSESYQQGVLSATILYEILLGKATLYAVLVSALVLMAMVKRKDSRGRSKRSRLLHSDYMNMTPRRPGPTRKHYQPYAPPRDFAAYRSRVKFSRSADAPAYQQGQNQLYNELNLGRREEYDVLDKRRGRDPEMGGKPQRRKNPQEGLYNELQKDKMAEAYSEIGMKGERRRGKGHDGLYQGLSTATKDTYDALHMQALPPR

SEQ ID NO: 29698 - protein, 293 aa, synthetic construct
VELSWWVNGKEVHSGVCTDPQPLKEQPALNDSRYCLSSRLRVSATFWQNPRNHFRCQVQFYGLSENDEWTQDRAKPVTQIVSAEAWGRADCGFTSESYQQGVLSATILYEILLGKATLYAVLVSALVLMAMVKRKDSRGRSKRSRLLHSDYMNMTPRRPGPTRKHYQPYAPPRDFAAYRSRVKFSRSADAPAYQQGQNQLYNELNLGRREEYDVLDKRRGRDPEMGGKPQRRKNPQEGLYNELQKDKMAEAYSEIGMKGERRRGKGHDGLYQGLSTATKDTYDALHMQALPPR

SEQ ID NO: 29699 - protein, 292 aa, synthetic construct
ELSWWVNGKEVHSGVCTDPQPLKEQPALNDSRYCLSSRLRVSATFWQNPRNHFRCQVQFYGLSENDEWTQDRAKPVTQIVSAEAWGRADCGFTSESYQQGVLSATILYEILLGKATLYAVLVSALVLMAMVKRKDSRGRSKRSRLLHSDYMNMTPRRPGPTRKHYQPYAPPRDFAAYRSRVKFSRSADAPAYQQGQNQLYNELNLGRREEYDVLDKRRGRDPEMGGKPQRRKNPQEGLYNELQKDKMAEAYSEIGMKGERRRGKGHDGLYQGLSTATKDTYDALHMQALPPR

SEQ ID NO: 29700 - protein, 291 aa, synthetic construct
LSWWVNGKEVHSGVCTDPQPLKEQPALNDSRYCLSSRLRVSATFWQNPRNHFRCQVQFYGLSENDEWTQDRAKPVTQIVSAEAWGRADCGFTSESYQQGVLSATILYEILLGKATLYAVLVSALVLMAMVKRKDSRGRSKRSRLLHSDYMNMTPRRPGPTRKHYQPYAPPRDFAAYRSRVKFSRSADAPAYQQGQNQLYNELNLGRREEYDVLDKRRGRDPEMGGKPQRRKNPQEGLYNELQKDKMAEAYSEIGMKGERRRGKGHDGLYQGLSTATKDTYDALHMQALPPR

SEQ ID NO: 29701 - protein, 290 aa, synthetic construct
SWWVNGKEVHSGVCTDPQPLKEQPALNDSRYCLSSRLRVSATFWQNPRNHFRCQVQFYGLSENDEWTQDRAKPVTQIVSAEAWGRADCGFTSESYQQGVLSATILYEILLGKATLYAVLVSALVLMAMVKRKDSRGRSKRSRLLHSDYMNMTPRRPGPTRKHYQPYAPPRDFAAYRSRVKFSRSADAPAYQQGQNQLYNELNLGRREEYDVLDKRRGRDPEMGGKPQRRKNPQEGLYNELQKDKMAEAYSEIGMKGERRRGKGHDGLYQGLSTATKDTYDALHMQALPPR

SEQ ID NO: 29702 - protein, 289 aa, synthetic construct
WWVNGKEVHSGVCTDPQPLKEQPALNDSRYCLSSRLRVSATFWQNPRNHFRCQVQFYGLSENDEWTQDRAKPVTQIVSAEAWGRADCGFTSESYQQGVLSATILYEILLGKATLYAVLVSALVLMAMVKRKDSRGRSKRSRLLHSDYMNMTPRRPGPTRKHYQPYAPPRDFAAYRSRVKFSRSADAPAYQQGQNQLYNELNLGRREEYDVLDKRRGRDPEMGGKPQRRKNPQEGLYNELQKDKMAEAYSEIGMKGERRRGKGHDGLYQGLSTATKDTYDALHMQALPPR

SEQ ID NO: 29703 - protein, 288 aa, synthetic construct
WVNGKEVHSGVCTDPQPLKEQPALNDSRYCLSSRLRVSATFWQNPRNHFRCQVQFYGLSENDEWTQDRAKPVTQIVSAEAWGRADCGFTSESYQQGVLSATILYEILLGKATLYAVLVSALVLMAMVKRKDSRGRSKRSRLLHSDYMNMTPRRPGPTRKHYQPYAPPRDFAAYRSRVKFSRSADAPAYQQGQNQLYNELNLGRREEYDVLDKRRGRDPEMGGKPQRRKNPQEGLYNELQKDKMAEAYSEIGMKGERRRGKGHDGLYQGLSTATKDTYDALHMQALPPR

SEQ ID NO: 29704 - protein, 287 aa, synthetic construct
VNGKEVHSGVCTDPQPLKEQPALNDSRYCLSSRLRVSATFWQNPRNHFRCQVQFYGLSENDEWTQDRAKPVTQIVSAEAWGRADCGFTSESYQQGVLSATILYEILLGKATLYAVLVSALVLMAMVKRKDSRGRSKRSRLLHSDYMNMTPRRPGPTRKHYQPYAPPRDFAAYRSRVKFSRSADAPAYQQGQNQLYNELNLGRREEYDVLDKRRGRDPEMGGKPQRRKNPQEGLYNELQKDKMAEAYSEIGMKGERRRGKGHDGLYQGLSTATKDTYDALHMQALPPR

SEQ ID NO: 29705 - protein, 286 aa, synthetic construct
NGKEVHSGVCTDPQPLKEQPALNDSRYCLSSRLRVSATFWQNPRNHFRCQVQFYGLSENDEWTQDRAKPVTQIVSAEAWGRADCGFTSESYQQGVLSATILYEILLGKATLYAVLVSALVLMAMVKRKDSRGRSKRSRLLHSDYMNMTPRRPGPTRKHYQPYAPPRDFAAYRSRVKFSRSADAPAYQQGQNQLYNELNLGRREEYDVLDKRRGRDPEMGGKPQRRKNPQEGLYNELQKDKMAEAYSEIGMKGERRRGKGHDGLYQGLSTATKDTYDALHMQALPPR

SEQ ID NO: 29706 - protein, 285 aa, synthetic construct
GKEVHSGVCTDPQPLKEQPALNDSRYCLSSRLRVSATFWQNPRNHFRCQVQFYGLSENDEWTQDRAKPVTQIVSAEAWGRADCGFTSESYQQGVLSATILYEILLGKATLYAVLVSALVLMAMVKRKDSRGRSKRSRLLHSDYMNMTPRRPGPTRKHYQPYAPPRDFAAYRSRVKFSRSADAPAYQQGQNQLYNELNLGRREEYDVLDKRRGRDPEMGGKPQRRKNPQEGLYNELQKDKMAEAYSEIGMKGERRRGKGHDGLYQGLSTATKDTYDALHMQALPPR

SEQ ID NO: 29707 - protein, 284 aa, synthetic construct
KEVHSGVCTDPQPLKEQPALNDSRYCLSSRLRVSATFWQNPRNHFRCQVQFYGLSENDEWTQDRAKPVTQIVSAEAWGRADCGFTSESYQQGVLSATILYEILLGKATLYAVLVSALVLMAMVKRKDSRGRSKRSRLLHSDYMNMTPRRPGPTRKHYQPYAPPRDFAAYRSRVKFSRSADAPAYQQGQNQLYNELNLGRREEYDVLDKRRGRDPEMGGKPQRRKNPQEGLYNELQKDKMAEAYSEIGMKGERRRGKGHDGLYQGLSTATKDTYDALHMQALPPR

SEQ ID NO: 29708 - protein, 283 aa, synthetic construct
EVHSGVCTDPQPLKEQPALNDSRYCLSSRLRVSATFWQNPRNHFRCQVQFYGLSENDEWTQDRAKPVTQIVSAEAWGRADCGFTSESYQQGVLSATILYEILLGKATLYAVLVSALVLMAMVKRKDSRGRSKRSRLLHSDYMNMTPRRPGPTRKHYQPYAPPRDFAAYRSRVKFSRSADAPAYQQGQNQLYNELNLGRREEYDVLDKRRGRDPEMGGKPQRRKNPQEGLYNELQKDKMAEAYSEIGMKGERRRGKGHDGLYQGLSTATKDTYDALHMQALPPR

SEQ ID NO: 29709 - protein, 282 aa, synthetic construct
VHSGVCTDPQPLKEQPALNDSRYCLSSRLRVSATFWQNPRNHFRCQVQFYGLSENDEWTQDRAKPVTQIVSAEAWGRADCGFTSESYQQGVLSATILYEILLGKATLYAVLVSALVLMAMVKRKDSRGRSKRSRLLHSDYMNMTPRRPGPTRKHYQPYAPPRDFAAYRSRVKFSRSADAPAYQQGQNQLYNELNLGRREEYDVLDKRRGRDPEMGGKPQRRKNPQEGLYNELQKDKMAEAYSEIGMKGERRRGKGHDGLYQGLSTATKDTYDALHMQALPPR

SEQ ID NO: 29710 - protein, 281 aa, synthetic construct
HSGVCTDPQPLKEQPALNDSRYCLSSRLRVSATFWQNPRNHFRCQVQFYGLSENDEWTQDRAKPVTQIVSAEAWGRADCGFTSESYQQGVLSATILYEILLGKATLYAVLVSALVLMAMVKRKDSRGRSKRSRLLHSDYMNMTPRRPGPTRKHYQPYAPPRDFAAYRSRVKFSRSADAPAYQQGQNQLYNELNLGRREEYDVLDKRRGRDPEMGGKPQRRKNPQEGLYNELQKDKMAEAYSEIGMKGERRRGKGHDGLYQGLSTATKDTYDALHMQALPPR

SEQ ID NO: 29711 - protein, 280 aa, synthetic construct
SGVCTDPQPLKEQPALNDSRYCLSSRLRVSATFWQNPRNHFRCQVQFYGLSENDEWTQDRAKPVTQIVSAEAWGRADCGFTSESYQQGVLSATILYEILLGKATLYAVLVSALVLMAMVKRKDSRGRSKRSRLLHSDYMNMTPRRPGPTRKHYQPYAPPRDFAAYRSRVKFSRSADAPAYQQGQNQLYNELNLGRREEYDVLDKRRGRDPEMGGKPQRRKNPQEGLYNELQKDKMAEAYSEIGMKGERRRGKGHDGLYQGLSTATKDTYDALHMQALPPR

SEQ ID NO: 29712 - protein, 279 aa, synthetic construct
GVCTDPQPLKEQPALNDSRYCLSSRLRVSATFWQNPRNHFRCQVQFYGLSENDEWTQDRAKPVTQIVSAEAWGRADCGFTSESYQQGVLSATILYEILLGKATLYAVLVSALVLMAMVKRKDSRGRSKRSRLLHSDYMNMTPRRPGPTRKHYQPYAPPRDFAAYRSRVKFSRSADAPAYQQGQNQLYNELNLGRREEYDVLDKRRGRDPEMGGKPQRRKNPQEGLYNELQKDKMAEAYSEIGMKGERRRGKGHDGLYQGLSTATKDTYDALHMQALPPR

SEQ ID NO: 29713 - protein, 278 aa, synthetic construct
VCTDPQPLKEQPALNDSRYCLSSRLRVSATFWQNPRNHFRCQVQFYGLSENDEWTQDRAKPVTQIVSAEAWGRADCGFTSESYQQGVLSATILYEILLGKATLYAVLVSALVLMAMVKRKDSRGRSKRSRLLHSDYMNMTPRRPGPTRKHYQPYAPPRDFAAYRSRVKFSRSADAPAYQQGQNQLYNELNLGRREEYDVLDKRRGRDPEMGGKPQRRKNPQEGLYNELQKDKMAEAYSEIGMKGERRRGKGHDGLYQGLSTATKDTYDALHMQALPPR

SEQ ID NO: 29714 - protein, 277 aa, synthetic construct
CTDPQPLKEQPALNDSRYCLSSRLRVSATFWQNPRNHFRCQVQFYGLSENDEWTQDRAKPVTQIVSAEAWGRADCGFTSESYQQGVLSATILYEILLGKATLYAVLVSALVLMAMVKRKDSRGRSKRSRLLHSDYMNMTPRRPGPTRKHYQPYAPPRDFAAYRSRVKFSRSADAPAYQQGQNQLYNELNLGRREEYDVLDKRRGRDPEMGGKPQRRKNPQEGLYNELQKDKMAEAYSEIGMKGERRRGKGHDGLYQGLSTATKDTYDALHMQALPPR

SEQ ID NO: 29715 - protein, 276 aa, synthetic construct
TDPQPLKEQPALNDSRYCLSSRLRVSATFWQNPRNHFRCQVQFYGLSENDEWTQDRAKPVTQIVSAEAWGRADCGFTSESYQQGVLSATILYEILLGKATLYAVLVSALVLMAMVKRKDSRGRSKRSRLLHSDYMNMTPRRPGPTRKHYQPYAPPRDFAAYRSRVKFSRSADAPAYQQGQNQLYNELNLGRREEYDVLDKRRGRDPEMGGKPQRRKNPQEGLYNELQKDKMAEAYSEIGMKGERRRGKGHDGLYQGLSTATKDTYDALHMQALPPR

SEQ ID NO: 29716 - protein, 275 aa, synthetic construct
DPQPLKEQPALNDSRYCLSSRLRVSATFWQNPRNHFRCQVQFYGLSENDEWTQDRAKPVTQIVSAEAWGRADCGFTSESYQQGVLSATILYEILLGKATLYAVLVSALVLMAMVKRKDSRGRSKRSRLLHSDYMNMTPRRPGPTRKHYQPYAPPRDFAAYRSRVKFSRSADAPAYQQGQNQLYNELNLGRREEYDVLDKRRGRDPEMGGKPQRRKNPQEGLYNELQKDKMAEAYSEIGMKGERRRGKGHDGLYQGLSTATKDTYDALHMQALPPR

SEQ ID NO: 29717 - protein, 274 aa, synthetic construct
PQPLKEQPALNDSRYCLSSRLRVSATFWQNPRNHFRCQVQFYGLSENDEWTQDRAKPVTQIVSAEAWGRADCGFTSESYQQGVLSATILYEILLGKATLYAVLVSALVLMAMVKRKDSRGRSKRSRLLHSDYMNMTPRRPGPTRKHYQPYAPPRDFAAYRSRVKFSRSADAPAYQQGQNQLYNELNLGRREEYDVLDKRRGRDPEMGGKPQRRKNPQEGLYNELQKDKMAEAYSEIGMKGERRRGKGHDGLYQGLSTATKDTYDALHMQALPPR

SEQ ID NO: 29718 - protein, 273 aa, synthetic construct
QPLKEQPALNDSRYCLSSRLRVSATFWQNPRNHFRCQVQFYGLSENDEWTQDRAKPVTQIVSAEAWGRADCGFTSESYQQGVLSATILYEILLGKATLYAVLVSALVLMAMVKRKDSRGRSKRSRLLHSDYMNMTPRRPGPTRKHYQPYAPPRDFAAYRSRVKFSRSADAPAYQQGQNQLYNELNLGRREEYDVLDKRRGRDPEMGGKPQRRKNPQEGLYNELQKDKMAEAYSEIGMKGERRRGKGHDGLYQGLSTATKDTYDALHMQALPPR

SEQ ID NO: 29719 - protein, 272 aa, synthetic construct
PLKEQPALNDSRYCLSSRLRVSATFWQNPRNHFRCQVQFYGLSENDEWTQDRAKPVTQIVSAEAWGRADCGFTSESYQQGVLSATILYEILLGKATLYAVLVSALVLMAMVKRKDSRGRSKRSRLLHSDYMNMTPRRPGPTRKHYQPYAPPRDFAAYRSRVKFSRSADAPAYQQGQNQLYNELNLGRREEYDVLDKRRGRDPEMGGKPQRRKNPQEGLYNELQKDKMAEAYSEIGMKGERRRGKGHDGLYQGLSTATKDTYDALHMQALPPR

SEQ ID NO: 29720 - protein, 271 aa, synthetic construct
LKEQPALNDSRYCLSSRLRVSATFWQNPRNHFRCQVQFYGLSENDEWTQDRAKPVTQIVSAEAWGRADCGFTSESYQQGVLSATILYEILLGKATLYAVLVSALVLMAMVKRKDSRGRSKRSRLLHSDYMNMTPRRPGPTRKHYQPYAPPRDFAAYRSRVKFSRSADAPAYQQGQNQLYNELNLGRREEYDVLDKRRGRDPEMGGKPQRRKNPQEGLYNELQKDKMAEAYSEIGMKGERRRGKGHDGLYQGLSTATKDTYDALHMQALPPR

SEQ ID NO: 29721 - protein, 270 aa, synthetic construct
KEQPALNDSRYCLSSRLRVSATFWQNPRNHFRCQVQFYGLSENDEWTQDRAKPVTQIVSAEAWGRADCGFTSESYQQGVLSATILYEILLGKATLYAVLVSALVLMAMVKRKDSRGRSKRSRLLHSDYMNMTPRRPGPTRKHYQPYAPPRDFAAYRSRVKFSRSADAPAYQQGQNQLYNELNLGRREEYDVLDKRRGRDPEMGGKPQRRKNPQEGLYNELQKDKMAEAYSEIGMKGERRRGKGHDGLYQGLSTATKDTYDALHMQALPPR

SEQ ID NO: 29722 - protein, 269 aa, synthetic construct; identical to SEQ ID NO: 29325

SEQ ID NO: 29723 - protein, 268 aa, synthetic construct
QPALNDSRYCLSSRLRVSATFWQNPRNHFRCQVQFYGLSENDEWTQDRAKPVTQIVSAEAWGRADCGFTSESYQQGVLSATILYEILLGKATLYAVLVSALVLMAMVKRKDSRGRSKRSRLLHSDYMNMTPRRPGPTRKHYQPYAPPRDFAAYRSRVKFSRSADAPAYQQGQNQLYNELNLGRREEYDVLDKRRGRDPEMGGKPQRRKNPQEGLYNELQKDKMAEAYSEIGMKGERRRGKGHDGLYQGLSTATKDTYDALHMQALPPR

SEQ ID NO: 29724 - protein, 267 aa, synthetic construct
PALNDSRYCLSSRLRVSATFWQNPRNHFRCQVQFYGLSENDEWTQDRAKPVTQIVSAEAWGRADCGFTSESYQQGVLSATILYEILLGKATLYAVLVSALVLMAMVKRKDSRGRSKRSRLLHSDYMNMTPRRPGPTRKHYQPYAPPRDFAAYRSRVKFSRSADAPAYQQGQNQLYNELNLGRREEYDVLDKRRGRDPEMGGKPQRRKNPQEGLYNELQKDKMAEAYSEIGMKGERRRGKGHDGLYQGLSTATKDTYDALHMQALPPR

SEQ ID NO: 29725 - protein, 266 aa, synthetic construct
ALNDSRYCLSSRLRVSATFWQNPRNHFRCQVQFYGLSENDEWTQDRAKPVTQIVSAEAWGRADCGFTSESYQQGVLSATILYEILLGKATLYAVLVSALVLMAMVKRKDSRGRSKRSRLLHSDYMNMTPRRPGPTRKHYQPYAPPRDFAAYRSRVKFSRSADAPAYQQGQNQLYNELNLGRREEYDVLDKRRGRDPEMGGKPQRRKNPQEGLYNELQKDKMAEAYSEIGMKGERRRGKGHDGLYQGLSTATKDTYDALHMQALPPR

SEQ ID NO: 29726 - protein, 265 aa, synthetic construct
LNDSRYCLSSRLRVSATFWQNPRNHFRCQVQFYGLSENDEWTQDRAKPVTQIVSAEAWGRADCGFTSESYQQGVLSATILYEILLGKATLYAVLVSALVLMAMVKRKDSRGRSKRSRLLHSDYMNMTPRRPGPTRKHYQPYAPPRDFAAYRSRVKFSRSADAPAYQQGQNQLYNELNLGRREEYDVLDKRRGRDPEMGGKPQRRKNPQEGLYNELQKDKMAEAYSEIGMKGERRRGKGHDGLYQGLSTATKDTYDALHMQALPPR

SEQ ID NO: 29727 - protein, 264 aa, synthetic construct
NDSRYCLSSRLRVSATFWQNPRNHFRCQVQFYGLSENDEWTQDRAKPVTQIVSAEAWGRADCGFTSESYQQGVLSATILYEILLGKATLYAVLVSALVLMAMVKRKDSRGRSKRSRLLHSDYMNMTPRRPGPTRKHYQPYAPPRDFAAYRSRVKFSRSADAPAYQQGQNQLYNELNLGRREEYDVLDKRRGRDPEMGGKPQRRKNPQEGLYNELQKDKMAEAYSEIGMKGERRRGKGHDGLYQGLSTATKDTYDALHMQALPPR

SEQ ID NO: 29728 - protein, 263 aa, synthetic construct
DSRYCLSSRLRVSATFWQNPRNHFRCQVQFYGLSENDEWTQDRAKPVTQIVSAEAWGRADCGFTSESYQQGVLSATILYEILLGKATLYAVLVSALVLMAMVKRKDSRGRSKRSRLLHSDYMNMTPRRPGPTRKHYQPYAPPRDFAAYRSRVKFSRSADAPAYQQGQNQLYNELNLGRREEYDVLDKRRGRDPEMGGKPQRRKNPQEGLYNELQKDKMAEAYSEIGMKGERRRGKGHDGLYQGLSTATKDTYDALHMQALPPR

SEQ ID NO: 29729 - protein, 262 aa, synthetic construct
SRYCLSSRLRVSATFWQNPRNHFRCQVQFYGLSENDEWTQDRAKPVTQIVSAEAWGRADCGFTSESYQQGVLSATILYEILLGKATLYAVLVSALVLMAMVKRKDSRGRSKRSRLLHSDYMNMTPRRPGPTRKHYQPYAPPRDFAAYRSRVKFSRSADAPAYQQGQNQLYNELNLGRREEYDVLDKRRGRDPEMGGKPQRRKNPQEGLYNELQKDKMAEAYSEIGMKGERRRGKGHDGLYQGLSTATKDTYDALHMQALPPR

SEQ ID NO: 29730 - protein, 261 aa, synthetic construct
RYCLSSRLRVSATFWQNPRNHFRCQVQFYGLSENDEWTQDRAKPVTQIVSAEAWGRADCGFTSESYQQGVLSATILYEILLGKATLYAVLVSALVLMAMVKRKDSRGRSKRSRLLHSDYMNMTPRRPGPTRKHYQPYAPPRDFAAYRSRVKFSRSADAPAYQQGQNQLYNELNLGRREEYDVLDKRRGRDPEMGGKPQRRKNPQEGLYNELQKDKMAEAYSEIGMKGERRRGKGHDGLYQGLSTATKDTYDALHMQALPPR

SEQ ID NO: 29731 - protein, 260 aa, synthetic construct
YCLSSRLRVSATFWQNPRNHFRCQVQFYGLSENDEWTQDRAKPVTQIVSAEAWGRADCGFTSESYQQGVLSATILYEILLGKATLYAVLVSALVLMAMVKRKDSRGRSKRSRLLHSDYMNMTPRRPGPTRKHYQPYAPPRDFAAYRSRVKFSRSADAPAYQQGQNQLYNELNLGRREEYDVLDKRRGRDPEMGGKPQRRKNPQEGLYNELQKDKMAEAYSEIGMKGERRRGKGHDGLYQGLSTATKDTYDALHMQALPPR

SEQ ID NO: 29732 - protein, 259 aa, synthetic construct
CLSSRLRVSATFWQNPRNHFRCQVQFYGLSENDEWTQDRAKPVTQIVSAEAWGRADCGFTSESYQQGVLSATILYEILLGKATLYAVLVSALVLMAMVKRKDSRGRSKRSRLLHSDYMNMTPRRPGPTRKHYQPYAPPRDFAAYRSRVKFSRSADAPAYQQGQNQLYNELNLGRREEYDVLDKRRGRDPEMGGKPQRRKNPQEGLYNELQKDKMAEAYSEIGMKGERRRGKGHDGLYQGLSTATKDTYDALHMQALPPR

SEQ ID NO: 29733 - protein, 258 aa, synthetic construct
LSSRLRVSATFWQNPRNHFRCQVQFYGLSENDEWTQDRAKPVTQIVSAEAWGRADCGFTSESYQQGVLSATILYEILLGKATLYAVLVSALVLMAMVKRKDSRGRSKRSRLLHSDYMNMTPRRPGPTRKHYQPYAPPRDFAAYRSRVKFSRSADAPAYQQGQNQLYNELNLGRREEYDVLDKRRGRDPEMGGKPQRRKNPQEGLYNELQKDKMAEAYSEIGMKGERRRGKGHDGLYQGLSTATKDTYDALHMQALPPR

SEQ ID NO: 29734 - protein, 257 aa, synthetic construct
SSRLRVSATFWQNPRNHFRCQVQFYGLSENDEWTQDRAKPVTQIVSAEAWGRADCGFTSESYQQGVLSATILYEILLGKATLYAVLVSALVLMAMVKRKDSRGRSKRSRLLHSDYMNMTPRRPGPTRKHYQPYAPPRDFAAYRSRVKFSRSADAPAYQQGQNQLYNELNLGRREEYDVLDKRRGRDPEMGGKPQRRKNPQEGLYNELQKDKMAEAYSEIGMKGERRRGKGHDGLYQGLSTATKDTYDALHMQALPPR

SEQ ID NO: 29735 - protein, 256 aa, synthetic construct
SRLRVSATFWQNPRNHFRCQVQFYGLSENDEWTQDRAKPVTQIVSAEAWGRADCGFTSESYQQGVLSATILYEILLGKATLYAVLVSALVLMAMVKRKDSRGRSKRSRLLHSDYMNMTPRRPGPTRKHYQPYAPPRDFAAYRSRVKFSRSADAPAYQQGQNQLYNELNLGRREEYDVLDKRRGRDPEMGGKPQRRKNPQEGLYNELQKDKMAEAYSEIGMKGERRRGKGHDGLYQGLSTATKDTYDALHMQALPPR

SEQ ID NO: 29736 - protein, 255 aa, synthetic construct
RLRVSATFWQNPRNHFRCQVQFYGLSENDEWTQDRAKPVTQIVSAEAWGRADCGFTSESYQQGVLSATILYEILLGKATLYAVLVSALVLMAMVKRKDSRGRSKRSRLLHSDYMNMTPRRPGPTRKHYQPYAPPRDFAAYRSRVKFSRSADAPAYQQGQNQLYNELNLGRREEYDVLDKRRGRDPEMGGKPQRRKNPQEGLYNELQKDKMAEAYSEIGMKGERRRGKGHDGLYQGLSTATKDTYDALHMQALPPR

SEQ ID NO: 29737 - protein, 254 aa, synthetic construct
LRVSATFWQNPRNHFRCQVQFYGLSENDEWTQDRAKPVTQIVSAEAWGRADCGFTSESYQQGVLSATILYEILLGKATLYAVLVSALVLMAMVKRKDSRGRSKRSRLLHSDYMNMTPRRPGPTRKHYQPYAPPRDFAAYRSRVKFSRSADAPAYQQGQNQLYNELNLGRREEYDVLDKRRGRDPEMGGKPQRRKNPQEGLYNELQKDKMAEAYSEIGMKGERRRGKGHDGLYQGLSTATKDTYDALHMQALPPR

SEQ ID NO: 29738 - protein, 253 aa, synthetic construct
RVSATFWQNPRNHFRCQVQFYGLSENDEWTQDRAKPVTQIVSAEAWGRADCGFTSESYQQGVLSATILYEILLGKATLYAVLVSALVLMAMVKRKDSRGRSKRSRLLHSDYMNMTPRRPGPTRKHYQPYAPPRDFAAYRSRVKFSRSADAPAYQQGQNQLYNELNLGRREEYDVLDKRRGRDPEMGGKPQRRKNPQEGLYNELQKDKMAEAYSEIGMKGERRRGKGHDGLYQGLSTATKDTYDALHMQALPPR

SEQ ID NO: 29739 - protein, 252 aa, synthetic construct
VSATFWQNPRNHFRCQVQFYGLSENDEWTQDRAKPVTQIVSAEAWGRADCGFTSESYQQGVLSATILYEILLGKATLYAVLVSALVLMAMVKRKDSRGRSKRSRLLHSDYMNMTPRRPGPTRKHYQPYAPPRDFAAYRSRVKFSRSADAPAYQQGQNQLYNELNLGRREEYDVLDKRRGRDPEMGGKPQRRKNPQEGLYNELQKDKMAEAYSEIGMKGERRRGKGHDGLYQGLSTATKDTYDALHMQALPPR

SEQ ID NO: 29740 - protein, 251 aa, synthetic construct
SATFWQNPRNHFRCQVQFYGLSENDEWTQDRAKPVTQIVSAEAWGRADCGFTSESYQQGVLSATILYEILLGKATLYAVLVSALVLMAMVKRKDSRGRSKRSRLLHSDYMNMTPRRPGPTRKHYQPYAPPRDFAAYRSRVKFSRSADAPAYQQGQNQLYNELNLGRREEYDVLDKRRGRDPEMGGKPQRRKNPQEGLYNELQKDKMAEAYSEIGMKGERRRGKGHDGLYQGLSTATKDTYDALHMQALPPR

SEQ ID NO: 29741 - protein, 250 aa, synthetic construct
ATFWQNPRNHFRCQVQFYGLSENDEWTQDRAKPVTQIVSAEAWGRADCGFTSESYQQGVLSATILYEILLGKATLYAVLVSALVLMAMVKRKDSRGRSKRSRLLHSDYMNMTPRRPGPTRKHYQPYAPPRDFAAYRSRVKFSRSADAPAYQQGQNQLYNELNLGRREEYDVLDKRRGRDPEMGGKPQRRKNPQEGLYNELQKDKMAEAYSEIGMKGERRRGKGHDGLYQGLSTATKDTYDALHMQALPPR

SEQ ID NO: 29742 - protein, 249 aa, synthetic construct
TFWQNPRNHFRCQVQFYGLSENDEWTQDRAKPVTQIVSAEAWGRADCGFTSESYQQGVLSATILYEILLGKATLYAVLVSALVLMAMVKRKDSRGRSKRSRLLHSDYMNMTPRRPGPTRKHYQPYAPPRDFAAYRSRVKFSRSADAPAYQQGQNQLYNELNLGRREEYDVLDKRRGRDPEMGGKPQRRKNPQEGLYNELQKDKMAEAYSEIGMKGERRRGKGHDGLYQGLSTATKDTYDALHMQALPPR

SEQ ID NO: 29743 - protein, 248 aa, synthetic construct
FWQNPRNHFRCQVQFYGLSENDEWTQDRAKPVTQIVSAEAWGRADCGFTSESYQQGVLSATILYEILLGKATLYAVLVSALVLMAMVKRKDSRGRSKRSRLLHSDYMNMTPRRPGPTRKHYQPYAPPRDFAAYRSRVKFSRSADAPAYQQGQNQLYNELNLGRREEYDVLDKRRGRDPEMGGKPQRRKNPQEGLYNELQKDKMAEAYSEIGMKGERRRGKGHDGLYQGLSTATKDTYDALHMQALPPR

SEQ ID NO: 29744 - protein, 247 aa, synthetic construct
WQNPRNHFRCQVQFYGLSENDEWTQDRAKPVTQIVSAEAWGRADCGFTSESYQQGVLSATILYEILLGKATLYAVLVSALVLMAMVKRKDSRGRSKRSRLLHSDYMNMTPRRPGPTRKHYQPYAPPRDFAAYRSRVKFSRSADAPAYQQGQNQLYNELNLGRREEYDVLDKRRGRDPEMGGKPQRRKNPQEGLYNELQKDKMAEAYSEIGMKGERRRGKGHDGLYQGLSTATKDTYDALHMQALPPR

SEQ ID NO: 29745 - protein, 246 aa, synthetic construct
QNPRNHFRCQVQFYGLSENDEWTQDRAKPVTQIVSAEAWGRADCGFTSESYQQGVLSATILYEILLGKATLYAVLVSALVLMAMVKRKDSRGRSKRSRLLHSDYMNMTPRRPGPTRKHYQPYAPPRDFAAYRSRVKFSRSADAPAYQQGQNQLYNELNLGRREEYDVLDKRRGRDPEMGGKPQRRKNPQEGLYNELQKDKMAEAYSEIGMKGERRRGKGHDGLYQGLSTATKDTYDALHMQALPPR

SEQ ID NO: 29746 - protein, 245 aa, synthetic construct
NPRNHFRCQVQFYGLSENDEWTQDRAKPVTQIVSAEAWGRADCGFTSESYQQGVLSATILYEILLGKATLYAVLVSALVLMAMVKRKDSRGRSKRSRLLHSDYMNMTPRRPGPTRKHYQPYAPPRDFAAYRSRVKFSRSADAPAYQQGQNQLYNELNLGRREEYDVLDKRRGRDPEMGGKPQRRKNPQEGLYNELQKDKMAEAYSEIGMKGERRRGKGHDGLYQGLSTATKDTYDALHMQALPPR

SEQ ID NO: 29747 - protein, 244 aa, synthetic construct
PRNHFRCQVQFYGLSENDEWTQDRAKPVTQIVSAEAWGRADCGFTSESYQQGVLSATILYEILLGKATLYAVLVSALVLMAMVKRKDSRGRSKRSRLLHSDYMNMTPRRPGPTRKHYQPYAPPRDFAAYRSRVKFSRSADAPAYQQGQNQLYNELNLGRREEYDVLDKRRGRDPEMGGKPQRRKNPQEGLYNELQKDKMAEAYSEIGMKGERRRGKGHDGLYQGLSTATKDTYDALHMQALPPR

SEQ ID NO: 29748 - protein, 243 aa, synthetic construct
RNHFRCQVQFYGLSENDEWTQDRAKPVTQIVSAEAWGRADCGFTSESYQQGVLSATILYEILLGKATLYAVLVSALVLMAMVKRKDSRGRSKRSRLLHSDYMNMTPRRPGPTRKHYQPYAPPRDFAAYRSRVKFSRSADAPAYQQGQNQLYNELNLGRREEYDVLDKRRGRDPEMGGKPQRRKNPQEGLYNELQKDKMAEAYSEIGMKGERRRGKGHDGLYQGLSTATKDTYDALHMQALPPR

SEQ ID NO: 29749 - protein, 242 aa, synthetic construct
NHFRCQVQFYGLSENDEWTQDRAKPVTQIVSAEAWGRADCGFTSESYQQGVLSATILYEILLGKATLYAVLVSALVLMAMVKRKDSRGRSKRSRLLHSDYMNMTPRRPGPTRKHYQPYAPPRDFAAYRSRVKFSRSADAPAYQQGQNQLYNELNLGRREEYDVLDKRRGRDPEMGGKPQRRKNPQEGLYNELQKDKMAEAYSEIGMKGERRRGKGHDGLYQGLSTATKDTYDALHMQALPPR

SEQ ID NO: 29750 - protein, 241 aa, synthetic construct
HFRCQVQFYGLSENDEWTQDRAKPVTQIVSAEAWGRADCGFTSESYQQGVLSATILYEILLGKATLYAVLVSALVLMAMVKRKDSRGRSKRSRLLHSDYMNMTPRRPGPTRKHYQPYAPPRDFAAYRSRVKFSRSADAPAYQQGQNQLYNELNLGRREEYDVLDKRRGRDPEMGGKPQRRKNPQEGLYNELQKDKMAEAYSEIGMKGERRRGKGHDGLYQGLSTATKDTYDALHMQALPPR

SEQ ID NO: 29751 - protein, 240 aa, synthetic construct
FRCQVQFYGLSENDEWTQDRAKPVTQIVSAEAWGRADCGFTSESYQQGVLSATILYEILLGKATLYAVLVSALVLMAMVKRKDSRGRSKRSRLLHSDYMNMTPRRPGPTRKHYQPYAPPRDFAAYRSRVKFSRSADAPAYQQGQNQLYNELNLGRREEYDVLDKRRGRDPEMGGKPQRRKNPQEGLYNELQKDKMAEAYSEIGMKGERRRGKGHDGLYQGLSTATKDTYDALHMQALPPR

SEQ ID NO: 29752 - protein, 239 aa, synthetic construct
RCQVQFYGLSENDEWTQDRAKPVTQIVSAEAWGRADCGFTSESYQQGVLSATILYEILLGKATLYAVLVSALVLMAMVKRKDSRGRSKRSRLLHSDYMNMTPRRPGPTRKHYQPYAPPRDFAAYRSRVKFSRSADAPAYQQGQNQLYNELNLGRREEYDVLDKRRGRDPEMGGKPQRRKNPQEGLYNELQKDKMAEAYSEIGMKGERRRGKGHDGLYQGLSTATKDTYDALHMQALPPR

SEQ ID NO: 29753 - protein, 238 aa, synthetic construct
CQVQFYGLSENDEWTQDRAKPVTQIVSAEAWGRADCGFTSESYQQGVLSATILYEILLGKATLYAVLVSALVLMAMVKRKDSRGRSKRSRLLHSDYMNMTPRRPGPTRKHYQPYAPPRDFAAYRSRVKFSRSADAPAYQQGQNQLYNELNLGRREEYDVLDKRRGRDPEMGGKPQRRKNPQEGLYNELQKDKMAEAYSEIGMKGERRRGKGHDGLYQGLSTATKDTYDALHMQALPPR

SEQ ID NO: 29754 - protein, 237 aa, synthetic construct
QVQFYGLSENDEWTQDRAKPVTQIVSAEAWGRADCGFTSESYQQGVLSATILYEILLGKATLYAVLVSALVLMAMVKRKDSRGRSKRSRLLHSDYMNMTPRRPGPTRKHYQPYAPPRDFAAYRSRVKFSRSADAPAYQQGQNQLYNELNLGRREEYDVLDKRRGRDPEMGGKPQRRKNPQEGLYNELQKDKMAEAYSEIGMKGERRRGKGHDGLYQGLSTATKDTYDALHMQALPPR

SEQ ID NO: 29755 - protein, 236 aa, synthetic construct
VQFYGLSENDEWTQDRAKPVTQIVSAEAWGRADCGFTSESYQQGVLSATILYEILLGKATLYAVLVSALVLMAMVKRKDSRGRSKRSRLLHSDYMNMTPRRPGPTRKHYQPYAPPRDFAAYRSRVKFSRSADAPAYQQGQNQLYNELNLGRREEYDVLDKRRGRDPEMGGKPQRRKNPQEGLYNELQKDKMAEAYSEIGMKGERRRGKGHDGLYQGLSTATKDTYDALHMQALPPR

SEQ ID NO: 29756 - protein, 235 aa, synthetic construct
QFYGLSENDEWTQDRAKPVTQIVSAEAWGRADCGFTSESYQQGVLSATILYEILLGKATLYAVLVSALVLMAMVKRKDSRGRSKRSRLLHSDYMNMTPRRPGPTRKHYQPYAPPRDFAAYRSRVKFSRSADAPAYQQGQNQLYNELNLGRREEYDVLDKRRGRDPEMGGKPQRRKNPQEGLYNELQKDKMAEAYSEIGMKGERRRGKGHDGLYQGLSTATKDTYDALHMQALPPR

SEQ ID NO: 29757 - protein, 234 aa, synthetic construct
FYGLSENDEWTQDRAKPVTQIVSAEAWGRADCGFTSESYQQGVLSATILYEILLGKATLYAVLVSALVLMAMVKRKDSRGRSKRSRLLHSDYMNMTPRRPGPTRKHYQPYAPPRDFAAYRSRVKFSRSADAPAYQQGQNQLYNELNLGRREEYDVLDKRRGRDPEMGGKPQRRKNPQEGLYNELQKDKMAEAYSEIGMKGERRRGKGHDGLYQGLSTATKDTYDALHMQALPPR

SEQ ID NO: 29758 - protein, 233 aa, synthetic construct
YGLSENDEWTQDRAKPVTQIVSAEAWGRADCGFTSESYQQGVLSATILYEILLGKATLYAVLVSALVLMAMVKRKDSRGRSKRSRLLHSDYMNMTPRRPGPTRKHYQPYAPPRDFAAYRSRVKFSRSADAPAYQQGQNQLYNELNLGRREEYDVLDKRRGRDPEMGGKPQRRKNPQEGLYNELQKDKMAEAYSEIGMKGERRRGKGHDGLYQGLSTATKDTYDALHMQALPPR

SEQ ID NO: 29759 - protein, 232 aa, synthetic construct
GLSENDEWTQDRAKPVTQIVSAEAWGRADCGFTSESYQQGVLSATILYEILLGKATLYAVLVSALVLMAMVKRKDSRGRSKRSRLLHSDYMNMTPRRPGPTRKHYQPYAPPRDFAAYRSRVKFSRSADAPAYQQGQNQLYNELNLGRREEYDVLDKRRGRDPEMGGKPQRRKNPQEGLYNELQKDKMAEAYSEIGMKGERRRGKGHDGLYQGLSTATKDTYDALHMQALPPR

SEQ ID NO: 29760 - protein, 231 aa, synthetic construct
LSENDEWTQDRAKPVTQIVSAEAWGRADCGFTSESYQQGVLSATILYEILLGKATLYAVLVSALVLMAMVKRKDSRGRSKRSRLLHSDYMNMTPRRPGPTRKHYQPYAPPRDFAAYRSRVKFSRSADAPAYQQGQNQLYNELNLGRREEYDVLDKRRGRDPEMGGKPQRRKNPQEGLYNELQKDKMAEAYSEIGMKGERRRGKGHDGLYQGLSTATKDTYDALHMQALPPR

SEQ ID NO: 29761 - protein, 230 aa, synthetic construct
SENDEWTQDRAKPVTQIVSAEAWGRADCGFTSESYQQGVLSATILYEILLGKATLYAVLVSALVLMAMVKRKDSRGRSKRSRLLHSDYMNMTPRRPGPTRKHYQPYAPPRDFAAYRSRVKFSRSADAPAYQQGQNQLYNELNLGRREEYDVLDKRRGRDPEMGGKPQRRKNPQEGLYNELQKDKMAEAYSEIGMKGERRRGKGHDGLYQGLSTATKDTYDALHMQALPPR

SEQ ID NO: 29762 - protein, 229 aa, synthetic construct
ENDEWTQDRAKPVTQIVSAEAWGRADCGFTSESYQQGVLSATILYEILLGKATLYAVLVSALVLMAMVKRKDSRGRSKRSRLLHSDYMNMTPRRPGPTRKHYQPYAPPRDFAAYRSRVKFSRSADAPAYQQGQNQLYNELNLGRREEYDVLDKRRGRDPEMGGKPQRRKNPQEGLYNELQKDKMAEAYSEIGMKGERRRGKGHDGLYQGLSTATKDTYDALHMQALPPR

SEQ ID NO: 29763 - protein, 228 aa, synthetic construct
NDEWTQDRAKPVTQIVSAEAWGRADCGFTSESYQQGVLSATILYEILLGKATLYAVLVSALVLMAMVKRKDSRGRSKRSRLLHSDYMNMTPRRPGPTRKHYQPYAPPRDFAAYRSRVKFSRSADAPAYQQGQNQLYNELNLGRREEYDVLDKRRGRDPEMGGKPQRRKNPQEGLYNELQKDKMAEAYSEIGMKGERRRGKGHDGLYQGLSTATKDTYDALHMQALPPR

SEQ ID NO: 29764 - protein, 227 aa, synthetic construct
DEWTQDRAKPVTQIVSAEAWGRADCGFTSESYQQGVLSATILYEILLGKATLYAVLVSALVLMAMVKRKDSRGRSKRSRLLHSDYMNMTPRRPGPTRKHYQPYAPPRDFAAYRSRVKFSRSADAPAYQQGQNQLYNELNLGRREEYDVLDKRRGRDPEMGGKPQRRKNPQEGLYNELQKDKMAEAYSEIGMKGERRRGKGHDGLYQGLSTATKDTYDALHMQALPPR

SEQ ID NO: 29765 - protein, 226 aa, synthetic construct
EWTQDRAKPVTQIVSAEAWGRADCGFTSESYQQGVLSATILYEILLGKATLYAVLVSALVLMAMVKRKDSRGRSKRSRLLHSDYMNMTPRRPGPTRKHYQPYAPPRDFAAYRSRVKFSRSADAPAYQQGQNQLYNELNLGRREEYDVLDKRRGRDPEMGGKPQRRKNPQEGLYNELQKDKMAEAYSEIGMKGERRRGKGHDGLYQGLSTATKDTYDALHMQALPPR

SEQ ID NO: 29766 - protein, 225 aa, synthetic construct
WTQDRAKPVTQIVSAEAWGRADCGFTSESYQQGVLSATILYEILLGKATLYAVLVSALVLMAMVKRKDSRGRSKRSRLLHSDYMNMTPRRPGPTRKHYQPYAPPRDFAAYRSRVKFSRSADAPAYQQGQNQLYNELNLGRREEYDVLDKRRGRDPEMGGKPQRRKNPQEGLYNELQKDKMAEAYSEIGMKGERRRGKGHDGLYQGLSTATKDTYDALHMQALPPR

SEQ ID NO: 29767 - protein, 224 aa, synthetic construct
TQDRAKPVTQIVSAEAWGRADCGFTSESYQQGVLSATILYEILLGKATLYAVLVSALVLMAMVKRKDSRGRSKRSRLLHSDYMNMTPRRPGPTRKHYQPYAPPRDFAAYRSRVKFSRSADAPAYQQGQNQLYNELNLGRREEYDVLDKRRGRDPEMGGKPQRRKNPQEGLYNELQKDKMAEAYSEIGMKGERRRGKGHDGLYQGLSTATKDTYDALHMQALPPR

SEQ ID NO: 29768 - protein, 223 aa, synthetic construct
QDRAKPVTQIVSAEAWGRADCGFTSESYQQGVLSATILYEILLGKATLYAVLVSALVLMAMVKRKDSRGRSKRSRLLHSDYMNMTPRRPGPTRKHYQPYAPPRDFAAYRSRVKFSRSADAPAYQQGQNQLYNELNLGRREEYDVLDKRRGRDPEMGGKPQRRKNPQEGLYNELQKDKMAEAYSEIGMKGERRRGKGHDGLYQGLSTATKDTYDALHMQALPPR

SEQ ID NO: 29769 - protein, 222 aa, synthetic construct
DRAKPVTQIVSAEAWGRADCGFTSESYQQGVLSATILYEILLGKATLYAVLVSALVLMAMVKRKDSRGRSKRSRLLHSDYMNMTPRRPGPTRKHYQPYAPPRDFAAYRSRVKFSRSADAPAYQQGQNQLYNELNLGRREEYDVLDKRRGRDPEMGGKPQRRKNPQEGLYNELQKDKMAEAYSEIGMKGERRRGKGHDGLYQGLSTATKDTYDALHMQALPPR

SEQ ID NO: 29770 - protein, 221 aa, synthetic construct
RAKPVTQIVSAEAWGRADCGFTSESYQQGVLSATILYEILLGKATLYAVLVSALVLMAMVKRKDSRGRSKRSRLLHSDYMNMTPRRPGPTRKHYQPYAPPRDFAAYRSRVKFSRSADAPAYQQGQNQLYNELNLGRREEYDVLDKRRGRDPEMGGKPQRRKNPQEGLYNELQKDKMAEAYSEIGMKGERRRGKGHDGLYQGLSTATKDTYDALHMQALPPR

SEQ ID NO: 29771 - protein, 220 aa, synthetic construct
AKPVTQIVSAEAWGRADCGFTSESYQQGVLSATILYEILLGKATLYAVLVSALVLMAMVKRKDSRGRSKRSRLLHSDYMNMTPRRPGPTRKHYQPYAPPRDFAAYRSRVKFSRSADAPAYQQGQNQLYNELNLGRREEYDVLDKRRGRDPEMGGKPQRRKNPQEGLYNELQKDKMAEAYSEIGMKGERRRGKGHDGLYQGLSTATKDTYDALHMQALPPR

SEQ ID NO: 29772 - protein, 219 aa, synthetic construct
KPVTQIVSAEAWGRADCGFTSESYQQGVLSATILYEILLGKATLYAVLVSALVLMAMVKRKDSRGRSKRSRLLHSDYMNMTPRRPGPTRKHYQPYAPPRDFAAYRSRVKFSRSADAPAYQQGQNQLYNELNLGRREEYDVLDKRRGRDPEMGGKPQRRKNPQEGLYNELQKDKMAEAYSEIGMKGERRRGKGHDGLYQGLSTATKDTYDALHMQALPPR

SEQ ID NO: 29773 - protein, 218 aa, synthetic construct
PVTQIVSAEAWGRADCGFTSESYQQGVLSATILYEILLGKATLYAVLVSALVLMAMVKRKDSRGRSKRSRLLHSDYMNMTPRRPGPTRKHYQPYAPPRDFAAYRSRVKFSRSADAPAYQQGQNQLYNELNLGRREEYDVLDKRRGRDPEMGGKPQRRKNPQEGLYNELQKDKMAEAYSEIGMKGERRRGKGHDGLYQGLSTATKDTYDALHMQALPPR

SEQ ID NO: 29774 - protein, 217 aa, synthetic construct
VTQIVSAEAWGRADCGFTSESYQQGVLSATILYEILLGKATLYAVLVSALVLMAMVKRKDSRGRSKRSRLLHSDYMNMTPRRPGPTRKHYQPYAPPRDFAAYRSRVKFSRSADAPAYQQGQNQLYNELNLGRREEYDVLDKRRGRDPEMGGKPQRRKNPQEGLYNELQKDKMAEAYSEIGMKGERRRGKGHDGLYQGLSTATKDTYDALHMQALPPR

SEQ ID NO: 29775 - protein, 216 aa, synthetic construct
TQIVSAEAWGRADCGFTSESYQQGVLSATILYEILLGKATLYAVLVSALVLMAMVKRKDSRGRSKRSRLLHSDYMNMTPRRPGPTRKHYQPYAPPRDFAAYRSRVKFSRSADAPAYQQGQNQLYNELNLGRREEYDVLDKRRGRDPEMGGKPQRRKNPQEGLYNELQKDKMAEAYSEIGMKGERRRGKGHDGLYQGLSTATKDTYDALHMQALPPR

SEQ ID NO: 29776 - protein, 215 aa, synthetic construct
QIVSAEAWGRADCGFTSESYQQGVLSATILYEILLGKATLYAVLVSALVLMAMVKRKDSRGRSKRSRLLHSDYMNMTPRRPGPTRKHYQPYAPPRDFAAYRSRVKFSRSADAPAYQQGQNQLYNELNLGRREEYDVLDKRRGRDPEMGGKPQRRKNPQEGLYNELQKDKMAEAYSEIGMKGERRRGKGHDGLYQGLSTATKDTYDALHMQALPPR

SEQ ID NO: 29777 - protein, 214 aa, synthetic construct
IVSAEAWGRADCGFTSESYQQGVLSATILYEILLGKATLYAVLVSALVLMAMVKRKDSRGRSKRSRLLHSDYMNMTPRRPGPTRKHYQPYAPPRDFAAYRSRVKFSRSADAPAYQQGQNQLYNELNLGRREEYDVLDKRRGRDPEMGGKPQRRKNPQEGLYNELQKDKMAEAYSEIGMKGERRRGKGHDGLYQGLSTATKDTYDALHMQALPPR

SEQ ID NO: 29778 - protein, 213 aa, synthetic construct
VSAEAWGRADCGFTSESYQQGVLSATILYEILLGKATLYAVLVSALVLMAMVKRKDSRGRSKRSRLLHSDYMNMTPRRPGPTRKHYQPYAPPRDFAAYRSRVKFSRSADAPAYQQGQNQLYNELNLGRREEYDVLDKRRGRDPEMGGKPQRRKNPQEGLYNELQKDKMAEAYSEIGMKGERRRGKGHDGLYQGLSTATKDTYDALHMQALPPR

SEQ ID NO: 29779 - protein, 212 aa, synthetic construct
SAEAWGRADCGFTSESYQQGVLSATILYEILLGKATLYAVLVSALVLMAMVKRKDSRGRSKRSRLLHSDYMNMTPRRPGPTRKHYQPYAPPRDFAAYRSRVKFSRSADAPAYQQGQNQLYNELNLGRREEYDVLDKRRGRDPEMGGKPQRRKNPQEGLYNELQKDKMAEAYSEIGMKGERRRGKGHDGLYQGLSTATKDTYDALHMQALPPR

SEQ ID NO: 29780 - protein, 211 aa, synthetic construct
AEAWGRADCGFTSESYQQGVLSATILYEILLGKATLYAVLVSALVLMAMVKRKDSRGRSKRSRLLHSDYMNMTPRRPGPTRKHYQPYAPPRDFAAYRSRVKFSRSADAPAYQQGQNQLYNELNLGRREEYDVLDKRRGRDPEMGGKPQRRKNPQEGLYNELQKDKMAEAYSEIGMKGERRRGKGHDGLYQGLSTATKDTYDALHMQALPPR

SEQ ID NO: 29781 - protein, 210 aa, synthetic construct
EAWGRADCGFTSESYQQGVLSATILYEILLGKATLYAVLVSALVLMAMVKRKDSRGRSKRSRLLHSDYMNMTPRRPGPTRKHYQPYAPPRDFAAYRSRVKFSRSADAPAYQQGQNQLYNELNLGRREEYDVLDKRRGRDPEMGGKPQRRKNPQEGLYNELQKDKMAEAYSEIGMKGERRRGKGHDGLYQGLSTATKDTYDALHMQALPPR

SEQ ID NO: 29782 - protein, 209 aa, synthetic construct
AWGRADCGFTSESYQQGVLSATILYEILLGKATLYAVLVSALVLMAMVKRKDSRGRSKRSRLLHSDYMNMTPRRPGPTRKHYQPYAPPRDFAAYRSRVKFSRSADAPAYQQGQNQLYNELNLGRREEYDVLDKRRGRDPEMGGKPQRRKNPQEGLYNELQKDKMAEAYSEIGMKGERRRGKGHDGLYQGLSTATKDTYDALHMQALPPR

SEQ ID NO: 29783 - protein, 208 aa, synthetic construct
WGRADCGFTSESYQQGVLSATILYEILLGKATLYAVLVSALVLMAMVKRKDSRGRSKRSRLLHSDYMNMTPRRPGPTRKHYQPYAPPRDFAAYRSRVKFSRSADAPAYQQGQNQLYNELNLGRREEYDVLDKRRGRDPEMGGKPQRRKNPQEGLYNELQKDKMAEAYSEIGMKGERRRGKGHDGLYQGLSTATKDTYDALHMQALPPR

SEQ ID NO: 29784 - protein, 207 aa, synthetic construct; identical to SEQ ID NO: 29326

SEQ ID NO: 29785 - protein, 327 aa, synthetic construct; identical to SEQ ID NO: 29316

SEQ ID NO: 29786 - protein, 326 aa, synthetic construct
KQLDADVSPKPTIFLPSIAETKLQKAGTYLCLLEKFFPDVIKIHWQEKKSNTILGSQEGNTMKTNDTYMKFSWLTVPEKSLDKEHRCIVRHENNKNGVDQEIIFPPIKTDVITMDPKDNCSKDANDTLLLQLTNTSAYYMYLLLLLKSVVYFAIITCCLLRRTAFCCNGEKSRSKRSRLLHSDYMNMTPRRPGPTRKHYQPYAPPRDFAAYRSRVKFSRSADAPAYQQGQNQLYNELNLGRREEYDVLDKRRGRDPEMGGKPQRRKNPQEGLYNELQKDKMAEAYSEIGMKGERRRGKGHDGLYQGLSTATKDTYDALHMQALPPR

SEQ ID NO: 29787 - protein, 325 aa, synthetic construct
QLDADVSPKPTIFLPSIAETKLQKAGTYLCLLEKFFPDVIKIHWQEKKSNTILGSQEGNTMKTNDTYMKFSWLTVPEKSLDKEHRCIVRHENNKNGVDQEIIFPPIKTDVITMDPKDNCSKDANDTLLLQLTNTSAYYMYLLLLLKSVVYFAIITCCLLRRTAFCCNGEKSRSKRSRLLHSDYMNMTPRRPGPTRKHYQPYAPPRDFAAYRSRVKFSRSADAPAYQQGQNQLYNELNLGRREEYDVLDKRRGRDPEMGGKPQRRKNPQEGLYNELQKDKMAEAYSEIGMKGERRRGKGHDGLYQGLSTATKDTYDALHMQALPPR

SEQ ID NO: 29788 - protein, 324 aa, synthetic construct
LDADVSPKPTIFLPSIAETKLQKAGTYLCLLEKFFPDVIKIHWQEKKSNTILGSQEGNTMKTNDTYMKFSWLTVPEKSLDKEHRCIVRHENNKNGVDQEIIFPPIKTDVITMDPKDNCSKDANDTLLLQLTNTSAYYMYLLLLLKSVVYFAIITCCLLRRTAFCCNGEKSRSKRSRLLHSDYMNMTPRRPGPTRKHYQPYAPPRDFAAYRSRVKFSRSADAPAYQQGQNQLYNELNLGRREEYDVLDKRRGRDPEMGGKPQRRKNPQEGLYNELQKDKMAEAYSEIGMKGERRRGKGHDGLYQGLSTATKDTYDALHMQALPPR

SEQ ID NO: 29789 - protein, 323 aa, synthetic construct
DADVSPKPTIFLPSIAETKLQKAGTYLCLLEKFFPDVIKIHWQEKKSNTILGSQEGNTMKTNDTYMKFSWLTVPEKSLDKEHRCIVRHENNKNGVDQEIIFPPIKTDVITMDPKDNCSKDANDTLLLQLTNTSAYYMYLLLLLKSVVYFAIITCCLLRRTAFCCNGEKSRSKRSRLLHSDYMNMTPRRPGPTRKHYQPYAPPRDFAAYRSRVKFSRSADAPAYQQGQNQLYNELNLGRREEYDVLDKRRGRDPEMGGKPQRRKNPQEGLYNELQKDKMAEAYSEIGMKGERRRGKGHDGLYQGLSTATKDTYDALHMQALPPR

SEQ ID NO: 29790 - protein, 322 aa, synthetic construct; identical to SEQ ID NO: 29329

SEQ ID NO: 29791 - protein, 321 aa, synthetic construct
DVSPKPTIFLPSIAETKLQKAGTYLCLLEKFFPDVIKIHWQEKKSNTILGSQEGNTMKTNDTYMKFSWLTVPEKSLDKEHRCIVRHENNKNGVDQEIIFPPIKTDVITMDPKDNCSKDANDTLLLQLTNTSAYYMYLLLLLKSVVYFAIITCCLLRRTAFCCNGEKSRSKRSRLLHSDYMNMTPRRPGPTRKHYQPYAPPRDFAAYRSRVKFSRSADAPAYQQGQNQLYNELNLGRREEYDVLDKRRGRDPEMGGKPQRRKNPQEGLYNELQKDKMAEAYSEIGMKGERRRGKGHDGLYQGLSTATKDTYDALHMQALPPR

SEQ ID NO: 29792 - protein, 320 aa, synthetic construct; identical to SEQ ID NO: 29330

SEQ ID NO: 29793 - protein, 319 aa, synthetic construct
SPKPTIFLPSIAETKLQKAGTYLCLLEKFFPDVIKIHWQEKKSNTILGSQEGNTMKTNDTYMKFSWLTVPEKSLDKEHRCIVRHENNKNGVDQEIIFPPIKTDVITMDPKDNCSKDANDTLLLQLTNTSAYYMYLLLLLKSVVYFAIITCCLLRRTAFCCNGEKSRSKRSRLLHSDYMNMTPRRPGPTRKHYQPYAPPRDFAAYRSRVKFSRSADAPAYQQGQNQLYNELNLGRREEYDVLDKRRGRDPEMGGKPQRRKNPQEGLYNELQKDKMAEAYSEIGMKGERRRGKGHDGLYQGLSTATKDTYDALHMQALPPR

SEQ ID NO: 29794 - protein, 318 aa, synthetic construct
PKPTIFLPSIAETKLQKAGTYLCLLEKFFPDVIKIHWQEKKSNTILGSQEGNTMKTNDTYMKFSWLTVPEKSLDKEHRCIVRHENNKNGVDQEIIFPPIKTDVITMDPKDNCSKDANDTLLLQLTNTSAYYMYLLLLLKSVVYFAIITCCLLRRTAFCCNGEKSRSKRSRLLHSDYMNMTPRRPGPTRKHYQPYAPPRDFAAYRSRVKFSRSADAPAYQQGQNQLYNELNLGRREEYDVLDKRRGRDPEMGGKPQRRKNPQEGLYNELQKDKMAEAYSEIGMKGERRRGKGHDGLYQGLSTATKDTYDALHMQALPPR

SEQ ID NO: 29795 - protein, 317 aa, synthetic construct
KPTIFLPSIAETKLQKAGTYLCLLEKFFPDVIKIHWQEKKSNTILGSQEGNTMKTNDTYMKFSWLTVPEKSLDKEHRCIVRHENNKNGVDQEIIFPPIKTDVITMDPKDNCSKDANDTLLLQLTNTSAYYMYLLLLLKSVVYFAIITCCLLRRTAFCCNGEKSRSKRSRLLHSDYMNMTPRRPGPTRKHYQPYAPPRDFAAYRSRVKFSRSADAPAYQQGQNQLYNELNLGRREEYDVLDKRRGRDPEMGGKPQRRKNPQEGLYNELQKDKMAEAYSEIGMKGERRRGKGHDGLYQGLSTATKDTYDALHMQALPPR

SEQ ID NO: 29796 - protein, 316 aa, synthetic construct
PTIFLPSIAETKLQKAGTYLCLLEKFFPDVIKIHWQEKKSNTILGSQEGNTMKTNDTYMKFSWLTVPEKSLDKEHRCIVRHENNKNGVDQEIIFPPIKTDVITMDPKDNCSKDANDTLLLQLTNTSAYYMYLLLLLKSVVYFAIITCCLLRRTAFCCNGEKSRSKRSRLLHSDYMNMTPRRPGPTRKHYQPYAPPRDFAAYRSRVKFSRSADAPAYQQGQNQLYNELNLGRREEYDVLDKRRGRDPEMGGKPQRRKNPQEGLYNELQKDKMAEAYSEIGMKGERRRGKGHDGLYQGLSTATKDTYDALHMQALPPR

SEQ ID NO: 29797 - protein, 315 aa, synthetic construct; identical to SEQ ID NO: 29331

SEQ ID NO: 29798 - protein, 314 aa, synthetic construct
IFLPSIAETKLQKAGTYLCLLEKFFPDVIKIHWQEKKSNTILGSQEGNTMKTNDTYMKFSWLTVPEKSLDKEHRCIVRHENNKNGVDQEIIFPPIKTDVITMDPKDNCSKDANDTLLLQLTNTSAYYMYLLLLLKSVVYFAIITCCLLRRTAFCCNGEKSRSKRSRLLHSDYMNMTPRRPGPTRKHYQPYAPPRDFAAYRSRVKFSRSADAPAYQQGQNQLYNELNLGRREEYDVLDKRRGRDPEMGGKPQRRKNPQEGLYNELQKDKMAEAYSEIGMKGERRRGKGHDGLYQGLSTATKDTYDALHMQALPPR

SEQ ID NO: 29799 - protein, 313 aa, synthetic construct
FLPSIAETKLQKAGTYLCLLEKFFPDVIKIHWQEKKSNTILGSQEGNTMKTNDTYMKFSWLTVPEKSLDKEHRCIVRHENNKNGVDQEIIFPPIKTDVITMDPKDNCSKDANDTLLLQLTNTSAYYMYLLLLLKSVVYFAIITCCLLRRTAFCCNGEKSRSKRSRLLHSDYMNMTPRRPGPTRKHYQPYAPPRDFAAYRSRVKFSRSADAPAYQQGQNQLYNELNLGRREEYDVLDKRRGRDPEMGGKPQRRKNPQEGLYNELQKDKMAEAYSEIGMKGERRRGKGHDGLYQGLSTATKDTYDALHMQALPPR

SEQ ID NO: 29800 - protein, 312 aa, synthetic construct
LPSIAETKLQKAGTYLCLLEKFFPDVIKIHWQEKKSNTILGSQEGNTMKTNDTYMKFSWLTVPEKSLDKEHRCIVRHENNKNGVDQEIIFPPIKTDVITMDPKDNCSKDANDTLLLQLTNTSAYYMYLLLLLKSVVYFAIITCCLLRRTAFCCNGEKSRSKRSRLLHSDYMNMTPRRPGPTRKHYQPYAPPRDFAAYRSRVKFSRSADAPAYQQGQNQLYNELNLGRREEYDVLDKRRGRDPEMGGKPQRRKNPQEGLYNELQKDKMAEAYSEIGMKGERRRGKGHDGLYQGLSTATKDTYDALHMQALPPR

SEQ ID NO: 29801 - protein, 311 aa, synthetic construct
PSIAETKLQKAGTYLCLLEKFFPDVIKIHWQEKKSNTILGSQEGNTMKTNDTYMKFSWLTVPEKSLDKEHRCIVRHENNKNGVDQEIIFPPIKTDVITMDPKDNCSKDANDTLLLQLTNTSAYYMYLLLLLKSVVYFAIITCCLLRRTAFCCNGEKSRSKRSRLLHSDYMNMTPRRPGPTRKHYQPYAPPRDFAAYRSRVKFSRSADAPAYQQGQNQLYNELNLGRREEYDVLDKRRGRDPEMGGKPQRRKNPQEGLYNELQKDKMAEAYSEIGMKGERRRGKGHDGLYQGLSTATKDTYDALHMQALPPR

SEQ ID NO: 29802 - protein, 310 aa, synthetic construct
SIAETKLQKAGTYLCLLEKFFPDVIKIHWQEKKSNTILGSQEGNTMKTNDTYMKFSWLTVPEKSLDKEHRCIVRHENNKNGVDQEIIFPPIKTDVITMDPKDNCSKDANDTLLLQLTNTSAYYMYLLLLLKSVVYFAIITCCLLRRTAFCCNGEKSRSKRSRLLHSDYMNMTPRRPGPTRKHYQPYAPPRDFAAYRSRVKFSRSADAPAYQQGQNQLYNELNLGRREEYDVLDKRRGRDPEMGGKPQRRKNPQEGLYNELQKDKMAEAYSEIGMKGERRRGKGHDGLYQGLSTATKDTYDALHMQALPPR

SEQ ID NO: 29803 - protein, 309 aa, synthetic construct
IAETKLQKAGTYLCLLEKFFPDVIKIHWQEKKSNTILGSQEGNTMKTNDTYMKFSWLTVPEKSLDKEHRCIVRHENNKNGVDQEIIFPPIKTDVITMDPKDNCSKDANDTLLLQLTNTSAYYMYLLLLLKSVVYFAIITCCLLRRTAFCCNGEKSRSKRSRLLHSDYMNMTPRRPGPTRKHYQPYAPPRDFAAYRSRVKFSRSADAPAYQQGQNQLYNELNLGRREEYDVLDKRRGRDPEMGGKPQRRKNPQEGLYNELQKDKMAEAYSEIGMKGERRRGKGHDGLYQGLSTATKDTYDALHMQALPPR

SEQ ID NO: 29804 - protein, 308 aa, synthetic construct
AETKLQKAGTYLCLLEKFFPDVIKIHWQEKKSNTILGSQEGNTMKTNDTYMKFSWLTVPEKSLDKEHRCIVRHENNKNGVDQEIIFPPIKTDVITMDPKDNCSKDANDTLLLQLTNTSAYYMYLLLLLKSVVYFAIITCCLLRRTAFCCNGEKSRSKRSRLLHSDYMNMTPRRPGPTRKHYQPYAPPRDFAAYRSRVKFSRSADAPAYQQGQNQLYNELNLGRREEYDVLDKRRGRDPEMGGKPQRRKNPQEGLYNELQKDKMAEAYSEIGMKGERRRGKGHDGLYQGLSTATKDTYDALHMQALPPR

SEQ ID NO: 29805 - protein, 307 aa, synthetic construct
ETKLQKAGTYLCLLEKFFPDVIKIHWQEKKSNTILGSQEGNTMKTNDTYMKFSWLTVPEKSLDKEHRCIVRHENNKNGVDQEIIFPPIKTDVITMDPKDNCSKDANDTLLLQLTNTSAYYMYLLLLLKSVVYFAIITCCLLRRTAFCCNGEKSRSKRSRLLHSDYMNMTPRRPGPTRKHYQPYAPPRDFAAYRSRVKFSRSADAPAYQQGQNQLYNELNLGRREEYDVLDKRRGRDPEMGGKPQRRKNPQEGLYNELQKDKMAEAYSEIGMKGERRRGKGHDGLYQGLSTATKDTYDALHMQALPPR

SEQ ID NO: 29806 - protein, 306 aa, synthetic construct
TKLQKAGTYLCLLEKFFPDVIKIHWQEKKSNTILGSQEGNTMKTNDTYMKFSWLTVPEKSLDKEHRCIVRHENNKNGVDQEIIFPPIKTDVITMDPKDNCSKDANDTLLLQLTNTSAYYMYLLLLLKSVVYFAIITCCLLRRTAFCCNGEKSRSKRSRLLHSDYMNMTPRRPGPTRKHYQPYAPPRDFAAYRSRVKFSRSADAPAYQQGQNQLYNELNLGRREEYDVLDKRRGRDPEMGGKPQRRKNPQEGLYNELQKDKMAEAYSEIGMKGERRRGKGHDGLYQGLSTATKDTYDALHMQALPPR

SEQ ID NO: 29807 - protein, 305 aa, synthetic construct
KLQKAGTYLCLLEKFFPDVIKIHWQEKKSNTILGSQEGNTMKTNDTYMKFSWLTVPEKSLDKEHRCIVRHENNKNGVDQEIIFPPIKTDVITMDPKDNCSKDANDTLLLQLTNTSAYYMYLLLLLKSVVYFAIITCCLLRRTAFCCNGEKSRSKRSRLLHSDYMNMTPRRPGPTRKHYQPYAPPRDFAAYRSRVKFSRSADAPAYQQGQNQLYNELNLGRREEYDVLDKRRGRDPEMGGKPQRRKNPQEGLYNELQKDKMAEAYSEIGMKGERRRGKGHDGLYQGLSTATKDTYDALHMQALPPR

SEQ ID NO: 29808 - protein, 304 aa, synthetic construct
LQKAGTYLCLLEKFFPDVIKIHWQEKKSNTILGSQEGNTMKTNDTYMKFSWLTVPEKSLDKEHRCIVRHENNKNGVDQEIIFPPIKTDVITMDPKDNCSKDANDTLLLQLTNTSAYYMYLLLLLKSVVYFAIITCCLLRRTAFCCNGEKSRSKRSRLLHSDYMNMTPRRPGPTRKHYQPYAPPRDFAAYRSRVKFSRSADAPAYQQGQNQLYNELNLGRREEYDVLDKRRGRDPEMGGKPQRRKNPQEGLYNELQKDKMAEAYSEIGMKGERRRGKGHDGLYQGLSTATKDTYDALHMQALPPR

SEQ ID NO: 29809 - protein, 303 aa, synthetic construct
QKAGTYLCLLEKFFPDVIKIHWQEKKSNTILGSQEGNTMKTNDTYMKFSWLTVPEKSLDKEHRCIVRHENNKNGVDQEIIFPPIKTDVITMDPKDNCSKDANDTLLLQLTNTSAYYMYLLLLLKSVVYFAIITCCLLRRTAFCCNGEKSRSKRSRLLHSDYMNMTPRRPGPTRKHYQPYAPPRDFAAYRSRVKFSRSADAPAYQQGQNQLYNELNLGRREEYDVLDKRRGRDPEMGGKPQRRKNPQEGLYNELQKDKMAEAYSEIGMKGERRRGKGHDGLYQGLSTATKDTYDALHMQALPPR

SEQ ID NO: 29810 - protein, 302 aa, synthetic construct
KAGTYLCLLEKFFPDVIKIHWQEKKSNTILGSQEGNTMKTNDTYMKFSWLTVPEKSLDKEHRCIVRHENNKNGVDQEIIFPPIKTDVITMDPKDNCSKDANDTLLLQLTNTSAYYMYLLLLLKSVVYFAIITCCLLRRTAFCCNGEKSRSKRSRLLHSDYMNMTPRRPGPTRKHYQPYAPPRDFAAYRSRVKFSRSADAPAYQQGQNQLYNELNLGRREEYDVLDKRRGRDPEMGGKPQRRKNPQEGLYNELQKDKMAEAYSEIGMKGERRRGKGHDGLYQGLSTATKDTYDALHMQALPPR

SEQ ID NO: 29811 - protein, 301 aa, synthetic construct
AGTYLCLLEKFFPDVIKIHWQEKKSNTILGSQEGNTMKTNDTYMKFSWLTVPEKSLDKEHRCIVRHENNKNGVDQEIIFPPIKTDVITMDPKDNCSKDANDTLLLQLTNTSAYYMYLLLLLKSVVYFAIITCCLLRRTAFCCNGEKSRSKRSRLLHSDYMNMTPRRPGPTRKHYQPYAPPRDFAAYRSRVKFSRSADAPAYQQGQNQLYNELNLGRREEYDVLDKRRGRDPEMGGKPQRRKNPQEGLYNELQKDKMAEAYSEIGMKGERRRGKGHDGLYQGLSTATKDTYDALHMQALPPR

SEQ ID NO: 29812 - protein, 300 aa, synthetic construct
GTYLCLLEKFFPDVIKIHWQEKKSNTILGSQEGNTMKTNDTYMKFSWLTVPEKSLDKEHRCIVRHENNKNGVDQEIIFPPIKTDVITMDPKDNCSKDANDTLLLQLTNTSAYYMYLLLLLKSVVYFAIITCCLLRRTAFCCNGEKSRSKRSRLLHSDYMNMTPRRPGPTRKHYQPYAPPRDFAAYRSRVKFSRSADAPAYQQGQNQLYNELNLGRREEYDVLDKRRGRDPEMGGKPQRRKNPQEGLYNELQKDKMAEAYSEIGMKGERRRGKGHDGLYQGLSTATKDTYDALHMQALPPR

SEQ ID NO: 29813 - protein, 299 aa, synthetic construct
TYLCLLEKFFPDVIKIHWQEKKSNTILGSQEGNTMKTNDTYMKFSWLTVPEKSLDKEHRCIVRHENNKNGVDQEIIFPPIKTDVITMDPKDNCSKDANDTLLLQLTNTSAYYMYLLLLLKSVVYFAIITCCLLRRTAFCCNGEKSRSKRSRLLHSDYMNMTPRRPGPTRKHYQPYAPPRDFAAYRSRVKFSRSADAPAYQQGQNQLYNELNLGRREEYDVLDKRRGRDPEMGGKPQRRKNPQEGLYNELQKDKMAEAYSEIGMKGERRRGKGHDGLYQGLSTATKDTYDALHMQALPPR

SEQ ID NO: 29814 - protein, 298 aa, synthetic construct
YLCLLEKFFPDVIKIHWQEKKSNTILGSQEGNTMKTNDTYMKFSWLTVPEKSLDKEHRCIVRHENNKNGVDQEIIFPPIKTDVITMDPKDNCSKDANDTLLLQLTNTSAYYMYLLLLLKSVVYFAIITCCLLRRTAFCCNGEKSRSKRSRLLHSDYMNMTPRRPGPTRKHYQPYAPPRDFAAYRSRVKFSRSADAPAYQQGQNQLYNELNLGRREEYDVLDKRRGRDPEMGGKPQRRKNPQEGLYNELQKDKMAEAYSEIGMKGERRRGKGHDGLYQGLSTATKDTYDALHMQALPPR

SEQ ID NO: 29815 - protein, 297 aa, synthetic construct
LCLLEKFFPDVIKIHWQEKKSNTILGSQEGNTMKTNDTYMKFSWLTVPEKSLDKEHRCIVRHENNKNGVDQEIIFPPIKTDVITMDPKDNCSKDANDTLLLQLTNTSAYYMYLLLLLKSVVYFAIITCCLLRRTAFCCNGEKSRSKRSRLLHSDYMNMTPRRPGPTRKHYQPYAPPRDFAAYRSRVKFSRSADAPAYQQGQNQLYNELNLGRREEYDVLDKRRGRDPEMGGKPQRRKNPQEGLYNELQKDKMAEAYSEIGMKGERRRGKGHDGLYQGLSTATKDTYDALHMQALPPR

SEQ ID NO: 29816 - protein, 296 aa, synthetic construct
CLLEKFFPDVIKIHWQEKKSNTILGSQEGNTMKTNDTYMKFSWLTVPEKSLDKEHRCIVRHENNKNGVDQEIIFPPIKTDVITMDPKDNCSKDANDTLLLQLTNTSAYYMYLLLLLKSVVYFAIITCCLLRRTAFCCNGEKSRSKRSRLLHSDYMNMTPRRPGPTRKHYQPYAPPRDFAAYRSRVKFSRSADAPAYQQGQNQLYNELNLGRREEYDVLDKRRGRDPEMGGKPQRRKNPQEGLYNELQKDKMAEAYSEIGMKGERRRGKGHDGLYQGLSTATKDTYDALHMQALPPR

SEQ ID NO: 29817 - protein, 295 aa, synthetic construct
LLEKFFPDVIKIHWQEKKSNTILGSQEGNTMKTNDTYMKFSWLTVPEKSLDKEHRCIVRHENNKNGVDQEIIFPPIKTDVITMDPKDNCSKDANDTLLLQLTNTSAYYMYLLLLLKSVVYFAIITCCLLRRTAFCCNGEKSRSKRSRLLHSDYMNMTPRRPGPTRKHYQPYAPPRDFAAYRSRVKFSRSADAPAYQQGQNQLYNELNLGRREEYDVLDKRRGRDPEMGGKPQRRKNPQEGLYNELQKDKMAEAYSEIGMKGERRRGKGHDGLYQGLSTATKDTYDALHMQALPPR

SEQ ID NO: 29818 - protein, 294 aa, synthetic construct
LEKFFPDVIKIHWQEKKSNTILGSQEGNTMKTNDTYMKFSWLTVPEKSLDKEHRCIVRHENNKNGVDQEIIFPPIKTDVITMDPKDNCSKDANDTLLLQLTNTSAYYMYLLLLLKSVVYFAIITCCLLRRTAFCCNGEKSRSKRSRLLHSDYMNMTPRRPGPTRKHYQPYAPPRDFAAYRSRVKFSRSADAPAYQQGQNQLYNELNLGRREEYDVLDKRRGRDPEMGGKPQRRKNPQEGLYNELQKDKMAEAYSEIGMKGERRRGKGHDGLYQGLSTATKDTYDALHMQALPPR

SEQ ID NO: 29819 - protein, 293 aa, synthetic construct
EKFFPDVIKIHWQEKKSNTILGSQEGNTMKTNDTYMKFSWLTVPEKSLDKEHRCIVRHENNKNGVDQEIIFPPIKTDVITMDPKDNCSKDANDTLLLQLTNTSAYYMYLLLLLKSVVYFAIITCCLLRRTAFCCNGEKSRSKRSRLLHSDYMNMTPRRPGPTRKHYQPYAPPRDFAAYRSRVKFSRSADAPAYQQGQNQLYNELNLGRREEYDVLDKRRGRDPEMGGKPQRRKNPQEGLYNELQKDKMAEAYSEIGMKGERRRGKGHDGLYQGLSTATKDTYDALHMQALPPR

SEQ ID NO: 29820 - protein, 292 aa, synthetic construct
KFFPDVIKIHWQEKKSNTILGSQEGNTMKTNDTYMKFSWLTVPEKSLDKEHRCIVRHENNKNGVDQEIIFPPIKTDVITMDPKDNCSKDANDTLLLQLTNTSAYYMYLLLLLKSVVYFAIITCCLLRRTAFCCNGEKSRSKRSRLLHSDYMNMTPRRPGPTRKHYQPYAPPRDFAAYRSRVKFSRSADAPAYQQGQNQLYNELNLGRREEYDVLDKRRGRDPEMGGKPQRRKNPQEGLYNELQKDKMAEAYSEIGMKGERRRGKGHDGLYQGLSTATKDTYDALHMQALPPR

SEQ ID NO: 29821 - protein, 291 aa, synthetic construct
FFPDVIKIHWQEKKSNTILGSQEGNTMKTNDTYMKFSWLTVPEKSLDKEHRCIVRHENNKNGVDQEIIFPPIKTDVITMDPKDNCSKDANDTLLLQLTNTSAYYMYLLLLLKSVVYFAIITCCLLRRTAFCCNGEKSRSKRSRLLHSDYMNMTPRRPGPTRKHYQPYAPPRDFAAYRSRVKFSRSADAPAYQQGQNQLYNELNLGRREEYDVLDKRRGRDPEMGGKPQRRKNPQEGLYNELQKDKMAEAYSEIGMKGERRRGKGHDGLYQGLSTATKDTYDALHMQALPPR

SEQ ID NO: 29822 - protein, 290 aa, synthetic construct
FPDVIKIHWQEKKSNTILGSQEGNTMKTNDTYMKFSWLTVPEKSLDKEHRCIVRHENNKNGVDQEIIFPPIKTDVITMDPKDNCSKDANDTLLLQLTNTSAYYMYLLLLLKSVVYFAIITCCLLRRTAFCCNGEKSRSKRSRLLHSDYMNMTPRRPGPTRKHYQPYAPPRDFAAYRSRVKFSRSADAPAYQQGQNQLYNELNLGRREEYDVLDKRRGRDPEMGGKPQRRKNPQEGLYNELQKDKMAEAYSEIGMKGERRRGKGHDGLYQGLSTATKDTYDALHMQALPPR

SEQ ID NO: 29823 - protein, 289 aa, synthetic construct
PDVIKIHWQEKKSNTILGSQEGNTMKTNDTYMKFSWLTVPEKSLDKEHRCIVRHENNKNGVDQEIIFPPIKTDVITMDPKDNCSKDANDTLLLQLTNTSAYYMYLLLLLKSVVYFAIITCCLLRRTAFCCNGEKSRSKRSRLLHSDYMNMTPRRPGPTRKHYQPYAPPRDFAAYRSRVKFSRSADAPAYQQGQNQLYNELNLGRREEYDVLDKRRGRDPEMGGKPQRRKNPQEGLYNELQKDKMAEAYSEIGMKGERRRGKGHDGLYQGLSTATKDTYDALHMQALPPR

SEQ ID NO: 29824 - protein, 288 aa, synthetic construct
DVIKIHWQEKKSNTILGSQEGNTMKTNDTYMKFSWLTVPEKSLDKEHRCIVRHENNKNGVDQEIIFPPIKTDVITMDPKDNCSKDANDTLLLQLTNTSAYYMYLLLLLKSVVYFAIITCCLLRRTAFCCNGEKSRSKRSRLLHSDYMNMTPRRPGPTRKHYQPYAPPRDFAAYRSRVKFSRSADAPAYQQGQNQLYNELNLGRREEYDVLDKRRGRDPEMGGKPQRRKNPQEGLYNELQKDKMAEAYSEIGMKGERRRGKGHDGLYQGLSTATKDTYDALHMQALPPR

SEQ ID NO: 29825 - protein, 287 aa, synthetic construct
VIKIHWQEKKSNTILGSQEGNTMKTNDTYMKFSWLTVPEKSLDKEHRCIVRHENNKNGVDQEIIFPPIKTDVITMDPKDNCSKDANDTLLLQLTNTSAYYMYLLLLLKSVVYFAIITCCLLRRTAFCCNGEKSRSKRSRLLHSDYMNMTPRRPGPTRKHYQPYAPPRDFAAYRSRVKFSRSADAPAYQQGQNQLYNELNLGRREEYDVLDKRRGRDPEMGGKPQRRKNPQEGLYNELQKDKMAEAYSEIGMKGERRRGKGHDGLYQGLSTATKDTYDALHMQALPPR

SEQ ID NO: 29826 - protein, 286 aa, synthetic construct
IKIHWQEKKSNTILGSQEGNTMKTNDTYMKFSWLTVPEKSLDKEHRCIVRHENNKNGVDQEIIFPPIKTDVITMDPKDNCSKDANDTLLLQLTNTSAYYMYLLLLLKSVVYFAIITCCLLRRTAFCCNGEKSRSKRSRLLHSDYMNMTPRRPGPTRKHYQPYAPPRDFAAYRSRVKFSRSADAPAYQQGQNQLYNELNLGRREEYDVLDKRRGRDPEMGGKPQRRKNPQEGLYNELQKDKMAEAYSEIGMKGERRRGKGHDGLYQGLSTATKDTYDALHMQALPPR

SEQ ID NO: 29827 - protein, 285 aa, synthetic construct
KIHWQEKKSNTILGSQEGNTMKTNDTYMKFSWLTVPEKSLDKEHRCIVRHENNKNGVDQEIIFPPIKTDVITMDPKDNCSKDANDTLLLQLTNTSAYYMYLLLLLKSVVYFAIITCCLLRRTAFCCNGEKSRSKRSRLLHSDYMNMTPRRPGPTRKHYQPYAPPRDFAAYRSRVKFSRSADAPAYQQGQNQLYNELNLGRREEYDVLDKRRGRDPEMGGKPQRRKNPQEGLYNELQKDKMAEAYSEIGMKGERRRGKGHDGLYQGLSTATKDTYDALHMQALPPR

SEQ ID NO: 29828 - protein, 284 aa, synthetic construct
IHWQEKKSNTILGSQEGNTMKTNDTYMKFSWLTVPEKSLDKEHRCIVRHENNKNGVDQEIIFPPIKTDVITMDPKDNCSKDANDTLLLQLTNTSAYYMYLLLLLKSVVYFAIITCCLLRRTAFCCNGEKSRSKRSRLLHSDYMNMTPRRPGPTRKHYQPYAPPRDFAAYRSRVKFSRSADAPAYQQGQNQLYNELNLGRREEYDVLDKRRGRDPEMGGKPQRRKNPQEGLYNELQKDKMAEAYSEIGMKGERRRGKGHDGLYQGLSTATKDTYDALHMQALPPR

SEQ ID NO: 29829 - protein, 283 aa, synthetic construct
HWQEKKSNTILGSQEGNTMKTNDTYMKFSWLTVPEKSLDKEHRCIVRHENNKNGVDQEIIFPPIKTDVITMDPKDNCSKDANDTLLLQLTNTSAYYMYLLLLLKSVVYFAIITCCLLRRTAFCCNGEKSRSKRSRLLHSDYMNMTPRRPGPTRKHYQPYAPPRDFAAYRSRVKFSRSADAPAYQQGQNQLYNELNLGRREEYDVLDKRRGRDPEMGGKPQRRKNPQEGLYNELQKDKMAEAYSEIGMKGERRRGKGHDGLYQGLSTATKDTYDALHMQALPPR

SEQ ID NO: 29830 - protein, 282 aa, synthetic construct
WQEKKSNTILGSQEGNTMKTNDTYMKFSWLTVPEKSLDKEHRCIVRHENNKNGVDQEIIFPPIKTDVITMDPKDNCSKDANDTLLLQLTNTSAYYMYLLLLLKSVVYFAIITCCLLRRTAFCCNGEKSRSKRSRLLHSDYMNMTPRRPGPTRKHYQPYAPPRDFAAYRSRVKFSRSADAPAYQQGQNQLYNELNLGRREEYDVLDKRRGRDPEMGGKPQRRKNPQEGLYNELQKDKMAEAYSEIGMKGERRRGKGHDGLYQGLSTATKDTYDALHMQALPPR

SEQ ID NO: 29831 - protein, 281 aa, synthetic construct
QEKKSNTILGSQEGNTMKTNDTYMKFSWLTVPEKSLDKEHRCIVRHENNKNGVDQEIIFPPIKTDVITMDPKDNCSKDANDTLLLQLTNTSAYYMYLLLLLKSVVYFAIITCCLLRRTAFCCNGEKSRSKRSRLLHSDYMNMTPRRPGPTRKHYQPYAPPRDFAAYRSRVKFSRSADAPAYQQGQNQLYNELNLGRREEYDVLDKRRGRDPEMGGKPQRRKNPQEGLYNELQKDKMAEAYSEIGMKGERRRGKGHDGLYQGLSTATKDTYDALHMQALPPR

SEQ ID NO: 29832 - protein, 280 aa, synthetic construct
EKKSNTILGSQEGNTMKTNDTYMKFSWLTVPEKSLDKEHRCIVRHENNKNGVDQEIIFPPIKTDVITMDPKDNCSKDANDTLLLQLTNTSAYYMYLLLLLKSVVYFAIITCCLLRRTAFCCNGEKSRSKRSRLLHSDYMNMTPRRPGPTRKHYQPYAPPRDFAAYRSRVKFSRSADAPAYQQGQNQLYNELNLGRREEYDVLDKRRGRDPEMGGKPQRRKNPQEGLYNELQKDKMAEAYSEIGMKGERRRGKGHDGLYQGLSTATKDTYDALHMQALPPR

SEQ ID NO: 29833 - protein, 279 aa, synthetic construct
KKSNTILGSQEGNTMKTNDTYMKFSWLTVPEKSLDKEHRCIVRHENNKNGVDQEIIFPPIKTDVITMDPKDNCSKDANDTLLLQLTNTSAYYMYLLLLLKSVVYFAIITCCLLRRTAFCCNGEKSRSKRSRLLHSDYMNMTPRRPGPTRKHYQPYAPPRDFAAYRSRVKFSRSADAPAYQQGQNQLYNELNLGRREEYDVLDKRRGRDPEMGGKPQRRKNPQEGLYNELQKDKMAEAYSEIGMKGERRRGKGHDGLYQGLSTATKDTYDALHMQALPPR

SEQ ID NO: 29834 - protein, 278 aa, synthetic construct
KSNTILGSQEGNTMKTNDTYMKFSWLTVPEKSLDKEHRCIVRHENNKNGVDQEIIFPPIKTDVITMDPKDNCSKDANDTLLLQLTNTSAYYMYLLLLLKSVVYFAIITCCLLRRTAFCCNGEKSRSKRSRLLHSDYMNMTPRRPGPTRKHYQPYAPPRDFAAYRSRVKFSRSADAPAYQQGQNQLYNELNLGRREEYDVLDKRRGRDPEMGGKPQRRKNPQEGLYNELQKDKMAEAYSEIGMKGERRRGKGHDGLYQGLSTATKDTYDALHMQALPPR

SEQ ID NO: 29835 - protein, 277 aa, synthetic construct
SNTILGSQEGNTMKTNDTYMKFSWLTVPEKSLDKEHRCIVRHENNKNGVDQEIIFPPIKTDVITMDPKDNCSKDANDTLLLQLTNTSAYYMYLLLLLKSVVYFAIITCCLLRRTAFCCNGEKSRSKRSRLLHSDYMNMTPRRPGPTRKHYQPYAPPRDFAAYRSRVKFSRSADAPAYQQGQNQLYNELNLGRREEYDVLDKRRGRDPEMGGKPQRRKNPQEGLYNELQKDKMAEAYSEIGMKGERRRGKGHDGLYQGLSTATKDTYDALHMQALPPR

SEQ ID NO: 29836 - protein, 276 aa, synthetic construct
NTILGSQEGNTMKTNDTYMKFSWLTVPEKSLDKEHRCIVRHENNKNGVDQEIIFPPIKTDVITMDPKDNCSKDANDTLLLQLTNTSAYYMYLLLLLKSVVYFAIITCCLLRRTAFCCNGEKSRSKRSRLLHSDYMNMTPRRPGPTRKHYQPYAPPRDFAAYRSRVKFSRSADAPAYQQGQNQLYNELNLGRREEYDVLDKRRGRDPEMGGKPQRRKNPQEGLYNELQKDKMAEAYSEIGMKGERRRGKGHDGLYQGLSTATKDTYDALHMQALPPR

SEQ ID NO: 29837 - protein, 275 aa, synthetic construct
TILGSQEGNTMKTNDTYMKFSWLTVPEKSLDKEHRCIVRHENNKNGVDQEIIFPPIKTDVITMDPKDNCSKDANDTLLLQLTNTSAYYMYLLLLLKSVVYFAIITCCLLRRTAFCCNGEKSRSKRSRLLHSDYMNMTPRRPGPTRKHYQPYAPPRDFAAYRSRVKFSRSADAPAYQQGQNQLYNELNLGRREEYDVLDKRRGRDPEMGGKPQRRKNPQEGLYNELQKDKMAEAYSEIGMKGERRRGKGHDGLYQGLSTATKDTYDALHMQALPPR

SEQ ID NO: 29838 - protein, 274 aa, synthetic construct
ILGSQEGNTMKTNDTYMKFSWLTVPEKSLDKEHRCIVRHENNKNGVDQEIIFPPIKTDVITMDPKDNCSKDANDTLLLQLTNTSAYYMYLLLLLKSVVYFAIITCCLLRRTAFCCNGEKSRSKRSRLLHSDYMNMTPRRPGPTRKHYQPYAPPRDFAAYRSRVKFSRSADAPAYQQGQNQLYNELNLGRREEYDVLDKRRGRDPEMGGKPQRRKNPQEGLYNELQKDKMAEAYSEIGMKGERRRGKGHDGLYQGLSTATKDTYDALHMQALPPR

SEQ ID NO: 29839 - protein, 273 aa, synthetic construct
LGSQEGNTMKTNDTYMKFSWLTVPEKSLDKEHRCIVRHENNKNGVDQEIIFPPIKTDVITMDPKDNCSKDANDTLLLQLTNTSAYYMYLLLLLKSVVYFAIITCCLLRRTAFCCNGEKSRSKRSRLLHSDYMNMTPRRPGPTRKHYQPYAPPRDFAAYRSRVKFSRSADAPAYQQGQNQLYNELNLGRREEYDVLDKRRGRDPEMGGKPQRRKNPQEGLYNELQKDKMAEAYSEIGMKGERRRGKGHDGLYQGLSTATKDTYDALHMQALPPR

SEQ ID NO: 29840 - protein, 272 aa, synthetic construct
GSQEGNTMKTNDTYMKFSWLTVPEKSLDKEHRCIVRHENNKNGVDQEIIFPPIKTDVITMDPKDNCSKDANDTLLLQLTNTSAYYMYLLLLLKSVVYFAIITCCLLRRTAFCCNGEKSRSKRSRLLHSDYMNMTPRRPGPTRKHYQPYAPPRDFAAYRSRVKFSRSADAPAYQQGQNQLYNELNLGRREEYDVLDKRRGRDPEMGGKPQRRKNPQEGLYNELQKDKMAEAYSEIGMKGERRRGKGHDGLYQGLSTATKDTYDALHMQALPPR

SEQ ID NO: 29841 - protein, 271 aa, synthetic construct
SQEGNTMKTNDTYMKFSWLTVPEKSLDKEHRCIVRHENNKNGVDQEIIFPPIKTDVITMDPKDNCSKDANDTLLLQLTNTSAYYMYLLLLLKSVVYFAIITCCLLRRTAFCCNGEKSRSKRSRLLHSDYMNMTPRRPGPTRKHYQPYAPPRDFAAYRSRVKFSRSADAPAYQQGQNQLYNELNLGRREEYDVLDKRRGRDPEMGGKPQRRKNPQEGLYNELQKDKMAEAYSEIGMKGERRRGKGHDGLYQGLSTATKDTYDALHMQALPPR

SEQ ID NO: 29842 - protein, 270 aa, synthetic construct
QEGNTMKTNDTYMKFSWLTVPEKSLDKEHRCIVRHENNKNGVDQEIIFPPIKTDVITMDPKDNCSKDANDTLLLQLTNTSAYYMYLLLLLKSVVYFAIITCCLLRRTAFCCNGEKSRSKRSRLLHSDYMNMTPRRPGPTRKHYQPYAPPRDFAAYRSRVKFSRSADAPAYQQGQNQLYNELNLGRREEYDVLDKRRGRDPEMGGKPQRRKNPQEGLYNELQKDKMAEAYSEIGMKGERRRGKGHDGLYQGLSTATKDTYDALHMQALPPR

SEQ ID NO: 29843 - protein, 269 aa, synthetic construct
EGNTMKTNDTYMKFSWLTVPEKSLDKEHRCIVRHENNKNGVDQEIIFPPIKTDVITMDPKDNCSKDANDTLLLQLTNTSAYYMYLLLLLKSVVYFAIITCCLLRRTAFCCNGEKSRSKRSRLLHSDYMNMTPRRPGPTRKHYQPYAPPRDFAAYRSRVKFSRSADAPAYQQGQNQLYNELNLGRREEYDVLDKRRGRDPEMGGKPQRRKNPQEGLYNELQKDKMAEAYSEIGMKGERRRGKGHDGLYQGLSTATKDTYDALHMQALPPR

SEQ ID NO: 29844 - protein, 268 aa, synthetic construct
GNTMKTNDTYMKFSWLTVPEKSLDKEHRCIVRHENNKNGVDQEIIFPPIKTDVITMDPKDNCSKDANDTLLLQLTNTSAYYMYLLLLLKSVVYFAIITCCLLRRTAFCCNGEKSRSKRSRLLHSDYMNMTPRRPGPTRKHYQPYAPPRDFAAYRSRVKFSRSADAPAYQQGQNQLYNELNLGRREEYDVLDKRRGRDPEMGGKPQRRKNPQEGLYNELQKDKMAEAYSEIGMKGERRRGKGHDGLYQGLSTATKDTYDALHMQALPPR

SEQ ID NO: 29845 - protein, 267 aa, synthetic construct
NTMKTNDTYMKFSWLTVPEKSLDKEHRCIVRHENNKNGVDQEIIFPPIKTDVITMDPKDNCSKDANDTLLLQLTNTSAYYMYLLLLLKSVVYFAIITCCLLRRTAFCCNGEKSRSKRSRLLHSDYMNMTPRRPGPTRKHYQPYAPPRDFAAYRSRVKFSRSADAPAYQQGQNQLYNELNLGRREEYDVLDKRRGRDPEMGGKPQRRKNPQEGLYNELQKDKMAEAYSEIGMKGERRRGKGHDGLYQGLSTATKDTYDALHMQALPPR

SEQ ID NO: 29846 - protein, 266 aa, synthetic construct
TMKTNDTYMKFSWLTVPEKSLDKEHRCIVRHENNKNGVDQEIIFPPIKTDVITMDPKDNCSKDANDTLLLQLTNTSAYYMYLLLLLKSVVYFAIITCCLLRRTAFCCNGEKSRSKRSRLLHSDYMNMTPRRPGPTRKHYQPYAPPRDFAAYRSRVKFSRSADAPAYQQGQNQLYNELNLGRREEYDVLDKRRGRDPEMGGKPQRRKNPQEGLYNELQKDKMAEAYSEIGMKGERRRGKGHDGLYQGLSTATKDTYDALHMQALPPR

SEQ ID NO: 29847 - protein, 265 aa, synthetic construct
MKTNDTYMKFSWLTVPEKSLDKEHRCIVRHENNKNGVDQEIIFPPIKTDVITMDPKDNCSKDANDTLLLQLTNTSAYYMYLLLLLKSVVYFAIITCCLLRRTAFCCNGEKSRSKRSRLLHSDYMNMTPRRPGPTRKHYQPYAPPRDFAAYRSRVKFSRSADAPAYQQGQNQLYNELNLGRREEYDVLDKRRGRDPEMGGKPQRRKNPQEGLYNELQKDKMAEAYSEIGMKGERRRGKGHDGLYQGLSTATKDTYDALHMQALPPR

SEQ ID NO: 29848 - protein, 264 aa, synthetic construct
KTNDTYMKFSWLTVPEKSLDKEHRCIVRHENNKNGVDQEIIFPPIKTDVITMDPKDNCSKDANDTLLLQLTNTSAYYMYLLLLLKSVVYFAIITCCLLRRTAFCCNGEKSRSKRSRLLHSDYMNMTPRRPGPTRKHYQPYAPPRDFAAYRSRVKFSRSADAPAYQQGQNQLYNELNLGRREEYDVLDKRRGRDPEMGGKPQRRKNPQEGLYNELQKDKMAEAYSEIGMKGERRRGKGHDGLYQGLSTATKDTYDALHMQALPPR

SEQ ID NO: 29849 - protein, 263 aa, synthetic construct
TNDTYMKFSWLTVPEKSLDKEHRCIVRHENNKNGVDQEIIFPPIKTDVITMDPKDNCSKDANDTLLLQLTNTSAYYMYLLLLLKSVVYFAIITCCLLRRTAFCCNGEKSRSKRSRLLHSDYMNMTPRRPGPTRKHYQPYAPPRDFAAYRSRVKFSRSADAPAYQQGQNQLYNELNLGRREEYDVLDKRRGRDPEMGGKPQRRKNPQEGLYNELQKDKMAEAYSEIGMKGERRRGKGHDGLYQGLSTATKDTYDALHMQALPPR

SEQ ID NO: 29850 - protein, 262 aa, synthetic construct
NDTYMKFSWLTVPEKSLDKEHRCIVRHENNKNGVDQEIIFPPIKTDVITMDPKDNCSKDANDTLLLQLTNTSAYYMYLLLLLKSVVYFAIITCCLLRRTAFCCNGEKSRSKRSRLLHSDYMNMTPRRPGPTRKHYQPYAPPRDFAAYRSRVKFSRSADAPAYQQGQNQLYNELNLGRREEYDVLDKRRGRDPEMGGKPQRRKNPQEGLYNELQKDKMAEAYSEIGMKGERRRGKGHDGLYQGLSTATKDTYDALHMQALPPR

SEQ ID NO: 29851 - protein, 261 aa, synthetic construct
DTYMKFSWLTVPEKSLDKEHRCIVRHENNKNGVDQEIIFPPIKTDVITMDPKDNCSKDANDTLLLQLTNTSAYYMYLLLLLKSVVYFAIITCCLLRRTAFCCNGEKSRSKRSRLLHSDYMNMTPRRPGPTRKHYQPYAPPRDFAAYRSRVKFSRSADAPAYQQGQNQLYNELNLGRREEYDVLDKRRGRDPEMGGKPQRRKNPQEGLYNELQKDKMAEAYSEIGMKGERRRGKGHDGLYQGLSTATKDTYDALHMQALPPR

SEQ ID NO: 29852 - protein, 260 aa, synthetic construct
TYMKFSWLTVPEKSLDKEHRCIVRHENNKNGVDQEIIFPPIKTDVITMDPKDNCSKDANDTLLLQLTNTSAYYMYLLLLLKSVVYFAIITCCLLRRTAFCCNGEKSRSKRSRLLHSDYMNMTPRRPGPTRKHYQPYAPPRDFAAYRSRVKFSRSADAPAYQQGQNQLYNELNLGRREEYDVLDKRRGRDPEMGGKPQRRKNPQEGLYNELQKDKMAEAYSEIGMKGERRRGKGHDGLYQGLSTATKDTYDALHMQALPPR

SEQ ID NO: 29853 - protein, 259 aa, synthetic construct
YMKFSWLTVPEKSLDKEHRCIVRHENNKNGVDQEIIFPPIKTDVITMDPKDNCSKDANDTLLLQLTNTSAYYMYLLLLLKSVVYFAIITCCLLRRTAFCCNGEKSRSKRSRLLHSDYMNMTPRRPGPTRKHYQPYAPPRDFAAYRSRVKFSRSADAPAYQQGQNQLYNELNLGRREEYDVLDKRRGRDPEMGGKPQRRKNPQEGLYNELQKDKMAEAYSEIGMKGERRRGKGHDGLYQGLSTATKDTYDALHMQALPPR

SEQ ID NO: 29854 - protein, 258 aa, synthetic construct
MKFSWLTVPEKSLDKEHRCIVRHENNKNGVDQEIIFPPIKTDVITMDPKDNCSKDANDTLLLQLTNTSAYYMYLLLLLKSVVYFAIITCCLLRRTAFCCNGEKSRSKRSRLLHSDYMNMTPRRPGPTRKHYQPYAPPRDFAAYRSRVKFSRSADAPAYQQGQNQLYNELNLGRREEYDVLDKRRGRDPEMGGKPQRRKNPQEGLYNELQKDKMAEAYSEIGMKGERRRGKGHDGLYQGLSTATKDTYDALHMQALPPR

SEQ ID NO: 29855 - protein, 257 aa, synthetic construct
KFSWLTVPEKSLDKEHRCIVRHENNKNGVDQEIIFPPIKTDVITMDPKDNCSKDANDTLLLQLTNTSAYYMYLLLLLKSVVYFAIITCCLLRRTAFCCNGEKSRSKRSRLLHSDYMNMTPRRPGPTRKHYQPYAPPRDFAAYRSRVKFSRSADAPAYQQGQNQLYNELNLGRREEYDVLDKRRGRDPEMGGKPQRRKNPQEGLYNELQKDKMAEAYSEIGMKGERRRGKGHDGLYQGLSTATKDTYDALHMQALPPR

SEQ ID NO: 29856 - protein, 256 aa, synthetic construct
FSWLTVPEKSLDKEHRCIVRHENNKNGVDQEIIFPPIKTDVITMDPKDNCSKDANDTLLLQLTNTSAYYMYLLLLLKSVVYFAIITCCLLRRTAFCCNGEKSRSKRSRLLHSDYMNMTPRRPGPTRKHYQPYAPPRDFAAYRSRVKFSRSADAPAYQQGQNQLYNELNLGRREEYDVLDKRRGRDPEMGGKPQRRKNPQEGLYNELQKDKMAEAYSEIGMKGERRRGKGHDGLYQGLSTATKDTYDALHMQALPPR

SEQ ID NO: 29857 - protein, 255 aa, synthetic construct
SWLTVPEKSLDKEHRCIVRHENNKNGVDQEIIFPPIKTDVITMDPKDNCSKDANDTLLLQLTNTSAYYMYLLLLLKSVVYFAIITCCLLRRTAFCCNGEKSRSKRSRLLHSDYMNMTPRRPGPTRKHYQPYAPPRDFAAYRSRVKFSRSADAPAYQQGQNQLYNELNLGRREEYDVLDKRRGRDPEMGGKPQRRKNPQEGLYNELQKDKMAEAYSEIGMKGERRRGKGHDGLYQGLSTATKDTYDALHMQALPPR

SEQ ID NO: 29858 - protein, 254 aa, synthetic construct
WLTVPEKSLDKEHRCIVRHENNKNGVDQEIIFPPIKTDVITMDPKDNCSKDANDTLLLQLTNTSAYYMYLLLLLKSVVYFAIITCCLLRRTAFCCNGEKSRSKRSRLLHSDYMNMTPRRPGPTRKHYQPYAPPRDFAAYRSRVKFSRSADAPAYQQGQNQLYNELNLGRREEYDVLDKRRGRDPEMGGKPQRRKNPQEGLYNELQKDKMAEAYSEIGMKGERRRGKGHDGLYQGLSTATKDTYDALHMQALPPR

SEQ ID NO: 29859 - protein, 253 aa, synthetic construct
LTVPEKSLDKEHRCIVRHENNKNGVDQEIIFPPIKTDVITMDPKDNCSKDANDTLLLQLTNTSAYYMYLLLLLKSVVYFAIITCCLLRRTAFCCNGEKSRSKRSRLLHSDYMNMTPRRPGPTRKHYQPYAPPRDFAAYRSRVKFSRSADAPAYQQGQNQLYNELNLGRREEYDVLDKRRGRDPEMGGKPQRRKNPQEGLYNELQKDKMAEAYSEIGMKGERRRGKGHDGLYQGLSTATKDTYDALHMQALPPR

SEQ ID NO: 29860 - protein, 252 aa, synthetic construct
TVPEKSLDKEHRCIVRHENNKNGVDQEIIFPPIKTDVITMDPKDNCSKDANDTLLLQLTNTSAYYMYLLLLLKSVVYFAIITCCLLRRTAFCCNGEKSRSKRSRLLHSDYMNMTPRRPGPTRKHYQPYAPPRDFAAYRSRVKFSRSADAPAYQQGQNQLYNELNLGRREEYDVLDKRRGRDPEMGGKPQRRKNPQEGLYNELQKDKMAEAYSEIGMKGERRRGKGHDGLYQGLSTATKDTYDALHMQALPPR

SEQ ID NO: 29861 - protein, 251 aa, synthetic construct
VPEKSLDKEHRCIVRHENNKNGVDQEIIFPPIKTDVITMDPKDNCSKDANDTLLLQLTNTSAYYMYLLLLLKSVVYFAIITCCLLRRTAFCCNGEKSRSKRSRLLHSDYMNMTPRRPGPTRKHYQPYAPPRDFAAYRSRVKFSRSADAPAYQQGQNQLYNELNLGRREEYDVLDKRRGRDPEMGGKPQRRKNPQEGLYNELQKDKMAEAYSEIGMKGERRRGKGHDGLYQGLSTATKDTYDALHMQALPPR

SEQ ID NO: 29862 - protein, 250 aa, synthetic construct
PEKSLDKEHRCIVRHENNKNGVDQEIIFPPIKTDVITMDPKDNCSKDANDTLLLQLTNTSAYYMYLLLLLKSVVYFAIITCCLLRRTAFCCNGEKSRSKRSRLLHSDYMNMTPRRPGPTRKHYQPYAPPRDFAAYRSRVKFSRSADAPAYQQGQNQLYNELNLGRREEYDVLDKRRGRDPEMGGKPQRRKNPQEGLYNELQKDKMAEAYSEIGMKGERRRGKGHDGLYQGLSTATKDTYDALHMQALPPR

SEQ ID NO: 29863 - protein, 249 aa, synthetic construct
EKSLDKEHRCIVRHENNKNGVDQEIIFPPIKTDVITMDPKDNCSKDANDTLLLQLTNTSAYYMYLLLLLKSVVYFAIITCCLLRRTAFCCNGEKSRSKRSRLLHSDYMNMTPRRPGPTRKHYQPYAPPRDFAAYRSRVKFSRSADAPAYQQGQNQLYNELNLGRREEYDVLDKRRGRDPEMGGKPQRRKNPQEGLYNELQKDKMAEAYSEIGMKGERRRGKGHDGLYQGLSTATKDTYDALHMQALPPR

SEQ ID NO: 29864 - protein, 248 aa, synthetic construct
KSLDKEHRCIVRHENNKNGVDQEIIFPPIKTDVITMDPKDNCSKDANDTLLLQLTNTSAYYMYLLLLLKSVVYFAIITCCLLRRTAFCCNGEKSRSKRSRLLHSDYMNMTPRRPGPTRKHYQPYAPPRDFAAYRSRVKFSRSADAPAYQQGQNQLYNELNLGRREEYDVLDKRRGRDPEMGGKPQRRKNPQEGLYNELQKDKMAEAYSEIGMKGERRRGKGHDGLYQGLSTATKDTYDALHMQALPPR

SEQ ID NO: 29865 - protein, 247 aa, synthetic construct
SLDKEHRCIVRHENNKNGVDQEIIFPPIKTDVITMDPKDNCSKDANDTLLLQLTNTSAYYMYLLLLLKSVVYFAIITCCLLRRTAFCCNGEKSRSKRSRLLHSDYMNMTPRRPGPTRKHYQPYAPPRDFAAYRSRVKFSRSADAPAYQQGQNQLYNELNLGRREEYDVLDKRRGRDPEMGGKPQRRKNPQEGLYNELQKDKMAEAYSEIGMKGERRRGKGHDGLYQGLSTATKDTYDALHMQALPPR

SEQ ID NO: 29866 - protein, 246 aa, synthetic construct
LDKEHRCIVRHENNKNGVDQEIIFPPIKTDVITMDPKDNCSKDANDTLLLQLTNTSAYYMYLLLLLKSVVYFAIITCCLLRRTAFCCNGEKSRSKRSRLLHSDYMNMTPRRPGPTRKHYQPYAPPRDFAAYRSRVKFSRSADAPAYQQGQNQLYNELNLGRREEYDVLDKRRGRDPEMGGKPQRRKNPQEGLYNELQKDKMAEAYSEIGMKGERRRGKGHDGLYQGLSTATKDTYDALHMQALPPR

SEQ ID NO: 29867 - protein, 245 aa, synthetic construct
DKEHRCIVRHENNKNGVDQEIIFPPIKTDVITMDPKDNCSKDANDTLLLQLTNTSAYYMYLLLLLKSVVYFAIITCCLLRRTAFCCNGEKSRSKRSRLLHSDYMNMTPRRPGPTRKHYQPYAPPRDFAAYRSRVKFSRSADAPAYQQGQNQLYNELNLGRREEYDVLDKRRGRDPEMGGKPQRRKNPQEGLYNELQKDKMAEAYSEIGMKGERRRGKGHDGLYQGLSTATKDTYDALHMQALPPR

SEQ ID NO: 29868 - protein, 244 aa, synthetic construct
KEHRCIVRHENNKNGVDQEIIFPPIKTDVITMDPKDNCSKDANDTLLLQLTNTSAYYMYLLLLLKSVVYFAIITCCLLRRTAFCCNGEKSRSKRSRLLHSDYMNMTPRRPGPTRKHYQPYAPPRDFAAYRSRVKFSRSADAPAYQQGQNQLYNELNLGRREEYDVLDKRRGRDPEMGGKPQRRKNPQEGLYNELQKDKMAEAYSEIGMKGERRRGKGHDGLYQGLSTATKDTYDALHMQALPPR

SEQ ID NO: 29869 - protein, 243 aa, synthetic construct
EHRCIVRHENNKNGVDQEIIFPPIKTDVITMDPKDNCSKDANDTLLLQLTNTSAYYMYLLLLLKSVVYFAIITCCLLRRTAFCCNGEKSRSKRSRLLHSDYMNMTPRRPGPTRKHYQPYAPPRDFAAYRSRVKFSRSADAPAYQQGQNQLYNELNLGRREEYDVLDKRRGRDPEMGGKPQRRKNPQEGLYNELQKDKMAEAYSEIGMKGERRRGKGHDGLYQGLSTATKDTYDALHMQALPPR

SEQ ID NO: 29870 - protein, 242 aa, synthetic construct
HRCIVRHENNKNGVDQEIIFPPIKTDVITMDPKDNCSKDANDTLLLQLTNTSAYYMYLLLLLKSVVYFAIITCCLLRRTAFCCNGEKSRSKRSRLLHSDYMNMTPRRPGPTRKHYQPYAPPRDFAAYRSRVKFSRSADAPAYQQGQNQLYNELNLGRREEYDVLDKRRGRDPEMGGKPQRRKNPQEGLYNELQKDKMAEAYSEIGMKGERRRGKGHDGLYQGLSTATKDTYDALHMQALPPR

SEQ ID NO: 29871 - protein, 241 aa, synthetic construct
RCIVRHENNKNGVDQEIIFPPIKTDVITMDPKDNCSKDANDTLLLQLTNTSAYYMYLLLLLKSVVYFAIITCCLLRRTAFCCNGEKSRSKRSRLLHSDYMNMTPRRPGPTRKHYQPYAPPRDFAAYRSRVKFSRSADAPAYQQGQNQLYNELNLGRREEYDVLDKRRGRDPEMGGKPQRRKNPQEGLYNELQKDKMAEAYSEIGMKGERRRGKGHDGLYQGLSTATKDTYDALHMQALPPR

SEQ ID NO: 29872 - protein, 240 aa, synthetic construct
CIVRHENNKNGVDQEIIFPPIKTDVITMDPKDNCSKDANDTLLLQLTNTSAYYMYLLLLLKSVVYFAIITCCLLRRTAFCCNGEKSRSKRSRLLHSDYMNMTPRRPGPTRKHYQPYAPPRDFAAYRSRVKFSRSADAPAYQQGQNQLYNELNLGRREEYDVLDKRRGRDPEMGGKPQRRKNPQEGLYNELQKDKMAEAYSEIGMKGERRRGKGHDGLYQGLSTATKDTYDALHMQALPPR

SEQ ID NO: 29873 - protein, 239 aa, synthetic construct
IVRHENNKNGVDQEIIFPPIKTDVITMDPKDNCSKDANDTLLLQLTNTSAYYMYLLLLLKSVVYFAIITCCLLRRTAFCCNGEKSRSKRSRLLHSDYMNMTPRRPGPTRKHYQPYAPPRDFAAYRSRVKFSRSADAPAYQQGQNQLYNELNLGRREEYDVLDKRRGRDPEMGGKPQRRKNPQEGLYNELQKDKMAEAYSEIGMKGERRRGKGHDGLYQGLSTATKDTYDALHMQALPPR

SEQ ID NO: 29874 - protein, 238 aa, synthetic construct
VRHENNKNGVDQEIIFPPIKTDVITMDPKDNCSKDANDTLLLQLTNTSAYYMYLLLLLKSVVYFAIITCCLLRRTAFCCNGEKSRSKRSRLLHSDYMNMTPRRPGPTRKHYQPYAPPRDFAAYRSRVKFSRSADAPAYQQGQNQLYNELNLGRREEYDVLDKRRGRDPEMGGKPQRRKNPQEGLYNELQKDKMAEAYSEIGMKGERRRGKGHDGLYQGLSTATKDTYDALHMQALPPR

SEQ ID NO: 29875 - protein, 237 aa, synthetic construct
RHENNKNGVDQEIIFPPIKTDVITMDPKDNCSKDANDTLLLQLTNTSAYYMYLLLLLKSVVYFAIITCCLLRRTAFCCNGEKSRSKRSRLLHSDYMNMTPRRPGPTRKHYQPYAPPRDFAAYRSRVKFSRSADAPAYQQGQNQLYNELNLGRREEYDVLDKRRGRDPEMGGKPQRRKNPQEGLYNELQKDKMAEAYSEIGMKGERRRGKGHDGLYQGLSTATKDTYDALHMQALPPR

SEQ ID NO: 29876 - protein, 236 aa, synthetic construct
HENNKNGVDQEIIFPPIKTDVITMDPKDNCSKDANDTLLLQLTNTSAYYMYLLLLLKSVVYFAIITCCLLRRTAFCCNGEKSRSKRSRLLHSDYMNMTPRRPGPTRKHYQPYAPPRDFAAYRSRVKFSRSADAPAYQQGQNQLYNELNLGRREEYDVLDKRRGRDPEMGGKPQRRKNPQEGLYNELQKDKMAEAYSEIGMKGERRRGKGHDGLYQGLSTATKDTYDALHMQALPPR

SEQ ID NO: 29877 - protein, 235 aa, synthetic construct
ENNKNGVDQEIIFPPIKTDVITMDPKDNCSKDANDTLLLQLTNTSAYYMYLLLLLKSVVYFAIITCCLLRRTAFCCNGEKSRSKRSRLLHSDYMNMTPRRPGPTRKHYQPYAPPRDFAAYRSRVKFSRSADAPAYQQGQNQLYNELNLGRREEYDVLDKRRGRDPEMGGKPQRRKNPQEGLYNELQKDKMAEAYSEIGMKGERRRGKGHDGLYQGLSTATKDTYDALHMQALPPR

SEQ ID NO: 29878 - protein, 234 aa, synthetic construct
NNKNGVDQEIIFPPIKTDVITMDPKDNCSKDANDTLLLQLTNTSAYYMYLLLLLKSVVYFAIITCCLLRRTAFCCNGEKSRSKRSRLLHSDYMNMTPRRPGPTRKHYQPYAPPRDFAAYRSRVKFSRSADAPAYQQGQNQLYNELNLGRREEYDVLDKRRGRDPEMGGKPQRRKNPQEGLYNELQKDKMAEAYSEIGMKGERRRGKGHDGLYQGLSTATKDTYDALHMQALPPR

SEQ ID NO: 29879 - protein, 233 aa, synthetic construct
NKNGVDQEIIFPPIKTDVITMDPKDNCSKDANDTLLLQLTNTSAYYMYLLLLLKSVVYFAIITCCLLRRTAFCCNGEKSRSKRSRLLHSDYMNMTPRRPGPTRKHYQPYAPPRDFAAYRSRVKFSRSADAPAYQQGQNQLYNELNLGRREEYDVLDKRRGRDPEMGGKPQRRKNPQEGLYNELQKDKMAEAYSEIGMKGERRRGKGHDGLYQGLSTATKDTYDALHMQALPPR

SEQ ID NO: 29880 - protein, 232 aa, synthetic construct
KNGVDQEIIFPPIKTDVITMDPKDNCSKDANDTLLLQLTNTSAYYMYLLLLLKSVVYFAIITCCLLRRTAFCCNGEKSRSKRSRLLHSDYMNMTPRRPGPTRKHYQPYAPPRDFAAYRSRVKFSRSADAPAYQQGQNQLYNELNLGRREEYDVLDKRRGRDPEMGGKPQRRKNPQEGLYNELQKDKMAEAYSEIGMKGERRRGKGHDGLYQGLSTATKDTYDALHMQALPPR

SEQ ID NO: 29881 - protein, 231 aa, synthetic construct
NGVDQEIIFPPIKTDVITMDPKDNCSKDANDTLLLQLTNTSAYYMYLLLLLKSVVYFAIITCCLLRRTAFCCNGEKSRSKRSRLLHSDYMNMTPRRPGPTRKHYQPYAPPRDFAAYRSRVKFSRSADAPAYQQGQNQLYNELNLGRREEYDVLDKRRGRDPEMGGKPQRRKNPQEGLYNELQKDKMAEAYSEIGMKGERRRGKGHDGLYQGLSTATKDTYDALHMQALPPR

SEQ ID NO: 29882 - protein, 230 aa, synthetic construct
GVDQEIIFPPIKTDVITMDPKDNCSKDANDTLLLQLTNTSAYYMYLLLLLKSVVYFAIITCCLLRRTAFCCNGEKSRSKRSRLLHSDYMNMTPRRPGPTRKHYQPYAPPRDFAAYRSRVKFSRSADAPAYQQGQNQLYNELNLGRREEYDVLDKRRGRDPEMGGKPQRRKNPQEGLYNELQKDKMAEAYSEIGMKGERRRGKGHDGLYQGLSTATKDTYDALHMQALPPR

SEQ ID NO: 29883 - protein, 229 aa, synthetic construct
VDQEIIFPPIKTDVITMDPKDNCSKDANDTLLLQLTNTSAYYMYLLLLLKSVVYFAIITCCLLRRTAFCCNGEKSRSKRSRLLHSDYMNMTPRRPGPTRKHYQPYAPPRDFAAYRSRVKFSRSADAPAYQQGQNQLYNELNLGRREEYDVLDKRRGRDPEMGGKPQRRKNPQEGLYNELQKDKMAEAYSEIGMKGERRRGKGHDGLYQGLSTATKDTYDALHMQALPPR

SEQ ID NO: 29884 - protein, 228 aa, synthetic construct
DQEIIFPPIKTDVITMDPKDNCSKDANDTLLLQLTNTSAYYMYLLLLLKSVVYFAIITCCLLRRTAFCCNGEKSRSKRSRLLHSDYMNMTPRRPGPTRKHYQPYAPPRDFAAYRSRVKFSRSADAPAYQQGQNQLYNELNLGRREEYDVLDKRRGRDPEMGGKPQRRKNPQEGLYNELQKDKMAEAYSEIGMKGERRRGKGHDGLYQGLSTATKDTYDALHMQALPPR

SEQ ID NO: 29885 - protein, 227 aa, synthetic construct
QEIIFPPIKTDVITMDPKDNCSKDANDTLLLQLTNTSAYYMYLLLLLKSVVYFAIITCCLLRRTAFCCNGEKSRSKRSRLLHSDYMNMTPRRPGPTRKHYQPYAPPRDFAAYRSRVKFSRSADAPAYQQGQNQLYNELNLGRREEYDVLDKRRGRDPEMGGKPQRRKNPQEGLYNELQKDKMAEAYSEIGMKGERRRGKGHDGLYQGLSTATKDTYDALHMQALPPR

SEQ ID NO: 29886 - protein, 307 aa, synthetic construct; identical to SEQ ID NO: 29317

SEQ ID NO: 29887 - protein, 306 aa, synthetic construct
QPHTKPSVFVMKNGTNVACLVKEFYPKDIRINLVSSKKITEFDPAIVISPSGKYNAVKLGKYEDSNSVTCSVQHDNKTVHSTDFEVKTDSTDHVKPKETENTKQPSKSCHKPKAIVHTEKVNMMSLTVLGLRMLFAKTVAVNFLLTAKLFFLRSKRSRLLHSDYMNMTPRRPGPTRKHYQPYAPPRDFAAYRSRVKFSRSADAPAYQQGQNQLYNELNLGRREEYDVLDKRRGRDPEMGGKPQRRKNPQEGLYNELQKDKMAEAYSEIGMKGERRRGKGHDGLYQGLSTATKDTYDALHMQALPPR

SEQ ID NO: 29888 - protein, 305 aa, synthetic construct
PHTKPSVFVMKNGTNVACLVKEFYPKDIRINLVSSKKITEFDPAIVISPSGKYNAVKLGKYEDSNSVTCSVQHDNKTVHSTDFEVKTDSTDHVKPKETENTKQPSKSCHKPKAIVHTEKVNMMSLTVLGLRMLFAKTVAVNFLLTAKLFFLRSKRSRLLHSDYMNMTPRRPGPTRKHYQPYAPPRDFAAYRSRVKFSRSADAPAYQQGQNQLYNELNLGRREEYDVLDKRRGRDPEMGGKPQRRKNPQEGLYNELQKDKMAEAYSEIGMKGERRRGKGHDGLYQGLSTATKDTYDALHMQALPPR

SEQ ID NO: 29889 - protein, 304 aa, synthetic construct
HTKPSVFVMKNGTNVACLVKEFYPKDIRINLVSSKKITEFDPAIVISPSGKYNAVKLGKYEDSNSVTCSVQHDNKTVHSTDFEVKTDSTDHVKPKETENTKQPSKSCHKPKAIVHTEKVNMMSLTVLGLRMLFAKTVAVNFLLTAKLFFLRSKRSRLLHSDYMNMTPRRPGPTRKHYQPYAPPRDFAAYRSRVKFSRSADAPAYQQGQNQLYNELNLGRREEYDVLDKRRGRDPEMGGKPQRRKNPQEGLYNELQKDKMAEAYSEIGMKGERRRGKGHDGLYQGLSTATKDTYDALHMQALPPR

SEQ ID NO: 29890 - protein, 303 aa, synthetic construct
TKPSVFVMKNGTNVACLVKEFYPKDIRINLVSSKKITEFDPAIVISPSGKYNAVKLGKYEDSNSVTCSVQHDNKTVHSTDFEVKTDSTDHVKPKETENTKQPSKSCHKPKAIVHTEKVNMMSLTVLGLRMLFAKTVAVNFLLTAKLFFLRSKRSRLLHSDYMNMTPRRPGPTRKHYQPYAPPRDFAAYRSRVKFSRSADAPAYQQGQNQLYNELNLGRREEYDVLDKRRGRDPEMGGKPQRRKNPQEGLYNELQKDKMAEAYSEIGMKGERRRGKGHDGLYQGLSTATKDTYDALHMQALPPR

SEQ ID NO: 29891 - protein, 302 aa, synthetic construct
KPSVFVMKNGTNVACLVKEFYPKDIRINLVSSKKITEFDPAIVISPSGKYNAVKLGKYEDSNSVTCSVQHDNKTVHSTDFEVKTDSTDHVKPKETENTKQPSKSCHKPKAIVHTEKVNMMSLTVLGLRMLFAKTVAVNFLLTAKLFFLRSKRSRLLHSDYMNMTPRRPGPTRKHYQPYAPPRDFAAYRSRVKFSRSADAPAYQQGQNQLYNELNLGRREEYDVLDKRRGRDPEMGGKPQRRKNPQEGLYNELQKDKMAEAYSEIGMKGERRRGKGHDGLYQGLSTATKDTYDALHMQALPPR

SEQ ID NO: 29892 - protein, 300 aa, synthetic construct
SVFVMKNGTNVACLVKEFYPKDIRINLVSSKKITEFDPAIVISPSGKYNAVKLGKYEDSNSVTCSVQHDNKTVHSTDFEVKTDSTDHVKPKETENTKQPSKSCHKPKAIVHTEKVNMMSLTVLGLRMLFAKTVAVNFLLTAKLFFLRSKRSRLLHSDYMNMTPRRPGPTRKHYQPYAPPRDFAAYRSRVKFSRSADAPAYQQGQNQLYNELNLGRREEYDVLDKRRGRDPEMGGKPQRRKNPQEGLYNELQKDKMAEAYSEIGMKGERRRGKGHDGLYQGLSTATKDTYDALHMQALPPR

SEQ ID NO: 29893 - protein, 299 aa, synthetic construct
VFVMKNGTNVACLVKEFYPKDIRINLVSSKKITEFDPAIVISPSGKYNAVKLGKYEDSNSVTCSVQHDNKTVHSTDFEVKTDSTDHVKPKETENTKQPSKSCHKPKAIVHTEKVNMMSLTVLGLRMLFAKTVAVNFLLTAKLFFLRSKRSRLLHSDYMNMTPRRPGPTRKHYQPYAPPRDFAAYRSRVKFSRSADAPAYQQGQNQLYNELNLGRREEYDVLDKRRGRDPEMGGKPQRRKNPQEGLYNELQKDKMAEAYSEIGMKGERRRGKGHDGLYQGLSTATKDTYDALHMQALPPR

SEQ ID NO: 29894 - protein, 298 aa, synthetic construct
FVMKNGTNVACLVKEFYPKDIRINLVSSKKITEFDPAIVISPSGKYNAVKLGKYEDSNSVTCSVQHDNKTVHSTDFEVKTDSTDHVKPKETENTKQPSKSCHKPKAIVHTEKVNMMSLTVLGLRMLFAKTVAVNFLLTAKLFFLRSKRSRLLHSDYMNMTPRRPGPTRKHYQPYAPPRDFAAYRSRVKFSRSADAPAYQQGQNQLYNELNLGRREEYDVLDKRRGRDPEMGGKPQRRKNPQEGLYNELQKDKMAEAYSEIGMKGERRRGKGHDGLYQGLSTATKDTYDALHMQALPPR

SEQ ID NO: 29895 - protein, 297 aa, synthetic construct
VMKNGTNVACLVKEFYPKDIRINLVSSKKITEFDPAIVISPSGKYNAVKLGKYEDSNSVTCSVQHDNKTVHSTDFEVKTDSTDHVKPKETENTKQPSKSCHKPKAIVHTEKVNMMSLTVLGLRMLFAKTVAVNFLLTAKLFFLRSKRSRLLHSDYMNMTPRRPGPTRKHYQPYAPPRDFAAYRSRVKFSRSADAPAYQQGQNQLYNELNLGRREEYDVLDKRRGRDPEMGGKPQRRKNPQEGLYNELQKDKMAEAYSEIGMKGERRRGKGHDGLYQGLSTATKDTYDALHMQALPPR

SEQ ID NO: 29896 - protein, 296 aa, synthetic construct
MKNGTNVACLVKEFYPKDIRINLVSSKKITEFDPAIVISPSGKYNAVKLGKYEDSNSVTCSVQHDNKTVHSTDFEVKTDSTDHVKPKETENTKQPSKSCHKPKAIVHTEKVNMMSLTVLGLRMLFAKTVAVNFLLTAKLFFLRSKRSRLLHSDYMNMTPRRPGPTRKHYQPYAPPRDFAAYRSRVKFSRSADAPAYQQGQNQLYNELNLGRREEYDVLDKRRGRDPEMGGKPQRRKNPQEGLYNELQKDKMAEAYSEIGMKGERRRGKGHDGLYQGLSTATKDTYDALHMQALPPR

SEQ ID NO: 29897 - protein, 295 aa, synthetic construct
KNGTNVACLVKEFYPKDIRINLVSSKKITEFDPAIVISPSGKYNAVKLGKYEDSNSVTCSVQHDNKTVHSTDFEVKTDSTDHVKPKETENTKQPSKSCHKPKAIVHTEKVNMMSLTVLGLRMLFAKTVAVNFLLTAKLFFLRSKRSRLLHSDYMNMTPRRPGPTRKHYQPYAPPRDFAAYRSRVKFSRSADAPAYQQGQNQLYNELNLGRREEYDVLDKRRGRDPEMGGKPQRRKNPQEGLYNELQKDKMAEAYSEIGMKGERRRGKGHDGLYQGLSTATKDTYDALHMQALPPR

SEQ ID NO: 29898 - protein, 294 aa, synthetic construct
NGTNVACLVKEFYPKDIRINLVSSKKITEFDPAIVISPSGKYNAVKLGKYEDSNSVTCSVQHDNKTVHSTDFEVKTDSTDHVKPKETENTKQPSKSCHKPKAIVHTEKVNMMSLTVLGLRMLFAKTVAVNFLLTAKLFFLRSKRSRLLHSDYMNMTPRRPGPTRKHYQPYAPPRDFAAYRSRVKFSRSADAPAYQQGQNQLYNELNLGRREEYDVLDKRRGRDPEMGGKPQRRKNPQEGLYNELQKDKMAEAYSEIGMKGERRRGKGHDGLYQGLSTATKDTYDALHMQALPPR

SEQ ID NO: 29899 - protein, 293 aa, synthetic construct
GTNVACLVKEFYPKDIRINLVSSKKITEFDPAIVISPSGKYNAVKLGKYEDSNSVTCSVQHDNKTVHSTDFEVKTDSTDHVKPKETENTKQPSKSCHKPKAIVHTEKVNMMSLTVLGLRMLFAKTVAVNFLLTAKLFFLRSKRSRLLHSDYMNMTPRRPGPTRKHYQPYAPPRDFAAYRSRVKFSRSADAPAYQQGQNQLYNELNLGRREEYDVLDKRRGRDPEMGGKPQRRKNPQEGLYNELQKDKMAEAYSEIGMKGERRRGKGHDGLYQGLSTATKDTYDALHMQALPPR

SEQ ID NO: 29900 - protein, 292 aa, synthetic construct
TNVACLVKEFYPKDIRINLVSSKKITEFDPAIVISPSGKYNAVKLGKYEDSNSVTCSVQHDNKTVHSTDFEVKTDSTDHVKPKETENTKQPSKSCHKPKAIVHTEKVNMMSLTVLGLRMLFAKTVAVNFLLTAKLFFLRSKRSRLLHSDYMNMTPRRPGPTRKHYQPYAPPRDFAAYRSRVKFSRSADAPAYQQGQNQLYNELNLGRREEYDVLDKRRGRDPEMGGKPQRRKNPQEGLYNELQKDKMAEAYSEIGMKGERRRGKGHDGLYQGLSTATKDTYDALHMQALPPR

SEQ ID NO: 29901 - protein, 291 aa, synthetic construct
NVACLVKEFYPKDIRINLVSSKKITEFDPAIVISPSGKYNAVKLGKYEDSNSVTCSVQHDNKTVHSTDFEVKTDSTDHVKPKETENTKQPSKSCHKPKAIVHTEKVNMMSLTVLGLRMLFAKTVAVNFLLTAKLFFLRSKRSRLLHSDYMNMTPRRPGPTRKHYQPYAPPRDFAAYRSRVKFSRSADAPAYQQGQNQLYNELNLGRREEYDVLDKRRGRDPEMGGKPQRRKNPQEGLYNELQKDKMAEAYSEIGMKGERRRGKGHDGLYQGLSTATKDTYDALHMQALPPR

SEQ ID NO: 29902 - protein, 290 aa, synthetic construct
VACLVKEFYPKDIRINLVSSKKITEFDPAIVISPSGKYNAVKLGKYEDSNSVTCSVQHDNKTVHSTDFEVKTDSTDHVKPKETENTKQPSKSCHKPKAIVHTEKVNMMSLTVLGLRMLFAKTVAVNFLLTAKLFFLRSKRSRLLHSDYMNMTPRRPGPTRKHYQPYAPPRDFAAYRSRVKFSRSADAPAYQQGQNQLYNELNLGRREEYDVLDKRRGRDPEMGGKPQRRKNPQEGLYNELQKDKMAEAYSEIGMKGERRRGKGHDGLYQGLSTATKDTYDALHMQALPPR

SEQ ID NO: 29903 - protein, 289 aa, synthetic construct
ACLVKEFYPKDIRINLVSSKKITEFDPAIVISPSGKYNAVKLGKYEDSNSVTCSVQHDNKTVHSTDFEVKTDSTDHVKPKETENTKQPSKSCHKPKAIVHTEKVNMMSLTVLGLRMLFAKTVAVNFLLTAKLFFLRSKRSRLLHSDYMNMTPRRPGPTRKHYQPYAPPRDFAAYRSRVKFSRSADAPAYQQGQNQLYNELNLGRREEYDVLDKRRGRDPEMGGKPQRRKNPQEGLYNELQKDKMAEAYSEIGMKGERRRGKGHDGLYQGLSTATKDTYDALHMQALPPR

SEQ ID NO: 29904 - protein, 288 aa, synthetic construct
CLVKEFYPKDIRINLVSSKKITEFDPAIVISPSGKYNAVKLGKYEDSNSVTCSVQHDNKTVHSTDFEVKTDSTDHVKPKETENTKQPSKSCHKPKAIVHTEKVNMMSLTVLGLRMLFAKTVAVNFLLTAKLFFLRSKRSRLLHSDYMNMTPRRPGPTRKHYQPYAPPRDFAAYRSRVKFSRSADAPAYQQGQNQLYNELNLGRREEYDVLDKRRGRDPEMGGKPQRRKNPQEGLYNELQKDKMAEAYSEIGMKGERRRGKGHDGLYQGLSTATKDTYDALHMQALPPR

SEQ ID NO: 29905 - protein, 287 aa, synthetic construct
LVKEFYPKDIRINLVSSKKITEFDPAIVISPSGKYNAVKLGKYEDSNSVTCSVQHDNKTVHSTDFEVKTDSTDHVKPKETENTKQPSKSCHKPKAIVHTEKVNMMSLTVLGLRMLFAKTVAVNFLLTAKLFFLRSKRSRLLHSDYMNMTPRRPGPTRKHYQPYAPPRDFAAYRSRVKFSRSADAPAYQQGQNQLYNELNLGRREEYDVLDKRRGRDPEMGGKPQRRKNPQEGLYNELQKDKMAEAYSEIGMKGERRRGKGHDGLYQGLSTATKDTYDALHMQALPPR

SEQ ID NO: 29906 - protein, 286 aa, synthetic construct
VKEFYPKDIRINLVSSKKITEFDPAIVISPSGKYNAVKLGKYEDSNSVTCSVQHDNKTVHSTDFEVKTDSTDHVKPKETENTKQPSKSCHKPKAIVHTEKVNMMSLTVLGLRMLFAKTVAVNFLLTAKLFFLRSKRSRLLHSDYMNMTPRRPGPTRKHYQPYAPPRDFAAYRSRVKFSRSADAPAYQQGQNQLYNELNLGRREEYDVLDKRRGRDPEMGGKPQRRKNPQEGLYNELQKDKMAEAYSEIGMKGERRRGKGHDGLYQGLSTATKDTYDALHMQALPPR

SEQ ID NO: 29907 - protein, 285 aa, synthetic construct
KEFYPKDIRINLVSSKKITEFDPAIVISPSGKYNAVKLGKYEDSNSVTCSVQHDNKTVHSTDFEVKTDSTDHVKPKETENTKQPSKSCHKPKAIVHTEKVNMMSLTVLGLRMLFAKTVAVNFLLTAKLFFLRSKRSRLLHSDYMNMTPRRPGPTRKHYQPYAPPRDFAAYRSRVKFSRSADAPAYQQGQNQLYNELNLGRREEYDVLDKRRGRDPEMGGKPQRRKNPQEGLYNELQKDKMAEAYSEIGMKGERRRGKGHDGLYQGLSTATKDTYDALHMQALPPR

SEQ ID NO: 29908 - protein, 284 aa, synthetic construct
EFYPKDIRINLVSSKKITEFDPAIVISPSGKYNAVKLGKYEDSNSVTCSVQHDNKTVHSTDFEVKTDSTDHVKPKETENTKQPSKSCHKPKAIVHTEKVNMMSLTVLGLRMLFAKTVAVNFLLTAKLFFLRSKRSRLLHSDYMNMTPRRPGPTRKHYQPYAPPRDFAAYRSRVKFSRSADAPAYQQGQNQLYNELNLGRREEYDVLDKRRGRDPEMGGKPQRRKNPQEGLYNELQKDKMAEAYSEIGMKGERRRGKGHDGLYQGLSTATKDTYDALHMQALPPR

SEQ ID NO: 29909 - protein, 283 aa, synthetic construct
FYPKDIRINLVSSKKITEFDPAIVISPSGKYNAVKLGKYEDSNSVTCSVQHDNKTVHSTDFEVKTDSTDHVKPKETENTKQPSKSCHKPKAIVHTEKVNMMSLTVLGLRMLFAKTVAVNFLLTAKLFFLRSKRSRLLHSDYMNMTPRRPGPTRKHYQPYAPPRDFAAYRSRVKFSRSADAPAYQQGQNQLYNELNLGRREEYDVLDKRRGRDPEMGGKPQRRKNPQEGLYNELQKDKMAEAYSEIGMKGERRRGKGHDGLYQGLSTATKDTYDALHMQALPPR

SEQ ID NO: 29910 - protein, 282 aa, synthetic construct
YPKDIRINLVSSKKITEFDPAIVISPSGKYNAVKLGKYEDSNSVTCSVQHDNKTVHSTDFEVKTDSTDHVKPKETENTKQPSKSCHKPKAIVHTEKVNMMSLTVLGLRMLFAKTVAVNFLLTAKLFFLRSKRSRLLHSDYMNMTPRRPGPTRKHYQPYAPPRDFAAYRSRVKFSRSADAPAYQQGQNQLYNELNLGRREEYDVLDKRRGRDPEMGGKPQRRKNPQEGLYNELQKDKMAEAYSEIGMKGERRRGKGHDGLYQGLSTATKDTYDALHMQALPPR

SEQ ID NO: 29911 - protein, 281 aa, synthetic construct
PKDIRINLVSSKKITEFDPAIVISPSGKYNAVKLGKYEDSNSVTCSVQHDNKTVHSTDFEVKTDSTDHVKPKETENTKQPSKSCHKPKAIVHTEKVNMMSLTVLGLRMLFAKTVAVNFLLTAKLFFLRSKRSRLLHSDYMNMTPRRPGPTRKHYQPYAPPRDFAAYRSRVKFSRSADAPAYQQGQNQLYNELNLGRREEYDVLDKRRGRDPEMGGKPQRRKNPQEGLYNELQKDKMAEAYSEIGMKGERRRGKGHDGLYQGLSTATKDTYDALHMQALPPR

SEQ ID NO: 29912 - protein, 280 aa, synthetic construct
KDIRINLVSSKKITEFDPAIVISPSGKYNAVKLGKYEDSNSVTCSVQHDNKTVHSTDFEVKTDSTDHVKPKETENTKQPSKSCHKPKAIVHTEKVNMMSLTVLGLRMLFAKTVAVNFLLTAKLFFLRSKRSRLLHSDYMNMTPRRPGPTRKHYQPYAPPRDFAAYRSRVKFSRSADAPAYQQGQNQLYNELNLGRREEYDVLDKRRGRDPEMGGKPQRRKNPQEGLYNELQKDKMAEAYSEIGMKGERRRGKGHDGLYQGLSTATKDTYDALHMQALPPR

SEQ ID NO: 29913 - protein, 279 aa, synthetic construct
DIRINLVSSKKITEFDPAIVISPSGKYNAVKLGKYEDSNSVTCSVQHDNKTVHSTDFEVKTDSTDHVKPKETENTKQPSKSCHKPKAIVHTEKVNMMSLTVLGLRMLFAKTVAVNFLLTAKLFFLRSKRSRLLHSDYMNMTPRRPGPTRKHYQPYAPPRDFAAYRSRVKFSRSADAPAYQQGQNQLYNELNLGRREEYDVLDKRRGRDPEMGGKPQRRKNPQEGLYNELQKDKMAEAYSEIGMKGERRRGKGHDGLYQGLSTATKDTYDALHMQALPPR

SEQ ID NO: 29914 - protein, 278 aa, synthetic construct
IRINLVSSKKITEFDPAIVISPSGKYNAVKLGKYEDSNSVTCSVQHDNKTVHSTDFEVKTDSTDHVKPKETENTKQPSKSCHKPKAIVHTEKVNMMSLTVLGLRMLFAKTVAVNFLLTAKLFFLRSKRSRLLHSDYMNMTPRRPGPTRKHYQPYAPPRDFAAYRSRVKFSRSADAPAYQQGQNQLYNELNLGRREEYDVLDKRRGRDPEMGGKPQRRKNPQEGLYNELQKDKMAEAYSEIGMKGERRRGKGHDGLYQGLSTATKDTYDALHMQALPPR

SEQ ID NO: 29915 - protein, 277 aa, synthetic construct
RINLVSSKKITEFDPAIVISPSGKYNAVKLGKYEDSNSVTCSVQHDNKTVHSTDFEVKTDSTDHVKPKETENTKQPSKSCHKPKAIVHTEKVNMMSLTVLGLRMLFAKTVAVNFLLTAKLFFLRSKRSRLLHSDYMNMTPRRPGPTRKHYQPYAPPRDFAAYRSRVKFSRSADAPAYQQGQNQLYNELNLGRREEYDVLDKRRGRDPEMGGKPQRRKNPQEGLYNELQKDKMAEAYSEIGMKGERRRGKGHDGLYQGLSTATKDTYDALHMQALPPR

SEQ ID NO: 29916 - protein, 276 aa, synthetic construct
INLVSSKKITEFDPAIVISPSGKYNAVKLGKYEDSNSVTCSVQHDNKTVHSTDFEVKTDSTDHVKPKETENTKQPSKSCHKPKAIVHTEKVNMMSLTVLGLRMLFAKTVAVNFLLTAKLFFLRSKRSRLLHSDYMNMTPRRPGPTRKHYQPYAPPRDFAAYRSRVKFSRSADAPAYQQGQNQLYNELNLGRREEYDVLDKRRGRDPEMGGKPQRRKNPQEGLYNELQKDKMAEAYSEIGMKGERRRGKGHDGLYQGLSTATKDTYDALHMQALPPR

SEQ ID NO: 29917 - protein, 275 aa, synthetic construct
NLVSSKKITEFDPAIVISPSGKYNAVKLGKYEDSNSVTCSVQHDNKTVHSTDFEVKTDSTDHVKPKETENTKQPSKSCHKPKAIVHTEKVNMMSLTVLGLRMLFAKTVAVNFLLTAKLFFLRSKRSRLLHSDYMNMTPRRPGPTRKHYQPYAPPRDFAAYRSRVKFSRSADAPAYQQGQNQLYNELNLGRREEYDVLDKRRGRDPEMGGKPQRRKNPQEGLYNELQKDKMAEAYSEIGMKGERRRGKGHDGLYQGLSTATKDTYDALHMQALPPR

SEQ ID NO: 29918 - protein, 274 aa, synthetic construct
LVSSKKITEFDPAIVISPSGKYNAVKLGKYEDSNSVTCSVQHDNKTVHSTDFEVKTDSTDHVKPKETENTKQPSKSCHKPKAIVHTEKVNMMSLTVLGLRMLFAKTVAVNFLLTAKLFFLRSKRSRLLHSDYMNMTPRRPGPTRKHYQPYAPPRDFAAYRSRVKFSRSADAPAYQQGQNQLYNELNLGRREEYDVLDKRRGRDPEMGGKPQRRKNPQEGLYNELQKDKMAEAYSEIGMKGERRRGKGHDGLYQGLSTATKDTYDALHMQALPPR

SEQ ID NO: 29919 - protein, 273 aa, synthetic construct
VSSKKITEFDPAIVISPSGKYNAVKLGKYEDSNSVTCSVQHDNKTVHSTDFEVKTDSTDHVKPKETENTKQPSKSCHKPKAIVHTEKVNMMSLTVLGLRMLFAKTVAVNFLLTAKLFFLRSKRSRLLHSDYMNMTPRRPGPTRKHYQPYAPPRDFAAYRSRVKFSRSADAPAYQQGQNQLYNELNLGRREEYDVLDKRRGRDPEMGGKPQRRKNPQEGLYNELQKDKMAEAYSEIGMKGERRRGKGHDGLYQGLSTATKDTYDALHMQALPPR

SEQ ID NO: 29920 - protein, 272 aa, synthetic construct
SSKKITEFDPAIVISPSGKYNAVKLGKYEDSNSVTCSVQHDNKTVHSTDFEVKTDSTDHVKPKETENTKQPSKSCHKPKAIVHTEKVNMMSLTVLGLRMLFAKTVAVNFLLTAKLFFLRSKRSRLLHSDYMNMTPRRPGPTRKHYQPYAPPRDFAAYRSRVKFSRSADAPAYQQGQNQLYNELNLGRREEYDVLDKRRGRDPEMGGKPQRRKNPQEGLYNELQKDKMAEAYSEIGMKGERRRGKGHDGLYQGLSTATKDTYDALHMQALPPR

SEQ ID NO: 29921 - protein, 271 aa, synthetic construct
SKKITEFDPAIVISPSGKYNAVKLGKYEDSNSVTCSVQHDNKTVHSTDFEVKTDSTDHVKPKETENTKQPSKSCHKPKAIVHTEKVNMMSLTVLGLRMLFAKTVAVNFLLTAKLFFLRSKRSRLLHSDYMNMTPRRPGPTRKHYQPYAPPRDFAAYRSRVKFSRSADAPAYQQGQNQLYNELNLGRREEYDVLDKRRGRDPEMGGKPQRRKNPQEGLYNELQKDKMAEAYSEIGMKGERRRGKGHDGLYQGLSTATKDTYDALHMQALPPR

SEQ ID NO: 29922 - protein, 270 aa, synthetic construct
KKITEFDPAIVISPSGKYNAVKLGKYEDSNSVTCSVQHDNKTVHSTDFEVKTDSTDHVKPKETENTKQPSKSCHKPKAIVHTEKVNMMSLTVLGLRMLFAKTVAVNFLLTAKLFFLRSKRSRLLHSDYMNMTPRRPGPTRKHYQPYAPPRDFAAYRSRVKFSRSADAPAYQQGQNQLYNELNLGRREEYDVLDKRRGRDPEMGGKPQRRKNPQEGLYNELQKDKMAEAYSEIGMKGERRRGKGHDGLYQGLSTATKDTYDALHMQALPPR

SEQ ID NO: 29923 - protein, 269 aa, synthetic construct
KITEFDPAIVISPSGKYNAVKLGKYEDSNSVTCSVQHDNKTVHSTDFEVKTDSTDHVKPKETENTKQPSKSCHKPKAIVHTEKVNMMSLTVLGLRMLFAKTVAVNFLLTAKLFFLRSKRSRLLHSDYMNMTPRRPGPTRKHYQPYAPPRDFAAYRSRVKFSRSADAPAYQQGQNQLYNELNLGRREEYDVLDKRRGRDPEMGGKPQRRKNPQEGLYNELQKDKMAEAYSEIGMKGERRRGKGHDGLYQGLSTATKDTYDALHMQALPPR

SEQ ID NO: 29924 - protein, 268 aa, synthetic construct
ITEFDPAIVISPSGKYNAVKLGKYEDSNSVTCSVQHDNKTVHSTDFEVKTDSTDHVKPKETENTKQPSKSCHKPKAIVHTEKVNMMSLTVLGLRMLFAKTVAVNFLLTAKLFFLRSKRSRLLHSDYMNMTPRRPGPTRKHYQPYAPPRDFAAYRSRVKFSRSADAPAYQQGQNQLYNELNLGRREEYDVLDKRRGRDPEMGGKPQRRKNPQEGLYNELQKDKMAEAYSEIGMKGERRRGKGHDGLYQGLSTATKDTYDALHMQALPPR

SEQ ID NO: 29925 - protein, 267 aa, synthetic construct
TEFDPAIVISPSGKYNAVKLGKYEDSNSVTCSVQHDNKTVHSTDFEVKTDSTDHVKPKETENTKQPSKSCHKPKAIVHTEKVNMMSLTVLGLRMLFAKTVAVNFLLTAKLFFLRSKRSRLLHSDYMNMTPRRPGPTRKHYQPYAPPRDFAAYRSRVKFSRSADAPAYQQGQNQLYNELNLGRREEYDVLDKRRGRDPEMGGKPQRRKNPQEGLYNELQKDKMAEAYSEIGMKGERRRGKGHDGLYQGLSTATKDTYDALHMQALPPR

SEQ ID NO: 29926 - protein, 266 aa, synthetic construct
EFDPAIVISPSGKYNAVKLGKYEDSNSVTCSVQHDNKTVHSTDFEVKTDSTDHVKPKETENTKQPSKSCHKPKAIVHTEKVNMMSLTVLGLRMLFAKTVAVNFLLTAKLFFLRSKRSRLLHSDYMNMTPRRPGPTRKHYQPYAPPRDFAAYRSRVKFSRSADAPAYQQGQNQLYNELNLGRREEYDVLDKRRGRDPEMGGKPQRRKNPQEGLYNELQKDKMAEAYSEIGMKGERRRGKGHDGLYQGLSTATKDTYDALHMQALPPR

SEQ ID NO: 29927 - protein, 265 aa, synthetic construct
FDPAIVISPSGKYNAVKLGKYEDSNSVTCSVQHDNKTVHSTDFEVKTDSTDHVKPKETENTKQPSKSCHKPKAIVHTEKVNMMSLTVLGLRMLFAKTVAVNFLLTAKLFFLRSKRSRLLHSDYMNMTPRRPGPTRKHYQPYAPPRDFAAYRSRVKFSRSADAPAYQQGQNQLYNELNLGRREEYDVLDKRRGRDPEMGGKPQRRKNPQEGLYNELQKDKMAEAYSEIGMKGERRRGKGHDGLYQGLSTATKDTYDALHMQALPPR

SEQ ID NO: 29928 - protein, 264 aa, synthetic construct
DPAIVISPSGKYNAVKLGKYEDSNSVTCSVQHDNKTVHSTDFEVKTDSTDHVKPKETENTKQPSKSCHKPKAIVHTEKVNMMSLTVLGLRMLFAKTVAVNFLLTAKLFFLRSKRSRLLHSDYMNMTPRRPGPTRKHYQPYAPPRDFAAYRSRVKFSRSADAPAYQQGQNQLYNELNLGRREEYDVLDKRRGRDPEMGGKPQRRKNPQEGLYNELQKDKMAEAYSEIGMKGERRRGKGHDGLYQGLSTATKDTYDALHMQALPPR

SEQ ID NO: 29929 - protein, 263 aa, synthetic construct
PAIVISPSGKYNAVKLGKYEDSNSVTCSVQHDNKTVHSTDFEVKTDSTDHVKPKETENTKQPSKSCHKPKAIVHTEKVNMMSLTVLGLRMLFAKTVAVNFLLTAKLFFLRSKRSRLLHSDYMNMTPRRPGPTRKHYQPYAPPRDFAAYRSRVKFSRSADAPAYQQGQNQLYNELNLGRREEYDVLDKRRGRDPEMGGKPQRRKNPQEGLYNELQKDKMAEAYSEIGMKGERRRGKGHDGLYQGLSTATKDTYDALHMQALPPR

SEQ ID NO: 29930 - protein, 262 aa, synthetic construct
AIVISPSGKYNAVKLGKYEDSNSVTCSVQHDNKTVHSTDFEVKTDSTDHVKPKETENTKQPSKSCHKPKAIVHTEKVNMMSLTVLGLRMLFAKTVAVNFLLTAKLFFLRSKRSRLLHSDYMNMTPRRPGPTRKHYQPYAPPRDFAAYRSRVKFSRSADAPAYQQGQNQLYNELNLGRREEYDVLDKRRGRDPEMGGKPQRRKNPQEGLYNELQKDKMAEAYSEIGMKGERRRGKGHDGLYQGLSTATKDTYDALHMQALPPR

SEQ ID NO: 29931 - protein, 261 aa, synthetic construct
IVISPSGKYNAVKLGKYEDSNSVTCSVQHDNKTVHSTDFEVKTDSTDHVKPKETENTKQPSKSCHKPKAIVHTEKVNMMSLTVLGLRMLFAKTVAVNFLLTAKLFFLRSKRSRLLHSDYMNMTPRRPGPTRKHYQPYAPPRDFAAYRSRVKFSRSADAPAYQQGQNQLYNELNLGRREEYDVLDKRRGRDPEMGGKPQRRKNPQEGLYNELQKDKMAEAYSEIGMKGERRRGKGHDGLYQGLSTATKDTYDALHMQALPPR

SEQ ID NO: 29932 - protein, 260 aa, synthetic construct
VISPSGKYNAVKLGKYEDSNSVTCSVQHDNKTVHSTDFEVKTDSTDHVKPKETENTKQPSKSCHKPKAIVHTEKVNMMSLTVLGLRMLFAKTVAVNFLLTAKLFFLRSKRSRLLHSDYMNMTPRRPGPTRKHYQPYAPPRDFAAYRSRVKFSRSADAPAYQQGQNQLYNELNLGRREEYDVLDKRRGRDPEMGGKPQRRKNPQEGLYNELQKDKMAEAYSEIGMKGERRRGKGHDGLYQGLSTATKDTYDALHMQALPPR

SEQ ID NO: 29933 - protein, 259 aa, synthetic construct
ISPSGKYNAVKLGKYEDSNSVTCSVQHDNKTVHSTDFEVKTDSTDHVKPKETENTKQPSKSCHKPKAIVHTEKVNMMSLTVLGLRMLFAKTVAVNFLLTAKLFFLRSKRSRLLHSDYMNMTPRRPGPTRKHYQPYAPPRDFAAYRSRVKFSRSADAPAYQQGQNQLYNELNLGRREEYDVLDKRRGRDPEMGGKPQRRKNPQEGLYNELQKDKMAEAYSEIGMKGERRRGKGHDGLYQGLSTATKDTYDALHMQALPPR

SEQ ID NO: 29934 - protein, 258 aa, synthetic construct
SPSGKYNAVKLGKYEDSNSVTCSVQHDNKTVHSTDFEVKTDSTDHVKPKETENTKQPSKSCHKPKAIVHTEKVNMMSLTVLGLRMLFAKTVAVNFLLTAKLFFLRSKRSRLLHSDYMNMTPRRPGPTRKHYQPYAPPRDFAAYRSRVKFSRSADAPAYQQGQNQLYNELNLGRREEYDVLDKRRGRDPEMGGKPQRRKNPQEGLYNELQKDKMAEAYSEIGMKGERRRGKGHDGLYQGLSTATKDTYDALHMQALPPR

SEQ ID NO: 29935 - protein, 257 aa, synthetic construct
PSGKYNAVKLGKYEDSNSVTCSVQHDNKTVHSTDFEVKTDSTDHVKPKETENTKQPSKSCHKPKAIVHTEKVNMMSLTVLGLRMLFAKTVAVNFLLTAKLFFLRSKRSRLLHSDYMNMTPRRPGPTRKHYQPYAPPRDFAAYRSRVKFSRSADAPAYQQGQNQLYNELNLGRREEYDVLDKRRGRDPEMGGKPQRRKNPQEGLYNELQKDKMAEAYSEIGMKGERRRGKGHDGLYQGLSTATKDTYDALHMQALPPR

SEQ ID NO: 29936 - protein, 256 aa, synthetic construct
SGKYNAVKLGKYEDSNSVTCSVQHDNKTVHSTDFEVKTDSTDHVKPKETENTKQPSKSCHKPKAIVHTEKVNMMSLTVLGLRMLFAKTVAVNFLLTAKLFFLRSKRSRLLHSDYMNMTPRRPGPTRKHYQPYAPPRDFAAYRSRVKFSRSADAPAYQQGQNQLYNELNLGRREEYDVLDKRRGRDPEMGGKPQRRKNPQEGLYNELQKDKMAEAYSEIGMKGERRRGKGHDGLYQGLSTATKDTYDALHMQALPPR

SEQ ID NO: 29937 - protein, 255 aa, synthetic construct
GKYNAVKLGKYEDSNSVTCSVQHDNKTVHSTDFEVKTDSTDHVKPKETENTKQPSKSCHKPKAIVHTEKVNMMSLTVLGLRMLFAKTVAVNFLLTAKLFFLRSKRSRLLHSDYMNMTPRRPGPTRKHYQPYAPPRDFAAYRSRVKFSRSADAPAYQQGQNQLYNELNLGRREEYDVLDKRRGRDPEMGGKPQRRKNPQEGLYNELQKDKMAEAYSEIGMKGERRRGKGHDGLYQGLSTATKDTYDALHMQALPPR

SEQ ID NO: 29938 - protein, 254 aa, synthetic construct
KYNAVKLGKYEDSNSVTCSVQHDNKTVHSTDFEVKTDSTDHVKPKETENTKQPSKSCHKPKAIVHTEKVNMMSLTVLGLRMLFAKTVAVNFLLTAKLFFLRSKRSRLLHSDYMNMTPRRPGPTRKHYQPYAPPRDFAAYRSRVKFSRSADAPAYQQGQNQLYNELNLGRREEYDVLDKRRGRDPEMGGKPQRRKNPQEGLYNELQKDKMAEAYSEIGMKGERRRGKGHDGLYQGLSTATKDTYDALHMQALPPR

SEQ ID NO: 29939 - protein, 253 aa, synthetic construct
YNAVKLGKYEDSNSVTCSVQHDNKTVHSTDFEVKTDSTDHVKPKETENTKQPSKSCHKPKAIVHTEKVNMMSLTVLGLRMLFAKTVAVNFLLTAKLFFLRSKRSRLLHSDYMNMTPRRPGPTRKHYQPYAPPRDFAAYRSRVKFSRSADAPAYQQGQNQLYNELNLGRREEYDVLDKRRGRDPEMGGKPQRRKNPQEGLYNELQKDKMAEAYSEIGMKGERRRGKGHDGLYQGLSTATKDTYDALHMQALPPR

SEQ ID NO: 29940 - protein, 252 aa, synthetic construct
NAVKLGKYEDSNSVTCSVQHDNKTVHSTDFEVKTDSTDHVKPKETENTKQPSKSCHKPKAIVHTEKVNMMSLTVLGLRMLFAKTVAVNFLLTAKLFFLRSKRSRLLHSDYMNMTPRRPGPTRKHYQPYAPPRDFAAYRSRVKFSRSADAPAYQQGQNQLYNELNLGRREEYDVLDKRRGRDPEMGGKPQRRKNPQEGLYNELQKDKMAEAYSEIGMKGERRRGKGHDGLYQGLSTATKDTYDALHMQALPPR

SEQ ID NO: 29941 - protein, 251 aa, synthetic construct
AVKLGKYEDSNSVTCSVQHDNKTVHSTDFEVKTDSTDHVKPKETENTKQPSKSCHKPKAIVHTEKVNMMSLTVLGLRMLFAKTVAVNFLLTAKLFFLRSKRSRLLHSDYMNMTPRRPGPTRKHYQPYAPPRDFAAYRSRVKFSRSADAPAYQQGQNQLYNELNLGRREEYDVLDKRRGRDPEMGGKPQRRKNPQEGLYNELQKDKMAEAYSEIGMKGERRRGKGHDGLYQGLSTATKDTYDALHMQALPPR

SEQ ID NO: 29942 - protein, 250 aa, synthetic construct
VKLGKYEDSNSVTCSVQHDNKTVHSTDFEVKTDSTDHVKPKETENTKQPSKSCHKPKAIVHTEKVNMMSLTVLGLRMLFAKTVAVNFLLTAKLFFLRSKRSRLLHSDYMNMTPRRPGPTRKHYQPYAPPRDFAAYRSRVKFSRSADAPAYQQGQNQLYNELNLGRREEYDVLDKRRGRDPEMGGKPQRRKNPQEGLYNELQKDKMAEAYSEIGMKGERRRGKGHDGLYQGLSTATKDTYDALHMQALPPR

SEQ ID NO: 29943 - protein, 249 aa, synthetic construct
KLGKYEDSNSVTCSVQHDNKTVHSTDFEVKTDSTDHVKPKETENTKQPSKSCHKPKAIVHTEKVNMMSLTVLGLRMLFAKTVAVNFLLTAKLFFLRSKRSRLLHSDYMNMTPRRPGPTRKHYQPYAPPRDFAAYRSRVKFSRSADAPAYQQGQNQLYNELNLGRREEYDVLDKRRGRDPEMGGKPQRRKNPQEGLYNELQKDKMAEAYSEIGMKGERRRGKGHDGLYQGLSTATKDTYDALHMQALPPR

SEQ ID NO: 29944 - protein, 248 aa, synthetic construct
LGKYEDSNSVTCSVQHDNKTVHSTDFEVKTDSTDHVKPKETENTKQPSKSCHKPKAIVHTEKVNMMSLTVLGLRMLFAKTVAVNFLLTAKLFFLRSKRSRLLHSDYMNMTPRRPGPTRKHYQPYAPPRDFAAYRSRVKFSRSADAPAYQQGQNQLYNELNLGRREEYDVLDKRRGRDPEMGGKPQRRKNPQEGLYNELQKDKMAEAYSEIGMKGERRRGKGHDGLYQGLSTATKDTYDALHMQALPPR

SEQ ID NO: 29945 - protein, 247 aa, synthetic construct
GKYEDSNSVTCSVQHDNKTVHSTDFEVKTDSTDHVKPKETENTKQPSKSCHKPKAIVHTEKVNMMSLTVLGLRMLFAKTVAVNFLLTAKLFFLRSKRSRLLHSDYMNMTPRRPGPTRKHYQPYAPPRDFAAYRSRVKFSRSADAPAYQQGQNQLYNELNLGRREEYDVLDKRRGRDPEMGGKPQRRKNPQEGLYNELQKDKMAEAYSEIGMKGERRRGKGHDGLYQGLSTATKDTYDALHMQALPPR

SEQ ID NO: 29946 - protein, 246 aa, synthetic construct
KYEDSNSVTCSVQHDNKTVHSTDFEVKTDSTDHVKPKETENTKQPSKSCHKPKAIVHTEKVNMMSLTVLGLRMLFAKTVAVNFLLTAKLFFLRSKRSRLLHSDYMNMTPRRPGPTRKHYQPYAPPRDFAAYRSRVKFSRSADAPAYQQGQNQLYNELNLGRREEYDVLDKRRGRDPEMGGKPQRRKNPQEGLYNELQKDKMAEAYSEIGMKGERRRGKGHDGLYQGLSTATKDTYDALHMQALPPR

SEQ ID NO: 29947 - protein, 245 aa, synthetic construct
YEDSNSVTCSVQHDNKTVHSTDFEVKTDSTDHVKPKETENTKQPSKSCHKPKAIVHTEKVNMMSLTVLGLRMLFAKTVAVNFLLTAKLFFLRSKRSRLLHSDYMNMTPRRPGPTRKHYQPYAPPRDFAAYRSRVKFSRSADAPAYQQGQNQLYNELNLGRREEYDVLDKRRGRDPEMGGKPQRRKNPQEGLYNELQKDKMAEAYSEIGMKGERRRGKGHDGLYQGLSTATKDTYDALHMQALPPR

SEQ ID NO: 29948 - protein, 244 aa, synthetic construct
EDSNSVTCSVQHDNKTVHSTDFEVKTDSTDHVKPKETENTKQPSKSCHKPKAIVHTEKVNMMSLTVLGLRMLFAKTVAVNFLLTAKLFFLRSKRSRLLHSDYMNMTPRRPGPTRKHYQPYAPPRDFAAYRSRVKFSRSADAPAYQQGQNQLYNELNLGRREEYDVLDKRRGRDPEMGGKPQRRKNPQEGLYNELQKDKMAEAYSEIGMKGERRRGKGHDGLYQGLSTATKDTYDALHMQALPPR

SEQ ID NO: 29949 - protein, 243 aa, synthetic construct
DSNSVTCSVQHDNKTVHSTDFEVKTDSTDHVKPKETENTKQPSKSCHKPKAIVHTEKVNMMSLTVLGLRMLFAKTVAVNFLLTAKLFFLRSKRSRLLHSDYMNMTPRRPGPTRKHYQPYAPPRDFAAYRSRVKFSRSADAPAYQQGQNQLYNELNLGRREEYDVLDKRRGRDPEMGGKPQRRKNPQEGLYNELQKDKMAEAYSEIGMKGERRRGKGHDGLYQGLSTATKDTYDALHMQALPPR

SEQ ID NO: 29950 - protein, 242 aa, synthetic construct
SNSVTCSVQHDNKTVHSTDFEVKTDSTDHVKPKETENTKQPSKSCHKPKAIVHTEKVNMMSLTVLGLRMLFAKTVAVNFLLTAKLFFLRSKRSRLLHSDYMNMTPRRPGPTRKHYQPYAPPRDFAAYRSRVKFSRSADAPAYQQGQNQLYNELNLGRREEYDVLDKRRGRDPEMGGKPQRRKNPQEGLYNELQKDKMAEAYSEIGMKGERRRGKGHDGLYQGLSTATKDTYDALHMQALPPR

SEQ ID NO: 29951 - protein, 241 aa, synthetic construct
NSVTCSVQHDNKTVHSTDFEVKTDSTDHVKPKETENTKQPSKSCHKPKAIVHTEKVNMMSLTVLGLRMLFAKTVAVNFLLTAKLFFLRSKRSRLLHSDYMNMTPRRPGPTRKHYQPYAPPRDFAAYRSRVKFSRSADAPAYQQGQNQLYNELNLGRREEYDVLDKRRGRDPEMGGKPQRRKNPQEGLYNELQKDKMAEAYSEIGMKGERRRGKGHDGLYQGLSTATKDTYDALHMQALPPR

SEQ ID NO: 29952 - protein, 240 aa, synthetic construct
SVTCSVQHDNKTVHSTDFEVKTDSTDHVKPKETENTKQPSKSCHKPKAIVHTEKVNMMSLTVLGLRMLFAKTVAVNFLLTAKLFFLRSKRSRLLHSDYMNMTPRRPGPTRKHYQPYAPPRDFAAYRSRVKFSRSADAPAYQQGQNQLYNELNLGRREEYDVLDKRRGRDPEMGGKPQRRKNPQEGLYNELQKDKMAEAYSEIGMKGERRRGKGHDGLYQGLSTATKDTYDALHMQALPPR

SEQ ID NO: 29953 - protein, 239 aa, synthetic construct
VTCSVQHDNKTVHSTDFEVKTDSTDHVKPKETENTKQPSKSCHKPKAIVHTEKVNMMSLTVLGLRMLFAKTVAVNFLLTAKLFFLRSKRSRLLHSDYMNMTPRRPGPTRKHYQPYAPPRDFAAYRSRVKFSRSADAPAYQQGQNQLYNELNLGRREEYDVLDKRRGRDPEMGGKPQRRKNPQEGLYNELQKDKMAEAYSEIGMKGERRRGKGHDGLYQGLSTATKDTYDALHMQALPPR

SEQ ID NO: 29954 - protein, 238 aa, synthetic construct
TCSVQHDNKTVHSTDFEVKTDSTDHVKPKETENTKQPSKSCHKPKAIVHTEKVNMMSLTVLGLRMLFAKTVAVNFLLTAKLFFLRSKRSRLLHSDYMNMTPRRPGPTRKHYQPYAPPRDFAAYRSRVKFSRSADAPAYQQGQNQLYNELNLGRREEYDVLDKRRGRDPEMGGKPQRRKNPQEGLYNELQKDKMAEAYSEIGMKGERRRGKGHDGLYQGLSTATKDTYDALHMQALPPR

SEQ ID NO: 29955 - protein, 237 aa, synthetic construct
CSVQHDNKTVHSTDFEVKTDSTDHVKPKETENTKQPSKSCHKPKAIVHTEKVNMMSLTVLGLRMLFAKTVAVNFLLTAKLFFLRSKRSRLLHSDYMNMTPRRPGPTRKHYQPYAPPRDFAAYRSRVKFSRSADAPAYQQGQNQLYNELNLGRREEYDVLDKRRGRDPEMGGKPQRRKNPQEGLYNELQKDKMAEAYSEIGMKGERRRGKGHDGLYQGLSTATKDTYDALHMQALPPR

SEQ ID NO: 29956 - protein, 236 aa, synthetic construct
SVQHDNKTVHSTDFEVKTDSTDHVKPKETENTKQPSKSCHKPKAIVHTEKVNMMSLTVLGLRMLFAKTVAVNFLLTAKLFFLRSKRSRLLHSDYMNMTPRRPGPTRKHYQPYAPPRDFAAYRSRVKFSRSADAPAYQQGQNQLYNELNLGRREEYDVLDKRRGRDPEMGGKPQRRKNPQEGLYNELQKDKMAEAYSEIGMKGERRRGKGHDGLYQGLSTATKDTYDALHMQALPPR

SEQ ID NO: 29957 - protein, 235 aa, synthetic construct
VQHDNKTVHSTDFEVKTDSTDHVKPKETENTKQPSKSCHKPKAIVHTEKVNMMSLTVLGLRMLFAKTVAVNFLLTAKLFFLRSKRSRLLHSDYMNMTPRRPGPTRKHYQPYAPPRDFAAYRSRVKFSRSADAPAYQQGQNQLYNELNLGRREEYDVLDKRRGRDPEMGGKPQRRKNPQEGLYNELQKDKMAEAYSEIGMKGERRRGKGHDGLYQGLSTATKDTYDALHMQALPPR

SEQ ID NO: 29958 - protein, 234 aa, synthetic construct
QHDNKTVHSTDFEVKTDSTDHVKPKETENTKQPSKSCHKPKAIVHTEKVNMMSLTVLGLRMLFAKTVAVNFLLTAKLFFLRSKRSRLLHSDYMNMTPRRPGPTRKHYQPYAPPRDFAAYRSRVKFSRSADAPAYQQGQNQLYNELNLGRREEYDVLDKRRGRDPEMGGKPQRRKNPQEGLYNELQKDKMAEAYSEIGMKGERRRGKGHDGLYQGLSTATKDTYDALHMQALPPR

SEQ ID NO: 29959 - protein, 233 aa, synthetic construct
HDNKTVHSTDFEVKTDSTDHVKPKETENTKQPSKSCHKPKAIVHTEKVNMMSLTVLGLRMLFAKTVAVNFLLTAKLFFLRSKRSRLLHSDYMNMTPRRPGPTRKHYQPYAPPRDFAAYRSRVKFSRSADAPAYQQGQNQLYNELNLGRREEYDVLDKRRGRDPEMGGKPQRRKNPQEGLYNELQKDKMAEAYSEIGMKGERRRGKGHDGLYQGLSTATKDTYDALHMQALPPR

SEQ ID NO: 29960 - protein, 232 aa, synthetic construct
DNKTVHSTDFEVKTDSTDHVKPKETENTKQPSKSCHKPKAIVHTEKVNMMSLTVLGLRMLFAKTVAVNFLLTAKLFFLRSKRSRLLHSDYMNMTPRRPGPTRKHYQPYAPPRDFAAYRSRVKFSRSADAPAYQQGQNQLYNELNLGRREEYDVLDKRRGRDPEMGGKPQRRKNPQEGLYNELQKDKMAEAYSEIGMKGERRRGKGHDGLYQGLSTATKDTYDALHMQALPPR

SEQ ID NO: 29961 - protein, 231 aa, synthetic construct
NKTVHSTDFEVKTDSTDHVKPKETENTKQPSKSCHKPKAIVHTEKVNMMSLTVLGLRMLFAKTVAVNFLLTAKLFFLRSKRSRLLHSDYMNMTPRRPGPTRKHYQPYAPPRDFAAYRSRVKFSRSADAPAYQQGQNQLYNELNLGRREEYDVLDKRRGRDPEMGGKPQRRKNPQEGLYNELQKDKMAEAYSEIGMKGERRRGKGHDGLYQGLSTATKDTYDALHMQALPPR

SEQ ID NO: 29962 - protein, 230 aa, synthetic construct
KTVHSTDFEVKTDSTDHVKPKETENTKQPSKSCHKPKAIVHTEKVNMMSLTVLGLRMLFAKTVAVNFLLTAKLFFLRSKRSRLLHSDYMNMTPRRPGPTRKHYQPYAPPRDFAAYRSRVKFSRSADAPAYQQGQNQLYNELNLGRREEYDVLDKRRGRDPEMGGKPQRRKNPQEGLYNELQKDKMAEAYSEIGMKGERRRGKGHDGLYQGLSTATKDTYDALHMQALPPR

SEQ ID NO: 29963 - protein, 229 aa, synthetic construct
TVHSTDFEVKTDSTDHVKPKETENTKQPSKSCHKPKAIVHTEKVNMMSLTVLGLRMLFAKTVAVNFLLTAKLFFLRSKRSRLLHSDYMNMTPRRPGPTRKHYQPYAPPRDFAAYRSRVKFSRSADAPAYQQGQNQLYNELNLGRREEYDVLDKRRGRDPEMGGKPQRRKNPQEGLYNELQKDKMAEAYSEIGMKGERRRGKGHDGLYQGLSTATKDTYDALHMQALPPR

SEQ ID NO: 29964 - protein, 228 aa, synthetic construct
VHSTDFEVKTDSTDHVKPKETENTKQPSKSCHKPKAIVHTEKVNMMSLTVLGLRMLFAKTVAVNFLLTAKLFFLRSKRSRLLHSDYMNMTPRRPGPTRKHYQPYAPPRDFAAYRSRVKFSRSADAPAYQQGQNQLYNELNLGRREEYDVLDKRRGRDPEMGGKPQRRKNPQEGLYNELQKDKMAEAYSEIGMKGERRRGKGHDGLYQGLSTATKDTYDALHMQALPPR

SEQ ID NO: 29965 - protein, 227 aa, synthetic construct
HSTDFEVKTDSTDHVKPKETENTKQPSKSCHKPKAIVHTEKVNMMSLTVLGLRMLFAKTVAVNFLLTAKLFFLRSKRSRLLHSDYMNMTPRRPGPTRKHYQPYAPPRDFAAYRSRVKFSRSADAPAYQQGQNQLYNELNLGRREEYDVLDKRRGRDPEMGGKPQRRKNPQEGLYNELQKDKMAEAYSEIGMKGERRRGKGHDGLYQGLSTATKDTYDALHMQALPPR

SEQ ID NO: 29966 - protein, 226 aa, synthetic construct
STDFEVKTDSTDHVKPKETENTKQPSKSCHKPKAIVHTEKVNMMSLTVLGLRMLFAKTVAVNFLLTAKLFFLRSKRSRLLHSDYMNMTPRRPGPTRKHYQPYAPPRDFAAYRSRVKFSRSADAPAYQQGQNQLYNELNLGRREEYDVLDKRRGRDPEMGGKPQRRKNPQEGLYNELQKDKMAEAYSEIGMKGERRRGKGHDGLYQGLSTATKDTYDALHMQALPPR

SEQ ID NO: 29967 - protein, 225 aa, synthetic construct
TDFEVKTDSTDHVKPKETENTKQPSKSCHKPKAIVHTEKVNMMSLTVLGLRMLFAKTVAVNFLLTAKLFFLRSKRSRLLHSDYMNMTPRRPGPTRKHYQPYAPPRDFAAYRSRVKFSRSADAPAYQQGQNQLYNELNLGRREEYDVLDKRRGRDPEMGGKPQRRKNPQEGLYNELQKDKMAEAYSEIGMKGERRRGKGHDGLYQGLSTATKDTYDALHMQALPPR

SEQ ID NO: 29968 - protein, 224 aa, synthetic construct
DFEVKTDSTDHVKPKETENTKQPSKSCHKPKAIVHTEKVNMMSLTVLGLRMLFAKTVAVNFLLTAKLFFLRSKRSRLLHSDYMNMTPRRPGPTRKHYQPYAPPRDFAAYRSRVKFSRSADAPAYQQGQNQLYNELNLGRREEYDVLDKRRGRDPEMGGKPQRRKNPQEGLYNELQKDKMAEAYSEIGMKGERRRGKGHDGLYQGLSTATKDTYDALHMQALPPR

SEQ ID NO: 29969 - protein, 223 aa, synthetic construct
FEVKTDSTDHVKPKETENTKQPSKSCHKPKAIVHTEKVNMMSLTVLGLRMLFAKTVAVNFLLTAKLFFLRSKRSRLLHSDYMNMTPRRPGPTRKHYQPYAPPRDFAAYRSRVKFSRSADAPAYQQGQNQLYNELNLGRREEYDVLDKRRGRDPEMGGKPQRRKNPQEGLYNELQKDKMAEAYSEIGMKGERRRGKGHDGLYQGLSTATKDTYDALHMQALPPR

SEQ ID NO: 29970 - protein, 222 aa, synthetic construct; identical to SEQ ID NO: 29335

SEQ ID NO: 29971 - protein, 221 aa, synthetic construct
VKTDSTDHVKPKETENTKQPSKSCHKPKAIVHTEKVNMMSLTVLGLRMLFAKTVAVNFLLTAKLFFLRSKRSRLLHSDYMNMTPRRPGPTRKHYQPYAPPRDFAAYRSRVKFSRSADAPAYQQGQNQLYNELNLGRREEYDVLDKRRGRDPEMGGKPQRRKNPQEGLYNELQKDKMAEAYSEIGMKGERRRGKGHDGLYQGLSTATKDTYDALHMQALPPR

SEQ ID NO: 29972 - protein, 220 aa, synthetic construct
KTDSTDHVKPKETENTKQPSKSCHKPKAIVHTEKVNMMSLTVLGLRMLFAKTVAVNFLLTAKLFFLRSKRSRLLHSDYMNMTPRRPGPTRKHYQPYAPPRDFAAYRSRVKFSRSADAPAYQQGQNQLYNELNLGRREEYDVLDKRRGRDPEMGGKPQRRKNPQEGLYNELQKDKMAEAYSEIGMKGERRRGKGHDGLYQGLSTATKDTYDALHMQALPPR

SEQ ID NO: 29973 - protein, 219 aa, synthetic construct
TDSTDHVKPKETENTKQPSKSCHKPKAIVHTEKVNMMSLTVLGLRMLFAKTVAVNFLLTAKLFFLRSKRSRLLHSDYMNMTPRRPGPTRKHYQPYAPPRDFAAYRSRVKFSRSADAPAYQQGQNQLYNELNLGRREEYDVLDKRRGRDPEMGGKPQRRKNPQEGLYNELQKDKMAEAYSEIGMKGERRRGKGHDGLYQGLSTATKDTYDALHMQALPPR

SEQ ID NO: 29974 - protein, 218 aa, synthetic construct
DSTDHVKPKETENTKQPSKSCHKPKAIVHTEKVNMMSLTVLGLRMLFAKTVAVNFLLTAKLFFLRSKRSRLLHSDYMNMTPRRPGPTRKHYQPYAPPRDFAAYRSRVKFSRSADAPAYQQGQNQLYNELNLGRREEYDVLDKRRGRDPEMGGKPQRRKNPQEGLYNELQKDKMAEAYSEIGMKGERRRGKGHDGLYQGLSTATKDTYDALHMQALPPR

SEQ ID NO: 29975 - protein, 217 aa, synthetic construct
STDHVKPKETENTKQPSKSCHKPKAIVHTEKVNMMSLTVLGLRMLFAKTVAVNFLLTAKLFFLRSKRSRLLHSDYMNMTPRRPGPTRKHYQPYAPPRDFAAYRSRVKFSRSADAPAYQQGQNQLYNELNLGRREEYDVLDKRRGRDPEMGGKPQRRKNPQEGLYNELQKDKMAEAYSEIGMKGERRRGKGHDGLYQGLSTATKDTYDALHMQALPPR

SEQ ID NO: 29976 - protein, 216 aa, synthetic construct
TDHVKPKETENTKQPSKSCHKPKAIVHTEKVNMMSLTVLGLRMLFAKTVAVNFLLTAKLFFLRSKRSRLLHSDYMNMTPRRPGPTRKHYQPYAPPRDFAAYRSRVKFSRSADAPAYQQGQNQLYNELNLGRREEYDVLDKRRGRDPEMGGKPQRRKNPQEGLYNELQKDKMAEAYSEIGMKGERRRGKGHDGLYQGLSTATKDTYDALHMQALPPR

SEQ ID NO: 29977 - protein, 215 aa, synthetic construct; identical to SEQ ID NO: 29336

SEQ ID NO: 29978 - protein, 214 aa, synthetic construct
HVKPKETENTKQPSKSCHKPKAIVHTEKVNMMSLTVLGLRMLFAKTVAVNFLLTAKLFFLRSKRSRLLHSDYMNMTPRRPGPTRKHYQPYAPPRDFAAYRSRVKFSRSADAPAYQQGQNQLYNELNLGRREEYDVLDKRRGRDPEMGGKPQRRKNPQEGLYNELQKDKMAEAYSEIGMKGERRRGKGHDGLYQGLSTATKDTYDALHMQALPPR

SEQ ID NO: 29979 - protein, 213 aa, synthetic construct
VKPKETENTKQPSKSCHKPKAIVHTEKVNMMSLTVLGLRMLFAKTVAVNFLLTAKLFFLRSKRSRLLHSDYMNMTPRRPGPTRKHYQPYAPPRDFAAYRSRVKFSRSADAPAYQQGQNQLYNELNLGRREEYDVLDKRRGRDPEMGGKPQRRKNPQEGLYNELQKDKMAEAYSEIGMKGERRRGKGHDGLYQGLSTATKDTYDALHMQALPPR

SEQ ID NO: 29980 - protein, 212 aa, synthetic construct
KPKETENTKQPSKSCHKPKAIVHTEKVNMMSLTVLGLRMLFAKTVAVNFLLTAKLFFLRSKRSRLLHSDYMNMTPRRPGPTRKHYQPYAPPRDFAAYRSRVKFSRSADAPAYQQGQNQLYNELNLGRREEYDVLDKRRGRDPEMGGKPQRRKNPQEGLYNELQKDKMAEAYSEIGMKGERRRGKGHDGLYQGLSTATKDTYDALHMQALPPR

SEQ ID NO: 29981 - protein, 211 aa, synthetic construct
PKETENTKQPSKSCHKPKAIVHTEKVNMMSLTVLGLRMLFAKTVAVNFLLTAKLFFLRSKRSRLLHSDYMNMTPRRPGPTRKHYQPYAPPRDFAAYRSRVKFSRSADAPAYQQGQNQLYNELNLGRREEYDVLDKRRGRDPEMGGKPQRRKNPQEGLYNELQKDKMAEAYSEIGMKGERRRGKGHDGLYQGLSTATKDTYDALHMQALPPR

SEQ ID NO: 29982 - protein, 210 aa, synthetic construct
KETENTKQPSKSCHKPKAIVHTEKVNMMSLTVLGLRMLFAKTVAVNFLLTAKLFFLRSKRSRLLHSDYMNMTPRRPGPTRKHYQPYAPPRDFAAYRSRVKFSRSADAPAYQQGQNQLYNELNLGRREEYDVLDKRRGRDPEMGGKPQRRKNPQEGLYNELQKDKMAEAYSEIGMKGERRRGKGHDGLYQGLSTATKDTYDALHMQALPPR

SEQ ID NO: 29983 - protein, 209 aa, synthetic construct
ETENTKQPSKSCHKPKAIVHTEKVNMMSLTVLGLRMLFAKTVAVNFLLTAKLFFLRSKRSRLLHSDYMNMTPRRPGPTRKHYQPYAPPRDFAAYRSRVKFSRSADAPAYQQGQNQLYNELNLGRREEYDVLDKRRGRDPEMGGKPQRRKNPQEGLYNELQKDKMAEAYSEIGMKGERRRGKGHDGLYQGLSTATKDTYDALHMQALPPR

SEQ ID NO: 29984 - protein, 208 aa, synthetic construct
TENTKQPSKSCHKPKAIVHTEKVNMMSLTVLGLRMLFAKTVAVNFLLTAKLFFLRSKRSRLLHSDYMNMTPRRPGPTRKHYQPYAPPRDFAAYRSRVKFSRSADAPAYQQGQNQLYNELNLGRREEYDVLDKRRGRDPEMGGKPQRRKNPQEGLYNELQKDKMAEAYSEIGMKGERRRGKGHDGLYQGLSTATKDTYDALHMQALPPR

SEQ ID NO: 29985 - protein, 207 aa, synthetic construct
ENTKQPSKSCHKPKAIVHTEKVNMMSLTVLGLRMLFAKTVAVNFLLTAKLFFLRSKRSRLLHSDYMNMTPRRPGPTRKHYQPYAPPRDFAAYRSRVKFSRSADAPAYQQGQNQLYNELNLGRREEYDVLDKRRGRDPEMGGKPQRRKNPQEGLYNELQKDKMAEAYSEIGMKGERRRGKGHDGLYQGLSTATKDTYDALHMQALPPR

SEQ ID NO: 29986 - protein, 206 aa, synthetic construct
NTKQPSKSCHKPKAIVHTEKVNMMSLTVLGLRMLFAKTVAVNFLLTAKLFFLRSKRSRLLHSDYMNMTPRRPGPTRKHYQPYAPPRDFAAYRSRVKFSRSADAPAYQQGQNQLYNELNLGRREEYDVLDKRRGRDPEMGGKPQRRKNPQEGLYNELQKDKMAEAYSEIGMKGERRRGKGHDGLYQGLSTATKDTYDALHMQALPPR

SEQ ID NO: 29987 - protein, 290 aa, synthetic construct
IQNPEPAVYQLKDPRSQDSTLCLFTDFDSQINVPKTMESGTFITDKCVLDMKAMDSKSNGAIAWSNQTSFTCQDIFKETNATYPSSDVPCDATLTEKSFETDMNLNFQNLSVMGLRILLLKVAGFNLLMTLRLWSSRSKRSRLLHSDYMNMTPRRPGPTRKHYQPYAPPRDFAAYRSRVKFSRSADAPAYQQGQNQLYNELNLGRREEYDVLDKRRGRDPEMGGKPQRRKNPQEGLYNELQKDKMAEAYSEIGMKGERRRGKGHDGLYQGLSTATKDTYDALHMQALPPR

SEQ ID NO: 29988 - protein, 289 aa, synthetic construct
QNPEPAVYQLKDPRSQDSTLCLFTDFDSQINVPKTMESGTFITDKCVLDMKAMDSKSNGAIAWSNQTSFTCQDIFKETNATYPSSDVPCDATLTEKSFETDMNLNFQNLSVMGLRILLLKVAGFNLLMTLRLWSSRSKRSRLLHSDYMNMTPRRPGPTRKHYQPYAPPRDFAAYRSRVKFSRSADAPAYQQGQNQLYNELNLGRREEYDVLDKRRGRDPEMGGKPQRRKNPQEGLYNELQKDKMAEAYSEIGMKGERRRGKGHDGLYQGLSTATKDTYDALHMQALPPR

SEQ ID NO: 29989 - protein, 288 aa, synthetic construct
NPEPAVYQLKDPRSQDSTLCLFTDFDSQINVPKTMESGTFITDKCVLDMKAMDSKSNGAIAWSNQTSFTCQDIFKETNATYPSSDVPCDATLTEKSFETDMNLNFQNLSVMGLRILLLKVAGFNLLMTLRLWSSRSKRSRLLHSDYMNMTPRRPGPTRKHYQPYAPPRDFAAYRSRVKFSRSADAPAYQQGQNQLYNELNLGRREEYDVLDKRRGRDPEMGGKPQRRKNPQEGLYNELQKDKMAEAYSEIGMKGERRRGKGHDGLYQGLSTATKDTYDALHMQALPPR

SEQ ID NO: 29990 - protein, 287 aa, synthetic construct
PEPAVYQLKDPRSQDSTLCLFTDFDSQINVPKTMESGTFITDKCVLDMKAMDSKSNGAIAWSNQTSFTCQDIFKETNATYPSSDVPCDATLTEKSFETDMNLNFQNLSVMGLRILLLKVAGFNLLMTLRLWSSRSKRSRLLHSDYMNMTPRRPGPTRKHYQPYAPPRDFAAYRSRVKFSRSADAPAYQQGQNQLYNELNLGRREEYDVLDKRRGRDPEMGGKPQRRKNPQEGLYNELQKDKMAEAYSEIGMKGERRRGKGHDGLYQGLSTATKDTYDALHMQALPPR

SEQ ID NO: 29991 - protein, 286 aa, synthetic construct
EPAVYQLKDPRSQDSTLCLFTDFDSQINVPKTMESGTFITDKCVLDMKAMDSKSNGAIAWSNQTSFTCQDIFKETNATYPSSDVPCDATLTEKSFETDMNLNFQNLSVMGLRILLLKVAGFNLLMTLRLWSSRSKRSRLLHSDYMNMTPRRPGPTRKHYQPYAPPRDFAAYRSRVKFSRSADAPAYQQGQNQLYNELNLGRREEYDVLDKRRGRDPEMGGKPQRRKNPQEGLYNELQKDKMAEAYSEIGMKGERRRGKGHDGLYQGLSTATKDTYDALHMQALPPR

SEQ ID NO: 29992 - protein, 285 aa, synthetic construct
PAVYQLKDPRSQDSTLCLFTDFDSQINVPKTMESGTFITDKCVLDMKAMDSKSNGAIAWSNQTSFTCQDIFKETNATYPSSDVPCDATLTEKSFETDMNLNFQNLSVMGLRILLLKVAGFNLLMTLRLWSSRSKRSRLLHSDYMNMTPRRPGPTRKHYQPYAPPRDFAAYRSRVKFSRSADAPAYQQGQNQLYNELNLGRREEYDVLDKRRGRDPEMGGKPQRRKNPQEGLYNELQKDKMAEAYSEIGMKGERRRGKGHDGLYQGLSTATKDTYDALHMQALPPR

SEQ ID NO: 29993 - protein, 284 aa, synthetic construct
AVYQLKDPRSQDSTLCLFTDFDSQINVPKTMESGTFITDKCVLDMKAMDSKSNGAIAWSNQTSFTCQDIFKETNATYPSSDVPCDATLTEKSFETDMNLNFQNLSVMGLRILLLKVAGFNLLMTLRLWSSRSKRSRLLHSDYMNMTPRRPGPTRKHYQPYAPPRDFAAYRSRVKFSRSADAPAYQQGQNQLYNELNLGRREEYDVLDKRRGRDPEMGGKPQRRKNPQEGLYNELQKDKMAEAYSEIGMKGERRRGKGHDGLYQGLSTATKDTYDALHMQALPPR

SEQ ID NO: 29994 - protein, 283 aa, synthetic construct
VYQLKDPRSQDSTLCLFTDFDSQINVPKTMESGTFITDKCVLDMKAMDSKSNGAIAWSNQTSFTCQDIFKETNATYPSSDVPCDATLTEKSFETDMNLNFQNLSVMGLRILLLKVAGFNLLMTLRLWSSRSKRSRLLHSDYMNMTPRRPGPTRKHYQPYAPPRDFAAYRSRVKFSRSADAPAYQQGQNQLYNELNLGRREEYDVLDKRRGRDPEMGGKPQRRKNPQEGLYNELQKDKMAEAYSEIGMKGERRRGKGHDGLYQGLSTATKDTYDALHMQALPPR

SEQ ID NO: 29995 - protein, 282 aa, synthetic construct
YQLKDPRSQDSTLCLFTDFDSQINVPKTMESGTFITDKCVLDMKAMDSKSNGAIAWSNQTSFTCQDIFKETNATYPSSDVPCDATLTEKSFETDMNLNFQNLSVMGLRILLLKVAGFNLLMTLRLWSSRSKRSRLLHSDYMNMTPRRPGPTRKHYQPYAPPRDFAAYRSRVKFSRSADAPAYQQGQNQLYNELNLGRREEYDVLDKRRGRDPEMGGKPQRRKNPQEGLYNELQKDKMAEAYSEIGMKGERRRGKGHDGLYQGLSTATKDTYDALHMQALPPR

SEQ ID NO: 29996 - protein, 281 aa, synthetic construct
QLKDPRSQDSTLCLFTDFDSQINVPKTMESGTFITDKCVLDMKAMDSKSNGAIAWSNQTSFTCQDIFKETNATYPSSDVPCDATLTEKSFETDMNLNFQNLSVMGLRILLLKVAGFNLLMTLRLWSSRSKRSRLLHSDYMNMTPRRPGPTRKHYQPYAPPRDFAAYRSRVKFSRSADAPAYQQGQNQLYNELNLGRREEYDVLDKRRGRDPEMGGKPQRRKNPQEGLYNELQKDKMAEAYSEIGMKGERRRGKGHDGLYQGLSTATKDTYDALHMQALPPR

SEQ ID NO: 29997 - protein, 280 aa, synthetic construct
LKDPRSQDSTLCLFTDFDSQINVPKTMESGTFITDKCVLDMKAMDSKSNGAIAWSNQTSFTCQDIFKETNATYPSSDVPCDATLTEKSFETDMNLNFQNLSVMGLRILLLKVAGFNLLMTLRLWSSRSKRSRLLHSDYMNMTPRRPGPTRKHYQPYAPPRDFAAYRSRVKFSRSADAPAYQQGQNQLYNELNLGRREEYDVLDKRRGRDPEMGGKPQRRKNPQEGLYNELQKDKMAEAYSEIGMKGERRRGKGHDGLYQGLSTATKDTYDALHMQALPPR

SEQ ID NO: 29998 - protein, 275 aa, synthetic construct
SQDSTLCLFTDFDSQINVPKTMESGTFITDKCVLDMKAMDSKSNGAIAWSNQTSFTCQDIFKETNATYPSSDVPCDATLTEKSFETDMNLNFQNLSVMGLRILLLKVAGFNLLMTLRLWSSRSKRSRLLHSDYMNMTPRRPGPTRKHYQPYAPPRDFAAYRSRVKFSRSADAPAYQQGQNQLYNELNLGRREEYDVLDKRRGRDPEMGGKPQRRKNPQEGLYNELQKDKMAEAYSEIGMKGERRRGKGHDGLYQGLSTATKDTYDALHMQALPPR

SEQ ID NO: 29999 - protein, 270 aa, synthetic construct
LCLFTDFDSQINVPKTMESGTFITDKCVLDMKAMDSKSNGAIAWSNQTSFTCQDIFKETNATYPSSDVPCDATLTEKSFETDMNLNFQNLSVMGLRILLLKVAGFNLLMTLRLWSSRSKRSRLLHSDYMNMTPRRPGPTRKHYQPYAPPRDFAAYRSRVKFSRSADAPAYQQGQNQLYNELNLGRREEYDVLDKRRGRDPEMGGKPQRRKNPQEGLYNELQKDKMAEAYSEIGMKGERRRGKGHDGLYQGLSTATKDTYDALHMQALPPR

SEQ ID NO: 30000 - protein, 290 aa, synthetic construct
IQNPEPAVYQLKDPRSQDSTLCLFTDFDSQINVPKTMESGTFITDKCVLDMKAMDSKSNGAIAWSNQTSFTCQDIFKETNATYPSSDVPCDATLTEKSFETDMNLNFQNLLVVGLRILLLKVAGFNLLMTLRLWSSRSKRSRLLHSDYMNMTPRRPGPTRKHYQPYAPPRDFAAYRSRVKFSRSADAPAYQQGQNQLYNELNLGRREEYDVLDKRRGRDPEMGGKPQRRKNPQEGLYNELQKDKMAEAYSEIGMKGERRRGKGHDGLYQGLSTATKDTYDALHMQALPPR

SEQ ID NO: 30001 - protein, 289 aa, synthetic construct
QNPEPAVYQLKDPRSQDSTLCLFTDFDSQINVPKTMESGTFITDKCVLDMKAMDSKSNGAIAWSNQTSFTCQDIFKETNATYPSSDVPCDATLTEKSFETDMNLNFQNLLVVGLRILLLKVAGFNLLMTLRLWSSRSKRSRLLHSDYMNMTPRRPGPTRKHYQPYAPPRDFAAYRSRVKFSRSADAPAYQQGQNQLYNELNLGRREEYDVLDKRRGRDPEMGGKPQRRKNPQEGLYNELQKDKMAEAYSEIGMKGERRRGKGHDGLYQGLSTATKDTYDALHMQALPPR

SEQ ID NO: 30002 - protein, 288 aa, synthetic construct
NPEPAVYQLKDPRSQDSTLCLFTDFDSQINVPKTMESGTFITDKCVLDMKAMDSKSNGAIAWSNQTSFTCQDIFKETNATYPSSDVPCDATLTEKSFETDMNLNFQNLLVVGLRILLLKVAGFNLLMTLRLWSSRSKRSRLLHSDYMNMTPRRPGPTRKHYQPYAPPRDFAAYRSRVKFSRSADAPAYQQGQNQLYNELNLGRREEYDVLDKRRGRDPEMGGKPQRRKNPQEGLYNELQKDKMAEAYSEIGMKGERRRGKGHDGLYQGLSTATKDTYDALHMQALPPR

SEQ ID NO: 30003 - protein, 287 aa, synthetic construct
PEPAVYQLKDPRSQDSTLCLFTDFDSQINVPKTMESGTFITDKCVLDMKAMDSKSNGAIAWSNQTSFTCQDIFKETNATYPSSDVPCDATLTEKSFETDMNLNFQNLLVVGLRILLLKVAGFNLLMTLRLWSSRSKRSRLLHSDYMNMTPRRPGPTRKHYQPYAPPRDFAAYRSRVKFSRSADAPAYQQGQNQLYNELNLGRREEYDVLDKRRGRDPEMGGKPQRRKNPQEGLYNELQKDKMAEAYSEIGMKGERRRGKGHDGLYQGLSTATKDTYDALHMQALPPR

SEQ ID NO: 30004 - protein, 286 aa, synthetic construct
EPAVYQLKDPRSQDSTLCLFTDFDSQINVPKTMESGTFITDKCVLDMKAMDSKSNGAIAWSNQTSFTCQDIFKETNATYPSSDVPCDATLTEKSFETDMNLNFQNLLVVGLRILLLKVAGFNLLMTLRLWSSRSKRSRLLHSDYMNMTPRRPGPTRKHYQPYAPPRDFAAYRSRVKFSRSADAPAYQQGQNQLYNELNLGRREEYDVLDKRRGRDPEMGGKPQRRKNPQEGLYNELQKDKMAEAYSEIGMKGERRRGKGHDGLYQGLSTATKDTYDALHMQALPPR

SEQ ID NO: 30005 - protein, 285 aa, synthetic construct
PAVYQLKDPRSQDSTLCLFTDFDSQINVPKTMESGTFITDKCVLDMKAMDSKSNGAIAWSNQTSFTCQDIFKETNATYPSSDVPCDATLTEKSFETDMNLNFQNLLVVGLRILLLKVAGFNLLMTLRLWSSRSKRSRLLHSDYMNMTPRRPGPTRKHYQPYAPPRDFAAYRSRVKFSRSADAPAYQQGQNQLYNELNLGRREEYDVLDKRRGRDPEMGGKPQRRKNPQEGLYNELQKDKMAEAYSEIGMKGERRRGKGHDGLYQGLSTATKDTYDALHMQALPPR

SEQ ID NO: 30006 - protein, 284 aa, synthetic construct
AVYQLKDPRSQDSTLCLFTDFDSQINVPKTMESGTFITDKCVLDMKAMDSKSNGAIAWSNQTSFTCQDIFKETNATYPSSDVPCDATLTEKSFETDMNLNFQNLLVVGLRILLLKVAGFNLLMTLRLWSSRSKRSRLLHSDYMNMTPRRPGPTRKHYQPYAPPRDFAAYRSRVKFSRSADAPAYQQGQNQLYNELNLGRREEYDVLDKRRGRDPEMGGKPQRRKNPQEGLYNELQKDKMAEAYSEIGMKGERRRGKGHDGLYQGLSTATKDTYDALHMQALPPR

SEQ ID NO: 30007 - protein, 283 aa, synthetic construct
VYQLKDPRSQDSTLCLFTDFDSQINVPKTMESGTFITDKCVLDMKAMDSKSNGAIAWSNQTSFTCQDIFKETNATYPSSDVPCDATLTEKSFETDMNLNFQNLLVVGLRILLLKVAGFNLLMTLRLWSSRSKRSRLLHSDYMNMTPRRPGPTRKHYQPYAPPRDFAAYRSRVKFSRSADAPAYQQGQNQLYNELNLGRREEYDVLDKRRGRDPEMGGKPQRRKNPQEGLYNELQKDKMAEAYSEIGMKGERRRGKGHDGLYQGLSTATKDTYDALHMQALPPR

SEQ ID NO: 30008 - protein, 282 aa, synthetic construct
YQLKDPRSQDSTLCLFTDFDSQINVPKTMESGTFITDKCVLDMKAMDSKSNGAIAWSNQTSFTCQDIFKETNATYPSSDVPCDATLTEKSFETDMNLNFQNLLVVGLRILLLKVAGFNLLMTLRLWSSRSKRSRLLHSDYMNMTPRRPGPTRKHYQPYAPPRDFAAYRSRVKFSRSADAPAYQQGQNQLYNELNLGRREEYDVLDKRRGRDPEMGGKPQRRKNPQEGLYNELQKDKMAEAYSEIGMKGERRRGKGHDGLYQGLSTATKDTYDALHMQALPPR

SEQ ID NO: 30009 - protein, 281 aa, synthetic construct
QLKDPRSQDSTLCLFTDFDSQINVPKTMESGTFITDKCVLDMKAMDSKSNGAIAWSNQTSFTCQDIFKETNATYPSSDVPCDATLTEKSFETDMNLNFQNLLVVGLRILLLKVAGFNLLMTLRLWSSRSKRSRLLHSDYMNMTPRRPGPTRKHYQPYAPPRDFAAYRSRVKFSRSADAPAYQQGQNQLYNELNLGRREEYDVLDKRRGRDPEMGGKPQRRKNPQEGLYNELQKDKMAEAYSEIGMKGERRRGKGHDGLYQGLSTATKDTYDALHMQALPPR

SEQ ID NO: 30010 - protein, 280 aa, synthetic construct
LKDPRSQDSTLCLFTDFDSQINVPKTMESGTFITDKCVLDMKAMDSKSNGAIAWSNQTSFTCQDIFKETNATYPSSDVPCDATLTEKSFETDMNLNFQNLLVVGLRILLLKVAGFNLLMTLRLWSSRSKRSRLLHSDYMNMTPRRPGPTRKHYQPYAPPRDFAAYRSRVKFSRSADAPAYQQGQNQLYNELNLGRREEYDVLDKRRGRDPEMGGKPQRRKNPQEGLYNELQKDKMAEAYSEIGMKGERRRGKGHDGLYQGLSTATKDTYDALHMQALPPR

SEQ ID NO: 30011 - protein, 275 aa, synthetic construct
SQDSTLCLFTDFDSQINVPKTMESGTFITDKCVLDMKAMDSKSNGAIAWSNQTSFTCQDIFKETNATYPSSDVPCDATLTEKSFETDMNLNFQNLLVVGLRILLLKVAGFNLLMTLRLWSSRSKRSRLLHSDYMNMTPRRPGPTRKHYQPYAPPRDFAAYRSRVKFSRSADAPAYQQGQNQLYNELNLGRREEYDVLDKRRGRDPEMGGKPQRRKNPQEGLYNELQKDKMAEAYSEIGMKGERRRGKGHDGLYQGLSTATKDTYDALHMQALPPR

SEQ ID NO: 30012 - protein, 270 aa, synthetic construct
LCLFTDFDSQINVPKTMESGTFITDKCVLDMKAMDSKSNGAIAWSNQTSFTCQDIFKETNATYPSSDVPCDATLTEKSFETDMNLNFQNLLVVGLRILLLKVAGFNLLMTLRLWSSRSKRSRLLHSDYMNMTPRRPGPTRKHYQPYAPPRDFAAYRSRVKFSRSADAPAYQQGQNQLYNELNLGRREEYDVLDKRRGRDPEMGGKPQRRKNPQEGLYNELQKDKMAEAYSEIGMKGERRRGKGHDGLYQGLSTATKDTYDALHMQALPPR

SEQ ID NO: 30013 - protein, 325 aa, synthetic construct
EDLRNVTPPKVSLFEPSKAEIANKQKATLVCLARGFFPDHVELSWWVNGKEVHSGVCTDPQAYKESNYSYCLSSRLRVSATFWHNPRNHFRCQVQFHGLSEEDKWPEGSPKPVTQNISAEAWGRACGITSSYQQGVLSATILYEILLGKATLYAVLVSTLVVMAMVKRKNSRSKRSRLLHSDYMNMTPRRPGPTRKHYQPYAPPRDFAAYRSRVKFSRSADAPAYQQGQNQLYNELNLGRREEYDVLDKRRGRDPEMGGKPQRRKNPQEGLYNELQKDKMAEAYSEIGMKGERRRGKGHDGLYQGLSTATKDTYDALHMQALPPR

SEQ ID NO: 30014 - protein, 324 aa, synthetic construct
DLRNVTPPKVSLFEPSKAEIANKQKATLVCLARGFFPDHVELSWWVNGKEVHSGVCTDPQAYKESNYSYCLSSRLRVSATFWHNPRNHFRCQVQFHGLSEEDKWPEGSPKPVTQNISAEAWGRACGITSSYQQGVLSATILYEILLGKATLYAVLVSTLVVMAMVKRKNSRSKRSRLLHSDYMNMTPRRPGPTRKHYQPYAPPRDFAAYRSRVKFSRSADAPAYQQGQNQLYNELNLGRREEYDVLDKRRGRDPEMGGKPQRRKNPQEGLYNELQKDKMAEAYSEIGMKGERRRGKGHDGLYQGLSTATKDTYDALHMQALPPR

SEQ ID NO: 30015 - protein, 322 aa, synthetic construct
RNVTPPKVSLFEPSKAEIANKQKATLVCLARGFFPDHVELSWWVNGKEVHSGVCTDPQAYKESNYSYCLSSRLRVSATFWHNPRNHFRCQVQFHGLSEEDKWPEGSPKPVTQNISAEAWGRACGITSSYQQGVLSATILYEILLGKATLYAVLVSTLVVMAMVKRKNSRSKRSRLLHSDYMNMTPRRPGPTRKHYQPYAPPRDFAAYRSRVKFSRSADAPAYQQGQNQLYNELNLGRREEYDVLDKRRGRDPEMGGKPQRRKNPQEGLYNELQKDKMAEAYSEIGMKGERRRGKGHDGLYQGLSTATKDTYDALHMQALPPR

SEQ ID NO: 30016 - protein, 321 aa, synthetic construct
NVTPPKVSLFEPSKAEIANKQKATLVCLARGFFPDHVELSWWVNGKEVHSGVCTDPQAYKESNYSYCLSSRLRVSATFWHNPRNHFRCQVQFHGLSEEDKWPEGSPKPVTQNISAEAWGRACGITSSYQQGVLSATILYEILLGKATLYAVLVSTLVVMAMVKRKNSRSKRSRLLHSDYMNMTPRRPGPTRKHYQPYAPPRDFAAYRSRVKFSRSADAPAYQQGQNQLYNELNLGRREEYDVLDKRRGRDPEMGGKPQRRKNPQEGLYNELQKDKMAEAYSEIGMKGERRRGKGHDGLYQGLSTATKDTYDALHMQALPPR

SEQ ID NO: 30017 - protein, 320 aa, synthetic construct
VTPPKVSLFEPSKAEIANKQKATLVCLARGFFPDHVELSWWVNGKEVHSGVCTDPQAYKESNYSYCLSSRLRVSATFWHNPRNHFRCQVQFHGLSEEDKWPEGSPKPVTQNISAEAWGRACGITSSYQQGVLSATILYEILLGKATLYAVLVSTLVVMAMVKRKNSRSKRSRLLHSDYMNMTPRRPGPTRKHYQPYAPPRDFAAYRSRVKFSRSADAPAYQQGQNQLYNELNLGRREEYDVLDKRRGRDPEMGGKPQRRKNPQEGLYNELQKDKMAEAYSEIGMKGERRRGKGHDGLYQGLSTATKDTYDALHMQALPPR

SEQ ID NO: 30018 - protein, 319 aa, synthetic construct
TPPKVSLFEPSKAEIANKQKATLVCLARGFFPDHVELSWWVNGKEVHSGVCTDPQAYKESNYSYCLSSRLRVSATFWHNPRNHFRCQVQFHGLSEEDKWPEGSPKPVTQNISAEAWGRACGITSSYQQGVLSATILYEILLGKATLYAVLVSTLVVMAMVKRKNSRSKRSRLLHSDYMNMTPRRPGPTRKHYQPYAPPRDFAAYRSRVKFSRSADAPAYQQGQNQLYNELNLGRREEYDVLDKRRGRDPEMGGKPQRRKNPQEGLYNELQKDKMAEAYSEIGMKGERRRGKGHDGLYQGLSTATKDTYDALHMQALPPR

SEQ ID NO: 30019 - protein, 318 aa, synthetic construct
PPKVSLFEPSKAEIANKQKATLVCLARGFFPDHVELSWWVNGKEVHSGVCTDPQAYKESNYSYCLSSRLRVSATFWHNPRNHFRCQVQFHGLSEEDKWPEGSPKPVTQNISAEAWGRACGITSSYQQGVLSATILYEILLGKATLYAVLVSTLVVMAMVKRKNSRSKRSRLLHSDYMNMTPRRPGPTRKHYQPYAPPRDFAAYRSRVKFSRSADAPAYQQGQNQLYNELNLGRREEYDVLDKRRGRDPEMGGKPQRRKNPQEGLYNELQKDKMAEAYSEIGMKGERRRGKGHDGLYQGLSTATKDTYDALHMQALPPR

SEQ ID NO: 30020 - protein, 317 aa, synthetic construct
PKVSLFEPSKAEIANKQKATLVCLARGFFPDHVELSWWVNGKEVHSGVCTDPQAYKESNYSYCLSSRLRVSATFWHNPRNHFRCQVQFHGLSEEDKWPEGSPKPVTQNISAEAWGRACGITSSYQQGVLSATILYEILLGKATLYAVLVSTLVVMAMVKRKNSRSKRSRLLHSDYMNMTPRRPGPTRKHYQPYAPPRDFAAYRSRVKFSRSADAPAYQQGQNQLYNELNLGRREEYDVLDKRRGRDPEMGGKPQRRKNPQEGLYNELQKDKMAEAYSEIGMKGERRRGKGHDGLYQGLSTATKDTYDALHMQALPPR

SEQ ID NO: 30021 - protein, 316 aa, synthetic construct
KVSLFEPSKAEIANKQKATLVCLARGFFPDHVELSWWVNGKEVHSGVCTDPQAYKESNYSYCLSSRLRVSATFWHNPRNHFRCQVQFHGLSEEDKWPEGSPKPVTQNISAEAWGRACGITSSYQQGVLSATILYEILLGKATLYAVLVSTLVVMAMVKRKNSRSKRSRLLHSDYMNMTPRRPGPTRKHYQPYAPPRDFAAYRSRVKFSRSADAPAYQQGQNQLYNELNLGRREEYDVLDKRRGRDPEMGGKPQRRKNPQEGLYNELQKDKMAEAYSEIGMKGERRRGKGHDGLYQGLSTATKDTYDALHMQALPPR

SEQ ID NO: 30022 - protein, 315 aa, synthetic construct
VSLFEPSKAEIANKQKATLVCLARGFFPDHVELSWWVNGKEVHSGVCTDPQAYKESNYSYCLSSRLRVSATFWHNPRNHFRCQVQFHGLSEEDKWPEGSPKPVTQNISAEAWGRACGITSSYQQGVLSATILYEILLGKATLYAVLVSTLVVMAMVKRKNSRSKRSRLLHSDYMNMTPRRPGPTRKHYQPYAPPRDFAAYRSRVKFSRSADAPAYQQGQNQLYNELNLGRREEYDVLDKRRGRDPEMGGKPQRRKNPQEGLYNELQKDKMAEAYSEIGMKGERRRGKGHDGLYQGLSTATKDTYDALHMQALPPR

SEQ ID NO: 30023 - protein, 325 aa, synthetic construct; identical to SEQ ID NO: 30013

SEQ ID NO: 30024 - protein, 320 aa, synthetic construct; identical to SEQ ID NO: 30017

SEQ ID NO: 30025 - protein, 315 aa, synthetic construct; identical to SEQ ID NO: 30022

SEQ ID NO: 30026 - protein, 294 aa, synthetic construct
IQNPDPAVYQLRDSKSSDKSVCLFTDFDSQTNVSQSKDSDVYITDKCVLDMRSMDFKSNSAVAWSNKSDFACANAFNNSIIPEDTFFPSPESSCDVKLVEKSFETDTNLNFQNLLVIVLRILLLKVAGFNLLMTLRLWSSRSKRSRLLHSDYMNMTPRRPGPTRKHYQPYAPPRDFAAYRSRVKFSRSADAPAYQQGQNQLYNELNLGRREEYDVLDKRRGRDPEMGGKPQRRKNPQEGLYNELQKDKMAEAYSEIGMKGERRRGKGHDGLYQGLSTATKDTYDALHMQALPPR

SEQ ID NO: 30027 - protein, 293 aa, synthetic construct
QNPDPAVYQLRDSKSSDKSVCLFTDFDSQTNVSQSKDSDVYITDKCVLDMRSMDFKSNSAVAWSNKSDFACANAFNNSIIPEDTFFPSPESSCDVKLVEKSFETDTNLNFQNLLVIVLRILLLKVAGFNLLMTLRLWSSRSKRSRLLHSDYMNMTPRRPGPTRKHYQPYAPPRDFAAYRSRVKFSRSADAPAYQQGQNQLYNELNLGRREEYDVLDKRRGRDPEMGGKPQRRKNPQEGLYNELQKDKMAEAYSEIGMKGERRRGKGHDGLYQGLSTATKDTYDALHMQALPPR

SEQ ID NO: 30028 - protein, 292 aa, synthetic construct
NPDPAVYQLRDSKSSDKSVCLFTDFDSQTNVSQSKDSDVYITDKCVLDMRSMDFKSNSAVAWSNKSDFACANAFNNSIIPEDTFFPSPESSCDVKLVEKSFETDTNLNFQNLLVIVLRILLLKVAGFNLLMTLRLWSSRSKRSRLLHSDYMNMTPRRPGPTRKHYQPYAPPRDFAAYRSRVKFSRSADAPAYQQGQNQLYNELNLGRREEYDVLDKRRGRDPEMGGKPQRRKNPQEGLYNELQKDKMAEAYSEIGMKGERRRGKGHDGLYQGLSTATKDTYDALHMQALPPR

SEQ ID NO: 30029 - protein, 291 aa, synthetic construct
PDPAVYQLRDSKSSDKSVCLFTDFDSQTNVSQSKDSDVYITDKCVLDMRSMDFKSNSAVAWSNKSDFACANAFNNSIIPEDTFFPSPESSCDVKLVEKSFETDTNLNFQNLLVIVLRILLLKVAGFNLLMTLRLWSSRSKRSRLLHSDYMNMTPRRPGPTRKHYQPYAPPRDFAAYRSRVKFSRSADAPAYQQGQNQLYNELNLGRREEYDVLDKRRGRDPEMGGKPQRRKNPQEGLYNELQKDKMAEAYSEIGMKGERRRGKGHDGLYQGLSTATKDTYDALHMQALPPR

SEQ ID NO: 30030 - protein, 290 aa, synthetic construct
DPAVYQLRDSKSSDKSVCLFTDFDSQTNVSQSKDSDVYITDKCVLDMRSMDFKSNSAVAWSNKSDFACANAFNNSIIPEDTFFPSPESSCDVKLVEKSFETDTNLNFQNLLVIVLRILLLKVAGFNLLMTLRLWSSRSKRSRLLHSDYMNMTPRRPGPTRKHYQPYAPPRDFAAYRSRVKFSRSADAPAYQQGQNQLYNELNLGRREEYDVLDKRRGRDPEMGGKPQRRKNPQEGLYNELQKDKMAEAYSEIGMKGERRRGKGHDGLYQGLSTATKDTYDALHMQALPPR

SEQ ID NO: 30031 - protein, 289 aa, synthetic construct
PAVYQLRDSKSSDKSVCLFTDFDSQTNVSQSKDSDVYITDKCVLDMRSMDFKSNSAVAWSNKSDFACANAFNNSIIPEDTFFPSPESSCDVKLVEKSFETDTNLNFQNLLVIVLRILLLKVAGFNLLMTLRLWSSRSKRSRLLHSDYMNMTPRRPGPTRKHYQPYAPPRDFAAYRSRVKFSRSADAPAYQQGQNQLYNELNLGRREEYDVLDKRRGRDPEMGGKPQRRKNPQEGLYNELQKDKMAEAYSEIGMKGERRRGKGHDGLYQGLSTATKDTYDALHMQALPPR

SEQ ID NO: 30032 - protein, 288 aa, synthetic construct
AVYQLRDSKSSDKSVCLFTDFDSQTNVSQSKDSDVYITDKCVLDMRSMDFKSNSAVAWSNKSDFACANAFNNSIIPEDTFFPSPESSCDVKLVEKSFETDTNLNFQNLLVIVLRILLLKVAGFNLLMTLRLWSSRSKRSRLLHSDYMNMTPRRPGPTRKHYQPYAPPRDFAAYRSRVKFSRSADAPAYQQGQNQLYNELNLGRREEYDVLDKRRGRDPEMGGKPQRRKNPQEGLYNELQKDKMAEAYSEIGMKGERRRGKGHDGLYQGLSTATKDTYDALHMQALPPR

SEQ ID NO: 30033 - protein, 287 aa, synthetic construct
VYQLRDSKSSDKSVCLFTDFDSQTNVSQSKDSDVYITDKCVLDMRSMDFKSNSAVAWSNKSDFACANAFNNSIIPEDTFFPSPESSCDVKLVEKSFETDTNLNFQNLLVIVLRILLLKVAGFNLLMTLRLWSSRSKRSRLLHSDYMNMTPRRPGPTRKHYQPYAPPRDFAAYRSRVKFSRSADAPAYQQGQNQLYNELNLGRREEYDVLDKRRGRDPEMGGKPQRRKNPQEGLYNELQKDKMAEAYSEIGMKGERRRGKGHDGLYQGLSTATKDTYDALHMQALPPR

SEQ ID NO: 30034 - protein, 286 aa, synthetic construct
YQLRDSKSSDKSVCLFTDFDSQTNVSQSKDSDVYITDKCVLDMRSMDFKSNSAVAWSNKSDFACANAFNNSIIPEDTFFPSPESSCDVKLVEKSFETDTNLNFQNLLVIVLRILLLKVAGFNLLMTLRLWSSRSKRSRLLHSDYMNMTPRRPGPTRKHYQPYAPPRDFAAYRSRVKFSRSADAPAYQQGQNQLYNELNLGRREEYDVLDKRRGRDPEMGGKPQRRKNPQEGLYNELQKDKMAEAYSEIGMKGERRRGKGHDGLYQGLSTATKDTYDALHMQALPPR

SEQ ID NO: 30035 - protein, 285 aa, synthetic construct
QLRDSKSSDKSVCLFTDFDSQTNVSQSKDSDVYITDKCVLDMRSMDFKSNSAVAWSNKSDFACANAFNNSIIPEDTFFPSPESSCDVKLVEKSFETDTNLNFQNLLVIVLRILLLKVAGFNLLMTLRLWSSRSKRSRLLHSDYMNMTPRRPGPTRKHYQPYAPPRDFAAYRSRVKFSRSADAPAYQQGQNQLYNELNLGRREEYDVLDKRRGRDPEMGGKPQRRKNPQEGLYNELQKDKMAEAYSEIGMKGERRRGKGHDGLYQGLSTATKDTYDALHMQALPPR

SEQ ID NO: 30036 - protein, 284 aa, synthetic construct
LRDSKSSDKSVCLFTDFDSQTNVSQSKDSDVYITDKCVLDMRSMDFKSNSAVAWSNKSDFACANAFNNSIIPEDTFFPSPESSCDVKLVEKSFETDTNLNFQNLLVIVLRILLLKVAGFNLLMTLRLWSSRSKRSRLLHSDYMNMTPRRPGPTRKHYQPYAPPRDFAAYRSRVKFSRSADAPAYQQGQNQLYNELNLGRREEYDVLDKRRGRDPEMGGKPQRRKNPQEGLYNELQKDKMAEAYSEIGMKGERRRGKGHDGLYQGLSTATKDTYDALHMQALPPR

SEQ ID NO: 30037 - protein, 283 aa, synthetic construct
RDSKSSDKSVCLFTDFDSQTNVSQSKDSDVYITDKCVLDMRSMDFKSNSAVAWSNKSDFACANAFNNSIIPEDTFFPSPESSCDVKLVEKSFETDTNLNFQNLLVIVLRILLLKVAGFNLLMTLRLWSSRSKRSRLLHSDYMNMTPRRPGPTRKHYQPYAPPRDFAAYRSRVKFSRSADAPAYQQGQNQLYNELNLGRREEYDVLDKRRGRDPEMGGKPQRRKNPQEGLYNELQKDKMAEAYSEIGMKGERRRGKGHDGLYQGLSTATKDTYDALHMQALPPR

SEQ ID NO: 30038 - protein, 282 aa, synthetic construct
DSKSSDKSVCLFTDFDSQTNVSQSKDSDVYITDKCVLDMRSMDFKSNSAVAWSNKSDFACANAFNNSIIPEDTFFPSPESSCDVKLVEKSFETDTNLNFQNLLVIVLRILLLKVAGFNLLMTLRLWSSRSKRSRLLHSDYMNMTPRRPGPTRKHYQPYAPPRDFAAYRSRVKFSRSADAPAYQQGQNQLYNELNLGRREEYDVLDKRRGRDPEMGGKPQRRKNPQEGLYNELQKDKMAEAYSEIGMKGERRRGKGHDGLYQGLSTATKDTYDALHMQALPPR

SEQ ID NO: 30039 - protein, 281 aa, synthetic construct
SKSSDKSVCLFTDFDSQTNVSQSKDSDVYITDKCVLDMRSMDFKSNSAVAWSNKSDFACANAFNNSIIPEDTFFPSPESSCDVKLVEKSFETDTNLNFQNLLVIVLRILLLKVAGFNLLMTLRLWSSRSKRSRLLHSDYMNMTPRRPGPTRKHYQPYAPPRDFAAYRSRVKFSRSADAPAYQQGQNQLYNELNLGRREEYDVLDKRRGRDPEMGGKPQRRKNPQEGLYNELQKDKMAEAYSEIGMKGERRRGKGHDGLYQGLSTATKDTYDALHMQALPPR

SEQ ID NO: 30040 - protein, 280 aa, synthetic construct
KSSDKSVCLFTDFDSQTNVSQSKDSDVYITDKCVLDMRSMDFKSNSAVAWSNKSDFACANAFNNSIIPEDTFFPSPESSCDVKLVEKSFETDTNLNFQNLLVIVLRILLLKVAGFNLLMTLRLWSSRSKRSRLLHSDYMNMTPRRPGPTRKHYQPYAPPRDFAAYRSRVKFSRSADAPAYQQGQNQLYNELNLGRREEYDVLDKRRGRDPEMGGKPQRRKNPQEGLYNELQKDKMAEAYSEIGMKGERRRGKGHDGLYQGLSTATKDTYDALHMQALPPR

SEQ ID NO: 30041 - protein, 279 aa, synthetic construct
SSDKSVCLFTDFDSQTNVSQSKDSDVYITDKCVLDMRSMDFKSNSAVAWSNKSDFACANAFNNSIIPEDTFFPSPESSCDVKLVEKSFETDTNLNFQNLLVIVLRILLLKVAGFNLLMTLRLWSSRSKRSRLLHSDYMNMTPRRPGPTRKHYQPYAPPRDFAAYRSRVKFSRSADAPAYQQGQNQLYNELNLGRREEYDVLDKRRGRDPEMGGKPQRRKNPQEGLYNELQKDKMAEAYSEIGMKGERRRGKGHDGLYQGLSTATKDTYDALHMQALPPR

SEQ ID NO: 30042 - protein, 278 aa, synthetic construct
SDKSVCLFTDFDSQTNVSQSKDSDVYITDKCVLDMRSMDFKSNSAVAWSNKSDFACANAFNNSIIPEDTFFPSPESSCDVKLVEKSFETDTNLNFQNLLVIVLRILLLKVAGFNLLMTLRLWSSRSKRSRLLHSDYMNMTPRRPGPTRKHYQPYAPPRDFAAYRSRVKFSRSADAPAYQQGQNQLYNELNLGRREEYDVLDKRRGRDPEMGGKPQRRKNPQEGLYNELQKDKMAEAYSEIGMKGERRRGKGHDGLYQGLSTATKDTYDALHMQALPPR

SEQ ID NO: 30043 - protein, 277 aa, synthetic construct
DKSVCLFTDFDSQTNVSQSKDSDVYITDKCVLDMRSMDFKSNSAVAWSNKSDFACANAFNNSIIPEDTFFPSPESSCDVKLVEKSFETDTNLNFQNLLVIVLRILLLKVAGFNLLMTLRLWSSRSKRSRLLHSDYMNMTPRRPGPTRKHYQPYAPPRDFAAYRSRVKFSRSADAPAYQQGQNQLYNELNLGRREEYDVLDKRRGRDPEMGGKPQRRKNPQEGLYNELQKDKMAEAYSEIGMKGERRRGKGHDGLYQGLSTATKDTYDALHMQALPPR

SEQ ID NO: 30044 - protein, 276 aa, synthetic construct
KSVCLFTDFDSQTNVSQSKDSDVYITDKCVLDMRSMDFKSNSAVAWSNKSDFACANAFNNSIIPEDTFFPSPESSCDVKLVEKSFETDTNLNFQNLLVIVLRILLLKVAGFNLLMTLRLWSSRSKRSRLLHSDYMNMTPRRPGPTRKHYQPYAPPRDFAAYRSRVKFSRSADAPAYQQGQNQLYNELNLGRREEYDVLDKRRGRDPEMGGKPQRRKNPQEGLYNELQKDKMAEAYSEIGMKGERRRGKGHDGLYQGLSTATKDTYDALHMQALPPR

SEQ ID NO: 30045 - protein, 275 aa, synthetic construct
SVCLFTDFDSQTNVSQSKDSDVYITDKCVLDMRSMDFKSNSAVAWSNKSDFACANAFNNSIIPEDTFFPSPESSCDVKLVEKSFETDTNLNFQNLLVIVLRILLLKVAGFNLLMTLRLWSSRSKRSRLLHSDYMNMTPRRPGPTRKHYQPYAPPRDFAAYRSRVKFSRSADAPAYQQGQNQLYNELNLGRREEYDVLDKRRGRDPEMGGKPQRRKNPQEGLYNELQKDKMAEAYSEIGMKGERRRGKGHDGLYQGLSTATKDTYDALHMQALPPR

SEQ ID NO: 30046 - protein, 274 aa, synthetic construct
VCLFTDFDSQTNVSQSKDSDVYITDKCVLDMRSMDFKSNSAVAWSNKSDFACANAFNNSIIPEDTFFPSPESSCDVKLVEKSFETDTNLNFQNLLVIVLRILLLKVAGFNLLMTLRLWSSRSKRSRLLHSDYMNMTPRRPGPTRKHYQPYAPPRDFAAYRSRVKFSRSADAPAYQQGQNQLYNELNLGRREEYDVLDKRRGRDPEMGGKPQRRKNPQEGLYNELQKDKMAEAYSEIGMKGERRRGKGHDGLYQGLSTATKDTYDALHMQALPPR

SEQ ID NO: 30047 - protein, 273 aa, synthetic construct
CLFTDFDSQTNVSQSKDSDVYITDKCVLDMRSMDFKSNSAVAWSNKSDFACANAFNNSIIPEDTFFPSPESSCDVKLVEKSFETDTNLNFQNLLVIVLRILLLKVAGFNLLMTLRLWSSRSKRSRLLHSDYMNMTPRRPGPTRKHYQPYAPPRDFAAYRSRVKFSRSADAPAYQQGQNQLYNELNLGRREEYDVLDKRRGRDPEMGGKPQRRKNPQEGLYNELQKDKMAEAYSEIGMKGERRRGKGHDGLYQGLSTATKDTYDALHMQALPPR

SEQ ID NO: 30048 - protein, 272 aa, synthetic construct
LFTDFDSQTNVSQSKDSDVYITDKCVLDMRSMDFKSNSAVAWSNKSDFACANAFNNSIIPEDTFFPSPESSCDVKLVEKSFETDTNLNFQNLLVIVLRILLLKVAGFNLLMTLRLWSSRSKRSRLLHSDYMNMTPRRPGPTRKHYQPYAPPRDFAAYRSRVKFSRSADAPAYQQGQNQLYNELNLGRREEYDVLDKRRGRDPEMGGKPQRRKNPQEGLYNELQKDKMAEAYSEIGMKGERRRGKGHDGLYQGLSTATKDTYDALHMQALPPR

SEQ ID NO: 30049 - protein, 271 aa, synthetic construct
FTDFDSQTNVSQSKDSDVYITDKCVLDMRSMDFKSNSAVAWSNKSDFACANAFNNSIIPEDTFFPSPESSCDVKLVEKSFETDTNLNFQNLLVIVLRILLLKVAGFNLLMTLRLWSSRSKRSRLLHSDYMNMTPRRPGPTRKHYQPYAPPRDFAAYRSRVKFSRSADAPAYQQGQNQLYNELNLGRREEYDVLDKRRGRDPEMGGKPQRRKNPQEGLYNELQKDKMAEAYSEIGMKGERRRGKGHDGLYQGLSTATKDTYDALHMQALPPR

SEQ ID NO: 30050 - protein, 270 aa, synthetic construct
TDFDSQTNVSQSKDSDVYITDKCVLDMRSMDFKSNSAVAWSNKSDFACANAFNNSIIPEDTFFPSPESSCDVKLVEKSFETDTNLNFQNLLVIVLRILLLKVAGFNLLMTLRLWSSRSKRSRLLHSDYMNMTPRRPGPTRKHYQPYAPPRDFAAYRSRVKFSRSADAPAYQQGQNQLYNELNLGRREEYDVLDKRRGRDPEMGGKPQRRKNPQEGLYNELQKDKMAEAYSEIGMKGERRRGKGHDGLYQGLSTATKDTYDALHMQALPPR

SEQ ID NO: 30051 - protein, 269 aa, synthetic construct
DFDSQTNVSQSKDSDVYITDKCVLDMRSMDFKSNSAVAWSNKSDFACANAFNNSIIPEDTFFPSPESSCDVKLVEKSFETDTNLNFQNLLVIVLRILLLKVAGFNLLMTLRLWSSRSKRSRLLHSDYMNMTPRRPGPTRKHYQPYAPPRDFAAYRSRVKFSRSADAPAYQQGQNQLYNELNLGRREEYDVLDKRRGRDPEMGGKPQRRKNPQEGLYNELQKDKMAEAYSEIGMKGERRRGKGHDGLYQGLSTATKDTYDALHMQALPPR

SEQ ID NO: 30052 - protein, 268 aa, synthetic construct
FDSQTNVSQSKDSDVYITDKCVLDMRSMDFKSNSAVAWSNKSDFACANAFNNSIIPEDTFFPSPESSCDVKLVEKSFETDTNLNFQNLLVIVLRILLLKVAGFNLLMTLRLWSSRSKRSRLLHSDYMNMTPRRPGPTRKHYQPYAPPRDFAAYRSRVKFSRSADAPAYQQGQNQLYNELNLGRREEYDVLDKRRGRDPEMGGKPQRRKNPQEGLYNELQKDKMAEAYSEIGMKGERRRGKGHDGLYQGLSTATKDTYDALHMQALPPR

SEQ ID NO: 30053 - protein, 267 aa, synthetic construct
DSQTNVSQSKDSDVYITDKCVLDMRSMDFKSNSAVAWSNKSDFACANAFNNSIIPEDTFFPSPESSCDVKLVEKSFETDTNLNFQNLLVIVLRILLLKVAGFNLLMTLRLWSSRSKRSRLLHSDYMNMTPRRPGPTRKHYQPYAPPRDFAAYRSRVKFSRSADAPAYQQGQNQLYNELNLGRREEYDVLDKRRGRDPEMGGKPQRRKNPQEGLYNELQKDKMAEAYSEIGMKGERRRGKGHDGLYQGLSTATKDTYDALHMQALPPR

SEQ ID NO: 30054 - protein, 266 aa, synthetic construct
SQTNVSQSKDSDVYITDKCVLDMRSMDFKSNSAVAWSNKSDFACANAFNNSIIPEDTFFPSPESSCDVKLVEKSFETDTNLNFQNLLVIVLRILLLKVAGFNLLMTLRLWSSRSKRSRLLHSDYMNMTPRRPGPTRKHYQPYAPPRDFAAYRSRVKFSRSADAPAYQQGQNQLYNELNLGRREEYDVLDKRRGRDPEMGGKPQRRKNPQEGLYNELQKDKMAEAYSEIGMKGERRRGKGHDGLYQGLSTATKDTYDALHMQALPPR

SEQ ID NO: 30055 - protein, 265 aa, synthetic construct
QTNVSQSKDSDVYITDKCVLDMRSMDFKSNSAVAWSNKSDFACANAFNNSIIPEDTFFPSPESSCDVKLVEKSFETDTNLNFQNLLVIVLRILLLKVAGFNLLMTLRLWSSRSKRSRLLHSDYMNMTPRRPGPTRKHYQPYAPPRDFAAYRSRVKFSRSADAPAYQQGQNQLYNELNLGRREEYDVLDKRRGRDPEMGGKPQRRKNPQEGLYNELQKDKMAEAYSEIGMKGERRRGKGHDGLYQGLSTATKDTYDALHMQALPPR

SEQ ID NO: 30056 - protein, 264 aa, synthetic construct
TNVSQSKDSDVYITDKCVLDMRSMDFKSNSAVAWSNKSDFACANAFNNSIIPEDTFFPSPESSCDVKLVEKSFETDTNLNFQNLLVIVLRILLLKVAGFNLLMTLRLWSSRSKRSRLLHSDYMNMTPRRPGPTRKHYQPYAPPRDFAAYRSRVKFSRSADAPAYQQGQNQLYNELNLGRREEYDVLDKRRGRDPEMGGKPQRRKNPQEGLYNELQKDKMAEAYSEIGMKGERRRGKGHDGLYQGLSTATKDTYDALHMQALPPR

SEQ ID NO: 30057 - protein, 263 aa, synthetic construct
NVSQSKDSDVYITDKCVLDMRSMDFKSNSAVAWSNKSDFACANAFNNSIIPEDTFFPSPESSCDVKLVEKSFETDTNLNFQNLLVIVLRILLLKVAGFNLLMTLRLWSSRSKRSRLLHSDYMNMTPRRPGPTRKHYQPYAPPRDFAAYRSRVKFSRSADAPAYQQGQNQLYNELNLGRREEYDVLDKRRGRDPEMGGKPQRRKNPQEGLYNELQKDKMAEAYSEIGMKGERRRGKGHDGLYQGLSTATKDTYDALHMQALPPR

SEQ ID NO: 30058 - protein, 262 aa, synthetic construct
VSQSKDSDVYITDKCVLDMRSMDFKSNSAVAWSNKSDFACANAFNNSIIPEDTFFPSPESSCDVKLVEKSFETDTNLNFQNLLVIVLRILLLKVAGFNLLMTLRLWSSRSKRSRLLHSDYMNMTPRRPGPTRKHYQPYAPPRDFAAYRSRVKFSRSADAPAYQQGQNQLYNELNLGRREEYDVLDKRRGRDPEMGGKPQRRKNPQEGLYNELQKDKMAEAYSEIGMKGERRRGKGHDGLYQGLSTATKDTYDALHMQALPPR

SEQ ID NO: 30059 - protein, 261 aa, synthetic construct
SQSKDSDVYITDKCVLDMRSMDFKSNSAVAWSNKSDFACANAFNNSIIPEDTFFPSPESSCDVKLVEKSFETDTNLNFQNLLVIVLRILLLKVAGFNLLMTLRLWSSRSKRSRLLHSDYMNMTPRRPGPTRKHYQPYAPPRDFAAYRSRVKFSRSADAPAYQQGQNQLYNELNLGRREEYDVLDKRRGRDPEMGGKPQRRKNPQEGLYNELQKDKMAEAYSEIGMKGERRRGKGHDGLYQGLSTATKDTYDALHMQALPPR

SEQ ID NO: 30060 - protein, 260 aa, synthetic construct
QSKDSDVYITDKCVLDMRSMDFKSNSAVAWSNKSDFACANAFNNSIIPEDTFFPSPESSCDVKLVEKSFETDTNLNFQNLLVIVLRILLLKVAGFNLLMTLRLWSSRSKRSRLLHSDYMNMTPRRPGPTRKHYQPYAPPRDFAAYRSRVKFSRSADAPAYQQGQNQLYNELNLGRREEYDVLDKRRGRDPEMGGKPQRRKNPQEGLYNELQKDKMAEAYSEIGMKGERRRGKGHDGLYQGLSTATKDTYDALHMQALPPR

SEQ ID NO: 30061 - protein, 259 aa, synthetic construct
SKDSDVYITDKCVLDMRSMDFKSNSAVAWSNKSDFACANAFNNSIIPEDTFFPSPESSCDVKLVEKSFETDTNLNFQNLLVIVLRILLLKVAGFNLLMTLRLWSSRSKRSRLLHSDYMNMTPRRPGPTRKHYQPYAPPRDFAAYRSRVKFSRSADAPAYQQGQNQLYNELNLGRREEYDVLDKRRGRDPEMGGKPQRRKNPQEGLYNELQKDKMAEAYSEIGMKGERRRGKGHDGLYQGLSTATKDTYDALHMQALPPR

SEQ ID NO: 30062 - protein, 258 aa, synthetic construct
KDSDVYITDKCVLDMRSMDFKSNSAVAWSNKSDFACANAFNNSIIPEDTFFPSPESSCDVKLVEKSFETDTNLNFQNLLVIVLRILLLKVAGFNLLMTLRLWSSRSKRSRLLHSDYMNMTPRRPGPTRKHYQPYAPPRDFAAYRSRVKFSRSADAPAYQQGQNQLYNELNLGRREEYDVLDKRRGRDPEMGGKPQRRKNPQEGLYNELQKDKMAEAYSEIGMKGERRRGKGHDGLYQGLSTATKDTYDALHMQALPPR

SEQ ID NO: 30063 - protein, 257 aa, synthetic construct
DSDVYITDKCVLDMRSMDFKSNSAVAWSNKSDFACANAFNNSIIPEDTFFPSPESSCDVKLVEKSFETDTNLNFQNLLVIVLRILLLKVAGFNLLMTLRLWSSRSKRSRLLHSDYMNMTPRRPGPTRKHYQPYAPPRDFAAYRSRVKFSRSADAPAYQQGQNQLYNELNLGRREEYDVLDKRRGRDPEMGGKPQRRKNPQEGLYNELQKDKMAEAYSEIGMKGERRRGKGHDGLYQGLSTATKDTYDALHMQALPPR

SEQ ID NO: 30064 - protein, 256 aa, synthetic construct
SDVYITDKCVLDMRSMDFKSNSAVAWSNKSDFACANAFNNSIIPEDTFFPSPESSCDVKLVEKSFETDTNLNFQNLLVIVLRILLLKVAGFNLLMTLRLWSSRSKRSRLLHSDYMNMTPRRPGPTRKHYQPYAPPRDFAAYRSRVKFSRSADAPAYQQGQNQLYNELNLGRREEYDVLDKRRGRDPEMGGKPQRRKNPQEGLYNELQKDKMAEAYSEIGMKGERRRGKGHDGLYQGLSTATKDTYDALHMQALPPR

SEQ ID NO: 30065 - protein, 255 aa, synthetic construct
DVYITDKCVLDMRSMDFKSNSAVAWSNKSDFACANAFNNSIIPEDTFFPSPESSCDVKLVEKSFETDTNLNFQNLLVIVLRILLLKVAGFNLLMTLRLWSSRSKRSRLLHSDYMNMTPRRPGPTRKHYQPYAPPRDFAAYRSRVKFSRSADAPAYQQGQNQLYNELNLGRREEYDVLDKRRGRDPEMGGKPQRRKNPQEGLYNELQKDKMAEAYSEIGMKGERRRGKGHDGLYQGLSTATKDTYDALHMQALPPR

SEQ ID NO: 30066 - protein, 254 aa, synthetic construct
VYITDKCVLDMRSMDFKSNSAVAWSNKSDFACANAFNNSIIPEDTFFPSPESSCDVKLVEKSFETDTNLNFQNLLVIVLRILLLKVAGFNLLMTLRLWSSRSKRSRLLHSDYMNMTPRRPGPTRKHYQPYAPPRDFAAYRSRVKFSRSADAPAYQQGQNQLYNELNLGRREEYDVLDKRRGRDPEMGGKPQRRKNPQEGLYNELQKDKMAEAYSEIGMKGERRRGKGHDGLYQGLSTATKDTYDALHMQALPPR

SEQ ID NO: 30067 - protein, 253 aa, synthetic construct
YITDKCVLDMRSMDFKSNSAVAWSNKSDFACANAFNNSIIPEDTFFPSPESSCDVKLVEKSFETDTNLNFQNLLVIVLRILLLKVAGFNLLMTLRLWSSRSKRSRLLHSDYMNMTPRRPGPTRKHYQPYAPPRDFAAYRSRVKFSRSADAPAYQQGQNQLYNELNLGRREEYDVLDKRRGRDPEMGGKPQRRKNPQEGLYNELQKDKMAEAYSEIGMKGERRRGKGHDGLYQGLSTATKDTYDALHMQALPPR

SEQ ID NO: 30068 - protein, 252 aa, synthetic construct
ITDKCVLDMRSMDFKSNSAVAWSNKSDFACANAFNNSIIPEDTFFPSPESSCDVKLVEKSFETDTNLNFQNLLVIVLRILLLKVAGFNLLMTLRLWSSRSKRSRLLHSDYMNMTPRRPGPTRKHYQPYAPPRDFAAYRSRVKFSRSADAPAYQQGQNQLYNELNLGRREEYDVLDKRRGRDPEMGGKPQRRKNPQEGLYNELQKDKMAEAYSEIGMKGERRRGKGHDGLYQGLSTATKDTYDALHMQALPPR

SEQ ID NO: 30069 - protein, 251 aa, synthetic construct
TDKCVLDMRSMDFKSNSAVAWSNKSDFACANAFNNSIIPEDTFFPSPESSCDVKLVEKSFETDTNLNFQNLLVIVLRILLLKVAGFNLLMTLRLWSSRSKRSRLLHSDYMNMTPRRPGPTRKHYQPYAPPRDFAAYRSRVKFSRSADAPAYQQGQNQLYNELNLGRREEYDVLDKRRGRDPEMGGKPQRRKNPQEGLYNELQKDKMAEAYSEIGMKGERRRGKGHDGLYQGLSTATKDTYDALHMQALPPR

SEQ ID NO: 30070 - protein, 250 aa, synthetic construct
DKCVLDMRSMDFKSNSAVAWSNKSDFACANAFNNSIIPEDTFFPSPESSCDVKLVEKSFETDTNLNFQNLLVIVLRILLLKVAGFNLLMTLRLWSSRSKRSRLLHSDYMNMTPRRPGPTRKHYQPYAPPRDFAAYRSRVKFSRSADAPAYQQGQNQLYNELNLGRREEYDVLDKRRGRDPEMGGKPQRRKNPQEGLYNELQKDKMAEAYSEIGMKGERRRGKGHDGLYQGLSTATKDTYDALHMQALPPR

SEQ ID NO: 30071 - protein, 248 aa, synthetic construct
CVLDMRSMDFKSNSAVAWSNKSDFACANAFNNSIIPEDTFFPSPESSCDVKLVEKSFETDTNLNFQNLLVIVLRILLLKVAGFNLLMTLRLWSSRSKRSRLLHSDYMNMTPRRPGPTRKHYQPYAPPRDFAAYRSRVKFSRSADAPAYQQGQNQLYNELNLGRREEYDVLDKRRGRDPEMGGKPQRRKNPQEGLYNELQKDKMAEAYSEIGMKGERRRGKGHDGLYQGLSTATKDTYDALHMQALPPR

SEQ ID NO: 30072 - protein, 247 aa, synthetic construct
VLDMRSMDFKSNSAVAWSNKSDFACANAFNNSIIPEDTFFPSPESSCDVKLVEKSFETDTNLNFQNLLVIVLRILLLKVAGFNLLMTLRLWSSRSKRSRLLHSDYMNMTPRRPGPTRKHYQPYAPPRDFAAYRSRVKFSRSADAPAYQQGQNQLYNELNLGRREEYDVLDKRRGRDPEMGGKPQRRKNPQEGLYNELQKDKMAEAYSEIGMKGERRRGKGHDGLYQGLSTATKDTYDALHMQALPPR

SEQ ID NO: 30073 - protein, 246 aa, synthetic construct
LDMRSMDFKSNSAVAWSNKSDFACANAFNNSIIPEDTFFPSPESSCDVKLVEKSFETDTNLNFQNLLVIVLRILLLKVAGFNLLMTLRLWSSRSKRSRLLHSDYMNMTPRRPGPTRKHYQPYAPPRDFAAYRSRVKFSRSADAPAYQQGQNQLYNELNLGRREEYDVLDKRRGRDPEMGGKPQRRKNPQEGLYNELQKDKMAEAYSEIGMKGERRRGKGHDGLYQGLSTATKDTYDALHMQALPPR

SEQ ID NO: 30074 - protein, 245 aa, synthetic construct
DMRSMDFKSNSAVAWSNKSDFACANAFNNSIIPEDTFFPSPESSCDVKLVEKSFETDTNLNFQNLLVIVLRILLLKVAGFNLLMTLRLWSSRSKRSRLLHSDYMNMTPRRPGPTRKHYQPYAPPRDFAAYRSRVKFSRSADAPAYQQGQNQLYNELNLGRREEYDVLDKRRGRDPEMGGKPQRRKNPQEGLYNELQKDKMAEAYSEIGMKGERRRGKGHDGLYQGLSTATKDTYDALHMQALPPR

SEQ ID NO: 30075 - protein, 244 aa, synthetic construct
MRSMDFKSNSAVAWSNKSDFACANAFNNSIIPEDTFFPSPESSCDVKLVEKSFETDTNLNFQNLLVIVLRILLLKVAGFNLLMTLRLWSSRSKRSRLLHSDYMNMTPRRPGPTRKHYQPYAPPRDFAAYRSRVKFSRSADAPAYQQGQNQLYNELNLGRREEYDVLDKRRGRDPEMGGKPQRRKNPQEGLYNELQKDKMAEAYSEIGMKGERRRGKGHDGLYQGLSTATKDTYDALHMQALPPR

SEQ ID NO: 30076 - protein, 243 aa, synthetic construct
RSMDFKSNSAVAWSNKSDFACANAFNNSIIPEDTFFPSPESSCDVKLVEKSFETDTNLNFQNLLVIVLRILLLKVAGFNLLMTLRLWSSRSKRSRLLHSDYMNMTPRRPGPTRKHYQPYAPPRDFAAYRSRVKFSRSADAPAYQQGQNQLYNELNLGRREEYDVLDKRRGRDPEMGGKPQRRKNPQEGLYNELQKDKMAEAYSEIGMKGERRRGKGHDGLYQGLSTATKDTYDALHMQALPPR

SEQ ID NO: 30077 - protein, 242 aa, synthetic construct
SMDFKSNSAVAWSNKSDFACANAFNNSIIPEDTFFPSPESSCDVKLVEKSFETDTNLNFQNLLVIVLRILLLKVAGFNLLMTLRLWSSRSKRSRLLHSDYMNMTPRRPGPTRKHYQPYAPPRDFAAYRSRVKFSRSADAPAYQQGQNQLYNELNLGRREEYDVLDKRRGRDPEMGGKPQRRKNPQEGLYNELQKDKMAEAYSEIGMKGERRRGKGHDGLYQGLSTATKDTYDALHMQALPPR

SEQ ID NO: 30078 - protein, 241 aa, synthetic construct
MDFKSNSAVAWSNKSDFACANAFNNSIIPEDTFFPSPESSCDVKLVEKSFETDTNLNFQNLLVIVLRILLLKVAGFNLLMTLRLWSSRSKRSRLLHSDYMNMTPRRPGPTRKHYQPYAPPRDFAAYRSRVKFSRSADAPAYQQGQNQLYNELNLGRREEYDVLDKRRGRDPEMGGKPQRRKNPQEGLYNELQKDKMAEAYSEIGMKGERRRGKGHDGLYQGLSTATKDTYDALHMQALPPR

SEQ ID NO: 30079 - protein, 240 aa, synthetic construct
DFKSNSAVAWSNKSDFACANAFNNSIIPEDTFFPSPESSCDVKLVEKSFETDTNLNFQNLLVIVLRILLLKVAGFNLLMTLRLWSSRSKRSRLLHSDYMNMTPRRPGPTRKHYQPYAPPRDFAAYRSRVKFSRSADAPAYQQGQNQLYNELNLGRREEYDVLDKRRGRDPEMGGKPQRRKNPQEGLYNELQKDKMAEAYSEIGMKGERRRGKGHDGLYQGLSTATKDTYDALHMQALPPR

SEQ ID NO: 30080 - protein, 239 aa, synthetic construct
FKSNSAVAWSNKSDFACANAFNNSIIPEDTFFPSPESSCDVKLVEKSFETDTNLNFQNLLVIVLRILLLKVAGFNLLMTLRLWSSRSKRSRLLHSDYMNMTPRRPGPTRKHYQPYAPPRDFAAYRSRVKFSRSADAPAYQQGQNQLYNELNLGRREEYDVLDKRRGRDPEMGGKPQRRKNPQEGLYNELQKDKMAEAYSEIGMKGERRRGKGHDGLYQGLSTATKDTYDALHMQALPPR

SEQ ID NO: 30081 - protein, 238 aa, synthetic construct
KSNSAVAWSNKSDFACANAFNNSIIPEDTFFPSPESSCDVKLVEKSFETDTNLNFQNLLVIVLRILLLKVAGFNLLMTLRLWSSRSKRSRLLHSDYMNMTPRRPGPTRKHYQPYAPPRDFAAYRSRVKFSRSADAPAYQQGQNQLYNELNLGRREEYDVLDKRRGRDPEMGGKPQRRKNPQEGLYNELQKDKMAEAYSEIGMKGERRRGKGHDGLYQGLSTATKDTYDALHMQALPPR

SEQ ID NO: 30082 - protein, 237 aa, synthetic construct
SNSAVAWSNKSDFACANAFNNSIIPEDTFFPSPESSCDVKLVEKSFETDTNLNFQNLLVIVLRILLLKVAGFNLLMTLRLWSSRSKRSRLLHSDYMNMTPRRPGPTRKHYQPYAPPRDFAAYRSRVKFSRSADAPAYQQGQNQLYNELNLGRREEYDVLDKRRGRDPEMGGKPQRRKNPQEGLYNELQKDKMAEAYSEIGMKGERRRGKGHDGLYQGLSTATKDTYDALHMQALPPR

SEQ ID NO: 30083 - protein, 236 aa, synthetic construct
NSAVAWSNKSDFACANAFNNSIIPEDTFFPSPESSCDVKLVEKSFETDTNLNFQNLLVIVLRILLLKVAGFNLLMTLRLWSSRSKRSRLLHSDYMNMTPRRPGPTRKHYQPYAPPRDFAAYRSRVKFSRSADAPAYQQGQNQLYNELNLGRREEYDVLDKRRGRDPEMGGKPQRRKNPQEGLYNELQKDKMAEAYSEIGMKGERRRGKGHDGLYQGLSTATKDTYDALHMQALPPR

SEQ ID NO: 30084 - protein, 235 aa, synthetic construct
SAVAWSNKSDFACANAFNNSIIPEDTFFPSPESSCDVKLVEKSFETDTNLNFQNLLVIVLRILLLKVAGFNLLMTLRLWSSRSKRSRLLHSDYMNMTPRRPGPTRKHYQPYAPPRDFAAYRSRVKFSRSADAPAYQQGQNQLYNELNLGRREEYDVLDKRRGRDPEMGGKPQRRKNPQEGLYNELQKDKMAEAYSEIGMKGERRRGKGHDGLYQGLSTATKDTYDALHMQALPPR

SEQ ID NO: 30085 - protein, 234 aa, synthetic construct
AVAWSNKSDFACANAFNNSIIPEDTFFPSPESSCDVKLVEKSFETDTNLNFQNLLVIVLRILLLKVAGFNLLMTLRLWSSRSKRSRLLHSDYMNMTPRRPGPTRKHYQPYAPPRDFAAYRSRVKFSRSADAPAYQQGQNQLYNELNLGRREEYDVLDKRRGRDPEMGGKPQRRKNPQEGLYNELQKDKMAEAYSEIGMKGERRRGKGHDGLYQGLSTATKDTYDALHMQALPPR

SEQ ID NO: 30086 - protein, 233 aa, synthetic construct
VAWSNKSDFACANAFNNSIIPEDTFFPSPESSCDVKLVEKSFETDTNLNFQNLLVIVLRILLLKVAGFNLLMTLRLWSSRSKRSRLLHSDYMNMTPRRPGPTRKHYQPYAPPRDFAAYRSRVKFSRSADAPAYQQGQNQLYNELNLGRREEYDVLDKRRGRDPEMGGKPQRRKNPQEGLYNELQKDKMAEAYSEIGMKGERRRGKGHDGLYQGLSTATKDTYDALHMQALPPR

SEQ ID NO: 30087 - protein, 232 aa, synthetic construct
AWSNKSDFACANAFNNSIIPEDTFFPSPESSCDVKLVEKSFETDTNLNFQNLLVIVLRILLLKVAGFNLLMTLRLWSSRSKRSRLLHSDYMNMTPRRPGPTRKHYQPYAPPRDFAAYRSRVKFSRSADAPAYQQGQNQLYNELNLGRREEYDVLDKRRGRDPEMGGKPQRRKNPQEGLYNELQKDKMAEAYSEIGMKGERRRGKGHDGLYQGLSTATKDTYDALHMQALPPR

SEQ ID NO: 30088 - protein, 231 aa, synthetic construct
WSNKSDFACANAFNNSIIPEDTFFPSPESSCDVKLVEKSFETDTNLNFQNLLVIVLRILLLKVAGFNLLMTLRLWSSRSKRSRLLHSDYMNMTPRRPGPTRKHYQPYAPPRDFAAYRSRVKFSRSADAPAYQQGQNQLYNELNLGRREEYDVLDKRRGRDPEMGGKPQRRKNPQEGLYNELQKDKMAEAYSEIGMKGERRRGKGHDGLYQGLSTATKDTYDALHMQALPPR

SEQ ID NO: 30089 - protein, 230 aa, synthetic construct
SNKSDFACANAFNNSIIPEDTFFPSPESSCDVKLVEKSFETDTNLNFQNLLVIVLRILLLKVAGFNLLMTLRLWSSRSKRSRLLHSDYMNMTPRRPGPTRKHYQPYAPPRDFAAYRSRVKFSRSADAPAYQQGQNQLYNELNLGRREEYDVLDKRRGRDPEMGGKPQRRKNPQEGLYNELQKDKMAEAYSEIGMKGERRRGKGHDGLYQGLSTATKDTYDALHMQALPPR

SEQ ID NO: 30090 - protein, 229 aa, synthetic construct
NKSDFACANAFNNSIIPEDTFFPSPESSCDVKLVEKSFETDTNLNFQNLLVIVLRILLLKVAGFNLLMTLRLWSSRSKRSRLLHSDYMNMTPRRPGPTRKHYQPYAPPRDFAAYRSRVKFSRSADAPAYQQGQNQLYNELNLGRREEYDVLDKRRGRDPEMGGKPQRRKNPQEGLYNELQKDKMAEAYSEIGMKGERRRGKGHDGLYQGLSTATKDTYDALHMQALPPR

SEQ ID NO: 30091 - protein, 228 aa, synthetic construct
KSDFACANAFNNSIIPEDTFFPSPESSCDVKLVEKSFETDTNLNFQNLLVIVLRILLLKVAGFNLLMTLRLWSSRSKRSRLLHSDYMNMTPRRPGPTRKHYQPYAPPRDFAAYRSRVKFSRSADAPAYQQGQNQLYNELNLGRREEYDVLDKRRGRDPEMGGKPQRRKNPQEGLYNELQKDKMAEAYSEIGMKGERRRGKGHDGLYQGLSTATKDTYDALHMQALPPR

SEQ ID NO: 30092 - protein, 227 aa, synthetic construct
SDFACANAFNNSIIPEDTFFPSPESSCDVKLVEKSFETDTNLNFQNLLVIVLRILLLKVAGFNLLMTLRLWSSRSKRSRLLHSDYMNMTPRRPGPTRKHYQPYAPPRDFAAYRSRVKFSRSADAPAYQQGQNQLYNELNLGRREEYDVLDKRRGRDPEMGGKPQRRKNPQEGLYNELQKDKMAEAYSEIGMKGERRRGKGHDGLYQGLSTATKDTYDALHMQALPPR

SEQ ID NO: 30093 - protein, 226 aa, synthetic construct
DFACANAFNNSIIPEDTFFPSPESSCDVKLVEKSFETDTNLNFQNLLVIVLRILLLKVAGFNLLMTLRLWSSRSKRSRLLHSDYMNMTPRRPGPTRKHYQPYAPPRDFAAYRSRVKFSRSADAPAYQQGQNQLYNELNLGRREEYDVLDKRRGRDPEMGGKPQRRKNPQEGLYNELQKDKMAEAYSEIGMKGERRRGKGHDGLYQGLSTATKDTYDALHMQALPPR

SEQ ID NO: 30094 - protein, 225 aa, synthetic construct
FACANAFNNSIIPEDTFFPSPESSCDVKLVEKSFETDTNLNFQNLLVIVLRILLLKVAGFNLLMTLRLWSSRSKRSRLLHSDYMNMTPRRPGPTRKHYQPYAPPRDFAAYRSRVKFSRSADAPAYQQGQNQLYNELNLGRREEYDVLDKRRGRDPEMGGKPQRRKNPQEGLYNELQKDKMAEAYSEIGMKGERRRGKGHDGLYQGLSTATKDTYDALHMQALPPR

SEQ ID NO: 30095 - protein, 224 aa, synthetic construct
ACANAFNNSIIPEDTFFPSPESSCDVKLVEKSFETDTNLNFQNLLVIVLRILLLKVAGFNLLMTLRLWSSRSKRSRLLHSDYMNMTPRRPGPTRKHYQPYAPPRDFAAYRSRVKFSRSADAPAYQQGQNQLYNELNLGRREEYDVLDKRRGRDPEMGGKPQRRKNPQEGLYNELQKDKMAEAYSEIGMKGERRRGKGHDGLYQGLSTATKDTYDALHMQALPPR

SEQ ID NO: 30096 - protein, 223 aa, synthetic construct
CANAFNNSIIPEDTFFPSPESSCDVKLVEKSFETDTNLNFQNLLVIVLRILLLKVAGFNLLMTLRLWSSRSKRSRLLHSDYMNMTPRRPGPTRKHYQPYAPPRDFAAYRSRVKFSRSADAPAYQQGQNQLYNELNLGRREEYDVLDKRRGRDPEMGGKPQRRKNPQEGLYNELQKDKMAEAYSEIGMKGERRRGKGHDGLYQGLSTATKDTYDALHMQALPPR

SEQ ID NO: 30097 - protein, 222 aa, synthetic construct
ANAFNNSIIPEDTFFPSPESSCDVKLVEKSFETDTNLNFQNLLVIVLRILLLKVAGFNLLMTLRLWSSRSKRSRLLHSDYMNMTPRRPGPTRKHYQPYAPPRDFAAYRSRVKFSRSADAPAYQQGQNQLYNELNLGRREEYDVLDKRRGRDPEMGGKPQRRKNPQEGLYNELQKDKMAEAYSEIGMKGERRRGKGHDGLYQGLSTATKDTYDALHMQALPPR

SEQ ID NO: 30098 - protein, 221 aa, synthetic construct
NAFNNSIIPEDTFFPSPESSCDVKLVEKSFETDTNLNFQNLLVIVLRILLLKVAGFNLLMTLRLWSSRSKRSRLLHSDYMNMTPRRPGPTRKHYQPYAPPRDFAAYRSRVKFSRSADAPAYQQGQNQLYNELNLGRREEYDVLDKRRGRDPEMGGKPQRRKNPQEGLYNELQKDKMAEAYSEIGMKGERRRGKGHDGLYQGLSTATKDTYDALHMQALPPR

SEQ ID NO: 30099 - protein, 220 aa, synthetic construct
AFNNSIIPEDTFFPSPESSCDVKLVEKSFETDTNLNFQNLLVIVLRILLLKVAGFNLLMTLRLWSSRSKRSRLLHSDYMNMTPRRPGPTRKHYQPYAPPRDFAAYRSRVKFSRSADAPAYQQGQNQLYNELNLGRREEYDVLDKRRGRDPEMGGKPQRRKNPQEGLYNELQKDKMAEAYSEIGMKGERRRGKGHDGLYQGLSTATKDTYDALHMQALPPR

SEQ ID NO: 30100 - protein, 219 aa, synthetic construct
FNNSIIPEDTFFPSPESSCDVKLVEKSFETDTNLNFQNLLVIVLRILLLKVAGFNLLMTLRLWSSRSKRSRLLHSDYMNMTPRRPGPTRKHYQPYAPPRDFAAYRSRVKFSRSADAPAYQQGQNQLYNELNLGRREEYDVLDKRRGRDPEMGGKPQRRKNPQEGLYNELQKDKMAEAYSEIGMKGERRRGKGHDGLYQGLSTATKDTYDALHMQALPPR

SEQ ID NO: 30101 - protein, 218 aa, synthetic construct
NNSIIPEDTFFPSPESSCDVKLVEKSFETDTNLNFQNLLVIVLRILLLKVAGFNLLMTLRLWSSRSKRSRLLHSDYMNMTPRRPGPTRKHYQPYAPPRDFAAYRSRVKFSRSADAPAYQQGQNQLYNELNLGRREEYDVLDKRRGRDPEMGGKPQRRKNPQEGLYNELQKDKMAEAYSEIGMKGERRRGKGHDGLYQGLSTATKDTYDALHMQALPPR

SEQ ID NO: 30102 - protein, 217 aa, synthetic construct
NSIIPEDTFFPSPESSCDVKLVEKSFETDTNLNFQNLLVIVLRILLLKVAGFNLLMTLRLWSSRSKRSRLLHSDYMNMTPRRPGPTRKHYQPYAPPRDFAAYRSRVKFSRSADAPAYQQGQNQLYNELNLGRREEYDVLDKRRGRDPEMGGKPQRRKNPQEGLYNELQKDKMAEAYSEIGMKGERRRGKGHDGLYQGLSTATKDTYDALHMQALPPR

SEQ ID NO: 30103 - protein, 216 aa, synthetic construct
SIIPEDTFFPSPESSCDVKLVEKSFETDTNLNFQNLLVIVLRILLLKVAGFNLLMTLRLWSSRSKRSRLLHSDYMNMTPRRPGPTRKHYQPYAPPRDFAAYRSRVKFSRSADAPAYQQGQNQLYNELNLGRREEYDVLDKRRGRDPEMGGKPQRRKNPQEGLYNELQKDKMAEAYSEIGMKGERRRGKGHDGLYQGLSTATKDTYDALHMQALPPR

SEQ ID NO: 30104 - protein, 215 aa, synthetic construct
IIPEDTFFPSPESSCDVKLVEKSFETDTNLNFQNLLVIVLRILLLKVAGFNLLMTLRLWSSRSKRSRLLHSDYMNMTPRRPGPTRKHYQPYAPPRDFAAYRSRVKFSRSADAPAYQQGQNQLYNELNLGRREEYDVLDKRRGRDPEMGGKPQRRKNPQEGLYNELQKDKMAEAYSEIGMKGERRRGKGHDGLYQGLSTATKDTYDALHMQALPPR

SEQ ID NO: 30105 - protein, 214 aa, synthetic construct
IPEDTFFPSPESSCDVKLVEKSFETDTNLNFQNLLVIVLRILLLKVAGFNLLMTLRLWSSRSKRSRLLHSDYMNMTPRRPGPTRKHYQPYAPPRDFAAYRSRVKFSRSADAPAYQQGQNQLYNELNLGRREEYDVLDKRRGRDPEMGGKPQRRKNPQEGLYNELQKDKMAEAYSEIGMKGERRRGKGHDGLYQGLSTATKDTYDALHMQALPPR

SEQ ID NO: 30106 - protein, 213 aa, synthetic construct
PEDTFFPSPESSCDVKLVEKSFETDTNLNFQNLLVIVLRILLLKVAGFNLLMTLRLWSSRSKRSRLLHSDYMNMTPRRPGPTRKHYQPYAPPRDFAAYRSRVKFSRSADAPAYQQGQNQLYNELNLGRREEYDVLDKRRGRDPEMGGKPQRRKNPQEGLYNELQKDKMAEAYSEIGMKGERRRGKGHDGLYQGLSTATKDTYDALHMQALPPR

SEQ ID NO: 30107 - protein, 212 aa, synthetic construct
EDTFFPSPESSCDVKLVEKSFETDTNLNFQNLLVIVLRILLLKVAGFNLLMTLRLWSSRSKRSRLLHSDYMNMTPRRPGPTRKHYQPYAPPRDFAAYRSRVKFSRSADAPAYQQGQNQLYNELNLGRREEYDVLDKRRGRDPEMGGKPQRRKNPQEGLYNELQKDKMAEAYSEIGMKGERRRGKGHDGLYQGLSTATKDTYDALHMQALPPR

SEQ ID NO: 30108 - protein, 211 aa, synthetic construct
DTFFPSPESSCDVKLVEKSFETDTNLNFQNLLVIVLRILLLKVAGFNLLMTLRLWSSRSKRSRLLHSDYMNMTPRRPGPTRKHYQPYAPPRDFAAYRSRVKFSRSADAPAYQQGQNQLYNELNLGRREEYDVLDKRRGRDPEMGGKPQRRKNPQEGLYNELQKDKMAEAYSEIGMKGERRRGKGHDGLYQGLSTATKDTYDALHMQALPPR

SEQ ID NO: 30109 - protein, 210 aa, synthetic construct
TFFPSPESSCDVKLVEKSFETDTNLNFQNLLVIVLRILLLKVAGFNLLMTLRLWSSRSKRSRLLHSDYMNMTPRRPGPTRKHYQPYAPPRDFAAYRSRVKFSRSADAPAYQQGQNQLYNELNLGRREEYDVLDKRRGRDPEMGGKPQRRKNPQEGLYNELQKDKMAEAYSEIGMKGERRRGKGHDGLYQGLSTATKDTYDALHMQALPPR

SEQ ID NO: 30110 - protein, 209 aa, synthetic construct
FFPSPESSCDVKLVEKSFETDTNLNFQNLLVIVLRILLLKVAGFNLLMTLRLWSSRSKRSRLLHSDYMNMTPRRPGPTRKHYQPYAPPRDFAAYRSRVKFSRSADAPAYQQGQNQLYNELNLGRREEYDVLDKRRGRDPEMGGKPQRRKNPQEGLYNELQKDKMAEAYSEIGMKGERRRGKGHDGLYQGLSTATKDTYDALHMQALPPR

SEQ ID NO: 30111 - protein, 208 aa, synthetic construct
FPSPESSCDVKLVEKSFETDTNLNFQNLLVIVLRILLLKVAGFNLLMTLRLWSSRSKRSRLLHSDYMNMTPRRPGPTRKHYQPYAPPRDFAAYRSRVKFSRSADAPAYQQGQNQLYNELNLGRREEYDVLDKRRGRDPEMGGKPQRRKNPQEGLYNELQKDKMAEAYSEIGMKGERRRGKGHDGLYQGLSTATKDTYDALHMQALPPR

SEQ ID NO: 30112 - protein, 207 aa, synthetic construct
PSPESSCDVKLVEKSFETDTNLNFQNLLVIVLRILLLKVAGFNLLMTLRLWSSRSKRSRLLHSDYMNMTPRRPGPTRKHYQPYAPPRDFAAYRSRVKFSRSADAPAYQQGQNQLYNELNLGRREEYDVLDKRRGRDPEMGGKPQRRKNPQEGLYNELQKDKMAEAYSEIGMKGERRRGKGHDGLYQGLSTATKDTYDALHMQALPPR

SEQ ID NO: 30113 - protein, 206 aa, synthetic construct
SPESSCDVKLVEKSFETDTNLNFQNLLVIVLRILLLKVAGFNLLMTLRLWSSRSKRSRLLHSDYMNMTPRRPGPTRKHYQPYAPPRDFAAYRSRVKFSRSADAPAYQQGQNQLYNELNLGRREEYDVLDKRRGRDPEMGGKPQRRKNPQEGLYNELQKDKMAEAYSEIGMKGERRRGKGHDGLYQGLSTATKDTYDALHMQALPPR

SEQ ID NO: 30114 - protein, 205 aa, synthetic construct
PESSCDVKLVEKSFETDTNLNFQNLLVIVLRILLLKVAGFNLLMTLRLWSSRSKRSRLLHSDYMNMTPRRPGPTRKHYQPYAPPRDFAAYRSRVKFSRSADAPAYQQGQNQLYNELNLGRREEYDVLDKRRGRDPEMGGKPQRRKNPQEGLYNELQKDKMAEAYSEIGMKGERRRGKGHDGLYQGLSTATKDTYDALHMQALPPR

SEQ ID NO: 30115 - protein, 204 aa, synthetic construct
ESSCDVKLVEKSFETDTNLNFQNLLVIVLRILLLKVAGFNLLMTLRLWSSRSKRSRLLHSDYMNMTPRRPGPTRKHYQPYAPPRDFAAYRSRVKFSRSADAPAYQQGQNQLYNELNLGRREEYDVLDKRRGRDPEMGGKPQRRKNPQEGLYNELQKDKMAEAYSEIGMKGERRRGKGHDGLYQGLSTATKDTYDALHMQALPPR

SEQ ID NO: 30116 - protein, 203 aa, synthetic construct
SSCDVKLVEKSFETDTNLNFQNLLVIVLRILLLKVAGFNLLMTLRLWSSRSKRSRLLHSDYMNMTPRRPGPTRKHYQPYAPPRDFAAYRSRVKFSRSADAPAYQQGQNQLYNELNLGRREEYDVLDKRRGRDPEMGGKPQRRKNPQEGLYNELQKDKMAEAYSEIGMKGERRRGKGHDGLYQGLSTATKDTYDALHMQALPPR

SEQ ID NO: 30117 - protein, 202 aa, synthetic construct
SCDVKLVEKSFETDTNLNFQNLLVIVLRILLLKVAGFNLLMTLRLWSSRSKRSRLLHSDYMNMTPRRPGPTRKHYQPYAPPRDFAAYRSRVKFSRSADAPAYQQGQNQLYNELNLGRREEYDVLDKRRGRDPEMGGKPQRRKNPQEGLYNELQKDKMAEAYSEIGMKGERRRGKGHDGLYQGLSTATKDTYDALHMQALPPR

SEQ ID NO: 30118 - protein, 201 aa, synthetic construct
CDVKLVEKSFETDTNLNFQNLLVIVLRILLLKVAGFNLLMTLRLWSSRSKRSRLLHSDYMNMTPRRPGPTRKHYQPYAPPRDFAAYRSRVKFSRSADAPAYQQGQNQLYNELNLGRREEYDVLDKRRGRDPEMGGKPQRRKNPQEGLYNELQKDKMAEAYSEIGMKGERRRGKGHDGLYQGLSTATKDTYDALHMQALPPR

SEQ ID NO: 30119 - protein, 200 aa, synthetic construct
DVKLVEKSFETDTNLNFQNLLVIVLRILLLKVAGFNLLMTLRLWSSRSKRSRLLHSDYMNMTPRRPGPTRKHYQPYAPPRDFAAYRSRVKFSRSADAPAYQQGQNQLYNELNLGRREEYDVLDKRRGRDPEMGGKPQRRKNPQEGLYNELQKDKMAEAYSEIGMKGERRRGKGHDGLYQGLSTATKDTYDALHMQALPPR

SEQ ID NO: 30120 - protein, 199 aa, synthetic construct
VKLVEKSFETDTNLNFQNLLVIVLRILLLKVAGFNLLMTLRLWSSRSKRSRLLHSDYMNMTPRRPGPTRKHYQPYAPPRDFAAYRSRVKFSRSADAPAYQQGQNQLYNELNLGRREEYDVLDKRRGRDPEMGGKPQRRKNPQEGLYNELQKDKMAEAYSEIGMKGERRRGKGHDGLYQGLSTATKDTYDALHMQALPPR

SEQ ID NO: 30121 - protein, 198 aa, synthetic construct
KLVEKSFETDTNLNFQNLLVIVLRILLLKVAGFNLLMTLRLWSSRSKRSRLLHSDYMNMTPRRPGPTRKHYQPYAPPRDFAAYRSRVKFSRSADAPAYQQGQNQLYNELNLGRREEYDVLDKRRGRDPEMGGKPQRRKNPQEGLYNELQKDKMAEAYSEIGMKGERRRGKGHDGLYQGLSTATKDTYDALHMQALPPR

SEQ ID NO: 30122 - protein, 197 aa, synthetic construct
LVEKSFETDTNLNFQNLLVIVLRILLLKVAGFNLLMTLRLWSSRSKRSRLLHSDYMNMTPRRPGPTRKHYQPYAPPRDFAAYRSRVKFSRSADAPAYQQGQNQLYNELNLGRREEYDVLDKRRGRDPEMGGKPQRRKNPQEGLYNELQKDKMAEAYSEIGMKGERRRGKGHDGLYQGLSTATKDTYDALHMQALPPR

SEQ ID NO: 30123 - protein, 196 aa, synthetic construct
VEKSFETDTNLNFQNLLVIVLRILLLKVAGFNLLMTLRLWSSRSKRSRLLHSDYMNMTPRRPGPTRKHYQPYAPPRDFAAYRSRVKFSRSADAPAYQQGQNQLYNELNLGRREEYDVLDKRRGRDPEMGGKPQRRKNPQEGLYNELQKDKMAEAYSEIGMKGERRRGKGHDGLYQGLSTATKDTYDALHMQALPPR

SEQ ID NO: 30124 - protein, 195 aa, synthetic construct
EKSFETDTNLNFQNLLVIVLRILLLKVAGFNLLMTLRLWSSRSKRSRLLHSDYMNMTPRRPGPTRKHYQPYAPPRDFAAYRSRVKFSRSADAPAYQQGQNQLYNELNLGRREEYDVLDKRRGRDPEMGGKPQRRKNPQEGLYNELQKDKMAEAYSEIGMKGERRRGKGHDGLYQGLSTATKDTYDALHMQALPPR

SEQ ID NO: 30125 - protein, 194 aa, synthetic construct
KSFETDTNLNFQNLLVIVLRILLLKVAGFNLLMTLRLWSSRSKRSRLLHSDYMNMTPRRPGPTRKHYQPYAPPRDFAAYRSRVKFSRSADAPAYQQGQNQLYNELNLGRREEYDVLDKRRGRDPEMGGKPQRRKNPQEGLYNELQKDKMAEAYSEIGMKGERRRGKGHDGLYQGLSTATKDTYDALHMQALPPR

SEQ ID NO: 30126 - protein, 193 aa, synthetic construct
SFETDTNLNFQNLLVIVLRILLLKVAGFNLLMTLRLWSSRSKRSRLLHSDYMNMTPRRPGPTRKHYQPYAPPRDFAAYRSRVKFSRSADAPAYQQGQNQLYNELNLGRREEYDVLDKRRGRDPEMGGKPQRRKNPQEGLYNELQKDKMAEAYSEIGMKGERRRGKGHDGLYQGLSTATKDTYDALHMQALPPR

SEQ ID NO: 30127 - protein, 320 aa, synthetic construct
GQPKANPTVTLFPPSSEELQANKATLVCLISDFYPGAVTVAWKADGSPVKAGVETTKPSKQSNNKYAASSYLSLTPEQWKSHRSYSCQVTHEGSTVEKTVAPTECSIPEDTFFPSPESSCDVKLVEKSFETDTNLNFQNLLVIVLRILLLKVAGFNLLMTLRLWSSRSKRSRLLHSDYMNMTPRRPGPTRKHYQPYAPPRDFAAYRSRVKFSRSADAPAYQQGQNQLYNELNLGRREEYDVLDKRRGRDPEMGGKPQRRKNPQEGLYNELQKDKMAEAYSEIGMKGERRRGKGHDGLYQGLSTATKDTYDALHMQALPPR

SEQ ID NO: 30128 - protein, 319 aa, synthetic construct
QPKANPTVTLFPPSSEELQANKATLVCLISDFYPGAVTVAWKADGSPVKAGVETTKPSKQSNNKYAASSYLSLTPEQWKSHRSYSCQVTHEGSTVEKTVAPTECSIPEDTFFPSPESSCDVKLVEKSFETDTNLNFQNLLVIVLRILLLKVAGFNLLMTLRLWSSRSKRSRLLHSDYMNMTPRRPGPTRKHYQPYAPPRDFAAYRSRVKFSRSADAPAYQQGQNQLYNELNLGRREEYDVLDKRRGRDPEMGGKPQRRKNPQEGLYNELQKDKMAEAYSEIGMKGERRRGKGHDGLYQGLSTATKDTYDALHMQALPPR

SEQ ID NO: 30129 - protein, 318 aa, synthetic construct
PKANPTVTLFPPSSEELQANKATLVCLISDFYPGAVTVAWKADGSPVKAGVETTKPSKQSNNKYAASSYLSLTPEQWKSHRSYSCQVTHEGSTVEKTVAPTECSIPEDTFFPSPESSCDVKLVEKSFETDTNLNFQNLLVIVLRILLLKVAGFNLLMTLRLWSSRSKRSRLLHSDYMNMTPRRPGPTRKHYQPYAPPRDFAAYRSRVKFSRSADAPAYQQGQNQLYNELNLGRREEYDVLDKRRGRDPEMGGKPQRRKNPQEGLYNELQKDKMAEAYSEIGMKGERRRGKGHDGLYQGLSTATKDTYDALHMQALPPR

SEQ ID NO: 30130 - protein, 317 aa, synthetic construct
KANPTVTLFPPSSEELQANKATLVCLISDFYPGAVTVAWKADGSPVKAGVETTKPSKQSNNKYAASSYLSLTPEQWKSHRSYSCQVTHEGSTVEKTVAPTECSIPEDTFFPSPESSCDVKLVEKSFETDTNLNFQNLLVIVLRILLLKVAGFNLLMTLRLWSSRSKRSRLLHSDYMNMTPRRPGPTRKHYQPYAPPRDFAAYRSRVKFSRSADAPAYQQGQNQLYNELNLGRREEYDVLDKRRGRDPEMGGKPQRRKNPQEGLYNELQKDKMAEAYSEIGMKGERRRGKGHDGLYQGLSTATKDTYDALHMQALPPR

SEQ ID NO: 30131 - protein, 316 aa, synthetic construct
ANPTVTLFPPSSEELQANKATLVCLISDFYPGAVTVAWKADGSPVKAGVETTKPSKQSNNKYAASSYLSLTPEQWKSHRSYSCQVTHEGSTVEKTVAPTECSIPEDTFFPSPESSCDVKLVEKSFETDTNLNFQNLLVIVLRILLLKVAGFNLLMTLRLWSSRSKRSRLLHSDYMNMTPRRPGPTRKHYQPYAPPRDFAAYRSRVKFSRSADAPAYQQGQNQLYNELNLGRREEYDVLDKRRGRDPEMGGKPQRRKNPQEGLYNELQKDKMAEAYSEIGMKGERRRGKGHDGLYQGLSTATKDTYDALHMQALPPR

SEQ ID NO: 30132 - protein, 315 aa, synthetic construct
NPTVTLFPPSSEELQANKATLVCLISDFYPGAVTVAWKADGSPVKAGVETTKPSKQSNNKYAASSYLSLTPEQWKSHRSYSCQVTHEGSTVEKTVAPTECSIPEDTFFPSPESSCDVKLVEKSFETDTNLNFQNLLVIVLRILLLKVAGFNLLMTLRLWSSRSKRSRLLHSDYMNMTPRRPGPTRKHYQPYAPPRDFAAYRSRVKFSRSADAPAYQQGQNQLYNELNLGRREEYDVLDKRRGRDPEMGGKPQRRKNPQEGLYNELQKDKMAEAYSEIGMKGERRRGKGHDGLYQGLSTATKDTYDALHMQALPPR

SEQ ID NO: 30133 - protein, 314 aa, synthetic construct
PTVTLFPPSSEELQANKATLVCLISDFYPGAVTVAWKADGSPVKAGVETTKPSKQSNNKYAASSYLSLTPEQWKSHRSYSCQVTHEGSTVEKTVAPTECSIPEDTFFPSPESSCDVKLVEKSFETDTNLNFQNLLVIVLRILLLKVAGFNLLMTLRLWSSRSKRSRLLHSDYMNMTPRRPGPTRKHYQPYAPPRDFAAYRSRVKFSRSADAPAYQQGQNQLYNELNLGRREEYDVLDKRRGRDPEMGGKPQRRKNPQEGLYNELQKDKMAEAYSEIGMKGERRRGKGHDGLYQGLSTATKDTYDALHMQALPPR

SEQ ID NO: 30134 - protein, 313 aa, synthetic construct
TVTLFPPSSEELQANKATLVCLISDFYPGAVTVAWKADGSPVKAGVETTKPSKQSNNKYAASSYLSLTPEQWKSHRSYSCQVTHEGSTVEKTVAPTECSIPEDTFFPSPESSCDVKLVEKSFETDTNLNFQNLLVIVLRILLLKVAGFNLLMTLRLWSSRSKRSRLLHSDYMNMTPRRPGPTRKHYQPYAPPRDFAAYRSRVKFSRSADAPAYQQGQNQLYNELNLGRREEYDVLDKRRGRDPEMGGKPQRRKNPQEGLYNELQKDKMAEAYSEIGMKGERRRGKGHDGLYQGLSTATKDTYDALHMQALPPR

SEQ ID NO: 30135 - protein, 312 aa, synthetic construct
VTLFPPSSEELQANKATLVCLISDFYPGAVTVAWKADGSPVKAGVETTKPSKQSNNKYAASSYLSLTPEQWKSHRSYSCQVTHEGSTVEKTVAPTECSIPEDTFFPSPESSCDVKLVEKSFETDTNLNFQNLLVIVLRILLLKVAGFNLLMTLRLWSSRSKRSRLLHSDYMNMTPRRPGPTRKHYQPYAPPRDFAAYRSRVKFSRSADAPAYQQGQNQLYNELNLGRREEYDVLDKRRGRDPEMGGKPQRRKNPQEGLYNELQKDKMAEAYSEIGMKGERRRGKGHDGLYQGLSTATKDTYDALHMQALPPR

SEQ ID NO: 30136 - protein, 311 aa, synthetic construct
TLFPPSSEELQANKATLVCLISDFYPGAVTVAWKADGSPVKAGVETTKPSKQSNNKYAASSYLSLTPEQWKSHRSYSCQVTHEGSTVEKTVAPTECSIPEDTFFPSPESSCDVKLVEKSFETDTNLNFQNLLVIVLRILLLKVAGFNLLMTLRLWSSRSKRSRLLHSDYMNMTPRRPGPTRKHYQPYAPPRDFAAYRSRVKFSRSADAPAYQQGQNQLYNELNLGRREEYDVLDKRRGRDPEMGGKPQRRKNPQEGLYNELQKDKMAEAYSEIGMKGERRRGKGHDGLYQGLSTATKDTYDALHMQALPPR

SEQ ID NO: 30137 - protein, 310 aa, synthetic construct
LFPPSSEELQANKATLVCLISDFYPGAVTVAWKADGSPVKAGVETTKPSKQSNNKYAASSYLSLTPEQWKSHRSYSCQVTHEGSTVEKTVAPTECSIPEDTFFPSPESSCDVKLVEKSFETDTNLNFQNLLVIVLRILLLKVAGFNLLMTLRLWSSRSKRSRLLHSDYMNMTPRRPGPTRKHYQPYAPPRDFAAYRSRVKFSRSADAPAYQQGQNQLYNELNLGRREEYDVLDKRRGRDPEMGGKPQRRKNPQEGLYNELQKDKMAEAYSEIGMKGERRRGKGHDGLYQGLSTATKDTYDALHMQALPPR

SEQ ID NO: 30138 - protein, 330 aa, synthetic construct
DLKNVFPPEVAVFEPSEAEISHTQKATLVCLATGFYPDHVELSWWVNGKEVHSGVCTDPQPLKEQPALNDSRYCLSSRLRVSATFWQNPRNHFRCQVQFYGLSENDEWTQDRAKPVTQIVSAEAWGRADCDVKLVEKSFETDTNLNFQNLLVIVLRILLLKVAGFNLLMTLRLWSSRSKRSRLLHSDYMNMTPRRPGPTRKHYQPYAPPRDFAAYRSRVKFSRSADAPAYQQGQNQLYNELNLGRREEYDVLDKRRGRDPEMGGKPQRRKNPQEGLYNELQKDKMAEAYSEIGMKGERRRGKGHDGLYQGLSTATKDTYDALHMQALPPR

SEQ ID NO: 30139 - protein, 329 aa, synthetic construct
LKNVFPPEVAVFEPSEAEISHTQKATLVCLATGFYPDHVELSWWVNGKEVHSGVCTDPQPLKEQPALNDSRYCLSSRLRVSATFWQNPRNHFRCQVQFYGLSENDEWTQDRAKPVTQIVSAEAWGRADCDVKLVEKSFETDTNLNFQNLLVIVLRILLLKVAGFNLLMTLRLWSSRSKRSRLLHSDYMNMTPRRPGPTRKHYQPYAPPRDFAAYRSRVKFSRSADAPAYQQGQNQLYNELNLGRREEYDVLDKRRGRDPEMGGKPQRRKNPQEGLYNELQKDKMAEAYSEIGMKGERRRGKGHDGLYQGLSTATKDTYDALHMQALPPR

SEQ ID NO: 30140 - protein, 328 aa, synthetic construct
KNVFPPEVAVFEPSEAEISHTQKATLVCLATGFYPDHVELSWWVNGKEVHSGVCTDPQPLKEQPALNDSRYCLSSRLRVSATFWQNPRNHFRCQVQFYGLSENDEWTQDRAKPVTQIVSAEAWGRADCDVKLVEKSFETDTNLNFQNLLVIVLRILLLKVAGFNLLMTLRLWSSRSKRSRLLHSDYMNMTPRRPGPTRKHYQPYAPPRDFAAYRSRVKFSRSADAPAYQQGQNQLYNELNLGRREEYDVLDKRRGRDPEMGGKPQRRKNPQEGLYNELQKDKMAEAYSEIGMKGERRRGKGHDGLYQGLSTATKDTYDALHMQALPPR

SEQ ID NO: 30141 - protein, 327 aa, synthetic construct
NVFPPEVAVFEPSEAEISHTQKATLVCLATGFYPDHVELSWWVNGKEVHSGVCTDPQPLKEQPALNDSRYCLSSRLRVSATFWQNPRNHFRCQVQFYGLSENDEWTQDRAKPVTQIVSAEAWGRADCDVKLVEKSFETDTNLNFQNLLVIVLRILLLKVAGFNLLMTLRLWSSRSKRSRLLHSDYMNMTPRRPGPTRKHYQPYAPPRDFAAYRSRVKFSRSADAPAYQQGQNQLYNELNLGRREEYDVLDKRRGRDPEMGGKPQRRKNPQEGLYNELQKDKMAEAYSEIGMKGERRRGKGHDGLYQGLSTATKDTYDALHMQALPPR

SEQ ID NO: 30142 - protein, 326 aa, synthetic construct
VFPPEVAVFEPSEAEISHTQKATLVCLATGFYPDHVELSWWVNGKEVHSGVCTDPQPLKEQPALNDSRYCLSSRLRVSATFWQNPRNHFRCQVQFYGLSENDEWTQDRAKPVTQIVSAEAWGRADCDVKLVEKSFETDTNLNFQNLLVIVLRILLLKVAGFNLLMTLRLWSSRSKRSRLLHSDYMNMTPRRPGPTRKHYQPYAPPRDFAAYRSRVKFSRSADAPAYQQGQNQLYNELNLGRREEYDVLDKRRGRDPEMGGKPQRRKNPQEGLYNELQKDKMAEAYSEIGMKGERRRGKGHDGLYQGLSTATKDTYDALHMQALPPR

SEQ ID NO: 30143 - protein, 325 aa, synthetic construct
FPPEVAVFEPSEAEISHTQKATLVCLATGFYPDHVELSWWVNGKEVHSGVCTDPQPLKEQPALNDSRYCLSSRLRVSATFWQNPRNHFRCQVQFYGLSENDEWTQDRAKPVTQIVSAEAWGRADCDVKLVEKSFETDTNLNFQNLLVIVLRILLLKVAGFNLLMTLRLWSSRSKRSRLLHSDYMNMTPRRPGPTRKHYQPYAPPRDFAAYRSRVKFSRSADAPAYQQGQNQLYNELNLGRREEYDVLDKRRGRDPEMGGKPQRRKNPQEGLYNELQKDKMAEAYSEIGMKGERRRGKGHDGLYQGLSTATKDTYDALHMQALPPR

SEQ ID NO: 30144 - protein, 324 aa, synthetic construct
PPEVAVFEPSEAEISHTQKATLVCLATGFYPDHVELSWWVNGKEVHSGVCTDPQPLKEQPALNDSRYCLSSRLRVSATFWQNPRNHFRCQVQFYGLSENDEWTQDRAKPVTQIVSAEAWGRADCDVKLVEKSFETDTNLNFQNLLVIVLRILLLKVAGFNLLMTLRLWSSRSKRSRLLHSDYMNMTPRRPGPTRKHYQPYAPPRDFAAYRSRVKFSRSADAPAYQQGQNQLYNELNLGRREEYDVLDKRRGRDPEMGGKPQRRKNPQEGLYNELQKDKMAEAYSEIGMKGERRRGKGHDGLYQGLSTATKDTYDALHMQALPPR

SEQ ID NO: 30145 - protein, 323 aa, synthetic construct
PEVAVFEPSEAEISHTQKATLVCLATGFYPDHVELSWWVNGKEVHSGVCTDPQPLKEQPALNDSRYCLSSRLRVSATFWQNPRNHFRCQVQFYGLSENDEWTQDRAKPVTQIVSAEAWGRADCDVKLVEKSFETDTNLNFQNLLVIVLRILLLKVAGFNLLMTLRLWSSRSKRSRLLHSDYMNMTPRRPGPTRKHYQPYAPPRDFAAYRSRVKFSRSADAPAYQQGQNQLYNELNLGRREEYDVLDKRRGRDPEMGGKPQRRKNPQEGLYNELQKDKMAEAYSEIGMKGERRRGKGHDGLYQGLSTATKDTYDALHMQALPPR

SEQ ID NO: 30146 - protein, 322 aa, synthetic construct
EVAVFEPSEAEISHTQKATLVCLATGFYPDHVELSWWVNGKEVHSGVCTDPQPLKEQPALNDSRYCLSSRLRVSATFWQNPRNHFRCQVQFYGLSENDEWTQDRAKPVTQIVSAEAWGRADCDVKLVEKSFETDTNLNFQNLLVIVLRILLLKVAGFNLLMTLRLWSSRSKRSRLLHSDYMNMTPRRPGPTRKHYQPYAPPRDFAAYRSRVKFSRSADAPAYQQGQNQLYNELNLGRREEYDVLDKRRGRDPEMGGKPQRRKNPQEGLYNELQKDKMAEAYSEIGMKGERRRGKGHDGLYQGLSTATKDTYDALHMQALPPR

SEQ ID NO: 30147 - protein, 321 aa, synthetic construct
VAVFEPSEAEISHTQKATLVCLATGFYPDHVELSWWVNGKEVHSGVCTDPQPLKEQPALNDSRYCLSSRLRVSATFWQNPRNHFRCQVQFYGLSENDEWTQDRAKPVTQIVSAEAWGRADCDVKLVEKSFETDTNLNFQNLLVIVLRILLLKVAGFNLLMTLRLWSSRSKRSRLLHSDYMNMTPRRPGPTRKHYQPYAPPRDFAAYRSRVKFSRSADAPAYQQGQNQLYNELNLGRREEYDVLDKRRGRDPEMGGKPQRRKNPQEGLYNELQKDKMAEAYSEIGMKGERRRGKGHDGLYQGLSTATKDTYDALHMQALPPR

SEQ ID NO: 30148 - protein, 320 aa, synthetic construct
AVFEPSEAEISHTQKATLVCLATGFYPDHVELSWWVNGKEVHSGVCTDPQPLKEQPALNDSRYCLSSRLRVSATFWQNPRNHFRCQVQFYGLSENDEWTQDRAKPVTQIVSAEAWGRADCDVKLVEKSFETDTNLNFQNLLVIVLRILLLKVAGFNLLMTLRLWSSRSKRSRLLHSDYMNMTPRRPGPTRKHYQPYAPPRDFAAYRSRVKFSRSADAPAYQQGQNQLYNELNLGRREEYDVLDKRRGRDPEMGGKPQRRKNPQEGLYNELQKDKMAEAYSEIGMKGERRRGKGHDGLYQGLSTATKDTYDALHMQALPPR

SEQ ID NO: 30149 - protein, 319 aa, synthetic construct
VFEPSEAEISHTQKATLVCLATGFYPDHVELSWWVNGKEVHSGVCTDPQPLKEQPALNDSRYCLSSRLRVSATFWQNPRNHFRCQVQFYGLSENDEWTQDRAKPVTQIVSAEAWGRADCDVKLVEKSFETDTNLNFQNLLVIVLRILLLKVAGFNLLMTLRLWSSRSKRSRLLHSDYMNMTPRRPGPTRKHYQPYAPPRDFAAYRSRVKFSRSADAPAYQQGQNQLYNELNLGRREEYDVLDKRRGRDPEMGGKPQRRKNPQEGLYNELQKDKMAEAYSEIGMKGERRRGKGHDGLYQGLSTATKDTYDALHMQALPPR

SEQ ID NO: 30150 - protein, 318 aa, synthetic construct
FEPSEAEISHTQKATLVCLATGFYPDHVELSWWVNGKEVHSGVCTDPQPLKEQPALNDSRYCLSSRLRVSATFWQNPRNHFRCQVQFYGLSENDEWTQDRAKPVTQIVSAEAWGRADCDVKLVEKSFETDTNLNFQNLLVIVLRILLLKVAGFNLLMTLRLWSSRSKRSRLLHSDYMNMTPRRPGPTRKHYQPYAPPRDFAAYRSRVKFSRSADAPAYQQGQNQLYNELNLGRREEYDVLDKRRGRDPEMGGKPQRRKNPQEGLYNELQKDKMAEAYSEIGMKGERRRGKGHDGLYQGLSTATKDTYDALHMQALPPR

SEQ ID NO: 30151 - protein, 317 aa, synthetic construct
EPSEAEISHTQKATLVCLATGFYPDHVELSWWVNGKEVHSGVCTDPQPLKEQPALNDSRYCLSSRLRVSATFWQNPRNHFRCQVQFYGLSENDEWTQDRAKPVTQIVSAEAWGRADCDVKLVEKSFETDTNLNFQNLLVIVLRILLLKVAGFNLLMTLRLWSSRSKRSRLLHSDYMNMTPRRPGPTRKHYQPYAPPRDFAAYRSRVKFSRSADAPAYQQGQNQLYNELNLGRREEYDVLDKRRGRDPEMGGKPQRRKNPQEGLYNELQKDKMAEAYSEIGMKGERRRGKGHDGLYQGLSTATKDTYDALHMQALPPR

SEQ ID NO: 30152 - protein, 316 aa, synthetic construct
PSEAEISHTQKATLVCLATGFYPDHVELSWWVNGKEVHSGVCTDPQPLKEQPALNDSRYCLSSRLRVSATFWQNPRNHFRCQVQFYGLSENDEWTQDRAKPVTQIVSAEAWGRADCDVKLVEKSFETDTNLNFQNLLVIVLRILLLKVAGFNLLMTLRLWSSRSKRSRLLHSDYMNMTPRRPGPTRKHYQPYAPPRDFAAYRSRVKFSRSADAPAYQQGQNQLYNELNLGRREEYDVLDKRRGRDPEMGGKPQRRKNPQEGLYNELQKDKMAEAYSEIGMKGERRRGKGHDGLYQGLSTATKDTYDALHMQALPPR

SEQ ID NO: 30153 - protein, 315 aa, synthetic construct
SEAEISHTQKATLVCLATGFYPDHVELSWWVNGKEVHSGVCTDPQPLKEQPALNDSRYCLSSRLRVSATFWQNPRNHFRCQVQFYGLSENDEWTQDRAKPVTQIVSAEAWGRADCDVKLVEKSFETDTNLNFQNLLVIVLRILLLKVAGFNLLMTLRLWSSRSKRSRLLHSDYMNMTPRRPGPTRKHYQPYAPPRDFAAYRSRVKFSRSADAPAYQQGQNQLYNELNLGRREEYDVLDKRRGRDPEMGGKPQRRKNPQEGLYNELQKDKMAEAYSEIGMKGERRRGKGHDGLYQGLSTATKDTYDALHMQALPPR

SEQ ID NO: 30154 - protein, 314 aa, synthetic construct
EAEISHTQKATLVCLATGFYPDHVELSWWVNGKEVHSGVCTDPQPLKEQPALNDSRYCLSSRLRVSATFWQNPRNHFRCQVQFYGLSENDEWTQDRAKPVTQIVSAEAWGRADCDVKLVEKSFETDTNLNFQNLLVIVLRILLLKVAGFNLLMTLRLWSSRSKRSRLLHSDYMNMTPRRPGPTRKHYQPYAPPRDFAAYRSRVKFSRSADAPAYQQGQNQLYNELNLGRREEYDVLDKRRGRDPEMGGKPQRRKNPQEGLYNELQKDKMAEAYSEIGMKGERRRGKGHDGLYQGLSTATKDTYDALHMQALPPR

SEQ ID NO: 30155 - protein, 313 aa, synthetic construct
AEISHTQKATLVCLATGFYPDHVELSWWVNGKEVHSGVCTDPQPLKEQPALNDSRYCLSSRLRVSATFWQNPRNHFRCQVQFYGLSENDEWTQDRAKPVTQIVSAEAWGRADCDVKLVEKSFETDTNLNFQNLLVIVLRILLLKVAGFNLLMTLRLWSSRSKRSRLLHSDYMNMTPRRPGPTRKHYQPYAPPRDFAAYRSRVKFSRSADAPAYQQGQNQLYNELNLGRREEYDVLDKRRGRDPEMGGKPQRRKNPQEGLYNELQKDKMAEAYSEIGMKGERRRGKGHDGLYQGLSTATKDTYDALHMQALPPR

SEQ ID NO: 30156 - protein, 312 aa, synthetic construct
EISHTQKATLVCLATGFYPDHVELSWWVNGKEVHSGVCTDPQPLKEQPALNDSRYCLSSRLRVSATFWQNPRNHFRCQVQFYGLSENDEWTQDRAKPVTQIVSAEAWGRADCDVKLVEKSFETDTNLNFQNLLVIVLRILLLKVAGFNLLMTLRLWSSRSKRSRLLHSDYMNMTPRRPGPTRKHYQPYAPPRDFAAYRSRVKFSRSADAPAYQQGQNQLYNELNLGRREEYDVLDKRRGRDPEMGGKPQRRKNPQEGLYNELQKDKMAEAYSEIGMKGERRRGKGHDGLYQGLSTATKDTYDALHMQALPPR

SEQ ID NO: 30157 - protein, 311 aa, synthetic construct
ISHTQKATLVCLATGFYPDHVELSWWVNGKEVHSGVCTDPQPLKEQPALNDSRYCLSSRLRVSATFWQNPRNHFRCQVQFYGLSENDEWTQDRAKPVTQIVSAEAWGRADCDVKLVEKSFETDTNLNFQNLLVIVLRILLLKVAGFNLLMTLRLWSSRSKRSRLLHSDYMNMTPRRPGPTRKHYQPYAPPRDFAAYRSRVKFSRSADAPAYQQGQNQLYNELNLGRREEYDVLDKRRGRDPEMGGKPQRRKNPQEGLYNELQKDKMAEAYSEIGMKGERRRGKGHDGLYQGLSTATKDTYDALHMQALPPR

SEQ ID NO: 30158 - protein, 310 aa, synthetic construct
SHTQKATLVCLATGFYPDHVELSWWVNGKEVHSGVCTDPQPLKEQPALNDSRYCLSSRLRVSATFWQNPRNHFRCQVQFYGLSENDEWTQDRAKPVTQIVSAEAWGRADCDVKLVEKSFETDTNLNFQNLLVIVLRILLLKVAGFNLLMTLRLWSSRSKRSRLLHSDYMNMTPRRPGPTRKHYQPYAPPRDFAAYRSRVKFSRSADAPAYQQGQNQLYNELNLGRREEYDVLDKRRGRDPEMGGKPQRRKNPQEGLYNELQKDKMAEAYSEIGMKGERRRGKGHDGLYQGLSTATKDTYDALHMQALPPR

SEQ ID NO: 30159 - protein, 305 aa, synthetic construct
ATLVCLATGFYPDHVELSWWVNGKEVHSGVCTDPQPLKEQPALNDSRYCLSSRLRVSATFWQNPRNHFRCQVQFYGLSENDEWTQDRAKPVTQIVSAEAWGRADCDVKLVEKSFETDTNLNFQNLLVIVLRILLLKVAGFNLLMTLRLWSSRSKRSRLLHSDYMNMTPRRPGPTRKHYQPYAPPRDFAAYRSRVKFSRSADAPAYQQGQNQLYNELNLGRREEYDVLDKRRGRDPEMGGKPQRRKNPQEGLYNELQKDKMAEAYSEIGMKGERRRGKGHDGLYQGLSTATKDTYDALHMQALPPR

SEQ ID NO: 30160 - protein, 300 aa, synthetic construct
LATGFYPDHVELSWWVNGKEVHSGVCTDPQPLKEQPALNDSRYCLSSRLRVSATFWQNPRNHFRCQVQFYGLSENDEWTQDRAKPVTQIVSAEAWGRADCDVKLVEKSFETDTNLNFQNLLVIVLRILLLKVAGFNLLMTLRLWSSRSKRSRLLHSDYMNMTPRRPGPTRKHYQPYAPPRDFAAYRSRVKFSRSADAPAYQQGQNQLYNELNLGRREEYDVLDKRRGRDPEMGGKPQRRKNPQEGLYNELQKDKMAEAYSEIGMKGERRRGKGHDGLYQGLSTATKDTYDALHMQALPPR

SEQ ID NO: 30161 - protein, 327 aa, synthetic construct
DLKNVFPPEVAVFEPSEAEISHTQKATLVCLATGFYPDHVELSWWVNGKEVHSGVCTDPQPLKEQPALNDSRYCLSSRLRVSATFWQNPRNHFRCQVQFYGLSENDEWTQDRAKPVTQIVSAEAWGRADCGFTSESYQQGVLSATNLLVIVLRILLLKVAGFNLLMTLRLWSSRSKRSRLLHSDYMNMTPRRPGPTRKHYQPYAPPRDFAAYRSRVKFSRSADAPAYQQGQNQLYNELNLGRREEYDVLDKRRGRDPEMGGKPQRRKNPQEGLYNELQKDKMAEAYSEIGMKGERRRGKGHDGLYQGLSTATKDTYDALHMQALPPR

SEQ ID NO: 30162 - protein, 326 aa, synthetic construct
LKNVFPPEVAVFEPSEAEISHTQKATLVCLATGFYPDHVELSWWVNGKEVHSGVCTDPQPLKEQPALNDSRYCLSSRLRVSATFWQNPRNHFRCQVQFYGLSENDEWTQDRAKPVTQIVSAEAWGRADCGFTSESYQQGVLSATNLLVIVLRILLLKVAGFNLLMTLRLWSSRSKRSRLLHSDYMNMTPRRPGPTRKHYQPYAPPRDFAAYRSRVKFSRSADAPAYQQGQNQLYNELNLGRREEYDVLDKRRGRDPEMGGKPQRRKNPQEGLYNELQKDKMAEAYSEIGMKGERRRGKGHDGLYQGLSTATKDTYDALHMQALPPR

SEQ ID NO: 30163 - protein, 325 aa, synthetic construct
KNVFPPEVAVFEPSEAEISHTQKATLVCLATGFYPDHVELSWWVNGKEVHSGVCTDPQPLKEQPALNDSRYCLSSRLRVSATFWQNPRNHFRCQVQFYGLSENDEWTQDRAKPVTQIVSAEAWGRADCGFTSESYQQGVLSATNLLVIVLRILLLKVAGFNLLMTLRLWSSRSKRSRLLHSDYMNMTPRRPGPTRKHYQPYAPPRDFAAYRSRVKFSRSADAPAYQQGQNQLYNELNLGRREEYDVLDKRRGRDPEMGGKPQRRKNPQEGLYNELQKDKMAEAYSEIGMKGERRRGKGHDGLYQGLSTATKDTYDALHMQALPPR

SEQ ID NO: 30164 - protein, 324 aa, synthetic construct
NVFPPEVAVFEPSEAEISHTQKATLVCLATGFYPDHVELSWWVNGKEVHSGVCTDPQPLKEQPALNDSRYCLSSRLRVSATFWQNPRNHFRCQVQFYGLSENDEWTQDRAKPVTQIVSAEAWGRADCGFTSESYQQGVLSATNLLVIVLRILLLKVAGFNLLMTLRLWSSRSKRSRLLHSDYMNMTPRRPGPTRKHYQPYAPPRDFAAYRSRVKFSRSADAPAYQQGQNQLYNELNLGRREEYDVLDKRRGRDPEMGGKPQRRKNPQEGLYNELQKDKMAEAYSEIGMKGERRRGKGHDGLYQGLSTATKDTYDALHMQALPPR

SEQ ID NO: 30165 - protein, 323 aa, synthetic construct
VFPPEVAVFEPSEAEISHTQKATLVCLATGFYPDHVELSWWVNGKEVHSGVCTDPQPLKEQPALNDSRYCLSSRLRVSATFWQNPRNHFRCQVQFYGLSENDEWTQDRAKPVTQIVSAEAWGRADCGFTSESYQQGVLSATNLLVIVLRILLLKVAGFNLLMTLRLWSSRSKRSRLLHSDYMNMTPRRPGPTRKHYQPYAPPRDFAAYRSRVKFSRSADAPAYQQGQNQLYNELNLGRREEYDVLDKRRGRDPEMGGKPQRRKNPQEGLYNELQKDKMAEAYSEIGMKGERRRGKGHDGLYQGLSTATKDTYDALHMQALPPR

SEQ ID NO: 30166 - protein, 322 aa, synthetic construct
FPPEVAVFEPSEAEISHTQKATLVCLATGFYPDHVELSWWVNGKEVHSGVCTDPQPLKEQPALNDSRYCLSSRLRVSATFWQNPRNHFRCQVQFYGLSENDEWTQDRAKPVTQIVSAEAWGRADCGFTSESYQQGVLSATNLLVIVLRILLLKVAGFNLLMTLRLWSSRSKRSRLLHSDYMNMTPRRPGPTRKHYQPYAPPRDFAAYRSRVKFSRSADAPAYQQGQNQLYNELNLGRREEYDVLDKRRGRDPEMGGKPQRRKNPQEGLYNELQKDKMAEAYSEIGMKGERRRGKGHDGLYQGLSTATKDTYDALHMQALPPR

SEQ ID NO: 30167 - protein, 321 aa, synthetic construct
PPEVAVFEPSEAEISHTQKATLVCLATGFYPDHVELSWWVNGKEVHSGVCTDPQPLKEQPALNDSRYCLSSRLRVSATFWQNPRNHFRCQVQFYGLSENDEWTQDRAKPVTQIVSAEAWGRADCGFTSESYQQGVLSATNLLVIVLRILLLKVAGFNLLMTLRLWSSRSKRSRLLHSDYMNMTPRRPGPTRKHYQPYAPPRDFAAYRSRVKFSRSADAPAYQQGQNQLYNELNLGRREEYDVLDKRRGRDPEMGGKPQRRKNPQEGLYNELQKDKMAEAYSEIGMKGERRRGKGHDGLYQGLSTATKDTYDALHMQALPPR

SEQ ID NO: 30168 - protein, 320 aa, synthetic construct
PEVAVFEPSEAEISHTQKATLVCLATGFYPDHVELSWWVNGKEVHSGVCTDPQPLKEQPALNDSRYCLSSRLRVSATFWQNPRNHFRCQVQFYGLSENDEWTQDRAKPVTQIVSAEAWGRADCGFTSESYQQGVLSATNLLVIVLRILLLKVAGFNLLMTLRLWSSRSKRSRLLHSDYMNMTPRRPGPTRKHYQPYAPPRDFAAYRSRVKFSRSADAPAYQQGQNQLYNELNLGRREEYDVLDKRRGRDPEMGGKPQRRKNPQEGLYNELQKDKMAEAYSEIGMKGERRRGKGHDGLYQGLSTATKDTYDALHMQALPPR

SEQ ID NO: 30169 - protein, 319 aa, synthetic construct
EVAVFEPSEAEISHTQKATLVCLATGFYPDHVELSWWVNGKEVHSGVCTDPQPLKEQPALNDSRYCLSSRLRVSATFWQNPRNHFRCQVQFYGLSENDEWTQDRAKPVTQIVSAEAWGRADCGFTSESYQQGVLSATNLLVIVLRILLLKVAGFNLLMTLRLWSSRSKRSRLLHSDYMNMTPRRPGPTRKHYQPYAPPRDFAAYRSRVKFSRSADAPAYQQGQNQLYNELNLGRREEYDVLDKRRGRDPEMGGKPQRRKNPQEGLYNELQKDKMAEAYSEIGMKGERRRGKGHDGLYQGLSTATKDTYDALHMQALPPR

SEQ ID NO: 30170 - protein, 318 aa, synthetic construct
VAVFEPSEAEISHTQKATLVCLATGFYPDHVELSWWVNGKEVHSGVCTDPQPLKEQPALNDSRYCLSSRLRVSATFWQNPRNHFRCQVQFYGLSENDEWTQDRAKPVTQIVSAEAWGRADCGFTSESYQQGVLSATNLLVIVLRILLLKVAGFNLLMTLRLWSSRSKRSRLLHSDYMNMTPRRPGPTRKHYQPYAPPRDFAAYRSRVKFSRSADAPAYQQGQNQLYNELNLGRREEYDVLDKRRGRDPEMGGKPQRRKNPQEGLYNELQKDKMAEAYSEIGMKGERRRGKGHDGLYQGLSTATKDTYDALHMQALPPR

SEQ ID NO: 30171 - protein, 317 aa, synthetic construct
AVFEPSEAEISHTQKATLVCLATGFYPDHVELSWWVNGKEVHSGVCTDPQPLKEQPALNDSRYCLSSRLRVSATFWQNPRNHFRCQVQFYGLSENDEWTQDRAKPVTQIVSAEAWGRADCGFTSESYQQGVLSATNLLVIVLRILLLKVAGFNLLMTLRLWSSRSKRSRLLHSDYMNMTPRRPGPTRKHYQPYAPPRDFAAYRSRVKFSRSADAPAYQQGQNQLYNELNLGRREEYDVLDKRRGRDPEMGGKPQRRKNPQEGLYNELQKDKMAEAYSEIGMKGERRRGKGHDGLYQGLSTATKDTYDALHMQALPPR

SEQ ID NO: 30172 - protein, 316 aa, synthetic construct
VFEPSEAEISHTQKATLVCLATGFYPDHVELSWWVNGKEVHSGVCTDPQPLKEQPALNDSRYCLSSRLRVSATFWQNPRNHFRCQVQFYGLSENDEWTQDRAKPVTQIVSAEAWGRADCGFTSESYQQGVLSATNLLVIVLRILLLKVAGFNLLMTLRLWSSRSKRSRLLHSDYMNMTPRRPGPTRKHYQPYAPPRDFAAYRSRVKFSRSADAPAYQQGQNQLYNELNLGRREEYDVLDKRRGRDPEMGGKPQRRKNPQEGLYNELQKDKMAEAYSEIGMKGERRRGKGHDGLYQGLSTATKDTYDALHMQALPPR

SEQ ID NO: 30173 - protein, 315 aa, synthetic construct
FEPSEAEISHTQKATLVCLATGFYPDHVELSWWVNGKEVHSGVCTDPQPLKEQPALNDSRYCLSSRLRVSATFWQNPRNHFRCQVQFYGLSENDEWTQDRAKPVTQIVSAEAWGRADCGFTSESYQQGVLSATNLLVIVLRILLLKVAGFNLLMTLRLWSSRSKRSRLLHSDYMNMTPRRPGPTRKHYQPYAPPRDFAAYRSRVKFSRSADAPAYQQGQNQLYNELNLGRREEYDVLDKRRGRDPEMGGKPQRRKNPQEGLYNELQKDKMAEAYSEIGMKGERRRGKGHDGLYQGLSTATKDTYDALHMQALPPR

SEQ ID NO: 30174 - protein, 314 aa, synthetic construct
EPSEAEISHTQKATLVCLATGFYPDHVELSWWVNGKEVHSGVCTDPQPLKEQPALNDSRYCLSSRLRVSATFWQNPRNHFRCQVQFYGLSENDEWTQDRAKPVTQIVSAEAWGRADCGFTSESYQQGVLSATNLLVIVLRILLLKVAGFNLLMTLRLWSSRSKRSRLLHSDYMNMTPRRPGPTRKHYQPYAPPRDFAAYRSRVKFSRSADAPAYQQGQNQLYNELNLGRREEYDVLDKRRGRDPEMGGKPQRRKNPQEGLYNELQKDKMAEAYSEIGMKGERRRGKGHDGLYQGLSTATKDTYDALHMQALPPR

SEQ ID NO: 30175 - protein, 313 aa, synthetic construct
PSEAEISHTQKATLVCLATGFYPDHVELSWWVNGKEVHSGVCTDPQPLKEQPALNDSRYCLSSRLRVSATFWQNPRNHFRCQVQFYGLSENDEWTQDRAKPVTQIVSAEAWGRADCGFTSESYQQGVLSATNLLVIVLRILLLKVAGFNLLMTLRLWSSRSKRSRLLHSDYMNMTPRRPGPTRKHYQPYAPPRDFAAYRSRVKFSRSADAPAYQQGQNQLYNELNLGRREEYDVLDKRRGRDPEMGGKPQRRKNPQEGLYNELQKDKMAEAYSEIGMKGERRRGKGHDGLYQGLSTATKDTYDALHMQALPPR

SEQ ID NO: 30176 - protein, 312 aa, synthetic construct
SEAEISHTQKATLVCLATGFYPDHVELSWWVNGKEVHSGVCTDPQPLKEQPALNDSRYCLSSRLRVSATFWQNPRNHFRCQVQFYGLSENDEWTQDRAKPVTQIVSAEAWGRADCGFTSESYQQGVLSATNLLVIVLRILLLKVAGFNLLMTLRLWSSRSKRSRLLHSDYMNMTPRRPGPTRKHYQPYAPPRDFAAYRSRVKFSRSADAPAYQQGQNQLYNELNLGRREEYDVLDKRRGRDPEMGGKPQRRKNPQEGLYNELQKDKMAEAYSEIGMKGERRRGKGHDGLYQGLSTATKDTYDALHMQALPPR

SEQ ID NO: 30177 - protein, 311 aa, synthetic construct
EAEISHTQKATLVCLATGFYPDHVELSWWVNGKEVHSGVCTDPQPLKEQPALNDSRYCLSSRLRVSATFWQNPRNHFRCQVQFYGLSENDEWTQDRAKPVTQIVSAEAWGRADCGFTSESYQQGVLSATNLLVIVLRILLLKVAGFNLLMTLRLWSSRSKRSRLLHSDYMNMTPRRPGPTRKHYQPYAPPRDFAAYRSRVKFSRSADAPAYQQGQNQLYNELNLGRREEYDVLDKRRGRDPEMGGKPQRRKNPQEGLYNELQKDKMAEAYSEIGMKGERRRGKGHDGLYQGLSTATKDTYDALHMQALPPR

SEQ ID NO: 30178 - protein, 310 aa, synthetic construct
AEISHTQKATLVCLATGFYPDHVELSWWVNGKEVHSGVCTDPQPLKEQPALNDSRYCLSSRLRVSATFWQNPRNHFRCQVQFYGLSENDEWTQDRAKPVTQIVSAEAWGRADCGFTSESYQQGVLSATNLLVIVLRILLLKVAGFNLLMTLRLWSSRSKRSRLLHSDYMNMTPRRPGPTRKHYQPYAPPRDFAAYRSRVKFSRSADAPAYQQGQNQLYNELNLGRREEYDVLDKRRGRDPEMGGKPQRRKNPQEGLYNELQKDKMAEAYSEIGMKGERRRGKGHDGLYQGLSTATKDTYDALHMQALPPR

SEQ ID NO: 30179 - protein, 309 aa, synthetic construct
EISHTQKATLVCLATGFYPDHVELSWWVNGKEVHSGVCTDPQPLKEQPALNDSRYCLSSRLRVSATFWQNPRNHFRCQVQFYGLSENDEWTQDRAKPVTQIVSAEAWGRADCGFTSESYQQGVLSATNLLVIVLRILLLKVAGFNLLMTLRLWSSRSKRSRLLHSDYMNMTPRRPGPTRKHYQPYAPPRDFAAYRSRVKFSRSADAPAYQQGQNQLYNELNLGRREEYDVLDKRRGRDPEMGGKPQRRKNPQEGLYNELQKDKMAEAYSEIGMKGERRRGKGHDGLYQGLSTATKDTYDALHMQALPPR

SEQ ID NO: 30180 - protein, 308 aa, synthetic construct
ISHTQKATLVCLATGFYPDHVELSWWVNGKEVHSGVCTDPQPLKEQPALNDSRYCLSSRLRVSATFWQNPRNHFRCQVQFYGLSENDEWTQDRAKPVTQIVSAEAWGRADCGFTSESYQQGVLSATNLLVIVLRILLLKVAGFNLLMTLRLWSSRSKRSRLLHSDYMNMTPRRPGPTRKHYQPYAPPRDFAAYRSRVKFSRSADAPAYQQGQNQLYNELNLGRREEYDVLDKRRGRDPEMGGKPQRRKNPQEGLYNELQKDKMAEAYSEIGMKGERRRGKGHDGLYQGLSTATKDTYDALHMQALPPR

SEQ ID NO: 30181 - protein, 307 aa, synthetic construct
SHTQKATLVCLATGFYPDHVELSWWVNGKEVHSGVCTDPQPLKEQPALNDSRYCLSSRLRVSATFWQNPRNHFRCQVQFYGLSENDEWTQDRAKPVTQIVSAEAWGRADCGFTSESYQQGVLSATNLLVIVLRILLLKVAGFNLLMTLRLWSSRSKRSRLLHSDYMNMTPRRPGPTRKHYQPYAPPRDFAAYRSRVKFSRSADAPAYQQGQNQLYNELNLGRREEYDVLDKRRGRDPEMGGKPQRRKNPQEGLYNELQKDKMAEAYSEIGMKGERRRGKGHDGLYQGLSTATKDTYDALHMQALPPR

SEQ ID NO: 30182 - protein, 302 aa, synthetic construct
ATLVCLATGFYPDHVELSWWVNGKEVHSGVCTDPQPLKEQPALNDSRYCLSSRLRVSATFWQNPRNHFRCQVQFYGLSENDEWTQDRAKPVTQIVSAEAWGRADCGFTSESYQQGVLSATNLLVIVLRILLLKVAGFNLLMTLRLWSSRSKRSRLLHSDYMNMTPRRPGPTRKHYQPYAPPRDFAAYRSRVKFSRSADAPAYQQGQNQLYNELNLGRREEYDVLDKRRGRDPEMGGKPQRRKNPQEGLYNELQKDKMAEAYSEIGMKGERRRGKGHDGLYQGLSTATKDTYDALHMQALPPR

SEQ ID NO: 30183 - protein, 297 aa, synthetic construct
LATGFYPDHVELSWWVNGKEVHSGVCTDPQPLKEQPALNDSRYCLSSRLRVSATFWQNPRNHFRCQVQFYGLSENDEWTQDRAKPVTQIVSAEAWGRADCGFTSESYQQGVLSATNLLVIVLRILLLKVAGFNLLMTLRLWSSRSKRSRLLHSDYMNMTPRRPGPTRKHYQPYAPPRDFAAYRSRVKFSRSADAPAYQQGQNQLYNELNLGRREEYDVLDKRRGRDPEMGGKPQRRKNPQEGLYNELQKDKMAEAYSEIGMKGERRRGKGHDGLYQGLSTATKDTYDALHMQALPPR

SEQ ID NO: 30184 - protein, 287 aa, synthetic construct
IQNPDPAVYQLRDSKSSDKSVCLFTDFDSQTNVSQSKDSDVYITDKTVLDMRSMDFKSNSAVAWSNKSDFACANAFNNSIGRADCGFTSESYQQGVLSATILYEILLGKATLYAVLVSALVLMAMVKRKDSRGRSKRSRLLHSDYMNMTPRRPGPTRKHYQPYAPPRDFAAYRSRVKFSRSADAPAYQQGQNQLYNELNLGRREEYDVLDKRRGRDPEMGGKPQRRKNPQEGLYNELQKDKMAEAYSEIGMKGERRRGKGHDGLYQGLSTATKDTYDALHMQALPPR

SEQ ID NO: 30185 - protein, 285 aa, synthetic construct
IQNPDPAVYQLRDSKSSDKSVCLFTDFDSQTNVSQSKDSDVYITDKTVLDMRSMDFKSNSAVAWSNKSDFACANAFNNSIADCGFTSESYQQGVLSATILYEILLGKATLYAVLVSALVLMAMVKRKDSRGRSKRSRLLHSDYMNMTPRRPGPTRKHYQPYAPPRDFAAYRSRVKFSRSADAPAYQQGQNQLYNELNLGRREEYDVLDKRRGRDPEMGGKPQRRKNPQEGLYNELQKDKMAEAYSEIGMKGERRRGKGHDGLYQGLSTATKDTYDALHMQALPPR

SEQ ID NO: 30186 - protein, 295 aa, synthetic construct
IQNPDPAVYQLRDSKSSDKSVCLFTDFDSQTNVSQSKDSDVYITDKTVLDMRSMDFKSNSAVAWSNKSDFACANAFNNSIQIVSAEAWGRADCGFTSESYQQGVLSATILYEILLGKATLYAVLVSALVLMAMVKRKDSRGRSKRSRLLHSDYMNMTPRRPGPTRKHYQPYAPPRDFAAYRSRVKFSRSADAPAYQQGQNQLYNELNLGRREEYDVLDKRRGRDPEMGGKPQRRKNPQEGLYNELQKDKMAEAYSEIGMKGERRRGKGHDGLYQGLSTATKDTYDALHMQALPPR

SEQ ID NO: 30187 - protein, 303 aa, synthetic construct
IQNPDPAVYQLRDSKSSDKSVCLFTDFDSQTNVSQSKDSDVYITDKTVLDMRSMDFKSNSAVAWSNKSDFACANAFNNSIFPPIKTDVITMDPKDNCSKDANDTLLLQLTNTSAYYMYLLLLLKSVVYFAIITCCLLRRTAFCCNGEKSRSKRSRLLHSDYMNMTPRRPGPTRKHYQPYAPPRDFAAYRSRVKFSRSADAPAYQQGQNQLYNELNLGRREEYDVLDKRRGRDPEMGGKPQRRKNPQEGLYNELQKDKMAEAYSEIGMKGERRRGKGHDGLYQGLSTATKDTYDALHMQALPPR

SEQ ID NO: 30188 - protein, 301 aa, synthetic construct
IQNPDPAVYQLRDSKSSDKSVCLFTDFDSQTNVSQSKDSDVYITDKTVLDMRSMDFKSNSAVAWSNKSDFACANAFNNSIPIKTDVITMDPKDNCSKDANDTLLLQLTNTSAYYMYLLLLLKSVVYFAIITCCLLRRTAFCCNGEKSRSKRSRLLHSDYMNMTPRRPGPTRKHYQPYAPPRDFAAYRSRVKFSRSADAPAYQQGQNQLYNELNLGRREEYDVLDKRRGRDPEMGGKPQRRKNPQEGLYNELQKDKMAEAYSEIGMKGERRRGKGHDGLYQGLSTATKDTYDALHMQALPPR

SEQ ID NO: 30189 - protein, 293 aa, synthetic construct
IQNPDPAVYQLRDSKSSDKSVCLFTDFDSQTNVSQSKDSDVYITDKTVLDMRSMDFKSNSAVAWSNKSDFACANAFNNSIMDPKDNCSKDANDTLLLQLTNTSAYYMYLLLLLKSVVYFAIITCCLLRRTAFCCNGEKSRSKRSRLLHSDYMNMTPRRPGPTRKHYQPYAPPRDFAAYRSRVKFSRSADAPAYQQGQNQLYNELNLGRREEYDVLDKRRGRDPEMGGKPQRRKNPQEGLYNELQKDKMAEAYSEIGMKGERRRGKGHDGLYQGLSTATKDTYDALHMQALPPR

SEQ ID NO: 30190 - protein, 301 aa, synthetic construct; identical to SEQ ID NO: 30188

SEQ ID NO: 30191 - protein, 287 aa, synthetic construct
IQNPDPAVYQLRDSKSSDKSVCLFTDFDSQTNVSQSKDSDVYITDKTVLDMRSMDFKSNSAVAWSNKSDFACANAFNNSICSKDANDTLLLQLTNTSAYYMYLLLLLKSVVYFAIITCCLLRRTAFCCNGEKSRSKRSRLLHSDYMNMTPRRPGPTRKHYQPYAPPRDFAAYRSRVKFSRSADAPAYQQGQNQLYNELNLGRREEYDVLDKRRGRDPEMGGKPQRRKNPQEGLYNELQKDKMAEAYSEIGMKGERRRGKGHDGLYQGLSTATKDTYDALHMQALPPR

SEQ ID NO: 30192 - protein, 302 aa, synthetic construct
IQNPDPAVYQLRDSKSSDKSVCLFTDFDSQTNVSQSKDSDVYITDKTVLDMRSMDFKSNSAVAWSNKSDFACANAFNNSIEVKTDSTDHVKPKETENTKQPSKSCHKPKAIVHTEKVNMMSLTVLGLRMLFAKTVAVNFLLTAKLFFLRSKRSRLLHSDYMNMTPRRPGPTRKHYQPYAPPRDFAAYRSRVKFSRSADAPAYQQGQNQLYNELNLGRREEYDVLDKRRGRDPEMGGKPQRRKNPQEGLYNELQKDKMAEAYSEIGMKGERRRGKGHDGLYQGLSTATKDTYDALHMQALPPR

SEQ ID NO: 30193 - protein, 295 aa, synthetic construct
IQNPDPAVYQLRDSKSSDKSVCLFTDFDSQTNVSQSKDSDVYITDKTVLDMRSMDFKSNSAVAWSNKSDFACANAFNNSIDHVKPKETENTKQPSKSCHKPKAIVHTEKVNMMSLTVLGLRMLFAKTVAVNFLLTAKLFFLRSKRSRLLHSDYMNMTPRRPGPTRKHYQPYAPPRDFAAYRSRVKFSRSADAPAYQQGQNQLYNELNLGRREEYDVLDKRRGRDPEMGGKPQRRKNPQEGLYNELQKDKMAEAYSEIGMKGERRRGKGHDGLYQGLSTATKDTYDALHMQALPPR

SEQ ID NO: 30194 - protein, 297 aa, synthetic construct
IQNPDPAVYQLRDSKSSDKSVCLFTDFDSQTNVSQSKDSDVYITDKTVLDMRSMDFKSNSAVAWSNKSDFACANAFNNSIIPEDTFFPSPGRADCGFTSESYQQGVLSATILYEILLGKATLYAVLVSALVLMAMVKRKDSRGRSKRSRLLHSDYMNMTPRRPGPTRKHYQPYAPPRDFAAYRSRVKFSRSADAPAYQQGQNQLYNELNLGRREEYDVLDKRRGRDPEMGGKPQRRKNPQEGLYNELQKDKMAEAYSEIGMKGERRRGKGHDGLYQGLSTATKDTYDALHMQALPPR

SEQ ID NO: 30195 - protein, 295 aa, synthetic construct
IQNPDPAVYQLRDSKSSDKSVCLFTDFDSQTNVSQSKDSDVYITDKTVLDMRSMDFKSNSAVAWSNKSDFACANAFNNSIIPEDTFFPSPADCGFTSESYQQGVLSATILYEILLGKATLYAVLVSALVLMAMVKRKDSRGRSKRSRLLHSDYMNMTPRRPGPTRKHYQPYAPPRDFAAYRSRVKFSRSADAPAYQQGQNQLYNELNLGRREEYDVLDKRRGRDPEMGGKPQRRKNPQEGLYNELQKDKMAEAYSEIGMKGERRRGKGHDGLYQGLSTATKDTYDALHMQALPPR

SEQ ID NO: 30196 - protein, 305 aa, synthetic construct
IQNPDPAVYQLRDSKSSDKSVCLFTDFDSQTNVSQSKDSDVYITDKTVLDMRSMDFKSNSAVAWSNKSDFACANAFNNSIIPEDTFFPSPQIVSAEAWGRADCGFTSESYQQGVLSATILYEILLGKATLYAVLVSALVLMAMVKRKDSRGRSKRSRLLHSDYMNMTPRRPGPTRKHYQPYAPPRDFAAYRSRVKFSRSADAPAYQQGQNQLYNELNLGRREEYDVLDKRRGRDPEMGGKPQRRKNPQEGLYNELQKDKMAEAYSEIGMKGERRRGKGHDGLYQGLSTATKDTYDALHMQALPPR

SEQ ID NO: 30197 - protein, 313 aa, synthetic construct
IQNPDPAVYQLRDSKSSDKSVCLFTDFDSQTNVSQSKDSDVYITDKTVLDMRSMDFKSNSAVAWSNKSDFACANAFNNSIIPEDTFFPSPFPPIKTDVITMDPKDNCSKDANDTLLLQLTNTSAYYMYLLLLLKSVVYFAIITCCLLRRTAFCCNGEKSRSKRSRLLHSDYMNMTPRRPGPTRKHYQPYAPPRDFAAYRSRVKFSRSADAPAYQQGQNQLYNELNLGRREEYDVLDKRRGRDPEMGGKPQRRKNPQEGLYNELQKDKMAEAYSEIGMKGERRRGKGHDGLYQGLSTATKDTYDALHMQALPPR

SEQ ID NO: 30198 - protein, 311 aa, synthetic construct
IQNPDPAVYQLRDSKSSDKSVCLFTDFDSQTNVSQSKDSDVYITDKTVLDMRSMDFKSNSAVAWSNKSDFACANAFNNSIIPEDTFFPSPPIKTDVITMDPKDNCSKDANDTLLLQLTNTSAYYMYLLLLLKSVVYFAIITCCLLRRTAFCCNGEKSRSKRSRLLHSDYMNMTPRRPGPTRKHYQPYAPPRDFAAYRSRVKFSRSADAPAYQQGQNQLYNELNLGRREEYDVLDKRRGRDPEMGGKPQRRKNPQEGLYNELQKDKMAEAYSEIGMKGERRRGKGHDGLYQGLSTATKDTYDALHMQALPPR

SEQ ID NO: 30199 - protein, 303 aa, synthetic construct
IQNPDPAVYQLRDSKSSDKSVCLFTDFDSQTNVSQSKDSDVYITDKTVLDMRSMDFKSNSAVAWSNKSDFACANAFNNSIIPEDTFFPSPMDPKDNCSKDANDTLLLQLTNTSAYYMYLLLLLKSVVYFAIITCCLLRRTAFCCNGEKSRSKRSRLLHSDYMNMTPRRPGPTRKHYQPYAPPRDFAAYRSRVKFSRSADAPAYQQGQNQLYNELNLGRREEYDVLDKRRGRDPEMGGKPQRRKNPQEGLYNELQKDKMAEAYSEIGMKGERRRGKGHDGLYQGLSTATKDTYDALHMQALPPR

SEQ ID NO: 30200 - protein, 311 aa, synthetic construct; identical to SEQ ID NO: 30198

SEQ ID NO: 30201 - protein, 297 aa, synthetic construct
IQNPDPAVYQLRDSKSSDKSVCLFTDFDSQTNVSQSKDSDVYITDKTVLDMRSMDFKSNSAVAWSNKSDFACANAFNNSIIPEDTFFPSPCSKDANDTLLLQLTNTSAYYMYLLLLLKSVVYFAIITCCLLRRTAFCCNGEKSRSKRSRLLHSDYMNMTPRRPGPTRKHYQPYAPPRDFAAYRSRVKFSRSADAPAYQQGQNQLYNELNLGRREEYDVLDKRRGRDPEMGGKPQRRKNPQEGLYNELQKDKMAEAYSEIGMKGERRRGKGHDGLYQGLSTATKDTYDALHMQALPPR

SEQ ID NO: 30202 - protein, 312 aa, synthetic construct
IQNPDPAVYQLRDSKSSDKSVCLFTDFDSQTNVSQSKDSDVYITDKTVLDMRSMDFKSNSAVAWSNKSDFACANAFNNSIIPEDTFFPSPEVKTDSTDHVKPKETENTKQPSKSCHKPKAIVHTEKVNMMSLTVLGLRMLFAKTVAVNFLLTAKLFFLRSKRSRLLHSDYMNMTPRRPGPTRKHYQPYAPPRDFAAYRSRVKFSRSADAPAYQQGQNQLYNELNLGRREEYDVLDKRRGRDPEMGGKPQRRKNPQEGLYNELQKDKMAEAYSEIGMKGERRRGKGHDGLYQGLSTATKDTYDALHMQALPPR

SEQ ID NO: 30203 - protein, 305 aa, synthetic construct
IQNPDPAVYQLRDSKSSDKSVCLFTDFDSQTNVSQSKDSDVYITDKTVLDMRSMDFKSNSAVAWSNKSDFACANAFNNSIIPEDTFFPSPDHVKPKETENTKQPSKSCHKPKAIVHTEKVNMMSLTVLGLRMLFAKTVAVNFLLTAKLFFLRSKRSRLLHSDYMNMTPRRPGPTRKHYQPYAPPRDFAAYRSRVKFSRSADAPAYQQGQNQLYNELNLGRREEYDVLDKRRGRDPEMGGKPQRRKNPQEGLYNELQKDKMAEAYSEIGMKGERRRGKGHDGLYQGLSTATKDTYDALHMQALPPR

SEQ ID NO: 30204 - protein, 301 aa, synthetic construct
IQNPDPAVYQLRDSKSSDKSVCLFTDFDSQTNVSQSKDSDVYITDKTVLDMRSMDFKSNSAVAWSNKSDFACANAFNNSIIPEDTFFPSPESSCGRADCGFTSESYQQGVLSATILYEILLGKATLYAVLVSALVLMAMVKRKDSRGRSKRSRLLHSDYMNMTPRRPGPTRKHYQPYAPPRDFAAYRSRVKFSRSADAPAYQQGQNQLYNELNLGRREEYDVLDKRRGRDPEMGGKPQRRKNPQEGLYNELQKDKMAEAYSEIGMKGERRRGKGHDGLYQGLSTATKDTYDALHMQALPPR

SEQ ID NO: 30205 - protein, 299 aa, synthetic construct
IQNPDPAVYQLRDSKSSDKSVCLFTDFDSQTNVSQSKDSDVYITDKTVLDMRSMDFKSNSAVAWSNKSDFACANAFNNSIIPEDTFFPSPESSCADCGFTSESYQQGVLSATILYEILLGKATLYAVLVSALVLMAMVKRKDSRGRSKRSRLLHSDYMNMTPRRPGPTRKHYQPYAPPRDFAAYRSRVKFSRSADAPAYQQGQNQLYNELNLGRREEYDVLDKRRGRDPEMGGKPQRRKNPQEGLYNELQKDKMAEAYSEIGMKGERRRGKGHDGLYQGLSTATKDTYDALHMQALPPR

SEQ ID NO: 30206 - protein, 309 aa, synthetic construct
IQNPDPAVYQLRDSKSSDKSVCLFTDFDSQTNVSQSKDSDVYITDKTVLDMRSMDFKSNSAVAWSNKSDFACANAFNNSIIPEDTFFPSPESSCQIVSAEAWGRADCGFTSESYQQGVLSATILYEILLGKATLYAVLVSALVLMAMVKRKDSRGRSKRSRLLHSDYMNMTPRRPGPTRKHYQPYAPPRDFAAYRSRVKFSRSADAPAYQQGQNQLYNELNLGRREEYDVLDKRRGRDPEMGGKPQRRKNPQEGLYNELQKDKMAEAYSEIGMKGERRRGKGHDGLYQGLSTATKDTYDALHMQALPPR

SEQ ID NO: 30207 - protein, 317 aa, synthetic construct
IQNPDPAVYQLRDSKSSDKSVCLFTDFDSQTNVSQSKDSDVYITDKTVLDMRSMDFKSNSAVAWSNKSDFACANAFNNSIIPEDTFFPSPESSCFPPIKTDVITMDPKDNCSKDANDTLLLQLTNTSAYYMYLLLLLKSVVYFAIITCCLLRRTAFCCNGEKSRSKRSRLLHSDYMNMTPRRPGPTRKHYQPYAPPRDFAAYRSRVKFSRSADAPAYQQGQNQLYNELNLGRREEYDVLDKRRGRDPEMGGKPQRRKNPQEGLYNELQKDKMAEAYSEIGMKGERRRGKGHDGLYQGLSTATKDTYDALHMQALPPR

SEQ ID NO: 30208 - protein, 315 aa, synthetic construct
IQNPDPAVYQLRDSKSSDKSVCLFTDFDSQTNVSQSKDSDVYITDKTVLDMRSMDFKSNSAVAWSNKSDFACANAFNNSIIPEDTFFPSPESSCPIKTDVITMDPKDNCSKDANDTLLLQLTNTSAYYMYLLLLLKSVVYFAIITCCLLRRTAFCCNGEKSRSKRSRLLHSDYMNMTPRRPGPTRKHYQPYAPPRDFAAYRSRVKFSRSADAPAYQQGQNQLYNELNLGRREEYDVLDKRRGRDPEMGGKPQRRKNPQEGLYNELQKDKMAEAYSEIGMKGERRRGKGHDGLYQGLSTATKDTYDALHMQALPPR

SEQ ID NO: 30209 - protein, 307 aa, synthetic construct
IQNPDPAVYQLRDSKSSDKSVCLFTDFDSQTNVSQSKDSDVYITDKTVLDMRSMDFKSNSAVAWSNKSDFACANAFNNSIIPEDTFFPSPESSCMDPKDNCSKDANDTLLLQLTNTSAYYMYLLLLLKSVVYFAIITCCLLRRTAFCCNGEKSRSKRSRLLHSDYMNMTPRRPGPTRKHYQPYAPPRDFAAYRSRVKFSRSADAPAYQQGQNQLYNELNLGRREEYDVLDKRRGRDPEMGGKPQRRKNPQEGLYNELQKDKMAEAYSEIGMKGERRRGKGHDGLYQGLSTATKDTYDALHMQALPPR

SEQ ID NO: 30210 - protein, 315 aa, synthetic construct; identical to SEQ ID NO: 30208

SEQ ID NO: 30211 - protein, 301 aa, synthetic construct
IQNPDPAVYQLRDSKSSDKSVCLFTDFDSQTNVSQSKDSDVYITDKTVLDMRSMDFKSNSAVAWSNKSDFACANAFNNSIIPEDTFFPSPESSCCSKDANDTLLLQLTNTSAYYMYLLLLLKSVVYFAIITCCLLRRTAFCCNGEKSRSKRSRLLHSDYMNMTPRRPGPTRKHYQPYAPPRDFAAYRSRVKFSRSADAPAYQQGQNQLYNELNLGRREEYDVLDKRRGRDPEMGGKPQRRKNPQEGLYNELQKDKMAEAYSEIGMKGERRRGKGHDGLYQGLSTATKDTYDALHMQALPPR

SEQ ID NO: 30212 - protein, 316 aa, synthetic construct
IQNPDPAVYQLRDSKSSDKSVCLFTDFDSQTNVSQSKDSDVYITDKTVLDMRSMDFKSNSAVAWSNKSDFACANAFNNSIIPEDTFFPSPESSCEVKTDSTDHVKPKETENTKQPSKSCHKPKAIVHTEKVNMMSLTVLGLRMLFAKTVAVNFLLTAKLFFLRSKRSRLLHSDYMNMTPRRPGPTRKHYQPYAPPRDFAAYRSRVKFSRSADAPAYQQGQNQLYNELNLGRREEYDVLDKRRGRDPEMGGKPQRRKNPQEGLYNELQKDKMAEAYSEIGMKGERRRGKGHDGLYQGLSTATKDTYDALHMQALPPR

SEQ ID NO: 30213 - protein, 309 aa, synthetic construct
IQNPDPAVYQLRDSKSSDKSVCLFTDFDSQTNVSQSKDSDVYITDKTVLDMRSMDFKSNSAVAWSNKSDFACANAFNNSIIPEDTFFPSPESSCDHVKPKETENTKQPSKSCHKPKAIVHTEKVNMMSLTVLGLRMLFAKTVAVNFLLTAKLFFLRSKRSRLLHSDYMNMTPRRPGPTRKHYQPYAPPRDFAAYRSRVKFSRSADAPAYQQGQNQLYNELNLGRREEYDVLDKRRGRDPEMGGKPQRRKNPQEGLYNELQKDKMAEAYSEIGMKGERRRGKGHDGLYQGLSTATKDTYDALHMQALPPR

SEQ ID NO: 30214 - protein, 288 aa, synthetic construct
IQNPDPAVYQLRDSKSSDKSVCLFTDFDSQTNVSQSKDSDVYITDKTVLDMRSMDFKSNSAVAWSNKSDFACANAFNNSIIGRADCGFTSESYQQGVLSATILYEILLGKATLYAVLVSALVLMAMVKRKDSRGRSKRSRLLHSDYMNMTPRRPGPTRKHYQPYAPPRDFAAYRSRVKFSRSADAPAYQQGQNQLYNELNLGRREEYDVLDKRRGRDPEMGGKPQRRKNPQEGLYNELQKDKMAEAYSEIGMKGERRRGKGHDGLYQGLSTATKDTYDALHMQALPPR

SEQ ID NO: 30215 - protein, 286 aa, synthetic construct
IQNPDPAVYQLRDSKSSDKSVCLFTDFDSQTNVSQSKDSDVYITDKTVLDMRSMDFKSNSAVAWSNKSDFACANAFNNSIIADCGFTSESYQQGVLSATILYEILLGKATLYAVLVSALVLMAMVKRKDSRGRSKRSRLLHSDYMNMTPRRPGPTRKHYQPYAPPRDFAAYRSRVKFSRSADAPAYQQGQNQLYNELNLGRREEYDVLDKRRGRDPEMGGKPQRRKNPQEGLYNELQKDKMAEAYSEIGMKGERRRGKGHDGLYQGLSTATKDTYDALHMQALPPR

SEQ ID NO: 30216 - protein, 296 aa, synthetic construct
IQNPDPAVYQLRDSKSSDKSVCLFTDFDSQTNVSQSKDSDVYITDKTVLDMRSMDFKSNSAVAWSNKSDFACANAFNNSIIQIVSAEAWGRADCGFTSESYQQGVLSATILYEILLGKATLYAVLVSALVLMAMVKRKDSRGRSKRSRLLHSDYMNMTPRRPGPTRKHYQPYAPPRDFAAYRSRVKFSRSADAPAYQQGQNQLYNELNLGRREEYDVLDKRRGRDPEMGGKPQRRKNPQEGLYNELQKDKMAEAYSEIGMKGERRRGKGHDGLYQGLSTATKDTYDALHMQALPPR

SEQ ID NO: 30217 - protein, 304 aa, synthetic construct
IQNPDPAVYQLRDSKSSDKSVCLFTDFDSQTNVSQSKDSDVYITDKTVLDMRSMDFKSNSAVAWSNKSDFACANAFNNSIIFPPIKTDVITMDPKDNCSKDANDTLLLQLTNTSAYYMYLLLLLKSVVYFAIITCCLLRRTAFCCNGEKSRSKRSRLLHSDYMNMTPRRPGPTRKHYQPYAPPRDFAAYRSRVKFSRSADAPAYQQGQNQLYNELNLGRREEYDVLDKRRGRDPEMGGKPQRRKNPQEGLYNELQKDKMAEAYSEIGMKGERRRGKGHDGLYQGLSTATKDTYDALHMQALPPR

SEQ ID NO: 30218 - protein, 302 aa, synthetic construct
IQNPDPAVYQLRDSKSSDKSVCLFTDFDSQTNVSQSKDSDVYITDKTVLDMRSMDFKSNSAVAWSNKSDFACANAFNNSIIPIKTDVITMDPKDNCSKDANDTLLLQLTNTSAYYMYLLLLLKSVVYFAIITCCLLRRTAFCCNGEKSRSKRSRLLHSDYMNMTPRRPGPTRKHYQPYAPPRDFAAYRSRVKFSRSADAPAYQQGQNQLYNELNLGRREEYDVLDKRRGRDPEMGGKPQRRKNPQEGLYNELQKDKMAEAYSEIGMKGERRRGKGHDGLYQGLSTATKDTYDALHMQALPPR

SEQ ID NO: 30219 - protein, 294 aa, synthetic construct
IQNPDPAVYQLRDSKSSDKSVCLFTDFDSQTNVSQSKDSDVYITDKTVLDMRSMDFKSNSAVAWSNKSDFACANAFNNSIIMDPKDNCSKDANDTLLLQLTNTSAYYMYLLLLLKSVVYFAIITCCLLRRTAFCCNGEKSRSKRSRLLHSDYMNMTPRRPGPTRKHYQPYAPPRDFAAYRSRVKFSRSADAPAYQQGQNQLYNELNLGRREEYDVLDKRRGRDPEMGGKPQRRKNPQEGLYNELQKDKMAEAYSEIGMKGERRRGKGHDGLYQGLSTATKDTYDALHMQALPPR

SEQ ID NO: 30220 - protein, 302 aa, synthetic construct; identical to SEQ ID NO: 30218

SEQ ID NO: 30221 - protein, 288 aa, synthetic construct
IQNPDPAVYQLRDSKSSDKSVCLFTDFDSQTNVSQSKDSDVYITDKTVLDMRSMDFKSNSAVAWSNKSDFACANAFNNSIICSKDANDTLLLQLTNTSAYYMYLLLLLKSVVYFAIITCCLLRRTAFCCNGEKSRSKRSRLLHSDYMNMTPRRPGPTRKHYQPYAPPRDFAAYRSRVKFSRSADAPAYQQGQNQLYNELNLGRREEYDVLDKRRGRDPEMGGKPQRRKNPQEGLYNELQKDKMAEAYSEIGMKGERRRGKGHDGLYQGLSTATKDTYDALHMQALPPR

SEQ ID NO: 30222 - protein, 303 aa, synthetic construct
IQNPDPAVYQLRDSKSSDKSVCLFTDFDSQTNVSQSKDSDVYITDKTVLDMRSMDFKSNSAVAWSNKSDFACANAFNNSIIEVKTDSTDHVKPKETENTKQPSKSCHKPKAIVHTEKVNMMSLTVLGLRMLFAKTVAVNFLLTAKLFFLRSKRSRLLHSDYMNMTPRRPGPTRKHYQPYAPPRDFAAYRSRVKFSRSADAPAYQQGQNQLYNELNLGRREEYDVLDKRRGRDPEMGGKPQRRKNPQEGLYNELQKDKMAEAYSEIGMKGERRRGKGHDGLYQGLSTATKDTYDALHMQALPPR

SEQ ID NO: 30223 - protein, 296 aa, synthetic construct
IQNPDPAVYQLRDSKSSDKSVCLFTDFDSQTNVSQSKDSDVYITDKTVLDMRSMDFKSNSAVAWSNKSDFACANAFNNSIIDHVKPKETENTKQPSKSCHKPKAIVHTEKVNMMSLTVLGLRMLFAKTVAVNFLLTAKLFFLRSKRSRLLHSDYMNMTPRRPGPTRKHYQPYAPPRDFAAYRSRVKFSRSADAPAYQQGQNQLYNELNLGRREEYDVLDKRRGRDPEMGGKPQRRKNPQEGLYNELQKDKMAEAYSEIGMKGERRRGKGHDGLYQGLSTATKDTYDALHMQALPPR

SEQ ID NO: 30224 - protein, 301 aa, synthetic construct; identical to SEQ ID NO: 30204

SEQ ID NO: 30225 - protein, 299 aa, synthetic construct; identical to SEQ ID NO: 30205

SEQ ID NO: 30226 - protein, 309 aa, synthetic construct; identical to SEQ ID NO: 30206

SEQ ID NO: 30227 - protein, 317 aa, synthetic construct; identical to SEQ ID NO: 30207

SEQ ID NO: 30228 - protein, 315 aa, synthetic construct; identical to SEQ ID NO: 30208

SEQ ID NO: 30229 - protein, 307 aa, synthetic construct; identical to SEQ ID NO: 30209

SEQ ID NO: 30230 - protein, 315 aa, synthetic construct; identical to SEQ ID NO: 30208

SEQ ID NO: 30231 - protein, 301 aa, synthetic construct; identical to SEQ ID NO: 30211

SEQ ID NO: 30232 - protein, 316 aa, synthetic construct; identical to SEQ ID NO: 30212

SEQ ID NO: 30233 - protein, 309 aa, synthetic construct; identical to SEQ ID NO: 30213

SEQ ID NO: 30234 - protein, 286 aa, synthetic construct
KSSDKSVCLFTDFDSQTNVSQSKDSDVYITDKTVLDMRSMDFKSNSAVAWSNKSDFACANAFNNSIIPEDTFFPSPESSGRADCGFTSESYQQGVLSATILYEILLGKATLYAVLVSALVLMAMVKRKDSRGRSKRSRLLHSDYMNMTPRRPGPTRKHYQPYAPPRDFAAYRSRVKFSRSADAPAYQQGQNQLYNELNLGRREEYDVLDKRRGRDPEMGGKPQRRKNPQEGLYNELQKDKMAEAYSEIGMKGERRRGKGHDGLYQGLSTATKDTYDALHMQALPPR

SEQ ID NO: 30235 - protein, 284 aa, synthetic construct
KSSDKSVCLFTDFDSQTNVSQSKDSDVYITDKTVLDMRSMDFKSNSAVAWSNKSDFACANAFNNSIIPEDTFFPSPESSADCGFTSESYQQGVLSATILYEILLGKATLYAVLVSALVLMAMVKRKDSRGRSKRSRLLHSDYMNMTPRRPGPTRKHYQPYAPPRDFAAYRSRVKFSRSADAPAYQQGQNQLYNELNLGRREEYDVLDKRRGRDPEMGGKPQRRKNPQEGLYNELQKDKMAEAYSEIGMKGERRRGKGHDGLYQGLSTATKDTYDALHMQALPPR

SEQ ID NO: 30236 - protein, 294 aa, synthetic construct
KSSDKSVCLFTDFDSQTNVSQSKDSDVYITDKTVLDMRSMDFKSNSAVAWSNKSDFACANAFNNSIIPEDTFFPSPESSQIVSAEAWGRADCGFTSESYQQGVLSATILYEILLGKATLYAVLVSALVLMAMVKRKDSRGRSKRSRLLHSDYMNMTPRRPGPTRKHYQPYAPPRDFAAYRSRVKFSRSADAPAYQQGQNQLYNELNLGRREEYDVLDKRRGRDPEMGGKPQRRKNPQEGLYNELQKDKMAEAYSEIGMKGERRRGKGHDGLYQGLSTATKDTYDALHMQALPPR

SEQ ID NO: 30237 - protein, 302 aa, synthetic construct
KSSDKSVCLFTDFDSQTNVSQSKDSDVYITDKTVLDMRSMDFKSNSAVAWSNKSDFACANAFNNSIIPEDTFFPSPESSFPPIKTDVITMDPKDNCSKDANDTLLLQLTNTSAYYMYLLLLLKSVVYFAIITCCLLRRTAFCCNGEKSRSKRSRLLHSDYMNMTPRRPGPTRKHYQPYAPPRDFAAYRSRVKFSRSADAPAYQQGQNQLYNELNLGRREEYDVLDKRRGRDPEMGGKPQRRKNPQEGLYNELQKDKMAEAYSEIGMKGERRRGKGHDGLYQGLSTATKDTYDALHMQALPPR

SEQ ID NO: 30238 - protein, 300 aa, synthetic construct
KSSDKSVCLFTDFDSQTNVSQSKDSDVYITDKTVLDMRSMDFKSNSAVAWSNKSDFACANAFNNSIIPEDTFFPSPESSPIKTDVITMDPKDNCSKDANDTLLLQLTNTSAYYMYLLLLLKSVVYFAIITCCLLRRTAFCCNGEKSRSKRSRLLHSDYMNMTPRRPGPTRKHYQPYAPPRDFAAYRSRVKFSRSADAPAYQQGQNQLYNELNLGRREEYDVLDKRRGRDPEMGGKPQRRKNPQEGLYNELQKDKMAEAYSEIGMKGERRRGKGHDGLYQGLSTATKDTYDALHMQALPPR

SEQ ID NO: 30239 - protein, 292 aa, synthetic construct
KSSDKSVCLFTDFDSQTNVSQSKDSDVYITDKTVLDMRSMDFKSNSAVAWSNKSDFACANAFNNSIIPEDTFFPSPESSMDPKDNCSKDANDTLLLQLTNTSAYYMYLLLLLKSVVYFAIITCCLLRRTAFCCNGEKSRSKRSRLLHSDYMNMTPRRPGPTRKHYQPYAPPRDFAAYRSRVKFSRSADAPAYQQGQNQLYNELNLGRREEYDVLDKRRGRDPEMGGKPQRRKNPQEGLYNELQKDKMAEAYSEIGMKGERRRGKGHDGLYQGLSTATKDTYDALHMQALPPR

SEQ ID NO: 30240 - protein, 300 aa, synthetic construct; identical to SEQ ID NO: 30238

SEQ ID NO: 30241 - protein, 286 aa, synthetic construct
KSSDKSVCLFTDFDSQTNVSQSKDSDVYITDKTVLDMRSMDFKSNSAVAWSNKSDFACANAFNNSIIPEDTFFPSPESSCSKDANDTLLLQLTNTSAYYMYLLLLLKSVVYFAIITCCLLRRTAFCCNGEKSRSKRSRLLHSDYMNMTPRRPGPTRKHYQPYAPPRDFAAYRSRVKFSRSADAPAYQQGQNQLYNELNLGRREEYDVLDKRRGRDPEMGGKPQRRKNPQEGLYNELQKDKMAEAYSEIGMKGERRRGKGHDGLYQGLSTATKDTYDALHMQALPPR

SEQ ID NO: 30242 - protein, 301 aa, synthetic construct
KSSDKSVCLFTDFDSQTNVSQSKDSDVYITDKTVLDMRSMDFKSNSAVAWSNKSDFACANAFNNSIIPEDTFFPSPESSEVKTDSTDHVKPKETENTKQPSKSCHKPKAIVHTEKVNMMSLTVLGLRMLFAKTVAVNFLLTAKLFFLRSKRSRLLHSDYMNMTPRRPGPTRKHYQPYAPPRDFAAYRSRVKFSRSADAPAYQQGQNQLYNELNLGRREEYDVLDKRRGRDPEMGGKPQRRKNPQEGLYNELQKDKMAEAYSEIGMKGERRRGKGHDGLYQGLSTATKDTYDALHMQALPPR

SEQ ID NO: 30243 - protein, 294 aa, synthetic construct
KSSDKSVCLFTDFDSQTNVSQSKDSDVYITDKTVLDMRSMDFKSNSAVAWSNKSDFACANAFNNSIIPEDTFFPSPESSDHVKPKETENTKQPSKSCHKPKAIVHTEKVNMMSLTVLGLRMLFAKTVAVNFLLTAKLFFLRSKRSRLLHSDYMNMTPRRPGPTRKHYQPYAPPRDFAAYRSRVKFSRSADAPAYQQGQNQLYNELNLGRREEYDVLDKRRGRDPEMGGKPQRRKNPQEGLYNELQKDKMAEAYSEIGMKGERRRGKGHDGLYQGLSTATKDTYDALHMQALPPR

SEQ ID NO: 30244 - protein, 340 aa, synthetic construct
EDLKNVFPPEVAVFEPSEAEISHTQKATLVCLATGFYPDHVELSWWVNGKEVHSGVSTDPQPLKEQPALNDSRYCLSSRLRVSATFWQNPRNHFRCQVQFYGLSENDEWTQDRAKPVTQIVSAEAWIPEDTFFPSPESSCDVKLVEKSFETDTNLNFQNLSVIGFRILLLKVAGFNLLMTLRLWSSRSKRSRLLHSDYMNMTPRRPGPTRKHYQPYAPPRDFAAYRSRVKFSRSADAPAYQQGQNQLYNELNLGRREEYDVLDKRRGRDPEMGGKPQRRKNPQEGLYNELQKDKMAEAYSEIGMKGERRRGKGHDGLYQGLSTATKDTYDALHMQALPPR

SEQ ID NO: 30245 - protein, 330 aa, synthetic construct
EDLKNVFPPEVAVFEPSEAEISHTQKATLVCLATGFYPDHVELSWWVNGKEVHSGVSTDPQPLKEQPALNDSRYCLSSRLRVSATFWQNPRNHFRCQVQFYGLSENDEWTQDRAKPVTQIVSAEAWESSCDVKLVEKSFETDTNLNFQNLSVIGFRILLLKVAGFNLLMTLRLWSSRSKRSRLLHSDYMNMTPRRPGPTRKHYQPYAPPRDFAAYRSRVKFSRSADAPAYQQGQNQLYNELNLGRREEYDVLDKRRGRDPEMGGKPQRRKNPQEGLYNELQKDKMAEAYSEIGMKGERRRGKGHDGLYQGLSTATKDTYDALHMQALPPR

SEQ ID NO: 30246 - protein, 339 aa, synthetic construct
EDLKNVFPPEVAVFEPSEAEISHTQKATLVCLATGFYPDHVELSWWVNGKEVHSGVSTDPQPLKEQPALNDSRYCLSSRLRVSATFWQNPRNHFRCQVQFYGLSENDEWTQDRAKPVTQIVSAEAWPEDTFFPSPESSCDVKLVEKSFETDTNLNFQNLSVIGFRILLLKVAGFNLLMTLRLWSSRSKRSRLLHSDYMNMTPRRPGPTRKHYQPYAPPRDFAAYRSRVKFSRSADAPAYQQGQNQLYNELNLGRREEYDVLDKRRGRDPEMGGKPQRRKNPQEGLYNELQKDKMAEAYSEIGMKGERRRGKGHDGLYQGLSTATKDTYDALHMQALPPR

SEQ ID NO: 30247 - protein, 349 aa, synthetic construct
EDLKNVFPPEVAVFEPSEAEISHTQKATLVCLATGFYPDHVELSWWVNGKEVHSGVSTDPQPLKEQPALNDSRYCLSSRLRVSATFWQNPRNHFRCQVQFYGLSENDEWTQDRAKPVTQIVSAEAWFPPIKTDVITMDPKDNCSKDANDTLLLQLTNTSAYYMYLLLLLKSVVYFAIITCCLLRRTAFCCNGEKSRSKRSRLLHSDYMNMTPRRPGPTRKHYQPYAPPRDFAAYRSRVKFSRSADAPAYQQGQNQLYNELNLGRREEYDVLDKRRGRDPEMGGKPQRRKNPQEGLYNELQKDKMAEAYSEIGMKGERRRGKGHDGLYQGLSTATKDTYDALHMQALPPR

SEQ ID NO: 30248 - protein, 347 aa, synthetic construct
EDLKNVFPPEVAVFEPSEAEISHTQKATLVCLATGFYPDHVELSWWVNGKEVHSGVSTDPQPLKEQPALNDSRYCLSSRLRVSATFWQNPRNHFRCQVQFYGLSENDEWTQDRAKPVTQIVSAEAWPIKTDVITMDPKDNCSKDANDTLLLQLTNTSAYYMYLLLLLKSVVYFAIITCCLLRRTAFCCNGEKSRSKRSRLLHSDYMNMTPRRPGPTRKHYQPYAPPRDFAAYRSRVKFSRSADAPAYQQGQNQLYNELNLGRREEYDVLDKRRGRDPEMGGKPQRRKNPQEGLYNELQKDKMAEAYSEIGMKGERRRGKGHDGLYQGLSTATKDTYDALHMQALPPR

SEQ ID NO: 30249 - protein, 339 aa, synthetic construct
EDLKNVFPPEVAVFEPSEAEISHTQKATLVCLATGFYPDHVELSWWVNGKEVHSGVSTDPQPLKEQPALNDSRYCLSSRLRVSATFWQNPRNHFRCQVQFYGLSENDEWTQDRAKPVTQIVSAEAWMDPKDNCSKDANDTLLLQLTNTSAYYMYLLLLLKSVVYFAIITCCLLRRTAFCCNGEKSRSKRSRLLHSDYMNMTPRRPGPTRKHYQPYAPPRDFAAYRSRVKFSRSADAPAYQQGQNQLYNELNLGRREEYDVLDKRRGRDPEMGGKPQRRKNPQEGLYNELQKDKMAEAYSEIGMKGERRRGKGHDGLYQGLSTATKDTYDALHMQALPPR

SEQ ID NO: 30250 - protein, 347 aa, synthetic construct; identical to SEQ ID NO: 30248

SEQ ID NO: 30251 - protein, 333 aa, synthetic construct
EDLKNVFPPEVAVFEPSEAEISHTQKATLVCLATGFYPDHVELSWWVNGKEVHSGVSTDPQPLKEQPALNDSRYCLSSRLRVSATFWQNPRNHFRCQVQFYGLSENDEWTQDRAKPVTQIVSAEAWCSKDANDTLLLQLTNTSAYYMYLLLLLKSVVYFAIITCCLLRRTAFCCNGEKSRSKRSRLLHSDYMNMTPRRPGPTRKHYQPYAPPRDFAAYRSRVKFSRSADAPAYQQGQNQLYNELNLGRREEYDVLDKRRGRDPEMGGKPQRRKNPQEGLYNELQKDKMAEAYSEIGMKGERRRGKGHDGLYQGLSTATKDTYDALHMQALPPR

SEQ ID NO: 30252 - protein, 348 aa, synthetic construct
EDLKNVFPPEVAVFEPSEAEISHTQKATLVCLATGFYPDHVELSWWVNGKEVHSGVSTDPQPLKEQPALNDSRYCLSSRLRVSATFWQNPRNHFRCQVQFYGLSENDEWTQDRAKPVTQIVSAEAWEVKTDSTDHVKPKETENTKQPSKSCHKPKAIVHTEKVNMMSLTVLGLRMLFAKTVAVNFLLTAKLFFLRSKRSRLLHSDYMNMTPRRPGPTRKHYQPYAPPRDFAAYRSRVKFSRSADAPAYQQGQNQLYNELNLGRREEYDVLDKRRGRDPEMGGKPQRRKNPQEGLYNELQKDKMAEAYSEIGMKGERRRGKGHDGLYQGLSTATKDTYDALHMQALPPR

SEQ ID NO: 30253 - protein, 341 aa, synthetic construct
EDLKNVFPPEVAVFEPSEAEISHTQKATLVCLATGFYPDHVELSWWVNGKEVHSGVSTDPQPLKEQPALNDSRYCLSSRLRVSATFWQNPRNHFRCQVQFYGLSENDEWTQDRAKPVTQIVSAEAWDHVKPKETENTKQPSKSCHKPKAIVHTEKVNMMSLTVLGLRMLFAKTVAVNFLLTAKLFFLRSKRSRLLHSDYMNMTPRRPGPTRKHYQPYAPPRDFAAYRSRVKFSRSADAPAYQQGQNQLYNELNLGRREEYDVLDKRRGRDPEMGGKPQRRKNPQEGLYNELQKDKMAEAYSEIGMKGERRRGKGHDGLYQGLSTATKDTYDALHMQALPPR

SEQ ID NO: 30254 - protein, 342 aa, synthetic construct
EDLKNVFPPEVAVFEPSEAEISHTQKATLVCLATGFYPDHVELSWWVNGKEVHSGVSTDPQPLKEQPALNDSRYCLSSRLRVSATFWQNPRNHFRCQVQFYGLSENDEWTQDRAKPVTQIVSAEAWGRIPEDTFFPSPESSCDVKLVEKSFETDTNLNFQNLSVIGFRILLLKVAGFNLLMTLRLWSSRSKRSRLLHSDYMNMTPRRPGPTRKHYQPYAPPRDFAAYRSRVKFSRSADAPAYQQGQNQLYNELNLGRREEYDVLDKRRGRDPEMGGKPQRRKNPQEGLYNELQKDKMAEAYSEIGMKGERRRGKGHDGLYQGLSTATKDTYDALHMQALPPR

SEQ ID NO: 30255 - protein, 332 aa, synthetic construct
EDLKNVFPPEVAVFEPSEAEISHTQKATLVCLATGFYPDHVELSWWVNGKEVHSGVSTDPQPLKEQPALNDSRYCLSSRLRVSATFWQNPRNHFRCQVQFYGLSENDEWTQDRAKPVTQIVSAEAWGRESSCDVKLVEKSFETDTNLNFQNLSVIGFRILLLKVAGFNLLMTLRLWSSRSKRSRLLHSDYMNMTPRRPGPTRKHYQPYAPPRDFAAYRSRVKFSRSADAPAYQQGQNQLYNELNLGRREEYDVLDKRRGRDPEMGGKPQRRKNPQEGLYNELQKDKMAEAYSEIGMKGERRRGKGHDGLYQGLSTATKDTYDALHMQALPPR

SEQ ID NO: 30256 - protein, 341 aa, synthetic construct
EDLKNVFPPEVAVFEPSEAEISHTQKATLVCLATGFYPDHVELSWWVNGKEVHSGVSTDPQPLKEQPALNDSRYCLSSRLRVSATFWQNPRNHFRCQVQFYGLSENDEWTQDRAKPVTQIVSAEAWGRPEDTFFPSPESSCDVKLVEKSFETDTNLNFQNLSVIGFRILLLKVAGFNLLMTLRLWSSRSKRSRLLHSDYMNMTPRRPGPTRKHYQPYAPPRDFAAYRSRVKFSRSADAPAYQQGQNQLYNELNLGRREEYDVLDKRRGRDPEMGGKPQRRKNPQEGLYNELQKDKMAEAYSEIGMKGERRRGKGHDGLYQGLSTATKDTYDALHMQALPPR

SEQ ID NO: 30257 - protein, 351 aa, synthetic construct
EDLKNVFPPEVAVFEPSEAEISHTQKATLVCLATGFYPDHVELSWWVNGKEVHSGVSTDPQPLKEQPALNDSRYCLSSRLRVSATFWQNPRNHFRCQVQFYGLSENDEWTQDRAKPVTQIVSAEAWGRFPPIKTDVITMDPKDNCSKDANDTLLLQLTNTSAYYMYLLLLLKSVVYFAIITCCLLRRTAFCCNGEKSRSKRSRLLHSDYMNMTPRRPGPTRKHYQPYAPPRDFAAYRSRVKFSRSADAPAYQQGQNQLYNELNLGRREEYDVLDKRRGRDPEMGGKPQRRKNPQEGLYNELQKDKMAEAYSEIGMKGERRRGKGHDGLYQGLSTATKDTYDALHMQALPPR

SEQ ID NO: 30258 - protein, 349 aa, synthetic construct
EDLKNVFPPEVAVFEPSEAEISHTQKATLVCLATGFYPDHVELSWWVNGKEVHSGVSTDPQPLKEQPALNDSRYCLSSRLRVSATFWQNPRNHFRCQVQFYGLSENDEWTQDRAKPVTQIVSAEAWGRPIKTDVITMDPKDNCSKDANDTLLLQLTNTSAYYMYLLLLLKSVVYFAIITCCLLRRTAFCCNGEKSRSKRSRLLHSDYMNMTPRRPGPTRKHYQPYAPPRDFAAYRSRVKFSRSADAPAYQQGQNQLYNELNLGRREEYDVLDKRRGRDPEMGGKPQRRKNPQEGLYNELQKDKMAEAYSEIGMKGERRRGKGHDGLYQGLSTATKDTYDALHMQALPPR

SEQ ID NO: 30259 - protein, 341 aa, synthetic construct
EDLKNVFPPEVAVFEPSEAEISHTQKATLVCLATGFYPDHVELSWWVNGKEVHSGVSTDPQPLKEQPALNDSRYCLSSRLRVSATFWQNPRNHFRCQVQFYGLSENDEWTQDRAKPVTQIVSAEAWGRMDPKDNCSKDANDTLLLQLTNTSAYYMYLLLLLKSVVYFAIITCCLLRRTAFCCNGEKSRSKRSRLLHSDYMNMTPRRPGPTRKHYQPYAPPRDFAAYRSRVKFSRSADAPAYQQGQNQLYNELNLGRREEYDVLDKRRGRDPEMGGKPQRRKNPQEGLYNELQKDKMAEAYSEIGMKGERRRGKGHDGLYQGLSTATKDTYDALHMQALPPR

SEQ ID NO: 30260 - protein, 349 aa, synthetic construct; identical to SEQ ID NO: 30258

SEQ ID NO: 30261 - protein, 335 aa, synthetic construct
EDLKNVFPPEVAVFEPSEAEISHTQKATLVCLATGFYPDHVELSWWVNGKEVHSGVSTDPQPLKEQPALNDSRYCLSSRLRVSATFWQNPRNHFRCQVQFYGLSENDEWTQDRAKPVTQIVSAEAWGRCSKDANDTLLLQLTNTSAYYMYLLLLLKSVVYFAIITCCLLRRTAFCCNGEKSRSKRSRLLHSDYMNMTPRRPGPTRKHYQPYAPPRDFAAYRSRVKFSRSADAPAYQQGQNQLYNELNLGRREEYDVLDKRRGRDPEMGGKPQRRKNPQEGLYNELQKDKMAEAYSEIGMKGERRRGKGHDGLYQGLSTATKDTYDALHMQALPPR

SEQ ID NO: 30262 - protein, 350 aa, synthetic construct
EDLKNVFPPEVAVFEPSEAEISHTQKATLVCLATGFYPDHVELSWWVNGKEVHSGVSTDPQPLKEQPALNDSRYCLSSRLRVSATFWQNPRNHFRCQVQFYGLSENDEWTQDRAKPVTQIVSAEAWGREVKTDSTDHVKPKETENTKQPSKSCHKPKAIVHTEKVNMMSLTVLGLRMLFAKTVAVNFLLTAKLFFLRSKRSRLLHSDYMNMTPRRPGPTRKHYQPYAPPRDFAAYRSRVKFSRSADAPAYQQGQNQLYNELNLGRREEYDVLDKRRGRDPEMGGKPQRRKNPQEGLYNELQKDKMAEAYSEIGMKGERRRGKGHDGLYQGLSTATKDTYDALHMQALPPR

SEQ ID NO: 30263 - protein, 343 aa, synthetic construct
EDLKNVFPPEVAVFEPSEAEISHTQKATLVCLATGFYPDHVELSWWVNGKEVHSGVSTDPQPLKEQPALNDSRYCLSSRLRVSATFWQNPRNHFRCQVQFYGLSENDEWTQDRAKPVTQIVSAEAWGRDHVKPKETENTKQPSKSCHKPKAIVHTEKVNMMSLTVLGLRMLFAKTVAVNFLLTAKLFFLRSKRSRLLHSDYMNMTPRRPGPTRKHYQPYAPPRDFAAYRSRVKFSRSADAPAYQQGQNQLYNELNLGRREEYDVLDKRRGRDPEMGGKPQRRKNPQEGLYNELQKDKMAEAYSEIGMKGERRRGKGHDGLYQGLSTATKDTYDALHMQALPPR

SEQ ID NO: 30264 - protein, 345 aa, synthetic construct
EDLKNVFPPEVAVFEPSEAEISHTQKATLVCLATGFYPDHVELSWWVNGKEVHSGVSTDPQPLKEQPALNDSRYCLSSRLRVSATFWQNPRNHFRCQVQFYGLSENDEWTQDRAKPVTQIVSAEAWGRADCIPEDTFFPSPESSCDVKLVEKSFETDTNLNFQNLSVIGFRILLLKVAGFNLLMTLRLWSSRSKRSRLLHSDYMNMTPRRPGPTRKHYQPYAPPRDFAAYRSRVKFSRSADAPAYQQGQNQLYNELNLGRREEYDVLDKRRGRDPEMGGKPQRRKNPQEGLYNELQKDKMAEAYSEIGMKGERRRGKGHDGLYQGLSTATKDTYDALHMQALPPR

SEQ ID NO: 30265 - protein, 335 aa, synthetic construct
EDLKNVFPPEVAVFEPSEAEISHTQKATLVCLATGFYPDHVELSWWVNGKEVHSGVSTDPQPLKEQPALNDSRYCLSSRLRVSATFWQNPRNHFRCQVQFYGLSENDEWTQDRAKPVTQIVSAEAWGRADCESSCDVKLVEKSFETDTNLNFQNLSVIGFRILLLKVAGFNLLMTLRLWSSRSKRSRLLHSDYMNMTPRRPGPTRKHYQPYAPPRDFAAYRSRVKFSRSADAPAYQQGQNQLYNELNLGRREEYDVLDKRRGRDPEMGGKPQRRKNPQEGLYNELQKDKMAEAYSEIGMKGERRRGKGHDGLYQGLSTATKDTYDALHMQALPPR

SEQ ID NO: 30266 - protein, 344 aa, synthetic construct
EDLKNVFPPEVAVFEPSEAEISHTQKATLVCLATGFYPDHVELSWWVNGKEVHSGVSTDPQPLKEQPALNDSRYCLSSRLRVSATFWQNPRNHFRCQVQFYGLSENDEWTQDRAKPVTQIVSAEAWGRADCPEDTFFPSPESSCDVKLVEKSFETDTNLNFQNLSVIGFRILLLKVAGFNLLMTLRLWSSRSKRSRLLHSDYMNMTPRRPGPTRKHYQPYAPPRDFAAYRSRVKFSRSADAPAYQQGQNQLYNELNLGRREEYDVLDKRRGRDPEMGGKPQRRKNPQEGLYNELQKDKMAEAYSEIGMKGERRRGKGHDGLYQGLSTATKDTYDALHMQALPPR

SEQ ID NO: 30267 - protein, 354 aa, synthetic construct
EDLKNVFPPEVAVFEPSEAEISHTQKATLVCLATGFYPDHVELSWWVNGKEVHSGVSTDPQPLKEQPALNDSRYCLSSRLRVSATFWQNPRNHFRCQVQFYGLSENDEWTQDRAKPVTQIVSAEAWGRADCFPPIKTDVITMDPKDNCSKDANDTLLLQLTNTSAYYMYLLLLLKSVVYFAIITCCLLRRTAFCCNGEKSRSKRSRLLHSDYMNMTPRRPGPTRKHYQPYAPPRDFAAYRSRVKFSRSADAPAYQQGQNQLYNELNLGRREEYDVLDKRRGRDPEMGGKPQRRKNPQEGLYNELQKDKMAEAYSEIGMKGERRRGKGHDGLYQGLSTATKDTYDALHMQALPPR

SEQ ID NO: 30268 - protein, 352 aa, synthetic construct
EDLKNVFPPEVAVFEPSEAEISHTQKATLVCLATGFYPDHVELSWWVNGKEVHSGVSTDPQPLKEQPALNDSRYCLSSRLRVSATFWQNPRNHFRCQVQFYGLSENDEWTQDRAKPVTQIVSAEAWGRADCPIKTDVITMDPKDNCSKDANDTLLLQLTNTSAYYMYLLLLLKSVVYFAIITCCLLRRTAFCCNGEKSRSKRSRLLHSDYMNMTPRRPGPTRKHYQPYAPPRDFAAYRSRVKFSRSADAPAYQQGQNQLYNELNLGRREEYDVLDKRRGRDPEMGGKPQRRKNPQEGLYNELQKDKMAEAYSEIGMKGERRRGKGHDGLYQGLSTATKDTYDALHMQALPPR

SEQ ID NO: 30269 - protein, 344 aa, synthetic construct
EDLKNVFPPEVAVFEPSEAEISHTQKATLVCLATGFYPDHVELSWWVNGKEVHSGVSTDPQPLKEQPALNDSRYCLSSRLRVSATFWQNPRNHFRCQVQFYGLSENDEWTQDRAKPVTQIVSAEAWGRADCMDPKDNCSKDANDTLLLQLTNTSAYYMYLLLLLKSVVYFAIITCCLLRRTAFCCNGEKSRSKRSRLLHSDYMNMTPRRPGPTRKHYQPYAPPRDFAAYRSRVKFSRSADAPAYQQGQNQLYNELNLGRREEYDVLDKRRGRDPEMGGKPQRRKNPQEGLYNELQKDKMAEAYSEIGMKGERRRGKGHDGLYQGLSTATKDTYDALHMQALPPR

SEQ ID NO: 30270 - protein, 352 aa, synthetic construct; identical to SEQ ID NO: 30268

SEQ ID NO: 30271 - protein, 338 aa, synthetic construct
EDLKNVFPPEVAVFEPSEAEISHTQKATLVCLATGFYPDHVELSWWVNGKEVHSGVSTDPQPLKEQPALNDSRYCLSSRLRVSATFWQNPRNHFRCQVQFYGLSENDEWTQDRAKPVTQIVSAEAWGRADCCSKDANDTLLLQLTNTSAYYMYLLLLLKSVVYFAIITCCLLRRTAFCCNGEKSRSKRSRLLHSDYMNMTPRRPGPTRKHYQPYAPPRDFAAYRSRVKFSRSADAPAYQQGQNQLYNELNLGRREEYDVLDKRRGRDPEMGGKPQRRKNPQEGLYNELQKDKMAEAYSEIGMKGERRRGKGHDGLYQGLSTATKDTYDALHMQALPPR

SEQ ID NO: 30272 - protein, 353 aa, synthetic construct
EDLKNVFPPEVAVFEPSEAEISHTQKATLVCLATGFYPDHVELSWWVNGKEVHSGVSTDPQPLKEQPALNDSRYCLSSRLRVSATFWQNPRNHFRCQVQFYGLSENDEWTQDRAKPVTQIVSAEAWGRADCEVKTDSTDHVKPKETENTKQPSKSCHKPKAIVHTEKVNMMSLTVLGLRMLFAKTVAVNFLLTAKLFFLRSKRSRLLHSDYMNMTPRRPGPTRKHYQPYAPPRDFAAYRSRVKFSRSADAPAYQQGQNQLYNELNLGRREEYDVLDKRRGRDPEMGGKPQRRKNPQEGLYNELQKDKMAEAYSEIGMKGERRRGKGHDGLYQGLSTATKDTYDALHMQALPPR

SEQ ID NO: 30273 - protein, 346 aa, synthetic construct
EDLKNVFPPEVAVFEPSEAEISHTQKATLVCLATGFYPDHVELSWWVNGKEVHSGVSTDPQPLKEQPALNDSRYCLSSRLRVSATFWQNPRNHFRCQVQFYGLSENDEWTQDRAKPVTQIVSAEAWGRADCDHVKPKETENTKQPSKSCHKPKAIVHTEKVNMMSLTVLGLRMLFAKTVAVNFLLTAKLFFLRSKRSRLLHSDYMNMTPRRPGPTRKHYQPYAPPRDFAAYRSRVKFSRSADAPAYQQGQNQLYNELNLGRREEYDVLDKRRGRDPEMGGKPQRRKNPQEGLYNELQKDKMAEAYSEIGMKGERRRGKGHDGLYQGLSTATKDTYDALHMQALPPR

SEQ ID NO: 30274 - protein, 332 aa, synthetic construct
EDLKNVFPPEVAVFEPSEAEISHTQKATLVCLATGFYPDHVELSWWVNGKEVHSGVSTDPQPLKEQPALNDSRYCLSSRLRVSATFWQNPRNHFRCQVQFYGLSENDEWTQDRAKPVTIPEDTFFPSPESSCDVKLVEKSFETDTNLNFQNLSVIGFRILLLKVAGFNLLMTLRLWSSRSKRSRLLHSDYMNMTPRRPGPTRKHYQPYAPPRDFAAYRSRVKFSRSADAPAYQQGQNQLYNELNLGRREEYDVLDKRRGRDPEMGGKPQRRKNPQEGLYNELQKDKMAEAYSEIGMKGERRRGKGHDGLYQGLSTATKDTYDALHMQALPPR

SEQ ID NO: 30275 - protein, 322 aa, synthetic construct
EDLKNVFPPEVAVFEPSEAEISHTQKATLVCLATGFYPDHVELSWWVNGKEVHSGVSTDPQPLKEQPALNDSRYCLSSRLRVSATFWQNPRNHFRCQVQFYGLSENDEWTQDRAKPVTESSCDVKLVEKSFETDTNLNFQNLSVIGFRILLLKVAGFNLLMTLRLWSSRSKRSRLLHSDYMNMTPRRPGPTRKHYQPYAPPRDFAAYRSRVKFSRSADAPAYQQGQNQLYNELNLGRREEYDVLDKRRGRDPEMGGKPQRRKNPQEGLYNELQKDKMAEAYSEIGMKGERRRGKGHDGLYQGLSTATKDTYDALHMQALPPR

SEQ ID NO: 30276 - protein, 331 aa, synthetic construct
EDLKNVFPPEVAVFEPSEAEISHTQKATLVCLATGFYPDHVELSWWVNGKEVHSGVSTDPQPLKEQPALNDSRYCLSSRLRVSATFWQNPRNHFRCQVQFYGLSENDEWTQDRAKPVTPEDTFFPSPESSCDVKLVEKSFETDTNLNFQNLSVIGFRILLLKVAGFNLLMTLRLWSSRSKRSRLLHSDYMNMTPRRPGPTRKHYQPYAPPRDFAAYRSRVKFSRSADAPAYQQGQNQLYNELNLGRREEYDVLDKRRGRDPEMGGKPQRRKNPQEGLYNELQKDKMAEAYSEIGMKGERRRGKGHDGLYQGLSTATKDTYDALHMQALPPR

SEQ ID NO: 30277 - protein, 341 aa, synthetic construct
EDLKNVFPPEVAVFEPSEAEISHTQKATLVCLATGFYPDHVELSWWVNGKEVHSGVSTDPQPLKEQPALNDSRYCLSSRLRVSATFWQNPRNHFRCQVQFYGLSENDEWTQDRAKPVTFPPIKTDVITMDPKDNCSKDANDTLLLQLTNTSAYYMYLLLLLKSVVYFAIITCCLLRRTAFCCNGEKSRSKRSRLLHSDYMNMTPRRPGPTRKHYQPYAPPRDFAAYRSRVKFSRSADAPAYQQGQNQLYNELNLGRREEYDVLDKRRGRDPEMGGKPQRRKNPQEGLYNELQKDKMAEAYSEIGMKGERRRGKGHDGLYQGLSTATKDTYDALHMQALPPR

SEQ ID NO: 30278 - protein, 339 aa, synthetic construct
EDLKNVFPPEVAVFEPSEAEISHTQKATLVCLATGFYPDHVELSWWVNGKEVHSGVSTDPQPLKEQPALNDSRYCLSSRLRVSATFWQNPRNHFRCQVQFYGLSENDEWTQDRAKPVTPIKTDVITMDPKDNCSKDANDTLLLQLTNTSAYYMYLLLLLKSVVYFAIITCCLLRRTAFCCNGEKSRSKRSRLLHSDYMNMTPRRPGPTRKHYQPYAPPRDFAAYRSRVKFSRSADAPAYQQGQNQLYNELNLGRREEYDVLDKRRGRDPEMGGKPQRRKNPQEGLYNELQKDKMAEAYSEIGMKGERRRGKGHDGLYQGLSTATKDTYDALHMQALPPR

SEQ ID NO: 30279 - protein, 331 aa, synthetic construct
EDLKNVFPPEVAVFEPSEAEISHTQKATLVCLATGFYPDHVELSWWVNGKEVHSGVSTDPQPLKEQPALNDSRYCLSSRLRVSATFWQNPRNHFRCQVQFYGLSENDEWTQDRAKPVTMDPKDNCSKDANDTLLLQLTNTSAYYMYLLLLLKSVVYFAIITCCLLRRTAFCCNGEKSRSKRSRLLHSDYMNMTPRRPGPTRKHYQPYAPPRDFAAYRSRVKFSRSADAPAYQQGQNQLYNELNLGRREEYDVLDKRRGRDPEMGGKPQRRKNPQEGLYNELQKDKMAEAYSEIGMKGERRRGKGHDGLYQGLSTATKDTYDALHMQALPPR

SEQ ID NO: 30280 - protein, 339 aa, synthetic construct; identical to SEQ ID NO: 30278

SEQ ID NO: 30281 - protein, 325 aa, synthetic construct
EDLKNVFPPEVAVFEPSEAEISHTQKATLVCLATGFYPDHVELSWWVNGKEVHSGVSTDPQPLKEQPALNDSRYCLSSRLRVSATFWQNPRNHFRCQVQFYGLSENDEWTQDRAKPVTCSKDANDTLLLQLTNTSAYYMYLLLLLKSVVYFAIITCCLLRRTAFCCNGEKSRSKRSRLLHSDYMNMTPRRPGPTRKHYQPYAPPRDFAAYRSRVKFSRSADAPAYQQGQNQLYNELNLGRREEYDVLDKRRGRDPEMGGKPQRRKNPQEGLYNELQKDKMAEAYSEIGMKGERRRGKGHDGLYQGLSTATKDTYDALHMQALPPR

SEQ ID NO: 30282 - protein, 340 aa, synthetic construct
EDLKNVFPPEVAVFEPSEAEISHTQKATLVCLATGFYPDHVELSWWVNGKEVHSGVSTDPQPLKEQPALNDSRYCLSSRLRVSATFWQNPRNHFRCQVQFYGLSENDEWTQDRAKPVTEVKTDSTDHVKPKETENTKQPSKSCHKPKAIVHTEKVNMMSLTVLGLRMLFAKTVAVNFLLTAKLFFLRSKRSRLLHSDYMNMTPRRPGPTRKHYQPYAPPRDFAAYRSRVKFSRSADAPAYQQGQNQLYNELNLGRREEYDVLDKRRGRDPEMGGKPQRRKNPQEGLYNELQKDKMAEAYSEIGMKGERRRGKGHDGLYQGLSTATKDTYDALHMQALPPR

SEQ ID NO: 30283 - protein, 333 aa, synthetic construct
EDLKNVFPPEVAVFEPSEAEISHTQKATLVCLATGFYPDHVELSWWVNGKEVHSGVSTDPQPLKEQPALNDSRYCLSSRLRVSATFWQNPRNHFRCQVQFYGLSENDEWTQDRAKPVTDHVKPKETENTKQPSKSCHKPKAIVHTEKVNMMSLTVLGLRMLFAKTVAVNFLLTAKLFFLRSKRSRLLHSDYMNMTPRRPGPTRKHYQPYAPPRDFAAYRSRVKFSRSADAPAYQQGQNQLYNELNLGRREEYDVLDKRRGRDPEMGGKPQRRKNPQEGLYNELQKDKMAEAYSEIGMKGERRRGKGHDGLYQGLSTATKDTYDALHMQALPPR

SEQ ID NO: 30284 - protein, 340 aa, synthetic construct; identical to SEQ ID NO: 30244

SEQ ID NO: 30285 - protein, 330 aa, synthetic construct; identical to SEQ ID NO: 30245

SEQ ID NO: 30286 - protein, 339 aa, synthetic construct; identical to SEQ ID NO: 30246

SEQ ID NO: 30287 - protein, 349 aa, synthetic construct; identical to SEQ ID NO: 30247

SEQ ID NO: 30288 - protein, 347 aa, synthetic construct; identical to SEQ ID NO: 30248

SEQ ID NO: 30289 - protein, 339 aa, synthetic construct; identical to SEQ ID NO: 30249

SEQ ID NO: 30290 - protein, 347 aa, synthetic construct; identical to SEQ ID NO: 30248

SEQ ID NO: 30291 - protein, 333 aa, synthetic construct; identical to SEQ ID NO: 30251

SEQ ID NO: 30292 - protein, 348 aa, synthetic construct; identical to SEQ ID NO: 30252

SEQ ID NO: 30293 - protein, 341 aa, synthetic construct; identical to SEQ ID NO: 30253

SEQ ID NO: 30294 - protein, 324 aa, synthetic construct
PEVAVFEPSEAEISHTQKATLVCLATGFYPDHVELSWWVNGKEVHSGVSTDPQPLKEQPALNDSRYCLSSRLRVSATFWQNPRNHFRCQVQFYGLSENDEWTQDRAKPVTIPEDTFFPSPESSCDVKLVEKSFETDTNLNFQNLSVIGFRILLLKVAGFNLLMTLRLWSSRSKRSRLLHSDYMNMTPRRPGPTRKHYQPYAPPRDFAAYRSRVKFSRSADAPAYQQGQNQLYNELNLGRREEYDVLDKRRGRDPEMGGKPQRRKNPQEGLYNELQKDKMAEAYSEIGMKGERRRGKGHDGLYQGLSTATKDTYDALHMQALPPR

SEQ ID NO: 30295 - protein, 314 aa, synthetic construct
PEVAVFEPSEAEISHTQKATLVCLATGFYPDHVELSWWVNGKEVHSGVSTDPQPLKEQPALNDSRYCLSSRLRVSATFWQNPRNHFRCQVQFYGLSENDEWTQDRAKPVTESSCDVKLVEKSFETDTNLNFQNLSVIGFRILLLKVAGFNLLMTLRLWSSRSKRSRLLHSDYMNMTPRRPGPTRKHYQPYAPPRDFAAYRSRVKFSRSADAPAYQQGQNQLYNELNLGRREEYDVLDKRRGRDPEMGGKPQRRKNPQEGLYNELQKDKMAEAYSEIGMKGERRRGKGHDGLYQGLSTATKDTYDALHMQALPPR

SEQ ID NO: 30296 - protein, 323 aa, synthetic construct
PEVAVFEPSEAEISHTQKATLVCLATGFYPDHVELSWWVNGKEVHSGVSTDPQPLKEQPALNDSRYCLSSRLRVSATFWQNPRNHFRCQVQFYGLSENDEWTQDRAKPVTPEDTFFPSPESSCDVKLVEKSFETDTNLNFQNLSVIGFRILLLKVAGFNLLMTLRLWSSRSKRSRLLHSDYMNMTPRRPGPTRKHYQPYAPPRDFAAYRSRVKFSRSADAPAYQQGQNQLYNELNLGRREEYDVLDKRRGRDPEMGGKPQRRKNPQEGLYNELQKDKMAEAYSEIGMKGERRRGKGHDGLYQGLSTATKDTYDALHMQALPPR

SEQ ID NO: 30297 - protein, 333 aa, synthetic construct
PEVAVFEPSEAEISHTQKATLVCLATGFYPDHVELSWWVNGKEVHSGVSTDPQPLKEQPALNDSRYCLSSRLRVSATFWQNPRNHFRCQVQFYGLSENDEWTQDRAKPVTFPPIKTDVITMDPKDNCSKDANDTLLLQLTNTSAYYMYLLLLLKSVVYFAIITCCLLRRTAFCCNGEKSRSKRSRLLHSDYMNMTPRRPGPTRKHYQPYAPPRDFAAYRSRVKFSRSADAPAYQQGQNQLYNELNLGRREEYDVLDKRRGRDPEMGGKPQRRKNPQEGLYNELQKDKMAEAYSEIGMKGERRRGKGHDGLYQGLSTATKDTYDALHMQALPPR

SEQ ID NO: 30298 - protein, 331 aa, synthetic construct
PEVAVFEPSEAEISHTQKATLVCLATGFYPDHVELSWWVNGKEVHSGVSTDPQPLKEQPALNDSRYCLSSRLRVSATFWQNPRNHFRCQVQFYGLSENDEWTQDRAKPVTPIKTDVITMDPKDNCSKDANDTLLLQLTNTSAYYMYLLLLLKSVVYFAIITCCLLRRTAFCCNGEKSRSKRSRLLHSDYMNMTPRRPGPTRKHYQPYAPPRDFAAYRSRVKFSRSADAPAYQQGQNQLYNELNLGRREEYDVLDKRRGRDPEMGGKPQRRKNPQEGLYNELQKDKMAEAYSEIGMKGERRRGKGHDGLYQGLSTATKDTYDALHMQALPPR

SEQ ID NO: 30299 - protein, 323 aa, synthetic construct
PEVAVFEPSEAEISHTQKATLVCLATGFYPDHVELSWWVNGKEVHSGVSTDPQPLKEQPALNDSRYCLSSRLRVSATFWQNPRNHFRCQVQFYGLSENDEWTQDRAKPVTMDPKDNCSKDANDTLLLQLTNTSAYYMYLLLLLKSVVYFAIITCCLLRRTAFCCNGEKSRSKRSRLLHSDYMNMTPRRPGPTRKHYQPYAPPRDFAAYRSRVKFSRSADAPAYQQGQNQLYNELNLGRREEYDVLDKRRGRDPEMGGKPQRRKNPQEGLYNELQKDKMAEAYSEIGMKGERRRGKGHDGLYQGLSTATKDTYDALHMQALPPR

SEQ ID NO: 30300 - protein, 331 aa, synthetic construct; identical to SEQ ID NO: 30298

SEQ ID NO: 30301 - protein, 317 aa, synthetic construct
PEVAVFEPSEAEISHTQKATLVCLATGFYPDHVELSWWVNGKEVHSGVSTDPQPLKEQPALNDSRYCLSSRLRVSATFWQNPRNHFRCQVQFYGLSENDEWTQDRAKPVTCSKDANDTLLLQLTNTSAYYMYLLLLLKSVVYFAIITCCLLRRTAFCCNGEKSRSKRSRLLHSDYMNMTPRRPGPTRKHYQPYAPPRDFAAYRSRVKFSRSADAPAYQQGQNQLYNELNLGRREEYDVLDKRRGRDPEMGGKPQRRKNPQEGLYNELQKDKMAEAYSEIGMKGERRRGKGHDGLYQGLSTATKDTYDALHMQALPPR

SEQ ID NO: 30302 - protein, 332 aa, synthetic construct
PEVAVFEPSEAEISHTQKATLVCLATGFYPDHVELSWWVNGKEVHSGVSTDPQPLKEQPALNDSRYCLSSRLRVSATFWQNPRNHFRCQVQFYGLSENDEWTQDRAKPVTEVKTDSTDHVKPKETENTKQPSKSCHKPKAIVHTEKVNMMSLTVLGLRMLFAKTVAVNFLLTAKLFFLRSKRSRLLHSDYMNMTPRRPGPTRKHYQPYAPPRDFAAYRSRVKFSRSADAPAYQQGQNQLYNELNLGRREEYDVLDKRRGRDPEMGGKPQRRKNPQEGLYNELQKDKMAEAYSEIGMKGERRRGKGHDGLYQGLSTATKDTYDALHMQALPPR

SEQ ID NO: 30303 - protein, 325 aa, synthetic construct
PEVAVFEPSEAEISHTQKATLVCLATGFYPDHVELSWWVNGKEVHSGVSTDPQPLKEQPALNDSRYCLSSRLRVSATFWQNPRNHFRCQVQFYGLSENDEWTQDRAKPVTDHVKPKETENTKQPSKSCHKPKAIVHTEKVNMMSLTVLGLRMLFAKTVAVNFLLTAKLFFLRSKRSRLLHSDYMNMTPRRPGPTRKHYQPYAPPRDFAAYRSRVKFSRSADAPAYQQGQNQLYNELNLGRREEYDVLDKRRGRDPEMGGKPQRRKNPQEGLYNELQKDKMAEAYSEIGMKGERRRGKGHDGLYQGLSTATKDTYDALHMQALPPR

SEQ ID NO: 30304 - protein, 318 aa, synthetic construct
DKQLDADVSPKPTIFLPSIAETKLQKAGTYLCLLEKFFPDVIKIHWQEKKSNTILGSQEGNTMKTNDTYMKFSWLTVPEKSLDKEHRCIVRHENNKNGVDQEIIIPEDTFFPSPESSCDVKLVEKSFETDTNLNFQNLSVIGFRILLLKVAGFNLLMTLRLWSSRSKRSRLLHSDYMNMTPRRPGPTRKHYQPYAPPRDFAAYRSRVKFSRSADAPAYQQGQNQLYNELNLGRREEYDVLDKRRGRDPEMGGKPQRRKNPQEGLYNELQKDKMAEAYSEIGMKGERRRGKGHDGLYQGLSTATKDTYDALHMQALPPR

SEQ ID NO: 30305 - protein, 308 aa, synthetic construct
DKQLDADVSPKPTIFLPSIAETKLQKAGTYLCLLEKFFPDVIKIHWQEKKSNTILGSQEGNTMKTNDTYMKFSWLTVPEKSLDKEHRCIVRHENNKNGVDQEIIESSCDVKLVEKSFETDTNLNFQNLSVIGFRILLLKVAGFNLLMTLRLWSSRSKRSRLLHSDYMNMTPRRPGPTRKHYQPYAPPRDFAAYRSRVKFSRSADAPAYQQGQNQLYNELNLGRREEYDVLDKRRGRDPEMGGKPQRRKNPQEGLYNELQKDKMAEAYSEIGMKGERRRGKGHDGLYQGLSTATKDTYDALHMQALPPR

SEQ ID NO: 30306 - protein, 317 aa, synthetic construct
DKQLDADVSPKPTIFLPSIAETKLQKAGTYLCLLEKFFPDVIKIHWQEKKSNTILGSQEGNTMKTNDTYMKFSWLTVPEKSLDKEHRCIVRHENNKNGVDQEIIPEDTFFPSPESSCDVKLVEKSFETDTNLNFQNLSVIGFRILLLKVAGFNLLMTLRLWSSRSKRSRLLHSDYMNMTPRRPGPTRKHYQPYAPPRDFAAYRSRVKFSRSADAPAYQQGQNQLYNELNLGRREEYDVLDKRRGRDPEMGGKPQRRKNPQEGLYNELQKDKMAEAYSEIGMKGERRRGKGHDGLYQGLSTATKDTYDALHMQALPPR

SEQ ID NO: 30307 - protein, 311 aa, synthetic construct
DKQLDADVSPKPTIFLPSIAETKLQKAGTYLCLLEKFFPDVIKIHWQEKKSNTILGSQEGNTMKTNDTYMKFSWLTVPEKSLDKEHRCIVRHENNKNGVDQEIIGRADCGFTSESYQQGVLSATILYEILLGKATLYAVLVSALVLMAMVKRKDSRGRSKRSRLLHSDYMNMTPRRPGPTRKHYQPYAPPRDFAAYRSRVKFSRSADAPAYQQGQNQLYNELNLGRREEYDVLDKRRGRDPEMGGKPQRRKNPQEGLYNELQKDKMAEAYSEIGMKGERRRGKGHDGLYQGLSTATKDTYDALHMQALPPR

SEQ ID NO: 30308 - protein, 309 aa, synthetic construct
DKQLDADVSPKPTIFLPSIAETKLQKAGTYLCLLEKFFPDVIKIHWQEKKSNTILGSQEGNTMKTNDTYMKFSWLTVPEKSLDKEHRCIVRHENNKNGVDQEIIADCGFTSESYQQGVLSATILYEILLGKATLYAVLVSALVLMAMVKRKDSRGRSKRSRLLHSDYMNMTPRRPGPTRKHYQPYAPPRDFAAYRSRVKFSRSADAPAYQQGQNQLYNELNLGRREEYDVLDKRRGRDPEMGGKPQRRKNPQEGLYNELQKDKMAEAYSEIGMKGERRRGKGHDGLYQGLSTATKDTYDALHMQALPPR

SEQ ID NO: 30309 - protein, 319 aa, synthetic construct
DKQLDADVSPKPTIFLPSIAETKLQKAGTYLCLLEKFFPDVIKIHWQEKKSNTILGSQEGNTMKTNDTYMKFSWLTVPEKSLDKEHRCIVRHENNKNGVDQEIIQIVSAEAWGRADCGFTSESYQQGVLSATILYEILLGKATLYAVLVSALVLMAMVKRKDSRGRSKRSRLLHSDYMNMTPRRPGPTRKHYQPYAPPRDFAAYRSRVKFSRSADAPAYQQGQNQLYNELNLGRREEYDVLDKRRGRDPEMGGKPQRRKNPQEGLYNELQKDKMAEAYSEIGMKGERRRGKGHDGLYQGLSTATKDTYDALHMQALPPR

SEQ ID NO: 30310 - protein, 326 aa, synthetic construct
DKQLDADVSPKPTIFLPSIAETKLQKAGTYLCLLEKFFPDVIKIHWQEKKSNTILGSQEGNTMKTNDTYMKFSWLTVPEKSLDKEHRCIVRHENNKNGVDQEIIEVKTDSTDHVKPKETENTKQPSKSCHKPKAIVHTEKVNMMSLTVLGLRMLFAKTVAVNFLLTAKLFFLRSKRSRLLHSDYMNMTPRRPGPTRKHYQPYAPPRDFAAYRSRVKFSRSADAPAYQQGQNQLYNELNLGRREEYDVLDKRRGRDPEMGGKPQRRKNPQEGLYNELQKDKMAEAYSEIGMKGERRRGKGHDGLYQGLSTATKDTYDALHMQALPPR

SEQ ID NO: 30311 - protein, 319 aa, synthetic construct
DKQLDADVSPKPTIFLPSIAETKLQKAGTYLCLLEKFFPDVIKIHWQEKKSNTILGSQEGNTMKTNDTYMKFSWLTVPEKSLDKEHRCIVRHENNKNGVDQEIIDHVKPKETENTKQPSKSCHKPKAIVHTEKVNMMSLTVLGLRMLFAKTVAVNFLLTAKLFFLRSKRSRLLHSDYMNMTPRRPGPTRKHYQPYAPPRDFAAYRSRVKFSRSADAPAYQQGQNQLYNELNLGRREEYDVLDKRRGRDPEMGGKPQRRKNPQEGLYNELQKDKMAEAYSEIGMKGERRRGKGHDGLYQGLSTATKDTYDALHMQALPPR

SEQ ID NO: 30312 - protein, 320 aa, synthetic construct
DKQLDADVSPKPTIFLPSIAETKLQKAGTYLCLLEKFFPDVIKIHWQEKKSNTILGSQEGNTMKTNDTYMKFSWLTVPEKSLDKEHRCIVRHENNKNGVDQEIIFPIPEDTFFPSPESSCDVKLVEKSFETDTNLNFQNLSVIGFRILLLKVAGFNLLMTLRLWSSRSKRSRLLHSDYMNMTPRRPGPTRKHYQPYAPPRDFAAYRSRVKFSRSADAPAYQQGQNQLYNELNLGRREEYDVLDKRRGRDPEMGGKPQRRKNPQEGLYNELQKDKMAEAYSEIGMKGERRRGKGHDGLYQGLSTATKDTYDALHMQALPPR

SEQ ID NO: 30313 - protein, 310 aa, synthetic construct
DKQLDADVSPKPTIFLPSIAETKLQKAGTYLCLLEKFFPDVIKIHWQEKKSNTILGSQEGNTMKTNDTYMKFSWLTVPEKSLDKEHRCIVRHENNKNGVDQEIIFPESSCDVKLVEKSFETDTNLNFQNLSVIGFRILLLKVAGFNLLMTLRLWSSRSKRSRLLHSDYMNMTPRRPGPTRKHYQPYAPPRDFAAYRSRVKFSRSADAPAYQQGQNQLYNELNLGRREEYDVLDKRRGRDPEMGGKPQRRKNPQEGLYNELQKDKMAEAYSEIGMKGERRRGKGHDGLYQGLSTATKDTYDALHMQALPPR

SEQ ID NO: 30314 - protein, 319 aa, synthetic construct
DKQLDADVSPKPTIFLPSIAETKLQKAGTYLCLLEKFFPDVIKIHWQEKKSNTILGSQEGNTMKTNDTYMKFSWLTVPEKSLDKEHRCIVRHENNKNGVDQEIIFPPEDTFFPSPESSCDVKLVEKSFETDTNLNFQNLSVIGFRILLLKVAGFNLLMTLRLWSSRSKRSRLLHSDYMNMTPRRPGPTRKHYQPYAPPRDFAAYRSRVKFSRSADAPAYQQGQNQLYNELNLGRREEYDVLDKRRGRDPEMGGKPQRRKNPQEGLYNELQKDKMAEAYSEIGMKGERRRGKGHDGLYQGLSTATKDTYDALHMQALPPR

SEQ ID NO: 30315 - protein, 313 aa, synthetic construct
DKQLDADVSPKPTIFLPSIAETKLQKAGTYLCLLEKFFPDVIKIHWQEKKSNTILGSQEGNTMKTNDTYMKFSWLTVPEKSLDKEHRCIVRHENNKNGVDQEIIFPGRADCGFTSESYQQGVLSATILYEILLGKATLYAVLVSALVLMAMVKRKDSRGRSKRSRLLHSDYMNMTPRRPGPTRKHYQPYAPPRDFAAYRSRVKFSRSADAPAYQQGQNQLYNELNLGRREEYDVLDKRRGRDPEMGGKPQRRKNPQEGLYNELQKDKMAEAYSEIGMKGERRRGKGHDGLYQGLSTATKDTYDALHMQALPPR

SEQ ID NO: 30316 - protein, 311 aa, synthetic construct
DKQLDADVSPKPTIFLPSIAETKLQKAGTYLCLLEKFFPDVIKIHWQEKKSNTILGSQEGNTMKTNDTYMKFSWLTVPEKSLDKEHRCIVRHENNKNGVDQEIIFPADCGFTSESYQQGVLSATILYEILLGKATLYAVLVSALVLMAMVKRKDSRGRSKRSRLLHSDYMNMTPRRPGPTRKHYQPYAPPRDFAAYRSRVKFSRSADAPAYQQGQNQLYNELNLGRREEYDVLDKRRGRDPEMGGKPQRRKNPQEGLYNELQKDKMAEAYSEIGMKGERRRGKGHDGLYQGLSTATKDTYDALHMQALPPR

SEQ ID NO: 30317 - protein, 321 aa, synthetic construct
DKQLDADVSPKPTIFLPSIAETKLQKAGTYLCLLEKFFPDVIKIHWQEKKSNTILGSQEGNTMKTNDTYMKFSWLTVPEKSLDKEHRCIVRHENNKNGVDQEIIFPQIVSAEAWGRADCGFTSESYQQGVLSATILYEILLGKATLYAVLVSALVLMAMVKRKDSRGRSKRSRLLHSDYMNMTPRRPGPTRKHYQPYAPPRDFAAYRSRVKFSRSADAPAYQQGQNQLYNELNLGRREEYDVLDKRRGRDPEMGGKPQRRKNPQEGLYNELQKDKMAEAYSEIGMKGERRRGKGHDGLYQGLSTATKDTYDALHMQALPPR

SEQ ID NO: 30318 - protein, 328 aa, synthetic construct
DKQLDADVSPKPTIFLPSIAETKLQKAGTYLCLLEKFFPDVIKIHWQEKKSNTILGSQEGNTMKTNDTYMKFSWLTVPEKSLDKEHRCIVRHENNKNGVDQEIIFPEVKTDSTDHVKPKETENTKQPSKSCHKPKAIVHTEKVNMMSLTVLGLRMLFAKTVAVNFLLTAKLFFLRSKRSRLLHSDYMNMTPRRPGPTRKHYQPYAPPRDFAAYRSRVKFSRSADAPAYQQGQNQLYNELNLGRREEYDVLDKRRGRDPEMGGKPQRRKNPQEGLYNELQKDKMAEAYSEIGMKGERRRGKGHDGLYQGLSTATKDTYDALHMQALPPR

SEQ ID NO: 30319 - protein, 321 aa, synthetic construct
DKQLDADVSPKPTIFLPSIAETKLQKAGTYLCLLEKFFPDVIKIHWQEKKSNTILGSQEGNTMKTNDTYMKFSWLTVPEKSLDKEHRCIVRHENNKNGVDQEIIFPDHVKPKETENTKQPSKSCHKPKAIVHTEKVNMMSLTVLGLRMLFAKTVAVNFLLTAKLFFLRSKRSRLLHSDYMNMTPRRPGPTRKHYQPYAPPRDFAAYRSRVKFSRSADAPAYQQGQNQLYNELNLGRREEYDVLDKRRGRDPEMGGKPQRRKNPQEGLYNELQKDKMAEAYSEIGMKGERRRGKGHDGLYQGLSTATKDTYDALHMQALPPR

SEQ ID NO: 30320 - protein, 328 aa, synthetic construct
DKQLDADVSPKPTIFLPSIAETKLQKAGTYLCLLEKFFPDVIKIHWQEKKSNTILGSQEGNTMKTNDTYMKFSWLTVPEKSLDKEHRCIVRHENNKNGVDQEIIFPPIKTDVITIPEDTFFPSPESSCDVKLVEKSFETDTNLNFQNLSVIGFRILLLKVAGFNLLMTLRLWSSRSKRSRLLHSDYMNMTPRRPGPTRKHYQPYAPPRDFAAYRSRVKFSRSADAPAYQQGQNQLYNELNLGRREEYDVLDKRRGRDPEMGGKPQRRKNPQEGLYNELQKDKMAEAYSEIGMKGERRRGKGHDGLYQGLSTATKDTYDALHMQALPPR

SEQ ID NO: 30321 - protein, 318 aa, synthetic construct
DKQLDADVSPKPTIFLPSIAETKLQKAGTYLCLLEKFFPDVIKIHWQEKKSNTILGSQEGNTMKTNDTYMKFSWLTVPEKSLDKEHRCIVRHENNKNGVDQEIIFPPIKTDVITESSCDVKLVEKSFETDTNLNFQNLSVIGFRILLLKVAGFNLLMTLRLWSSRSKRSRLLHSDYMNMTPRRPGPTRKHYQPYAPPRDFAAYRSRVKFSRSADAPAYQQGQNQLYNELNLGRREEYDVLDKRRGRDPEMGGKPQRRKNPQEGLYNELQKDKMAEAYSEIGMKGERRRGKGHDGLYQGLSTATKDTYDALHMQALPPR

SEQ ID NO: 30322 - protein, 327 aa, synthetic construct
DKQLDADVSPKPTIFLPSIAETKLQKAGTYLCLLEKFFPDVIKIHWQEKKSNTILGSQEGNTMKTNDTYMKFSWLTVPEKSLDKEHRCIVRHENNKNGVDQEIIFPPIKTDVITPEDTFFPSPESSCDVKLVEKSFETDTNLNFQNLSVIGFRILLLKVAGFNLLMTLRLWSSRSKRSRLLHSDYMNMTPRRPGPTRKHYQPYAPPRDFAAYRSRVKFSRSADAPAYQQGQNQLYNELNLGRREEYDVLDKRRGRDPEMGGKPQRRKNPQEGLYNELQKDKMAEAYSEIGMKGERRRGKGHDGLYQGLSTATKDTYDALHMQALPPR

SEQ ID NO: 30323 - protein, 321 aa, synthetic construct
DKQLDADVSPKPTIFLPSIAETKLQKAGTYLCLLEKFFPDVIKIHWQEKKSNTILGSQEGNTMKTNDTYMKFSWLTVPEKSLDKEHRCIVRHENNKNGVDQEIIFPPIKTDVITGRADCGFTSESYQQGVLSATILYEILLGKATLYAVLVSALVLMAMVKRKDSRGRSKRSRLLHSDYMNMTPRRPGPTRKHYQPYAPPRDFAAYRSRVKFSRSADAPAYQQGQNQLYNELNLGRREEYDVLDKRRGRDPEMGGKPQRRKNPQEGLYNELQKDKMAEAYSEIGMKGERRRGKGHDGLYQGLSTATKDTYDALHMQALPPR

SEQ ID NO: 30324 - protein, 319 aa, synthetic construct
DKQLDADVSPKPTIFLPSIAETKLQKAGTYLCLLEKFFPDVIKIHWQEKKSNTILGSQEGNTMKTNDTYMKFSWLTVPEKSLDKEHRCIVRHENNKNGVDQEIIFPPIKTDVITADCGFTSESYQQGVLSATILYEILLGKATLYAVLVSALVLMAMVKRKDSRGRSKRSRLLHSDYMNMTPRRPGPTRKHYQPYAPPRDFAAYRSRVKFSRSADAPAYQQGQNQLYNELNLGRREEYDVLDKRRGRDPEMGGKPQRRKNPQEGLYNELQKDKMAEAYSEIGMKGERRRGKGHDGLYQGLSTATKDTYDALHMQALPPR

SEQ ID NO: 30325 - protein, 329 aa, synthetic construct
DKQLDADVSPKPTIFLPSIAETKLQKAGTYLCLLEKFFPDVIKIHWQEKKSNTILGSQEGNTMKTNDTYMKFSWLTVPEKSLDKEHRCIVRHENNKNGVDQEIIFPPIKTDVITQIVSAEAWGRADCGFTSESYQQGVLSATILYEILLGKATLYAVLVSALVLMAMVKRKDSRGRSKRSRLLHSDYMNMTPRRPGPTRKHYQPYAPPRDFAAYRSRVKFSRSADAPAYQQGQNQLYNELNLGRREEYDVLDKRRGRDPEMGGKPQRRKNPQEGLYNELQKDKMAEAYSEIGMKGERRRGKGHDGLYQGLSTATKDTYDALHMQALPPR

SEQ ID NO: 30326 - protein, 336 aa, synthetic construct
DKQLDADVSPKPTIFLPSIAETKLQKAGTYLCLLEKFFPDVIKIHWQEKKSNTILGSQEGNTMKTNDTYMKFSWLTVPEKSLDKEHRCIVRHENNKNGVDQEIIFPPIKTDVITEVKTDSTDHVKPKETENTKQPSKSCHKPKAIVHTEKVNMMSLTVLGLRMLFAKTVAVNFLLTAKLFFLRSKRSRLLHSDYMNMTPRRPGPTRKHYQPYAPPRDFAAYRSRVKFSRSADAPAYQQGQNQLYNELNLGRREEYDVLDKRRGRDPEMGGKPQRRKNPQEGLYNELQKDKMAEAYSEIGMKGERRRGKGHDGLYQGLSTATKDTYDALHMQALPPR

SEQ ID NO: 30327 - protein, 329 aa, synthetic construct
DKQLDADVSPKPTIFLPSIAETKLQKAGTYLCLLEKFFPDVIKIHWQEKKSNTILGSQEGNTMKTNDTYMKFSWLTVPEKSLDKEHRCIVRHENNKNGVDQEIIFPPIKTDVITDHVKPKETENTKQPSKSCHKPKAIVHTEKVNMMSLTVLGLRMLFAKTVAVNFLLTAKLFFLRSKRSRLLHSDYMNMTPRRPGPTRKHYQPYAPPRDFAAYRSRVKFSRSADAPAYQQGQNQLYNELNLGRREEYDVLDKRRGRDPEMGGKPQRRKNPQEGLYNELQKDKMAEAYSEIGMKGERRRGKGHDGLYQGLSTATKDTYDALHMQALPPR

SEQ ID NO: 30328 - protein, 281 aa, synthetic construct
PIKTDVITMDPKDNCSKDANDTLLLQLTNTSAYYMYLLLLLKSVVYFAIITCCLLRRTAFCCNGEKSIPEDTFFPSPESSCDVKLVEKSFETDTNLNFQNLSVIGFRILLLKVAGFNLLMTLRLWSSRSKRSRLLHSDYMNMTPRRPGPTRKHYQPYAPPRDFAAYRSRVKFSRSADAPAYQQGQNQLYNELNLGRREEYDVLDKRRGRDPEMGGKPQRRKNPQEGLYNELQKDKMAEAYSEIGMKGERRRGKGHDGLYQGLSTATKDTYDALHMQALPPR

SEQ ID NO: 30329 - protein, 271 aa, synthetic construct
PIKTDVITMDPKDNCSKDANDTLLLQLTNTSAYYMYLLLLLKSVVYFAIITCCLLRRTAFCCNGEKSESSCDVKLVEKSFETDTNLNFQNLSVIGFRILLLKVAGFNLLMTLRLWSSRSKRSRLLHSDYMNMTPRRPGPTRKHYQPYAPPRDFAAYRSRVKFSRSADAPAYQQGQNQLYNELNLGRREEYDVLDKRRGRDPEMGGKPQRRKNPQEGLYNELQKDKMAEAYSEIGMKGERRRGKGHDGLYQGLSTATKDTYDALHMQALPPR

SEQ ID NO: 30330 - protein, 280 aa, synthetic construct
PIKTDVITMDPKDNCSKDANDTLLLQLTNTSAYYMYLLLLLKSVVYFAIITCCLLRRTAFCCNGEKSPEDTFFPSPESSCDVKLVEKSFETDTNLNFQNLSVIGFRILLLKVAGFNLLMTLRLWSSRSKRSRLLHSDYMNMTPRRPGPTRKHYQPYAPPRDFAAYRSRVKFSRSADAPAYQQGQNQLYNELNLGRREEYDVLDKRRGRDPEMGGKPQRRKNPQEGLYNELQKDKMAEAYSEIGMKGERRRGKGHDGLYQGLSTATKDTYDALHMQALPPR

SEQ ID NO: 30331 - protein, 274 aa, synthetic construct
PIKTDVITMDPKDNCSKDANDTLLLQLTNTSAYYMYLLLLLKSVVYFAIITCCLLRRTAFCCNGEKSGRADCGFTSESYQQGVLSATILYEILLGKATLYAVLVSALVLMAMVKRKDSRGRSKRSRLLHSDYMNMTPRRPGPTRKHYQPYAPPRDFAAYRSRVKFSRSADAPAYQQGQNQLYNELNLGRREEYDVLDKRRGRDPEMGGKPQRRKNPQEGLYNELQKDKMAEAYSEIGMKGERRRGKGHDGLYQGLSTATKDTYDALHMQALPPR

SEQ ID NO: 30332 - protein, 272 aa, synthetic construct
PIKTDVITMDPKDNCSKDANDTLLLQLTNTSAYYMYLLLLLKSVVYFAIITCCLLRRTAFCCNGEKSADCGFTSESYQQGVLSATILYEILLGKATLYAVLVSALVLMAMVKRKDSRGRSKRSRLLHSDYMNMTPRRPGPTRKHYQPYAPPRDFAAYRSRVKFSRSADAPAYQQGQNQLYNELNLGRREEYDVLDKRRGRDPEMGGKPQRRKNPQEGLYNELQKDKMAEAYSEIGMKGERRRGKGHDGLYQGLSTATKDTYDALHMQALPPR

SEQ ID NO: 30333 - protein, 282 aa, synthetic construct
PIKTDVITMDPKDNCSKDANDTLLLQLTNTSAYYMYLLLLLKSVVYFAIITCCLLRRTAFCCNGEKSQIVSAEAWGRADCGFTSESYQQGVLSATILYEILLGKATLYAVLVSALVLMAMVKRKDSRGRSKRSRLLHSDYMNMTPRRPGPTRKHYQPYAPPRDFAAYRSRVKFSRSADAPAYQQGQNQLYNELNLGRREEYDVLDKRRGRDPEMGGKPQRRKNPQEGLYNELQKDKMAEAYSEIGMKGERRRGKGHDGLYQGLSTATKDTYDALHMQALPPR

SEQ ID NO: 30334 - protein, 289 aa, synthetic construct
PIKTDVITMDPKDNCSKDANDTLLLQLTNTSAYYMYLLLLLKSVVYFAIITCCLLRRTAFCCNGEKSEVKTDSTDHVKPKETENTKQPSKSCHKPKAIVHTEKVNMMSLTVLGLRMLFAKTVAVNFLLTAKLFFLRSKRSRLLHSDYMNMTPRRPGPTRKHYQPYAPPRDFAAYRSRVKFSRSADAPAYQQGQNQLYNELNLGRREEYDVLDKRRGRDPEMGGKPQRRKNPQEGLYNELQKDKMAEAYSEIGMKGERRRGKGHDGLYQGLSTATKDTYDALHMQALPPR

SEQ ID NO: 30335 - protein, 282 aa, synthetic construct
PIKTDVITMDPKDNCSKDANDTLLLQLTNTSAYYMYLLLLLKSVVYFAIITCCLLRRTAFCCNGEKSDHVKPKETENTKQPSKSCHKPKAIVHTEKVNMMSLTVLGLRMLFAKTVAVNFLLTAKLFFLRSKRSRLLHSDYMNMTPRRPGPTRKHYQPYAPPRDFAAYRSRVKFSRSADAPAYQQGQNQLYNELNLGRREEYDVLDKRRGRDPEMGGKPQRRKNPQEGLYNELQKDKMAEAYSEIGMKGERRRGKGHDGLYQGLSTATKDTYDALHMQALPPR

SEQ ID NO: 30336 - protein, 333 aa, synthetic construct
DKQLDADVSPKPTIFLPSIAETKLQKAGTYLCLLEKFFPDVIKIHWQEKKSNTILGSQEGNTMKTNDTYMKFSWLTVPEKSLDKEHRCIVRHENNKNGVDQEIIFPPIKTDVITMDPKDIPEDTFFPSPESSCDVKLVEKSFETDTNLNFQNLSVIGFRILLLKVAGFNLLMTLRLWSSRSKRSRLLHSDYMNMTPRRPGPTRKHYQPYAPPRDFAAYRSRVKFSRSADAPAYQQGQNQLYNELNLGRREEYDVLDKRRGRDPEMGGKPQRRKNPQEGLYNELQKDKMAEAYSEIGMKGERRRGKGHDGLYQGLSTATKDTYDALHMQALPPR

SEQ ID NO: 30337 - protein, 323 aa, synthetic construct
DKQLDADVSPKPTIFLPSIAETKLQKAGTYLCLLEKFFPDVIKIHWQEKKSNTILGSQEGNTMKTNDTYMKFSWLTVPEKSLDKEHRCIVRHENNKNGVDQEIIFPPIKTDVITMDPKDESSCDVKLVEKSFETDTNLNFQNLSVIGFRILLLKVAGFNLLMTLRLWSSRSKRSRLLHSDYMNMTPRRPGPTRKHYQPYAPPRDFAAYRSRVKFSRSADAPAYQQGQNQLYNELNLGRREEYDVLDKRRGRDPEMGGKPQRRKNPQEGLYNELQKDKMAEAYSEIGMKGERRRGKGHDGLYQGLSTATKDTYDALHMQALPPR

SEQ ID NO: 30338 - protein, 332 aa, synthetic construct
DKQLDADVSPKPTIFLPSIAETKLQKAGTYLCLLEKFFPDVIKIHWQEKKSNTILGSQEGNTMKTNDTYMKFSWLTVPEKSLDKEHRCIVRHENNKNGVDQEIIFPPIKTDVITMDPKDPEDTFFPSPESSCDVKLVEKSFETDTNLNFQNLSVIGFRILLLKVAGFNLLMTLRLWSSRSKRSRLLHSDYMNMTPRRPGPTRKHYQPYAPPRDFAAYRSRVKFSRSADAPAYQQGQNQLYNELNLGRREEYDVLDKRRGRDPEMGGKPQRRKNPQEGLYNELQKDKMAEAYSEIGMKGERRRGKGHDGLYQGLSTATKDTYDALHMQALPPR

SEQ ID NO: 30339 - protein, 326 aa, synthetic construct
DKQLDADVSPKPTIFLPSIAETKLQKAGTYLCLLEKFFPDVIKIHWQEKKSNTILGSQEGNTMKTNDTYMKFSWLTVPEKSLDKEHRCIVRHENNKNGVDQEIIFPPIKTDVITMDPKDGRADCGFTSESYQQGVLSATILYEILLGKATLYAVLVSALVLMAMVKRKDSRGRSKRSRLLHSDYMNMTPRRPGPTRKHYQPYAPPRDFAAYRSRVKFSRSADAPAYQQGQNQLYNELNLGRREEYDVLDKRRGRDPEMGGKPQRRKNPQEGLYNELQKDKMAEAYSEIGMKGERRRGKGHDGLYQGLSTATKDTYDALHMQALPPR

SEQ ID NO: 30340 - protein, 324 aa, synthetic construct
DKQLDADVSPKPTIFLPSIAETKLQKAGTYLCLLEKFFPDVIKIHWQEKKSNTILGSQEGNTMKTNDTYMKFSWLTVPEKSLDKEHRCIVRHENNKNGVDQEIIFPPIKTDVITMDPKDADCGFTSESYQQGVLSATILYEILLGKATLYAVLVSALVLMAMVKRKDSRGRSKRSRLLHSDYMNMTPRRPGPTRKHYQPYAPPRDFAAYRSRVKFSRSADAPAYQQGQNQLYNELNLGRREEYDVLDKRRGRDPEMGGKPQRRKNPQEGLYNELQKDKMAEAYSEIGMKGERRRGKGHDGLYQGLSTATKDTYDALHMQALPPR

SEQ ID NO: 30341 - protein, 334 aa, synthetic construct
DKQLDADVSPKPTIFLPSIAETKLQKAGTYLCLLEKFFPDVIKIHWQEKKSNTILGSQEGNTMKTNDTYMKFSWLTVPEKSLDKEHRCIVRHENNKNGVDQEIIFPPIKTDVITMDPKDQIVSAEAWGRADCGFTSESYQQGVLSATILYEILLGKATLYAVLVSALVLMAMVKRKDSRGRSKRSRLLHSDYMNMTPRRPGPTRKHYQPYAPPRDFAAYRSRVKFSRSADAPAYQQGQNQLYNELNLGRREEYDVLDKRRGRDPEMGGKPQRRKNPQEGLYNELQKDKMAEAYSEIGMKGERRRGKGHDGLYQGLSTATKDTYDALHMQALPPR

SEQ ID NO: 30342 - protein, 341 aa, synthetic construct
DKQLDADVSPKPTIFLPSIAETKLQKAGTYLCLLEKFFPDVIKIHWQEKKSNTILGSQEGNTMKTNDTYMKFSWLTVPEKSLDKEHRCIVRHENNKNGVDQEIIFPPIKTDVITMDPKDEVKTDSTDHVKPKETENTKQPSKSCHKPKAIVHTEKVNMMSLTVLGLRMLFAKTVAVNFLLTAKLFFLRSKRSRLLHSDYMNMTPRRPGPTRKHYQPYAPPRDFAAYRSRVKFSRSADAPAYQQGQNQLYNELNLGRREEYDVLDKRRGRDPEMGGKPQRRKNPQEGLYNELQKDKMAEAYSEIGMKGERRRGKGHDGLYQGLSTATKDTYDALHMQALPPR

SEQ ID NO: 30343 - protein, 334 aa, synthetic construct
DKQLDADVSPKPTIFLPSIAETKLQKAGTYLCLLEKFFPDVIKIHWQEKKSNTILGSQEGNTMKTNDTYMKFSWLTVPEKSLDKEHRCIVRHENNKNGVDQEIIFPPIKTDVITMDPKDDHVKPKETENTKQPSKSCHKPKAIVHTEKVNMMSLTVLGLRMLFAKTVAVNFLLTAKLFFLRSKRSRLLHSDYMNMTPRRPGPTRKHYQPYAPPRDFAAYRSRVKFSRSADAPAYQQGQNQLYNELNLGRREEYDVLDKRRGRDPEMGGKPQRRKNPQEGLYNELQKDKMAEAYSEIGMKGERRRGKGHDGLYQGLSTATKDTYDALHMQALPPR

SEQ ID NO: 30344 - protein, 328 aa, synthetic construct; identical to SEQ ID NO: 30320

SEQ ID NO: 30345 - protein, 318 aa, synthetic construct; identical to SEQ ID NO: 30321

SEQ ID NO: 30346 - protein, 327 aa, synthetic construct; identical to SEQ ID NO: 30322

SEQ ID NO: 30347 - protein, 321 aa, synthetic construct; identical to SEQ ID NO: 30323

SEQ ID NO: 30348 - protein, 319 aa, synthetic construct; identical to SEQ ID NO: 30324

SEQ ID NO: 30349 - protein, 329 aa, synthetic construct; identical to SEQ ID NO: 30325

SEQ ID NO: 30350 - protein, 336 aa, synthetic construct; identical to SEQ ID NO: 30326

SEQ ID NO: 30351 - protein, 329 aa, synthetic construct; identical to SEQ ID NO: 30327

SEQ ID NO: 30352 - protein, 309 aa, synthetic construct
PKPTIFLPSIAETKLQKAGTYLCLLEKFFPDVIKIHWQEKKSNTILGSQEGNTMKTNDTYMKFSWLTVPEKSLDKEHRCIVRHENNKNGVDQEIIIPEDTFFPSPESSCDVKLVEKSFETDTNLNFQNLSVIGFRILLLKVAGFNLLMTLRLWSSRSKRSRLLHSDYMNMTPRRPGPTRKHYQPYAPPRDFAAYRSRVKFSRSADAPAYQQGQNQLYNELNLGRREEYDVLDKRRGRDPEMGGKPQRRKNPQEGLYNELQKDKMAEAYSEIGMKGERRRGKGHDGLYQGLSTATKDTYDALHMQALPPR

SEQ ID NO: 30353 - protein, 299 aa, synthetic construct
PKPTIFLPSIAETKLQKAGTYLCLLEKFFPDVIKIHWQEKKSNTILGSQEGNTMKTNDTYMKFSWLTVPEKSLDKEHRCIVRHENNKNGVDQEIIESSCDVKLVEKSFETDTNLNFQNLSVIGFRILLLKVAGFNLLMTLRLWSSRSKRSRLLHSDYMNMTPRRPGPTRKHYQPYAPPRDFAAYRSRVKFSRSADAPAYQQGQNQLYNELNLGRREEYDVLDKRRGRDPEMGGKPQRRKNPQEGLYNELQKDKMAEAYSEIGMKGERRRGKGHDGLYQGLSTATKDTYDALHMQALPPR

SEQ ID NO: 30354 - protein, 308 aa, synthetic construct
PKPTIFLPSIAETKLQKAGTYLCLLEKFFPDVIKIHWQEKKSNTILGSQEGNTMKTNDTYMKFSWLTVPEKSLDKEHRCIVRHENNKNGVDQEIIPEDTFFPSPESSCDVKLVEKSFETDTNLNFQNLSVIGFRILLLKVAGFNLLMTLRLWSSRSKRSRLLHSDYMNMTPRRPGPTRKHYQPYAPPRDFAAYRSRVKFSRSADAPAYQQGQNQLYNELNLGRREEYDVLDKRRGRDPEMGGKPQRRKNPQEGLYNELQKDKMAEAYSEIGMKGERRRGKGHDGLYQGLSTATKDTYDALHMQALPPR

SEQ ID NO: 30355 - protein, 302 aa, synthetic construct
PKPTIFLPSIAETKLQKAGTYLCLLEKFFPDVIKIHWQEKKSNTILGSQEGNTMKTNDTYMKFSWLTVPEKSLDKEHRCIVRHENNKNGVDQEIIGRADCGFTSESYQQGVLSATILYEILLGKATLYAVLVSALVLMAMVKRKDSRGRSKRSRLLHSDYMNMTPRRPGPTRKHYQPYAPPRDFAAYRSRVKFSRSADAPAYQQGQNQLYNELNLGRREEYDVLDKRRGRDPEMGGKPQRRKNPQEGLYNELQKDKMAEAYSEIGMKGERRRGKGHDGLYQGLSTATKDTYDALHMQALPPR

SEQ ID NO: 30356 - protein, 300 aa, synthetic construct
PKPTIFLPSIAETKLQKAGTYLCLLEKFFPDVIKIHWQEKKSNTILGSQEGNTMKTNDTYMKFSWLTVPEKSLDKEHRCIVRHENNKNGVDQEIIADCGFTSESYQQGVLSATILYEILLGKATLYAVLVSALVLMAMVKRKDSRGRSKRSRLLHSDYMNMTPRRPGPTRKHYQPYAPPRDFAAYRSRVKFSRSADAPAYQQGQNQLYNELNLGRREEYDVLDKRRGRDPEMGGKPQRRKNPQEGLYNELQKDKMAEAYSEIGMKGERRRGKGHDGLYQGLSTATKDTYDALHMQALPPR

SEQ ID NO: 30357 - protein, 310 aa, synthetic construct
PKPTIFLPSIAETKLQKAGTYLCLLEKFFPDVIKIHWQEKKSNTILGSQEGNTMKTNDTYMKFSWLTVPEKSLDKEHRCIVRHENNKNGVDQEIIQIVSAEAWGRADCGFTSESYQQGVLSATILYEILLGKATLYAVLVSALVLMAMVKRKDSRGRSKRSRLLHSDYMNMTPRRPGPTRKHYQPYAPPRDFAAYRSRVKFSRSADAPAYQQGQNQLYNELNLGRREEYDVLDKRRGRDPEMGGKPQRRKNPQEGLYNELQKDKMAEAYSEIGMKGERRRGKGHDGLYQGLSTATKDTYDALHMQALPPR

SEQ ID NO: 30358 - protein, 318 aa, synthetic construct; identical to SEQ ID NO: 29794

SEQ ID NO: 30359 - protein, 316 aa, synthetic construct
PKPTIFLPSIAETKLQKAGTYLCLLEKFFPDVIKIHWQEKKSNTILGSQEGNTMKTNDTYMKFSWLTVPEKSLDKEHRCIVRHENNKNGVDQEIIPIKTDVITMDPKDNCSKDANDTLLLQLTNTSAYYMYLLLLLKSVVYFAIITCCLLRRTAFCCNGEKSRSKRSRLLHSDYMNMTPRRPGPTRKHYQPYAPPRDFAAYRSRVKFSRSADAPAYQQGQNQLYNELNLGRREEYDVLDKRRGRDPEMGGKPQRRKNPQEGLYNELQKDKMAEAYSEIGMKGERRRGKGHDGLYQGLSTATKDTYDALHMQALPPR

SEQ ID NO: 30360 - protein, 308 aa, synthetic construct
PKPTIFLPSIAETKLQKAGTYLCLLEKFFPDVIKIHWQEKKSNTILGSQEGNTMKTNDTYMKFSWLTVPEKSLDKEHRCIVRHENNKNGVDQEIIMDPKDNCSKDANDTLLLQLTNTSAYYMYLLLLLKSVVYFAIITCCLLRRTAFCCNGEKSRSKRSRLLHSDYMNMTPRRPGPTRKHYQPYAPPRDFAAYRSRVKFSRSADAPAYQQGQNQLYNELNLGRREEYDVLDKRRGRDPEMGGKPQRRKNPQEGLYNELQKDKMAEAYSEIGMKGERRRGKGHDGLYQGLSTATKDTYDALHMQALPPR

SEQ ID NO: 30361 - protein, 316 aa, synthetic construct; identical to SEQ ID NO: 30359

SEQ ID NO: 30362 - protein, 302 aa, synthetic construct
PKPTIFLPSIAETKLQKAGTYLCLLEKFFPDVIKIHWQEKKSNTILGSQEGNTMKTNDTYMKFSWLTVPEKSLDKEHRCIVRHENNKNGVDQEIICSKDANDTLLLQLTNTSAYYMYLLLLLKSVVYFAIITCCLLRRTAFCCNGEKSRSKRSRLLHSDYMNMTPRRPGPTRKHYQPYAPPRDFAAYRSRVKFSRSADAPAYQQGQNQLYNELNLGRREEYDVLDKRRGRDPEMGGKPQRRKNPQEGLYNELQKDKMAEAYSEIGMKGERRRGKGHDGLYQGLSTATKDTYDALHMQALPPR

SEQ ID NO: 30363 - protein, 317 aa, synthetic construct
PKPTIFLPSIAETKLQKAGTYLCLLEKFFPDVIKIHWQEKKSNTILGSQEGNTMKTNDTYMKFSWLTVPEKSLDKEHRCIVRHENNKNGVDQEIIEVKTDSTDHVKPKETENTKQPSKSCHKPKAIVHTEKVNMMSLTVLGLRMLFAKTVAVNFLLTAKLFFLRSKRSRLLHSDYMNMTPRRPGPTRKHYQPYAPPRDFAAYRSRVKFSRSADAPAYQQGQNQLYNELNLGRREEYDVLDKRRGRDPEMGGKPQRRKNPQEGLYNELQKDKMAEAYSEIGMKGERRRGKGHDGLYQGLSTATKDTYDALHMQALPPR

SEQ ID NO: 30364 - protein, 310 aa, synthetic construct
PKPTIFLPSIAETKLQKAGTYLCLLEKFFPDVIKIHWQEKKSNTILGSQEGNTMKTNDTYMKFSWLTVPEKSLDKEHRCIVRHENNKNGVDQEIIDHVKPKETENTKQPSKSCHKPKAIVHTEKVNMMSLTVLGLRMLFAKTVAVNFLLTAKLFFLRSKRSRLLHSDYMNMTPRRPGPTRKHYQPYAPPRDFAAYRSRVKFSRSADAPAYQQGQNQLYNELNLGRREEYDVLDKRRGRDPEMGGKPQRRKNPQEGLYNELQKDKMAEAYSEIGMKGERRRGKGHDGLYQGLSTATKDTYDALHMQALPPR

SEQ ID NO: 30365 - protein, 299 aa, synthetic construct
SQPHTKPSVFVMKNGTNVACLVKEFYPKDIRINLVSSKKITEFDPAIVISPSGKYNAVKLGKYEDSNSVTCSVQHDNKTVHSTDFIPEDTFFPSPESSCDVKLVEKSFETDTNLNFQNLSVIGFRILLLKVAGFNLLMTLRLWSSRSKRSRLLHSDYMNMTPRRPGPTRKHYQPYAPPRDFAAYRSRVKFSRSADAPAYQQGQNQLYNELNLGRREEYDVLDKRRGRDPEMGGKPQRRKNPQEGLYNELQKDKMAEAYSEIGMKGERRRGKGHDGLYQGLSTATKDTYDALHMQALPPR

SEQ ID NO: 30366 - protein, 289 aa, synthetic construct
SQPHTKPSVFVMKNGTNVACLVKEFYPKDIRINLVSSKKITEFDPAIVISPSGKYNAVKLGKYEDSNSVTCSVQHDNKTVHSTDFESSCDVKLVEKSFETDTNLNFQNLSVIGFRILLLKVAGFNLLMTLRLWSSRSKRSRLLHSDYMNMTPRRPGPTRKHYQPYAPPRDFAAYRSRVKFSRSADAPAYQQGQNQLYNELNLGRREEYDVLDKRRGRDPEMGGKPQRRKNPQEGLYNELQKDKMAEAYSEIGMKGERRRGKGHDGLYQGLSTATKDTYDALHMQALPPR

SEQ ID NO: 30367 - protein, 298 aa, synthetic construct
SQPHTKPSVFVMKNGTNVACLVKEFYPKDIRINLVSSKKITEFDPAIVISPSGKYNAVKLGKYEDSNSVTCSVQHDNKTVHSTDFPEDTFFPSPESSCDVKLVEKSFETDTNLNFQNLSVIGFRILLLKVAGFNLLMTLRLWSSRSKRSRLLHSDYMNMTPRRPGPTRKHYQPYAPPRDFAAYRSRVKFSRSADAPAYQQGQNQLYNELNLGRREEYDVLDKRRGRDPEMGGKPQRRKNPQEGLYNELQKDKMAEAYSEIGMKGERRRGKGHDGLYQGLSTATKDTYDALHMQALPPR

SEQ ID NO: 30368 - protein, 292 aa, synthetic construct
SQPHTKPSVFVMKNGTNVACLVKEFYPKDIRINLVSSKKITEFDPAIVISPSGKYNAVKLGKYEDSNSVTCSVQHDNKTVHSTDFGRADCGFTSESYQQGVLSATILYEILLGKATLYAVLVSALVLMAMVKRKDSRGRSKRSRLLHSDYMNMTPRRPGPTRKHYQPYAPPRDFAAYRSRVKFSRSADAPAYQQGQNQLYNELNLGRREEYDVLDKRRGRDPEMGGKPQRRKNPQEGLYNELQKDKMAEAYSEIGMKGERRRGKGHDGLYQGLSTATKDTYDALHMQALPPR

SEQ ID NO: 30369 - protein, 290 aa, synthetic construct
SQPHTKPSVFVMKNGTNVACLVKEFYPKDIRINLVSSKKITEFDPAIVISPSGKYNAVKLGKYEDSNSVTCSVQHDNKTVHSTDFADCGFTSESYQQGVLSATILYEILLGKATLYAVLVSALVLMAMVKRKDSRGRSKRSRLLHSDYMNMTPRRPGPTRKHYQPYAPPRDFAAYRSRVKFSRSADAPAYQQGQNQLYNELNLGRREEYDVLDKRRGRDPEMGGKPQRRKNPQEGLYNELQKDKMAEAYSEIGMKGERRRGKGHDGLYQGLSTATKDTYDALHMQALPPR

SEQ ID NO: 30370 - protein, 300 aa, synthetic construct
SQPHTKPSVFVMKNGTNVACLVKEFYPKDIRINLVSSKKITEFDPAIVISPSGKYNAVKLGKYEDSNSVTCSVQHDNKTVHSTDFQIVSAEAWGRADCGFTSESYQQGVLSATILYEILLGKATLYAVLVSALVLMAMVKRKDSRGRSKRSRLLHSDYMNMTPRRPGPTRKHYQPYAPPRDFAAYRSRVKFSRSADAPAYQQGQNQLYNELNLGRREEYDVLDKRRGRDPEMGGKPQRRKNPQEGLYNELQKDKMAEAYSEIGMKGERRRGKGHDGLYQGLSTATKDTYDALHMQALPPR

SEQ ID NO: 30371 - protein, 308 aa, synthetic construct
SQPHTKPSVFVMKNGTNVACLVKEFYPKDIRINLVSSKKITEFDPAIVISPSGKYNAVKLGKYEDSNSVTCSVQHDNKTVHSTDFFPPIKTDVITMDPKDNCSKDANDTLLLQLTNTSAYYMYLLLLLKSVVYFAIITCCLLRRTAFCCNGEKSRSKRSRLLHSDYMNMTPRRPGPTRKHYQPYAPPRDFAAYRSRVKFSRSADAPAYQQGQNQLYNELNLGRREEYDVLDKRRGRDPEMGGKPQRRKNPQEGLYNELQKDKMAEAYSEIGMKGERRRGKGHDGLYQGLSTATKDTYDALHMQALPPR

SEQ ID NO: 30372 - protein, 306 aa, synthetic construct
SQPHTKPSVFVMKNGTNVACLVKEFYPKDIRINLVSSKKITEFDPAIVISPSGKYNAVKLGKYEDSNSVTCSVQHDNKTVHSTDFPIKTDVITMDPKDNCSKDANDTLLLQLTNTSAYYMYLLLLLKSVVYFAIITCCLLRRTAFCCNGEKSRSKRSRLLHSDYMNMTPRRPGPTRKHYQPYAPPRDFAAYRSRVKFSRSADAPAYQQGQNQLYNELNLGRREEYDVLDKRRGRDPEMGGKPQRRKNPQEGLYNELQKDKMAEAYSEIGMKGERRRGKGHDGLYQGLSTATKDTYDALHMQALPPR

SEQ ID NO: 30373 - protein, 298 aa, synthetic construct
SQPHTKPSVFVMKNGTNVACLVKEFYPKDIRINLVSSKKITEFDPAIVISPSGKYNAVKLGKYEDSNSVTCSVQHDNKTVHSTDFMDPKDNCSKDANDTLLLQLTNTSAYYMYLLLLLKSVVYFAIITCCLLRRTAFCCNGEKSRSKRSRLLHSDYMNMTPRRPGPTRKHYQPYAPPRDFAAYRSRVKFSRSADAPAYQQGQNQLYNELNLGRREEYDVLDKRRGRDPEMGGKPQRRKNPQEGLYNELQKDKMAEAYSEIGMKGERRRGKGHDGLYQGLSTATKDTYDALHMQALPPR

SEQ ID NO: 30374 - protein, 307 aa, synthetic construct; identical to SEQ ID NO: 29317

SEQ ID NO: 30375 - protein, 300 aa, synthetic construct
SQPHTKPSVFVMKNGTNVACLVKEFYPKDIRINLVSSKKITEFDPAIVISPSGKYNAVKLGKYEDSNSVTCSVQHDNKTVHSTDFDHVKPKETENTKQPSKSCHKPKAIVHTEKVNMMSLTVLGLRMLFAKTVAVNFLLTAKLFFLRSKRSRLLHSDYMNMTPRRPGPTRKHYQPYAPPRDFAAYRSRVKFSRSADAPAYQQGQNQLYNELNLGRREEYDVLDKRRGRDPEMGGKPQRRKNPQEGLYNELQKDKMAEAYSEIGMKGERRRGKGHDGLYQGLSTATKDTYDALHMQALPPR

SEQ ID NO: 30376 - protein, 306 aa, synthetic construct
SQPHTKPSVFVMKNGTNVACLVKEFYPKDIRINLVSSKKITEFDPAIVISPSGKYNAVKLGKYEDSNSVTCSVQHDNKTVHSTDFEVKTDSTIPEDTFFPSPESSCDVKLVEKSFETDTNLNFQNLSVIGFRILLLKVAGFNLLMTLRLWSSRSKRSRLLHSDYMNMTPRRPGPTRKHYQPYAPPRDFAAYRSRVKFSRSADAPAYQQGQNQLYNELNLGRREEYDVLDKRRGRDPEMGGKPQRRKNPQEGLYNELQKDKMAEAYSEIGMKGERRRGKGHDGLYQGLSTATKDTYDALHMQALPPR

SEQ ID NO: 30377 - protein, 296 aa, synthetic construct
SQPHTKPSVFVMKNGTNVACLVKEFYPKDIRINLVSSKKITEFDPAIVISPSGKYNAVKLGKYEDSNSVTCSVQHDNKTVHSTDFEVKTDSTESSCDVKLVEKSFETDTNLNFQNLSVIGFRILLLKVAGFNLLMTLRLWSSRSKRSRLLHSDYMNMTPRRPGPTRKHYQPYAPPRDFAAYRSRVKFSRSADAPAYQQGQNQLYNELNLGRREEYDVLDKRRGRDPEMGGKPQRRKNPQEGLYNELQKDKMAEAYSEIGMKGERRRGKGHDGLYQGLSTATKDTYDALHMQALPPR

SEQ ID NO: 30378 - protein, 305 aa, synthetic construct
SQPHTKPSVFVMKNGTNVACLVKEFYPKDIRINLVSSKKITEFDPAIVISPSGKYNAVKLGKYEDSNSVTCSVQHDNKTVHSTDFEVKTDSTPEDTFFPSPESSCDVKLVEKSFETDTNLNFQNLSVIGFRILLLKVAGFNLLMTLRLWSSRSKRSRLLHSDYMNMTPRRPGPTRKHYQPYAPPRDFAAYRSRVKFSRSADAPAYQQGQNQLYNELNLGRREEYDVLDKRRGRDPEMGGKPQRRKNPQEGLYNELQKDKMAEAYSEIGMKGERRRGKGHDGLYQGLSTATKDTYDALHMQALPPR

SEQ ID NO: 30379 - protein, 299 aa, synthetic construct
SQPHTKPSVFVMKNGTNVACLVKEFYPKDIRINLVSSKKITEFDPAIVISPSGKYNAVKLGKYEDSNSVTCSVQHDNKTVHSTDFEVKTDSTGRADCGFTSESYQQGVLSATILYEILLGKATLYAVLVSALVLMAMVKRKDSRGRSKRSRLLHSDYMNMTPRRPGPTRKHYQPYAPPRDFAAYRSRVKFSRSADAPAYQQGQNQLYNELNLGRREEYDVLDKRRGRDPEMGGKPQRRKNPQEGLYNELQKDKMAEAYSEIGMKGERRRGKGHDGLYQGLSTATKDTYDALHMQALPPR

SEQ ID NO: 30380 - protein, 297 aa, synthetic construct
SQPHTKPSVFVMKNGTNVACLVKEFYPKDIRINLVSSKKITEFDPAIVISPSGKYNAVKLGKYEDSNSVTCSVQHDNKTVHSTDFEVKTDSTADCGFTSESYQQGVLSATILYEILLGKATLYAVLVSALVLMAMVKRKDSRGRSKRSRLLHSDYMNMTPRRPGPTRKHYQPYAPPRDFAAYRSRVKFSRSADAPAYQQGQNQLYNELNLGRREEYDVLDKRRGRDPEMGGKPQRRKNPQEGLYNELQKDKMAEAYSEIGMKGERRRGKGHDGLYQGLSTATKDTYDALHMQALPPR

SEQ ID NO: 30381 - protein, 307 aa, synthetic construct
SQPHTKPSVFVMKNGTNVACLVKEFYPKDIRINLVSSKKITEFDPAIVISPSGKYNAVKLGKYEDSNSVTCSVQHDNKTVHSTDFEVKTDSTQIVSAEAWGRADCGFTSESYQQGVLSATILYEILLGKATLYAVLVSALVLMAMVKRKDSRGRSKRSRLLHSDYMNMTPRRPGPTRKHYQPYAPPRDFAAYRSRVKFSRSADAPAYQQGQNQLYNELNLGRREEYDVLDKRRGRDPEMGGKPQRRKNPQEGLYNELQKDKMAEAYSEIGMKGERRRGKGHDGLYQGLSTATKDTYDALHMQALPPR

SEQ ID NO: 30382 - protein, 315 aa, synthetic construct
SQPHTKPSVFVMKNGTNVACLVKEFYPKDIRINLVSSKKITEFDPAIVISPSGKYNAVKLGKYEDSNSVTCSVQHDNKTVHSTDFEVKTDSTFPPIKTDVITMDPKDNCSKDANDTLLLQLTNTSAYYMYLLLLLKSVVYFAIITCCLLRRTAFCCNGEKSRSKRSRLLHSDYMNMTPRRPGPTRKHYQPYAPPRDFAAYRSRVKFSRSADAPAYQQGQNQLYNELNLGRREEYDVLDKRRGRDPEMGGKPQRRKNPQEGLYNELQKDKMAEAYSEIGMKGERRRGKGHDGLYQGLSTATKDTYDALHMQALPPR

SEQ ID NO: 30383 - protein, 313 aa, synthetic construct
SQPHTKPSVFVMKNGTNVACLVKEFYPKDIRINLVSSKKITEFDPAIVISPSGKYNAVKLGKYEDSNSVTCSVQHDNKTVHSTDFEVKTDSTPIKTDVITMDPKDNCSKDANDTLLLQLTNTSAYYMYLLLLLKSVVYFAIITCCLLRRTAFCCNGEKSRSKRSRLLHSDYMNMTPRRPGPTRKHYQPYAPPRDFAAYRSRVKFSRSADAPAYQQGQNQLYNELNLGRREEYDVLDKRRGRDPEMGGKPQRRKNPQEGLYNELQKDKMAEAYSEIGMKGERRRGKGHDGLYQGLSTATKDTYDALHMQALPPR

SEQ ID NO: 30384 - protein, 305 aa, synthetic construct
SQPHTKPSVFVMKNGTNVACLVKEFYPKDIRINLVSSKKITEFDPAIVISPSGKYNAVKLGKYEDSNSVTCSVQHDNKTVHSTDFEVKTDSTMDPKDNCSKDANDTLLLQLTNTSAYYMYLLLLLKSVVYFAIITCCLLRRTAFCCNGEKSRSKRSRLLHSDYMNMTPRRPGPTRKHYQPYAPPRDFAAYRSRVKFSRSADAPAYQQGQNQLYNELNLGRREEYDVLDKRRGRDPEMGGKPQRRKNPQEGLYNELQKDKMAEAYSEIGMKGERRRGKGHDGLYQGLSTATKDTYDALHMQALPPR

SEQ ID NO: 30385 - protein, 313 aa, synthetic construct; identical to SEQ ID NO: 30383

SEQ ID NO: 30386 - protein, 299 aa, synthetic construct
SQPHTKPSVFVMKNGTNVACLVKEFYPKDIRINLVSSKKITEFDPAIVISPSGKYNAVKLGKYEDSNSVTCSVQHDNKTVHSTDFEVKTDSTCSKDANDTLLLQLTNTSAYYMYLLLLLKSVVYFAIITCCLLRRTAFCCNGEKSRSKRSRLLHSDYMNMTPRRPGPTRKHYQPYAPPRDFAAYRSRVKFSRSADAPAYQQGQNQLYNELNLGRREEYDVLDKRRGRDPEMGGKPQRRKNPQEGLYNELQKDKMAEAYSEIGMKGERRRGKGHDGLYQGLSTATKDTYDALHMQALPPR

SEQ ID NO: 30387 - protein, 299 aa, synthetic construct; identical to SEQ ID NO: 30365

SEQ ID NO: 30388 - protein, 289 aa, synthetic construct; identical to SEQ ID NO: 30366

SEQ ID NO: 30389 - protein, 298 aa, synthetic construct; identical to SEQ ID NO: 30367

SEQ ID NO: 30390 - protein, 292 aa, synthetic construct; identical to SEQ ID NO: 30368

SEQ ID NO: 30391 - protein, 290 aa, synthetic construct; identical to SEQ ID NO: 30369

SEQ ID NO: 30392 - protein, 300 aa, synthetic construct; identical to SEQ ID NO: 30370

SEQ ID NO: 30393 - protein, 308 aa, synthetic construct; identical to SEQ ID NO: 30371

SEQ ID NO: 30394 - protein, 306 aa, synthetic construct; identical to SEQ ID NO: 30372

SEQ ID NO: 30395 - protein, 298 aa, synthetic construct; identical to SEQ ID NO: 30373

SEQ ID NO: 30396 - protein, 306 aa, synthetic construct; identical to SEQ ID NO: 30372

SEQ ID NO: 30397 - protein, 292 aa, synthetic construct
SQPHTKPSVFVMKNGTNVACLVKEFYPKDIRINLVSSKKITEFDPAIVISPSGKYNAVKLGKYEDSNSVTCSVQHDNKTVHSTDFCSKDANDTLLLQLTNTSAYYMYLLLLLKSVVYFAIITCCLLRRTAFCCNGEKSRSKRSRLLHSDYMNMTPRRPGPTRKHYQPYAPPRDFAAYRSRVKFSRSADAPAYQQGQNQLYNELNLGRREEYDVLDKRRGRDPEMGGKPQRRKNPQEGLYNELQKDKMAEAYSEIGMKGERRRGKGHDGLYQGLSTATKDTYDALHMQALPPR

SEQ ID NO: 30398 - protein, 306 aa, synthetic construct; identical to SEQ ID NO: 30376

SEQ ID NO: 30399 - protein, 296 aa, synthetic construct; identical to SEQ ID NO: 30377

SEQ ID NO: 30400 - protein, 305 aa, synthetic construct; identical to SEQ ID NO: 30378

SEQ ID NO: 30401 - protein, 299 aa, synthetic construct; identical to SEQ ID NO: 30379

SEQ ID NO: 30402 - protein, 297 aa, synthetic construct; identical to SEQ ID NO: 30380

SEQ ID NO: 30403 - protein, 307 aa, synthetic construct; identical to SEQ ID NO: 30381

SEQ ID NO: 30404 - protein, 315 aa, synthetic construct; identical to SEQ ID NO: 30382

SEQ ID NO: 30405 - protein, 313 aa, synthetic construct; identical to SEQ ID NO: 30383

SEQ ID NO: 30406 - protein, 305 aa, synthetic construct; identical to SEQ ID NO: 30384

SEQ ID NO: 30407 - protein, 313 aa, synthetic construct; identical to SEQ ID NO: 30383

SEQ ID NO: 30408 - protein, 299 aa, synthetic construct; identical to SEQ ID NO: 30386

SEQ ID NO: 30409 - protein, 277 aa, synthetic construct
LRDSKSSDKSVCLFTDFDSQTNVSQSKDSDVYITDKTVLDMRSMDFKSNSAVAWSNKSDFACANAFNNSIGRADCGFTSESYQQGVLSATILYEILLGKATLYAVLVSALVLMAMVKRKDSRGRSKRSRLLHSDYMNMTPRRPGPTRKHYQPYAPPRDFAAYRSRVKFSRSADAPAYQQGQNQLYNELNLGRREEYDVLDKRRGRDPEMGGKPQRRKNPQEGLYNELQKDKMAEAYSEIGMKGERRRGKGHDGLYQGLSTATKDTYDALHMQALPPR

SEQ ID NO: 30410 - protein, 275 aa, synthetic construct
LRDSKSSDKSVCLFTDFDSQTNVSQSKDSDVYITDKTVLDMRSMDFKSNSAVAWSNKSDFACANAFNNSIADCGFTSESYQQGVLSATILYEILLGKATLYAVLVSALVLMAMVKRKDSRGRSKRSRLLHSDYMNMTPRRPGPTRKHYQPYAPPRDFAAYRSRVKFSRSADAPAYQQGQNQLYNELNLGRREEYDVLDKRRGRDPEMGGKPQRRKNPQEGLYNELQKDKMAEAYSEIGMKGERRRGKGHDGLYQGLSTATKDTYDALHMQALPPR

SEQ ID NO: 30411 - protein, 285 aa, synthetic construct
LRDSKSSDKSVCLFTDFDSQTNVSQSKDSDVYITDKTVLDMRSMDFKSNSAVAWSNKSDFACANAFNNSIQIVSAEAWGRADCGFTSESYQQGVLSATILYEILLGKATLYAVLVSALVLMAMVKRKDSRGRSKRSRLLHSDYMNMTPRRPGPTRKHYQPYAPPRDFAAYRSRVKFSRSADAPAYQQGQNQLYNELNLGRREEYDVLDKRRGRDPEMGGKPQRRKNPQEGLYNELQKDKMAEAYSEIGMKGERRRGKGHDGLYQGLSTATKDTYDALHMQALPPR

SEQ ID NO: 30412 - protein, 293 aa, synthetic construct
LRDSKSSDKSVCLFTDFDSQTNVSQSKDSDVYITDKTVLDMRSMDFKSNSAVAWSNKSDFACANAFNNSIFPPIKTDVITMDPKDNCSKDANDTLLLQLTNTSAYYMYLLLLLKSVVYFAIITCCLLRRTAFCCNGEKSRSKRSRLLHSDYMNMTPRRPGPTRKHYQPYAPPRDFAAYRSRVKFSRSADAPAYQQGQNQLYNELNLGRREEYDVLDKRRGRDPEMGGKPQRRKNPQEGLYNELQKDKMAEAYSEIGMKGERRRGKGHDGLYQGLSTATKDTYDALHMQALPPR

SEQ ID NO: 30413 - protein, 291 aa, synthetic construct
LRDSKSSDKSVCLFTDFDSQTNVSQSKDSDVYITDKTVLDMRSMDFKSNSAVAWSNKSDFACANAFNNSIPIKTDVITMDPKDNCSKDANDTLLLQLTNTSAYYMYLLLLLKSVVYFAIITCCLLRRTAFCCNGEKSRSKRSRLLHSDYMNMTPRRPGPTRKHYQPYAPPRDFAAYRSRVKFSRSADAPAYQQGQNQLYNELNLGRREEYDVLDKRRGRDPEMGGKPQRRKNPQEGLYNELQKDKMAEAYSEIGMKGERRRGKGHDGLYQGLSTATKDTYDALHMQALPPR

SEQ ID NO: 30414 - protein, 283 aa, synthetic construct
LRDSKSSDKSVCLFTDFDSQTNVSQSKDSDVYITDKTVLDMRSMDFKSNSAVAWSNKSDFACANAFNNSIMDPKDNCSKDANDTLLLQLTNTSAYYMYLLLLLKSVVYFAIITCCLLRRTAFCCNGEKSRSKRSRLLHSDYMNMTPRRPGPTRKHYQPYAPPRDFAAYRSRVKFSRSADAPAYQQGQNQLYNELNLGRREEYDVLDKRRGRDPEMGGKPQRRKNPQEGLYNELQKDKMAEAYSEIGMKGERRRGKGHDGLYQGLSTATKDTYDALHMQALPPR

SEQ ID NO: 30415 - protein, 291 aa, synthetic construct; identical to SEQ ID NO: 30413

SEQ ID NO: 30416 - protein, 277 aa, synthetic construct
LRDSKSSDKSVCLFTDFDSQTNVSQSKDSDVYITDKTVLDMRSMDFKSNSAVAWSNKSDFACANAFNNSICSKDANDTLLLQLTNTSAYYMYLLLLLKSVVYFAIITCCLLRRTAFCCNGEKSRSKRSRLLHSDYMNMTPRRPGPTRKHYQPYAPPRDFAAYRSRVKFSRSADAPAYQQGQNQLYNELNLGRREEYDVLDKRRGRDPEMGGKPQRRKNPQEGLYNELQKDKMAEAYSEIGMKGERRRGKGHDGLYQGLSTATKDTYDALHMQALPPR

SEQ ID NO: 30417 - protein, 292 aa, synthetic construct
LRDSKSSDKSVCLFTDFDSQTNVSQSKDSDVYITDKTVLDMRSMDFKSNSAVAWSNKSDFACANAFNNSIEVKTDSTDHVKPKETENTKQPSKSCHKPKAIVHTEKVNMMSLTVLGLRMLFAKTVAVNFLLTAKLFFLRSKRSRLLHSDYMNMTPRRPGPTRKHYQPYAPPRDFAAYRSRVKFSRSADAPAYQQGQNQLYNELNLGRREEYDVLDKRRGRDPEMGGKPQRRKNPQEGLYNELQKDKMAEAYSEIGMKGERRRGKGHDGLYQGLSTATKDTYDALHMQALPPR

SEQ ID NO: 30418 - protein, 285 aa, synthetic construct
LRDSKSSDKSVCLFTDFDSQTNVSQSKDSDVYITDKTVLDMRSMDFKSNSAVAWSNKSDFACANAFNNSIDHVKPKETENTKQPSKSCHKPKAIVHTEKVNMMSLTVLGLRMLFAKTVAVNFLLTAKLFFLRSKRSRLLHSDYMNMTPRRPGPTRKHYQPYAPPRDFAAYRSRVKFSRSADAPAYQQGQNQLYNELNLGRREEYDVLDKRRGRDPEMGGKPQRRKNPQEGLYNELQKDKMAEAYSEIGMKGERRRGKGHDGLYQGLSTATKDTYDALHMQALPPR

SEQ ID NO: 30419 - protein, 287 aa, synthetic construct
LRDSKSSDKSVCLFTDFDSQTNVSQSKDSDVYITDKTVLDMRSMDFKSNSAVAWSNKSDFACANAFNNSIIPEDTFFPSPGRADCGFTSESYQQGVLSATILYEILLGKATLYAVLVSALVLMAMVKRKDSRGRSKRSRLLHSDYMNMTPRRPGPTRKHYQPYAPPRDFAAYRSRVKFSRSADAPAYQQGQNQLYNELNLGRREEYDVLDKRRGRDPEMGGKPQRRKNPQEGLYNELQKDKMAEAYSEIGMKGERRRGKGHDGLYQGLSTATKDTYDALHMQALPPR

SEQ ID NO: 30420 - protein, 285 aa, synthetic construct
LRDSKSSDKSVCLFTDFDSQTNVSQSKDSDVYITDKTVLDMRSMDFKSNSAVAWSNKSDFACANAFNNSIIPEDTFFPSPADCGFTSESYQQGVLSATILYEILLGKATLYAVLVSALVLMAMVKRKDSRGRSKRSRLLHSDYMNMTPRRPGPTRKHYQPYAPPRDFAAYRSRVKFSRSADAPAYQQGQNQLYNELNLGRREEYDVLDKRRGRDPEMGGKPQRRKNPQEGLYNELQKDKMAEAYSEIGMKGERRRGKGHDGLYQGLSTATKDTYDALHMQALPPR

SEQ ID NO: 30421 - protein, 295 aa, synthetic construct
LRDSKSSDKSVCLFTDFDSQTNVSQSKDSDVYITDKTVLDMRSMDFKSNSAVAWSNKSDFACANAFNNSIIPEDTFFPSPQIVSAEAWGRADCGFTSESYQQGVLSATILYEILLGKATLYAVLVSALVLMAMVKRKDSRGRSKRSRLLHSDYMNMTPRRPGPTRKHYQPYAPPRDFAAYRSRVKFSRSADAPAYQQGQNQLYNELNLGRREEYDVLDKRRGRDPEMGGKPQRRKNPQEGLYNELQKDKMAEAYSEIGMKGERRRGKGHDGLYQGLSTATKDTYDALHMQALPPR

SEQ ID NO: 30422 - protein, 303 aa, synthetic construct
LRDSKSSDKSVCLFTDFDSQTNVSQSKDSDVYITDKTVLDMRSMDFKSNSAVAWSNKSDFACANAFNNSIIPEDTFFPSPFPPIKTDVITMDPKDNCSKDANDTLLLQLTNTSAYYMYLLLLLKSVVYFAIITCCLLRRTAFCCNGEKSRSKRSRLLHSDYMNMTPRRPGPTRKHYQPYAPPRDFAAYRSRVKFSRSADAPAYQQGQNQLYNELNLGRREEYDVLDKRRGRDPEMGGKPQRRKNPQEGLYNELQKDKMAEAYSEIGMKGERRRGKGHDGLYQGLSTATKDTYDALHMQALPPR

SEQ ID NO: 30423 - protein, 301 aa, synthetic construct
LRDSKSSDKSVCLFTDFDSQTNVSQSKDSDVYITDKTVLDMRSMDFKSNSAVAWSNKSDFACANAFNNSIIPEDTFFPSPPIKTDVITMDPKDNCSKDANDTLLLQLTNTSAYYMYLLLLLKSVVYFAIITCCLLRRTAFCCNGEKSRSKRSRLLHSDYMNMTPRRPGPTRKHYQPYAPPRDFAAYRSRVKFSRSADAPAYQQGQNQLYNELNLGRREEYDVLDKRRGRDPEMGGKPQRRKNPQEGLYNELQKDKMAEAYSEIGMKGERRRGKGHDGLYQGLSTATKDTYDALHMQALPPR

SEQ ID NO: 30424 - protein, 293 aa, synthetic construct
LRDSKSSDKSVCLFTDFDSQTNVSQSKDSDVYITDKTVLDMRSMDFKSNSAVAWSNKSDFACANAFNNSIIPEDTFFPSPMDPKDNCSKDANDTLLLQLTNTSAYYMYLLLLLKSVVYFAIITCCLLRRTAFCCNGEKSRSKRSRLLHSDYMNMTPRRPGPTRKHYQPYAPPRDFAAYRSRVKFSRSADAPAYQQGQNQLYNELNLGRREEYDVLDKRRGRDPEMGGKPQRRKNPQEGLYNELQKDKMAEAYSEIGMKGERRRGKGHDGLYQGLSTATKDTYDALHMQALPPR

SEQ ID NO: 30425 - protein, 301 aa, synthetic construct; identical to SEQ ID NO: 30423

SEQ ID NO: 30426 - protein, 287 aa, synthetic construct
LRDSKSSDKSVCLFTDFDSQTNVSQSKDSDVYITDKTVLDMRSMDFKSNSAVAWSNKSDFACANAFNNSIIPEDTFFPSPCSKDANDTLLLQLTNTSAYYMYLLLLLKSVVYFAIITCCLLRRTAFCCNGEKSRSKRSRLLHSDYMNMTPRRPGPTRKHYQPYAPPRDFAAYRSRVKFSRSADAPAYQQGQNQLYNELNLGRREEYDVLDKRRGRDPEMGGKPQRRKNPQEGLYNELQKDKMAEAYSEIGMKGERRRGKGHDGLYQGLSTATKDTYDALHMQALPPR

SEQ ID NO: 30427 - protein, 302 aa, synthetic construct
LRDSKSSDKSVCLFTDFDSQTNVSQSKDSDVYITDKTVLDMRSMDFKSNSAVAWSNKSDFACANAFNNSIIPEDTFFPSPEVKTDSTDHVKPKETENTKQPSKSCHKPKAIVHTEKVNMMSLTVLGLRMLFAKTVAVNFLLTAKLFFLRSKRSRLLHSDYMNMTPRRPGPTRKHYQPYAPPRDFAAYRSRVKFSRSADAPAYQQGQNQLYNELNLGRREEYDVLDKRRGRDPEMGGKPQRRKNPQEGLYNELQKDKMAEAYSEIGMKGERRRGKGHDGLYQGLSTATKDTYDALHMQALPPR

SEQ ID NO: 30428 - protein, 295 aa, synthetic construct
LRDSKSSDKSVCLFTDFDSQTNVSQSKDSDVYITDKTVLDMRSMDFKSNSAVAWSNKSDFACANAFNNSIIPEDTFFPSPDHVKPKETENTKQPSKSCHKPKAIVHTEKVNMMSLTVLGLRMLFAKTVAVNFLLTAKLFFLRSKRSRLLHSDYMNMTPRRPGPTRKHYQPYAPPRDFAAYRSRVKFSRSADAPAYQQGQNQLYNELNLGRREEYDVLDKRRGRDPEMGGKPQRRKNPQEGLYNELQKDKMAEAYSEIGMKGERRRGKGHDGLYQGLSTATKDTYDALHMQALPPR

SEQ ID NO: 30429 - protein, 291 aa, synthetic construct
LRDSKSSDKSVCLFTDFDSQTNVSQSKDSDVYITDKTVLDMRSMDFKSNSAVAWSNKSDFACANAFNNSIIPEDTFFPSPESSCGRADCGFTSESYQQGVLSATILYEILLGKATLYAVLVSALVLMAMVKRKDSRGRSKRSRLLHSDYMNMTPRRPGPTRKHYQPYAPPRDFAAYRSRVKFSRSADAPAYQQGQNQLYNELNLGRREEYDVLDKRRGRDPEMGGKPQRRKNPQEGLYNELQKDKMAEAYSEIGMKGERRRGKGHDGLYQGLSTATKDTYDALHMQALPPR

SEQ ID NO: 30430 - protein, 289 aa, synthetic construct
LRDSKSSDKSVCLFTDFDSQTNVSQSKDSDVYITDKTVLDMRSMDFKSNSAVAWSNKSDFACANAFNNSIIPEDTFFPSPESSCADCGFTSESYQQGVLSATILYEILLGKATLYAVLVSALVLMAMVKRKDSRGRSKRSRLLHSDYMNMTPRRPGPTRKHYQPYAPPRDFAAYRSRVKFSRSADAPAYQQGQNQLYNELNLGRREEYDVLDKRRGRDPEMGGKPQRRKNPQEGLYNELQKDKMAEAYSEIGMKGERRRGKGHDGLYQGLSTATKDTYDALHMQALPPR

SEQ ID NO: 30431 - protein, 299 aa, synthetic construct
LRDSKSSDKSVCLFTDFDSQTNVSQSKDSDVYITDKTVLDMRSMDFKSNSAVAWSNKSDFACANAFNNSIIPEDTFFPSPESSCQIVSAEAWGRADCGFTSESYQQGVLSATILYEILLGKATLYAVLVSALVLMAMVKRKDSRGRSKRSRLLHSDYMNMTPRRPGPTRKHYQPYAPPRDFAAYRSRVKFSRSADAPAYQQGQNQLYNELNLGRREEYDVLDKRRGRDPEMGGKPQRRKNPQEGLYNELQKDKMAEAYSEIGMKGERRRGKGHDGLYQGLSTATKDTYDALHMQALPPR

SEQ ID NO: 30432 - protein, 307 aa, synthetic construct
LRDSKSSDKSVCLFTDFDSQTNVSQSKDSDVYITDKTVLDMRSMDFKSNSAVAWSNKSDFACANAFNNSIIPEDTFFPSPESSCFPPIKTDVITMDPKDNCSKDANDTLLLQLTNTSAYYMYLLLLLKSVVYFAIITCCLLRRTAFCCNGEKSRSKRSRLLHSDYMNMTPRRPGPTRKHYQPYAPPRDFAAYRSRVKFSRSADAPAYQQGQNQLYNELNLGRREEYDVLDKRRGRDPEMGGKPQRRKNPQEGLYNELQKDKMAEAYSEIGMKGERRRGKGHDGLYQGLSTATKDTYDALHMQALPPR

SEQ ID NO: 30433 - protein, 305 aa, synthetic construct
LRDSKSSDKSVCLFTDFDSQTNVSQSKDSDVYITDKTVLDMRSMDFKSNSAVAWSNKSDFACANAFNNSIIPEDTFFPSPESSCPIKTDVITMDPKDNCSKDANDTLLLQLTNTSAYYMYLLLLLKSVVYFAIITCCLLRRTAFCCNGEKSRSKRSRLLHSDYMNMTPRRPGPTRKHYQPYAPPRDFAAYRSRVKFSRSADAPAYQQGQNQLYNELNLGRREEYDVLDKRRGRDPEMGGKPQRRKNPQEGLYNELQKDKMAEAYSEIGMKGERRRGKGHDGLYQGLSTATKDTYDALHMQALPPR

SEQ ID NO: 30434 - protein, 297 aa, synthetic construct
LRDSKSSDKSVCLFTDFDSQTNVSQSKDSDVYITDKTVLDMRSMDFKSNSAVAWSNKSDFACANAFNNSIIPEDTFFPSPESSCMDPKDNCSKDANDTLLLQLTNTSAYYMYLLLLLKSVVYFAIITCCLLRRTAFCCNGEKSRSKRSRLLHSDYMNMTPRRPGPTRKHYQPYAPPRDFAAYRSRVKFSRSADAPAYQQGQNQLYNELNLGRREEYDVLDKRRGRDPEMGGKPQRRKNPQEGLYNELQKDKMAEAYSEIGMKGERRRGKGHDGLYQGLSTATKDTYDALHMQALPPR

SEQ ID NO: 30435 - protein, 305 aa, synthetic construct; identical to SEQ ID NO: 30433

SEQ ID NO: 30436 - protein, 291 aa, synthetic construct
LRDSKSSDKSVCLFTDFDSQTNVSQSKDSDVYITDKTVLDMRSMDFKSNSAVAWSNKSDFACANAFNNSIIPEDTFFPSPESSCCSKDANDTLLLQLTNTSAYYMYLLLLLKSVVYFAIITCCLLRRTAFCCNGEKSRSKRSRLLHSDYMNMTPRRPGPTRKHYQPYAPPRDFAAYRSRVKFSRSADAPAYQQGQNQLYNELNLGRREEYDVLDKRRGRDPEMGGKPQRRKNPQEGLYNELQKDKMAEAYSEIGMKGERRRGKGHDGLYQGLSTATKDTYDALHMQALPPR

SEQ ID NO: 30437 - protein, 306 aa, synthetic construct
LRDSKSSDKSVCLFTDFDSQTNVSQSKDSDVYITDKTVLDMRSMDFKSNSAVAWSNKSDFACANAFNNSIIPEDTFFPSPESSCEVKTDSTDHVKPKETENTKQPSKSCHKPKAIVHTEKVNMMSLTVLGLRMLFAKTVAVNFLLTAKLFFLRSKRSRLLHSDYMNMTPRRPGPTRKHYQPYAPPRDFAAYRSRVKFSRSADAPAYQQGQNQLYNELNLGRREEYDVLDKRRGRDPEMGGKPQRRKNPQEGLYNELQKDKMAEAYSEIGMKGERRRGKGHDGLYQGLSTATKDTYDALHMQALPPR

SEQ ID NO: 30438 - protein, 299 aa, synthetic construct
LRDSKSSDKSVCLFTDFDSQTNVSQSKDSDVYITDKTVLDMRSMDFKSNSAVAWSNKSDFACANAFNNSIIPEDTFFPSPESSCDHVKPKETENTKQPSKSCHKPKAIVHTEKVNMMSLTVLGLRMLFAKTVAVNFLLTAKLFFLRSKRSRLLHSDYMNMTPRRPGPTRKHYQPYAPPRDFAAYRSRVKFSRSADAPAYQQGQNQLYNELNLGRREEYDVLDKRRGRDPEMGGKPQRRKNPQEGLYNELQKDKMAEAYSEIGMKGERRRGKGHDGLYQGLSTATKDTYDALHMQALPPR

SEQ ID NO: 30439 - protein, 278 aa, synthetic construct
LRDSKSSDKSVCLFTDFDSQTNVSQSKDSDVYITDKTVLDMRSMDFKSNSAVAWSNKSDFACANAFNNSIIGRADCGFTSESYQQGVLSATILYEILLGKATLYAVLVSALVLMAMVKRKDSRGRSKRSRLLHSDYMNMTPRRPGPTRKHYQPYAPPRDFAAYRSRVKFSRSADAPAYQQGQNQLYNELNLGRREEYDVLDKRRGRDPEMGGKPQRRKNPQEGLYNELQKDKMAEAYSEIGMKGERRRGKGHDGLYQGLSTATKDTYDALHMQALPPR

SEQ ID NO: 30440 - protein, 276 aa, synthetic construct
LRDSKSSDKSVCLFTDFDSQTNVSQSKDSDVYITDKTVLDMRSMDFKSNSAVAWSNKSDFACANAFNNSIIADCGFTSESYQQGVLSATILYEILLGKATLYAVLVSALVLMAMVKRKDSRGRSKRSRLLHSDYMNMTPRRPGPTRKHYQPYAPPRDFAAYRSRVKFSRSADAPAYQQGQNQLYNELNLGRREEYDVLDKRRGRDPEMGGKPQRRKNPQEGLYNELQKDKMAEAYSEIGMKGERRRGKGHDGLYQGLSTATKDTYDALHMQALPPR

SEQ ID NO: 30441 - protein, 286 aa, synthetic construct
LRDSKSSDKSVCLFTDFDSQTNVSQSKDSDVYITDKTVLDMRSMDFKSNSAVAWSNKSDFACANAFNNSIIQIVSAEAWGRADCGFTSESYQQGVLSATILYEILLGKATLYAVLVSALVLMAMVKRKDSRGRSKRSRLLHSDYMNMTPRRPGPTRKHYQPYAPPRDFAAYRSRVKFSRSADAPAYQQGQNQLYNELNLGRREEYDVLDKRRGRDPEMGGKPQRRKNPQEGLYNELQKDKMAEAYSEIGMKGERRRGKGHDGLYQGLSTATKDTYDALHMQALPPR

SEQ ID NO: 30442 - protein, 294 aa, synthetic construct
LRDSKSSDKSVCLFTDFDSQTNVSQSKDSDVYITDKTVLDMRSMDFKSNSAVAWSNKSDFACANAFNNSIIFPPIKTDVITMDPKDNCSKDANDTLLLQLTNTSAYYMYLLLLLKSVVYFAIITCCLLRRTAFCCNGEKSRSKRSRLLHSDYMNMTPRRPGPTRKHYQPYAPPRDFAAYRSRVKFSRSADAPAYQQGQNQLYNELNLGRREEYDVLDKRRGRDPEMGGKPQRRKNPQEGLYNELQKDKMAEAYSEIGMKGERRRGKGHDGLYQGLSTATKDTYDALHMQALPPR

SEQ ID NO: 30443 - protein, 292 aa, synthetic construct
LRDSKSSDKSVCLFTDFDSQTNVSQSKDSDVYITDKTVLDMRSMDFKSNSAVAWSNKSDFACANAFNNSIIPIKTDVITMDPKDNCSKDANDTLLLQLTNTSAYYMYLLLLLKSVVYFAIITCCLLRRTAFCCNGEKSRSKRSRLLHSDYMNMTPRRPGPTRKHYQPYAPPRDFAAYRSRVKFSRSADAPAYQQGQNQLYNELNLGRREEYDVLDKRRGRDPEMGGKPQRRKNPQEGLYNELQKDKMAEAYSEIGMKGERRRGKGHDGLYQGLSTATKDTYDALHMQALPPR

SEQ ID NO: 30444 - protein, 284 aa, synthetic construct
LRDSKSSDKSVCLFTDFDSQTNVSQSKDSDVYITDKTVLDMRSMDFKSNSAVAWSNKSDFACANAFNNSIIMDPKDNCSKDANDTLLLQLTNTSAYYMYLLLLLKSVVYFAIITCCLLRRTAFCCNGEKSRSKRSRLLHSDYMNMTPRRPGPTRKHYQPYAPPRDFAAYRSRVKFSRSADAPAYQQGQNQLYNELNLGRREEYDVLDKRRGRDPEMGGKPQRRKNPQEGLYNELQKDKMAEAYSEIGMKGERRRGKGHDGLYQGLSTATKDTYDALHMQALPPR

SEQ ID NO: 30445 - protein, 292 aa, synthetic construct; identical to SEQ ID NO: 30443

SEQ ID NO: 30446 - protein, 278 aa, synthetic construct
LRDSKSSDKSVCLFTDFDSQTNVSQSKDSDVYITDKTVLDMRSMDFKSNSAVAWSNKSDFACANAFNNSIICSKDANDTLLLQLTNTSAYYMYLLLLLKSVVYFAIITCCLLRRTAFCCNGEKSRSKRSRLLHSDYMNMTPRRPGPTRKHYQPYAPPRDFAAYRSRVKFSRSADAPAYQQGQNQLYNELNLGRREEYDVLDKRRGRDPEMGGKPQRRKNPQEGLYNELQKDKMAEAYSEIGMKGERRRGKGHDGLYQGLSTATKDTYDALHMQALPPR

SEQ ID NO: 30447 - protein, 293 aa, synthetic construct
LRDSKSSDKSVCLFTDFDSQTNVSQSKDSDVYITDKTVLDMRSMDFKSNSAVAWSNKSDFACANAFNNSIIEVKTDSTDHVKPKETENTKQPSKSCHKPKAIVHTEKVNMMSLTVLGLRMLFAKTVAVNFLLTAKLFFLRSKRSRLLHSDYMNMTPRRPGPTRKHYQPYAPPRDFAAYRSRVKFSRSADAPAYQQGQNQLYNELNLGRREEYDVLDKRRGRDPEMGGKPQRRKNPQEGLYNELQKDKMAEAYSEIGMKGERRRGKGHDGLYQGLSTATKDTYDALHMQALPPR

SEQ ID NO: 30448 - protein, 286 aa, synthetic construct
LRDSKSSDKSVCLFTDFDSQTNVSQSKDSDVYITDKTVLDMRSMDFKSNSAVAWSNKSDFACANAFNNSIIDHVKPKETENTKQPSKSCHKPKAIVHTEKVNMMSLTVLGLRMLFAKTVAVNFLLTAKLFFLRSKRSRLLHSDYMNMTPRRPGPTRKHYQPYAPPRDFAAYRSRVKFSRSADAPAYQQGQNQLYNELNLGRREEYDVLDKRRGRDPEMGGKPQRRKNPQEGLYNELQKDKMAEAYSEIGMKGERRRGKGHDGLYQGLSTATKDTYDALHMQALPPR

SEQ ID NO: 30449 - protein, 291 aa, synthetic construct; identical to SEQ ID NO: 30429

SEQ ID NO: 30450 - protein, 289 aa, synthetic construct; identical to SEQ ID NO: 30430

SEQ ID NO: 30451 - protein, 299 aa, synthetic construct; identical to SEQ ID NO: 30431

SEQ ID NO: 30452 - protein, 307 aa, synthetic construct; identical to SEQ ID NO: 30432

SEQ ID NO: 30453 - protein, 305 aa, synthetic construct; identical to SEQ ID NO: 30433

SEQ ID NO: 30454 - protein, 297 aa, synthetic construct; identical to SEQ ID NO: 30434

SEQ ID NO: 30455 - protein, 305 aa, synthetic construct; identical to SEQ ID NO: 30433

SEQ ID NO: 30456 - protein, 291 aa, synthetic construct; identical to SEQ ID NO: 30436

SEQ ID NO: 30457 - protein, 306 aa, synthetic construct; identical to SEQ ID NO: 30437

SEQ ID NO: 30458 - protein, 299 aa, synthetic construct; identical to SEQ ID NO: 30438

SEQ ID NO: 30459 - protein, 331 aa, synthetic construct
EVAVFEPSEAEISHTQKATLVCLATGFYPDHVELSWWVNGKEVHSGVSTDPQPLKEQPALNDSRYCLSSRLRVSATFWQNPRNHFRCQVQFYGLSENDEWTQDRAKPVTQIVSAEAWIPEDTFFPSPESSCDVKLVEKSFETDTNLNFQNLSVIGFRILLLKVAGFNLLMTLRLWSSRSKRSRLLHSDYMNMTPRRPGPTRKHYQPYAPPRDFAAYRSRVKFSRSADAPAYQQGQNQLYNELNLGRREEYDVLDKRRGRDPEMGGKPQRRKNPQEGLYNELQKDKMAEAYSEIGMKGERRRGKGHDGLYQGLSTATKDTYDALHMQALPPR

SEQ ID NO: 30460 - protein, 321 aa, synthetic construct
EVAVFEPSEAEISHTQKATLVCLATGFYPDHVELSWWVNGKEVHSGVSTDPQPLKEQPALNDSRYCLSSRLRVSATFWQNPRNHFRCQVQFYGLSENDEWTQDRAKPVTQIVSAEAWESSCDVKLVEKSFETDTNLNFQNLSVIGFRILLLKVAGFNLLMTLRLWSSRSKRSRLLHSDYMNMTPRRPGPTRKHYQPYAPPRDFAAYRSRVKFSRSADAPAYQQGQNQLYNELNLGRREEYDVLDKRRGRDPEMGGKPQRRKNPQEGLYNELQKDKMAEAYSEIGMKGERRRGKGHDGLYQGLSTATKDTYDALHMQALPPR

SEQ ID NO: 30461 - protein, 330 aa, synthetic construct
EVAVFEPSEAEISHTQKATLVCLATGFYPDHVELSWWVNGKEVHSGVSTDPQPLKEQPALNDSRYCLSSRLRVSATFWQNPRNHFRCQVQFYGLSENDEWTQDRAKPVTQIVSAEAWPEDTFFPSPESSCDVKLVEKSFETDTNLNFQNLSVIGFRILLLKVAGFNLLMTLRLWSSRSKRSRLLHSDYMNMTPRRPGPTRKHYQPYAPPRDFAAYRSRVKFSRSADAPAYQQGQNQLYNELNLGRREEYDVLDKRRGRDPEMGGKPQRRKNPQEGLYNELQKDKMAEAYSEIGMKGERRRGKGHDGLYQGLSTATKDTYDALHMQALPPR

SEQ ID NO: 30462 - protein, 340 aa, synthetic construct
EVAVFEPSEAEISHTQKATLVCLATGFYPDHVELSWWVNGKEVHSGVSTDPQPLKEQPALNDSRYCLSSRLRVSATFWQNPRNHFRCQVQFYGLSENDEWTQDRAKPVTQIVSAEAWFPPIKTDVITMDPKDNCSKDANDTLLLQLTNTSAYYMYLLLLLKSVVYFAIITCCLLRRTAFCCNGEKSRSKRSRLLHSDYMNMTPRRPGPTRKHYQPYAPPRDFAAYRSRVKFSRSADAPAYQQGQNQLYNELNLGRREEYDVLDKRRGRDPEMGGKPQRRKNPQEGLYNELQKDKMAEAYSEIGMKGERRRGKGHDGLYQGLSTATKDTYDALHMQALPPR

SEQ ID NO: 30463 - protein, 338 aa, synthetic construct
EVAVFEPSEAEISHTQKATLVCLATGFYPDHVELSWWVNGKEVHSGVSTDPQPLKEQPALNDSRYCLSSRLRVSATFWQNPRNHFRCQVQFYGLSENDEWTQDRAKPVTQIVSAEAWPIKTDVITMDPKDNCSKDANDTLLLQLTNTSAYYMYLLLLLKSVVYFAIITCCLLRRTAFCCNGEKSRSKRSRLLHSDYMNMTPRRPGPTRKHYQPYAPPRDFAAYRSRVKFSRSADAPAYQQGQNQLYNELNLGRREEYDVLDKRRGRDPEMGGKPQRRKNPQEGLYNELQKDKMAEAYSEIGMKGERRRGKGHDGLYQGLSTATKDTYDALHMQALPPR

SEQ ID NO: 30464 - protein, 330 aa, synthetic construct
EVAVFEPSEAEISHTQKATLVCLATGFYPDHVELSWWVNGKEVHSGVSTDPQPLKEQPALNDSRYCLSSRLRVSATFWQNPRNHFRCQVQFYGLSENDEWTQDRAKPVTQIVSAEAWMDPKDNCSKDANDTLLLQLTNTSAYYMYLLLLLKSVVYFAIITCCLLRRTAFCCNGEKSRSKRSRLLHSDYMNMTPRRPGPTRKHYQPYAPPRDFAAYRSRVKFSRSADAPAYQQGQNQLYNELNLGRREEYDVLDKRRGRDPEMGGKPQRRKNPQEGLYNELQKDKMAEAYSEIGMKGERRRGKGHDGLYQGLSTATKDTYDALHMQALPPR

SEQ ID NO: 30465 - protein, 338 aa, synthetic construct; identical to SEQ ID NO: 30463

SEQ ID NO: 30466 - protein, 324 aa, synthetic construct
EVAVFEPSEAEISHTQKATLVCLATGFYPDHVELSWWVNGKEVHSGVSTDPQPLKEQPALNDSRYCLSSRLRVSATFWQNPRNHFRCQVQFYGLSENDEWTQDRAKPVTQIVSAEAWCSKDANDTLLLQLTNTSAYYMYLLLLLKSVVYFAIITCCLLRRTAFCCNGEKSRSKRSRLLHSDYMNMTPRRPGPTRKHYQPYAPPRDFAAYRSRVKFSRSADAPAYQQGQNQLYNELNLGRREEYDVLDKRRGRDPEMGGKPQRRKNPQEGLYNELQKDKMAEAYSEIGMKGERRRGKGHDGLYQGLSTATKDTYDALHMQALPPR

SEQ ID NO: 30467 - protein, 339 aa, synthetic construct
EVAVFEPSEAEISHTQKATLVCLATGFYPDHVELSWWVNGKEVHSGVSTDPQPLKEQPALNDSRYCLSSRLRVSATFWQNPRNHFRCQVQFYGLSENDEWTQDRAKPVTQIVSAEAWEVKTDSTDHVKPKETENTKQPSKSCHKPKAIVHTEKVNMMSLTVLGLRMLFAKTVAVNFLLTAKLFFLRSKRSRLLHSDYMNMTPRRPGPTRKHYQPYAPPRDFAAYRSRVKFSRSADAPAYQQGQNQLYNELNLGRREEYDVLDKRRGRDPEMGGKPQRRKNPQEGLYNELQKDKMAEAYSEIGMKGERRRGKGHDGLYQGLSTATKDTYDALHMQALPPR

SEQ ID NO: 30468 - protein, 332 aa, synthetic construct
EVAVFEPSEAEISHTQKATLVCLATGFYPDHVELSWWVNGKEVHSGVSTDPQPLKEQPALNDSRYCLSSRLRVSATFWQNPRNHFRCQVQFYGLSENDEWTQDRAKPVTQIVSAEAWDHVKPKETENTKQPSKSCHKPKAIVHTEKVNMMSLTVLGLRMLFAKTVAVNFLLTAKLFFLRSKRSRLLHSDYMNMTPRRPGPTRKHYQPYAPPRDFAAYRSRVKFSRSADAPAYQQGQNQLYNELNLGRREEYDVLDKRRGRDPEMGGKPQRRKNPQEGLYNELQKDKMAEAYSEIGMKGERRRGKGHDGLYQGLSTATKDTYDALHMQALPPR

SEQ ID NO: 30469 - protein, 333 aa, synthetic construct
EVAVFEPSEAEISHTQKATLVCLATGFYPDHVELSWWVNGKEVHSGVSTDPQPLKEQPALNDSRYCLSSRLRVSATFWQNPRNHFRCQVQFYGLSENDEWTQDRAKPVTQIVSAEAWGRIPEDTFFPSPESSCDVKLVEKSFETDTNLNFQNLSVIGFRILLLKVAGFNLLMTLRLWSSRSKRSRLLHSDYMNMTPRRPGPTRKHYQPYAPPRDFAAYRSRVKFSRSADAPAYQQGQNQLYNELNLGRREEYDVLDKRRGRDPEMGGKPQRRKNPQEGLYNELQKDKMAEAYSEIGMKGERRRGKGHDGLYQGLSTATKDTYDALHMQALPPR

SEQ ID NO: 30470 - protein, 323 aa, synthetic construct
EVAVFEPSEAEISHTQKATLVCLATGFYPDHVELSWWVNGKEVHSGVSTDPQPLKEQPALNDSRYCLSSRLRVSATFWQNPRNHFRCQVQFYGLSENDEWTQDRAKPVTQIVSAEAWGRESSCDVKLVEKSFETDTNLNFQNLSVIGFRILLLKVAGFNLLMTLRLWSSRSKRSRLLHSDYMNMTPRRPGPTRKHYQPYAPPRDFAAYRSRVKFSRSADAPAYQQGQNQLYNELNLGRREEYDVLDKRRGRDPEMGGKPQRRKNPQEGLYNELQKDKMAEAYSEIGMKGERRRGKGHDGLYQGLSTATKDTYDALHMQALPPR

SEQ ID NO: 30471 - protein, 332 aa, synthetic construct
EVAVFEPSEAEISHTQKATLVCLATGFYPDHVELSWWVNGKEVHSGVSTDPQPLKEQPALNDSRYCLSSRLRVSATFWQNPRNHFRCQVQFYGLSENDEWTQDRAKPVTQIVSAEAWGRPEDTFFPSPESSCDVKLVEKSFETDTNLNFQNLSVIGFRILLLKVAGFNLLMTLRLWSSRSKRSRLLHSDYMNMTPRRPGPTRKHYQPYAPPRDFAAYRSRVKFSRSADAPAYQQGQNQLYNELNLGRREEYDVLDKRRGRDPEMGGKPQRRKNPQEGLYNELQKDKMAEAYSEIGMKGERRRGKGHDGLYQGLSTATKDTYDALHMQALPPR

SEQ ID NO: 30472 - protein, 342 aa, synthetic construct
EVAVFEPSEAEISHTQKATLVCLATGFYPDHVELSWWVNGKEVHSGVSTDPQPLKEQPALNDSRYCLSSRLRVSATFWQNPRNHFRCQVQFYGLSENDEWTQDRAKPVTQIVSAEAWGRFPPIKTDVITMDPKDNCSKDANDTLLLQLTNTSAYYMYLLLLLKSVVYFAIITCCLLRRTAFCCNGEKSRSKRSRLLHSDYMNMTPRRPGPTRKHYQPYAPPRDFAAYRSRVKFSRSADAPAYQQGQNQLYNELNLGRREEYDVLDKRRGRDPEMGGKPQRRKNPQEGLYNELQKDKMAEAYSEIGMKGERRRGKGHDGLYQGLSTATKDTYDALHMQALPPR

SEQ ID NO: 30473 - protein, 340 aa, synthetic construct
EVAVFEPSEAEISHTQKATLVCLATGFYPDHVELSWWVNGKEVHSGVSTDPQPLKEQPALNDSRYCLSSRLRVSATFWQNPRNHFRCQVQFYGLSENDEWTQDRAKPVTQIVSAEAWGRPIKTDVITMDPKDNCSKDANDTLLLQLTNTSAYYMYLLLLLKSVVYFAIITCCLLRRTAFCCNGEKSRSKRSRLLHSDYMNMTPRRPGPTRKHYQPYAPPRDFAAYRSRVKFSRSADAPAYQQGQNQLYNELNLGRREEYDVLDKRRGRDPEMGGKPQRRKNPQEGLYNELQKDKMAEAYSEIGMKGERRRGKGHDGLYQGLSTATKDTYDALHMQALPPR

SEQ ID NO: 30474 - protein, 332 aa, synthetic construct
EVAVFEPSEAEISHTQKATLVCLATGFYPDHVELSWWVNGKEVHSGVSTDPQPLKEQPALNDSRYCLSSRLRVSATFWQNPRNHFRCQVQFYGLSENDEWTQDRAKPVTQIVSAEAWGRMDPKDNCSKDANDTLLLQLTNTSAYYMYLLLLLKSVVYFAIITCCLLRRTAFCCNGEKSRSKRSRLLHSDYMNMTPRRPGPTRKHYQPYAPPRDFAAYRSRVKFSRSADAPAYQQGQNQLYNELNLGRREEYDVLDKRRGRDPEMGGKPQRRKNPQEGLYNELQKDKMAEAYSEIGMKGERRRGKGHDGLYQGLSTATKDTYDALHMQALPPR

SEQ ID NO: 30475 - protein, 340 aa, synthetic construct; identical to SEQ ID NO: 30473

SEQ ID NO: 30476 - protein, 326 aa, synthetic construct
EVAVFEPSEAEISHTQKATLVCLATGFYPDHVELSWWVNGKEVHSGVSTDPQPLKEQPALNDSRYCLSSRLRVSATFWQNPRNHFRCQVQFYGLSENDEWTQDRAKPVTQIVSAEAWGRCSKDANDTLLLQLTNTSAYYMYLLLLLKSVVYFAIITCCLLRRTAFCCNGEKSRSKRSRLLHSDYMNMTPRRPGPTRKHYQPYAPPRDFAAYRSRVKFSRSADAPAYQQGQNQLYNELNLGRREEYDVLDKRRGRDPEMGGKPQRRKNPQEGLYNELQKDKMAEAYSEIGMKGERRRGKGHDGLYQGLSTATKDTYDALHMQALPPR

SEQ ID NO: 30477 - protein, 341 aa, synthetic construct
EVAVFEPSEAEISHTQKATLVCLATGFYPDHVELSWWVNGKEVHSGVSTDPQPLKEQPALNDSRYCLSSRLRVSATFWQNPRNHFRCQVQFYGLSENDEWTQDRAKPVTQIVSAEAWGREVKTDSTDHVKPKETENTKQPSKSCHKPKAIVHTEKVNMMSLTVLGLRMLFAKTVAVNFLLTAKLFFLRSKRSRLLHSDYMNMTPRRPGPTRKHYQPYAPPRDFAAYRSRVKFSRSADAPAYQQGQNQLYNELNLGRREEYDVLDKRRGRDPEMGGKPQRRKNPQEGLYNELQKDKMAEAYSEIGMKGERRRGKGHDGLYQGLSTATKDTYDALHMQALPPR

SEQ ID NO: 30478 - protein, 334 aa, synthetic construct
EVAVFEPSEAEISHTQKATLVCLATGFYPDHVELSWWVNGKEVHSGVSTDPQPLKEQPALNDSRYCLSSRLRVSATFWQNPRNHFRCQVQFYGLSENDEWTQDRAKPVTQIVSAEAWGRDHVKPKETENTKQPSKSCHKPKAIVHTEKVNMMSLTVLGLRMLFAKTVAVNFLLTAKLFFLRSKRSRLLHSDYMNMTPRRPGPTRKHYQPYAPPRDFAAYRSRVKFSRSADAPAYQQGQNQLYNELNLGRREEYDVLDKRRGRDPEMGGKPQRRKNPQEGLYNELQKDKMAEAYSEIGMKGERRRGKGHDGLYQGLSTATKDTYDALHMQALPPR

SEQ ID NO: 30479 - protein, 336 aa, synthetic construct
EVAVFEPSEAEISHTQKATLVCLATGFYPDHVELSWWVNGKEVHSGVSTDPQPLKEQPALNDSRYCLSSRLRVSATFWQNPRNHFRCQVQFYGLSENDEWTQDRAKPVTQIVSAEAWGRADCIPEDTFFPSPESSCDVKLVEKSFETDTNLNFQNLSVIGFRILLLKVAGFNLLMTLRLWSSRSKRSRLLHSDYMNMTPRRPGPTRKHYQPYAPPRDFAAYRSRVKFSRSADAPAYQQGQNQLYNELNLGRREEYDVLDKRRGRDPEMGGKPQRRKNPQEGLYNELQKDKMAEAYSEIGMKGERRRGKGHDGLYQGLSTATKDTYDALHMQALPPR

SEQ ID NO: 30480 - protein, 326 aa, synthetic construct
EVAVFEPSEAEISHTQKATLVCLATGFYPDHVELSWWVNGKEVHSGVSTDPQPLKEQPALNDSRYCLSSRLRVSATFWQNPRNHFRCQVQFYGLSENDEWTQDRAKPVTQIVSAEAWGRADCESSCDVKLVEKSFETDTNLNFQNLSVIGFRILLLKVAGFNLLMTLRLWSSRSKRSRLLHSDYMNMTPRRPGPTRKHYQPYAPPRDFAAYRSRVKFSRSADAPAYQQGQNQLYNELNLGRREEYDVLDKRRGRDPEMGGKPQRRKNPQEGLYNELQKDKMAEAYSEIGMKGERRRGKGHDGLYQGLSTATKDTYDALHMQALPPR

SEQ ID NO: 30481 - protein, 335 aa, synthetic construct
EVAVFEPSEAEISHTQKATLVCLATGFYPDHVELSWWVNGKEVHSGVSTDPQPLKEQPALNDSRYCLSSRLRVSATFWQNPRNHFRCQVQFYGLSENDEWTQDRAKPVTQIVSAEAWGRADCPEDTFFPSPESSCDVKLVEKSFETDTNLNFQNLSVIGFRILLLKVAGFNLLMTLRLWSSRSKRSRLLHSDYMNMTPRRPGPTRKHYQPYAPPRDFAAYRSRVKFSRSADAPAYQQGQNQLYNELNLGRREEYDVLDKRRGRDPEMGGKPQRRKNPQEGLYNELQKDKMAEAYSEIGMKGERRRGKGHDGLYQGLSTATKDTYDALHMQALPPR

SEQ ID NO: 30482 - protein, 345 aa, synthetic construct
EVAVFEPSEAEISHTQKATLVCLATGFYPDHVELSWWVNGKEVHSGVSTDPQPLKEQPALNDSRYCLSSRLRVSATFWQNPRNHFRCQVQFYGLSENDEWTQDRAKPVTQIVSAEAWGRADCFPPIKTDVITMDPKDNCSKDANDTLLLQLTNTSAYYMYLLLLLKSVVYFAIITCCLLRRTAFCCNGEKSRSKRSRLLHSDYMNMTPRRPGPTRKHYQPYAPPRDFAAYRSRVKFSRSADAPAYQQGQNQLYNELNLGRREEYDVLDKRRGRDPEMGGKPQRRKNPQEGLYNELQKDKMAEAYSEIGMKGERRRGKGHDGLYQGLSTATKDTYDALHMQALPPR

SEQ ID NO: 30483 - protein, 343 aa, synthetic construct
EVAVFEPSEAEISHTQKATLVCLATGFYPDHVELSWWVNGKEVHSGVSTDPQPLKEQPALNDSRYCLSSRLRVSATFWQNPRNHFRCQVQFYGLSENDEWTQDRAKPVTQIVSAEAWGRADCPIKTDVITMDPKDNCSKDANDTLLLQLTNTSAYYMYLLLLLKSVVYFAIITCCLLRRTAFCCNGEKSRSKRSRLLHSDYMNMTPRRPGPTRKHYQPYAPPRDFAAYRSRVKFSRSADAPAYQQGQNQLYNELNLGRREEYDVLDKRRGRDPEMGGKPQRRKNPQEGLYNELQKDKMAEAYSEIGMKGERRRGKGHDGLYQGLSTATKDTYDALHMQALPPR

SEQ ID NO: 30484 - protein, 335 aa, synthetic construct
EVAVFEPSEAEISHTQKATLVCLATGFYPDHVELSWWVNGKEVHSGVSTDPQPLKEQPALNDSRYCLSSRLRVSATFWQNPRNHFRCQVQFYGLSENDEWTQDRAKPVTQIVSAEAWGRADCMDPKDNCSKDANDTLLLQLTNTSAYYMYLLLLLKSVVYFAIITCCLLRRTAFCCNGEKSRSKRSRLLHSDYMNMTPRRPGPTRKHYQPYAPPRDFAAYRSRVKFSRSADAPAYQQGQNQLYNELNLGRREEYDVLDKRRGRDPEMGGKPQRRKNPQEGLYNELQKDKMAEAYSEIGMKGERRRGKGHDGLYQGLSTATKDTYDALHMQALPPR

SEQ ID NO: 30485 - protein, 343 aa, synthetic construct; identical to SEQ ID NO: 30483

SEQ ID NO: 30486 - protein, 329 aa, synthetic construct
EVAVFEPSEAEISHTQKATLVCLATGFYPDHVELSWWVNGKEVHSGVSTDPQPLKEQPALNDSRYCLSSRLRVSATFWQNPRNHFRCQVQFYGLSENDEWTQDRAKPVTQIVSAEAWGRADCCSKDANDTLLLQLTNTSAYYMYLLLLLKSVVYFAIITCCLLRRTAFCCNGEKSRSKRSRLLHSDYMNMTPRRPGPTRKHYQPYAPPRDFAAYRSRVKFSRSADAPAYQQGQNQLYNELNLGRREEYDVLDKRRGRDPEMGGKPQRRKNPQEGLYNELQKDKMAEAYSEIGMKGERRRGKGHDGLYQGLSTATKDTYDALHMQALPPR

SEQ ID NO: 30487 - protein, 344 aa, synthetic construct
EVAVFEPSEAEISHTQKATLVCLATGFYPDHVELSWWVNGKEVHSGVSTDPQPLKEQPALNDSRYCLSSRLRVSATFWQNPRNHFRCQVQFYGLSENDEWTQDRAKPVTQIVSAEAWGRADCEVKTDSTDHVKPKETENTKQPSKSCHKPKAIVHTEKVNMMSLTVLGLRMLFAKTVAVNFLLTAKLFFLRSKRSRLLHSDYMNMTPRRPGPTRKHYQPYAPPRDFAAYRSRVKFSRSADAPAYQQGQNQLYNELNLGRREEYDVLDKRRGRDPEMGGKPQRRKNPQEGLYNELQKDKMAEAYSEIGMKGERRRGKGHDGLYQGLSTATKDTYDALHMQALPPR

SEQ ID NO: 30488 - protein, 337 aa, synthetic construct
EVAVFEPSEAEISHTQKATLVCLATGFYPDHVELSWWVNGKEVHSGVSTDPQPLKEQPALNDSRYCLSSRLRVSATFWQNPRNHFRCQVQFYGLSENDEWTQDRAKPVTQIVSAEAWGRADCDHVKPKETENTKQPSKSCHKPKAIVHTEKVNMMSLTVLGLRMLFAKTVAVNFLLTAKLFFLRSKRSRLLHSDYMNMTPRRPGPTRKHYQPYAPPRDFAAYRSRVKFSRSADAPAYQQGQNQLYNELNLGRREEYDVLDKRRGRDPEMGGKPQRRKNPQEGLYNELQKDKMAEAYSEIGMKGERRRGKGHDGLYQGLSTATKDTYDALHMQALPPR

SEQ ID NO: 30489 - protein, 323 aa, synthetic construct
EVAVFEPSEAEISHTQKATLVCLATGFYPDHVELSWWVNGKEVHSGVSTDPQPLKEQPALNDSRYCLSSRLRVSATFWQNPRNHFRCQVQFYGLSENDEWTQDRAKPVTIPEDTFFPSPESSCDVKLVEKSFETDTNLNFQNLSVIGFRILLLKVAGFNLLMTLRLWSSRSKRSRLLHSDYMNMTPRRPGPTRKHYQPYAPPRDFAAYRSRVKFSRSADAPAYQQGQNQLYNELNLGRREEYDVLDKRRGRDPEMGGKPQRRKNPQEGLYNELQKDKMAEAYSEIGMKGERRRGKGHDGLYQGLSTATKDTYDALHMQALPPR

SEQ ID NO: 30490 - protein, 313 aa, synthetic construct
EVAVFEPSEAEISHTQKATLVCLATGFYPDHVELSWWVNGKEVHSGVSTDPQPLKEQPALNDSRYCLSSRLRVSATFWQNPRNHFRCQVQFYGLSENDEWTQDRAKPVTESSCDVKLVEKSFETDTNLNFQNLSVIGFRILLLKVAGFNLLMTLRLWSSRSKRSRLLHSDYMNMTPRRPGPTRKHYQPYAPPRDFAAYRSRVKFSRSADAPAYQQGQNQLYNELNLGRREEYDVLDKRRGRDPEMGGKPQRRKNPQEGLYNELQKDKMAEAYSEIGMKGERRRGKGHDGLYQGLSTATKDTYDALHMQALPPR

SEQ ID NO: 30491 - protein, 322 aa, synthetic construct
EVAVFEPSEAEISHTQKATLVCLATGFYPDHVELSWWVNGKEVHSGVSTDPQPLKEQPALNDSRYCLSSRLRVSATFWQNPRNHFRCQVQFYGLSENDEWTQDRAKPVTPEDTFFPSPESSCDVKLVEKSFETDTNLNFQNLSVIGFRILLLKVAGFNLLMTLRLWSSRSKRSRLLHSDYMNMTPRRPGPTRKHYQPYAPPRDFAAYRSRVKFSRSADAPAYQQGQNQLYNELNLGRREEYDVLDKRRGRDPEMGGKPQRRKNPQEGLYNELQKDKMAEAYSEIGMKGERRRGKGHDGLYQGLSTATKDTYDALHMQALPPR

SEQ ID NO: 30492 - protein, 332 aa, synthetic construct
EVAVFEPSEAEISHTQKATLVCLATGFYPDHVELSWWVNGKEVHSGVSTDPQPLKEQPALNDSRYCLSSRLRVSATFWQNPRNHFRCQVQFYGLSENDEWTQDRAKPVTFPPIKTDVITMDPKDNCSKDANDTLLLQLTNTSAYYMYLLLLLKSVVYFAIITCCLLRRTAFCCNGEKSRSKRSRLLHSDYMNMTPRRPGPTRKHYQPYAPPRDFAAYRSRVKFSRSADAPAYQQGQNQLYNELNLGRREEYDVLDKRRGRDPEMGGKPQRRKNPQEGLYNELQKDKMAEAYSEIGMKGERRRGKGHDGLYQGLSTATKDTYDALHMQALPPR

SEQ ID NO: 30493 - protein, 330 aa, synthetic construct
EVAVFEPSEAEISHTQKATLVCLATGFYPDHVELSWWVNGKEVHSGVSTDPQPLKEQPALNDSRYCLSSRLRVSATFWQNPRNHFRCQVQFYGLSENDEWTQDRAKPVTPIKTDVITMDPKDNCSKDANDTLLLQLTNTSAYYMYLLLLLKSVVYFAIITCCLLRRTAFCCNGEKSRSKRSRLLHSDYMNMTPRRPGPTRKHYQPYAPPRDFAAYRSRVKFSRSADAPAYQQGQNQLYNELNLGRREEYDVLDKRRGRDPEMGGKPQRRKNPQEGLYNELQKDKMAEAYSEIGMKGERRRGKGHDGLYQGLSTATKDTYDALHMQALPPR

SEQ ID NO: 30494 - protein, 322 aa, synthetic construct
EVAVFEPSEAEISHTQKATLVCLATGFYPDHVELSWWVNGKEVHSGVSTDPQPLKEQPALNDSRYCLSSRLRVSATFWQNPRNHFRCQVQFYGLSENDEWTQDRAKPVTMDPKDNCSKDANDTLLLQLTNTSAYYMYLLLLLKSVVYFAIITCCLLRRTAFCCNGEKSRSKRSRLLHSDYMNMTPRRPGPTRKHYQPYAPPRDFAAYRSRVKFSRSADAPAYQQGQNQLYNELNLGRREEYDVLDKRRGRDPEMGGKPQRRKNPQEGLYNELQKDKMAEAYSEIGMKGERRRGKGHDGLYQGLSTATKDTYDALHMQALPPR

SEQ ID NO: 30495 - protein, 330 aa, synthetic construct; identical to SEQ ID NO: 30493

SEQ ID NO: 30496 - protein, 316 aa, synthetic construct
EVAVFEPSEAEISHTQKATLVCLATGFYPDHVELSWWVNGKEVHSGVSTDPQPLKEQPALNDSRYCLSSRLRVSATFWQNPRNHFRCQVQFYGLSENDEWTQDRAKPVTCSKDANDTLLLQLTNTSAYYMYLLLLLKSVVYFAIITCCLLRRTAFCCNGEKSRSKRSRLLHSDYMNMTPRRPGPTRKHYQPYAPPRDFAAYRSRVKFSRSADAPAYQQGQNQLYNELNLGRREEYDVLDKRRGRDPEMGGKPQRRKNPQEGLYNELQKDKMAEAYSEIGMKGERRRGKGHDGLYQGLSTATKDTYDALHMQALPPR

SEQ ID NO: 30497 - protein, 331 aa, synthetic construct
EVAVFEPSEAEISHTQKATLVCLATGFYPDHVELSWWVNGKEVHSGVSTDPQPLKEQPALNDSRYCLSSRLRVSATFWQNPRNHFRCQVQFYGLSENDEWTQDRAKPVTEVKTDSTDHVKPKETENTKQPSKSCHKPKAIVHTEKVNMMSLTVLGLRMLFAKTVAVNFLLTAKLFFLRSKRSRLLHSDYMNMTPRRPGPTRKHYQPYAPPRDFAAYRSRVKFSRSADAPAYQQGQNQLYNELNLGRREEYDVLDKRRGRDPEMGGKPQRRKNPQEGLYNELQKDKMAEAYSEIGMKGERRRGKGHDGLYQGLSTATKDTYDALHMQALPPR

SEQ ID NO: 30498 - protein, 324 aa, synthetic construct
EVAVFEPSEAEISHTQKATLVCLATGFYPDHVELSWWVNGKEVHSGVSTDPQPLKEQPALNDSRYCLSSRLRVSATFWQNPRNHFRCQVQFYGLSENDEWTQDRAKPVTDHVKPKETENTKQPSKSCHKPKAIVHTEKVNMMSLTVLGLRMLFAKTVAVNFLLTAKLFFLRSKRSRLLHSDYMNMTPRRPGPTRKHYQPYAPPRDFAAYRSRVKFSRSADAPAYQQGQNQLYNELNLGRREEYDVLDKRRGRDPEMGGKPQRRKNPQEGLYNELQKDKMAEAYSEIGMKGERRRGKGHDGLYQGLSTATKDTYDALHMQALPPR

SEQ ID NO: 30499 - protein, 331 aa, synthetic construct; identical to SEQ ID NO: 30459

SEQ ID NO: 30500 - protein, 321 aa, synthetic construct; identical to SEQ ID NO: 30460

SEQ ID NO: 30501 - protein, 330 aa, synthetic construct; identical to SEQ ID NO: 30461

SEQ ID NO: 30502 - protein, 340 aa, synthetic construct; identical to SEQ ID NO: 30462

SEQ ID NO: 30503 - protein, 338 aa, synthetic construct; identical to SEQ ID NO: 30463

SEQ ID NO: 30504 - protein, 330 aa, synthetic construct; identical to SEQ ID NO: 30464

SEQ ID NO: 30505 - protein, 338 aa, synthetic construct; identical to SEQ ID NO: 30463

SEQ ID NO: 30506 - protein, 324 aa, synthetic construct; identical to SEQ ID NO: 30466

SEQ ID NO: 30507 - protein, 339 aa, synthetic construct; identical to SEQ ID NO: 30467

SEQ ID NO: 30508 - protein, 332 aa, synthetic construct; identical to SEQ ID NO: 30468

SEQ ID NO: 30509 - protein, 324 aa, synthetic construct; identical to SEQ ID NO: 30294

SEQ ID NO: 30510 - protein, 314 aa, synthetic construct; identical to SEQ ID NO: 30295

SEQ ID NO: 30511 - protein, 323 aa, synthetic construct; identical to SEQ ID NO: 30296

SEQ ID NO: 30512 - protein, 333 aa, synthetic construct; identical to SEQ ID NO: 30297

SEQ ID NO: 30513 - protein, 331 aa, synthetic construct; identical to SEQ ID NO: 30298

SEQ ID NO: 30514 - protein, 323 aa, synthetic construct; identical to SEQ ID NO: 30299

SEQ ID NO: 30515 - protein, 331 aa, synthetic construct; identical to SEQ ID NO: 30298

SEQ ID NO: 30516 - protein, 317 aa, synthetic construct; identical to SEQ ID NO: 30301

SEQ ID NO: 30517 - protein, 332 aa, synthetic construct; identical to SEQ ID NO: 30302

SEQ ID NO: 30518 - protein, 325 aa, synthetic construct; identical to SEQ ID NO: 30303

SEQ ID NO: 30519 - protein, 313 aa, synthetic construct
ADVSPKPTIFLPSIAETKLQKAGTYLCLLEKFFPDVIKIHWQEKKSNTILGSQEGNTMKTNDTYMKFSWLTVPEKSLDKEHRCIVRHENNKNGVDQEIIIPEDTFFPSPESSCDVKLVEKSFETDTNLNFQNLSVIGFRILLLKVAGFNLLMTLRLWSSRSKRSRLLHSDYMNMTPRRPGPTRKHYQPYAPPRDFAAYRSRVKFSRSADAPAYQQGQNQLYNELNLGRREEYDVLDKRRGRDPEMGGKPQRRKNPQEGLYNELQKDKMAEAYSEIGMKGERRRGKGHDGLYQGLSTATKDTYDALHMQALPPR

SEQ ID NO: 30520 - protein, 303 aa, synthetic construct
ADVSPKPTIFLPSIAETKLQKAGTYLCLLEKFFPDVIKIHWQEKKSNTILGSQEGNTMKTNDTYMKFSWLTVPEKSLDKEHRCIVRHENNKNGVDQEIIESSCDVKLVEKSFETDTNLNFQNLSVIGFRILLLKVAGFNLLMTLRLWSSRSKRSRLLHSDYMNMTPRRPGPTRKHYQPYAPPRDFAAYRSRVKFSRSADAPAYQQGQNQLYNELNLGRREEYDVLDKRRGRDPEMGGKPQRRKNPQEGLYNELQKDKMAEAYSEIGMKGERRRGKGHDGLYQGLSTATKDTYDALHMQALPPR

SEQ ID NO: 30521 - protein, 312 aa, synthetic construct
ADVSPKPTIFLPSIAETKLQKAGTYLCLLEKFFPDVIKIHWQEKKSNTILGSQEGNTMKTNDTYMKFSWLTVPEKSLDKEHRCIVRHENNKNGVDQEIIPEDTFFPSPESSCDVKLVEKSFETDTNLNFQNLSVIGFRILLLKVAGFNLLMTLRLWSSRSKRSRLLHSDYMNMTPRRPGPTRKHYQPYAPPRDFAAYRSRVKFSRSADAPAYQQGQNQLYNELNLGRREEYDVLDKRRGRDPEMGGKPQRRKNPQEGLYNELQKDKMAEAYSEIGMKGERRRGKGHDGLYQGLSTATKDTYDALHMQALPPR

SEQ ID NO: 30522 - protein, 306 aa, synthetic construct
ADVSPKPTIFLPSIAETKLQKAGTYLCLLEKFFPDVIKIHWQEKKSNTILGSQEGNTMKTNDTYMKFSWLTVPEKSLDKEHRCIVRHENNKNGVDQEIIGRADCGFTSESYQQGVLSATILYEILLGKATLYAVLVSALVLMAMVKRKDSRGRSKRSRLLHSDYMNMTPRRPGPTRKHYQPYAPPRDFAAYRSRVKFSRSADAPAYQQGQNQLYNELNLGRREEYDVLDKRRGRDPEMGGKPQRRKNPQEGLYNELQKDKMAEAYSEIGMKGERRRGKGHDGLYQGLSTATKDTYDALHMQALPPR

SEQ ID NO: 30523 - protein, 304 aa, synthetic construct
ADVSPKPTIFLPSIAETKLQKAGTYLCLLEKFFPDVIKIHWQEKKSNTILGSQEGNTMKTNDTYMKFSWLTVPEKSLDKEHRCIVRHENNKNGVDQEIIADCGFTSESYQQGVLSATILYEILLGKATLYAVLVSALVLMAMVKRKDSRGRSKRSRLLHSDYMNMTPRRPGPTRKHYQPYAPPRDFAAYRSRVKFSRSADAPAYQQGQNQLYNELNLGRREEYDVLDKRRGRDPEMGGKPQRRKNPQEGLYNELQKDKMAEAYSEIGMKGERRRGKGHDGLYQGLSTATKDTYDALHMQALPPR

SEQ ID NO: 30524 - protein, 314 aa, synthetic construct
ADVSPKPTIFLPSIAETKLQKAGTYLCLLEKFFPDVIKIHWQEKKSNTILGSQEGNTMKTNDTYMKFSWLTVPEKSLDKEHRCIVRHENNKNGVDQEIIQIVSAEAWGRADCGFTSESYQQGVLSATILYEILLGKATLYAVLVSALVLMAMVKRKDSRGRSKRSRLLHSDYMNMTPRRPGPTRKHYQPYAPPRDFAAYRSRVKFSRSADAPAYQQGQNQLYNELNLGRREEYDVLDKRRGRDPEMGGKPQRRKNPQEGLYNELQKDKMAEAYSEIGMKGERRRGKGHDGLYQGLSTATKDTYDALHMQALPPR

SEQ ID NO: 30525 - protein, 321 aa, synthetic construct
ADVSPKPTIFLPSIAETKLQKAGTYLCLLEKFFPDVIKIHWQEKKSNTILGSQEGNTMKTNDTYMKFSWLTVPEKSLDKEHRCIVRHENNKNGVDQEIIEVKTDSTDHVKPKETENTKQPSKSCHKPKAIVHTEKVNMMSLTVLGLRMLFAKTVAVNFLLTAKLFFLRSKRSRLLHSDYMNMTPRRPGPTRKHYQPYAPPRDFAAYRSRVKFSRSADAPAYQQGQNQLYNELNLGRREEYDVLDKRRGRDPEMGGKPQRRKNPQEGLYNELQKDKMAEAYSEIGMKGERRRGKGHDGLYQGLSTATKDTYDALHMQALPPR

SEQ ID NO: 30526 - protein, 314 aa, synthetic construct
ADVSPKPTIFLPSIAETKLQKAGTYLCLLEKFFPDVIKIHWQEKKSNTILGSQEGNTMKTNDTYMKFSWLTVPEKSLDKEHRCIVRHENNKNGVDQEIIDHVKPKETENTKQPSKSCHKPKAIVHTEKVNMMSLTVLGLRMLFAKTVAVNFLLTAKLFFLRSKRSRLLHSDYMNMTPRRPGPTRKHYQPYAPPRDFAAYRSRVKFSRSADAPAYQQGQNQLYNELNLGRREEYDVLDKRRGRDPEMGGKPQRRKNPQEGLYNELQKDKMAEAYSEIGMKGERRRGKGHDGLYQGLSTATKDTYDALHMQALPPR

SEQ ID NO: 30527 - protein, 315 aa, synthetic construct
ADVSPKPTIFLPSIAETKLQKAGTYLCLLEKFFPDVIKIHWQEKKSNTILGSQEGNTMKTNDTYMKFSWLTVPEKSLDKEHRCIVRHENNKNGVDQEIIFPIPEDTFFPSPESSCDVKLVEKSFETDTNLNFQNLSVIGFRILLLKVAGFNLLMTLRLWSSRSKRSRLLHSDYMNMTPRRPGPTRKHYQPYAPPRDFAAYRSRVKFSRSADAPAYQQGQNQLYNELNLGRREEYDVLDKRRGRDPEMGGKPQRRKNPQEGLYNELQKDKMAEAYSEIGMKGERRRGKGHDGLYQGLSTATKDTYDALHMQALPPR

SEQ ID NO: 30528 - protein, 305 aa, synthetic construct
ADVSPKPTIFLPSIAETKLQKAGTYLCLLEKFFPDVIKIHWQEKKSNTILGSQEGNTMKTNDTYMKFSWLTVPEKSLDKEHRCIVRHENNKNGVDQEIIFPESSCDVKLVEKSFETDTNLNFQNLSVIGFRILLLKVAGFNLLMTLRLWSSRSKRSRLLHSDYMNMTPRRPGPTRKHYQPYAPPRDFAAYRSRVKFSRSADAPAYQQGQNQLYNELNLGRREEYDVLDKRRGRDPEMGGKPQRRKNPQEGLYNELQKDKMAEAYSEIGMKGERRRGKGHDGLYQGLSTATKDTYDALHMQALPPR

SEQ ID NO: 30529 - protein, 314 aa, synthetic construct
ADVSPKPTIFLPSIAETKLQKAGTYLCLLEKFFPDVIKIHWQEKKSNTILGSQEGNTMKTNDTYMKFSWLTVPEKSLDKEHRCIVRHENNKNGVDQEIIFPPEDTFFPSPESSCDVKLVEKSFETDTNLNFQNLSVIGFRILLLKVAGFNLLMTLRLWSSRSKRSRLLHSDYMNMTPRRPGPTRKHYQPYAPPRDFAAYRSRVKFSRSADAPAYQQGQNQLYNELNLGRREEYDVLDKRRGRDPEMGGKPQRRKNPQEGLYNELQKDKMAEAYSEIGMKGERRRGKGHDGLYQGLSTATKDTYDALHMQALPPR

SEQ ID NO: 30530 - protein, 308 aa, synthetic construct
ADVSPKPTIFLPSIAETKLQKAGTYLCLLEKFFPDVIKIHWQEKKSNTILGSQEGNTMKTNDTYMKFSWLTVPEKSLDKEHRCIVRHENNKNGVDQEIIFPGRADCGFTSESYQQGVLSATILYEILLGKATLYAVLVSALVLMAMVKRKDSRGRSKRSRLLHSDYMNMTPRRPGPTRKHYQPYAPPRDFAAYRSRVKFSRSADAPAYQQGQNQLYNELNLGRREEYDVLDKRRGRDPEMGGKPQRRKNPQEGLYNELQKDKMAEAYSEIGMKGERRRGKGHDGLYQGLSTATKDTYDALHMQALPPR

SEQ ID NO: 30531 - protein, 306 aa, synthetic construct
ADVSPKPTIFLPSIAETKLQKAGTYLCLLEKFFPDVIKIHWQEKKSNTILGSQEGNTMKTNDTYMKFSWLTVPEKSLDKEHRCIVRHENNKNGVDQEIIFPADCGFTSESYQQGVLSATILYEILLGKATLYAVLVSALVLMAMVKRKDSRGRSKRSRLLHSDYMNMTPRRPGPTRKHYQPYAPPRDFAAYRSRVKFSRSADAPAYQQGQNQLYNELNLGRREEYDVLDKRRGRDPEMGGKPQRRKNPQEGLYNELQKDKMAEAYSEIGMKGERRRGKGHDGLYQGLSTATKDTYDALHMQALPPR

SEQ ID NO: 30532 - protein, 316 aa, synthetic construct
ADVSPKPTIFLPSIAETKLQKAGTYLCLLEKFFPDVIKIHWQEKKSNTILGSQEGNTMKTNDTYMKFSWLTVPEKSLDKEHRCIVRHENNKNGVDQEIIFPQIVSAEAWGRADCGFTSESYQQGVLSATILYEILLGKATLYAVLVSALVLMAMVKRKDSRGRSKRSRLLHSDYMNMTPRRPGPTRKHYQPYAPPRDFAAYRSRVKFSRSADAPAYQQGQNQLYNELNLGRREEYDVLDKRRGRDPEMGGKPQRRKNPQEGLYNELQKDKMAEAYSEIGMKGERRRGKGHDGLYQGLSTATKDTYDALHMQALPPR

SEQ ID NO: 30533 - protein, 323 aa, synthetic construct
ADVSPKPTIFLPSIAETKLQKAGTYLCLLEKFFPDVIKIHWQEKKSNTILGSQEGNTMKTNDTYMKFSWLTVPEKSLDKEHRCIVRHENNKNGVDQEIIFPEVKTDSTDHVKPKETENTKQPSKSCHKPKAIVHTEKVNMMSLTVLGLRMLFAKTVAVNFLLTAKLFFLRSKRSRLLHSDYMNMTPRRPGPTRKHYQPYAPPRDFAAYRSRVKFSRSADAPAYQQGQNQLYNELNLGRREEYDVLDKRRGRDPEMGGKPQRRKNPQEGLYNELQKDKMAEAYSEIGMKGERRRGKGHDGLYQGLSTATKDTYDALHMQALPPR

SEQ ID NO: 30534 - protein, 316 aa, synthetic construct
ADVSPKPTIFLPSIAETKLQKAGTYLCLLEKFFPDVIKIHWQEKKSNTILGSQEGNTMKTNDTYMKFSWLTVPEKSLDKEHRCIVRHENNKNGVDQEIIFPDHVKPKETENTKQPSKSCHKPKAIVHTEKVNMMSLTVLGLRMLFAKTVAVNFLLTAKLFFLRSKRSRLLHSDYMNMTPRRPGPTRKHYQPYAPPRDFAAYRSRVKFSRSADAPAYQQGQNQLYNELNLGRREEYDVLDKRRGRDPEMGGKPQRRKNPQEGLYNELQKDKMAEAYSEIGMKGERRRGKGHDGLYQGLSTATKDTYDALHMQALPPR

SEQ ID NO: 30535 - protein, 323 aa, synthetic construct
ADVSPKPTIFLPSIAETKLQKAGTYLCLLEKFFPDVIKIHWQEKKSNTILGSQEGNTMKTNDTYMKFSWLTVPEKSLDKEHRCIVRHENNKNGVDQEIIFPPIKTDVITIPEDTFFPSPESSCDVKLVEKSFETDTNLNFQNLSVIGFRILLLKVAGFNLLMTLRLWSSRSKRSRLLHSDYMNMTPRRPGPTRKHYQPYAPPRDFAAYRSRVKFSRSADAPAYQQGQNQLYNELNLGRREEYDVLDKRRGRDPEMGGKPQRRKNPQEGLYNELQKDKMAEAYSEIGMKGERRRGKGHDGLYQGLSTATKDTYDALHMQALPPR

SEQ ID NO: 30536 - protein, 313 aa, synthetic construct
ADVSPKPTIFLPSIAETKLQKAGTYLCLLEKFFPDVIKIHWQEKKSNTILGSQEGNTMKTNDTYMKFSWLTVPEKSLDKEHRCIVRHENNKNGVDQEIIFPPIKTDVITESSCDVKLVEKSFETDTNLNFQNLSVIGFRILLLKVAGFNLLMTLRLWSSRSKRSRLLHSDYMNMTPRRPGPTRKHYQPYAPPRDFAAYRSRVKFSRSADAPAYQQGQNQLYNELNLGRREEYDVLDKRRGRDPEMGGKPQRRKNPQEGLYNELQKDKMAEAYSEIGMKGERRRGKGHDGLYQGLSTATKDTYDALHMQALPPR

SEQ ID NO: 30537 - protein, 322 aa, synthetic construct
ADVSPKPTIFLPSIAETKLQKAGTYLCLLEKFFPDVIKIHWQEKKSNTILGSQEGNTMKTNDTYMKFSWLTVPEKSLDKEHRCIVRHENNKNGVDQEIIFPPIKTDVITPEDTFFPSPESSCDVKLVEKSFETDTNLNFQNLSVIGFRILLLKVAGFNLLMTLRLWSSRSKRSRLLHSDYMNMTPRRPGPTRKHYQPYAPPRDFAAYRSRVKFSRSADAPAYQQGQNQLYNELNLGRREEYDVLDKRRGRDPEMGGKPQRRKNPQEGLYNELQKDKMAEAYSEIGMKGERRRGKGHDGLYQGLSTATKDTYDALHMQALPPR

SEQ ID NO: 30538 - protein, 316 aa, synthetic construct
ADVSPKPTIFLPSIAETKLQKAGTYLCLLEKFFPDVIKIHWQEKKSNTILGSQEGNTMKTNDTYMKFSWLTVPEKSLDKEHRCIVRHENNKNGVDQEIIFPPIKTDVITGRADCGFTSESYQQGVLSATILYEILLGKATLYAVLVSALVLMAMVKRKDSRGRSKRSRLLHSDYMNMTPRRPGPTRKHYQPYAPPRDFAAYRSRVKFSRSADAPAYQQGQNQLYNELNLGRREEYDVLDKRRGRDPEMGGKPQRRKNPQEGLYNELQKDKMAEAYSEIGMKGERRRGKGHDGLYQGLSTATKDTYDALHMQALPPR

SEQ ID NO: 30539 - protein, 314 aa, synthetic construct
ADVSPKPTIFLPSIAETKLQKAGTYLCLLEKFFPDVIKIHWQEKKSNTILGSQEGNTMKTNDTYMKFSWLTVPEKSLDKEHRCIVRHENNKNGVDQEIIFPPIKTDVITADCGFTSESYQQGVLSATILYEILLGKATLYAVLVSALVLMAMVKRKDSRGRSKRSRLLHSDYMNMTPRRPGPTRKHYQPYAPPRDFAAYRSRVKFSRSADAPAYQQGQNQLYNELNLGRREEYDVLDKRRGRDPEMGGKPQRRKNPQEGLYNELQKDKMAEAYSEIGMKGERRRGKGHDGLYQGLSTATKDTYDALHMQALPPR

SEQ ID NO: 30540 - protein, 324 aa, synthetic construct
ADVSPKPTIFLPSIAETKLQKAGTYLCLLEKFFPDVIKIHWQEKKSNTILGSQEGNTMKTNDTYMKFSWLTVPEKSLDKEHRCIVRHENNKNGVDQEIIFPPIKTDVITQIVSAEAWGRADCGFTSESYQQGVLSATILYEILLGKATLYAVLVSALVLMAMVKRKDSRGRSKRSRLLHSDYMNMTPRRPGPTRKHYQPYAPPRDFAAYRSRVKFSRSADAPAYQQGQNQLYNELNLGRREEYDVLDKRRGRDPEMGGKPQRRKNPQEGLYNELQKDKMAEAYSEIGMKGERRRGKGHDGLYQGLSTATKDTYDALHMQALPPR

SEQ ID NO: 30541 - protein, 331 aa, synthetic construct
ADVSPKPTIFLPSIAETKLQKAGTYLCLLEKFFPDVIKIHWQEKKSNTILGSQEGNTMKTNDTYMKFSWLTVPEKSLDKEHRCIVRHENNKNGVDQEIIFPPIKTDVITEVKTDSTDHVKPKETENTKQPSKSCHKPKAIVHTEKVNMMSLTVLGLRMLFAKTVAVNFLLTAKLFFLRSKRSRLLHSDYMNMTPRRPGPTRKHYQPYAPPRDFAAYRSRVKFSRSADAPAYQQGQNQLYNELNLGRREEYDVLDKRRGRDPEMGGKPQRRKNPQEGLYNELQKDKMAEAYSEIGMKGERRRGKGHDGLYQGLSTATKDTYDALHMQALPPR

SEQ ID NO: 30542 - protein, 324 aa, synthetic construct
ADVSPKPTIFLPSIAETKLQKAGTYLCLLEKFFPDVIKIHWQEKKSNTILGSQEGNTMKTNDTYMKFSWLTVPEKSLDKEHRCIVRHENNKNGVDQEIIFPPIKTDVITDHVKPKETENTKQPSKSCHKPKAIVHTEKVNMMSLTVLGLRMLFAKTVAVNFLLTAKLFFLRSKRSRLLHSDYMNMTPRRPGPTRKHYQPYAPPRDFAAYRSRVKFSRSADAPAYQQGQNQLYNELNLGRREEYDVLDKRRGRDPEMGGKPQRRKNPQEGLYNELQKDKMAEAYSEIGMKGERRRGKGHDGLYQGLSTATKDTYDALHMQALPPR

SEQ ID NO: 30543 - protein, 328 aa, synthetic construct
ADVSPKPTIFLPSIAETKLQKAGTYLCLLEKFFPDVIKIHWQEKKSNTILGSQEGNTMKTNDTYMKFSWLTVPEKSLDKEHRCIVRHENNKNGVDQEIIFPPIKTDVITMDPKDIPEDTFFPSPESSCDVKLVEKSFETDTNLNFQNLSVIGFRILLLKVAGFNLLMTLRLWSSRSKRSRLLHSDYMNMTPRRPGPTRKHYQPYAPPRDFAAYRSRVKFSRSADAPAYQQGQNQLYNELNLGRREEYDVLDKRRGRDPEMGGKPQRRKNPQEGLYNELQKDKMAEAYSEIGMKGERRRGKGHDGLYQGLSTATKDTYDALHMQALPPR

SEQ ID NO: 30544 - protein, 318 aa, synthetic construct
ADVSPKPTIFLPSIAETKLQKAGTYLCLLEKFFPDVIKIHWQEKKSNTILGSQEGNTMKTNDTYMKFSWLTVPEKSLDKEHRCIVRHENNKNGVDQEIIFPPIKTDVITMDPKDESSCDVKLVEKSFETDTNLNFQNLSVIGFRILLLKVAGFNLLMTLRLWSSRSKRSRLLHSDYMNMTPRRPGPTRKHYQPYAPPRDFAAYRSRVKFSRSADAPAYQQGQNQLYNELNLGRREEYDVLDKRRGRDPEMGGKPQRRKNPQEGLYNELQKDKMAEAYSEIGMKGERRRGKGHDGLYQGLSTATKDTYDALHMQALPPR

SEQ ID NO: 30545 - protein, 327 aa, synthetic construct
ADVSPKPTIFLPSIAETKLQKAGTYLCLLEKFFPDVIKIHWQEKKSNTILGSQEGNTMKTNDTYMKFSWLTVPEKSLDKEHRCIVRHENNKNGVDQEIIFPPIKTDVITMDPKDPEDTFFPSPESSCDVKLVEKSFETDTNLNFQNLSVIGFRILLLKVAGFNLLMTLRLWSSRSKRSRLLHSDYMNMTPRRPGPTRKHYQPYAPPRDFAAYRSRVKFSRSADAPAYQQGQNQLYNELNLGRREEYDVLDKRRGRDPEMGGKPQRRKNPQEGLYNELQKDKMAEAYSEIGMKGERRRGKGHDGLYQGLSTATKDTYDALHMQALPPR

SEQ ID NO: 30546 - protein, 321 aa, synthetic construct
ADVSPKPTIFLPSIAETKLQKAGTYLCLLEKFFPDVIKIHWQEKKSNTILGSQEGNTMKTNDTYMKFSWLTVPEKSLDKEHRCIVRHENNKNGVDQEIIFPPIKTDVITMDPKDGRADCGFTSESYQQGVLSATILYEILLGKATLYAVLVSALVLMAMVKRKDSRGRSKRSRLLHSDYMNMTPRRPGPTRKHYQPYAPPRDFAAYRSRVKFSRSADAPAYQQGQNQLYNELNLGRREEYDVLDKRRGRDPEMGGKPQRRKNPQEGLYNELQKDKMAEAYSEIGMKGERRRGKGHDGLYQGLSTATKDTYDALHMQALPPR

SEQ ID NO: 30547 - protein, 319 aa, synthetic construct
ADVSPKPTIFLPSIAETKLQKAGTYLCLLEKFFPDVIKIHWQEKKSNTILGSQEGNTMKTNDTYMKFSWLTVPEKSLDKEHRCIVRHENNKNGVDQEIIFPPIKTDVITMDPKDADCGFTSESYQQGVLSATILYEILLGKATLYAVLVSALVLMAMVKRKDSRGRSKRSRLLHSDYMNMTPRRPGPTRKHYQPYAPPRDFAAYRSRVKFSRSADAPAYQQGQNQLYNELNLGRREEYDVLDKRRGRDPEMGGKPQRRKNPQEGLYNELQKDKMAEAYSEIGMKGERRRGKGHDGLYQGLSTATKDTYDALHMQALPPR

SEQ ID NO: 30548 - protein, 329 aa, synthetic construct
ADVSPKPTIFLPSIAETKLQKAGTYLCLLEKFFPDVIKIHWQEKKSNTILGSQEGNTMKTNDTYMKFSWLTVPEKSLDKEHRCIVRHENNKNGVDQEIIFPPIKTDVITMDPKDQIVSAEAWGRADCGFTSESYQQGVLSATILYEILLGKATLYAVLVSALVLMAMVKRKDSRGRSKRSRLLHSDYMNMTPRRPGPTRKHYQPYAPPRDFAAYRSRVKFSRSADAPAYQQGQNQLYNELNLGRREEYDVLDKRRGRDPEMGGKPQRRKNPQEGLYNELQKDKMAEAYSEIGMKGERRRGKGHDGLYQGLSTATKDTYDALHMQALPPR

SEQ ID NO: 30549 - protein, 336 aa, synthetic construct
ADVSPKPTIFLPSIAETKLQKAGTYLCLLEKFFPDVIKIHWQEKKSNTILGSQEGNTMKTNDTYMKFSWLTVPEKSLDKEHRCIVRHENNKNGVDQEIIFPPIKTDVITMDPKDEVKTDSTDHVKPKETENTKQPSKSCHKPKAIVHTEKVNMMSLTVLGLRMLFAKTVAVNFLLTAKLFFLRSKRSRLLHSDYMNMTPRRPGPTRKHYQPYAPPRDFAAYRSRVKFSRSADAPAYQQGQNQLYNELNLGRREEYDVLDKRRGRDPEMGGKPQRRKNPQEGLYNELQKDKMAEAYSEIGMKGERRRGKGHDGLYQGLSTATKDTYDALHMQALPPR

SEQ ID NO: 30550 - protein, 329 aa, synthetic construct
ADVSPKPTIFLPSIAETKLQKAGTYLCLLEKFFPDVIKIHWQEKKSNTILGSQEGNTMKTNDTYMKFSWLTVPEKSLDKEHRCIVRHENNKNGVDQEIIFPPIKTDVITMDPKDDHVKPKETENTKQPSKSCHKPKAIVHTEKVNMMSLTVLGLRMLFAKTVAVNFLLTAKLFFLRSKRSRLLHSDYMNMTPRRPGPTRKHYQPYAPPRDFAAYRSRVKFSRSADAPAYQQGQNQLYNELNLGRREEYDVLDKRRGRDPEMGGKPQRRKNPQEGLYNELQKDKMAEAYSEIGMKGERRRGKGHDGLYQGLSTATKDTYDALHMQALPPR

SEQ ID NO: 30551 - protein, 323 aa, synthetic construct; identical to SEQ ID NO: 30535

SEQ ID NO: 30552 - protein, 313 aa, synthetic construct; identical to SEQ ID NO: 30536

SEQ ID NO: 30553 - protein, 322 aa, synthetic construct; identical to SEQ ID NO: 30537

SEQ ID NO: 30554 - protein, 316 aa, synthetic construct; identical to SEQ ID NO: 30538

SEQ ID NO: 30555 - protein, 314 aa, synthetic construct; identical to SEQ ID NO: 30539

SEQ ID NO: 30556 - protein, 324 aa, synthetic construct; identical to SEQ ID NO: 30540

SEQ ID NO: 30557 - protein, 331 aa, synthetic construct; identical to SEQ ID NO: 30541

SEQ ID NO: 30558 - protein, 324 aa, synthetic construct; identical to SEQ ID NO: 30542

SEQ ID NO: 30559 - protein, 297 aa, synthetic construct
PHTKPSVFVMKNGTNVACLVKEFYPKDIRINLVSSKKITEFDPAIVISPSGKYNAVKLGKYEDSNSVTCSVQHDNKTVHSTDFIPEDTFFPSPESSCDVKLVEKSFETDTNLNFQNLSVIGFRILLLKVAGFNLLMTLRLWSSRSKRSRLLHSDYMNMTPRRPGPTRKHYQPYAPPRDFAAYRSRVKFSRSADAPAYQQGQNQLYNELNLGRREEYDVLDKRRGRDPEMGGKPQRRKNPQEGLYNELQKDKMAEAYSEIGMKGERRRGKGHDGLYQGLSTATKDTYDALHMQALPPR

SEQ ID NO: 30560 - protein, 287 aa, synthetic construct
PHTKPSVFVMKNGTNVACLVKEFYPKDIRINLVSSKKITEFDPAIVISPSGKYNAVKLGKYEDSNSVTCSVQHDNKTVHSTDFESSCDVKLVEKSFETDTNLNFQNLSVIGFRILLLKVAGFNLLMTLRLWSSRSKRSRLLHSDYMNMTPRRPGPTRKHYQPYAPPRDFAAYRSRVKFSRSADAPAYQQGQNQLYNELNLGRREEYDVLDKRRGRDPEMGGKPQRRKNPQEGLYNELQKDKMAEAYSEIGMKGERRRGKGHDGLYQGLSTATKDTYDALHMQALPPR

SEQ ID NO: 30561 - protein, 296 aa, synthetic construct
PHTKPSVFVMKNGTNVACLVKEFYPKDIRINLVSSKKITEFDPAIVISPSGKYNAVKLGKYEDSNSVTCSVQHDNKTVHSTDFPEDTFFPSPESSCDVKLVEKSFETDTNLNFQNLSVIGFRILLLKVAGFNLLMTLRLWSSRSKRSRLLHSDYMNMTPRRPGPTRKHYQPYAPPRDFAAYRSRVKFSRSADAPAYQQGQNQLYNELNLGRREEYDVLDKRRGRDPEMGGKPQRRKNPQEGLYNELQKDKMAEAYSEIGMKGERRRGKGHDGLYQGLSTATKDTYDALHMQALPPR

SEQ ID NO: 30562 - protein, 290 aa, synthetic construct
PHTKPSVFVMKNGTNVACLVKEFYPKDIRINLVSSKKITEFDPAIVISPSGKYNAVKLGKYEDSNSVTCSVQHDNKTVHSTDFGRADCGFTSESYQQGVLSATILYEILLGKATLYAVLVSALVLMAMVKRKDSRGRSKRSRLLHSDYMNMTPRRPGPTRKHYQPYAPPRDFAAYRSRVKFSRSADAPAYQQGQNQLYNELNLGRREEYDVLDKRRGRDPEMGGKPQRRKNPQEGLYNELQKDKMAEAYSEIGMKGERRRGKGHDGLYQGLSTATKDTYDALHMQALPPR

SEQ ID NO: 30563 - protein, 288 aa, synthetic construct
PHTKPSVFVMKNGTNVACLVKEFYPKDIRINLVSSKKITEFDPAIVISPSGKYNAVKLGKYEDSNSVTCSVQHDNKTVHSTDFADCGFTSESYQQGVLSATILYEILLGKATLYAVLVSALVLMAMVKRKDSRGRSKRSRLLHSDYMNMTPRRPGPTRKHYQPYAPPRDFAAYRSRVKFSRSADAPAYQQGQNQLYNELNLGRREEYDVLDKRRGRDPEMGGKPQRRKNPQEGLYNELQKDKMAEAYSEIGMKGERRRGKGHDGLYQGLSTATKDTYDALHMQALPPR

SEQ ID NO: 30564 - protein, 298 aa, synthetic construct
PHTKPSVFVMKNGTNVACLVKEFYPKDIRINLVSSKKITEFDPAIVISPSGKYNAVKLGKYEDSNSVTCSVQHDNKTVHSTDFQIVSAEAWGRADCGFTSESYQQGVLSATILYEILLGKATLYAVLVSALVLMAMVKRKDSRGRSKRSRLLHSDYMNMTPRRPGPTRKHYQPYAPPRDFAAYRSRVKFSRSADAPAYQQGQNQLYNELNLGRREEYDVLDKRRGRDPEMGGKPQRRKNPQEGLYNELQKDKMAEAYSEIGMKGERRRGKGHDGLYQGLSTATKDTYDALHMQALPPR

SEQ ID NO: 30565 - protein, 306 aa, synthetic construct
PHTKPSVFVMKNGTNVACLVKEFYPKDIRINLVSSKKITEFDPAIVISPSGKYNAVKLGKYEDSNSVTCSVQHDNKTVHSTDFFPPIKTDVITMDPKDNCSKDANDTLLLQLTNTSAYYMYLLLLLKSVVYFAIITCCLLRRTAFCCNGEKSRSKRSRLLHSDYMNMTPRRPGPTRKHYQPYAPPRDFAAYRSRVKFSRSADAPAYQQGQNQLYNELNLGRREEYDVLDKRRGRDPEMGGKPQRRKNPQEGLYNELQKDKMAEAYSEIGMKGERRRGKGHDGLYQGLSTATKDTYDALHMQALPPR

SEQ ID NO: 30566 - protein, 304 aa, synthetic construct
PHTKPSVFVMKNGTNVACLVKEFYPKDIRINLVSSKKITEFDPAIVISPSGKYNAVKLGKYEDSNSVTCSVQHDNKTVHSTDFPIKTDVITMDPKDNCSKDANDTLLLQLTNTSAYYMYLLLLLKSVVYFAIITCCLLRRTAFCCNGEKSRSKRSRLLHSDYMNMTPRRPGPTRKHYQPYAPPRDFAAYRSRVKFSRSADAPAYQQGQNQLYNELNLGRREEYDVLDKRRGRDPEMGGKPQRRKNPQEGLYNELQKDKMAEAYSEIGMKGERRRGKGHDGLYQGLSTATKDTYDALHMQALPPR

SEQ ID NO: 30567 - protein, 296 aa, synthetic construct
PHTKPSVFVMKNGTNVACLVKEFYPKDIRINLVSSKKITEFDPAIVISPSGKYNAVKLGKYEDSNSVTCSVQHDNKTVHSTDFMDPKDNCSKDANDTLLLQLTNTSAYYMYLLLLLKSVVYFAIITCCLLRRTAFCCNGEKSRSKRSRLLHSDYMNMTPRRPGPTRKHYQPYAPPRDFAAYRSRVKFSRSADAPAYQQGQNQLYNELNLGRREEYDVLDKRRGRDPEMGGKPQRRKNPQEGLYNELQKDKMAEAYSEIGMKGERRRGKGHDGLYQGLSTATKDTYDALHMQALPPR

SEQ ID NO: 30568 - protein, 305 aa, synthetic construct; identical to SEQ ID NO: 29888

SEQ ID NO: 30569 - protein, 298 aa, synthetic construct
PHTKPSVFVMKNGTNVACLVKEFYPKDIRINLVSSKKITEFDPAIVISPSGKYNAVKLGKYEDSNSVTCSVQHDNKTVHSTDFDHVKPKETENTKQPSKSCHKPKAIVHTEKVNMMSLTVLGLRMLFAKTVAVNFLLTAKLFFLRSKRSRLLHSDYMNMTPRRPGPTRKHYQPYAPPRDFAAYRSRVKFSRSADAPAYQQGQNQLYNELNLGRREEYDVLDKRRGRDPEMGGKPQRRKNPQEGLYNELQKDKMAEAYSEIGMKGERRRGKGHDGLYQGLSTATKDTYDALHMQALPPR

SEQ ID NO: 30570 - protein, 304 aa, synthetic construct
PHTKPSVFVMKNGTNVACLVKEFYPKDIRINLVSSKKITEFDPAIVISPSGKYNAVKLGKYEDSNSVTCSVQHDNKTVHSTDFEVKTDSTIPEDTFFPSPESSCDVKLVEKSFETDTNLNFQNLSVIGFRILLLKVAGFNLLMTLRLWSSRSKRSRLLHSDYMNMTPRRPGPTRKHYQPYAPPRDFAAYRSRVKFSRSADAPAYQQGQNQLYNELNLGRREEYDVLDKRRGRDPEMGGKPQRRKNPQEGLYNELQKDKMAEAYSEIGMKGERRRGKGHDGLYQGLSTATKDTYDALHMQALPPR

SEQ ID NO: 30571 - protein, 294 aa, synthetic construct
PHTKPSVFVMKNGTNVACLVKEFYPKDIRINLVSSKKITEFDPAIVISPSGKYNAVKLGKYEDSNSVTCSVQHDNKTVHSTDFEVKTDSTESSCDVKLVEKSFETDTNLNFQNLSVIGFRILLLKVAGFNLLMTLRLWSSRSKRSRLLHSDYMNMTPRRPGPTRKHYQPYAPPRDFAAYRSRVKFSRSADAPAYQQGQNQLYNELNLGRREEYDVLDKRRGRDPEMGGKPQRRKNPQEGLYNELQKDKMAEAYSEIGMKGERRRGKGHDGLYQGLSTATKDTYDALHMQALPPR

SEQ ID NO: 30572 - protein, 303 aa, synthetic construct
PHTKPSVFVMKNGTNVACLVKEFYPKDIRINLVSSKKITEFDPAIVISPSGKYNAVKLGKYEDSNSVTCSVQHDNKTVHSTDFEVKTDSTPEDTFFPSPESSCDVKLVEKSFETDTNLNFQNLSVIGFRILLLKVAGFNLLMTLRLWSSRSKRSRLLHSDYMNMTPRRPGPTRKHYQPYAPPRDFAAYRSRVKFSRSADAPAYQQGQNQLYNELNLGRREEYDVLDKRRGRDPEMGGKPQRRKNPQEGLYNELQKDKMAEAYSEIGMKGERRRGKGHDGLYQGLSTATKDTYDALHMQALPPR

SEQ ID NO: 30573 - protein, 297 aa, synthetic construct
PHTKPSVFVMKNGTNVACLVKEFYPKDIRINLVSSKKITEFDPAIVISPSGKYNAVKLGKYEDSNSVTCSVQHDNKTVHSTDFEVKTDSTGRADCGFTSESYQQGVLSATILYEILLGKATLYAVLVSALVLMAMVKRKDSRGRSKRSRLLHSDYMNMTPRRPGPTRKHYQPYAPPRDFAAYRSRVKFSRSADAPAYQQGQNQLYNELNLGRREEYDVLDKRRGRDPEMGGKPQRRKNPQEGLYNELQKDKMAEAYSEIGMKGERRRGKGHDGLYQGLSTATKDTYDALHMQALPPR

SEQ ID NO: 30574 - protein, 295 aa, synthetic construct
PHTKPSVFVMKNGTNVACLVKEFYPKDIRINLVSSKKITEFDPAIVISPSGKYNAVKLGKYEDSNSVTCSVQHDNKTVHSTDFEVKTDSTADCGFTSESYQQGVLSATILYEILLGKATLYAVLVSALVLMAMVKRKDSRGRSKRSRLLHSDYMNMTPRRPGPTRKHYQPYAPPRDFAAYRSRVKFSRSADAPAYQQGQNQLYNELNLGRREEYDVLDKRRGRDPEMGGKPQRRKNPQEGLYNELQKDKMAEAYSEIGMKGERRRGKGHDGLYQGLSTATKDTYDALHMQALPPR

SEQ ID NO: 30575 - protein, 305 aa, synthetic construct
PHTKPSVFVMKNGTNVACLVKEFYPKDIRINLVSSKKITEFDPAIVISPSGKYNAVKLGKYEDSNSVTCSVQHDNKTVHSTDFEVKTDSTQIVSAEAWGRADCGFTSESYQQGVLSATILYEILLGKATLYAVLVSALVLMAMVKRKDSRGRSKRSRLLHSDYMNMTPRRPGPTRKHYQPYAPPRDFAAYRSRVKFSRSADAPAYQQGQNQLYNELNLGRREEYDVLDKRRGRDPEMGGKPQRRKNPQEGLYNELQKDKMAEAYSEIGMKGERRRGKGHDGLYQGLSTATKDTYDALHMQALPPR

SEQ ID NO: 30576 - protein, 313 aa, synthetic construct
PHTKPSVFVMKNGTNVACLVKEFYPKDIRINLVSSKKITEFDPAIVISPSGKYNAVKLGKYEDSNSVTCSVQHDNKTVHSTDFEVKTDSTFPPIKTDVITMDPKDNCSKDANDTLLLQLTNTSAYYMYLLLLLKSVVYFAIITCCLLRRTAFCCNGEKSRSKRSRLLHSDYMNMTPRRPGPTRKHYQPYAPPRDFAAYRSRVKFSRSADAPAYQQGQNQLYNELNLGRREEYDVLDKRRGRDPEMGGKPQRRKNPQEGLYNELQKDKMAEAYSEIGMKGERRRGKGHDGLYQGLSTATKDTYDALHMQALPPR

SEQ ID NO: 30577 - protein, 311 aa, synthetic construct
PHTKPSVFVMKNGTNVACLVKEFYPKDIRINLVSSKKITEFDPAIVISPSGKYNAVKLGKYEDSNSVTCSVQHDNKTVHSTDFEVKTDSTPIKTDVITMDPKDNCSKDANDTLLLQLTNTSAYYMYLLLLLKSVVYFAIITCCLLRRTAFCCNGEKSRSKRSRLLHSDYMNMTPRRPGPTRKHYQPYAPPRDFAAYRSRVKFSRSADAPAYQQGQNQLYNELNLGRREEYDVLDKRRGRDPEMGGKPQRRKNPQEGLYNELQKDKMAEAYSEIGMKGERRRGKGHDGLYQGLSTATKDTYDALHMQALPPR

SEQ ID NO: 30578 - protein, 303 aa, synthetic construct
PHTKPSVFVMKNGTNVACLVKEFYPKDIRINLVSSKKITEFDPAIVISPSGKYNAVKLGKYEDSNSVTCSVQHDNKTVHSTDFEVKTDSTMDPKDNCSKDANDTLLLQLTNTSAYYMYLLLLLKSVVYFAIITCCLLRRTAFCCNGEKSRSKRSRLLHSDYMNMTPRRPGPTRKHYQPYAPPRDFAAYRSRVKFSRSADAPAYQQGQNQLYNELNLGRREEYDVLDKRRGRDPEMGGKPQRRKNPQEGLYNELQKDKMAEAYSEIGMKGERRRGKGHDGLYQGLSTATKDTYDALHMQALPPR

SEQ ID NO: 30579 - protein, 311 aa, synthetic construct; identical to SEQ ID NO: 30577

SEQ ID NO: 30580 - protein, 297 aa, synthetic construct
PHTKPSVFVMKNGTNVACLVKEFYPKDIRINLVSSKKITEFDPAIVISPSGKYNAVKLGKYEDSNSVTCSVQHDNKTVHSTDFEVKTDSTCSKDANDTLLLQLTNTSAYYMYLLLLLKSVVYFAIITCCLLRRTAFCCNGEKSRSKRSRLLHSDYMNMTPRRPGPTRKHYQPYAPPRDFAAYRSRVKFSRSADAPAYQQGQNQLYNELNLGRREEYDVLDKRRGRDPEMGGKPQRRKNPQEGLYNELQKDKMAEAYSEIGMKGERRRGKGHDGLYQGLSTATKDTYDALHMQALPPR

SEQ ID NO: 30581 - protein, 297 aa, synthetic construct; identical to SEQ ID NO: 30559

SEQ ID NO: 30582 - protein, 287 aa, synthetic construct; identical to SEQ ID NO: 30560

SEQ ID NO: 30583 - protein, 296 aa, synthetic construct; identical to SEQ ID NO: 30561

SEQ ID NO: 30584 - protein, 290 aa, synthetic construct; identical to SEQ ID NO: 30562

SEQ ID NO: 30585 - protein, 288 aa, synthetic construct; identical to SEQ ID NO: 30563

SEQ ID NO: 30586 - protein, 298 aa, synthetic construct; identical to SEQ ID NO: 30564

SEQ ID NO: 30587 - protein, 306 aa, synthetic construct; identical to SEQ ID NO: 30565

SEQ ID NO: 30588 - protein, 304 aa, synthetic construct; identical to SEQ ID NO: 30566

SEQ ID NO: 30589 - protein, 296 aa, synthetic construct; identical to SEQ ID NO: 30567

SEQ ID NO: 30590 - protein, 304 aa, synthetic construct; identical to SEQ ID NO: 30566

SEQ ID NO: 30591 - protein, 290 aa, synthetic construct
PHTKPSVFVMKNGTNVACLVKEFYPKDIRINLVSSKKITEFDPAIVISPSGKYNAVKLGKYEDSNSVTCSVQHDNKTVHSTDFCSKDANDTLLLQLTNTSAYYMYLLLLLKSVVYFAIITCCLLRRTAFCCNGEKSRSKRSRLLHSDYMNMTPRRPGPTRKHYQPYAPPRDFAAYRSRVKFSRSADAPAYQQGQNQLYNELNLGRREEYDVLDKRRGRDPEMGGKPQRRKNPQEGLYNELQKDKMAEAYSEIGMKGERRRGKGHDGLYQGLSTATKDTYDALHMQALPPR

SEQ ID NO: 30592 - protein, 304 aa, synthetic construct; identical to SEQ ID NO: 30570

SEQ ID NO: 30593 - protein, 294 aa, synthetic construct; identical to SEQ ID NO: 30571

SEQ ID NO: 30594 - protein, 303 aa, synthetic construct; identical to SEQ ID NO: 30572

SEQ ID NO: 30595 - protein, 297 aa, synthetic construct; identical to SEQ ID NO: 30573

SEQ ID NO: 30596 - protein, 295 aa, synthetic construct; identical to SEQ ID NO: 30574

SEQ ID NO: 30597 - protein, 305 aa, synthetic construct; identical to SEQ ID NO: 30575

SEQ ID NO: 30598 - protein, 313 aa, synthetic construct; identical to SEQ ID NO: 30576

SEQ ID NO: 30599 - protein, 311 aa, synthetic construct; identical to SEQ ID NO: 30577

SEQ ID NO: 30600 - protein, 303 aa, synthetic construct; identical to SEQ ID NO: 30578

SEQ ID NO: 30601 - protein, 311 aa, synthetic construct; identical to SEQ ID NO: 30577

SEQ ID NO: 30602 - protein, 297 aa, synthetic construct; identical to SEQ ID NO: 30580

SEQ ID NO: 30603 - protein, 294 aa, synthetic construct
IQNPDPAVYQLRDSKSSDKSVCLFTDFDSQTNVSQSKDSDVYITDKCVLDMRSMDFKSNSAVAWSNKSDFACANAFNNSIIPEDTFFPSPESSCDVKLVEKSFETDTNLNFQNLSVIGLRMLFAKTVAVNFLLTAKLFFLRSKRSRLLHSDYMNMTPRRPGPTRKHYQPYAPPRDFAAYRSRVKFSRSADAPAYQQGQNQLYNELNLGRREEYDVLDKRRGRDPEMGGKPQRRKNPQEGLYNELQKDKMAEAYSEIGMKGERRRGKGHDGLYQGLSTATKDTYDALHMQALPPR

SEQ ID NO: 30604 - protein, 294 aa, synthetic construct
IQNPDPAVYQLRDSKSSDKSVCLFTDFDSQTNVSQSKDSDVYITDKCVLDMRSMDFKSNSAVAWSNKSDFACANAFNNSIIPEDTFFPSPESSCDVKLVEKSFETDTNLNFQNLSVLGLRMLFAKTVAVNFLLTAKLFFLRSKRSRLLHSDYMNMTPRRPGPTRKHYQPYAPPRDFAAYRSRVKFSRSADAPAYQQGQNQLYNELNLGRREEYDVLDKRRGRDPEMGGKPQRRKNPQEGLYNELQKDKMAEAYSEIGMKGERRRGKGHDGLYQGLSTATKDTYDALHMQALPPR

SEQ ID NO: 30605 - protein, 294 aa, synthetic construct; identical to SEQ ID NO: 30604

SEQ ID NO: 30606 - protein, 307 aa, synthetic construct
SQPHTKPSVFVMKNGTNVACLVKEFYPKDIRINLVSSKKITEFDPAIVISPSGKYNAVKLGKYEDSNSVTCSVQHDNKTVHSTDFEVKTDSTDHVKPKETENTKQPSKSCHKPKAIVHTEKVNMMSLTVLGFRILLLKVAGFNLLMTLRLWSSRSKRSRLLHSDYMNMTPRRPGPTRKHYQPYAPPRDFAAYRSRVKFSRSADAPAYQQGQNQLYNELNLGRREEYDVLDKRRGRDPEMGGKPQRRKNPQEGLYNELQKDKMAEAYSEIGMKGERRRGKGHDGLYQGLSTATKDTYDALHMQALPPR

SEQ ID NO: 30607 - protein, 307 aa, synthetic construct
SQPHTKPSVFVMKNGTNVACLVKEFYPKDIRINLVSSKKITEFDPAIVISPSGKYNAVKLGKYEDSNSVTCSVQHDNKTVHSTDFEVKTDSTDHVKPKETENTKQPSKSCHKPKAIVHTEKVNMMSLTVIGFRILLLKVAGFNLLMTLRLWSSRSKRSRLLHSDYMNMTPRRPGPTRKHYQPYAPPRDFAAYRSRVKFSRSADAPAYQQGQNQLYNELNLGRREEYDVLDKRRGRDPEMGGKPQRRKNPQEGLYNELQKDKMAEAYSEIGMKGERRRGKGHDGLYQGLSTATKDTYDALHMQALPPR

SEQ ID NO: 30608 - protein, 334 aa, synthetic construct
EDLKNVFPPEVAVFEPSEAEISHTQKATLVCLATGFYPDHVELSWWVNGKEVHSGVCTDPQPLKEQPALNDSRYCLSSRLRVSATFWQNPRNHFRCQVQFYGLSENDEWTQDRAKPVTQIVSAEAWGRADCGFTSESYQQGVLSATILYLLLLLKSVVYFAIITCCLLRRTAFCCNGEKSRSKRSRLLHSDYMNMTPRRPGPTRKHYQPYAPPRDFAAYRSRVKFSRSADAPAYQQGQNQLYNELNLGRREEYDVLDKRRGRDPEMGGKPQRRKNPQEGLYNELQKDKMAEAYSEIGMKGERRRGKGHDGLYQGLSTATKDTYDALHMQALPPR

SEQ ID NO: 30609 - protein, 334 aa, synthetic construct
EDLKNVFPPEVAVFEPSEAEISHTQKATLVCLATGFYPDHVELSWWVNGKEVHSGVCTDPQPLKEQPALNDSRYCLSSRLRVSATFWQNPRNHFRCQVQFYGLSENDEWTQDRAKPVTQIVSAEAWGRADCGFTSESYQQGVLSAYYMYLLLLLKSVVYFAIITCCLLRRTAFCCNGEKSRSKRSRLLHSDYMNMTPRRPGPTRKHYQPYAPPRDFAAYRSRVKFSRSADAPAYQQGQNQLYNELNLGRREEYDVLDKRRGRDPEMGGKPQRRKNPQEGLYNELQKDKMAEAYSEIGMKGERRRGKGHDGLYQGLSTATKDTYDALHMQALPPR

SEQ ID NO: 30610 - protein, 326 aa, synthetic construct
DKQLDADVSPKPTIFLPSIAETKLQKAGTYLCLLEKFFPDVIKIHWQEKKSNTILGSQEGNTMKTNDTYMKFSWLTVPEKSLDKEHRCIVRHENNKNGVDQEIIFPPIKTDVITMDPKDNCSKDANDTLLLQLTNTSAYYMYEILLGKATLYAVLVSALVLMAMVKRKDSRGRSKRSRLLHSDYMNMTPRRPGPTRKHYQPYAPPRDFAAYRSRVKFSRSADAPAYQQGQNQLYNELNLGRREEYDVLDKRRGRDPEMGGKPQRRKNPQEGLYNELQKDKMAEAYSEIGMKGERRRGKGHDGLYQGLSTATKDTYDALHMQALPPR

SEQ ID NO: 30611 - protein, 326 aa, synthetic construct
DKQLDADVSPKPTIFLPSIAETKLQKAGTYLCLLEKFFPDVIKIHWQEKKSNTILGSQEGNTMKTNDTYMKFSWLTVPEKSLDKEHRCIVRHENNKNGVDQEIIFPPIKTDVITMDPKDNCSKDANDTLLLQLTNTSATILYEILLGKATLYAVLVSALVLMAMVKRKDSRGRSKRSRLLHSDYMNMTPRRPGPTRKHYQPYAPPRDFAAYRSRVKFSRSADAPAYQQGQNQLYNELNLGRREEYDVLDKRRGRDPEMGGKPQRRKNPQEGLYNELQKDKMAEAYSEIGMKGERRRGKGHDGLYQGLSTATKDTYDALHMQALPPR

SEQ ID NO: 30612 - protein, 333 aa, synthetic construct
EDLKNVFPPEVAVFEPSEAEISHTQKATLVCLATGFYPDHVELSWWVNGKEVHSGVCTDPQPLKEQPALNDSRYCLSSRLRVSATFWQNPRNHFRCQVQFYGLSENDEWTQDRAKPVTQIVSAEAWGRADSGFTSESYQQGVLSATILYEILLGKATLYAVLVSALVLMAMVKRKDSRGRSKRSRLLHSDYMNMTPRRPGPTRKHYQPYAPPRDFAAYRSRVKFSRSADAPAYQQGQNQLYNELNLGRREEYDVLDKRRGRDPEMGGKPQRRKNPQEGLYNELQKDKMAEAYSEIGMKGERRRGKGHDGLYQGLSTATKDTYDALHMQALPPR

SEQ ID NO: 30613 - protein, 294 aa, synthetic construct
IQNPDPAVYQLRDSKSSDKSVCLFTDFDSQTNVSQSKDSDVYITDKCVLDMRSMDFKSNSAVAWSNKSDFACANAFNNSIIPEDTFFPSPESSSDVKLVEKSFETDTNLNFQNLSVIGFRILLLKVAGFNLLMTLRLWSSRSKRSRLLHSDYMNMTPRRPGPTRKHYQPYAPPRDFAAYRSRVKFSRSADAPAYQQGQNQLYNELNLGRREEYDVLDKRRGRDPEMGGKPQRRKNPQEGLYNELQKDKMAEAYSEIGMKGERRRGKGHDGLYQGLSTATKDTYDALHMQALPPR

SEQ ID NO: 30614 - protein, 333 aa, synthetic construct
EDLKNVFPPEVAVFEPSEAEISHTQKATLVCLATGFYPDHVELSWWVNGKEVHSGVCTDPQPLKEQPALNDSRYCLSSRLRVSATFWQNPRNHFRCQVQFYGLSENDEWTQDRAKPVTQIVSAEAWGRADGGFTSESYQQGVLSATILYEILLGKATLYAVLVSALVLMAMVKRKDSRGRSKRSRLLHSDYMNMTPRRPGPTRKHYQPYAPPRDFAAYRSRVKFSRSADAPAYQQGQNQLYNELNLGRREEYDVLDKRRGRDPEMGGKPQRRKNPQEGLYNELQKDKMAEAYSEIGMKGERRRGKGHDGLYQGLSTATKDTYDALHMQALPPR

SEQ ID NO: 30615 - protein, 294 aa, synthetic construct
IQNPDPAVYQLRDSKSSDKSVCLFTDFDSQTNVSQSKDSDVYITDKCVLDMRSMDFKSNSAVAWSNKSDFACANAFNNSIIPEDTFFPSPESSRDVKLVEKSFETDTNLNFQNLSVIGFRILLLKVAGFNLLMTLRLWSSRSKRSRLLHSDYMNMTPRRPGPTRKHYQPYAPPRDFAAYRSRVKFSRSADAPAYQQGQNQLYNELNLGRREEYDVLDKRRGRDPEMGGKPQRRKNPQEGLYNELQKDKMAEAYSEIGMKGERRRGKGHDGLYQGLSTATKDTYDALHMQALPPR

SEQ ID NO: 30616 - protein, 296 aa, synthetic construct
DIQNPDPAVYQLRDSKSSDKSVCLFTDFDSQTNVSQSKDSDVYITDKTVLDMRSMDFKSNSAVAWSNKSDFACANAFNNSIIPEDTFFPSPESSCDVKLVEKSFETDTNLNFQNLSVIGFRILLLKVAGFNLLMTLRLWSSKRGRKKLLYIFKQPFMRPVQTTQEEDGCSCRFPEEEEGGCELRVKFSRSADAPAYQQGQNQLYNELNLGRREEYDVLDKRRGRDPEMGGKPQRRKNPQEGLYNELQKDKMAEAYSEIGMKGERRRGKGHDGLYQGLSTATKDTYDALHMQALPPR

SEQ ID NO: 30617 - protein, 295 aa, synthetic construct
IQNPDPAVYQLRDSKSSDKSVCLFTDFDSQTNVSQSKDSDVYITDKTVLDMRSMDFKSNSAVAWSNKSDFACANAFNNSIIPEDTFFPSPESSCDVKLVEKSFETDTNLNFQNLSVIGFRILLLKVAGFNLLMTLRLWSSKRGRKKLLYIFKQPFMRPVQTTQEEDGCSCRFPEEEEGGCELRVKFSRSADAPAYQQGQNQLYNELNLGRREEYDVLDKRRGRDPEMGGKPQRRKNPQEGLYNELQKDKMAEAYSEIGMKGERRRGKGHDGLYQGLSTATKDTYDALHMQALPPR

SEQ ID NO: 30618 - protein, 295 aa, synthetic construct
IQNPDPAVYQLRDSKSSDKSVCLFTDFDSQTNVSQSKDSDVYITDKCVLDMRSMDFKSNSAVAWSNKSDFACANAFNNSIIPEDTFFPSSDVPCDVKLVEKSFETDTNLNFQNLSVIGFRILLLKVAGFNLLMTLRLWSSKRGRKKLLYIFKQPFMRPVQTTQEEDGCSCRFPEEEEGGCELRVKFSRSADAPAYQQGQNQLYNELNLGRREEYDVLDKRRGRDPEMGGKPQRRKNPQEGLYNELQKDKMAEAYSEIGMKGERRRGKGHDGLYQGLSTATKDTYDALHMQALPPR

SEQ ID NO: 30619 - protein, 295 aa, synthetic construct; identical to SEQ ID NO: 30617

SEQ ID NO: 30620 - protein, 292 aa, synthetic construct
PDPAVYQLRDSKSSDKSVCLFTDFDSQTNVSQSKDSDVYITDKTVLDMRSMDFKSNSAVAWSNKSDFACANAFNNSIIPEDTFFPSPESSCDVKLVEKSFETDTNLNFQNLSVIGFRILLLKVAGFNLLMTLRLWSSKRGRKKLLYIFKQPFMRPVQTTQEEDGCSCRFPEEEEGGCELRVKFSRSADAPAYQQGQNQLYNELNLGRREEYDVLDKRRGRDPEMGGKPQRRKNPQEGLYNELQKDKMAEAYSEIGMKGERRRGKGHDGLYQGLSTATKDTYDALHMQALPPR

SEQ ID NO: 30621 - protein, 295 aa, synthetic construct
IQNPDPAVYQLRDSKSSDKSVCLFTDFDSQTNVSQSKDSDVYITDKCVLDMRSMDFKSNSAVAWSNKSDFACANAFNNSIIPEDTFFPSPESSCDVKLVEKSFETDTNLNFQNLSVIGFRILLLKVAGFNLLMTLRLWSSKRGRKKLLYIFKQPFMRPVQTTQEEDGCSCRFPEEEEGGCELRVKFSRSADAPAYQQGQNQLYNELNLGRREEYDVLDKRRGRDPEMGGKPQRRKNPQEGLYNELQKDKMAEAYSEIGMKGERRRGKGHDGLYQGLSTATKDTYDALHMQALPPR

SEQ ID NO: 30622 - protein, 292 aa, synthetic construct
PDPAVYQLRDSKSSDKSVCLFTDFDSQTNVSQSKDSDVYITDKCVLDMRSMDFKSNSAVAWSNKSDFACANAFNNSIIPEDTFFPSPESSCDVKLVEKSFETDTNLNFQNLSVIGFRILLLKVAGFNLLMTLRLWSSKRGRKKLLYIFKQPFMRPVQTTQEEDGCSCRFPEEEEGGCELRVKFSRSADAPAYQQGQNQLYNELNLGRREEYDVLDKRRGRDPEMGGKPQRRKNPQEGLYNELQKDKMAEAYSEIGMKGERRRGKGHDGLYQGLSTATKDTYDALHMQALPPR

SEQ ID NO: 30623 - protein, 295 aa, synthetic construct
IQNPDPAVYQLRDSKSSDKSVCLFTDFDSQTNVSQSKDSDVYITDKTVLDMRSMDFKSNSAVAWSNKSDFACANAFNNSIIPEDTFFPSSDVPCDVKLVEKSFETDTNLNFQNLSVIGFRILLLKVAGFNLLMTLRLWSSKRGRKKLLYIFKQPFMRPVQTTQEEDGCSCRFPEEEEGGCELRVKFSRSADAPAYQQGQNQLYNELNLGRREEYDVLDKRRGRDPEMGGKPQRRKNPQEGLYNELQKDKMAEAYSEIGMKGERRRGKGHDGLYQGLSTATKDTYDALHMQALPPR

SEQ ID NO: 30624 - protein, 295 aa, synthetic construct
IQNPDPAVYQLRDSKSSDKSVCLFTDFDSQTNVSQSKDSDVYITDKTVLDMRSMDFKSNRAVAWSNKSDFACANAFNNSIIPEDTFFPSPESSCDVKLVEKSFETDTNLNFQNLSVIGFRILLLKVAGFNLLMTLRLWSSKRGRKKLLYIFKQPFMRPVQTTQEEDGCSCRFPEEEEGGCELRVKFSRSADAPAYQQGQNQLYNELNLGRREEYDVLDKRRGRDPEMGGKPQRRKNPQEGLYNELQKDKMAEAYSEIGMKGERRRGKGHDGLYQGLSTATKDTYDALHMQALPPR

SEQ ID NO: 30625 - protein, 295 aa, synthetic construct
IQNPDPAVYQLRDSKSSDKSVCLFTDFDSQTNVSQSKDSDVYITDKTVLDMRSMDFKSNRAVAWSNKSDFACANAFNNSIIPEDTFFPSSDVPCDVKLVEKSFETDTNLNFQNLSVIGFRILLLKVAGFNLLMTLRLWSSKRGRKKLLYIFKQPFMRPVQTTQEEDGCSCRFPEEEEGGCELRVKFSRSADAPAYQQGQNQLYNELNLGRREEYDVLDKRRGRDPEMGGKPQRRKNPQEGLYNELQKDKMAEAYSEIGMKGERRRGKGHDGLYQGLSTATKDTYDALHMQALPPR

SEQ ID NO: 30626 - protein, 295 aa, synthetic construct
IQNPDPAVYQLRDSKSSDKSVCLFTDFDSQTNVSQSKDSDVYITDKTVLDMRSMDFKSNSAVAWSNKSDFACANAFNNSIIPEDTFFPSSDSSCDVKLVEKSFETDTNLNFQNLSVIGFRILLLKVAGFNLLMTLRLWSSKRGRKKLLYIFKQPFMRPVQTTQEEDGCSCRFPEEEEGGCELRVKFSRSADAPAYQQGQNQLYNELNLGRREEYDVLDKRRGRDPEMGGKPQRRKNPQEGLYNELQKDKMAEAYSEIGMKGERRRGKGHDGLYQGLSTATKDTYDALHMQALPPR

SEQ ID NO: 30627 - protein, 394 aa, synthetic construct
IQNPDPAVYQLRDSKSSDKSVCLFTDFDSQTNVSQSKDSDVYITDKTVLDMRSMDFKSNSAVAWSNKSDFACANAFNNSIIPEDTFFPSPESSCGTQSFGLLDPKLCYLLDGILFIYGVILTALFLRVKFSRSADAPAYQQGQNQLYNELNLGRREEYDVLDKRRGRDPEMGGKPQRRKNPQEGLYNELQKDKMAEAYSEIGMKGERRRGKGHDGLYQGLSTATKDTYDALHMQALPPRKRGRKKLLYIFKQPFMRPVQTTQEEDGCSCRFPEEEEGGCELRVKFSRSADAPAYQQGQNQLYNELNLGRREEYDVLDKRRGRDPEMGGKPQRRKNPQEGLYNELQKDKMAEAYSEIGMKGERRRGKGHDGLYQGLSTATKDTYDALHMQALPPR

SEQ ID NO: 30628 - protein, 291 aa, synthetic construct
IQNPEPAVYQLKDPRSQDSTLCLFTDFDSQINVPKTMESGTFITDKTVLDMKAMDSKSNGAIAWSNQTSFTCQDIFKETNATYPSSDVPCDATLTEKSFETDMNLNFQNLSVMGLRILLLKVAGFNLLMTLRLWSSKRGRKKLLYIFKQPFMRPVQTTQEEDGCSCRFPEEEEGGCELRVKFSRSADAPAYQQGQNQLYNELNLGRREEYDVLDKRRGRDPEMGGKPQRRKNPQEGLYNELQKDKMAEAYSEIGMKGERRRGKGHDGLYQGLSTATKDTYDALHMQALPPR

SEQ ID NO: 30629 - protein, 288 aa, synthetic construct
VQDPDPSVYQMRSPKTGRTVCLFTDFDSQADFQKPEGATVISLNSTVLDMKVMDSKSNGALTWNSETNIECKENFQQPFYPSSNYSCDAKLIEKSFETDMDLNFYNLLVIGLRILLLKVIGFNLFMTLRLWSCKRGRKKLLYIFKQPFMRPVQTTQEEDGCSCRFPEEEEGGCELRVKFSRSADAPAYQQGQNQLYNELNLGRREEYDVLDKRRGRDPEMGGKPQRRKNPQEGLYNELQKDKMAEAYSEIGMKGERRRGKGHDGLYQGLSTATKDTYDALHMQALPPR

SEQ ID NO: 30630 - protein, 332 aa, synthetic construct
EDLNKVFPPEVAVFEPSEAEISHTQKATLVCLATGFFPDHVELSWWVNGKEVHSGVSTDPQPLKEQPALNDSRYCLSSRLRVSATFWQNPRNHFRCQVQFYGLSENDEWTQDRAKPVTQIVSAEAWGRADCGFTSVSYQQGVLSATILYEILLGKATLYAVLVSALVLMAMVKRKDFKRGRKKLLYIFKQPFMRPVQTTQEEDGCSCRFPEEEEGGCELRVKFSRSADAPAYQQGQNQLYNELNLGRREEYDVLDKRRGRDPEMGGKPQRRKNPQEGLYNELQKDKMAEAYSEIGMKGERRRGKGHDGLYQGLSTATKDTYDALHMQALPPR

SEQ ID NO: 30631 - protein, 334 aa, synthetic construct
EDLKNVFPPEVAVFEPSEAEISHTQKATLVCLATGFYPDHVELSWWVNGKEVHSGVSTDPQPLKEQPALNDSRYCLSSRLRVSATFWQNPRNHFRCQVQFYGLSENDEWTQDRAKPVTQIVSAEAWGRADCGFTSESYQQGVLSATILYEILLGKATLYAVLVSALVLMAMVKRKDSRGKRGRKKLLYIFKQPFMRPVQTTQEEDGCSCRFPEEEEGGCELRVKFSRSADAPAYQQGQNQLYNELNLGRREEYDVLDKRRGRDPEMGGKPQRRKNPQEGLYNELQKDKMAEAYSEIGMKGERRRGKGHDGLYQGLSTATKDTYDALHMQALPPR

SEQ ID NO: 30632 - protein, 334 aa, synthetic construct; identical to SEQ ID NO: 30631

SEQ ID NO: 30633 - protein, 334 aa, synthetic construct
EDLKNVFPPEVAVFEPSEAEISHTQKATLVCLATGFYPDHVELSWWVNGKEVHSGVCTDPQPLKEQPALNDSRYCLSSRLRVSATFWQNPRNHFRCQVQFYGLSENDEWTQDRAKPVTQIVSAEAWGRADCGFTSESYQQGVLSATILYEILLGKATLYAVLVSALVLMAMVKRKDSRGKRGRKKLLYIFKQPFMRPVQTTQEEDGCSCRFPEEEEGGCELRVKFSRSADAPAYQQGQNQLYNELNLGRREEYDVLDKRRGRDPEMGGKPQRRKNPQEGLYNELQKDKMAEAYSEIGMKGERRRGKGHDGLYQGLSTATKDTYDALHMQALPPR

SEQ ID NO: 30634 - protein, 334 aa, synthetic construct
EDLKNVFPPEVAVFEPSKAEIAHTQKATLVCLATGFYPDHVELSWWVNGKEVHSGVCTDPQPLKEQPALNDSRYCLSSRLRVSATFWQNPRNHFRCQVQFYGLSENDEWTQDRAKPVTQIVSAEAWGRADCGITSASYHQGVLSATILYEILLGKATLYAVLVSALVLMAMVKRKDSRGKRGRKKLLYIFKQPFMRPVQTTQEEDGCSCRFPEEEEGGCELRVKFSRSADAPAYQQGQNQLYNELNLGRREEYDVLDKRRGRDPEMGGKPQRRKNPQEGLYNELQKDKMAEAYSEIGMKGERRRGKGHDGLYQGLSTATKDTYDALHMQALPPR

SEQ ID NO: 30635 - protein, 334 aa, synthetic construct; identical to SEQ ID NO: 30631

SEQ ID NO: 30636 - protein, 333 aa, synthetic construct
DLKNVFPPEVAVFEPSEAEISHTQKATLVCLATGFYPDHVELSWWVNGKEVHSGVSTDPQPLKEQPALNDSRYCLSSRLRVSATFWQNPRNHFRCQVQFYGLSENDEWTQDRAKPVTQIVSAEAWGRADCGFTSESYQQGVLSATILYEILLGKATLYAVLVSALVLMAMVKRKDSRGKRGRKKLLYIFKQPFMRPVQTTQEEDGCSCRFPEEEEGGCELRVKFSRSADAPAYQQGQNQLYNELNLGRREEYDVLDKRRGRDPEMGGKPQRRKNPQEGLYNELQKDKMAEAYSEIGMKGERRRGKGHDGLYQGLSTATKDTYDALHMQALPPR

SEQ ID NO: 30637 - protein, 332 aa, synthetic construct
EDLKNVFPPEVAVFEPSEAEISHTQKATLVCLATGFFPDHVELSWWVNGKEVHSGVSTDPQPLKEQPALNDSRYCLSSRLRVSATFWQNPRNHFRCQVQFYGLSENDEWTQDRAKPVTQIVSAEAWGRADCGFTSESYQQGVLSATILYEILLGKATLYAVLVSALVLMAMVKRKDFKRGRKKLLYIFKQPFMRPVQTTQEEDGCSCRFPEEEEGGCELRVKFSRSADAPAYQQGQNQLYNELNLGRREEYDVLDKRRGRDPEMGGKPQRRKNPQEGLYNELQKDKMAEAYSEIGMKGERRRGKGHDGLYQGLSTATKDTYDALHMQALPPR

SEQ ID NO: 30638 - protein, 332 aa, synthetic construct; identical to SEQ ID NO: 30630

SEQ ID NO: 30639 - protein, 334 aa, synthetic construct
EDLKNVFPPEVAVFEPSKAEIAHTQKATLVCLATGFYPDHVELSWWVNGKEVHSGVSTDPQPLKEQPALNDSRYCLSSRLRVSATFWQNPRNHFRCQVQFYGLSENDEWTQDRAKPVTQIVSAEAWGRADCGITSASYHQGVLSATILYEILLGKATLYAVLVSALVLMAMVKRKDSRGKRGRKKLLYIFKQPFMRPVQTTQEEDGCSCRFPEEEEGGCELRVKFSRSADAPAYQQGQNQLYNELNLGRREEYDVLDKRRGRDPEMGGKPQRRKNPQEGLYNELQKDKMAEAYSEIGMKGERRRGKGHDGLYQGLSTATKDTYDALHMQALPPR

SEQ ID NO: 30640 - protein, 334 aa, synthetic construct
EDLKNVFPPEVAVFEPSKAEIAHTQKATLVCLATGFYPDHVELSWWVNGKEVHSGVSTDPQPLKEQPALNDSRYCLSSRLRVSATFWQNPRNHFRCQVQFYGLSENDEWTQDRAKPVTQIVSAEAWGRADCGFTSESYQQGVLSATILYEILLGKATLYAVLVSALVLMAMVKRKDSRGKRGRKKLLYIFKQPFMRPVQTTQEEDGCSCRFPEEEEGGCELRVKFSRSADAPAYQQGQNQLYNELNLGRREEYDVLDKRRGRDPEMGGKPQRRKNPQEGLYNELQKDKMAEAYSEIGMKGERRRGKGHDGLYQGLSTATKDTYDALHMQALPPR

SEQ ID NO: 30641 - protein, 334 aa, synthetic construct
EDLKNVFPPEVAVFEPSKAEISHTQKATLVCLATGFYPDHVELSWWVNGKEVHSGVSTDPQPLKEQPALNDSRYCLSSRLRVSATFWQNPRNHFRCQVQFYGLSENDEWTQDRAKPVTQIVSAEAWGRADCGITSESYQQGVLSATILYEILLGKATLYAVLVSALVLMAMVKRKDSRGKRGRKKLLYIFKQPFMRPVQTTQEEDGCSCRFPEEEEGGCELRVKFSRSADAPAYQQGQNQLYNELNLGRREEYDVLDKRRGRDPEMGGKPQRRKNPQEGLYNELQKDKMAEAYSEIGMKGERRRGKGHDGLYQGLSTATKDTYDALHMQALPPR

SEQ ID NO: 30642 - protein, 334 aa, synthetic construct
EDLKNVFPPEVAVFEPSKAEISHTQKATLVCLATGFYPDHVELSWWVNGKEVHSGVSTDPQPLKEQPALNDSRYCLSSRLRVSATFWQNPRNHFRCQVQFYGLSENDEWTQDRAKPVTQIVSAEAWGRADCGFTSASYQQGVLSATILYEILLGKATLYAVLVSALVLMAMVKRKDSRGKRGRKKLLYIFKQPFMRPVQTTQEEDGCSCRFPEEEEGGCELRVKFSRSADAPAYQQGQNQLYNELNLGRREEYDVLDKRRGRDPEMGGKPQRRKNPQEGLYNELQKDKMAEAYSEIGMKGERRRGKGHDGLYQGLSTATKDTYDALHMQALPPR

SEQ ID NO: 30643 - protein, 334 aa, synthetic construct
EDLKNVFPPEVAVFEPSKAEISHTQKATLVCLATGFYPDHVELSWWVNGKEVHSGVSTDPQPLKEQPALNDSRYCLSSRLRVSATFWQNPRNHFRCQVQFYGLSENDEWTQDRAKPVTQIVSAEAWGRADCGFTSESYHQGVLSATILYEILLGKATLYAVLVSALVLMAMVKRKDSRGKRGRKKLLYIFKQPFMRPVQTTQEEDGCSCRFPEEEEGGCELRVKFSRSADAPAYQQGQNQLYNELNLGRREEYDVLDKRRGRDPEMGGKPQRRKNPQEGLYNELQKDKMAEAYSEIGMKGERRRGKGHDGLYQGLSTATKDTYDALHMQALPPR

SEQ ID NO: 30644 - protein, 334 aa, synthetic construct
EDLKNVFPPEVAVFEPSRAEIAHTQKATLVCLATGFYPDHVELSWWVNGKEVHSGVSTDPQPLKEQPALNDSRYCLSSRLRVSATFWQNPRNHFRCQVQFYGLSENDEWTQDRAKPVTQIVSAEAWGRADCGFTSESYQQGVLSATILYEILLGKATLYAVLVSALVLMAMVKRKDSRGKRGRKKLLYIFKQPFMRPVQTTQEEDGCSCRFPEEEEGGCELRVKFSRSADAPAYQQGQNQLYNELNLGRREEYDVLDKRRGRDPEMGGKPQRRKNPQEGLYNELQKDKMAEAYSEIGMKGERRRGKGHDGLYQGLSTATKDTYDALHMQALPPR

SEQ ID NO: 30645 - protein, 334 aa, synthetic construct
EDLKNVFPPEVAVFEPSRAEISHTQKATLVCLATGFYPDHVELSWWVNGKEVHSGVSTDPQPLKEQPALNDSRYCLSSRLRVSATFWQNPRNHFRCQVQFYGLSENDEWTQDRAKPVTQIVSAEAWGRADCGFTSESYQQGVLSATILYEILLGKATLYAVLVSALVLMAMVKRKDSRGKRGRKKLLYIFKQPFMRPVQTTQEEDGCSCRFPEEEEGGCELRVKFSRSADAPAYQQGQNQLYNELNLGRREEYDVLDKRRGRDPEMGGKPQRRKNPQEGLYNELQKDKMAEAYSEIGMKGERRRGKGHDGLYQGLSTATKDTYDALHMQALPPR

SEQ ID NO: 30646 - protein, 334 aa, synthetic construct
EDLKNVFPPEVAVFEPSKAEIAHTQKATLVCLATGFYPDHVELSWWVNGKEVHSGVSTDPQPLKEQPALNDSRYCLSSGLRVSATFWQNPRNHFRCQVQFYGLSENDEWTQDRAKPVTQIVSAEAWGRADCGITSASYHQGVLSATILYEILLGKATLYAVLVSALVLMAMVKRKDSRGKRGRKKLLYIFKQPFMRPVQTTQEEDGCSCRFPEEEEGGCELRVKFSRSADAPAYQQGQNQLYNELNLGRREEYDVLDKRRGRDPEMGGKPQRRKNPQEGLYNELQKDKMAEAYSEIGMKGERRRGKGHDGLYQGLSTATKDTYDALHMQALPPR

SEQ ID NO: 30647 - protein, 334 aa, synthetic construct
EDLKNVFPPEVAVFEPSKAEIAHTQKATLVCLATGFYPDHVELSWWVNGKEVHSGVSTDPQPLKEQPALNDSRYCLSSGLRVSATFWQNPRNHFRCQVQFYGLSENDEWTQDRAKPVTQIVSAEAWGRADCGFTSESYQQGVLSATILYEILLGKATLYAVLVSALVLMAMVKRKDSRGKRGRKKLLYIFKQPFMRPVQTTQEEDGCSCRFPEEEEGGCELRVKFSRSADAPAYQQGQNQLYNELNLGRREEYDVLDKRRGRDPEMGGKPQRRKNPQEGLYNELQKDKMAEAYSEIGMKGERRRGKGHDGLYQGLSTATKDTYDALHMQALPPR

SEQ ID NO: 30648 - protein, 334 aa, synthetic construct
EDLKNVFPPEVAVFEPSEAEISHTQKATLVCLATGFYPDHVELSWWVNGKEVHSGVSTDPQPLKEQPALNDSRYCLSSGLRVSATFWQNPRNHFRCQVQFYGLSENDEWTQDRAKPVTQIVSAEAWGRADCGFTSESYQQGVLSATILYEILLGKATLYAVLVSALVLMAMVKRKDSRGKRGRKKLLYIFKQPFMRPVQTTQEEDGCSCRFPEEEEGGCELRVKFSRSADAPAYQQGQNQLYNELNLGRREEYDVLDKRRGRDPEMGGKPQRRKNPQEGLYNELQKDKMAEAYSEIGMKGERRRGKGHDGLYQGLSTATKDTYDALHMQALPPR

SEQ ID NO: 30649 - protein, 326 aa, synthetic construct
EDLRNVTPPKVSLFEPSKAEIANKQKATLVCLARGFFPDHVELSWWVNGKEVHSGVSTDPQAYKESNYSYCLSSRLRVSATFWHNPRNHFRCQVQFHGLSEEDKWPEGSPKPVTQNISAEAWGRACGITSSYQQGVLSATILYEILLGKATLYAVLVSTLVVMAMVKRKNSKRGRKKLLYIFKQPFMRPVQTTQEEDGCSCRFPEEEEGGCELRVKFSRSADAPAYQQGQNQLYNELNLGRREEYDVLDKRRGRDPEMGGKPQRRKNPQEGLYNELQKDKMAEAYSEIGMKGERRRGKGHDGLYQGLSTATKDTYDALHMQALPPR

SEQ ID NO: 30650 - protein, 332 aa, synthetic construct
EDLQKVTPPTVTVFEPSEAEISRTQKATLVCLARGFYPDHVELSWWVNGKEVTSGFSTDPQPDKERPSENDSSYCLSSRLRVSASFWHNPRNHFRCQVQFYGLGDDDEWKYDRVKPITQNISAEAWGRADCGFTSVSYHQGVLSATILYEILLGKATLYAVLVSILVLMAKVKRKGSKRGRKKLLYIFKQPFMRPVQTTQEEDGCSCRFPEEEEGGCELRVKFSRSADAPAYQQGQNQLYNELNLGRREEYDVLDKRRGRDPEMGGKPQRRKNPQEGLYNELQKDKMAEAYSEIGMKGERRRGKGHDGLYQGLSTATKDTYDALHMQALPPR

SEQ ID NO: 30651 - protein, 431 aa, synthetic construct
EDLKNVFPPEVAVFEPSEAEISHTQKATLVCLATGFYPDHVELSWWVNGKEVHSGVSTDPQPLKEQPALNDSRYCLSSRLRVSATFWQNPRNHFRCQVQFYGLSENDEWTQDRAKPVTQIVSAEAWGRADCGSQSFGLLDPKLCYLLDGILFIYGVILTALFLRVKFSRSADAPAYQQGQNQLYNELNLGRREEYDVLDKRRGRDPEMGGKPQRRKNPQEGLYNELQKDKMAEAYSEIGMKGERRRGKGHDGLYQGLSTATKDTYDALHMQALPPRKRGRKKLLYIFKQPFMRPVQTTQEEDGCSCRFPEEEEGGCELRVKFSRSADAPAYQQGQNQLYNELNLGRREEYDVLDKRRGRDPEMGGKPQRRKNPQEGLYNELQKDKMAEAYSEIGMKGERRRGKGHDGLYQGLSTATKDTYDALHMQALPPR

SEQ ID NO: 30652 - protein, 424 aa, synthetic construct
GCPALPTGVGGTPFPSLAPPIMLLVDGKQQMVVVCLVLDVAPPGLDSPIWFSAGNGSALDAFTYGPSPATDGTWTNLAHLSLPSEELASWEPLVCHTGPGAEGHSRSTQPMHLSGEASTARTCPQEPLRGTPGGALWLGVLRLLLFKLLLFDLLLTCSCLCDPAGPLPSPATTTRLRALGSHRLHPATETGGREATSSPRPQPRDRRWGDTPPGRKPGSPVWGEGSYLSSYPTCPAQAWCSRSRLRAPSSSLGAFFAGDLPPPLQAGAAKRGRKKLLYIFKQPFMRPVQTTQEEDGCSCRFPEEEEGGCELRVKFSRSADAPAYQQGQNQLYNELNLGRREEYDVLDKRRGRDPEMGGKPQRRKNPQEGLYNELQKDKMAEAYSEIGMKGERRRGKGHDGLYQGLSTATKDTYDALHMQALPPR

SEQ ID NO: 30653 - protein, 413 aa, synthetic construct
TPFPSLAPPIMLLVDGKQQMVVVCLVLDVAPPGLDSPIWFSAGNGSALDAFTYGPSPATDGTWTNLAHLSLPSEELASWEPLVCHTGPGAEGHSRSTQPMHLSGEASTARTCPQEPLRGTPGGALWLGVLRLLLFKLLLFDLLLTCSCLCDPAGPLPSPATTTRLRALGSHRLHPATETGGREATSSPRPQPRDRRWGDTPPGRKPGSPVWGEGSYLSSYPTCPAQAWCSRSALRAPSSSLGAFFAGDLPPPLQAGAAKRGRKKLLYIFKQPFMRPVQTTQEEDGCSCRFPEEEEGGCELRVKFSRSADAPAYQQGQNQLYNELNLGRREEYDVLDKRRGRDPEMGGKPQRRKNPQEGLYNELQKDKMAEAYSEIGMKGERRRGKGHDGLYQGLSTATKDTYDALHMQALPPR

SEQ ID NO: 30654 - protein, 365 aa, synthetic construct
TPFPSLAPPIMLLVDGKQQMVVVCLVLDVAPPGLDSPIWFSAGNGSALDAFTYGPSPATDGTWTNLAHLSLPSEELASWEPLVCHTGPGAEGHSRSTQPMHLSGEASTARTCPQEPLRGTPGGALWLGVLRLLLFKLLLFDLLLTCSCLCDPAGPLPSPATTTRLRALGSHRLHPATETGGREATSSPRPQPRDRRWGDTPPGRKPGSPVKRGRKKLLYIFKQPFMRPVQTTQEEDGCSCRFPEEEEGGCELRVKFSRSADAPAYQQGQNQLYNELNLGRREEYDVLDKRRGRDPEMGGKPQRRKNPQEGLYNELQKDKMAEAYSEIGMKGERRRGKGHDGLYQGLSTATKDTYDALHMQALPPR

SEQ ID NO: 30655 - protein, 344 aa, synthetic construct
DKQLDADVSPKPTIFLPSIAETKLQKAGTYLCLLEKFFPDIIKIHWQEKKSNTILGSQEGNTMKTNDTYMKFSWLTVPEESLDKEHRCIVRHENNKNGIDQEIIFPPIKTDVTTVDPKYNYSKDANDVITMDPKDNWSKDANDTLLLQLTNTSAYYMYLLLLLKSVVYFAIITCCLLGRTAFCCNGEKSKRGRKKLLYIFKQPFMRPVQTTQEEDGCSCRFPEEEEGGCELRVKFSRSADAPAYQQGQNQLYNELNLGRREEYDVLDKRRGRDPEMGGKPQRRKNPQEGLYNELQKDKMAEAYSEIGMKGERRRGKGHDGLYQGLSTATKDTYDALHMQALPPR

SEQ ID NO: 30656 - protein, 328 aa, synthetic construct
DKQLDADVSPKPTIFLPSIAETKLQKAGTYLCLLEKFFPDVIKIHWQEKKSNTILGSQEGNTMKTNDTYMKFSWLTVPEKSLDKEHRCIVRHENNKNGVDQEIIFPPIKTDVITMDPKDNCSKDANDTLLLQLTNTSAYYMYLLLLLKSVVYFAIITCCLLRRTAFCCNGEKSKRGRKKLLYIFKQPFMRPVQTTQEEDGCSCRFPEEEEGGCELRVKFSRSADAPAYQQGQNQLYNELNLGRREEYDVLDKRRGRDPEMGGKPQRRKNPQEGLYNELQKDKMAEAYSEIGMKGERRRGKGHDGLYQGLSTATKDTYDALHMQALPPR

SEQ ID NO: 30657 - protein, 308 aa, synthetic construct
SQPHTKPSVFVMKNGTNVACLVKEFYPKDIRINLVSSKKITEFDPAIVISPSGKYNAVKLGKYEDSNSVTCSVQHDNKTVHSTDFEVKTDSTDHVKPKETENTKQPSKSCHKPKAIVHTEKVNMMSLTVLGLRMLFAKTVAVNFLLTAKLFFLKRGRKKLLYIFKQPFMRPVQTTQEEDGCSCRFPEEEEGGCELRVKFSRSADAPAYQQGQNQLYNELNLGRREEYDVLDKRRGRDPEMGGKPQRRKNPQEGLYNELQKDKMAEAYSEIGMKGERRRGKGHDGLYQGLSTATKDTYDALHMQALPPR

SEQ ID NO: 30658 - protein, 308 aa, synthetic construct; identical to SEQ ID NO: 30657

SEQ ID NO: 30659 - protein, 262 aa, synthetic construct
IQNPDPAVYITDKTVLDMRSMDFKSNSAVAWSNKSDFACANAFNNSIIPEDTFFPSPESSCDVKLVEKSFETDTNLNFQNLSVIGFRILLLKVAGFNLLMTLRLWSSKRGRKKLLYIFKQPFMRPVQTTQEEDGCSCRFPEEEEGGCELRVKFSRSADAPAYQQGQNQLYNELNLGRREEYDVLDKRRGRDPEMGGKPQRRKNPQEGLYNELQKDKMAEAYSEIGMKGERRRGKGHDGLYQGLSTATKDTYDALHMQALPPR

SEQ ID NO: 30660 - protein, 334 aa, synthetic construct
EDLKNVFPPEVAVFEPSRAEISHTQKATLVCLATGFYPDHVELSWWVNGKEVHSGVCTDPQPLKEQPALNDSRYCLSSRLRVSATFWQNPRNHFRCQVQFYGLSENDEWTQDRAKPVTQIVSAEAWGRADCGFTSESYQQGVLSATILYEILLGKATLYAVLVSALVLMAMVKRKDSRGKRGRKKLLYIFKQPFMRPVQTTQEEDGCSCRFPEEEEGGCELRVKFSRSADAPAYQQGQNQLYNELNLGRREEYDVLDKRRGRDPEMGGKPQRRKNPQEGLYNELQKDKMAEAYSEIGMKGERRRGKGHDGLYQGLSTATKDTYDALHMQALPPR

SEQ ID NO: 30661 - protein, 334 aa, synthetic construct
EDLKNVFPPEVAVFEPSRAEIAHTQKATLVCLATGFYPDHVELSWWVNGKEVHSGVCTDPQPLKEQPALNDSRYCLSSRLRVSATFWQNPRNHFRCQVQFYGLSENDEWTQDRAKPVTQIVSAEAWGRADCGFTSESYQQGVLSATILYEILLGKATLYAVLVSALVLMAMVKRKDSRGKRGRKKLLYIFKQPFMRPVQTTQEEDGCSCRFPEEEEGGCELRVKFSRSADAPAYQQGQNQLYNELNLGRREEYDVLDKRRGRDPEMGGKPQRRKNPQEGLYNELQKDKMAEAYSEIGMKGERRRGKGHDGLYQGLSTATKDTYDALHMQALPPR

SEQ ID NO: 30662 - protein, 215 aa, synthetic construct
IPEDTFFPSPESSCDVKLVEKSFETDTNLNFQNLSVIGFRILLLKVAGFNLLMTLRLWSSKRGRKKLLYIFKQPFMRPVQTTQEEDGCSCRFPEEEEGGCELRVKFSRSADAPAYQQGQNQLYNELNLGRREEYDVLDKRRGRDPEMGGKPQRRKNPQEGLYNELQKDKMAEAYSEIGMKGERRRGKGHDGLYQGLSTATKDTYDALHMQALPPR

SEQ ID NO: 30663 - protein, 205 aa, synthetic construct
ESSCDVKLVEKSFETDTNLNFQNLSVIGFRILLLKVAGFNLLMTLRLWSSKRGRKKLLYIFKQPFMRPVQTTQEEDGCSCRFPEEEEGGCELRVKFSRSADAPAYQQGQNQLYNELNLGRREEYDVLDKRRGRDPEMGGKPQRRKNPQEGLYNELQKDKMAEAYSEIGMKGERRRGKGHDGLYQGLSTATKDTYDALHMQALPPR

SEQ ID NO: 30664 - protein, 334 aa, synthetic construct; identical to SEQ ID NO: 30633

SEQ ID NO: 30665 - protein, 270 aa, synthetic construct
EQPALNDSRYCLSSRLRVSATFWQNPRNHFRCQVQFYGLSENDEWTQDRAKPVTQIVSAEAWGRADCGFTSESYQQGVLSATILYEILLGKATLYAVLVSALVLMAMVKRKDSRGKRGRKKLLYIFKQPFMRPVQTTQEEDGCSCRFPEEEEGGCELRVKFSRSADAPAYQQGQNQLYNELNLGRREEYDVLDKRRGRDPEMGGKPQRRKNPQEGLYNELQKDKMAEAYSEIGMKGERRRGKGHDGLYQGLSTATKDTYDALHMQALPPR

SEQ ID NO: 30666 - protein, 208 aa, synthetic construct
GRADCGFTSESYQQGVLSATILYEILLGKATLYAVLVSALVLMAMVKRKDSRGKRGRKKLLYIFKQPFMRPVQTTQEEDGCSCRFPEEEEGGCELRVKFSRSADAPAYQQGQNQLYNELNLGRREEYDVLDKRRGRDPEMGGKPQRRKNPQEGLYNELQKDKMAEAYSEIGMKGERRRGKGHDGLYQGLSTATKDTYDALHMQALPPR

SEQ ID NO: 30667 - protein, 206 aa, synthetic construct
ADCGFTSESYQQGVLSATILYEILLGKATLYAVLVSALVLMAMVKRKDSRGKRGRKKLLYIFKQPFMRPVQTTQEEDGCSCRFPEEEEGGCELRVKFSRSADAPAYQQGQNQLYNELNLGRREEYDVLDKRRGRDPEMGGKPQRRKNPQEGLYNELQKDKMAEAYSEIGMKGERRRGKGHDGLYQGLSTATKDTYDALHMQALPPR

SEQ ID NO: 30668 - protein, 328 aa, synthetic construct; identical to SEQ ID NO: 30656

SEQ ID NO: 30669 - protein, 323 aa, synthetic construct
ADVSPKPTIFLPSIAETKLQKAGTYLCLLEKFFPDVIKIHWQEKKSNTILGSQEGNTMKTNDTYMKFSWLTVPEKSLDKEHRCIVRHENNKNGVDQEIIFPPIKTDVITMDPKDNCSKDANDTLLLQLTNTSAYYMYLLLLLKSVVYFAIITCCLLRRTAFCCNGEKSKRGRKKLLYIFKQPFMRPVQTTQEEDGCSCRFPEEEEGGCELRVKFSRSADAPAYQQGQNQLYNELNLGRREEYDVLDKRRGRDPEMGGKPQRRKNPQEGLYNELQKDKMAEAYSEIGMKGERRRGKGHDGLYQGLSTATKDTYDALHMQALPPR

SEQ ID NO: 30670 - protein, 321 aa, synthetic construct
VSPKPTIFLPSIAETKLQKAGTYLCLLEKFFPDVIKIHWQEKKSNTILGSQEGNTMKTNDTYMKFSWLTVPEKSLDKEHRCIVRHENNKNGVDQEIIFPPIKTDVITMDPKDNCSKDANDTLLLQLTNTSAYYMYLLLLLKSVVYFAIITCCLLRRTAFCCNGEKSKRGRKKLLYIFKQPFMRPVQTTQEEDGCSCRFPEEEEGGCELRVKFSRSADAPAYQQGQNQLYNELNLGRREEYDVLDKRRGRDPEMGGKPQRRKNPQEGLYNELQKDKMAEAYSEIGMKGERRRGKGHDGLYQGLSTATKDTYDALHMQALPPR

SEQ ID NO: 30671 - protein, 316 aa, synthetic construct
TIFLPSIAETKLQKAGTYLCLLEKFFPDVIKIHWQEKKSNTILGSQEGNTMKTNDTYMKFSWLTVPEKSLDKEHRCIVRHENNKNGVDQEIIFPPIKTDVITMDPKDNCSKDANDTLLLQLTNTSAYYMYLLLLLKSVVYFAIITCCLLRRTAFCCNGEKSKRGRKKLLYIFKQPFMRPVQTTQEEDGCSCRFPEEEEGGCELRVKFSRSADAPAYQQGQNQLYNELNLGRREEYDVLDKRRGRDPEMGGKPQRRKNPQEGLYNELQKDKMAEAYSEIGMKGERRRGKGHDGLYQGLSTATKDTYDALHMQALPPR

SEQ ID NO: 30672 - protein, 222 aa, synthetic construct
PIKTDVITMDPKDNCSKDANDTLLLQLTNTSAYYMYLLLLLKSVVYFAIITCCLLRRTAFCCNGEKSKRGRKKLLYIFKQPFMRPVQTTQEEDGCSCRFPEEEEGGCELRVKFSRSADAPAYQQGQNQLYNELNLGRREEYDVLDKRRGRDPEMGGKPQRRKNPQEGLYNELQKDKMAEAYSEIGMKGERRRGKGHDGLYQGLSTATKDTYDALHMQALPPR

SEQ ID NO: 30673 - protein, 214 aa, synthetic construct
MDPKDNCSKDANDTLLLQLTNTSAYYMYLLLLLKSVVYFAIITCCLLRRTAFCCNGEKSKRGRKKLLYIFKQPFMRPVQTTQEEDGCSCRFPEEEEGGCELRVKFSRSADAPAYQQGQNQLYNELNLGRREEYDVLDKRRGRDPEMGGKPQRRKNPQEGLYNELQKDKMAEAYSEIGMKGERRRGKGHDGLYQGLSTATKDTYDALHMQALPPR

SEQ ID NO: 30674 - protein, 308 aa, synthetic construct; identical to SEQ ID NO: 30657

SEQ ID NO: 30675 - protein, 223 aa, synthetic construct
EVKTDSTDHVKPKETENTKQPSKSCHKPKAIVHTEKVNMMSLTVLGLRMLFAKTVAVNFLLTAKLFFLKRGRKKLLYIFKQPFMRPVQTTQEEDGCSCRFPEEEEGGCELRVKFSRSADAPAYQQGQNQLYNELNLGRREEYDVLDKRRGRDPEMGGKPQRRKNPQEGLYNELQKDKMAEAYSEIGMKGERRRGKGHDGLYQGLSTATKDTYDALHMQALPPR

SEQ ID NO: 30676 - protein, 216 aa, synthetic construct
DHVKPKETENTKQPSKSCHKPKAIVHTEKVNMMSLTVLGLRMLFAKTVAVNFLLTAKLFFLKRGRKKLLYIFKQPFMRPVQTTQEEDGCSCRFPEEEEGGCELRVKFSRSADAPAYQQGQNQLYNELNLGRREEYDVLDKRRGRDPEMGGKPQRRKNPQEGLYNELQKDKMAEAYSEIGMKGERRRGKGHDGLYQGLSTATKDTYDALHMQALPPR

SEQ ID NO: 30677 - protein, 332 aa, synthetic construct
EDLKNVFPPEVAVFEPSEAEISHTQKATLVCLATGFYPDHVELSWWVNGKEVHSGVCTDPQPLKEQPALNDSRYCLSSRLRVSATFWQNPRNHFRCQVQFYGLSENDEWTQDRAKPVTQIVSAEAWGRADCDVKLVEKSFETDTNLNFQNLSVIGFRILLLKVAGFNLLMTLRLWSSKRGRKKLLYIFKQPFMRPVQTTQEEDGCSCRFPEEEEGGCELRVKFSRSADAPAYQQGQNQLYNELNLGRREEYDVLDKRRGRDPEMGGKPQRRKNPQEGLYNELQKDKMAEAYSEIGMKGERRRGKGHDGLYQGLSTATKDTYDALHMQALPPR

SEQ ID NO: 30678 - protein, 297 aa, synthetic construct
IQNPDPAVYQLRDSKSSDKSVCLFTDFDSQTNVSQSKDSDVYITDKCVLDMRSMDFKSNSAVAWSNKSDFACANAFNNSIIPEDTFFPSPESSCGFTSESYQQGVLSATILYEILLGKATLYAVLVSALVLMAMVKRKDSRGKRGRKKLLYIFKQPFMRPVQTTQEEDGCSCRFPEEEEGGCELRVKFSRSADAPAYQQGQNQLYNELNLGRREEYDVLDKRRGRDPEMGGKPQRRKNPQEGLYNELQKDKMAEAYSEIGMKGERRRGKGHDGLYQGLSTATKDTYDALHMQALPPR

SEQ ID NO: 30679 - protein, 329 aa, synthetic construct
EDLKNVFPPEVAVFEPSEAEISHTQKATLVCLATGFYPDHVELSWWVNGKEVHSGVCTDPQPLKEQPALNDSRYCLSSRLRVSATFWQNPRNHFRCQVQFYGLSENDEWTQDRAKPVTQIVSAEAWGRADCGFTSESYQQGVLSATNLSVIGFRILLLKVAGFNLLMTLRLWSSKRGRKKLLYIFKQPFMRPVQTTQEEDGCSCRFPEEEEGGCELRVKFSRSADAPAYQQGQNQLYNELNLGRREEYDVLDKRRGRDPEMGGKPQRRKNPQEGLYNELQKDKMAEAYSEIGMKGERRRGKGHDGLYQGLSTATKDTYDALHMQALPPR

SEQ ID NO: 30680 - protein, 300 aa, synthetic construct
IQNPDPAVYQLRDSKSSDKSVCLFTDFDSQTNVSQSKDSDVYITDKCVLDMRSMDFKSNSAVAWSNKSDFACANAFNNSIIPEDTFFPSPESSCDVKLVEKSFETDTNLNFQILYEILLGKATLYAVLVSALVLMAMVKRKDSRGKRGRKKLLYIFKQPFMRPVQTTQEEDGCSCRFPEEEEGGCELRVKFSRSADAPAYQQGQNQLYNELNLGRREEYDVLDKRRGRDPEMGGKPQRRKNPQEGLYNELQKDKMAEAYSEIGMKGERRRGKGHDGLYQGLSTATKDTYDALHMQALPPR

SEQ ID NO: 30681 - protein, 315 aa, synthetic construct
IQNPDPAVYQLRDSKSSDKSVCLFTDFDSQTNVSQSKDSDVYITDKCVLDMRSMDFKSNSAVAWSNKSDFACANAFNNSIIPEDTFFPSPESSDSTDHVKPKETENTKQPSKSCHKPKAIVHTEKVNMMSLTVLGLRMLFAKTVAVNFLLTAKLFFLLTAKRGRKKLLYIFKQPFMRPVQTTQEEDGCSCRFPEEEEGGCELRVKFSRSADAPAYQQGQNQLYNELNLGRREEYDVLDKRRGRDPEMGGKPQRRKNPQEGLYNELQKDKMAEAYSEIGMKGERRRGKGHDGLYQGLSTATKDTYDALHMQALPPR

SEQ ID NO: 30682 - protein, 418 aa, synthetic construct
EDLKNVFPPEVAVFEPSEAEISHTQKATLVCLATGFYPDHVELSWWVNGKEVHSGVCTDPQPLKEQPALNDSRYCLSSRLRVSATFWQNPRNHFRCQVQFYGLSENDEWTQDRAKPVTQIVSAEAWGRADDVIKIHWQEKKSNTILGSQEGNTMKTNDTYMKFSWLTVPEKSLDKEHRCIVRHENNKNGVDQEIIFPPIKTDVITMDPKDNCSKDANDTLLLQLTNTSAYYMYLLLLLKSVVYFAIITCCLLMAMVKRKDSRGKRGRKKLLYIFKQPFMRPVQTTQEEDGCSCRFPEEEEGGCELRVKFSRSADAPAYQQGQNQLYNELNLGRREEYDVLDKRRGRDPEMGGKPQRRKNPQEGLYNELQKDKMAEAYSEIGMKGERRRGKGHDGLYQGLSTATKDTYDALHMQALPPR

SEQ ID NO: 30683 - protein, 332 aa, synthetic construct
EDLKNVFPPEVAVFEPSEAEISHTQKATLVCLATGFYPDHVELSWWVNGKEVHSGVSTDPQPLKEQPALNDSRYCLSSRLRVSATFWQNPRNHFRCQVQFYGLSENDEWTQDRAKPVTQIVSAEAWGRADCDVKLVEKSFETDTNLNFQNLSVIGFRILLLKVAGFNLLMTLRLWSSKRGRKKLLYIFKQPFMRPVQTTQEEDGCSCRFPEEEEGGCELRVKFSRSADAPAYQQGQNQLYNELNLGRREEYDVLDKRRGRDPEMGGKPQRRKNPQEGLYNELQKDKMAEAYSEIGMKGERRRGKGHDGLYQGLSTATKDTYDALHMQALPPR

SEQ ID NO: 30684 - protein, 297 aa, synthetic construct
IQNPDPAVYQLRDSKSSDKSVCLFTDFDSQTNVSQSKDSDVYITDKTVLDMRSMDFKSNSAVAWSNKSDFACANAFNNSIIPEDTFFPSPESSCGFTSESYQQGVLSATILYEILLGKATLYAVLVSALVLMAMVKRKDSRGKRGRKKLLYIFKQPFMRPVQTTQEEDGCSCRFPEEEEGGCELRVKFSRSADAPAYQQGQNQLYNELNLGRREEYDVLDKRRGRDPEMGGKPQRRKNPQEGLYNELQKDKMAEAYSEIGMKGERRRGKGHDGLYQGLSTATKDTYDALHMQALPPR

SEQ ID NO: 30685 - protein, 329 aa, synthetic construct
EDLKNVFPPEVAVFEPSEAEISHTQKATLVCLATGFYPDHVELSWWVNGKEVHSGVSTDPQPLKEQPALNDSRYCLSSRLRVSATFWQNPRNHFRCQVQFYGLSENDEWTQDRAKPVTQIVSAEAWGRADCGFTSESYQQGVLSATNLSVIGFRILLLKVAGFNLLMTLRLWSSKRGRKKLLYIFKQPFMRPVQTTQEEDGCSCRFPEEEEGGCELRVKFSRSADAPAYQQGQNQLYNELNLGRREEYDVLDKRRGRDPEMGGKPQRRKNPQEGLYNELQKDKMAEAYSEIGMKGERRRGKGHDGLYQGLSTATKDTYDALHMQALPPR

SEQ ID NO: 30686 - protein, 300 aa, synthetic construct
IQNPDPAVYQLRDSKSSDKSVCLFTDFDSQTNVSQSKDSDVYITDKTVLDMRSMDFKSNSAVAWSNKSDFACANAFNNSIIPEDTFFPSPESSCDVKLVEKSFETDTNLNFQILYEILLGKATLYAVLVSALVLMAMVKRKDSRGKRGRKKLLYIFKQPFMRPVQTTQEEDGCSCRFPEEEEGGCELRVKFSRSADAPAYQQGQNQLYNELNLGRREEYDVLDKRRGRDPEMGGKPQRRKNPQEGLYNELQKDKMAEAYSEIGMKGERRRGKGHDGLYQGLSTATKDTYDALHMQALPPR

SEQ ID NO: 30687 - protein, 315 aa, synthetic construct
IQNPDPAVYQLRDSKSSDKSVCLFTDFDSQTNVSQSKDSDVYITDKTVLDMRSMDFKSNSAVAWSNKSDFACANAFNNSIIPEDTFFPSPESSDSTDHVKPKETENTKQPSKSCHKPKAIVHTEKVNMMSLTVLGLRMLFAKTVAVNFLLTAKLFFLLTAKRGRKKLLYIFKQPFMRPVQTTQEEDGCSCRFPEEEEGGCELRVKFSRSADAPAYQQGQNQLYNELNLGRREEYDVLDKRRGRDPEMGGKPQRRKNPQEGLYNELQKDKMAEAYSEIGMKGERRRGKGHDGLYQGLSTATKDTYDALHMQALPPR

SEQ ID NO: 30688 - protein, 418 aa, synthetic construct
EDLKNVFPPEVAVFEPSEAEISHTQKATLVCLATGFYPDHVELSWWVNGKEVHSGVSTDPQPLKEQPALNDSRYCLSSRLRVSATFWQNPRNHFRCQVQFYGLSENDEWTQDRAKPVTQIVSAEAWGRADDVIKIHWQEKKSNTILGSQEGNTMKTNDTYMKFSWLTVPEKSLDKEHRCIVRHENNKNGVDQEIIFPPIKTDVITMDPKDNCSKDANDTLLLQLTNTSAYYMYLLLLLKSVVYFAIITCCLLMAMVKRKDSRGKRGRKKLLYIFKQPFMRPVQTTQEEDGCSCRFPEEEEGGCELRVKFSRSADAPAYQQGQNQLYNELNLGRREEYDVLDKRRGRDPEMGGKPQRRKNPQEGLYNELQKDKMAEAYSEIGMKGERRRGKGHDGLYQGLSTATKDTYDALHMQALPPR

SEQ ID NO: 30689 - protein, 312 aa, synthetic construct
IQNPDPAVYQLRDSKSSDKSVCLFTDFDSQTNVSQSKDSDVYITDKCVLDMRSMDFKSNSAVAWSNKSDFACANAFNNSIIPEDTFFPSPESSDSTDHVKPKETENTKQPSKSCHKPKAIVHTEKVNMMSLTVLGLRMLFAKTVAVNFLLTAKLFFLKRGRKKLLYIFKQPFMRPVQTTQEEDGCSCRFPEEEEGGCELRVKFSRSADAPAYQQGQNQLYNELNLGRREEYDVLDKRRGRDPEMGGKPQRRKNPQEGLYNELQKDKMAEAYSEIGMKGERRRGKGHDGLYQGLSTATKDTYDALHMQALPPR

SEQ ID NO: 30690 - protein, 419 aa, synthetic construct
EDLKNVFPPEVAVFEPSEAEISHTQKATLVCLATGFYPDHVELSWWVNGKEVHSGVCTDPQPLKEQPALNDSRYCLSSRLRVSATFWQNPRNHFRCQVQFYGLSENDEWTQDRAKPVTQIVSAEAWGRADDVIKIHWQEKKSNTILGSQEGNTMKTNDTYMKFSWLTVPEKSLDKEHRCIVRHENNKNGVDQEIIFPPIKTDVITMDPKDNCSKDANDTLLLQLTNTSAYYMYLLLLLKSVVYFAIITCCLLRRTAFCCNGEKSKRGRKKLLYIFKQPFMRPVQTTQEEDGCSCRFPEEEEGGCELRVKFSRSADAPAYQQGQNQLYNELNLGRREEYDVLDKRRGRDPEMGGKPQRRKNPQEGLYNELQKDKMAEAYSEIGMKGERRRGKGHDGLYQGLSTATKDTYDALHMQALPPR

SEQ ID NO: 30691 - protein, 312 aa, synthetic construct
IQNPDPAVYQLRDSKSSDKSVCLFTDFDSQTNVSQSKDSDVYITDKTVLDMRSMDFKSNSAVAWSNKSDFACANAFNNSIIPEDTFFPSPESSDSTDHVKPKETENTKQPSKSCHKPKAIVHTEKVNMMSLTVLGLRMLFAKTVAVNFLLTAKLFFLKRGRKKLLYIFKQPFMRPVQTTQEEDGCSCRFPEEEEGGCELRVKFSRSADAPAYQQGQNQLYNELNLGRREEYDVLDKRRGRDPEMGGKPQRRKNPQEGLYNELQKDKMAEAYSEIGMKGERRRGKGHDGLYQGLSTATKDTYDALHMQALPPR

SEQ ID NO: 30692 - protein, 419 aa, synthetic construct
EDLKNVFPPEVAVFEPSEAEISHTQKATLVCLATGFYPDHVELSWWVNGKEVHSGVSTDPQPLKEQPALNDSRYCLSSRLRVSATFWQNPRNHFRCQVQFYGLSENDEWTQDRAKPVTQIVSAEAWGRADDVIKIHWQEKKSNTILGSQEGNTMKTNDTYMKFSWLTVPEKSLDKEHRCIVRHENNKNGVDQEIIFPPIKTDVITMDPKDNCSKDANDTLLLQLTNTSAYYMYLLLLLKSVVYFAIITCCLLRRTAFCCNGEKSKRGRKKLLYIFKQPFMRPVQTTQEEDGCSCRFPEEEEGGCELRVKFSRSADAPAYQQGQNQLYNELNLGRREEYDVLDKRRGRDPEMGGKPQRRKNPQEGLYNELQKDKMAEAYSEIGMKGERRRGKGHDGLYQGLSTATKDTYDALHMQALPPR

SEQ ID NO: 30693 - protein, 297 aa, synthetic construct; identical to SEQ ID NO: 30678

SEQ ID NO: 30694 - protein, 296 aa, synthetic construct
QNPDPAVYQLRDSKSSDKSVCLFTDFDSQTNVSQSKDSDVYITDKCVLDMRSMDFKSNSAVAWSNKSDFACANAFNNSIIPEDTFFPSPESSCGFTSESYQQGVLSATILYEILLGKATLYAVLVSALVLMAMVKRKDSRGKRGRKKLLYIFKQPFMRPVQTTQEEDGCSCRFPEEEEGGCELRVKFSRSADAPAYQQGQNQLYNELNLGRREEYDVLDKRRGRDPEMGGKPQRRKNPQEGLYNELQKDKMAEAYSEIGMKGERRRGKGHDGLYQGLSTATKDTYDALHMQALPPR

SEQ ID NO: 30695 - protein, 295 aa, synthetic construct
NPDPAVYQLRDSKSSDKSVCLFTDFDSQTNVSQSKDSDVYITDKCVLDMRSMDFKSNSAVAWSNKSDFACANAFNNSIIPEDTFFPSPESSCGFTSESYQQGVLSATILYEILLGKATLYAVLVSALVLMAMVKRKDSRGKRGRKKLLYIFKQPFMRPVQTTQEEDGCSCRFPEEEEGGCELRVKFSRSADAPAYQQGQNQLYNELNLGRREEYDVLDKRRGRDPEMGGKPQRRKNPQEGLYNELQKDKMAEAYSEIGMKGERRRGKGHDGLYQGLSTATKDTYDALHMQALPPR

SEQ ID NO: 30696 - protein, 294 aa, synthetic construct
PDPAVYQLRDSKSSDKSVCLFTDFDSQTNVSQSKDSDVYITDKCVLDMRSMDFKSNSAVAWSNKSDFACANAFNNSIIPEDTFFPSPESSCGFTSESYQQGVLSATILYEILLGKATLYAVLVSALVLMAMVKRKDSRGKRGRKKLLYIFKQPFMRPVQTTQEEDGCSCRFPEEEEGGCELRVKFSRSADAPAYQQGQNQLYNELNLGRREEYDVLDKRRGRDPEMGGKPQRRKNPQEGLYNELQKDKMAEAYSEIGMKGERRRGKGHDGLYQGLSTATKDTYDALHMQALPPR

SEQ ID NO: 30697 - protein, 293 aa, synthetic construct
DPAVYQLRDSKSSDKSVCLFTDFDSQTNVSQSKDSDVYITDKCVLDMRSMDFKSNSAVAWSNKSDFACANAFNNSIIPEDTFFPSPESSCGFTSESYQQGVLSATILYEILLGKATLYAVLVSALVLMAMVKRKDSRGKRGRKKLLYIFKQPFMRPVQTTQEEDGCSCRFPEEEEGGCELRVKFSRSADAPAYQQGQNQLYNELNLGRREEYDVLDKRRGRDPEMGGKPQRRKNPQEGLYNELQKDKMAEAYSEIGMKGERRRGKGHDGLYQGLSTATKDTYDALHMQALPPR

SEQ ID NO: 30698 - protein, 292 aa, synthetic construct
PAVYQLRDSKSSDKSVCLFTDFDSQTNVSQSKDSDVYITDKCVLDMRSMDFKSNSAVAWSNKSDFACANAFNNSIIPEDTFFPSPESSCGFTSESYQQGVLSATILYEILLGKATLYAVLVSALVLMAMVKRKDSRGKRGRKKLLYIFKQPFMRPVQTTQEEDGCSCRFPEEEEGGCELRVKFSRSADAPAYQQGQNQLYNELNLGRREEYDVLDKRRGRDPEMGGKPQRRKNPQEGLYNELQKDKMAEAYSEIGMKGERRRGKGHDGLYQGLSTATKDTYDALHMQALPPR

SEQ ID NO: 30699 - protein, 291 aa, synthetic construct
AVYQLRDSKSSDKSVCLFTDFDSQTNVSQSKDSDVYITDKCVLDMRSMDFKSNSAVAWSNKSDFACANAFNNSIIPEDTFFPSPESSCGFTSESYQQGVLSATILYEILLGKATLYAVLVSALVLMAMVKRKDSRGKRGRKKLLYIFKQPFMRPVQTTQEEDGCSCRFPEEEEGGCELRVKFSRSADAPAYQQGQNQLYNELNLGRREEYDVLDKRRGRDPEMGGKPQRRKNPQEGLYNELQKDKMAEAYSEIGMKGERRRGKGHDGLYQGLSTATKDTYDALHMQALPPR

SEQ ID NO: 30700 - protein, 290 aa, synthetic construct
VYQLRDSKSSDKSVCLFTDFDSQTNVSQSKDSDVYITDKCVLDMRSMDFKSNSAVAWSNKSDFACANAFNNSIIPEDTFFPSPESSCGFTSESYQQGVLSATILYEILLGKATLYAVLVSALVLMAMVKRKDSRGKRGRKKLLYIFKQPFMRPVQTTQEEDGCSCRFPEEEEGGCELRVKFSRSADAPAYQQGQNQLYNELNLGRREEYDVLDKRRGRDPEMGGKPQRRKNPQEGLYNELQKDKMAEAYSEIGMKGERRRGKGHDGLYQGLSTATKDTYDALHMQALPPR

SEQ ID NO: 30701 - protein, 289 aa, synthetic construct
YQLRDSKSSDKSVCLFTDFDSQTNVSQSKDSDVYITDKCVLDMRSMDFKSNSAVAWSNKSDFACANAFNNSIIPEDTFFPSPESSCGFTSESYQQGVLSATILYEILLGKATLYAVLVSALVLMAMVKRKDSRGKRGRKKLLYIFKQPFMRPVQTTQEEDGCSCRFPEEEEGGCELRVKFSRSADAPAYQQGQNQLYNELNLGRREEYDVLDKRRGRDPEMGGKPQRRKNPQEGLYNELQKDKMAEAYSEIGMKGERRRGKGHDGLYQGLSTATKDTYDALHMQALPPR

SEQ ID NO: 30702 - protein, 288 aa, synthetic construct
QLRDSKSSDKSVCLFTDFDSQTNVSQSKDSDVYITDKCVLDMRSMDFKSNSAVAWSNKSDFACANAFNNSIIPEDTFFPSPESSCGFTSESYQQGVLSATILYEILLGKATLYAVLVSALVLMAMVKRKDSRGKRGRKKLLYIFKQPFMRPVQTTQEEDGCSCRFPEEEEGGCELRVKFSRSADAPAYQQGQNQLYNELNLGRREEYDVLDKRRGRDPEMGGKPQRRKNPQEGLYNELQKDKMAEAYSEIGMKGERRRGKGHDGLYQGLSTATKDTYDALHMQALPPR

SEQ ID NO: 30703 - protein, 287 aa, synthetic construct
LRDSKSSDKSVCLFTDFDSQTNVSQSKDSDVYITDKCVLDMRSMDFKSNSAVAWSNKSDFACANAFNNSIIPEDTFFPSPESSCGFTSESYQQGVLSATILYEILLGKATLYAVLVSALVLMAMVKRKDSRGKRGRKKLLYIFKQPFMRPVQTTQEEDGCSCRFPEEEEGGCELRVKFSRSADAPAYQQGQNQLYNELNLGRREEYDVLDKRRGRDPEMGGKPQRRKNPQEGLYNELQKDKMAEAYSEIGMKGERRRGKGHDGLYQGLSTATKDTYDALHMQALPPR

SEQ ID NO: 30704 - protein, 286 aa, synthetic construct
RDSKSSDKSVCLFTDFDSQTNVSQSKDSDVYITDKCVLDMRSMDFKSNSAVAWSNKSDFACANAFNNSIIPEDTFFPSPESSCGFTSESYQQGVLSATILYEILLGKATLYAVLVSALVLMAMVKRKDSRGKRGRKKLLYIFKQPFMRPVQTTQEEDGCSCRFPEEEEGGCELRVKFSRSADAPAYQQGQNQLYNELNLGRREEYDVLDKRRGRDPEMGGKPQRRKNPQEGLYNELQKDKMAEAYSEIGMKGERRRGKGHDGLYQGLSTATKDTYDALHMQALPPR

SEQ ID NO: 30705 - protein, 285 aa, synthetic construct
DSKSSDKSVCLFTDFDSQTNVSQSKDSDVYITDKCVLDMRSMDFKSNSAVAWSNKSDFACANAFNNSIIPEDTFFPSPESSCGFTSESYQQGVLSATILYEILLGKATLYAVLVSALVLMAMVKRKDSRGKRGRKKLLYIFKQPFMRPVQTTQEEDGCSCRFPEEEEGGCELRVKFSRSADAPAYQQGQNQLYNELNLGRREEYDVLDKRRGRDPEMGGKPQRRKNPQEGLYNELQKDKMAEAYSEIGMKGERRRGKGHDGLYQGLSTATKDTYDALHMQALPPR

SEQ ID NO: 30706 - protein, 284 aa, synthetic construct
SKSSDKSVCLFTDFDSQTNVSQSKDSDVYITDKCVLDMRSMDFKSNSAVAWSNKSDFACANAFNNSIIPEDTFFPSPESSCGFTSESYQQGVLSATILYEILLGKATLYAVLVSALVLMAMVKRKDSRGKRGRKKLLYIFKQPFMRPVQTTQEEDGCSCRFPEEEEGGCELRVKFSRSADAPAYQQGQNQLYNELNLGRREEYDVLDKRRGRDPEMGGKPQRRKNPQEGLYNELQKDKMAEAYSEIGMKGERRRGKGHDGLYQGLSTATKDTYDALHMQALPPR

SEQ ID NO: 30707 - protein, 283 aa, synthetic construct
KSSDKSVCLFTDFDSQTNVSQSKDSDVYITDKCVLDMRSMDFKSNSAVAWSNKSDFACANAFNNSIIPEDTFFPSPESSCGFTSESYQQGVLSATILYEILLGKATLYAVLVSALVLMAMVKRKDSRGKRGRKKLLYIFKQPFMRPVQTTQEEDGCSCRFPEEEEGGCELRVKFSRSADAPAYQQGQNQLYNELNLGRREEYDVLDKRRGRDPEMGGKPQRRKNPQEGLYNELQKDKMAEAYSEIGMKGERRRGKGHDGLYQGLSTATKDTYDALHMQALPPR

SEQ ID NO: 30708 - protein, 282 aa, synthetic construct
SSDKSVCLFTDFDSQTNVSQSKDSDVYITDKCVLDMRSMDFKSNSAVAWSNKSDFACANAFNNSIIPEDTFFPSPESSCGFTSESYQQGVLSATILYEILLGKATLYAVLVSALVLMAMVKRKDSRGKRGRKKLLYIFKQPFMRPVQTTQEEDGCSCRFPEEEEGGCELRVKFSRSADAPAYQQGQNQLYNELNLGRREEYDVLDKRRGRDPEMGGKPQRRKNPQEGLYNELQKDKMAEAYSEIGMKGERRRGKGHDGLYQGLSTATKDTYDALHMQALPPR

SEQ ID NO: 30709 - protein, 281 aa, synthetic construct
SDKSVCLFTDFDSQTNVSQSKDSDVYITDKCVLDMRSMDFKSNSAVAWSNKSDFACANAFNNSIIPEDTFFPSPESSCGFTSESYQQGVLSATILYEILLGKATLYAVLVSALVLMAMVKRKDSRGKRGRKKLLYIFKQPFMRPVQTTQEEDGCSCRFPEEEEGGCELRVKFSRSADAPAYQQGQNQLYNELNLGRREEYDVLDKRRGRDPEMGGKPQRRKNPQEGLYNELQKDKMAEAYSEIGMKGERRRGKGHDGLYQGLSTATKDTYDALHMQALPPR

SEQ ID NO: 30710 - protein, 280 aa, synthetic construct
DKSVCLFTDFDSQTNVSQSKDSDVYITDKCVLDMRSMDFKSNSAVAWSNKSDFACANAFNNSIIPEDTFFPSPESSCGFTSESYQQGVLSATILYEILLGKATLYAVLVSALVLMAMVKRKDSRGKRGRKKLLYIFKQPFMRPVQTTQEEDGCSCRFPEEEEGGCELRVKFSRSADAPAYQQGQNQLYNELNLGRREEYDVLDKRRGRDPEMGGKPQRRKNPQEGLYNELQKDKMAEAYSEIGMKGERRRGKGHDGLYQGLSTATKDTYDALHMQALPPR

SEQ ID NO: 30711 - protein, 279 aa, synthetic construct
KSVCLFTDFDSQTNVSQSKDSDVYITDKCVLDMRSMDFKSNSAVAWSNKSDFACANAFNNSIIPEDTFFPSPESSCGFTSESYQQGVLSATILYEILLGKATLYAVLVSALVLMAMVKRKDSRGKRGRKKLLYIFKQPFMRPVQTTQEEDGCSCRFPEEEEGGCELRVKFSRSADAPAYQQGQNQLYNELNLGRREEYDVLDKRRGRDPEMGGKPQRRKNPQEGLYNELQKDKMAEAYSEIGMKGERRRGKGHDGLYQGLSTATKDTYDALHMQALPPR

SEQ ID NO: 30712 - protein, 278 aa, synthetic construct
SVCLFTDFDSQTNVSQSKDSDVYITDKCVLDMRSMDFKSNSAVAWSNKSDFACANAFNNSIIPEDTFFPSPESSCGFTSESYQQGVLSATILYEILLGKATLYAVLVSALVLMAMVKRKDSRGKRGRKKLLYIFKQPFMRPVQTTQEEDGCSCRFPEEEEGGCELRVKFSRSADAPAYQQGQNQLYNELNLGRREEYDVLDKRRGRDPEMGGKPQRRKNPQEGLYNELQKDKMAEAYSEIGMKGERRRGKGHDGLYQGLSTATKDTYDALHMQALPPR

SEQ ID NO: 30713 - protein, 277 aa, synthetic construct
VCLFTDFDSQTNVSQSKDSDVYITDKCVLDMRSMDFKSNSAVAWSNKSDFACANAFNNSIIPEDTFFPSPESSCGFTSESYQQGVLSATILYEILLGKATLYAVLVSALVLMAMVKRKDSRGKRGRKKLLYIFKQPFMRPVQTTQEEDGCSCRFPEEEEGGCELRVKFSRSADAPAYQQGQNQLYNELNLGRREEYDVLDKRRGRDPEMGGKPQRRKNPQEGLYNELQKDKMAEAYSEIGMKGERRRGKGHDGLYQGLSTATKDTYDALHMQALPPR

SEQ ID NO: 30714 - protein, 272 aa, synthetic construct
DFDSQTNVSQSKDSDVYITDKCVLDMRSMDFKSNSAVAWSNKSDFACANAFNNSIIPEDTFFPSPESSCGFTSESYQQGVLSATILYEILLGKATLYAVLVSALVLMAMVKRKDSRGKRGRKKLLYIFKQPFMRPVQTTQEEDGCSCRFPEEEEGGCELRVKFSRSADAPAYQQGQNQLYNELNLGRREEYDVLDKRRGRDPEMGGKPQRRKNPQEGLYNELQKDKMAEAYSEIGMKGERRRGKGHDGLYQGLSTATKDTYDALHMQALPPR

SEQ ID NO: 30715 - protein, 267 aa, synthetic construct
TNVSQSKDSDVYITDKCVLDMRSMDFKSNSAVAWSNKSDFACANAFNNSIIPEDTFFPSPESSCGFTSESYQQGVLSATILYEILLGKATLYAVLVSALVLMAMVKRKDSRGKRGRKKLLYIFKQPFMRPVQTTQEEDGCSCRFPEEEEGGCELRVKFSRSADAPAYQQGQNQLYNELNLGRREEYDVLDKRRGRDPEMGGKPQRRKNPQEGLYNELQKDKMAEAYSEIGMKGERRRGKGHDGLYQGLSTATKDTYDALHMQALPPR

SEQ ID NO: 30716 - protein, 300 aa, synthetic construct; identical to SEQ ID NO: 30680

SEQ ID NO: 30717 - protein, 299 aa, synthetic construct
QNPDPAVYQLRDSKSSDKSVCLFTDFDSQTNVSQSKDSDVYITDKCVLDMRSMDFKSNSAVAWSNKSDFACANAFNNSIIPEDTFFPSPESSCDVKLVEKSFETDTNLNFQILYEILLGKATLYAVLVSALVLMAMVKRKDSRGKRGRKKLLYIFKQPFMRPVQTTQEEDGCSCRFPEEEEGGCELRVKFSRSADAPAYQQGQNQLYNELNLGRREEYDVLDKRRGRDPEMGGKPQRRKNPQEGLYNELQKDKMAEAYSEIGMKGERRRGKGHDGLYQGLSTATKDTYDALHMQALPPR

SEQ ID NO: 30718 - protein, 298 aa, synthetic construct
NPDPAVYQLRDSKSSDKSVCLFTDFDSQTNVSQSKDSDVYITDKCVLDMRSMDFKSNSAVAWSNKSDFACANAFNNSIIPEDTFFPSPESSCDVKLVEKSFETDTNLNFQILYEILLGKATLYAVLVSALVLMAMVKRKDSRGKRGRKKLLYIFKQPFMRPVQTTQEEDGCSCRFPEEEEGGCELRVKFSRSADAPAYQQGQNQLYNELNLGRREEYDVLDKRRGRDPEMGGKPQRRKNPQEGLYNELQKDKMAEAYSEIGMKGERRRGKGHDGLYQGLSTATKDTYDALHMQALPPR

SEQ ID NO: 30719 - protein, 297 aa, synthetic construct
PDPAVYQLRDSKSSDKSVCLFTDFDSQTNVSQSKDSDVYITDKCVLDMRSMDFKSNSAVAWSNKSDFACANAFNNSIIPEDTFFPSPESSCDVKLVEKSFETDTNLNFQILYEILLGKATLYAVLVSALVLMAMVKRKDSRGKRGRKKLLYIFKQPFMRPVQTTQEEDGCSCRFPEEEEGGCELRVKFSRSADAPAYQQGQNQLYNELNLGRREEYDVLDKRRGRDPEMGGKPQRRKNPQEGLYNELQKDKMAEAYSEIGMKGERRRGKGHDGLYQGLSTATKDTYDALHMQALPPR

SEQ ID NO: 30720 - protein, 296 aa, synthetic construct
DPAVYQLRDSKSSDKSVCLFTDFDSQTNVSQSKDSDVYITDKCVLDMRSMDFKSNSAVAWSNKSDFACANAFNNSIIPEDTFFPSPESSCDVKLVEKSFETDTNLNFQILYEILLGKATLYAVLVSALVLMAMVKRKDSRGKRGRKKLLYIFKQPFMRPVQTTQEEDGCSCRFPEEEEGGCELRVKFSRSADAPAYQQGQNQLYNELNLGRREEYDVLDKRRGRDPEMGGKPQRRKNPQEGLYNELQKDKMAEAYSEIGMKGERRRGKGHDGLYQGLSTATKDTYDALHMQALPPR

SEQ ID NO: 30721 - protein, 295 aa, synthetic construct
PAVYQLRDSKSSDKSVCLFTDFDSQTNVSQSKDSDVYITDKCVLDMRSMDFKSNSAVAWSNKSDFACANAFNNSIIPEDTFFPSPESSCDVKLVEKSFETDTNLNFQILYEILLGKATLYAVLVSALVLMAMVKRKDSRGKRGRKKLLYIFKQPFMRPVQTTQEEDGCSCRFPEEEEGGCELRVKFSRSADAPAYQQGQNQLYNELNLGRREEYDVLDKRRGRDPEMGGKPQRRKNPQEGLYNELQKDKMAEAYSEIGMKGERRRGKGHDGLYQGLSTATKDTYDALHMQALPPR

SEQ ID NO: 30722 - protein, 294 aa, synthetic construct
AVYQLRDSKSSDKSVCLFTDFDSQTNVSQSKDSDVYITDKCVLDMRSMDFKSNSAVAWSNKSDFACANAFNNSIIPEDTFFPSPESSCDVKLVEKSFETDTNLNFQILYEILLGKATLYAVLVSALVLMAMVKRKDSRGKRGRKKLLYIFKQPFMRPVQTTQEEDGCSCRFPEEEEGGCELRVKFSRSADAPAYQQGQNQLYNELNLGRREEYDVLDKRRGRDPEMGGKPQRRKNPQEGLYNELQKDKMAEAYSEIGMKGERRRGKGHDGLYQGLSTATKDTYDALHMQALPPR

SEQ ID NO: 30723 - protein, 293 aa, synthetic construct
VYQLRDSKSSDKSVCLFTDFDSQTNVSQSKDSDVYITDKCVLDMRSMDFKSNSAVAWSNKSDFACANAFNNSIIPEDTFFPSPESSCDVKLVEKSFETDTNLNFQILYEILLGKATLYAVLVSALVLMAMVKRKDSRGKRGRKKLLYIFKQPFMRPVQTTQEEDGCSCRFPEEEEGGCELRVKFSRSADAPAYQQGQNQLYNELNLGRREEYDVLDKRRGRDPEMGGKPQRRKNPQEGLYNELQKDKMAEAYSEIGMKGERRRGKGHDGLYQGLSTATKDTYDALHMQALPPR

SEQ ID NO: 30724 - protein, 292 aa, synthetic construct
YQLRDSKSSDKSVCLFTDFDSQTNVSQSKDSDVYITDKCVLDMRSMDFKSNSAVAWSNKSDFACANAFNNSIIPEDTFFPSPESSCDVKLVEKSFETDTNLNFQILYEILLGKATLYAVLVSALVLMAMVKRKDSRGKRGRKKLLYIFKQPFMRPVQTTQEEDGCSCRFPEEEEGGCELRVKFSRSADAPAYQQGQNQLYNELNLGRREEYDVLDKRRGRDPEMGGKPQRRKNPQEGLYNELQKDKMAEAYSEIGMKGERRRGKGHDGLYQGLSTATKDTYDALHMQALPPR

SEQ ID NO: 30725 - protein, 291 aa, synthetic construct
QLRDSKSSDKSVCLFTDFDSQTNVSQSKDSDVYITDKCVLDMRSMDFKSNSAVAWSNKSDFACANAFNNSIIPEDTFFPSPESSCDVKLVEKSFETDTNLNFQILYEILLGKATLYAVLVSALVLMAMVKRKDSRGKRGRKKLLYIFKQPFMRPVQTTQEEDGCSCRFPEEEEGGCELRVKFSRSADAPAYQQGQNQLYNELNLGRREEYDVLDKRRGRDPEMGGKPQRRKNPQEGLYNELQKDKMAEAYSEIGMKGERRRGKGHDGLYQGLSTATKDTYDALHMQALPPR

SEQ ID NO: 30726 - protein, 290 aa, synthetic construct
LRDSKSSDKSVCLFTDFDSQTNVSQSKDSDVYITDKCVLDMRSMDFKSNSAVAWSNKSDFACANAFNNSIIPEDTFFPSPESSCDVKLVEKSFETDTNLNFQILYEILLGKATLYAVLVSALVLMAMVKRKDSRGKRGRKKLLYIFKQPFMRPVQTTQEEDGCSCRFPEEEEGGCELRVKFSRSADAPAYQQGQNQLYNELNLGRREEYDVLDKRRGRDPEMGGKPQRRKNPQEGLYNELQKDKMAEAYSEIGMKGERRRGKGHDGLYQGLSTATKDTYDALHMQALPPR

SEQ ID NO: 30727 - protein, 289 aa, synthetic construct
RDSKSSDKSVCLFTDFDSQTNVSQSKDSDVYITDKCVLDMRSMDFKSNSAVAWSNKSDFACANAFNNSIIPEDTFFPSPESSCDVKLVEKSFETDTNLNFQILYEILLGKATLYAVLVSALVLMAMVKRKDSRGKRGRKKLLYIFKQPFMRPVQTTQEEDGCSCRFPEEEEGGCELRVKFSRSADAPAYQQGQNQLYNELNLGRREEYDVLDKRRGRDPEMGGKPQRRKNPQEGLYNELQKDKMAEAYSEIGMKGERRRGKGHDGLYQGLSTATKDTYDALHMQALPPR

SEQ ID NO: 30728 - protein, 288 aa, synthetic construct
DSKSSDKSVCLFTDFDSQTNVSQSKDSDVYITDKCVLDMRSMDFKSNSAVAWSNKSDFACANAFNNSIIPEDTFFPSPESSCDVKLVEKSFETDTNLNFQILYEILLGKATLYAVLVSALVLMAMVKRKDSRGKRGRKKLLYIFKQPFMRPVQTTQEEDGCSCRFPEEEEGGCELRVKFSRSADAPAYQQGQNQLYNELNLGRREEYDVLDKRRGRDPEMGGKPQRRKNPQEGLYNELQKDKMAEAYSEIGMKGERRRGKGHDGLYQGLSTATKDTYDALHMQALPPR

SEQ ID NO: 30729 - protein, 287 aa, synthetic construct
SKSSDKSVCLFTDFDSQTNVSQSKDSDVYITDKCVLDMRSMDFKSNSAVAWSNKSDFACANAFNNSIIPEDTFFPSPESSCDVKLVEKSFETDTNLNFQILYEILLGKATLYAVLVSALVLMAMVKRKDSRGKRGRKKLLYIFKQPFMRPVQTTQEEDGCSCRFPEEEEGGCELRVKFSRSADAPAYQQGQNQLYNELNLGRREEYDVLDKRRGRDPEMGGKPQRRKNPQEGLYNELQKDKMAEAYSEIGMKGERRRGKGHDGLYQGLSTATKDTYDALHMQALPPR

SEQ ID NO: 30730 - protein, 286 aa, synthetic construct
KSSDKSVCLFTDFDSQTNVSQSKDSDVYITDKCVLDMRSMDFKSNSAVAWSNKSDFACANAFNNSIIPEDTFFPSPESSCDVKLVEKSFETDTNLNFQILYEILLGKATLYAVLVSALVLMAMVKRKDSRGKRGRKKLLYIFKQPFMRPVQTTQEEDGCSCRFPEEEEGGCELRVKFSRSADAPAYQQGQNQLYNELNLGRREEYDVLDKRRGRDPEMGGKPQRRKNPQEGLYNELQKDKMAEAYSEIGMKGERRRGKGHDGLYQGLSTATKDTYDALHMQALPPR

SEQ ID NO: 30731 - protein, 285 aa, synthetic construct
SSDKSVCLFTDFDSQTNVSQSKDSDVYITDKCVLDMRSMDFKSNSAVAWSNKSDFACANAFNNSIIPEDTFFPSPESSCDVKLVEKSFETDTNLNFQILYEILLGKATLYAVLVSALVLMAMVKRKDSRGKRGRKKLLYIFKQPFMRPVQTTQEEDGCSCRFPEEEEGGCELRVKFSRSADAPAYQQGQNQLYNELNLGRREEYDVLDKRRGRDPEMGGKPQRRKNPQEGLYNELQKDKMAEAYSEIGMKGERRRGKGHDGLYQGLSTATKDTYDALHMQALPPR

SEQ ID NO: 30732 - protein, 284 aa, synthetic construct
SDKSVCLFTDFDSQTNVSQSKDSDVYITDKCVLDMRSMDFKSNSAVAWSNKSDFACANAFNNSIIPEDTFFPSPESSCDVKLVEKSFETDTNLNFQILYEILLGKATLYAVLVSALVLMAMVKRKDSRGKRGRKKLLYIFKQPFMRPVQTTQEEDGCSCRFPEEEEGGCELRVKFSRSADAPAYQQGQNQLYNELNLGRREEYDVLDKRRGRDPEMGGKPQRRKNPQEGLYNELQKDKMAEAYSEIGMKGERRRGKGHDGLYQGLSTATKDTYDALHMQALPPR

SEQ ID NO: 30733 - protein, 283 aa, synthetic construct
DKSVCLFTDFDSQTNVSQSKDSDVYITDKCVLDMRSMDFKSNSAVAWSNKSDFACANAFNNSIIPEDTFFPSPESSCDVKLVEKSFETDTNLNFQILYEILLGKATLYAVLVSALVLMAMVKRKDSRGKRGRKKLLYIFKQPFMRPVQTTQEEDGCSCRFPEEEEGGCELRVKFSRSADAPAYQQGQNQLYNELNLGRREEYDVLDKRRGRDPEMGGKPQRRKNPQEGLYNELQKDKMAEAYSEIGMKGERRRGKGHDGLYQGLSTATKDTYDALHMQALPPR

SEQ ID NO: 30734 - protein, 282 aa, synthetic construct
KSVCLFTDFDSQTNVSQSKDSDVYITDKCVLDMRSMDFKSNSAVAWSNKSDFACANAFNNSIIPEDTFFPSPESSCDVKLVEKSFETDTNLNFQILYEILLGKATLYAVLVSALVLMAMVKRKDSRGKRGRKKLLYIFKQPFMRPVQTTQEEDGCSCRFPEEEEGGCELRVKFSRSADAPAYQQGQNQLYNELNLGRREEYDVLDKRRGRDPEMGGKPQRRKNPQEGLYNELQKDKMAEAYSEIGMKGERRRGKGHDGLYQGLSTATKDTYDALHMQALPPR

SEQ ID NO: 30735 - protein, 281 aa, synthetic construct
SVCLFTDFDSQTNVSQSKDSDVYITDKCVLDMRSMDFKSNSAVAWSNKSDFACANAFNNSIIPEDTFFPSPESSCDVKLVEKSFETDTNLNFQILYEILLGKATLYAVLVSALVLMAMVKRKDSRGKRGRKKLLYIFKQPFMRPVQTTQEEDGCSCRFPEEEEGGCELRVKFSRSADAPAYQQGQNQLYNELNLGRREEYDVLDKRRGRDPEMGGKPQRRKNPQEGLYNELQKDKMAEAYSEIGMKGERRRGKGHDGLYQGLSTATKDTYDALHMQALPPR

SEQ ID NO: 30736 - protein, 280 aa, synthetic construct
VCLFTDFDSQTNVSQSKDSDVYITDKCVLDMRSMDFKSNSAVAWSNKSDFACANAFNNSIIPEDTFFPSPESSCDVKLVEKSFETDTNLNFQILYEILLGKATLYAVLVSALVLMAMVKRKDSRGKRGRKKLLYIFKQPFMRPVQTTQEEDGCSCRFPEEEEGGCELRVKFSRSADAPAYQQGQNQLYNELNLGRREEYDVLDKRRGRDPEMGGKPQRRKNPQEGLYNELQKDKMAEAYSEIGMKGERRRGKGHDGLYQGLSTATKDTYDALHMQALPPR

SEQ ID NO: 30737 - protein, 275 aa, synthetic construct
DFDSQTNVSQSKDSDVYITDKCVLDMRSMDFKSNSAVAWSNKSDFACANAFNNSIIPEDTFFPSPESSCDVKLVEKSFETDTNLNFQILYEILLGKATLYAVLVSALVLMAMVKRKDSRGKRGRKKLLYIFKQPFMRPVQTTQEEDGCSCRFPEEEEGGCELRVKFSRSADAPAYQQGQNQLYNELNLGRREEYDVLDKRRGRDPEMGGKPQRRKNPQEGLYNELQKDKMAEAYSEIGMKGERRRGKGHDGLYQGLSTATKDTYDALHMQALPPR

SEQ ID NO: 30738 - protein, 270 aa, synthetic construct
TNVSQSKDSDVYITDKCVLDMRSMDFKSNSAVAWSNKSDFACANAFNNSIIPEDTFFPSPESSCDVKLVEKSFETDTNLNFQILYEILLGKATLYAVLVSALVLMAMVKRKDSRGKRGRKKLLYIFKQPFMRPVQTTQEEDGCSCRFPEEEEGGCELRVKFSRSADAPAYQQGQNQLYNELNLGRREEYDVLDKRRGRDPEMGGKPQRRKNPQEGLYNELQKDKMAEAYSEIGMKGERRRGKGHDGLYQGLSTATKDTYDALHMQALPPR

SEQ ID NO: 30739 - protein, 315 aa, synthetic construct; identical to SEQ ID NO: 30681

SEQ ID NO: 30740 - protein, 314 aa, synthetic construct
QNPDPAVYQLRDSKSSDKSVCLFTDFDSQTNVSQSKDSDVYITDKCVLDMRSMDFKSNSAVAWSNKSDFACANAFNNSIIPEDTFFPSPESSDSTDHVKPKETENTKQPSKSCHKPKAIVHTEKVNMMSLTVLGLRMLFAKTVAVNFLLTAKLFFLLTAKRGRKKLLYIFKQPFMRPVQTTQEEDGCSCRFPEEEEGGCELRVKFSRSADAPAYQQGQNQLYNELNLGRREEYDVLDKRRGRDPEMGGKPQRRKNPQEGLYNELQKDKMAEAYSEIGMKGERRRGKGHDGLYQGLSTATKDTYDALHMQALPPR

SEQ ID NO: 30741 - protein, 313 aa, synthetic construct
NPDPAVYQLRDSKSSDKSVCLFTDFDSQTNVSQSKDSDVYITDKCVLDMRSMDFKSNSAVAWSNKSDFACANAFNNSIIPEDTFFPSPESSDSTDHVKPKETENTKQPSKSCHKPKAIVHTEKVNMMSLTVLGLRMLFAKTVAVNFLLTAKLFFLLTAKRGRKKLLYIFKQPFMRPVQTTQEEDGCSCRFPEEEEGGCELRVKFSRSADAPAYQQGQNQLYNELNLGRREEYDVLDKRRGRDPEMGGKPQRRKNPQEGLYNELQKDKMAEAYSEIGMKGERRRGKGHDGLYQGLSTATKDTYDALHMQALPPR

SEQ ID NO: 30742 - protein, 312 aa, synthetic construct
PDPAVYQLRDSKSSDKSVCLFTDFDSQTNVSQSKDSDVYITDKCVLDMRSMDFKSNSAVAWSNKSDFACANAFNNSIIPEDTFFPSPESSDSTDHVKPKETENTKQPSKSCHKPKAIVHTEKVNMMSLTVLGLRMLFAKTVAVNFLLTAKLFFLLTAKRGRKKLLYIFKQPFMRPVQTTQEEDGCSCRFPEEEEGGCELRVKFSRSADAPAYQQGQNQLYNELNLGRREEYDVLDKRRGRDPEMGGKPQRRKNPQEGLYNELQKDKMAEAYSEIGMKGERRRGKGHDGLYQGLSTATKDTYDALHMQALPPR

SEQ ID NO: 30743 - protein, 311 aa, synthetic construct
DPAVYQLRDSKSSDKSVCLFTDFDSQTNVSQSKDSDVYITDKCVLDMRSMDFKSNSAVAWSNKSDFACANAFNNSIIPEDTFFPSPESSDSTDHVKPKETENTKQPSKSCHKPKAIVHTEKVNMMSLTVLGLRMLFAKTVAVNFLLTAKLFFLLTAKRGRKKLLYIFKQPFMRPVQTTQEEDGCSCRFPEEEEGGCELRVKFSRSADAPAYQQGQNQLYNELNLGRREEYDVLDKRRGRDPEMGGKPQRRKNPQEGLYNELQKDKMAEAYSEIGMKGERRRGKGHDGLYQGLSTATKDTYDALHMQALPPR

SEQ ID NO: 30744 - protein, 310 aa, synthetic construct
PAVYQLRDSKSSDKSVCLFTDFDSQTNVSQSKDSDVYITDKCVLDMRSMDFKSNSAVAWSNKSDFACANAFNNSIIPEDTFFPSPESSDSTDHVKPKETENTKQPSKSCHKPKAIVHTEKVNMMSLTVLGLRMLFAKTVAVNFLLTAKLFFLLTAKRGRKKLLYIFKQPFMRPVQTTQEEDGCSCRFPEEEEGGCELRVKFSRSADAPAYQQGQNQLYNELNLGRREEYDVLDKRRGRDPEMGGKPQRRKNPQEGLYNELQKDKMAEAYSEIGMKGERRRGKGHDGLYQGLSTATKDTYDALHMQALPPR

SEQ ID NO: 30745 - protein, 309 aa, synthetic construct
AVYQLRDSKSSDKSVCLFTDFDSQTNVSQSKDSDVYITDKCVLDMRSMDFKSNSAVAWSNKSDFACANAFNNSIIPEDTFFPSPESSDSTDHVKPKETENTKQPSKSCHKPKAIVHTEKVNMMSLTVLGLRMLFAKTVAVNFLLTAKLFFLLTAKRGRKKLLYIFKQPFMRPVQTTQEEDGCSCRFPEEEEGGCELRVKFSRSADAPAYQQGQNQLYNELNLGRREEYDVLDKRRGRDPEMGGKPQRRKNPQEGLYNELQKDKMAEAYSEIGMKGERRRGKGHDGLYQGLSTATKDTYDALHMQALPPR

SEQ ID NO: 30746 - protein, 308 aa, synthetic construct
VYQLRDSKSSDKSVCLFTDFDSQTNVSQSKDSDVYITDKCVLDMRSMDFKSNSAVAWSNKSDFACANAFNNSIIPEDTFFPSPESSDSTDHVKPKETENTKQPSKSCHKPKAIVHTEKVNMMSLTVLGLRMLFAKTVAVNFLLTAKLFFLLTAKRGRKKLLYIFKQPFMRPVQTTQEEDGCSCRFPEEEEGGCELRVKFSRSADAPAYQQGQNQLYNELNLGRREEYDVLDKRRGRDPEMGGKPQRRKNPQEGLYNELQKDKMAEAYSEIGMKGERRRGKGHDGLYQGLSTATKDTYDALHMQALPPR

SEQ ID NO: 30747 - protein, 307 aa, synthetic construct
YQLRDSKSSDKSVCLFTDFDSQTNVSQSKDSDVYITDKCVLDMRSMDFKSNSAVAWSNKSDFACANAFNNSIIPEDTFFPSPESSDSTDHVKPKETENTKQPSKSCHKPKAIVHTEKVNMMSLTVLGLRMLFAKTVAVNFLLTAKLFFLLTAKRGRKKLLYIFKQPFMRPVQTTQEEDGCSCRFPEEEEGGCELRVKFSRSADAPAYQQGQNQLYNELNLGRREEYDVLDKRRGRDPEMGGKPQRRKNPQEGLYNELQKDKMAEAYSEIGMKGERRRGKGHDGLYQGLSTATKDTYDALHMQALPPR

SEQ ID NO: 30748 - protein, 306 aa, synthetic construct
QLRDSKSSDKSVCLFTDFDSQTNVSQSKDSDVYITDKCVLDMRSMDFKSNSAVAWSNKSDFACANAFNNSIIPEDTFFPSPESSDSTDHVKPKETENTKQPSKSCHKPKAIVHTEKVNMMSLTVLGLRMLFAKTVAVNFLLTAKLFFLLTAKRGRKKLLYIFKQPFMRPVQTTQEEDGCSCRFPEEEEGGCELRVKFSRSADAPAYQQGQNQLYNELNLGRREEYDVLDKRRGRDPEMGGKPQRRKNPQEGLYNELQKDKMAEAYSEIGMKGERRRGKGHDGLYQGLSTATKDTYDALHMQALPPR

SEQ ID NO: 30749 - protein, 305 aa, synthetic construct
LRDSKSSDKSVCLFTDFDSQTNVSQSKDSDVYITDKCVLDMRSMDFKSNSAVAWSNKSDFACANAFNNSIIPEDTFFPSPESSDSTDHVKPKETENTKQPSKSCHKPKAIVHTEKVNMMSLTVLGLRMLFAKTVAVNFLLTAKLFFLLTAKRGRKKLLYIFKQPFMRPVQTTQEEDGCSCRFPEEEEGGCELRVKFSRSADAPAYQQGQNQLYNELNLGRREEYDVLDKRRGRDPEMGGKPQRRKNPQEGLYNELQKDKMAEAYSEIGMKGERRRGKGHDGLYQGLSTATKDTYDALHMQALPPR

SEQ ID NO: 30750 - protein, 304 aa, synthetic construct
RDSKSSDKSVCLFTDFDSQTNVSQSKDSDVYITDKCVLDMRSMDFKSNSAVAWSNKSDFACANAFNNSIIPEDTFFPSPESSDSTDHVKPKETENTKQPSKSCHKPKAIVHTEKVNMMSLTVLGLRMLFAKTVAVNFLLTAKLFFLLTAKRGRKKLLYIFKQPFMRPVQTTQEEDGCSCRFPEEEEGGCELRVKFSRSADAPAYQQGQNQLYNELNLGRREEYDVLDKRRGRDPEMGGKPQRRKNPQEGLYNELQKDKMAEAYSEIGMKGERRRGKGHDGLYQGLSTATKDTYDALHMQALPPR

SEQ ID NO: 30751 - protein, 303 aa, synthetic construct
DSKSSDKSVCLFTDFDSQTNVSQSKDSDVYITDKCVLDMRSMDFKSNSAVAWSNKSDFACANAFNNSIIPEDTFFPSPESSDSTDHVKPKETENTKQPSKSCHKPKAIVHTEKVNMMSLTVLGLRMLFAKTVAVNFLLTAKLFFLLTAKRGRKKLLYIFKQPFMRPVQTTQEEDGCSCRFPEEEEGGCELRVKFSRSADAPAYQQGQNQLYNELNLGRREEYDVLDKRRGRDPEMGGKPQRRKNPQEGLYNELQKDKMAEAYSEIGMKGERRRGKGHDGLYQGLSTATKDTYDALHMQALPPR

SEQ ID NO: 30752 - protein, 302 aa, synthetic construct
SKSSDKSVCLFTDFDSQTNVSQSKDSDVYITDKCVLDMRSMDFKSNSAVAWSNKSDFACANAFNNSIIPEDTFFPSPESSDSTDHVKPKETENTKQPSKSCHKPKAIVHTEKVNMMSLTVLGLRMLFAKTVAVNFLLTAKLFFLLTAKRGRKKLLYIFKQPFMRPVQTTQEEDGCSCRFPEEEEGGCELRVKFSRSADAPAYQQGQNQLYNELNLGRREEYDVLDKRRGRDPEMGGKPQRRKNPQEGLYNELQKDKMAEAYSEIGMKGERRRGKGHDGLYQGLSTATKDTYDALHMQALPPR

SEQ ID NO: 30753 - protein, 301 aa, synthetic construct
KSSDKSVCLFTDFDSQTNVSQSKDSDVYITDKCVLDMRSMDFKSNSAVAWSNKSDFACANAFNNSIIPEDTFFPSPESSDSTDHVKPKETENTKQPSKSCHKPKAIVHTEKVNMMSLTVLGLRMLFAKTVAVNFLLTAKLFFLLTAKRGRKKLLYIFKQPFMRPVQTTQEEDGCSCRFPEEEEGGCELRVKFSRSADAPAYQQGQNQLYNELNLGRREEYDVLDKRRGRDPEMGGKPQRRKNPQEGLYNELQKDKMAEAYSEIGMKGERRRGKGHDGLYQGLSTATKDTYDALHMQALPPR

SEQ ID NO: 30754 - protein, 300 aa, synthetic construct
SSDKSVCLFTDFDSQTNVSQSKDSDVYITDKCVLDMRSMDFKSNSAVAWSNKSDFACANAFNNSIIPEDTFFPSPESSDSTDHVKPKETENTKQPSKSCHKPKAIVHTEKVNMMSLTVLGLRMLFAKTVAVNFLLTAKLFFLLTAKRGRKKLLYIFKQPFMRPVQTTQEEDGCSCRFPEEEEGGCELRVKFSRSADAPAYQQGQNQLYNELNLGRREEYDVLDKRRGRDPEMGGKPQRRKNPQEGLYNELQKDKMAEAYSEIGMKGERRRGKGHDGLYQGLSTATKDTYDALHMQALPPR

SEQ ID NO: 30755 - protein, 299 aa, synthetic construct
SDKSVCLFTDFDSQTNVSQSKDSDVYITDKCVLDMRSMDFKSNSAVAWSNKSDFACANAFNNSIIPEDTFFPSPESSDSTDHVKPKETENTKQPSKSCHKPKAIVHTEKVNMMSLTVLGLRMLFAKTVAVNFLLTAKLFFLLTAKRGRKKLLYIFKQPFMRPVQTTQEEDGCSCRFPEEEEGGCELRVKFSRSADAPAYQQGQNQLYNELNLGRREEYDVLDKRRGRDPEMGGKPQRRKNPQEGLYNELQKDKMAEAYSEIGMKGERRRGKGHDGLYQGLSTATKDTYDALHMQALPPR

SEQ ID NO: 30756 - protein, 298 aa, synthetic construct
DKSVCLFTDFDSQTNVSQSKDSDVYITDKCVLDMRSMDFKSNSAVAWSNKSDFACANAFNNSIIPEDTFFPSPESSDSTDHVKPKETENTKQPSKSCHKPKAIVHTEKVNMMSLTVLGLRMLFAKTVAVNFLLTAKLFFLLTAKRGRKKLLYIFKQPFMRPVQTTQEEDGCSCRFPEEEEGGCELRVKFSRSADAPAYQQGQNQLYNELNLGRREEYDVLDKRRGRDPEMGGKPQRRKNPQEGLYNELQKDKMAEAYSEIGMKGERRRGKGHDGLYQGLSTATKDTYDALHMQALPPR

SEQ ID NO: 30757 - protein, 297 aa, synthetic construct
KSVCLFTDFDSQTNVSQSKDSDVYITDKCVLDMRSMDFKSNSAVAWSNKSDFACANAFNNSIIPEDTFFPSPESSDSTDHVKPKETENTKQPSKSCHKPKAIVHTEKVNMMSLTVLGLRMLFAKTVAVNFLLTAKLFFLLTAKRGRKKLLYIFKQPFMRPVQTTQEEDGCSCRFPEEEEGGCELRVKFSRSADAPAYQQGQNQLYNELNLGRREEYDVLDKRRGRDPEMGGKPQRRKNPQEGLYNELQKDKMAEAYSEIGMKGERRRGKGHDGLYQGLSTATKDTYDALHMQALPPR

SEQ ID NO: 30758 - protein, 296 aa, synthetic construct
SVCLFTDFDSQTNVSQSKDSDVYITDKCVLDMRSMDFKSNSAVAWSNKSDFACANAFNNSIIPEDTFFPSPESSDSTDHVKPKETENTKQPSKSCHKPKAIVHTEKVNMMSLTVLGLRMLFAKTVAVNFLLTAKLFFLLTAKRGRKKLLYIFKQPFMRPVQTTQEEDGCSCRFPEEEEGGCELRVKFSRSADAPAYQQGQNQLYNELNLGRREEYDVLDKRRGRDPEMGGKPQRRKNPQEGLYNELQKDKMAEAYSEIGMKGERRRGKGHDGLYQGLSTATKDTYDALHMQALPPR

SEQ ID NO: 30759 - protein, 295 aa, synthetic construct
VCLFTDFDSQTNVSQSKDSDVYITDKCVLDMRSMDFKSNSAVAWSNKSDFACANAFNNSIIPEDTFFPSPESSDSTDHVKPKETENTKQPSKSCHKPKAIVHTEKVNMMSLTVLGLRMLFAKTVAVNFLLTAKLFFLLTAKRGRKKLLYIFKQPFMRPVQTTQEEDGCSCRFPEEEEGGCELRVKFSRSADAPAYQQGQNQLYNELNLGRREEYDVLDKRRGRDPEMGGKPQRRKNPQEGLYNELQKDKMAEAYSEIGMKGERRRGKGHDGLYQGLSTATKDTYDALHMQALPPR

SEQ ID NO: 30760 - protein, 290 aa, synthetic construct
DFDSQTNVSQSKDSDVYITDKCVLDMRSMDFKSNSAVAWSNKSDFACANAFNNSIIPEDTFFPSPESSDSTDHVKPKETENTKQPSKSCHKPKAIVHTEKVNMMSLTVLGLRMLFAKTVAVNFLLTAKLFFLLTAKRGRKKLLYIFKQPFMRPVQTTQEEDGCSCRFPEEEEGGCELRVKFSRSADAPAYQQGQNQLYNELNLGRREEYDVLDKRRGRDPEMGGKPQRRKNPQEGLYNELQKDKMAEAYSEIGMKGERRRGKGHDGLYQGLSTATKDTYDALHMQALPPR

SEQ ID NO: 30761 - protein, 285 aa, synthetic construct
TNVSQSKDSDVYITDKCVLDMRSMDFKSNSAVAWSNKSDFACANAFNNSIIPEDTFFPSPESSDSTDHVKPKETENTKQPSKSCHKPKAIVHTEKVNMMSLTVLGLRMLFAKTVAVNFLLTAKLFFLLTAKRGRKKLLYIFKQPFMRPVQTTQEEDGCSCRFPEEEEGGCELRVKFSRSADAPAYQQGQNQLYNELNLGRREEYDVLDKRRGRDPEMGGKPQRRKNPQEGLYNELQKDKMAEAYSEIGMKGERRRGKGHDGLYQGLSTATKDTYDALHMQALPPR

SEQ ID NO: 30762 - protein, 312 aa, synthetic construct; identical to SEQ ID NO: 30689

SEQ ID NO: 30763 - protein, 311 aa, synthetic construct
QNPDPAVYQLRDSKSSDKSVCLFTDFDSQTNVSQSKDSDVYITDKCVLDMRSMDFKSNSAVAWSNKSDFACANAFNNSIIPEDTFFPSPESSDSTDHVKPKETENTKQPSKSCHKPKAIVHTEKVNMMSLTVLGLRMLFAKTVAVNFLLTAKLFFLKRGRKKLLYIFKQPFMRPVQTTQEEDGCSCRFPEEEEGGCELRVKFSRSADAPAYQQGQNQLYNELNLGRREEYDVLDKRRGRDPEMGGKPQRRKNPQEGLYNELQKDKMAEAYSEIGMKGERRRGKGHDGLYQGLSTATKDTYDALHMQALPPR

SEQ ID NO: 30764 - protein, 310 aa, synthetic construct
NPDPAVYQLRDSKSSDKSVCLFTDFDSQTNVSQSKDSDVYITDKCVLDMRSMDFKSNSAVAWSNKSDFACANAFNNSIIPEDTFFPSPESSDSTDHVKPKETENTKQPSKSCHKPKAIVHTEKVNMMSLTVLGLRMLFAKTVAVNFLLTAKLFFLKRGRKKLLYIFKQPFMRPVQTTQEEDGCSCRFPEEEEGGCELRVKFSRSADAPAYQQGQNQLYNELNLGRREEYDVLDKRRGRDPEMGGKPQRRKNPQEGLYNELQKDKMAEAYSEIGMKGERRRGKGHDGLYQGLSTATKDTYDALHMQALPPR

SEQ ID NO: 30765 - protein, 309 aa, synthetic construct
PDPAVYQLRDSKSSDKSVCLFTDFDSQTNVSQSKDSDVYITDKCVLDMRSMDFKSNSAVAWSNKSDFACANAFNNSIIPEDTFFPSPESSDSTDHVKPKETENTKQPSKSCHKPKAIVHTEKVNMMSLTVLGLRMLFAKTVAVNFLLTAKLFFLKRGRKKLLYIFKQPFMRPVQTTQEEDGCSCRFPEEEEGGCELRVKFSRSADAPAYQQGQNQLYNELNLGRREEYDVLDKRRGRDPEMGGKPQRRKNPQEGLYNELQKDKMAEAYSEIGMKGERRRGKGHDGLYQGLSTATKDTYDALHMQALPPR

SEQ ID NO: 30766 - protein, 308 aa, synthetic construct
DPAVYQLRDSKSSDKSVCLFTDFDSQTNVSQSKDSDVYITDKCVLDMRSMDFKSNSAVAWSNKSDFACANAFNNSIIPEDTFFPSPESSDSTDHVKPKETENTKQPSKSCHKPKAIVHTEKVNMMSLTVLGLRMLFAKTVAVNFLLTAKLFFLKRGRKKLLYIFKQPFMRPVQTTQEEDGCSCRFPEEEEGGCELRVKFSRSADAPAYQQGQNQLYNELNLGRREEYDVLDKRRGRDPEMGGKPQRRKNPQEGLYNELQKDKMAEAYSEIGMKGERRRGKGHDGLYQGLSTATKDTYDALHMQALPPR

SEQ ID NO: 30767 - protein, 307 aa, synthetic construct
PAVYQLRDSKSSDKSVCLFTDFDSQTNVSQSKDSDVYITDKCVLDMRSMDFKSNSAVAWSNKSDFACANAFNNSIIPEDTFFPSPESSDSTDHVKPKETENTKQPSKSCHKPKAIVHTEKVNMMSLTVLGLRMLFAKTVAVNFLLTAKLFFLKRGRKKLLYIFKQPFMRPVQTTQEEDGCSCRFPEEEEGGCELRVKFSRSADAPAYQQGQNQLYNELNLGRREEYDVLDKRRGRDPEMGGKPQRRKNPQEGLYNELQKDKMAEAYSEIGMKGERRRGKGHDGLYQGLSTATKDTYDALHMQALPPR

SEQ ID NO: 30768 - protein, 306 aa, synthetic construct
AVYQLRDSKSSDKSVCLFTDFDSQTNVSQSKDSDVYITDKCVLDMRSMDFKSNSAVAWSNKSDFACANAFNNSIIPEDTFFPSPESSDSTDHVKPKETENTKQPSKSCHKPKAIVHTEKVNMMSLTVLGLRMLFAKTVAVNFLLTAKLFFLKRGRKKLLYIFKQPFMRPVQTTQEEDGCSCRFPEEEEGGCELRVKFSRSADAPAYQQGQNQLYNELNLGRREEYDVLDKRRGRDPEMGGKPQRRKNPQEGLYNELQKDKMAEAYSEIGMKGERRRGKGHDGLYQGLSTATKDTYDALHMQALPPR

SEQ ID NO: 30769 - protein, 305 aa, synthetic construct
VYQLRDSKSSDKSVCLFTDFDSQTNVSQSKDSDVYITDKCVLDMRSMDFKSNSAVAWSNKSDFACANAFNNSIIPEDTFFPSPESSDSTDHVKPKETENTKQPSKSCHKPKAIVHTEKVNMMSLTVLGLRMLFAKTVAVNFLLTAKLFFLKRGRKKLLYIFKQPFMRPVQTTQEEDGCSCRFPEEEEGGCELRVKFSRSADAPAYQQGQNQLYNELNLGRREEYDVLDKRRGRDPEMGGKPQRRKNPQEGLYNELQKDKMAEAYSEIGMKGERRRGKGHDGLYQGLSTATKDTYDALHMQALPPR

SEQ ID NO: 30770 - protein, 304 aa, synthetic construct
YQLRDSKSSDKSVCLFTDFDSQTNVSQSKDSDVYITDKCVLDMRSMDFKSNSAVAWSNKSDFACANAFNNSIIPEDTFFPSPESSDSTDHVKPKETENTKQPSKSCHKPKAIVHTEKVNMMSLTVLGLRMLFAKTVAVNFLLTAKLFFLKRGRKKLLYIFKQPFMRPVQTTQEEDGCSCRFPEEEEGGCELRVKFSRSADAPAYQQGQNQLYNELNLGRREEYDVLDKRRGRDPEMGGKPQRRKNPQEGLYNELQKDKMAEAYSEIGMKGERRRGKGHDGLYQGLSTATKDTYDALHMQALPPR

SEQ ID NO: 30771 - protein, 303 aa, synthetic construct
QLRDSKSSDKSVCLFTDFDSQTNVSQSKDSDVYITDKCVLDMRSMDFKSNSAVAWSNKSDFACANAFNNSIIPEDTFFPSPESSDSTDHVKPKETENTKQPSKSCHKPKAIVHTEKVNMMSLTVLGLRMLFAKTVAVNFLLTAKLFFLKRGRKKLLYIFKQPFMRPVQTTQEEDGCSCRFPEEEEGGCELRVKFSRSADAPAYQQGQNQLYNELNLGRREEYDVLDKRRGRDPEMGGKPQRRKNPQEGLYNELQKDKMAEAYSEIGMKGERRRGKGHDGLYQGLSTATKDTYDALHMQALPPR

SEQ ID NO: 30772 - protein, 302 aa, synthetic construct
LRDSKSSDKSVCLFTDFDSQTNVSQSKDSDVYITDKCVLDMRSMDFKSNSAVAWSNKSDFACANAFNNSIIPEDTFFPSPESSDSTDHVKPKETENTKQPSKSCHKPKAIVHTEKVNMMSLTVLGLRMLFAKTVAVNFLLTAKLFFLKRGRKKLLYIFKQPFMRPVQTTQEEDGCSCRFPEEEEGGCELRVKFSRSADAPAYQQGQNQLYNELNLGRREEYDVLDKRRGRDPEMGGKPQRRKNPQEGLYNELQKDKMAEAYSEIGMKGERRRGKGHDGLYQGLSTATKDTYDALHMQALPPR

SEQ ID NO: 30773 - protein, 301 aa, synthetic construct
RDSKSSDKSVCLFTDFDSQTNVSQSKDSDVYITDKCVLDMRSMDFKSNSAVAWSNKSDFACANAFNNSIIPEDTFFPSPESSDSTDHVKPKETENTKQPSKSCHKPKAIVHTEKVNMMSLTVLGLRMLFAKTVAVNFLLTAKLFFLKRGRKKLLYIFKQPFMRPVQTTQEEDGCSCRFPEEEEGGCELRVKFSRSADAPAYQQGQNQLYNELNLGRREEYDVLDKRRGRDPEMGGKPQRRKNPQEGLYNELQKDKMAEAYSEIGMKGERRRGKGHDGLYQGLSTATKDTYDALHMQALPPR

SEQ ID NO: 30774 - protein, 300 aa, synthetic construct
DSKSSDKSVCLFTDFDSQTNVSQSKDSDVYITDKCVLDMRSMDFKSNSAVAWSNKSDFACANAFNNSIIPEDTFFPSPESSDSTDHVKPKETENTKQPSKSCHKPKAIVHTEKVNMMSLTVLGLRMLFAKTVAVNFLLTAKLFFLKRGRKKLLYIFKQPFMRPVQTTQEEDGCSCRFPEEEEGGCELRVKFSRSADAPAYQQGQNQLYNELNLGRREEYDVLDKRRGRDPEMGGKPQRRKNPQEGLYNELQKDKMAEAYSEIGMKGERRRGKGHDGLYQGLSTATKDTYDALHMQALPPR

SEQ ID NO: 30775 - protein, 299 aa, synthetic construct
SKSSDKSVCLFTDFDSQTNVSQSKDSDVYITDKCVLDMRSMDFKSNSAVAWSNKSDFACANAFNNSIIPEDTFFPSPESSDSTDHVKPKETENTKQPSKSCHKPKAIVHTEKVNMMSLTVLGLRMLFAKTVAVNFLLTAKLFFLKRGRKKLLYIFKQPFMRPVQTTQEEDGCSCRFPEEEEGGCELRVKFSRSADAPAYQQGQNQLYNELNLGRREEYDVLDKRRGRDPEMGGKPQRRKNPQEGLYNELQKDKMAEAYSEIGMKGERRRGKGHDGLYQGLSTATKDTYDALHMQALPPR

SEQ ID NO: 30776 - protein, 298 aa, synthetic construct
KSSDKSVCLFTDFDSQTNVSQSKDSDVYITDKCVLDMRSMDFKSNSAVAWSNKSDFACANAFNNSIIPEDTFFPSPESSDSTDHVKPKETENTKQPSKSCHKPKAIVHTEKVNMMSLTVLGLRMLFAKTVAVNFLLTAKLFFLKRGRKKLLYIFKQPFMRPVQTTQEEDGCSCRFPEEEEGGCELRVKFSRSADAPAYQQGQNQLYNELNLGRREEYDVLDKRRGRDPEMGGKPQRRKNPQEGLYNELQKDKMAEAYSEIGMKGERRRGKGHDGLYQGLSTATKDTYDALHMQALPPR

SEQ ID NO: 30777 - protein, 297 aa, synthetic construct
SSDKSVCLFTDFDSQTNVSQSKDSDVYITDKCVLDMRSMDFKSNSAVAWSNKSDFACANAFNNSIIPEDTFFPSPESSDSTDHVKPKETENTKQPSKSCHKPKAIVHTEKVNMMSLTVLGLRMLFAKTVAVNFLLTAKLFFLKRGRKKLLYIFKQPFMRPVQTTQEEDGCSCRFPEEEEGGCELRVKFSRSADAPAYQQGQNQLYNELNLGRREEYDVLDKRRGRDPEMGGKPQRRKNPQEGLYNELQKDKMAEAYSEIGMKGERRRGKGHDGLYQGLSTATKDTYDALHMQALPPR

SEQ ID NO: 30778 - protein, 296 aa, synthetic construct
SDKSVCLFTDFDSQTNVSQSKDSDVYITDKCVLDMRSMDFKSNSAVAWSNKSDFACANAFNNSIIPEDTFFPSPESSDSTDHVKPKETENTKQPSKSCHKPKAIVHTEKVNMMSLTVLGLRMLFAKTVAVNFLLTAKLFFLKRGRKKLLYIFKQPFMRPVQTTQEEDGCSCRFPEEEEGGCELRVKFSRSADAPAYQQGQNQLYNELNLGRREEYDVLDKRRGRDPEMGGKPQRRKNPQEGLYNELQKDKMAEAYSEIGMKGERRRGKGHDGLYQGLSTATKDTYDALHMQALPPR

SEQ ID NO: 30779 - protein, 295 aa, synthetic construct
DKSVCLFTDFDSQTNVSQSKDSDVYITDKCVLDMRSMDFKSNSAVAWSNKSDFACANAFNNSIIPEDTFFPSPESSDSTDHVKPKETENTKQPSKSCHKPKAIVHTEKVNMMSLTVLGLRMLFAKTVAVNFLLTAKLFFLKRGRKKLLYIFKQPFMRPVQTTQEEDGCSCRFPEEEEGGCELRVKFSRSADAPAYQQGQNQLYNELNLGRREEYDVLDKRRGRDPEMGGKPQRRKNPQEGLYNELQKDKMAEAYSEIGMKGERRRGKGHDGLYQGLSTATKDTYDALHMQALPPR

SEQ ID NO: 30780 - protein, 294 aa, synthetic construct
KSVCLFTDFDSQTNVSQSKDSDVYITDKCVLDMRSMDFKSNSAVAWSNKSDFACANAFNNSIIPEDTFFPSPESSDSTDHVKPKETENTKQPSKSCHKPKAIVHTEKVNMMSLTVLGLRMLFAKTVAVNFLLTAKLFFLKRGRKKLLYIFKQPFMRPVQTTQEEDGCSCRFPEEEEGGCELRVKFSRSADAPAYQQGQNQLYNELNLGRREEYDVLDKRRGRDPEMGGKPQRRKNPQEGLYNELQKDKMAEAYSEIGMKGERRRGKGHDGLYQGLSTATKDTYDALHMQALPPR

SEQ ID NO: 30781 - protein, 293 aa, synthetic construct
SVCLFTDFDSQTNVSQSKDSDVYITDKCVLDMRSMDFKSNSAVAWSNKSDFACANAFNNSIIPEDTFFPSPESSDSTDHVKPKETENTKQPSKSCHKPKAIVHTEKVNMMSLTVLGLRMLFAKTVAVNFLLTAKLFFLKRGRKKLLYIFKQPFMRPVQTTQEEDGCSCRFPEEEEGGCELRVKFSRSADAPAYQQGQNQLYNELNLGRREEYDVLDKRRGRDPEMGGKPQRRKNPQEGLYNELQKDKMAEAYSEIGMKGERRRGKGHDGLYQGLSTATKDTYDALHMQALPPR

SEQ ID NO: 30782 - protein, 292 aa, synthetic construct
VCLFTDFDSQTNVSQSKDSDVYITDKCVLDMRSMDFKSNSAVAWSNKSDFACANAFNNSIIPEDTFFPSPESSDSTDHVKPKETENTKQPSKSCHKPKAIVHTEKVNMMSLTVLGLRMLFAKTVAVNFLLTAKLFFLKRGRKKLLYIFKQPFMRPVQTTQEEDGCSCRFPEEEEGGCELRVKFSRSADAPAYQQGQNQLYNELNLGRREEYDVLDKRRGRDPEMGGKPQRRKNPQEGLYNELQKDKMAEAYSEIGMKGERRRGKGHDGLYQGLSTATKDTYDALHMQALPPR

SEQ ID NO: 30783 - protein, 287 aa, synthetic construct
DFDSQTNVSQSKDSDVYITDKCVLDMRSMDFKSNSAVAWSNKSDFACANAFNNSIIPEDTFFPSPESSDSTDHVKPKETENTKQPSKSCHKPKAIVHTEKVNMMSLTVLGLRMLFAKTVAVNFLLTAKLFFLKRGRKKLLYIFKQPFMRPVQTTQEEDGCSCRFPEEEEGGCELRVKFSRSADAPAYQQGQNQLYNELNLGRREEYDVLDKRRGRDPEMGGKPQRRKNPQEGLYNELQKDKMAEAYSEIGMKGERRRGKGHDGLYQGLSTATKDTYDALHMQALPPR

SEQ ID NO: 30784 - protein, 282 aa, synthetic construct
TNVSQSKDSDVYITDKCVLDMRSMDFKSNSAVAWSNKSDFACANAFNNSIIPEDTFFPSPESSDSTDHVKPKETENTKQPSKSCHKPKAIVHTEKVNMMSLTVLGLRMLFAKTVAVNFLLTAKLFFLKRGRKKLLYIFKQPFMRPVQTTQEEDGCSCRFPEEEEGGCELRVKFSRSADAPAYQQGQNQLYNELNLGRREEYDVLDKRRGRDPEMGGKPQRRKNPQEGLYNELQKDKMAEAYSEIGMKGERRRGKGHDGLYQGLSTATKDTYDALHMQALPPR

SEQ ID NO: 30785 - protein, 328 aa, synthetic construct
GQPKANPTVTLFPPSSEELQANKATLVCLISDFYPGAVTVAWKADGSPVKAGVETTKPSKQSNNKYAASSYLSLTPEQWKSHRSYSCQVTHEGSTVEKTVAPTECSPIKTDVITMDPKDNCSKDANDTLLLQLTNTSAYYMYLLLLLKSVVYFAIITCCLLRRTAFCCNGEKSKRGRKKLLYIFKQPFMRPVQTTQEEDGCSCRFPEEEEGGCELRVKFSRSADAPAYQQGQNQLYNELNLGRREEYDVLDKRRGRDPEMGGKPQRRKNPQEGLYNELQKDKMAEAYSEIGMKGERRRGKGHDGLYQGLSTATKDTYDALHMQALPPR

SEQ ID NO: 30786 - protein, 327 aa, synthetic construct
QPKANPTVTLFPPSSEELQANKATLVCLISDFYPGAVTVAWKADGSPVKAGVETTKPSKQSNNKYAASSYLSLTPEQWKSHRSYSCQVTHEGSTVEKTVAPTECSPIKTDVITMDPKDNCSKDANDTLLLQLTNTSAYYMYLLLLLKSVVYFAIITCCLLRRTAFCCNGEKSKRGRKKLLYIFKQPFMRPVQTTQEEDGCSCRFPEEEEGGCELRVKFSRSADAPAYQQGQNQLYNELNLGRREEYDVLDKRRGRDPEMGGKPQRRKNPQEGLYNELQKDKMAEAYSEIGMKGERRRGKGHDGLYQGLSTATKDTYDALHMQALPPR

SEQ ID NO: 30787 - protein, 326 aa, synthetic construct
PKANPTVTLFPPSSEELQANKATLVCLISDFYPGAVTVAWKADGSPVKAGVETTKPSKQSNNKYAASSYLSLTPEQWKSHRSYSCQVTHEGSTVEKTVAPTECSPIKTDVITMDPKDNCSKDANDTLLLQLTNTSAYYMYLLLLLKSVVYFAIITCCLLRRTAFCCNGEKSKRGRKKLLYIFKQPFMRPVQTTQEEDGCSCRFPEEEEGGCELRVKFSRSADAPAYQQGQNQLYNELNLGRREEYDVLDKRRGRDPEMGGKPQRRKNPQEGLYNELQKDKMAEAYSEIGMKGERRRGKGHDGLYQGLSTATKDTYDALHMQALPPR

SEQ ID NO: 30788 - protein, 325 aa, synthetic construct
KANPTVTLFPPSSEELQANKATLVCLISDFYPGAVTVAWKADGSPVKAGVETTKPSKQSNNKYAASSYLSLTPEQWKSHRSYSCQVTHEGSTVEKTVAPTECSPIKTDVITMDPKDNCSKDANDTLLLQLTNTSAYYMYLLLLLKSVVYFAIITCCLLRRTAFCCNGEKSKRGRKKLLYIFKQPFMRPVQTTQEEDGCSCRFPEEEEGGCELRVKFSRSADAPAYQQGQNQLYNELNLGRREEYDVLDKRRGRDPEMGGKPQRRKNPQEGLYNELQKDKMAEAYSEIGMKGERRRGKGHDGLYQGLSTATKDTYDALHMQALPPR

SEQ ID NO: 30789 - protein, 324 aa, synthetic construct
ANPTVTLFPPSSEELQANKATLVCLISDFYPGAVTVAWKADGSPVKAGVETTKPSKQSNNKYAASSYLSLTPEQWKSHRSYSCQVTHEGSTVEKTVAPTECSPIKTDVITMDPKDNCSKDANDTLLLQLTNTSAYYMYLLLLLKSVVYFAIITCCLLRRTAFCCNGEKSKRGRKKLLYIFKQPFMRPVQTTQEEDGCSCRFPEEEEGGCELRVKFSRSADAPAYQQGQNQLYNELNLGRREEYDVLDKRRGRDPEMGGKPQRRKNPQEGLYNELQKDKMAEAYSEIGMKGERRRGKGHDGLYQGLSTATKDTYDALHMQALPPR

SEQ ID NO: 30790 - protein, 323 aa, synthetic construct
NPTVTLFPPSSEELQANKATLVCLISDFYPGAVTVAWKADGSPVKAGVETTKPSKQSNNKYAASSYLSLTPEQWKSHRSYSCQVTHEGSTVEKTVAPTECSPIKTDVITMDPKDNCSKDANDTLLLQLTNTSAYYMYLLLLLKSVVYFAIITCCLLRRTAFCCNGEKSKRGRKKLLYIFKQPFMRPVQTTQEEDGCSCRFPEEEEGGCELRVKFSRSADAPAYQQGQNQLYNELNLGRREEYDVLDKRRGRDPEMGGKPQRRKNPQEGLYNELQKDKMAEAYSEIGMKGERRRGKGHDGLYQGLSTATKDTYDALHMQALPPR

SEQ ID NO: 30791 - protein, 322 aa, synthetic construct
PTVTLFPPSSEELQANKATLVCLISDFYPGAVTVAWKADGSPVKAGVETTKPSKQSNNKYAASSYLSLTPEQWKSHRSYSCQVTHEGSTVEKTVAPTECSPIKTDVITMDPKDNCSKDANDTLLLQLTNTSAYYMYLLLLLKSVVYFAIITCCLLRRTAFCCNGEKSKRGRKKLLYIFKQPFMRPVQTTQEEDGCSCRFPEEEEGGCELRVKFSRSADAPAYQQGQNQLYNELNLGRREEYDVLDKRRGRDPEMGGKPQRRKNPQEGLYNELQKDKMAEAYSEIGMKGERRRGKGHDGLYQGLSTATKDTYDALHMQALPPR

SEQ ID NO: 30792 - protein, 321 aa, synthetic construct
TVTLFPPSSEELQANKATLVCLISDFYPGAVTVAWKADGSPVKAGVETTKPSKQSNNKYAASSYLSLTPEQWKSHRSYSCQVTHEGSTVEKTVAPTECSPIKTDVITMDPKDNCSKDANDTLLLQLTNTSAYYMYLLLLLKSVVYFAIITCCLLRRTAFCCNGEKSKRGRKKLLYIFKQPFMRPVQTTQEEDGCSCRFPEEEEGGCELRVKFSRSADAPAYQQGQNQLYNELNLGRREEYDVLDKRRGRDPEMGGKPQRRKNPQEGLYNELQKDKMAEAYSEIGMKGERRRGKGHDGLYQGLSTATKDTYDALHMQALPPR

SEQ ID NO: 30793 - protein, 320 aa, synthetic construct
VTLFPPSSEELQANKATLVCLISDFYPGAVTVAWKADGSPVKAGVETTKPSKQSNNKYAASSYLSLTPEQWKSHRSYSCQVTHEGSTVEKTVAPTECSPIKTDVITMDPKDNCSKDANDTLLLQLTNTSAYYMYLLLLLKSVVYFAIITCCLLRRTAFCCNGEKSKRGRKKLLYIFKQPFMRPVQTTQEEDGCSCRFPEEEEGGCELRVKFSRSADAPAYQQGQNQLYNELNLGRREEYDVLDKRRGRDPEMGGKPQRRKNPQEGLYNELQKDKMAEAYSEIGMKGERRRGKGHDGLYQGLSTATKDTYDALHMQALPPR

SEQ ID NO: 30794 - protein, 319 aa, synthetic construct
TLFPPSSEELQANKATLVCLISDFYPGAVTVAWKADGSPVKAGVETTKPSKQSNNKYAASSYLSLTPEQWKSHRSYSCQVTHEGSTVEKTVAPTECSPIKTDVITMDPKDNCSKDANDTLLLQLTNTSAYYMYLLLLLKSVVYFAIITCCLLRRTAFCCNGEKSKRGRKKLLYIFKQPFMRPVQTTQEEDGCSCRFPEEEEGGCELRVKFSRSADAPAYQQGQNQLYNELNLGRREEYDVLDKRRGRDPEMGGKPQRRKNPQEGLYNELQKDKMAEAYSEIGMKGERRRGKGHDGLYQGLSTATKDTYDALHMQALPPR

SEQ ID NO: 30795 - protein, 318 aa, synthetic construct
LFPPSSEELQANKATLVCLISDFYPGAVTVAWKADGSPVKAGVETTKPSKQSNNKYAASSYLSLTPEQWKSHRSYSCQVTHEGSTVEKTVAPTECSPIKTDVITMDPKDNCSKDANDTLLLQLTNTSAYYMYLLLLLKSVVYFAIITCCLLRRTAFCCNGEKSKRGRKKLLYIFKQPFMRPVQTTQEEDGCSCRFPEEEEGGCELRVKFSRSADAPAYQQGQNQLYNELNLGRREEYDVLDKRRGRDPEMGGKPQRRKNPQEGLYNELQKDKMAEAYSEIGMKGERRRGKGHDGLYQGLSTATKDTYDALHMQALPPR

SEQ ID NO: 30796 - protein, 329 aa, synthetic construct
GQPKANPTVTLFPPSSEELQANKATLVCLISDFYPGAVTVAWKADGSPVKAGVETTKPSKQSNNKYAASSYLSLTPEQWKSHRSYSCQVTHEGSTVEKTVAPTECSEVKTDSTDHVKPKETENTKQPSKSCHKPKAIVHTEKVNMMSLTVLGLRMLFAKTVAVNFLLTAKLFFLKRGRKKLLYIFKQPFMRPVQTTQEEDGCSCRFPEEEEGGCELRVKFSRSADAPAYQQGQNQLYNELNLGRREEYDVLDKRRGRDPEMGGKPQRRKNPQEGLYNELQKDKMAEAYSEIGMKGERRRGKGHDGLYQGLSTATKDTYDALHMQALPPR

SEQ ID NO: 30797 - protein, 328 aa, synthetic construct
QPKANPTVTLFPPSSEELQANKATLVCLISDFYPGAVTVAWKADGSPVKAGVETTKPSKQSNNKYAASSYLSLTPEQWKSHRSYSCQVTHEGSTVEKTVAPTECSEVKTDSTDHVKPKETENTKQPSKSCHKPKAIVHTEKVNMMSLTVLGLRMLFAKTVAVNFLLTAKLFFLKRGRKKLLYIFKQPFMRPVQTTQEEDGCSCRFPEEEEGGCELRVKFSRSADAPAYQQGQNQLYNELNLGRREEYDVLDKRRGRDPEMGGKPQRRKNPQEGLYNELQKDKMAEAYSEIGMKGERRRGKGHDGLYQGLSTATKDTYDALHMQALPPR

SEQ ID NO: 30798 - protein, 327 aa, synthetic construct
PKANPTVTLFPPSSEELQANKATLVCLISDFYPGAVTVAWKADGSPVKAGVETTKPSKQSNNKYAASSYLSLTPEQWKSHRSYSCQVTHEGSTVEKTVAPTECSEVKTDSTDHVKPKETENTKQPSKSCHKPKAIVHTEKVNMMSLTVLGLRMLFAKTVAVNFLLTAKLFFLKRGRKKLLYIFKQPFMRPVQTTQEEDGCSCRFPEEEEGGCELRVKFSRSADAPAYQQGQNQLYNELNLGRREEYDVLDKRRGRDPEMGGKPQRRKNPQEGLYNELQKDKMAEAYSEIGMKGERRRGKGHDGLYQGLSTATKDTYDALHMQALPPR

SEQ ID NO: 30799 - protein, 326 aa, synthetic construct
KANPTVTLFPPSSEELQANKATLVCLISDFYPGAVTVAWKADGSPVKAGVETTKPSKQSNNKYAASSYLSLTPEQWKSHRSYSCQVTHEGSTVEKTVAPTECSEVKTDSTDHVKPKETENTKQPSKSCHKPKAIVHTEKVNMMSLTVLGLRMLFAKTVAVNFLLTAKLFFLKRGRKKLLYIFKQPFMRPVQTTQEEDGCSCRFPEEEEGGCELRVKFSRSADAPAYQQGQNQLYNELNLGRREEYDVLDKRRGRDPEMGGKPQRRKNPQEGLYNELQKDKMAEAYSEIGMKGERRRGKGHDGLYQGLSTATKDTYDALHMQALPPR

SEQ ID NO: 30800 - protein, 325 aa, synthetic construct
ANPTVTLFPPSSEELQANKATLVCLISDFYPGAVTVAWKADGSPVKAGVETTKPSKQSNNKYAASSYLSLTPEQWKSHRSYSCQVTHEGSTVEKTVAPTECSEVKTDSTDHVKPKETENTKQPSKSCHKPKAIVHTEKVNMMSLTVLGLRMLFAKTVAVNFLLTAKLFFLKRGRKKLLYIFKQPFMRPVQTTQEEDGCSCRFPEEEEGGCELRVKFSRSADAPAYQQGQNQLYNELNLGRREEYDVLDKRRGRDPEMGGKPQRRKNPQEGLYNELQKDKMAEAYSEIGMKGERRRGKGHDGLYQGLSTATKDTYDALHMQALPPR

SEQ ID NO: 30801 - protein, 324 aa, synthetic construct
NPTVTLFPPSSEELQANKATLVCLISDFYPGAVTVAWKADGSPVKAGVETTKPSKQSNNKYAASSYLSLTPEQWKSHRSYSCQVTHEGSTVEKTVAPTECSEVKTDSTDHVKPKETENTKQPSKSCHKPKAIVHTEKVNMMSLTVLGLRMLFAKTVAVNFLLTAKLFFLKRGRKKLLYIFKQPFMRPVQTTQEEDGCSCRFPEEEEGGCELRVKFSRSADAPAYQQGQNQLYNELNLGRREEYDVLDKRRGRDPEMGGKPQRRKNPQEGLYNELQKDKMAEAYSEIGMKGERRRGKGHDGLYQGLSTATKDTYDALHMQALPPR

SEQ ID NO: 30802 - protein, 323 aa, synthetic construct
PTVTLFPPSSEELQANKATLVCLISDFYPGAVTVAWKADGSPVKAGVETTKPSKQSNNKYAASSYLSLTPEQWKSHRSYSCQVTHEGSTVEKTVAPTECSEVKTDSTDHVKPKETENTKQPSKSCHKPKAIVHTEKVNMMSLTVLGLRMLFAKTVAVNFLLTAKLFFLKRGRKKLLYIFKQPFMRPVQTTQEEDGCSCRFPEEEEGGCELRVKFSRSADAPAYQQGQNQLYNELNLGRREEYDVLDKRRGRDPEMGGKPQRRKNPQEGLYNELQKDKMAEAYSEIGMKGERRRGKGHDGLYQGLSTATKDTYDALHMQALPPR

SEQ ID NO: 30803 - protein, 322 aa, synthetic construct
TVTLFPPSSEELQANKATLVCLISDFYPGAVTVAWKADGSPVKAGVETTKPSKQSNNKYAASSYLSLTPEQWKSHRSYSCQVTHEGSTVEKTVAPTECSEVKTDSTDHVKPKETENTKQPSKSCHKPKAIVHTEKVNMMSLTVLGLRMLFAKTVAVNFLLTAKLFFLKRGRKKLLYIFKQPFMRPVQTTQEEDGCSCRFPEEEEGGCELRVKFSRSADAPAYQQGQNQLYNELNLGRREEYDVLDKRRGRDPEMGGKPQRRKNPQEGLYNELQKDKMAEAYSEIGMKGERRRGKGHDGLYQGLSTATKDTYDALHMQALPPR

SEQ ID NO: 30804 - protein, 321 aa, synthetic construct
VTLFPPSSEELQANKATLVCLISDFYPGAVTVAWKADGSPVKAGVETTKPSKQSNNKYAASSYLSLTPEQWKSHRSYSCQVTHEGSTVEKTVAPTECSEVKTDSTDHVKPKETENTKQPSKSCHKPKAIVHTEKVNMMSLTVLGLRMLFAKTVAVNFLLTAKLFFLKRGRKKLLYIFKQPFMRPVQTTQEEDGCSCRFPEEEEGGCELRVKFSRSADAPAYQQGQNQLYNELNLGRREEYDVLDKRRGRDPEMGGKPQRRKNPQEGLYNELQKDKMAEAYSEIGMKGERRRGKGHDGLYQGLSTATKDTYDALHMQALPPR

SEQ ID NO: 30805 - protein, 320 aa, synthetic construct
TLFPPSSEELQANKATLVCLISDFYPGAVTVAWKADGSPVKAGVETTKPSKQSNNKYAASSYLSLTPEQWKSHRSYSCQVTHEGSTVEKTVAPTECSEVKTDSTDHVKPKETENTKQPSKSCHKPKAIVHTEKVNMMSLTVLGLRMLFAKTVAVNFLLTAKLFFLKRGRKKLLYIFKQPFMRPVQTTQEEDGCSCRFPEEEEGGCELRVKFSRSADAPAYQQGQNQLYNELNLGRREEYDVLDKRRGRDPEMGGKPQRRKNPQEGLYNELQKDKMAEAYSEIGMKGERRRGKGHDGLYQGLSTATKDTYDALHMQALPPR

SEQ ID NO: 30806 - protein, 319 aa, synthetic construct
LFPPSSEELQANKATLVCLISDFYPGAVTVAWKADGSPVKAGVETTKPSKQSNNKYAASSYLSLTPEQWKSHRSYSCQVTHEGSTVEKTVAPTECSEVKTDSTDHVKPKETENTKQPSKSCHKPKAIVHTEKVNMMSLTVLGLRMLFAKTVAVNFLLTAKLFFLKRGRKKLLYIFKQPFMRPVQTTQEEDGCSCRFPEEEEGGCELRVKFSRSADAPAYQQGQNQLYNELNLGRREEYDVLDKRRGRDPEMGGKPQRRKNPQEGLYNELQKDKMAEAYSEIGMKGERRRGKGHDGLYQGLSTATKDTYDALHMQALPPR

SEQ ID NO: 30807 - protein, 314 aa, synthetic construct
GQPKANPTVTLFPPSSEELQANKATLVCLISDFYPGAVTVAWKADGSPVKAGVETTKPSKQSNNKYAASSYLSLTPEQWKSHRSYSCQVTHEGSTVEKTVAPTECSGRADCGFTSESYQQGVLSATILYEILLGKATLYAVLVSALVLMAMVKRKDSRGKRGRKKLLYIFKQPFMRPVQTTQEEDGCSCRFPEEEEGGCELRVKFSRSADAPAYQQGQNQLYNELNLGRREEYDVLDKRRGRDPEMGGKPQRRKNPQEGLYNELQKDKMAEAYSEIGMKGERRRGKGHDGLYQGLSTATKDTYDALHMQALPPR

SEQ ID NO: 30808 - protein, 313 aa, synthetic construct
QPKANPTVTLFPPSSEELQANKATLVCLISDFYPGAVTVAWKADGSPVKAGVETTKPSKQSNNKYAASSYLSLTPEQWKSHRSYSCQVTHEGSTVEKTVAPTECSGRADCGFTSESYQQGVLSATILYEILLGKATLYAVLVSALVLMAMVKRKDSRGKRGRKKLLYIFKQPFMRPVQTTQEEDGCSCRFPEEEEGGCELRVKFSRSADAPAYQQGQNQLYNELNLGRREEYDVLDKRRGRDPEMGGKPQRRKNPQEGLYNELQKDKMAEAYSEIGMKGERRRGKGHDGLYQGLSTATKDTYDALHMQALPPR

SEQ ID NO: 30809 - protein, 312 aa, synthetic construct
PKANPTVTLFPPSSEELQANKATLVCLISDFYPGAVTVAWKADGSPVKAGVETTKPSKQSNNKYAASSYLSLTPEQWKSHRSYSCQVTHEGSTVEKTVAPTECSGRADCGFTSESYQQGVLSATILYEILLGKATLYAVLVSALVLMAMVKRKDSRGKRGRKKLLYIFKQPFMRPVQTTQEEDGCSCRFPEEEEGGCELRVKFSRSADAPAYQQGQNQLYNELNLGRREEYDVLDKRRGRDPEMGGKPQRRKNPQEGLYNELQKDKMAEAYSEIGMKGERRRGKGHDGLYQGLSTATKDTYDALHMQALPPR

SEQ ID NO: 30810 - protein, 311 aa, synthetic construct
KANPTVTLFPPSSEELQANKATLVCLISDFYPGAVTVAWKADGSPVKAGVETTKPSKQSNNKYAASSYLSLTPEQWKSHRSYSCQVTHEGSTVEKTVAPTECSGRADCGFTSESYQQGVLSATILYEILLGKATLYAVLVSALVLMAMVKRKDSRGKRGRKKLLYIFKQPFMRPVQTTQEEDGCSCRFPEEEEGGCELRVKFSRSADAPAYQQGQNQLYNELNLGRREEYDVLDKRRGRDPEMGGKPQRRKNPQEGLYNELQKDKMAEAYSEIGMKGERRRGKGHDGLYQGLSTATKDTYDALHMQALPPR

SEQ ID NO: 30811 - protein, 310 aa, synthetic construct
ANPTVTLFPPSSEELQANKATLVCLISDFYPGAVTVAWKADGSPVKAGVETTKPSKQSNNKYAASSYLSLTPEQWKSHRSYSCQVTHEGSTVEKTVAPTECSGRADCGFTSESYQQGVLSATILYEILLGKATLYAVLVSALVLMAMVKRKDSRGKRGRKKLLYIFKQPFMRPVQTTQEEDGCSCRFPEEEEGGCELRVKFSRSADAPAYQQGQNQLYNELNLGRREEYDVLDKRRGRDPEMGGKPQRRKNPQEGLYNELQKDKMAEAYSEIGMKGERRRGKGHDGLYQGLSTATKDTYDALHMQALPPR

SEQ ID NO: 30812 - protein, 309 aa, synthetic construct
NPTVTLFPPSSEELQANKATLVCLISDFYPGAVTVAWKADGSPVKAGVETTKPSKQSNNKYAASSYLSLTPEQWKSHRSYSCQVTHEGSTVEKTVAPTECSGRADCGFTSESYQQGVLSATILYEILLGKATLYAVLVSALVLMAMVKRKDSRGKRGRKKLLYIFKQPFMRPVQTTQEEDGCSCRFPEEEEGGCELRVKFSRSADAPAYQQGQNQLYNELNLGRREEYDVLDKRRGRDPEMGGKPQRRKNPQEGLYNELQKDKMAEAYSEIGMKGERRRGKGHDGLYQGLSTATKDTYDALHMQALPPR

SEQ ID NO: 30813 - protein, 308 aa, synthetic construct
PTVTLFPPSSEELQANKATLVCLISDFYPGAVTVAWKADGSPVKAGVETTKPSKQSNNKYAASSYLSLTPEQWKSHRSYSCQVTHEGSTVEKTVAPTECSGRADCGFTSESYQQGVLSATILYEILLGKATLYAVLVSALVLMAMVKRKDSRGKRGRKKLLYIFKQPFMRPVQTTQEEDGCSCRFPEEEEGGCELRVKFSRSADAPAYQQGQNQLYNELNLGRREEYDVLDKRRGRDPEMGGKPQRRKNPQEGLYNELQKDKMAEAYSEIGMKGERRRGKGHDGLYQGLSTATKDTYDALHMQALPPR

SEQ ID NO: 30814 - protein, 307 aa, synthetic construct
TVTLFPPSSEELQANKATLVCLISDFYPGAVTVAWKADGSPVKAGVETTKPSKQSNNKYAASSYLSLTPEQWKSHRSYSCQVTHEGSTVEKTVAPTECSGRADCGFTSESYQQGVLSATILYEILLGKATLYAVLVSALVLMAMVKRKDSRGKRGRKKLLYIFKQPFMRPVQTTQEEDGCSCRFPEEEEGGCELRVKFSRSADAPAYQQGQNQLYNELNLGRREEYDVLDKRRGRDPEMGGKPQRRKNPQEGLYNELQKDKMAEAYSEIGMKGERRRGKGHDGLYQGLSTATKDTYDALHMQALPPR

SEQ ID NO: 30815 - protein, 306 aa, synthetic construct
VTLFPPSSEELQANKATLVCLISDFYPGAVTVAWKADGSPVKAGVETTKPSKQSNNKYAASSYLSLTPEQWKSHRSYSCQVTHEGSTVEKTVAPTECSGRADCGFTSESYQQGVLSATILYEILLGKATLYAVLVSALVLMAMVKRKDSRGKRGRKKLLYIFKQPFMRPVQTTQEEDGCSCRFPEEEEGGCELRVKFSRSADAPAYQQGQNQLYNELNLGRREEYDVLDKRRGRDPEMGGKPQRRKNPQEGLYNELQKDKMAEAYSEIGMKGERRRGKGHDGLYQGLSTATKDTYDALHMQALPPR

SEQ ID NO: 30816 - protein, 305 aa, synthetic construct
TLFPPSSEELQANKATLVCLISDFYPGAVTVAWKADGSPVKAGVETTKPSKQSNNKYAASSYLSLTPEQWKSHRSYSCQVTHEGSTVEKTVAPTECSGRADCGFTSESYQQGVLSATILYEILLGKATLYAVLVSALVLMAMVKRKDSRGKRGRKKLLYIFKQPFMRPVQTTQEEDGCSCRFPEEEEGGCELRVKFSRSADAPAYQQGQNQLYNELNLGRREEYDVLDKRRGRDPEMGGKPQRRKNPQEGLYNELQKDKMAEAYSEIGMKGERRRGKGHDGLYQGLSTATKDTYDALHMQALPPR

SEQ ID NO: 30817 - protein, 304 aa, synthetic construct
LFPPSSEELQANKATLVCLISDFYPGAVTVAWKADGSPVKAGVETTKPSKQSNNKYAASSYLSLTPEQWKSHRSYSCQVTHEGSTVEKTVAPTECSGRADCGFTSESYQQGVLSATILYEILLGKATLYAVLVSALVLMAMVKRKDSRGKRGRKKLLYIFKQPFMRPVQTTQEEDGCSCRFPEEEEGGCELRVKFSRSADAPAYQQGQNQLYNELNLGRREEYDVLDKRRGRDPEMGGKPQRRKNPQEGLYNELQKDKMAEAYSEIGMKGERRRGKGHDGLYQGLSTATKDTYDALHMQALPPR

SEQ ID NO: 30818 - protein, 321 aa, synthetic construct
GQPKANPTVTLFPPSSEELQANKATLVCLISDFYPGAVTVAWKADGSPVKAGVETTKPSKQSNNKYAASSYLSLTPEQWKSHRSYSCQVTHEGSTVEKTVAPTECSIPEDTFFPSPESSCDVKLVEKSFETDTNLNFQNLSVIGFRILLLKVAGFNLLMTLRLWSSKRGRKKLLYIFKQPFMRPVQTTQEEDGCSCRFPEEEEGGCELRVKFSRSADAPAYQQGQNQLYNELNLGRREEYDVLDKRRGRDPEMGGKPQRRKNPQEGLYNELQKDKMAEAYSEIGMKGERRRGKGHDGLYQGLSTATKDTYDALHMQALPPR

SEQ ID NO: 30819 - protein, 320 aa, synthetic construct
QPKANPTVTLFPPSSEELQANKATLVCLISDFYPGAVTVAWKADGSPVKAGVETTKPSKQSNNKYAASSYLSLTPEQWKSHRSYSCQVTHEGSTVEKTVAPTECSIPEDTFFPSPESSCDVKLVEKSFETDTNLNFQNLSVIGFRILLLKVAGFNLLMTLRLWSSKRGRKKLLYIFKQPFMRPVQTTQEEDGCSCRFPEEEEGGCELRVKFSRSADAPAYQQGQNQLYNELNLGRREEYDVLDKRRGRDPEMGGKPQRRKNPQEGLYNELQKDKMAEAYSEIGMKGERRRGKGHDGLYQGLSTATKDTYDALHMQALPPR

SEQ ID NO: 30820 - protein, 319 aa, synthetic construct
PKANPTVTLFPPSSEELQANKATLVCLISDFYPGAVTVAWKADGSPVKAGVETTKPSKQSNNKYAASSYLSLTPEQWKSHRSYSCQVTHEGSTVEKTVAPTECSIPEDTFFPSPESSCDVKLVEKSFETDTNLNFQNLSVIGFRILLLKVAGFNLLMTLRLWSSKRGRKKLLYIFKQPFMRPVQTTQEEDGCSCRFPEEEEGGCELRVKFSRSADAPAYQQGQNQLYNELNLGRREEYDVLDKRRGRDPEMGGKPQRRKNPQEGLYNELQKDKMAEAYSEIGMKGERRRGKGHDGLYQGLSTATKDTYDALHMQALPPR

SEQ ID NO: 30821 - protein, 318 aa, synthetic construct
KANPTVTLFPPSSEELQANKATLVCLISDFYPGAVTVAWKADGSPVKAGVETTKPSKQSNNKYAASSYLSLTPEQWKSHRSYSCQVTHEGSTVEKTVAPTECSIPEDTFFPSPESSCDVKLVEKSFETDTNLNFQNLSVIGFRILLLKVAGFNLLMTLRLWSSKRGRKKLLYIFKQPFMRPVQTTQEEDGCSCRFPEEEEGGCELRVKFSRSADAPAYQQGQNQLYNELNLGRREEYDVLDKRRGRDPEMGGKPQRRKNPQEGLYNELQKDKMAEAYSEIGMKGERRRGKGHDGLYQGLSTATKDTYDALHMQALPPR

SEQ ID NO: 30822 - protein, 317 aa, synthetic construct
ANPTVTLFPPSSEELQANKATLVCLISDFYPGAVTVAWKADGSPVKAGVETTKPSKQSNNKYAASSYLSLTPEQWKSHRSYSCQVTHEGSTVEKTVAPTECSIPEDTFFPSPESSCDVKLVEKSFETDTNLNFQNLSVIGFRILLLKVAGFNLLMTLRLWSSKRGRKKLLYIFKQPFMRPVQTTQEEDGCSCRFPEEEEGGCELRVKFSRSADAPAYQQGQNQLYNELNLGRREEYDVLDKRRGRDPEMGGKPQRRKNPQEGLYNELQKDKMAEAYSEIGMKGERRRGKGHDGLYQGLSTATKDTYDALHMQALPPR

SEQ ID NO: 30823 - protein, 316 aa, synthetic construct
NPTVTLFPPSSEELQANKATLVCLISDFYPGAVTVAWKADGSPVKAGVETTKPSKQSNNKYAASSYLSLTPEQWKSHRSYSCQVTHEGSTVEKTVAPTECSIPEDTFFPSPESSCDVKLVEKSFETDTNLNFQNLSVIGFRILLLKVAGFNLLMTLRLWSSKRGRKKLLYIFKQPFMRPVQTTQEEDGCSCRFPEEEEGGCELRVKFSRSADAPAYQQGQNQLYNELNLGRREEYDVLDKRRGRDPEMGGKPQRRKNPQEGLYNELQKDKMAEAYSEIGMKGERRRGKGHDGLYQGLSTATKDTYDALHMQALPPR

SEQ ID NO: 30824 - protein, 315 aa, synthetic construct
PTVTLFPPSSEELQANKATLVCLISDFYPGAVTVAWKADGSPVKAGVETTKPSKQSNNKYAASSYLSLTPEQWKSHRSYSCQVTHEGSTVEKTVAPTECSIPEDTFFPSPESSCDVKLVEKSFETDTNLNFQNLSVIGFRILLLKVAGFNLLMTLRLWSSKRGRKKLLYIFKQPFMRPVQTTQEEDGCSCRFPEEEEGGCELRVKFSRSADAPAYQQGQNQLYNELNLGRREEYDVLDKRRGRDPEMGGKPQRRKNPQEGLYNELQKDKMAEAYSEIGMKGERRRGKGHDGLYQGLSTATKDTYDALHMQALPPR

SEQ ID NO: 30825 - protein, 314 aa, synthetic construct
TVTLFPPSSEELQANKATLVCLISDFYPGAVTVAWKADGSPVKAGVETTKPSKQSNNKYAASSYLSLTPEQWKSHRSYSCQVTHEGSTVEKTVAPTECSIPEDTFFPSPESSCDVKLVEKSFETDTNLNFQNLSVIGFRILLLKVAGFNLLMTLRLWSSKRGRKKLLYIFKQPFMRPVQTTQEEDGCSCRFPEEEEGGCELRVKFSRSADAPAYQQGQNQLYNELNLGRREEYDVLDKRRGRDPEMGGKPQRRKNPQEGLYNELQKDKMAEAYSEIGMKGERRRGKGHDGLYQGLSTATKDTYDALHMQALPPR

SEQ ID NO: 30826 - protein, 313 aa, synthetic construct
VTLFPPSSEELQANKATLVCLISDFYPGAVTVAWKADGSPVKAGVETTKPSKQSNNKYAASSYLSLTPEQWKSHRSYSCQVTHEGSTVEKTVAPTECSIPEDTFFPSPESSCDVKLVEKSFETDTNLNFQNLSVIGFRILLLKVAGFNLLMTLRLWSSKRGRKKLLYIFKQPFMRPVQTTQEEDGCSCRFPEEEEGGCELRVKFSRSADAPAYQQGQNQLYNELNLGRREEYDVLDKRRGRDPEMGGKPQRRKNPQEGLYNELQKDKMAEAYSEIGMKGERRRGKGHDGLYQGLSTATKDTYDALHMQALPPR

SEQ ID NO: 30827 - protein, 312 aa, synthetic construct
TLFPPSSEELQANKATLVCLISDFYPGAVTVAWKADGSPVKAGVETTKPSKQSNNKYAASSYLSLTPEQWKSHRSYSCQVTHEGSTVEKTVAPTECSIPEDTFFPSPESSCDVKLVEKSFETDTNLNFQNLSVIGFRILLLKVAGFNLLMTLRLWSSKRGRKKLLYIFKQPFMRPVQTTQEEDGCSCRFPEEEEGGCELRVKFSRSADAPAYQQGQNQLYNELNLGRREEYDVLDKRRGRDPEMGGKPQRRKNPQEGLYNELQKDKMAEAYSEIGMKGERRRGKGHDGLYQGLSTATKDTYDALHMQALPPR

SEQ ID NO: 30828 - protein, 311 aa, synthetic construct
LFPPSSEELQANKATLVCLISDFYPGAVTVAWKADGSPVKAGVETTKPSKQSNNKYAASSYLSLTPEQWKSHRSYSCQVTHEGSTVEKTVAPTECSIPEDTFFPSPESSCDVKLVEKSFETDTNLNFQNLSVIGFRILLLKVAGFNLLMTLRLWSSKRGRKKLLYIFKQPFMRPVQTTQEEDGCSCRFPEEEEGGCELRVKFSRSADAPAYQQGQNQLYNELNLGRREEYDVLDKRRGRDPEMGGKPQRRKNPQEGLYNELQKDKMAEAYSEIGMKGERRRGKGHDGLYQGLSTATKDTYDALHMQALPPR

SEQ ID NO: 30829 - protein, 331 aa, synthetic construct
DLKNVFPPEVAVFEPSEAEISHTQKATLVCLATGFYPDHVELSWWVNGKEVHSGVCTDPQPLKEQPALNDSRYCLSSRLRVSATFWQNPRNHFRCQVQFYGLSENDEWTQDRAKPVTQIVSAEAWGRADCDVKLVEKSFETDTNLNFQNLSVIGFRILLLKVAGFNLLMTLRLWSSKRGRKKLLYIFKQPFMRPVQTTQEEDGCSCRFPEEEEGGCELRVKFSRSADAPAYQQGQNQLYNELNLGRREEYDVLDKRRGRDPEMGGKPQRRKNPQEGLYNELQKDKMAEAYSEIGMKGERRRGKGHDGLYQGLSTATKDTYDALHMQALPPR

SEQ ID NO: 30830 - protein, 330 aa, synthetic construct
LKNVFPPEVAVFEPSEAEISHTQKATLVCLATGFYPDHVELSWWVNGKEVHSGVCTDPQPLKEQPALNDSRYCLSSRLRVSATFWQNPRNHFRCQVQFYGLSENDEWTQDRAKPVTQIVSAEAWGRADCDVKLVEKSFETDTNLNFQNLSVIGFRILLLKVAGFNLLMTLRLWSSKRGRKKLLYIFKQPFMRPVQTTQEEDGCSCRFPEEEEGGCELRVKFSRSADAPAYQQGQNQLYNELNLGRREEYDVLDKRRGRDPEMGGKPQRRKNPQEGLYNELQKDKMAEAYSEIGMKGERRRGKGHDGLYQGLSTATKDTYDALHMQALPPR

SEQ ID NO: 30831 - protein, 329 aa, synthetic construct
KNVFPPEVAVFEPSEAEISHTQKATLVCLATGFYPDHVELSWWVNGKEVHSGVCTDPQPLKEQPALNDSRYCLSSRLRVSATFWQNPRNHFRCQVQFYGLSENDEWTQDRAKPVTQIVSAEAWGRADCDVKLVEKSFETDTNLNFQNLSVIGFRILLLKVAGFNLLMTLRLWSSKRGRKKLLYIFKQPFMRPVQTTQEEDGCSCRFPEEEEGGCELRVKFSRSADAPAYQQGQNQLYNELNLGRREEYDVLDKRRGRDPEMGGKPQRRKNPQEGLYNELQKDKMAEAYSEIGMKGERRRGKGHDGLYQGLSTATKDTYDALHMQALPPR

SEQ ID NO: 30832 - protein, 328 aa, synthetic construct
NVFPPEVAVFEPSEAEISHTQKATLVCLATGFYPDHVELSWWVNGKEVHSGVCTDPQPLKEQPALNDSRYCLSSRLRVSATFWQNPRNHFRCQVQFYGLSENDEWTQDRAKPVTQIVSAEAWGRADCDVKLVEKSFETDTNLNFQNLSVIGFRILLLKVAGFNLLMTLRLWSSKRGRKKLLYIFKQPFMRPVQTTQEEDGCSCRFPEEEEGGCELRVKFSRSADAPAYQQGQNQLYNELNLGRREEYDVLDKRRGRDPEMGGKPQRRKNPQEGLYNELQKDKMAEAYSEIGMKGERRRGKGHDGLYQGLSTATKDTYDALHMQALPPR

SEQ ID NO: 30833 - protein, 327 aa, synthetic construct
VFPPEVAVFEPSEAEISHTQKATLVCLATGFYPDHVELSWWVNGKEVHSGVCTDPQPLKEQPALNDSRYCLSSRLRVSATFWQNPRNHFRCQVQFYGLSENDEWTQDRAKPVTQIVSAEAWGRADCDVKLVEKSFETDTNLNFQNLSVIGFRILLLKVAGFNLLMTLRLWSSKRGRKKLLYIFKQPFMRPVQTTQEEDGCSCRFPEEEEGGCELRVKFSRSADAPAYQQGQNQLYNELNLGRREEYDVLDKRRGRDPEMGGKPQRRKNPQEGLYNELQKDKMAEAYSEIGMKGERRRGKGHDGLYQGLSTATKDTYDALHMQALPPR

SEQ ID NO: 30834 - protein, 326 aa, synthetic construct
FPPEVAVFEPSEAEISHTQKATLVCLATGFYPDHVELSWWVNGKEVHSGVCTDPQPLKEQPALNDSRYCLSSRLRVSATFWQNPRNHFRCQVQFYGLSENDEWTQDRAKPVTQIVSAEAWGRADCDVKLVEKSFETDTNLNFQNLSVIGFRILLLKVAGFNLLMTLRLWSSKRGRKKLLYIFKQPFMRPVQTTQEEDGCSCRFPEEEEGGCELRVKFSRSADAPAYQQGQNQLYNELNLGRREEYDVLDKRRGRDPEMGGKPQRRKNPQEGLYNELQKDKMAEAYSEIGMKGERRRGKGHDGLYQGLSTATKDTYDALHMQALPPR

SEQ ID NO: 30835 - protein, 325 aa, synthetic construct
PPEVAVFEPSEAEISHTQKATLVCLATGFYPDHVELSWWVNGKEVHSGVCTDPQPLKEQPALNDSRYCLSSRLRVSATFWQNPRNHFRCQVQFYGLSENDEWTQDRAKPVTQIVSAEAWGRADCDVKLVEKSFETDTNLNFQNLSVIGFRILLLKVAGFNLLMTLRLWSSKRGRKKLLYIFKQPFMRPVQTTQEEDGCSCRFPEEEEGGCELRVKFSRSADAPAYQQGQNQLYNELNLGRREEYDVLDKRRGRDPEMGGKPQRRKNPQEGLYNELQKDKMAEAYSEIGMKGERRRGKGHDGLYQGLSTATKDTYDALHMQALPPR

SEQ ID NO: 30836 - protein, 324 aa, synthetic construct
PEVAVFEPSEAEISHTQKATLVCLATGFYPDHVELSWWVNGKEVHSGVCTDPQPLKEQPALNDSRYCLSSRLRVSATFWQNPRNHFRCQVQFYGLSENDEWTQDRAKPVTQIVSAEAWGRADCDVKLVEKSFETDTNLNFQNLSVIGFRILLLKVAGFNLLMTLRLWSSKRGRKKLLYIFKQPFMRPVQTTQEEDGCSCRFPEEEEGGCELRVKFSRSADAPAYQQGQNQLYNELNLGRREEYDVLDKRRGRDPEMGGKPQRRKNPQEGLYNELQKDKMAEAYSEIGMKGERRRGKGHDGLYQGLSTATKDTYDALHMQALPPR

SEQ ID NO: 30837 - protein, 323 aa, synthetic construct
EVAVFEPSEAEISHTQKATLVCLATGFYPDHVELSWWVNGKEVHSGVCTDPQPLKEQPALNDSRYCLSSRLRVSATFWQNPRNHFRCQVQFYGLSENDEWTQDRAKPVTQIVSAEAWGRADCDVKLVEKSFETDTNLNFQNLSVIGFRILLLKVAGFNLLMTLRLWSSKRGRKKLLYIFKQPFMRPVQTTQEEDGCSCRFPEEEEGGCELRVKFSRSADAPAYQQGQNQLYNELNLGRREEYDVLDKRRGRDPEMGGKPQRRKNPQEGLYNELQKDKMAEAYSEIGMKGERRRGKGHDGLYQGLSTATKDTYDALHMQALPPR

SEQ ID NO: 30838 - protein, 322 aa, synthetic construct
VAVFEPSEAEISHTQKATLVCLATGFYPDHVELSWWVNGKEVHSGVCTDPQPLKEQPALNDSRYCLSSRLRVSATFWQNPRNHFRCQVQFYGLSENDEWTQDRAKPVTQIVSAEAWGRADCDVKLVEKSFETDTNLNFQNLSVIGFRILLLKVAGFNLLMTLRLWSSKRGRKKLLYIFKQPFMRPVQTTQEEDGCSCRFPEEEEGGCELRVKFSRSADAPAYQQGQNQLYNELNLGRREEYDVLDKRRGRDPEMGGKPQRRKNPQEGLYNELQKDKMAEAYSEIGMKGERRRGKGHDGLYQGLSTATKDTYDALHMQALPPR

SEQ ID NO: 30839 - protein, 321 aa, synthetic construct
AVFEPSEAEISHTQKATLVCLATGFYPDHVELSWWVNGKEVHSGVCTDPQPLKEQPALNDSRYCLSSRLRVSATFWQNPRNHFRCQVQFYGLSENDEWTQDRAKPVTQIVSAEAWGRADCDVKLVEKSFETDTNLNFQNLSVIGFRILLLKVAGFNLLMTLRLWSSKRGRKKLLYIFKQPFMRPVQTTQEEDGCSCRFPEEEEGGCELRVKFSRSADAPAYQQGQNQLYNELNLGRREEYDVLDKRRGRDPEMGGKPQRRKNPQEGLYNELQKDKMAEAYSEIGMKGERRRGKGHDGLYQGLSTATKDTYDALHMQALPPR

SEQ ID NO: 30840 - protein, 320 aa, synthetic construct
VFEPSEAEISHTQKATLVCLATGFYPDHVELSWWVNGKEVHSGVCTDPQPLKEQPALNDSRYCLSSRLRVSATFWQNPRNHFRCQVQFYGLSENDEWTQDRAKPVTQIVSAEAWGRADCDVKLVEKSFETDTNLNFQNLSVIGFRILLLKVAGFNLLMTLRLWSSKRGRKKLLYIFKQPFMRPVQTTQEEDGCSCRFPEEEEGGCELRVKFSRSADAPAYQQGQNQLYNELNLGRREEYDVLDKRRGRDPEMGGKPQRRKNPQEGLYNELQKDKMAEAYSEIGMKGERRRGKGHDGLYQGLSTATKDTYDALHMQALPPR

SEQ ID NO: 30841 - protein, 319 aa, synthetic construct
FEPSEAEISHTQKATLVCLATGFYPDHVELSWWVNGKEVHSGVCTDPQPLKEQPALNDSRYCLSSRLRVSATFWQNPRNHFRCQVQFYGLSENDEWTQDRAKPVTQIVSAEAWGRADCDVKLVEKSFETDTNLNFQNLSVIGFRILLLKVAGFNLLMTLRLWSSKRGRKKLLYIFKQPFMRPVQTTQEEDGCSCRFPEEEEGGCELRVKFSRSADAPAYQQGQNQLYNELNLGRREEYDVLDKRRGRDPEMGGKPQRRKNPQEGLYNELQKDKMAEAYSEIGMKGERRRGKGHDGLYQGLSTATKDTYDALHMQALPPR

SEQ ID NO: 30842 - protein, 318 aa, synthetic construct
EPSEAEISHTQKATLVCLATGFYPDHVELSWWVNGKEVHSGVCTDPQPLKEQPALNDSRYCLSSRLRVSATFWQNPRNHFRCQVQFYGLSENDEWTQDRAKPVTQIVSAEAWGRADCDVKLVEKSFETDTNLNFQNLSVIGFRILLLKVAGFNLLMTLRLWSSKRGRKKLLYIFKQPFMRPVQTTQEEDGCSCRFPEEEEGGCELRVKFSRSADAPAYQQGQNQLYNELNLGRREEYDVLDKRRGRDPEMGGKPQRRKNPQEGLYNELQKDKMAEAYSEIGMKGERRRGKGHDGLYQGLSTATKDTYDALHMQALPPR

SEQ ID NO: 30843 - protein, 317 aa, synthetic construct
PSEAEISHTQKATLVCLATGFYPDHVELSWWVNGKEVHSGVCTDPQPLKEQPALNDSRYCLSSRLRVSATFWQNPRNHFRCQVQFYGLSENDEWTQDRAKPVTQIVSAEAWGRADCDVKLVEKSFETDTNLNFQNLSVIGFRILLLKVAGFNLLMTLRLWSSKRGRKKLLYIFKQPFMRPVQTTQEEDGCSCRFPEEEEGGCELRVKFSRSADAPAYQQGQNQLYNELNLGRREEYDVLDKRRGRDPEMGGKPQRRKNPQEGLYNELQKDKMAEAYSEIGMKGERRRGKGHDGLYQGLSTATKDTYDALHMQALPPR

SEQ ID NO: 30844 - protein, 316 aa, synthetic construct
SEAEISHTQKATLVCLATGFYPDHVELSWWVNGKEVHSGVCTDPQPLKEQPALNDSRYCLSSRLRVSATFWQNPRNHFRCQVQFYGLSENDEWTQDRAKPVTQIVSAEAWGRADCDVKLVEKSFETDTNLNFQNLSVIGFRILLLKVAGFNLLMTLRLWSSKRGRKKLLYIFKQPFMRPVQTTQEEDGCSCRFPEEEEGGCELRVKFSRSADAPAYQQGQNQLYNELNLGRREEYDVLDKRRGRDPEMGGKPQRRKNPQEGLYNELQKDKMAEAYSEIGMKGERRRGKGHDGLYQGLSTATKDTYDALHMQALPPR

SEQ ID NO: 30845 - protein, 315 aa, synthetic construct
EAEISHTQKATLVCLATGFYPDHVELSWWVNGKEVHSGVCTDPQPLKEQPALNDSRYCLSSRLRVSATFWQNPRNHFRCQVQFYGLSENDEWTQDRAKPVTQIVSAEAWGRADCDVKLVEKSFETDTNLNFQNLSVIGFRILLLKVAGFNLLMTLRLWSSKRGRKKLLYIFKQPFMRPVQTTQEEDGCSCRFPEEEEGGCELRVKFSRSADAPAYQQGQNQLYNELNLGRREEYDVLDKRRGRDPEMGGKPQRRKNPQEGLYNELQKDKMAEAYSEIGMKGERRRGKGHDGLYQGLSTATKDTYDALHMQALPPR

SEQ ID NO: 30846 - protein, 314 aa, synthetic construct
AEISHTQKATLVCLATGFYPDHVELSWWVNGKEVHSGVCTDPQPLKEQPALNDSRYCLSSRLRVSATFWQNPRNHFRCQVQFYGLSENDEWTQDRAKPVTQIVSAEAWGRADCDVKLVEKSFETDTNLNFQNLSVIGFRILLLKVAGFNLLMTLRLWSSKRGRKKLLYIFKQPFMRPVQTTQEEDGCSCRFPEEEEGGCELRVKFSRSADAPAYQQGQNQLYNELNLGRREEYDVLDKRRGRDPEMGGKPQRRKNPQEGLYNELQKDKMAEAYSEIGMKGERRRGKGHDGLYQGLSTATKDTYDALHMQALPPR

SEQ ID NO: 30847 - protein, 313 aa, synthetic construct
EISHTQKATLVCLATGFYPDHVELSWWVNGKEVHSGVCTDPQPLKEQPALNDSRYCLSSRLRVSATFWQNPRNHFRCQVQFYGLSENDEWTQDRAKPVTQIVSAEAWGRADCDVKLVEKSFETDTNLNFQNLSVIGFRILLLKVAGFNLLMTLRLWSSKRGRKKLLYIFKQPFMRPVQTTQEEDGCSCRFPEEEEGGCELRVKFSRSADAPAYQQGQNQLYNELNLGRREEYDVLDKRRGRDPEMGGKPQRRKNPQEGLYNELQKDKMAEAYSEIGMKGERRRGKGHDGLYQGLSTATKDTYDALHMQALPPR

SEQ ID NO: 30848 - protein, 312 aa, synthetic construct
ISHTQKATLVCLATGFYPDHVELSWWVNGKEVHSGVCTDPQPLKEQPALNDSRYCLSSRLRVSATFWQNPRNHFRCQVQFYGLSENDEWTQDRAKPVTQIVSAEAWGRADCDVKLVEKSFETDTNLNFQNLSVIGFRILLLKVAGFNLLMTLRLWSSKRGRKKLLYIFKQPFMRPVQTTQEEDGCSCRFPEEEEGGCELRVKFSRSADAPAYQQGQNQLYNELNLGRREEYDVLDKRRGRDPEMGGKPQRRKNPQEGLYNELQKDKMAEAYSEIGMKGERRRGKGHDGLYQGLSTATKDTYDALHMQALPPR

SEQ ID NO: 30849 - protein, 311 aa, synthetic construct
SHTQKATLVCLATGFYPDHVELSWWVNGKEVHSGVCTDPQPLKEQPALNDSRYCLSSRLRVSATFWQNPRNHFRCQVQFYGLSENDEWTQDRAKPVTQIVSAEAWGRADCDVKLVEKSFETDTNLNFQNLSVIGFRILLLKVAGFNLLMTLRLWSSKRGRKKLLYIFKQPFMRPVQTTQEEDGCSCRFPEEEEGGCELRVKFSRSADAPAYQQGQNQLYNELNLGRREEYDVLDKRRGRDPEMGGKPQRRKNPQEGLYNELQKDKMAEAYSEIGMKGERRRGKGHDGLYQGLSTATKDTYDALHMQALPPR

SEQ ID NO: 30850 - protein, 306 aa, synthetic construct
ATLVCLATGFYPDHVELSWWVNGKEVHSGVCTDPQPLKEQPALNDSRYCLSSRLRVSATFWQNPRNHFRCQVQFYGLSENDEWTQDRAKPVTQIVSAEAWGRADCDVKLVEKSFETDTNLNFQNLSVIGFRILLLKVAGFNLLMTLRLWSSKRGRKKLLYIFKQPFMRPVQTTQEEDGCSCRFPEEEEGGCELRVKFSRSADAPAYQQGQNQLYNELNLGRREEYDVLDKRRGRDPEMGGKPQRRKNPQEGLYNELQKDKMAEAYSEIGMKGERRRGKGHDGLYQGLSTATKDTYDALHMQALPPR

SEQ ID NO: 30851 - protein, 301 aa, synthetic construct
LATGFYPDHVELSWWVNGKEVHSGVCTDPQPLKEQPALNDSRYCLSSRLRVSATFWQNPRNHFRCQVQFYGLSENDEWTQDRAKPVTQIVSAEAWGRADCDVKLVEKSFETDTNLNFQNLSVIGFRILLLKVAGFNLLMTLRLWSSKRGRKKLLYIFKQPFMRPVQTTQEEDGCSCRFPEEEEGGCELRVKFSRSADAPAYQQGQNQLYNELNLGRREEYDVLDKRRGRDPEMGGKPQRRKNPQEGLYNELQKDKMAEAYSEIGMKGERRRGKGHDGLYQGLSTATKDTYDALHMQALPPR

SEQ ID NO: 30852 - protein, 328 aa, synthetic construct
DLKNVFPPEVAVFEPSEAEISHTQKATLVCLATGFYPDHVELSWWVNGKEVHSGVCTDPQPLKEQPALNDSRYCLSSRLRVSATFWQNPRNHFRCQVQFYGLSENDEWTQDRAKPVTQIVSAEAWGRADCGFTSESYQQGVLSATNLSVIGFRILLLKVAGFNLLMTLRLWSSKRGRKKLLYIFKQPFMRPVQTTQEEDGCSCRFPEEEEGGCELRVKFSRSADAPAYQQGQNQLYNELNLGRREEYDVLDKRRGRDPEMGGKPQRRKNPQEGLYNELQKDKMAEAYSEIGMKGERRRGKGHDGLYQGLSTATKDTYDALHMQALPPR

SEQ ID NO: 30853 - protein, 327 aa, synthetic construct
LKNVFPPEVAVFEPSEAEISHTQKATLVCLATGFYPDHVELSWWVNGKEVHSGVCTDPQPLKEQPALNDSRYCLSSRLRVSATFWQNPRNHFRCQVQFYGLSENDEWTQDRAKPVTQIVSAEAWGRADCGFTSESYQQGVLSATNLSVIGFRILLLKVAGFNLLMTLRLWSSKRGRKKLLYIFKQPFMRPVQTTQEEDGCSCRFPEEEEGGCELRVKFSRSADAPAYQQGQNQLYNELNLGRREEYDVLDKRRGRDPEMGGKPQRRKNPQEGLYNELQKDKMAEAYSEIGMKGERRRGKGHDGLYQGLSTATKDTYDALHMQALPPR

SEQ ID NO: 30854 - protein, 326 aa, synthetic construct
KNVFPPEVAVFEPSEAEISHTQKATLVCLATGFYPDHVELSWWVNGKEVHSGVCTDPQPLKEQPALNDSRYCLSSRLRVSATFWQNPRNHFRCQVQFYGLSENDEWTQDRAKPVTQIVSAEAWGRADCGFTSESYQQGVLSATNLSVIGFRILLLKVAGFNLLMTLRLWSSKRGRKKLLYIFKQPFMRPVQTTQEEDGCSCRFPEEEEGGCELRVKFSRSADAPAYQQGQNQLYNELNLGRREEYDVLDKRRGRDPEMGGKPQRRKNPQEGLYNELQKDKMAEAYSEIGMKGERRRGKGHDGLYQGLSTATKDTYDALHMQALPPR

SEQ ID NO: 30855 - protein, 325 aa, synthetic construct
NVFPPEVAVFEPSEAEISHTQKATLVCLATGFYPDHVELSWWVNGKEVHSGVCTDPQPLKEQPALNDSRYCLSSRLRVSATFWQNPRNHFRCQVQFYGLSENDEWTQDRAKPVTQIVSAEAWGRADCGFTSESYQQGVLSATNLSVIGFRILLLKVAGFNLLMTLRLWSSKRGRKKLLYIFKQPFMRPVQTTQEEDGCSCRFPEEEEGGCELRVKFSRSADAPAYQQGQNQLYNELNLGRREEYDVLDKRRGRDPEMGGKPQRRKNPQEGLYNELQKDKMAEAYSEIGMKGERRRGKGHDGLYQGLSTATKDTYDALHMQALPPR

SEQ ID NO: 30856 - protein, 324 aa, synthetic construct
VFPPEVAVFEPSEAEISHTQKATLVCLATGFYPDHVELSWWVNGKEVHSGVCTDPQPLKEQPALNDSRYCLSSRLRVSATFWQNPRNHFRCQVQFYGLSENDEWTQDRAKPVTQIVSAEAWGRADCGFTSESYQQGVLSATNLSVIGFRILLLKVAGFNLLMTLRLWSSKRGRKKLLYIFKQPFMRPVQTTQEEDGCSCRFPEEEEGGCELRVKFSRSADAPAYQQGQNQLYNELNLGRREEYDVLDKRRGRDPEMGGKPQRRKNPQEGLYNELQKDKMAEAYSEIGMKGERRRGKGHDGLYQGLSTATKDTYDALHMQALPPR

SEQ ID NO: 30857 - protein, 323 aa, synthetic construct
FPPEVAVFEPSEAEISHTQKATLVCLATGFYPDHVELSWWVNGKEVHSGVCTDPQPLKEQPALNDSRYCLSSRLRVSATFWQNPRNHFRCQVQFYGLSENDEWTQDRAKPVTQIVSAEAWGRADCGFTSESYQQGVLSATNLSVIGFRILLLKVAGFNLLMTLRLWSSKRGRKKLLYIFKQPFMRPVQTTQEEDGCSCRFPEEEEGGCELRVKFSRSADAPAYQQGQNQLYNELNLGRREEYDVLDKRRGRDPEMGGKPQRRKNPQEGLYNELQKDKMAEAYSEIGMKGERRRGKGHDGLYQGLSTATKDTYDALHMQALPPR

SEQ ID NO: 30858 - protein, 322 aa, synthetic construct
PPEVAVFEPSEAEISHTQKATLVCLATGFYPDHVELSWWVNGKEVHSGVCTDPQPLKEQPALNDSRYCLSSRLRVSATFWQNPRNHFRCQVQFYGLSENDEWTQDRAKPVTQIVSAEAWGRADCGFTSESYQQGVLSATNLSVIGFRILLLKVAGFNLLMTLRLWSSKRGRKKLLYIFKQPFMRPVQTTQEEDGCSCRFPEEEEGGCELRVKFSRSADAPAYQQGQNQLYNELNLGRREEYDVLDKRRGRDPEMGGKPQRRKNPQEGLYNELQKDKMAEAYSEIGMKGERRRGKGHDGLYQGLSTATKDTYDALHMQALPPR

SEQ ID NO: 30859 - protein, 321 aa, synthetic construct
PEVAVFEPSEAEISHTQKATLVCLATGFYPDHVELSWWVNGKEVHSGVCTDPQPLKEQPALNDSRYCLSSRLRVSATFWQNPRNHFRCQVQFYGLSENDEWTQDRAKPVTQIVSAEAWGRADCGFTSESYQQGVLSATNLSVIGFRILLLKVAGFNLLMTLRLWSSKRGRKKLLYIFKQPFMRPVQTTQEEDGCSCRFPEEEEGGCELRVKFSRSADAPAYQQGQNQLYNELNLGRREEYDVLDKRRGRDPEMGGKPQRRKNPQEGLYNELQKDKMAEAYSEIGMKGERRRGKGHDGLYQGLSTATKDTYDALHMQALPPR

SEQ ID NO: 30860 - protein, 320 aa, synthetic construct
EVAVFEPSEAEISHTQKATLVCLATGFYPDHVELSWWVNGKEVHSGVCTDPQPLKEQPALNDSRYCLSSRLRVSATFWQNPRNHFRCQVQFYGLSENDEWTQDRAKPVTQIVSAEAWGRADCGFTSESYQQGVLSATNLSVIGFRILLLKVAGFNLLMTLRLWSSKRGRKKLLYIFKQPFMRPVQTTQEEDGCSCRFPEEEEGGCELRVKFSRSADAPAYQQGQNQLYNELNLGRREEYDVLDKRRGRDPEMGGKPQRRKNPQEGLYNELQKDKMAEAYSEIGMKGERRRGKGHDGLYQGLSTATKDTYDALHMQALPPR

SEQ ID NO: 30861 - protein, 319 aa, synthetic construct
VAVFEPSEAEISHTQKATLVCLATGFYPDHVELSWWVNGKEVHSGVCTDPQPLKEQPALNDSRYCLSSRLRVSATFWQNPRNHFRCQVQFYGLSENDEWTQDRAKPVTQIVSAEAWGRADCGFTSESYQQGVLSATNLSVIGFRILLLKVAGFNLLMTLRLWSSKRGRKKLLYIFKQPFMRPVQTTQEEDGCSCRFPEEEEGGCELRVKFSRSADAPAYQQGQNQLYNELNLGRREEYDVLDKRRGRDPEMGGKPQRRKNPQEGLYNELQKDKMAEAYSEIGMKGERRRGKGHDGLYQGLSTATKDTYDALHMQALPPR

SEQ ID NO: 30862 - protein, 318 aa, synthetic construct
AVFEPSEAEISHTQKATLVCLATGFYPDHVELSWWVNGKEVHSGVCTDPQPLKEQPALNDSRYCLSSRLRVSATFWQNPRNHFRCQVQFYGLSENDEWTQDRAKPVTQIVSAEAWGRADCGFTSESYQQGVLSATNLSVIGFRILLLKVAGFNLLMTLRLWSSKRGRKKLLYIFKQPFMRPVQTTQEEDGCSCRFPEEEEGGCELRVKFSRSADAPAYQQGQNQLYNELNLGRREEYDVLDKRRGRDPEMGGKPQRRKNPQEGLYNELQKDKMAEAYSEIGMKGERRRGKGHDGLYQGLSTATKDTYDALHMQALPPR

SEQ ID NO: 30863 - protein, 317 aa, synthetic construct
VFEPSEAEISHTQKATLVCLATGFYPDHVELSWWVNGKEVHSGVCTDPQPLKEQPALNDSRYCLSSRLRVSATFWQNPRNHFRCQVQFYGLSENDEWTQDRAKPVTQIVSAEAWGRADCGFTSESYQQGVLSATNLSVIGFRILLLKVAGFNLLMTLRLWSSKRGRKKLLYIFKQPFMRPVQTTQEEDGCSCRFPEEEEGGCELRVKFSRSADAPAYQQGQNQLYNELNLGRREEYDVLDKRRGRDPEMGGKPQRRKNPQEGLYNELQKDKMAEAYSEIGMKGERRRGKGHDGLYQGLSTATKDTYDALHMQALPPR

SEQ ID NO: 30864 - protein, 316 aa, synthetic construct
FEPSEAEISHTQKATLVCLATGFYPDHVELSWWVNGKEVHSGVCTDPQPLKEQPALNDSRYCLSSRLRVSATFWQNPRNHFRCQVQFYGLSENDEWTQDRAKPVTQIVSAEAWGRADCGFTSESYQQGVLSATNLSVIGFRILLLKVAGFNLLMTLRLWSSKRGRKKLLYIFKQPFMRPVQTTQEEDGCSCRFPEEEEGGCELRVKFSRSADAPAYQQGQNQLYNELNLGRREEYDVLDKRRGRDPEMGGKPQRRKNPQEGLYNELQKDKMAEAYSEIGMKGERRRGKGHDGLYQGLSTATKDTYDALHMQALPPR

SEQ ID NO: 30865 - protein, 315 aa, synthetic construct
EPSEAEISHTQKATLVCLATGFYPDHVELSWWVNGKEVHSGVCTDPQPLKEQPALNDSRYCLSSRLRVSATFWQNPRNHFRCQVQFYGLSENDEWTQDRAKPVTQIVSAEAWGRADCGFTSESYQQGVLSATNLSVIGFRILLLKVAGFNLLMTLRLWSSKRGRKKLLYIFKQPFMRPVQTTQEEDGCSCRFPEEEEGGCELRVKFSRSADAPAYQQGQNQLYNELNLGRREEYDVLDKRRGRDPEMGGKPQRRKNPQEGLYNELQKDKMAEAYSEIGMKGERRRGKGHDGLYQGLSTATKDTYDALHMQALPPR

SEQ ID NO: 30866 - protein, 314 aa, synthetic construct
PSEAEISHTQKATLVCLATGFYPDHVELSWWVNGKEVHSGVCTDPQPLKEQPALNDSRYCLSSRLRVSATFWQNPRNHFRCQVQFYGLSENDEWTQDRAKPVTQIVSAEAWGRADCGFTSESYQQGVLSATNLSVIGFRILLLKVAGFNLLMTLRLWSSKRGRKKLLYIFKQPFMRPVQTTQEEDGCSCRFPEEEEGGCELRVKFSRSADAPAYQQGQNQLYNELNLGRREEYDVLDKRRGRDPEMGGKPQRRKNPQEGLYNELQKDKMAEAYSEIGMKGERRRGKGHDGLYQGLSTATKDTYDALHMQALPPR

SEQ ID NO: 30867 - protein, 313 aa, synthetic construct
SEAEISHTQKATLVCLATGFYPDHVELSWWVNGKEVHSGVCTDPQPLKEQPALNDSRYCLSSRLRVSATFWQNPRNHFRCQVQFYGLSENDEWTQDRAKPVTQIVSAEAWGRADCGFTSESYQQGVLSATNLSVIGFRILLLKVAGFNLLMTLRLWSSKRGRKKLLYIFKQPFMRPVQTTQEEDGCSCRFPEEEEGGCELRVKFSRSADAPAYQQGQNQLYNELNLGRREEYDVLDKRRGRDPEMGGKPQRRKNPQEGLYNELQKDKMAEAYSEIGMKGERRRGKGHDGLYQGLSTATKDTYDALHMQALPPR

SEQ ID NO: 30868 - protein, 312 aa, synthetic construct
EAEISHTQKATLVCLATGFYPDHVELSWWVNGKEVHSGVCTDPQPLKEQPALNDSRYCLSSRLRVSATFWQNPRNHFRCQVQFYGLSENDEWTQDRAKPVTQIVSAEAWGRADCGFTSESYQQGVLSATNLSVIGFRILLLKVAGFNLLMTLRLWSSKRGRKKLLYIFKQPFMRPVQTTQEEDGCSCRFPEEEEGGCELRVKFSRSADAPAYQQGQNQLYNELNLGRREEYDVLDKRRGRDPEMGGKPQRRKNPQEGLYNELQKDKMAEAYSEIGMKGERRRGKGHDGLYQGLSTATKDTYDALHMQALPPR

SEQ ID NO: 30869 - protein, 311 aa, synthetic construct
AEISHTQKATLVCLATGFYPDHVELSWWVNGKEVHSGVCTDPQPLKEQPALNDSRYCLSSRLRVSATFWQNPRNHFRCQVQFYGLSENDEWTQDRAKPVTQIVSAEAWGRADCGFTSESYQQGVLSATNLSVIGFRILLLKVAGFNLLMTLRLWSSKRGRKKLLYIFKQPFMRPVQTTQEEDGCSCRFPEEEEGGCELRVKFSRSADAPAYQQGQNQLYNELNLGRREEYDVLDKRRGRDPEMGGKPQRRKNPQEGLYNELQKDKMAEAYSEIGMKGERRRGKGHDGLYQGLSTATKDTYDALHMQALPPR

SEQ ID NO: 30870 - protein, 310 aa, synthetic construct
EISHTQKATLVCLATGFYPDHVELSWWVNGKEVHSGVCTDPQPLKEQPALNDSRYCLSSRLRVSATFWQNPRNHFRCQVQFYGLSENDEWTQDRAKPVTQIVSAEAWGRADCGFTSESYQQGVLSATNLSVIGFRILLLKVAGFNLLMTLRLWSSKRGRKKLLYIFKQPFMRPVQTTQEEDGCSCRFPEEEEGGCELRVKFSRSADAPAYQQGQNQLYNELNLGRREEYDVLDKRRGRDPEMGGKPQRRKNPQEGLYNELQKDKMAEAYSEIGMKGERRRGKGHDGLYQGLSTATKDTYDALHMQALPPR

SEQ ID NO: 30871 - protein, 309 aa, synthetic construct
ISHTQKATLVCLATGFYPDHVELSWWVNGKEVHSGVCTDPQPLKEQPALNDSRYCLSSRLRVSATFWQNPRNHFRCQVQFYGLSENDEWTQDRAKPVTQIVSAEAWGRADCGFTSESYQQGVLSATNLSVIGFRILLLKVAGFNLLMTLRLWSSKRGRKKLLYIFKQPFMRPVQTTQEEDGCSCRFPEEEEGGCELRVKFSRSADAPAYQQGQNQLYNELNLGRREEYDVLDKRRGRDPEMGGKPQRRKNPQEGLYNELQKDKMAEAYSEIGMKGERRRGKGHDGLYQGLSTATKDTYDALHMQALPPR

SEQ ID NO: 30872 - protein, 308 aa, synthetic construct
SHTQKATLVCLATGFYPDHVELSWWVNGKEVHSGVCTDPQPLKEQPALNDSRYCLSSRLRVSATFWQNPRNHFRCQVQFYGLSENDEWTQDRAKPVTQIVSAEAWGRADCGFTSESYQQGVLSATNLSVIGFRILLLKVAGFNLLMTLRLWSSKRGRKKLLYIFKQPFMRPVQTTQEEDGCSCRFPEEEEGGCELRVKFSRSADAPAYQQGQNQLYNELNLGRREEYDVLDKRRGRDPEMGGKPQRRKNPQEGLYNELQKDKMAEAYSEIGMKGERRRGKGHDGLYQGLSTATKDTYDALHMQALPPR

SEQ ID NO: 30873 - protein, 303 aa, synthetic construct
ATLVCLATGFYPDHVELSWWVNGKEVHSGVCTDPQPLKEQPALNDSRYCLSSRLRVSATFWQNPRNHFRCQVQFYGLSENDEWTQDRAKPVTQIVSAEAWGRADCGFTSESYQQGVLSATNLSVIGFRILLLKVAGFNLLMTLRLWSSKRGRKKLLYIFKQPFMRPVQTTQEEDGCSCRFPEEEEGGCELRVKFSRSADAPAYQQGQNQLYNELNLGRREEYDVLDKRRGRDPEMGGKPQRRKNPQEGLYNELQKDKMAEAYSEIGMKGERRRGKGHDGLYQGLSTATKDTYDALHMQALPPR

SEQ ID NO: 30874 - protein, 298 aa, synthetic construct
LATGFYPDHVELSWWVNGKEVHSGVCTDPQPLKEQPALNDSRYCLSSRLRVSATFWQNPRNHFRCQVQFYGLSENDEWTQDRAKPVTQIVSAEAWGRADCGFTSESYQQGVLSATNLSVIGFRILLLKVAGFNLLMTLRLWSSKRGRKKLLYIFKQPFMRPVQTTQEEDGCSCRFPEEEEGGCELRVKFSRSADAPAYQQGQNQLYNELNLGRREEYDVLDKRRGRDPEMGGKPQRRKNPQEGLYNELQKDKMAEAYSEIGMKGERRRGKGHDGLYQGLSTATKDTYDALHMQALPPR

SEQ ID NO: 30875 - protein, 417 aa, synthetic construct
DLKNVFPPEVAVFEPSEAEISHTQKATLVCLATGFYPDHVELSWWVNGKEVHSGVCTDPQPLKEQPALNDSRYCLSSRLRVSATFWQNPRNHFRCQVQFYGLSENDEWTQDRAKPVTQIVSAEAWGRADDVIKIHWQEKKSNTILGSQEGNTMKTNDTYMKFSWLTVPEKSLDKEHRCIVRHENNKNGVDQEIIFPPIKTDVITMDPKDNCSKDANDTLLLQLTNTSAYYMYLLLLLKSVVYFAIITCCLLMAMVKRKDSRGKRGRKKLLYIFKQPFMRPVQTTQEEDGCSCRFPEEEEGGCELRVKFSRSADAPAYQQGQNQLYNELNLGRREEYDVLDKRRGRDPEMGGKPQRRKNPQEGLYNELQKDKMAEAYSEIGMKGERRRGKGHDGLYQGLSTATKDTYDALHMQALPPR

SEQ ID NO: 30876 - protein, 416 aa, synthetic construct
LKNVFPPEVAVFEPSEAEISHTQKATLVCLATGFYPDHVELSWWVNGKEVHSGVCTDPQPLKEQPALNDSRYCLSSRLRVSATFWQNPRNHFRCQVQFYGLSENDEWTQDRAKPVTQIVSAEAWGRADDVIKIHWQEKKSNTILGSQEGNTMKTNDTYMKFSWLTVPEKSLDKEHRCIVRHENNKNGVDQEIIFPPIKTDVITMDPKDNCSKDANDTLLLQLTNTSAYYMYLLLLLKSVVYFAIITCCLLMAMVKRKDSRGKRGRKKLLYIFKQPFMRPVQTTQEEDGCSCRFPEEEEGGCELRVKFSRSADAPAYQQGQNQLYNELNLGRREEYDVLDKRRGRDPEMGGKPQRRKNPQEGLYNELQKDKMAEAYSEIGMKGERRRGKGHDGLYQGLSTATKDTYDALHMQALPPR

SEQ ID NO: 30877 - protein, 415 aa, synthetic construct
KNVFPPEVAVFEPSEAEISHTQKATLVCLATGFYPDHVELSWWVNGKEVHSGVCTDPQPLKEQPALNDSRYCLSSRLRVSATFWQNPRNHFRCQVQFYGLSENDEWTQDRAKPVTQIVSAEAWGRADDVIKIHWQEKKSNTILGSQEGNTMKTNDTYMKFSWLTVPEKSLDKEHRCIVRHENNKNGVDQEIIFPPIKTDVITMDPKDNCSKDANDTLLLQLTNTSAYYMYLLLLLKSVVYFAIITCCLLMAMVKRKDSRGKRGRKKLLYIFKQPFMRPVQTTQEEDGCSCRFPEEEEGGCELRVKFSRSADAPAYQQGQNQLYNELNLGRREEYDVLDKRRGRDPEMGGKPQRRKNPQEGLYNELQKDKMAEAYSEIGMKGERRRGKGHDGLYQGLSTATKDTYDALHMQALPPR

SEQ ID NO: 30878 - protein, 414 aa, synthetic construct
NVFPPEVAVFEPSEAEISHTQKATLVCLATGFYPDHVELSWWVNGKEVHSGVCTDPQPLKEQPALNDSRYCLSSRLRVSATFWQNPRNHFRCQVQFYGLSENDEWTQDRAKPVTQIVSAEAWGRADDVIKIHWQEKKSNTILGSQEGNTMKTNDTYMKFSWLTVPEKSLDKEHRCIVRHENNKNGVDQEIIFPPIKTDVITMDPKDNCSKDANDTLLLQLTNTSAYYMYLLLLLKSVVYFAIITCCLLMAMVKRKDSRGKRGRKKLLYIFKQPFMRPVQTTQEEDGCSCRFPEEEEGGCELRVKFSRSADAPAYQQGQNQLYNELNLGRREEYDVLDKRRGRDPEMGGKPQRRKNPQEGLYNELQKDKMAEAYSEIGMKGERRRGKGHDGLYQGLSTATKDTYDALHMQALPPR

SEQ ID NO: 30879 - protein, 413 aa, synthetic construct
VFPPEVAVFEPSEAEISHTQKATLVCLATGFYPDHVELSWWVNGKEVHSGVCTDPQPLKEQPALNDSRYCLSSRLRVSATFWQNPRNHFRCQVQFYGLSENDEWTQDRAKPVTQIVSAEAWGRADDVIKIHWQEKKSNTILGSQEGNTMKTNDTYMKFSWLTVPEKSLDKEHRCIVRHENNKNGVDQEIIFPPIKTDVITMDPKDNCSKDANDTLLLQLTNTSAYYMYLLLLLKSVVYFAIITCCLLMAMVKRKDSRGKRGRKKLLYIFKQPFMRPVQTTQEEDGCSCRFPEEEEGGCELRVKFSRSADAPAYQQGQNQLYNELNLGRREEYDVLDKRRGRDPEMGGKPQRRKNPQEGLYNELQKDKMAEAYSEIGMKGERRRGKGHDGLYQGLSTATKDTYDALHMQALPPR

SEQ ID NO: 30880 - protein, 412 aa, synthetic construct
FPPEVAVFEPSEAEISHTQKATLVCLATGFYPDHVELSWWVNGKEVHSGVCTDPQPLKEQPALNDSRYCLSSRLRVSATFWQNPRNHFRCQVQFYGLSENDEWTQDRAKPVTQIVSAEAWGRADDVIKIHWQEKKSNTILGSQEGNTMKTNDTYMKFSWLTVPEKSLDKEHRCIVRHENNKNGVDQEIIFPPIKTDVITMDPKDNCSKDANDTLLLQLTNTSAYYMYLLLLLKSVVYFAIITCCLLMAMVKRKDSRGKRGRKKLLYIFKQPFMRPVQTTQEEDGCSCRFPEEEEGGCELRVKFSRSADAPAYQQGQNQLYNELNLGRREEYDVLDKRRGRDPEMGGKPQRRKNPQEGLYNELQKDKMAEAYSEIGMKGERRRGKGHDGLYQGLSTATKDTYDALHMQALPPR

SEQ ID NO: 30881 - protein, 411 aa, synthetic construct
PPEVAVFEPSEAEISHTQKATLVCLATGFYPDHVELSWWVNGKEVHSGVCTDPQPLKEQPALNDSRYCLSSRLRVSATFWQNPRNHFRCQVQFYGLSENDEWTQDRAKPVTQIVSAEAWGRADDVIKIHWQEKKSNTILGSQEGNTMKTNDTYMKFSWLTVPEKSLDKEHRCIVRHENNKNGVDQEIIFPPIKTDVITMDPKDNCSKDANDTLLLQLTNTSAYYMYLLLLLKSVVYFAIITCCLLMAMVKRKDSRGKRGRKKLLYIFKQPFMRPVQTTQEEDGCSCRFPEEEEGGCELRVKFSRSADAPAYQQGQNQLYNELNLGRREEYDVLDKRRGRDPEMGGKPQRRKNPQEGLYNELQKDKMAEAYSEIGMKGERRRGKGHDGLYQGLSTATKDTYDALHMQALPPR

SEQ ID NO: 30882 - protein, 410 aa, synthetic construct
PEVAVFEPSEAEISHTQKATLVCLATGFYPDHVELSWWVNGKEVHSGVCTDPQPLKEQPALNDSRYCLSSRLRVSATFWQNPRNHFRCQVQFYGLSENDEWTQDRAKPVTQIVSAEAWGRADDVIKIHWQEKKSNTILGSQEGNTMKTNDTYMKFSWLTVPEKSLDKEHRCIVRHENNKNGVDQEIIFPPIKTDVITMDPKDNCSKDANDTLLLQLTNTSAYYMYLLLLLKSVVYFAIITCCLLMAMVKRKDSRGKRGRKKLLYIFKQPFMRPVQTTQEEDGCSCRFPEEEEGGCELRVKFSRSADAPAYQQGQNQLYNELNLGRREEYDVLDKRRGRDPEMGGKPQRRKNPQEGLYNELQKDKMAEAYSEIGMKGERRRGKGHDGLYQGLSTATKDTYDALHMQALPPR

SEQ ID NO: 30883 - protein, 409 aa, synthetic construct
EVAVFEPSEAEISHTQKATLVCLATGFYPDHVELSWWVNGKEVHSGVCTDPQPLKEQPALNDSRYCLSSRLRVSATFWQNPRNHFRCQVQFYGLSENDEWTQDRAKPVTQIVSAEAWGRADDVIKIHWQEKKSNTILGSQEGNTMKTNDTYMKFSWLTVPEKSLDKEHRCIVRHENNKNGVDQEIIFPPIKTDVITMDPKDNCSKDANDTLLLQLTNTSAYYMYLLLLLKSVVYFAIITCCLLMAMVKRKDSRGKRGRKKLLYIFKQPFMRPVQTTQEEDGCSCRFPEEEEGGCELRVKFSRSADAPAYQQGQNQLYNELNLGRREEYDVLDKRRGRDPEMGGKPQRRKNPQEGLYNELQKDKMAEAYSEIGMKGERRRGKGHDGLYQGLSTATKDTYDALHMQALPPR

SEQ ID NO: 30884 - protein, 408 aa, synthetic construct
VAVFEPSEAEISHTQKATLVCLATGFYPDHVELSWWVNGKEVHSGVCTDPQPLKEQPALNDSRYCLSSRLRVSATFWQNPRNHFRCQVQFYGLSENDEWTQDRAKPVTQIVSAEAWGRADDVIKIHWQEKKSNTILGSQEGNTMKTNDTYMKFSWLTVPEKSLDKEHRCIVRHENNKNGVDQEIIFPPIKTDVITMDPKDNCSKDANDTLLLQLTNTSAYYMYLLLLLKSVVYFAIITCCLLMAMVKRKDSRGKRGRKKLLYIFKQPFMRPVQTTQEEDGCSCRFPEEEEGGCELRVKFSRSADAPAYQQGQNQLYNELNLGRREEYDVLDKRRGRDPEMGGKPQRRKNPQEGLYNELQKDKMAEAYSEIGMKGERRRGKGHDGLYQGLSTATKDTYDALHMQALPPR

SEQ ID NO: 30885 - protein, 407 aa, synthetic construct
AVFEPSEAEISHTQKATLVCLATGFYPDHVELSWWVNGKEVHSGVCTDPQPLKEQPALNDSRYCLSSRLRVSATFWQNPRNHFRCQVQFYGLSENDEWTQDRAKPVTQIVSAEAWGRADDVIKIHWQEKKSNTILGSQEGNTMKTNDTYMKFSWLTVPEKSLDKEHRCIVRHENNKNGVDQEIIFPPIKTDVITMDPKDNCSKDANDTLLLQLTNTSAYYMYLLLLLKSVVYFAIITCCLLMAMVKRKDSRGKRGRKKLLYIFKQPFMRPVQTTQEEDGCSCRFPEEEEGGCELRVKFSRSADAPAYQQGQNQLYNELNLGRREEYDVLDKRRGRDPEMGGKPQRRKNPQEGLYNELQKDKMAEAYSEIGMKGERRRGKGHDGLYQGLSTATKDTYDALHMQALPPR

SEQ ID NO: 30886 - protein, 419 aa, synthetic construct; identical to SEQ ID NO: 30690

SEQ ID NO: 30887 - protein, 418 aa, synthetic construct
DLKNVFPPEVAVFEPSEAEISHTQKATLVCLATGFYPDHVELSWWVNGKEVHSGVCTDPQPLKEQPALNDSRYCLSSRLRVSATFWQNPRNHFRCQVQFYGLSENDEWTQDRAKPVTQIVSAEAWGRADDVIKIHWQEKKSNTILGSQEGNTMKTNDTYMKFSWLTVPEKSLDKEHRCIVRHENNKNGVDQEIIFPPIKTDVITMDPKDNCSKDANDTLLLQLTNTSAYYMYLLLLLKSVVYFAIITCCLLRRTAFCCNGEKSKRGRKKLLYIFKQPFMRPVQTTQEEDGCSCRFPEEEEGGCELRVKFSRSADAPAYQQGQNQLYNELNLGRREEYDVLDKRRGRDPEMGGKPQRRKNPQEGLYNELQKDKMAEAYSEIGMKGERRRGKGHDGLYQGLSTATKDTYDALHMQALPPR

SEQ ID NO: 30888 - protein, 417 aa, synthetic construct
LKNVFPPEVAVFEPSEAEISHTQKATLVCLATGFYPDHVELSWWVNGKEVHSGVCTDPQPLKEQPALNDSRYCLSSRLRVSATFWQNPRNHFRCQVQFYGLSENDEWTQDRAKPVTQIVSAEAWGRADDVIKIHWQEKKSNTILGSQEGNTMKTNDTYMKFSWLTVPEKSLDKEHRCIVRHENNKNGVDQEIIFPPIKTDVITMDPKDNCSKDANDTLLLQLTNTSAYYMYLLLLLKSVVYFAIITCCLLRRTAFCCNGEKSKRGRKKLLYIFKQPFMRPVQTTQEEDGCSCRFPEEEEGGCELRVKFSRSADAPAYQQGQNQLYNELNLGRREEYDVLDKRRGRDPEMGGKPQRRKNPQEGLYNELQKDKMAEAYSEIGMKGERRRGKGHDGLYQGLSTATKDTYDALHMQALPPR

SEQ ID NO: 30889 - protein, 416 aa, synthetic construct
KNVFPPEVAVFEPSEAEISHTQKATLVCLATGFYPDHVELSWWVNGKEVHSGVCTDPQPLKEQPALNDSRYCLSSRLRVSATFWQNPRNHFRCQVQFYGLSENDEWTQDRAKPVTQIVSAEAWGRADDVIKIHWQEKKSNTILGSQEGNTMKTNDTYMKFSWLTVPEKSLDKEHRCIVRHENNKNGVDQEIIFPPIKTDVITMDPKDNCSKDANDTLLLQLTNTSAYYMYLLLLLKSVVYFAIITCCLLRRTAFCCNGEKSKRGRKKLLYIFKQPFMRPVQTTQEEDGCSCRFPEEEEGGCELRVKFSRSADAPAYQQGQNQLYNELNLGRREEYDVLDKRRGRDPEMGGKPQRRKNPQEGLYNELQKDKMAEAYSEIGMKGERRRGKGHDGLYQGLSTATKDTYDALHMQALPPR

SEQ ID NO: 30890 - protein, 415 aa, synthetic construct
NVFPPEVAVFEPSEAEISHTQKATLVCLATGFYPDHVELSWWVNGKEVHSGVCTDPQPLKEQPALNDSRYCLSSRLRVSATFWQNPRNHFRCQVQFYGLSENDEWTQDRAKPVTQIVSAEAWGRADDVIKIHWQEKKSNTILGSQEGNTMKTNDTYMKFSWLTVPEKSLDKEHRCIVRHENNKNGVDQEIIFPPIKTDVITMDPKDNCSKDANDTLLLQLTNTSAYYMYLLLLLKSVVYFAIITCCLLRRTAFCCNGEKSKRGRKKLLYIFKQPFMRPVQTTQEEDGCSCRFPEEEEGGCELRVKFSRSADAPAYQQGQNQLYNELNLGRREEYDVLDKRRGRDPEMGGKPQRRKNPQEGLYNELQKDKMAEAYSEIGMKGERRRGKGHDGLYQGLSTATKDTYDALHMQALPPR

SEQ ID NO: 30891 - protein, 414 aa, synthetic construct
VFPPEVAVFEPSEAEISHTQKATLVCLATGFYPDHVELSWWVNGKEVHSGVCTDPQPLKEQPALNDSRYCLSSRLRVSATFWQNPRNHFRCQVQFYGLSENDEWTQDRAKPVTQIVSAEAWGRADDVIKIHWQEKKSNTILGSQEGNTMKTNDTYMKFSWLTVPEKSLDKEHRCIVRHENNKNGVDQEIIFPPIKTDVITMDPKDNCSKDANDTLLLQLTNTSAYYMYLLLLLKSVVYFAIITCCLLRRTAFCCNGEKSKRGRKKLLYIFKQPFMRPVQTTQEEDGCSCRFPEEEEGGCELRVKFSRSADAPAYQQGQNQLYNELNLGRREEYDVLDKRRGRDPEMGGKPQRRKNPQEGLYNELQKDKMAEAYSEIGMKGERRRGKGHDGLYQGLSTATKDTYDALHMQALPPR

SEQ ID NO: 30892 - protein, 413 aa, synthetic construct
FPPEVAVFEPSEAEISHTQKATLVCLATGFYPDHVELSWWVNGKEVHSGVCTDPQPLKEQPALNDSRYCLSSRLRVSATFWQNPRNHFRCQVQFYGLSENDEWTQDRAKPVTQIVSAEAWGRADDVIKIHWQEKKSNTILGSQEGNTMKTNDTYMKFSWLTVPEKSLDKEHRCIVRHENNKNGVDQEIIFPPIKTDVITMDPKDNCSKDANDTLLLQLTNTSAYYMYLLLLLKSVVYFAIITCCLLRRTAFCCNGEKSKRGRKKLLYIFKQPFMRPVQTTQEEDGCSCRFPEEEEGGCELRVKFSRSADAPAYQQGQNQLYNELNLGRREEYDVLDKRRGRDPEMGGKPQRRKNPQEGLYNELQKDKMAEAYSEIGMKGERRRGKGHDGLYQGLSTATKDTYDALHMQALPPR

SEQ ID NO: 30893 - protein, 412 aa, synthetic construct
PPEVAVFEPSEAEISHTQKATLVCLATGFYPDHVELSWWVNGKEVHSGVCTDPQPLKEQPALNDSRYCLSSRLRVSATFWQNPRNHFRCQVQFYGLSENDEWTQDRAKPVTQIVSAEAWGRADDVIKIHWQEKKSNTILGSQEGNTMKTNDTYMKFSWLTVPEKSLDKEHRCIVRHENNKNGVDQEIIFPPIKTDVITMDPKDNCSKDANDTLLLQLTNTSAYYMYLLLLLKSVVYFAIITCCLLRRTAFCCNGEKSKRGRKKLLYIFKQPFMRPVQTTQEEDGCSCRFPEEEEGGCELRVKFSRSADAPAYQQGQNQLYNELNLGRREEYDVLDKRRGRDPEMGGKPQRRKNPQEGLYNELQKDKMAEAYSEIGMKGERRRGKGHDGLYQGLSTATKDTYDALHMQALPPR

SEQ ID NO: 30894 - protein, 411 aa, synthetic construct
PEVAVFEPSEAEISHTQKATLVCLATGFYPDHVELSWWVNGKEVHSGVCTDPQPLKEQPALNDSRYCLSSRLRVSATFWQNPRNHFRCQVQFYGLSENDEWTQDRAKPVTQIVSAEAWGRADDVIKIHWQEKKSNTILGSQEGNTMKTNDTYMKFSWLTVPEKSLDKEHRCIVRHENNKNGVDQEIIFPPIKTDVITMDPKDNCSKDANDTLLLQLTNTSAYYMYLLLLLKSVVYFAIITCCLLRRTAFCCNGEKSKRGRKKLLYIFKQPFMRPVQTTQEEDGCSCRFPEEEEGGCELRVKFSRSADAPAYQQGQNQLYNELNLGRREEYDVLDKRRGRDPEMGGKPQRRKNPQEGLYNELQKDKMAEAYSEIGMKGERRRGKGHDGLYQGLSTATKDTYDALHMQALPPR

SEQ ID NO: 30895 - protein, 410 aa, synthetic construct
EVAVFEPSEAEISHTQKATLVCLATGFYPDHVELSWWVNGKEVHSGVCTDPQPLKEQPALNDSRYCLSSRLRVSATFWQNPRNHFRCQVQFYGLSENDEWTQDRAKPVTQIVSAEAWGRADDVIKIHWQEKKSNTILGSQEGNTMKTNDTYMKFSWLTVPEKSLDKEHRCIVRHENNKNGVDQEIIFPPIKTDVITMDPKDNCSKDANDTLLLQLTNTSAYYMYLLLLLKSVVYFAIITCCLLRRTAFCCNGEKSKRGRKKLLYIFKQPFMRPVQTTQEEDGCSCRFPEEEEGGCELRVKFSRSADAPAYQQGQNQLYNELNLGRREEYDVLDKRRGRDPEMGGKPQRRKNPQEGLYNELQKDKMAEAYSEIGMKGERRRGKGHDGLYQGLSTATKDTYDALHMQALPPR

SEQ ID NO: 30896 - protein, 409 aa, synthetic construct
VAVFEPSEAEISHTQKATLVCLATGFYPDHVELSWWVNGKEVHSGVCTDPQPLKEQPALNDSRYCLSSRLRVSATFWQNPRNHFRCQVQFYGLSENDEWTQDRAKPVTQIVSAEAWGRADDVIKIHWQEKKSNTILGSQEGNTMKTNDTYMKFSWLTVPEKSLDKEHRCIVRHENNKNGVDQEIIFPPIKTDVITMDPKDNCSKDANDTLLLQLTNTSAYYMYLLLLLKSVVYFAIITCCLLRRTAFCCNGEKSKRGRKKLLYIFKQPFMRPVQTTQEEDGCSCRFPEEEEGGCELRVKFSRSADAPAYQQGQNQLYNELNLGRREEYDVLDKRRGRDPEMGGKPQRRKNPQEGLYNELQKDKMAEAYSEIGMKGERRRGKGHDGLYQGLSTATKDTYDALHMQALPPR

SEQ ID NO: 30897 - protein, 295 aa, synthetic construct; identical to SEQ ID NO: 30621

SEQ ID NO: 30898 - protein, 294 aa, synthetic construct
QNPDPAVYQLRDSKSSDKSVCLFTDFDSQTNVSQSKDSDVYITDKCVLDMRSMDFKSNSAVAWSNKSDFACANAFNNSIIPEDTFFPSPESSCDVKLVEKSFETDTNLNFQNLSVIGFRILLLKVAGFNLLMTLRLWSSKRGRKKLLYIFKQPFMRPVQTTQEEDGCSCRFPEEEEGGCELRVKFSRSADAPAYQQGQNQLYNELNLGRREEYDVLDKRRGRDPEMGGKPQRRKNPQEGLYNELQKDKMAEAYSEIGMKGERRRGKGHDGLYQGLSTATKDTYDALHMQALPPR

SEQ ID NO: 30899 - protein, 293 aa, synthetic construct
NPDPAVYQLRDSKSSDKSVCLFTDFDSQTNVSQSKDSDVYITDKCVLDMRSMDFKSNSAVAWSNKSDFACANAFNNSIIPEDTFFPSPESSCDVKLVEKSFETDTNLNFQNLSVIGFRILLLKVAGFNLLMTLRLWSSKRGRKKLLYIFKQPFMRPVQTTQEEDGCSCRFPEEEEGGCELRVKFSRSADAPAYQQGQNQLYNELNLGRREEYDVLDKRRGRDPEMGGKPQRRKNPQEGLYNELQKDKMAEAYSEIGMKGERRRGKGHDGLYQGLSTATKDTYDALHMQALPPR

SEQ ID NO: 30900 - protein, 292 aa, synthetic construct; identical to SEQ ID NO: 30622

SEQ ID NO: 30901 - protein, 291 aa, synthetic construct
DPAVYQLRDSKSSDKSVCLFTDFDSQTNVSQSKDSDVYITDKCVLDMRSMDFKSNSAVAWSNKSDFACANAFNNSIIPEDTFFPSPESSCDVKLVEKSFETDTNLNFQNLSVIGFRILLLKVAGFNLLMTLRLWSSKRGRKKLLYIFKQPFMRPVQTTQEEDGCSCRFPEEEEGGCELRVKFSRSADAPAYQQGQNQLYNELNLGRREEYDVLDKRRGRDPEMGGKPQRRKNPQEGLYNELQKDKMAEAYSEIGMKGERRRGKGHDGLYQGLSTATKDTYDALHMQALPPR

SEQ ID NO: 30902 - protein, 290 aa, synthetic construct
PAVYQLRDSKSSDKSVCLFTDFDSQTNVSQSKDSDVYITDKCVLDMRSMDFKSNSAVAWSNKSDFACANAFNNSIIPEDTFFPSPESSCDVKLVEKSFETDTNLNFQNLSVIGFRILLLKVAGFNLLMTLRLWSSKRGRKKLLYIFKQPFMRPVQTTQEEDGCSCRFPEEEEGGCELRVKFSRSADAPAYQQGQNQLYNELNLGRREEYDVLDKRRGRDPEMGGKPQRRKNPQEGLYNELQKDKMAEAYSEIGMKGERRRGKGHDGLYQGLSTATKDTYDALHMQALPPR

SEQ ID NO: 30903 - protein, 289 aa, synthetic construct
AVYQLRDSKSSDKSVCLFTDFDSQTNVSQSKDSDVYITDKCVLDMRSMDFKSNSAVAWSNKSDFACANAFNNSIIPEDTFFPSPESSCDVKLVEKSFETDTNLNFQNLSVIGFRILLLKVAGFNLLMTLRLWSSKRGRKKLLYIFKQPFMRPVQTTQEEDGCSCRFPEEEEGGCELRVKFSRSADAPAYQQGQNQLYNELNLGRREEYDVLDKRRGRDPEMGGKPQRRKNPQEGLYNELQKDKMAEAYSEIGMKGERRRGKGHDGLYQGLSTATKDTYDALHMQALPPR

SEQ ID NO: 30904 - protein, 288 aa, synthetic construct
VYQLRDSKSSDKSVCLFTDFDSQTNVSQSKDSDVYITDKCVLDMRSMDFKSNSAVAWSNKSDFACANAFNNSIIPEDTFFPSPESSCDVKLVEKSFETDTNLNFQNLSVIGFRILLLKVAGFNLLMTLRLWSSKRGRKKLLYIFKQPFMRPVQTTQEEDGCSCRFPEEEEGGCELRVKFSRSADAPAYQQGQNQLYNELNLGRREEYDVLDKRRGRDPEMGGKPQRRKNPQEGLYNELQKDKMAEAYSEIGMKGERRRGKGHDGLYQGLSTATKDTYDALHMQALPPR

SEQ ID NO: 30905 - protein, 287 aa, synthetic construct
YQLRDSKSSDKSVCLFTDFDSQTNVSQSKDSDVYITDKCVLDMRSMDFKSNSAVAWSNKSDFACANAFNNSIIPEDTFFPSPESSCDVKLVEKSFETDTNLNFQNLSVIGFRILLLKVAGFNLLMTLRLWSSKRGRKKLLYIFKQPFMRPVQTTQEEDGCSCRFPEEEEGGCELRVKFSRSADAPAYQQGQNQLYNELNLGRREEYDVLDKRRGRDPEMGGKPQRRKNPQEGLYNELQKDKMAEAYSEIGMKGERRRGKGHDGLYQGLSTATKDTYDALHMQALPPR

SEQ ID NO: 30906 - protein, 286 aa, synthetic construct
QLRDSKSSDKSVCLFTDFDSQTNVSQSKDSDVYITDKCVLDMRSMDFKSNSAVAWSNKSDFACANAFNNSIIPEDTFFPSPESSCDVKLVEKSFETDTNLNFQNLSVIGFRILLLKVAGFNLLMTLRLWSSKRGRKKLLYIFKQPFMRPVQTTQEEDGCSCRFPEEEEGGCELRVKFSRSADAPAYQQGQNQLYNELNLGRREEYDVLDKRRGRDPEMGGKPQRRKNPQEGLYNELQKDKMAEAYSEIGMKGERRRGKGHDGLYQGLSTATKDTYDALHMQALPPR

SEQ ID NO: 30907 - protein, 285 aa, synthetic construct
LRDSKSSDKSVCLFTDFDSQTNVSQSKDSDVYITDKCVLDMRSMDFKSNSAVAWSNKSDFACANAFNNSIIPEDTFFPSPESSCDVKLVEKSFETDTNLNFQNLSVIGFRILLLKVAGFNLLMTLRLWSSKRGRKKLLYIFKQPFMRPVQTTQEEDGCSCRFPEEEEGGCELRVKFSRSADAPAYQQGQNQLYNELNLGRREEYDVLDKRRGRDPEMGGKPQRRKNPQEGLYNELQKDKMAEAYSEIGMKGERRRGKGHDGLYQGLSTATKDTYDALHMQALPPR

SEQ ID NO: 30908 - protein, 284 aa, synthetic construct
RDSKSSDKSVCLFTDFDSQTNVSQSKDSDVYITDKCVLDMRSMDFKSNSAVAWSNKSDFACANAFNNSIIPEDTFFPSPESSCDVKLVEKSFETDTNLNFQNLSVIGFRILLLKVAGFNLLMTLRLWSSKRGRKKLLYIFKQPFMRPVQTTQEEDGCSCRFPEEEEGGCELRVKFSRSADAPAYQQGQNQLYNELNLGRREEYDVLDKRRGRDPEMGGKPQRRKNPQEGLYNELQKDKMAEAYSEIGMKGERRRGKGHDGLYQGLSTATKDTYDALHMQALPPR

SEQ ID NO: 30909 - protein, 283 aa, synthetic construct
DSKSSDKSVCLFTDFDSQTNVSQSKDSDVYITDKCVLDMRSMDFKSNSAVAWSNKSDFACANAFNNSIIPEDTFFPSPESSCDVKLVEKSFETDTNLNFQNLSVIGFRILLLKVAGFNLLMTLRLWSSKRGRKKLLYIFKQPFMRPVQTTQEEDGCSCRFPEEEEGGCELRVKFSRSADAPAYQQGQNQLYNELNLGRREEYDVLDKRRGRDPEMGGKPQRRKNPQEGLYNELQKDKMAEAYSEIGMKGERRRGKGHDGLYQGLSTATKDTYDALHMQALPPR

SEQ ID NO: 30910 - protein, 282 aa, synthetic construct
SKSSDKSVCLFTDFDSQTNVSQSKDSDVYITDKCVLDMRSMDFKSNSAVAWSNKSDFACANAFNNSIIPEDTFFPSPESSCDVKLVEKSFETDTNLNFQNLSVIGFRILLLKVAGFNLLMTLRLWSSKRGRKKLLYIFKQPFMRPVQTTQEEDGCSCRFPEEEEGGCELRVKFSRSADAPAYQQGQNQLYNELNLGRREEYDVLDKRRGRDPEMGGKPQRRKNPQEGLYNELQKDKMAEAYSEIGMKGERRRGKGHDGLYQGLSTATKDTYDALHMQALPPR

SEQ ID NO: 30911 - protein, 281 aa, synthetic construct
KSSDKSVCLFTDFDSQTNVSQSKDSDVYITDKCVLDMRSMDFKSNSAVAWSNKSDFACANAFNNSIIPEDTFFPSPESSCDVKLVEKSFETDTNLNFQNLSVIGFRILLLKVAGFNLLMTLRLWSSKRGRKKLLYIFKQPFMRPVQTTQEEDGCSCRFPEEEEGGCELRVKFSRSADAPAYQQGQNQLYNELNLGRREEYDVLDKRRGRDPEMGGKPQRRKNPQEGLYNELQKDKMAEAYSEIGMKGERRRGKGHDGLYQGLSTATKDTYDALHMQALPPR

SEQ ID NO: 30912 - protein, 280 aa, synthetic construct
SSDKSVCLFTDFDSQTNVSQSKDSDVYITDKCVLDMRSMDFKSNSAVAWSNKSDFACANAFNNSIIPEDTFFPSPESSCDVKLVEKSFETDTNLNFQNLSVIGFRILLLKVAGFNLLMTLRLWSSKRGRKKLLYIFKQPFMRPVQTTQEEDGCSCRFPEEEEGGCELRVKFSRSADAPAYQQGQNQLYNELNLGRREEYDVLDKRRGRDPEMGGKPQRRKNPQEGLYNELQKDKMAEAYSEIGMKGERRRGKGHDGLYQGLSTATKDTYDALHMQALPPR

SEQ ID NO: 30913 - protein, 279 aa, synthetic construct
SDKSVCLFTDFDSQTNVSQSKDSDVYITDKCVLDMRSMDFKSNSAVAWSNKSDFACANAFNNSIIPEDTFFPSPESSCDVKLVEKSFETDTNLNFQNLSVIGFRILLLKVAGFNLLMTLRLWSSKRGRKKLLYIFKQPFMRPVQTTQEEDGCSCRFPEEEEGGCELRVKFSRSADAPAYQQGQNQLYNELNLGRREEYDVLDKRRGRDPEMGGKPQRRKNPQEGLYNELQKDKMAEAYSEIGMKGERRRGKGHDGLYQGLSTATKDTYDALHMQALPPR

SEQ ID NO: 30914 - protein, 278 aa, synthetic construct
DKSVCLFTDFDSQTNVSQSKDSDVYITDKCVLDMRSMDFKSNSAVAWSNKSDFACANAFNNSIIPEDTFFPSPESSCDVKLVEKSFETDTNLNFQNLSVIGFRILLLKVAGFNLLMTLRLWSSKRGRKKLLYIFKQPFMRPVQTTQEEDGCSCRFPEEEEGGCELRVKFSRSADAPAYQQGQNQLYNELNLGRREEYDVLDKRRGRDPEMGGKPQRRKNPQEGLYNELQKDKMAEAYSEIGMKGERRRGKGHDGLYQGLSTATKDTYDALHMQALPPR

SEQ ID NO: 30915 - protein, 277 aa, synthetic construct
KSVCLFTDFDSQTNVSQSKDSDVYITDKCVLDMRSMDFKSNSAVAWSNKSDFACANAFNNSIIPEDTFFPSPESSCDVKLVEKSFETDTNLNFQNLSVIGFRILLLKVAGFNLLMTLRLWSSKRGRKKLLYIFKQPFMRPVQTTQEEDGCSCRFPEEEEGGCELRVKFSRSADAPAYQQGQNQLYNELNLGRREEYDVLDKRRGRDPEMGGKPQRRKNPQEGLYNELQKDKMAEAYSEIGMKGERRRGKGHDGLYQGLSTATKDTYDALHMQALPPR

SEQ ID NO: 30916 - protein, 276 aa, synthetic construct
SVCLFTDFDSQTNVSQSKDSDVYITDKCVLDMRSMDFKSNSAVAWSNKSDFACANAFNNSIIPEDTFFPSPESSCDVKLVEKSFETDTNLNFQNLSVIGFRILLLKVAGFNLLMTLRLWSSKRGRKKLLYIFKQPFMRPVQTTQEEDGCSCRFPEEEEGGCELRVKFSRSADAPAYQQGQNQLYNELNLGRREEYDVLDKRRGRDPEMGGKPQRRKNPQEGLYNELQKDKMAEAYSEIGMKGERRRGKGHDGLYQGLSTATKDTYDALHMQALPPR

SEQ ID NO: 30917 - protein, 275 aa, synthetic construct
VCLFTDFDSQTNVSQSKDSDVYITDKCVLDMRSMDFKSNSAVAWSNKSDFACANAFNNSIIPEDTFFPSPESSCDVKLVEKSFETDTNLNFQNLSVIGFRILLLKVAGFNLLMTLRLWSSKRGRKKLLYIFKQPFMRPVQTTQEEDGCSCRFPEEEEGGCELRVKFSRSADAPAYQQGQNQLYNELNLGRREEYDVLDKRRGRDPEMGGKPQRRKNPQEGLYNELQKDKMAEAYSEIGMKGERRRGKGHDGLYQGLSTATKDTYDALHMQALPPR

SEQ ID NO: 30918 - protein, 274 aa, synthetic construct
CLFTDFDSQTNVSQSKDSDVYITDKCVLDMRSMDFKSNSAVAWSNKSDFACANAFNNSIIPEDTFFPSPESSCDVKLVEKSFETDTNLNFQNLSVIGFRILLLKVAGFNLLMTLRLWSSKRGRKKLLYIFKQPFMRPVQTTQEEDGCSCRFPEEEEGGCELRVKFSRSADAPAYQQGQNQLYNELNLGRREEYDVLDKRRGRDPEMGGKPQRRKNPQEGLYNELQKDKMAEAYSEIGMKGERRRGKGHDGLYQGLSTATKDTYDALHMQALPPR

SEQ ID NO: 30919 - protein, 273 aa, synthetic construct
LFTDFDSQTNVSQSKDSDVYITDKCVLDMRSMDFKSNSAVAWSNKSDFACANAFNNSIIPEDTFFPSPESSCDVKLVEKSFETDTNLNFQNLSVIGFRILLLKVAGFNLLMTLRLWSSKRGRKKLLYIFKQPFMRPVQTTQEEDGCSCRFPEEEEGGCELRVKFSRSADAPAYQQGQNQLYNELNLGRREEYDVLDKRRGRDPEMGGKPQRRKNPQEGLYNELQKDKMAEAYSEIGMKGERRRGKGHDGLYQGLSTATKDTYDALHMQALPPR

SEQ ID NO: 30920 - protein, 272 aa, synthetic construct
FTDFDSQTNVSQSKDSDVYITDKCVLDMRSMDFKSNSAVAWSNKSDFACANAFNNSIIPEDTFFPSPESSCDVKLVEKSFETDTNLNFQNLSVIGFRILLLKVAGFNLLMTLRLWSSKRGRKKLLYIFKQPFMRPVQTTQEEDGCSCRFPEEEEGGCELRVKFSRSADAPAYQQGQNQLYNELNLGRREEYDVLDKRRGRDPEMGGKPQRRKNPQEGLYNELQKDKMAEAYSEIGMKGERRRGKGHDGLYQGLSTATKDTYDALHMQALPPR

SEQ ID NO: 30921 - protein, 271 aa, synthetic construct
TDFDSQTNVSQSKDSDVYITDKCVLDMRSMDFKSNSAVAWSNKSDFACANAFNNSIIPEDTFFPSPESSCDVKLVEKSFETDTNLNFQNLSVIGFRILLLKVAGFNLLMTLRLWSSKRGRKKLLYIFKQPFMRPVQTTQEEDGCSCRFPEEEEGGCELRVKFSRSADAPAYQQGQNQLYNELNLGRREEYDVLDKRRGRDPEMGGKPQRRKNPQEGLYNELQKDKMAEAYSEIGMKGERRRGKGHDGLYQGLSTATKDTYDALHMQALPPR

SEQ ID NO: 30922 - protein, 270 aa, synthetic construct
DFDSQTNVSQSKDSDVYITDKCVLDMRSMDFKSNSAVAWSNKSDFACANAFNNSIIPEDTFFPSPESSCDVKLVEKSFETDTNLNFQNLSVIGFRILLLKVAGFNLLMTLRLWSSKRGRKKLLYIFKQPFMRPVQTTQEEDGCSCRFPEEEEGGCELRVKFSRSADAPAYQQGQNQLYNELNLGRREEYDVLDKRRGRDPEMGGKPQRRKNPQEGLYNELQKDKMAEAYSEIGMKGERRRGKGHDGLYQGLSTATKDTYDALHMQALPPR

SEQ ID NO: 30923 - protein, 269 aa, synthetic construct
FDSQTNVSQSKDSDVYITDKCVLDMRSMDFKSNSAVAWSNKSDFACANAFNNSIIPEDTFFPSPESSCDVKLVEKSFETDTNLNFQNLSVIGFRILLLKVAGFNLLMTLRLWSSKRGRKKLLYIFKQPFMRPVQTTQEEDGCSCRFPEEEEGGCELRVKFSRSADAPAYQQGQNQLYNELNLGRREEYDVLDKRRGRDPEMGGKPQRRKNPQEGLYNELQKDKMAEAYSEIGMKGERRRGKGHDGLYQGLSTATKDTYDALHMQALPPR

SEQ ID NO: 30924 - protein, 268 aa, synthetic construct
DSQTNVSQSKDSDVYITDKCVLDMRSMDFKSNSAVAWSNKSDFACANAFNNSIIPEDTFFPSPESSCDVKLVEKSFETDTNLNFQNLSVIGFRILLLKVAGFNLLMTLRLWSSKRGRKKLLYIFKQPFMRPVQTTQEEDGCSCRFPEEEEGGCELRVKFSRSADAPAYQQGQNQLYNELNLGRREEYDVLDKRRGRDPEMGGKPQRRKNPQEGLYNELQKDKMAEAYSEIGMKGERRRGKGHDGLYQGLSTATKDTYDALHMQALPPR

SEQ ID NO: 30925 - protein, 267 aa, synthetic construct
SQTNVSQSKDSDVYITDKCVLDMRSMDFKSNSAVAWSNKSDFACANAFNNSIIPEDTFFPSPESSCDVKLVEKSFETDTNLNFQNLSVIGFRILLLKVAGFNLLMTLRLWSSKRGRKKLLYIFKQPFMRPVQTTQEEDGCSCRFPEEEEGGCELRVKFSRSADAPAYQQGQNQLYNELNLGRREEYDVLDKRRGRDPEMGGKPQRRKNPQEGLYNELQKDKMAEAYSEIGMKGERRRGKGHDGLYQGLSTATKDTYDALHMQALPPR

SEQ ID NO: 30926 - protein, 266 aa, synthetic construct
QTNVSQSKDSDVYITDKCVLDMRSMDFKSNSAVAWSNKSDFACANAFNNSIIPEDTFFPSPESSCDVKLVEKSFETDTNLNFQNLSVIGFRILLLKVAGFNLLMTLRLWSSKRGRKKLLYIFKQPFMRPVQTTQEEDGCSCRFPEEEEGGCELRVKFSRSADAPAYQQGQNQLYNELNLGRREEYDVLDKRRGRDPEMGGKPQRRKNPQEGLYNELQKDKMAEAYSEIGMKGERRRGKGHDGLYQGLSTATKDTYDALHMQALPPR

SEQ ID NO: 30927 - protein, 265 aa, synthetic construct
TNVSQSKDSDVYITDKCVLDMRSMDFKSNSAVAWSNKSDFACANAFNNSIIPEDTFFPSPESSCDVKLVEKSFETDTNLNFQNLSVIGFRILLLKVAGFNLLMTLRLWSSKRGRKKLLYIFKQPFMRPVQTTQEEDGCSCRFPEEEEGGCELRVKFSRSADAPAYQQGQNQLYNELNLGRREEYDVLDKRRGRDPEMGGKPQRRKNPQEGLYNELQKDKMAEAYSEIGMKGERRRGKGHDGLYQGLSTATKDTYDALHMQALPPR

SEQ ID NO: 30928 - protein, 264 aa, synthetic construct
NVSQSKDSDVYITDKCVLDMRSMDFKSNSAVAWSNKSDFACANAFNNSIIPEDTFFPSPESSCDVKLVEKSFETDTNLNFQNLSVIGFRILLLKVAGFNLLMTLRLWSSKRGRKKLLYIFKQPFMRPVQTTQEEDGCSCRFPEEEEGGCELRVKFSRSADAPAYQQGQNQLYNELNLGRREEYDVLDKRRGRDPEMGGKPQRRKNPQEGLYNELQKDKMAEAYSEIGMKGERRRGKGHDGLYQGLSTATKDTYDALHMQALPPR

SEQ ID NO: 30929 - protein, 263 aa, synthetic construct
VSQSKDSDVYITDKCVLDMRSMDFKSNSAVAWSNKSDFACANAFNNSIIPEDTFFPSPESSCDVKLVEKSFETDTNLNFQNLSVIGFRILLLKVAGFNLLMTLRLWSSKRGRKKLLYIFKQPFMRPVQTTQEEDGCSCRFPEEEEGGCELRVKFSRSADAPAYQQGQNQLYNELNLGRREEYDVLDKRRGRDPEMGGKPQRRKNPQEGLYNELQKDKMAEAYSEIGMKGERRRGKGHDGLYQGLSTATKDTYDALHMQALPPR

SEQ ID NO: 30930 - protein, 262 aa, synthetic construct
SQSKDSDVYITDKCVLDMRSMDFKSNSAVAWSNKSDFACANAFNNSIIPEDTFFPSPESSCDVKLVEKSFETDTNLNFQNLSVIGFRILLLKVAGFNLLMTLRLWSSKRGRKKLLYIFKQPFMRPVQTTQEEDGCSCRFPEEEEGGCELRVKFSRSADAPAYQQGQNQLYNELNLGRREEYDVLDKRRGRDPEMGGKPQRRKNPQEGLYNELQKDKMAEAYSEIGMKGERRRGKGHDGLYQGLSTATKDTYDALHMQALPPR

SEQ ID NO: 30931 - protein, 261 aa, synthetic construct
QSKDSDVYITDKCVLDMRSMDFKSNSAVAWSNKSDFACANAFNNSIIPEDTFFPSPESSCDVKLVEKSFETDTNLNFQNLSVIGFRILLLKVAGFNLLMTLRLWSSKRGRKKLLYIFKQPFMRPVQTTQEEDGCSCRFPEEEEGGCELRVKFSRSADAPAYQQGQNQLYNELNLGRREEYDVLDKRRGRDPEMGGKPQRRKNPQEGLYNELQKDKMAEAYSEIGMKGERRRGKGHDGLYQGLSTATKDTYDALHMQALPPR

SEQ ID NO: 30932 - protein, 260 aa, synthetic construct
SKDSDVYITDKCVLDMRSMDFKSNSAVAWSNKSDFACANAFNNSIIPEDTFFPSPESSCDVKLVEKSFETDTNLNFQNLSVIGFRILLLKVAGFNLLMTLRLWSSKRGRKKLLYIFKQPFMRPVQTTQEEDGCSCRFPEEEEGGCELRVKFSRSADAPAYQQGQNQLYNELNLGRREEYDVLDKRRGRDPEMGGKPQRRKNPQEGLYNELQKDKMAEAYSEIGMKGERRRGKGHDGLYQGLSTATKDTYDALHMQALPPR

SEQ ID NO: 30933 - protein, 259 aa, synthetic construct
KDSDVYITDKCVLDMRSMDFKSNSAVAWSNKSDFACANAFNNSIIPEDTFFPSPESSCDVKLVEKSFETDTNLNFQNLSVIGFRILLLKVAGFNLLMTLRLWSSKRGRKKLLYIFKQPFMRPVQTTQEEDGCSCRFPEEEEGGCELRVKFSRSADAPAYQQGQNQLYNELNLGRREEYDVLDKRRGRDPEMGGKPQRRKNPQEGLYNELQKDKMAEAYSEIGMKGERRRGKGHDGLYQGLSTATKDTYDALHMQALPPR

SEQ ID NO: 30934 - protein, 258 aa, synthetic construct
DSDVYITDKCVLDMRSMDFKSNSAVAWSNKSDFACANAFNNSIIPEDTFFPSPESSCDVKLVEKSFETDTNLNFQNLSVIGFRILLLKVAGFNLLMTLRLWSSKRGRKKLLYIFKQPFMRPVQTTQEEDGCSCRFPEEEEGGCELRVKFSRSADAPAYQQGQNQLYNELNLGRREEYDVLDKRRGRDPEMGGKPQRRKNPQEGLYNELQKDKMAEAYSEIGMKGERRRGKGHDGLYQGLSTATKDTYDALHMQALPPR

SEQ ID NO: 30935 - protein, 257 aa, synthetic construct
SDVYITDKCVLDMRSMDFKSNSAVAWSNKSDFACANAFNNSIIPEDTFFPSPESSCDVKLVEKSFETDTNLNFQNLSVIGFRILLLKVAGFNLLMTLRLWSSKRGRKKLLYIFKQPFMRPVQTTQEEDGCSCRFPEEEEGGCELRVKFSRSADAPAYQQGQNQLYNELNLGRREEYDVLDKRRGRDPEMGGKPQRRKNPQEGLYNELQKDKMAEAYSEIGMKGERRRGKGHDGLYQGLSTATKDTYDALHMQALPPR

SEQ ID NO: 30936 - protein, 256 aa, synthetic construct
DVYITDKCVLDMRSMDFKSNSAVAWSNKSDFACANAFNNSIIPEDTFFPSPESSCDVKLVEKSFETDTNLNFQNLSVIGFRILLLKVAGFNLLMTLRLWSSKRGRKKLLYIFKQPFMRPVQTTQEEDGCSCRFPEEEEGGCELRVKFSRSADAPAYQQGQNQLYNELNLGRREEYDVLDKRRGRDPEMGGKPQRRKNPQEGLYNELQKDKMAEAYSEIGMKGERRRGKGHDGLYQGLSTATKDTYDALHMQALPPR

SEQ ID NO: 30937 - protein, 255 aa, synthetic construct
VYITDKCVLDMRSMDFKSNSAVAWSNKSDFACANAFNNSIIPEDTFFPSPESSCDVKLVEKSFETDTNLNFQNLSVIGFRILLLKVAGFNLLMTLRLWSSKRGRKKLLYIFKQPFMRPVQTTQEEDGCSCRFPEEEEGGCELRVKFSRSADAPAYQQGQNQLYNELNLGRREEYDVLDKRRGRDPEMGGKPQRRKNPQEGLYNELQKDKMAEAYSEIGMKGERRRGKGHDGLYQGLSTATKDTYDALHMQALPPR

SEQ ID NO: 30938 - protein, 254 aa, synthetic construct
YITDKCVLDMRSMDFKSNSAVAWSNKSDFACANAFNNSIIPEDTFFPSPESSCDVKLVEKSFETDTNLNFQNLSVIGFRILLLKVAGFNLLMTLRLWSSKRGRKKLLYIFKQPFMRPVQTTQEEDGCSCRFPEEEEGGCELRVKFSRSADAPAYQQGQNQLYNELNLGRREEYDVLDKRRGRDPEMGGKPQRRKNPQEGLYNELQKDKMAEAYSEIGMKGERRRGKGHDGLYQGLSTATKDTYDALHMQALPPR

SEQ ID NO: 30939 - protein, 253 aa, synthetic construct
ITDKCVLDMRSMDFKSNSAVAWSNKSDFACANAFNNSIIPEDTFFPSPESSCDVKLVEKSFETDTNLNFQNLSVIGFRILLLKVAGFNLLMTLRLWSSKRGRKKLLYIFKQPFMRPVQTTQEEDGCSCRFPEEEEGGCELRVKFSRSADAPAYQQGQNQLYNELNLGRREEYDVLDKRRGRDPEMGGKPQRRKNPQEGLYNELQKDKMAEAYSEIGMKGERRRGKGHDGLYQGLSTATKDTYDALHMQALPPR

SEQ ID NO: 30940 - protein, 252 aa, synthetic construct
TDKCVLDMRSMDFKSNSAVAWSNKSDFACANAFNNSIIPEDTFFPSPESSCDVKLVEKSFETDTNLNFQNLSVIGFRILLLKVAGFNLLMTLRLWSSKRGRKKLLYIFKQPFMRPVQTTQEEDGCSCRFPEEEEGGCELRVKFSRSADAPAYQQGQNQLYNELNLGRREEYDVLDKRRGRDPEMGGKPQRRKNPQEGLYNELQKDKMAEAYSEIGMKGERRRGKGHDGLYQGLSTATKDTYDALHMQALPPR

SEQ ID NO: 30941 - protein, 251 aa, synthetic construct
DKCVLDMRSMDFKSNSAVAWSNKSDFACANAFNNSIIPEDTFFPSPESSCDVKLVEKSFETDTNLNFQNLSVIGFRILLLKVAGFNLLMTLRLWSSKRGRKKLLYIFKQPFMRPVQTTQEEDGCSCRFPEEEEGGCELRVKFSRSADAPAYQQGQNQLYNELNLGRREEYDVLDKRRGRDPEMGGKPQRRKNPQEGLYNELQKDKMAEAYSEIGMKGERRRGKGHDGLYQGLSTATKDTYDALHMQALPPR

SEQ ID NO: 30942 - protein, 249 aa, synthetic construct
CVLDMRSMDFKSNSAVAWSNKSDFACANAFNNSIIPEDTFFPSPESSCDVKLVEKSFETDTNLNFQNLSVIGFRILLLKVAGFNLLMTLRLWSSKRGRKKLLYIFKQPFMRPVQTTQEEDGCSCRFPEEEEGGCELRVKFSRSADAPAYQQGQNQLYNELNLGRREEYDVLDKRRGRDPEMGGKPQRRKNPQEGLYNELQKDKMAEAYSEIGMKGERRRGKGHDGLYQGLSTATKDTYDALHMQALPPR

SEQ ID NO: 30943 - protein, 248 aa, synthetic construct
VLDMRSMDFKSNSAVAWSNKSDFACANAFNNSIIPEDTFFPSPESSCDVKLVEKSFETDTNLNFQNLSVIGFRILLLKVAGFNLLMTLRLWSSKRGRKKLLYIFKQPFMRPVQTTQEEDGCSCRFPEEEEGGCELRVKFSRSADAPAYQQGQNQLYNELNLGRREEYDVLDKRRGRDPEMGGKPQRRKNPQEGLYNELQKDKMAEAYSEIGMKGERRRGKGHDGLYQGLSTATKDTYDALHMQALPPR

SEQ ID NO: 30944 - protein, 247 aa, synthetic construct
LDMRSMDFKSNSAVAWSNKSDFACANAFNNSIIPEDTFFPSPESSCDVKLVEKSFETDTNLNFQNLSVIGFRILLLKVAGFNLLMTLRLWSSKRGRKKLLYIFKQPFMRPVQTTQEEDGCSCRFPEEEEGGCELRVKFSRSADAPAYQQGQNQLYNELNLGRREEYDVLDKRRGRDPEMGGKPQRRKNPQEGLYNELQKDKMAEAYSEIGMKGERRRGKGHDGLYQGLSTATKDTYDALHMQALPPR

SEQ ID NO: 30945 - protein, 246 aa, synthetic construct
DMRSMDFKSNSAVAWSNKSDFACANAFNNSIIPEDTFFPSPESSCDVKLVEKSFETDTNLNFQNLSVIGFRILLLKVAGFNLLMTLRLWSSKRGRKKLLYIFKQPFMRPVQTTQEEDGCSCRFPEEEEGGCELRVKFSRSADAPAYQQGQNQLYNELNLGRREEYDVLDKRRGRDPEMGGKPQRRKNPQEGLYNELQKDKMAEAYSEIGMKGERRRGKGHDGLYQGLSTATKDTYDALHMQALPPR

SEQ ID NO: 30946 - protein, 245 aa, synthetic construct
MRSMDFKSNSAVAWSNKSDFACANAFNNSIIPEDTFFPSPESSCDVKLVEKSFETDTNLNFQNLSVIGFRILLLKVAGFNLLMTLRLWSSKRGRKKLLYIFKQPFMRPVQTTQEEDGCSCRFPEEEEGGCELRVKFSRSADAPAYQQGQNQLYNELNLGRREEYDVLDKRRGRDPEMGGKPQRRKNPQEGLYNELQKDKMAEAYSEIGMKGERRRGKGHDGLYQGLSTATKDTYDALHMQALPPR

SEQ ID NO: 30947 - protein, 244 aa, synthetic construct
RSMDFKSNSAVAWSNKSDFACANAFNNSIIPEDTFFPSPESSCDVKLVEKSFETDTNLNFQNLSVIGFRILLLKVAGFNLLMTLRLWSSKRGRKKLLYIFKQPFMRPVQTTQEEDGCSCRFPEEEEGGCELRVKFSRSADAPAYQQGQNQLYNELNLGRREEYDVLDKRRGRDPEMGGKPQRRKNPQEGLYNELQKDKMAEAYSEIGMKGERRRGKGHDGLYQGLSTATKDTYDALHMQALPPR

SEQ ID NO: 30948 - protein, 243 aa, synthetic construct
SMDFKSNSAVAWSNKSDFACANAFNNSIIPEDTFFPSPESSCDVKLVEKSFETDTNLNFQNLSVIGFRILLLKVAGFNLLMTLRLWSSKRGRKKLLYIFKQPFMRPVQTTQEEDGCSCRFPEEEEGGCELRVKFSRSADAPAYQQGQNQLYNELNLGRREEYDVLDKRRGRDPEMGGKPQRRKNPQEGLYNELQKDKMAEAYSEIGMKGERRRGKGHDGLYQGLSTATKDTYDALHMQALPPR

SEQ ID NO: 30949 - protein, 242 aa, synthetic construct
MDFKSNSAVAWSNKSDFACANAFNNSIIPEDTFFPSPESSCDVKLVEKSFETDTNLNFQNLSVIGFRILLLKVAGFNLLMTLRLWSSKRGRKKLLYIFKQPFMRPVQTTQEEDGCSCRFPEEEEGGCELRVKFSRSADAPAYQQGQNQLYNELNLGRREEYDVLDKRRGRDPEMGGKPQRRKNPQEGLYNELQKDKMAEAYSEIGMKGERRRGKGHDGLYQGLSTATKDTYDALHMQALPPR

SEQ ID NO: 30950 - protein, 241 aa, synthetic construct
DFKSNSAVAWSNKSDFACANAFNNSIIPEDTFFPSPESSCDVKLVEKSFETDTNLNFQNLSVIGFRILLLKVAGFNLLMTLRLWSSKRGRKKLLYIFKQPFMRPVQTTQEEDGCSCRFPEEEEGGCELRVKFSRSADAPAYQQGQNQLYNELNLGRREEYDVLDKRRGRDPEMGGKPQRRKNPQEGLYNELQKDKMAEAYSEIGMKGERRRGKGHDGLYQGLSTATKDTYDALHMQALPPR

SEQ ID NO: 30951 - protein, 240 aa, synthetic construct
FKSNSAVAWSNKSDFACANAFNNSIIPEDTFFPSPESSCDVKLVEKSFETDTNLNFQNLSVIGFRILLLKVAGFNLLMTLRLWSSKRGRKKLLYIFKQPFMRPVQTTQEEDGCSCRFPEEEEGGCELRVKFSRSADAPAYQQGQNQLYNELNLGRREEYDVLDKRRGRDPEMGGKPQRRKNPQEGLYNELQKDKMAEAYSEIGMKGERRRGKGHDGLYQGLSTATKDTYDALHMQALPPR

SEQ ID NO: 30952 - protein, 239 aa, synthetic construct
KSNSAVAWSNKSDFACANAFNNSIIPEDTFFPSPESSCDVKLVEKSFETDTNLNFQNLSVIGFRILLLKVAGFNLLMTLRLWSSKRGRKKLLYIFKQPFMRPVQTTQEEDGCSCRFPEEEEGGCELRVKFSRSADAPAYQQGQNQLYNELNLGRREEYDVLDKRRGRDPEMGGKPQRRKNPQEGLYNELQKDKMAEAYSEIGMKGERRRGKGHDGLYQGLSTATKDTYDALHMQALPPR

SEQ ID NO: 30953 - protein, 238 aa, synthetic construct
SNSAVAWSNKSDFACANAFNNSIIPEDTFFPSPESSCDVKLVEKSFETDTNLNFQNLSVIGFRILLLKVAGFNLLMTLRLWSSKRGRKKLLYIFKQPFMRPVQTTQEEDGCSCRFPEEEEGGCELRVKFSRSADAPAYQQGQNQLYNELNLGRREEYDVLDKRRGRDPEMGGKPQRRKNPQEGLYNELQKDKMAEAYSEIGMKGERRRGKGHDGLYQGLSTATKDTYDALHMQALPPR

SEQ ID NO: 30954 - protein, 237 aa, synthetic construct
NSAVAWSNKSDFACANAFNNSIIPEDTFFPSPESSCDVKLVEKSFETDTNLNFQNLSVIGFRILLLKVAGFNLLMTLRLWSSKRGRKKLLYIFKQPFMRPVQTTQEEDGCSCRFPEEEEGGCELRVKFSRSADAPAYQQGQNQLYNELNLGRREEYDVLDKRRGRDPEMGGKPQRRKNPQEGLYNELQKDKMAEAYSEIGMKGERRRGKGHDGLYQGLSTATKDTYDALHMQALPPR

SEQ ID NO: 30955 - protein, 236 aa, synthetic construct
SAVAWSNKSDFACANAFNNSIIPEDTFFPSPESSCDVKLVEKSFETDTNLNFQNLSVIGFRILLLKVAGFNLLMTLRLWSSKRGRKKLLYIFKQPFMRPVQTTQEEDGCSCRFPEEEEGGCELRVKFSRSADAPAYQQGQNQLYNELNLGRREEYDVLDKRRGRDPEMGGKPQRRKNPQEGLYNELQKDKMAEAYSEIGMKGERRRGKGHDGLYQGLSTATKDTYDALHMQALPPR

SEQ ID NO: 30956 - protein, 235 aa, synthetic construct
AVAWSNKSDFACANAFNNSIIPEDTFFPSPESSCDVKLVEKSFETDTNLNFQNLSVIGFRILLLKVAGFNLLMTLRLWSSKRGRKKLLYIFKQPFMRPVQTTQEEDGCSCRFPEEEEGGCELRVKFSRSADAPAYQQGQNQLYNELNLGRREEYDVLDKRRGRDPEMGGKPQRRKNPQEGLYNELQKDKMAEAYSEIGMKGERRRGKGHDGLYQGLSTATKDTYDALHMQALPPR

SEQ ID NO: 30957 - protein, 234 aa, synthetic construct
VAWSNKSDFACANAFNNSIIPEDTFFPSPESSCDVKLVEKSFETDTNLNFQNLSVIGFRILLLKVAGFNLLMTLRLWSSKRGRKKLLYIFKQPFMRPVQTTQEEDGCSCRFPEEEEGGCELRVKFSRSADAPAYQQGQNQLYNELNLGRREEYDVLDKRRGRDPEMGGKPQRRKNPQEGLYNELQKDKMAEAYSEIGMKGERRRGKGHDGLYQGLSTATKDTYDALHMQALPPR

SEQ ID NO: 30958 - protein, 233 aa, synthetic construct
AWSNKSDFACANAFNNSIIPEDTFFPSPESSCDVKLVEKSFETDTNLNFQNLSVIGFRILLLKVAGFNLLMTLRLWSSKRGRKKLLYIFKQPFMRPVQTTQEEDGCSCRFPEEEEGGCELRVKFSRSADAPAYQQGQNQLYNELNLGRREEYDVLDKRRGRDPEMGGKPQRRKNPQEGLYNELQKDKMAEAYSEIGMKGERRRGKGHDGLYQGLSTATKDTYDALHMQALPPR

SEQ ID NO: 30959 - protein, 232 aa, synthetic construct
WSNKSDFACANAFNNSIIPEDTFFPSPESSCDVKLVEKSFETDTNLNFQNLSVIGFRILLLKVAGFNLLMTLRLWSSKRGRKKLLYIFKQPFMRPVQTTQEEDGCSCRFPEEEEGGCELRVKFSRSADAPAYQQGQNQLYNELNLGRREEYDVLDKRRGRDPEMGGKPQRRKNPQEGLYNELQKDKMAEAYSEIGMKGERRRGKGHDGLYQGLSTATKDTYDALHMQALPPR

SEQ ID NO: 30960 - protein, 231 aa, synthetic construct
SNKSDFACANAFNNSIIPEDTFFPSPESSCDVKLVEKSFETDTNLNFQNLSVIGFRILLLKVAGFNLLMTLRLWSSKRGRKKLLYIFKQPFMRPVQTTQEEDGCSCRFPEEEEGGCELRVKFSRSADAPAYQQGQNQLYNELNLGRREEYDVLDKRRGRDPEMGGKPQRRKNPQEGLYNELQKDKMAEAYSEIGMKGERRRGKGHDGLYQGLSTATKDTYDALHMQALPPR

SEQ ID NO: 30961 - protein, 230 aa, synthetic construct
NKSDFACANAFNNSIIPEDTFFPSPESSCDVKLVEKSFETDTNLNFQNLSVIGFRILLLKVAGFNLLMTLRLWSSKRGRKKLLYIFKQPFMRPVQTTQEEDGCSCRFPEEEEGGCELRVKFSRSADAPAYQQGQNQLYNELNLGRREEYDVLDKRRGRDPEMGGKPQRRKNPQEGLYNELQKDKMAEAYSEIGMKGERRRGKGHDGLYQGLSTATKDTYDALHMQALPPR

SEQ ID NO: 30962 - protein, 229 aa, synthetic construct
KSDFACANAFNNSIIPEDTFFPSPESSCDVKLVEKSFETDTNLNFQNLSVIGFRILLLKVAGFNLLMTLRLWSSKRGRKKLLYIFKQPFMRPVQTTQEEDGCSCRFPEEEEGGCELRVKFSRSADAPAYQQGQNQLYNELNLGRREEYDVLDKRRGRDPEMGGKPQRRKNPQEGLYNELQKDKMAEAYSEIGMKGERRRGKGHDGLYQGLSTATKDTYDALHMQALPPR

SEQ ID NO: 30963 - protein, 228 aa, synthetic construct
SDFACANAFNNSIIPEDTFFPSPESSCDVKLVEKSFETDTNLNFQNLSVIGFRILLLKVAGFNLLMTLRLWSSKRGRKKLLYIFKQPFMRPVQTTQEEDGCSCRFPEEEEGGCELRVKFSRSADAPAYQQGQNQLYNELNLGRREEYDVLDKRRGRDPEMGGKPQRRKNPQEGLYNELQKDKMAEAYSEIGMKGERRRGKGHDGLYQGLSTATKDTYDALHMQALPPR

SEQ ID NO: 30964 - protein, 227 aa, synthetic construct
DFACANAFNNSIIPEDTFFPSPESSCDVKLVEKSFETDTNLNFQNLSVIGFRILLLKVAGFNLLMTLRLWSSKRGRKKLLYIFKQPFMRPVQTTQEEDGCSCRFPEEEEGGCELRVKFSRSADAPAYQQGQNQLYNELNLGRREEYDVLDKRRGRDPEMGGKPQRRKNPQEGLYNELQKDKMAEAYSEIGMKGERRRGKGHDGLYQGLSTATKDTYDALHMQALPPR

SEQ ID NO: 30965 - protein, 226 aa, synthetic construct
FACANAFNNSIIPEDTFFPSPESSCDVKLVEKSFETDTNLNFQNLSVIGFRILLLKVAGFNLLMTLRLWSSKRGRKKLLYIFKQPFMRPVQTTQEEDGCSCRFPEEEEGGCELRVKFSRSADAPAYQQGQNQLYNELNLGRREEYDVLDKRRGRDPEMGGKPQRRKNPQEGLYNELQKDKMAEAYSEIGMKGERRRGKGHDGLYQGLSTATKDTYDALHMQALPPR

SEQ ID NO: 30966 - protein, 225 aa, synthetic construct
ACANAFNNSIIPEDTFFPSPESSCDVKLVEKSFETDTNLNFQNLSVIGFRILLLKVAGFNLLMTLRLWSSKRGRKKLLYIFKQPFMRPVQTTQEEDGCSCRFPEEEEGGCELRVKFSRSADAPAYQQGQNQLYNELNLGRREEYDVLDKRRGRDPEMGGKPQRRKNPQEGLYNELQKDKMAEAYSEIGMKGERRRGKGHDGLYQGLSTATKDTYDALHMQALPPR

SEQ ID NO: 30967 - protein, 224 aa, synthetic construct
CANAFNNSIIPEDTFFPSPESSCDVKLVEKSFETDTNLNFQNLSVIGFRILLLKVAGFNLLMTLRLWSSKRGRKKLLYIFKQPFMRPVQTTQEEDGCSCRFPEEEEGGCELRVKFSRSADAPAYQQGQNQLYNELNLGRREEYDVLDKRRGRDPEMGGKPQRRKNPQEGLYNELQKDKMAEAYSEIGMKGERRRGKGHDGLYQGLSTATKDTYDALHMQALPPR

SEQ ID NO: 30968 - protein, 223 aa, synthetic construct
ANAFNNSIIPEDTFFPSPESSCDVKLVEKSFETDTNLNFQNLSVIGFRILLLKVAGFNLLMTLRLWSSKRGRKKLLYIFKQPFMRPVQTTQEEDGCSCRFPEEEEGGCELRVKFSRSADAPAYQQGQNQLYNELNLGRREEYDVLDKRRGRDPEMGGKPQRRKNPQEGLYNELQKDKMAEAYSEIGMKGERRRGKGHDGLYQGLSTATKDTYDALHMQALPPR

SEQ ID NO: 30969 - protein, 222 aa, synthetic construct
NAFNNSIIPEDTFFPSPESSCDVKLVEKSFETDTNLNFQNLSVIGFRILLLKVAGFNLLMTLRLWSSKRGRKKLLYIFKQPFMRPVQTTQEEDGCSCRFPEEEEGGCELRVKFSRSADAPAYQQGQNQLYNELNLGRREEYDVLDKRRGRDPEMGGKPQRRKNPQEGLYNELQKDKMAEAYSEIGMKGERRRGKGHDGLYQGLSTATKDTYDALHMQALPPR

SEQ ID NO: 30970 - protein, 221 aa, synthetic construct
AFNNSIIPEDTFFPSPESSCDVKLVEKSFETDTNLNFQNLSVIGFRILLLKVAGFNLLMTLRLWSSKRGRKKLLYIFKQPFMRPVQTTQEEDGCSCRFPEEEEGGCELRVKFSRSADAPAYQQGQNQLYNELNLGRREEYDVLDKRRGRDPEMGGKPQRRKNPQEGLYNELQKDKMAEAYSEIGMKGERRRGKGHDGLYQGLSTATKDTYDALHMQALPPR

SEQ ID NO: 30971 - protein, 220 aa, synthetic construct
FNNSIIPEDTFFPSPESSCDVKLVEKSFETDTNLNFQNLSVIGFRILLLKVAGFNLLMTLRLWSSKRGRKKLLYIFKQPFMRPVQTTQEEDGCSCRFPEEEEGGCELRVKFSRSADAPAYQQGQNQLYNELNLGRREEYDVLDKRRGRDPEMGGKPQRRKNPQEGLYNELQKDKMAEAYSEIGMKGERRRGKGHDGLYQGLSTATKDTYDALHMQALPPR

SEQ ID NO: 30972 - protein, 219 aa, synthetic construct
NNSIIPEDTFFPSPESSCDVKLVEKSFETDTNLNFQNLSVIGFRILLLKVAGFNLLMTLRLWSSKRGRKKLLYIFKQPFMRPVQTTQEEDGCSCRFPEEEEGGCELRVKFSRSADAPAYQQGQNQLYNELNLGRREEYDVLDKRRGRDPEMGGKPQRRKNPQEGLYNELQKDKMAEAYSEIGMKGERRRGKGHDGLYQGLSTATKDTYDALHMQALPPR

SEQ ID NO: 30973 - protein, 218 aa, synthetic construct
NSIIPEDTFFPSPESSCDVKLVEKSFETDTNLNFQNLSVIGFRILLLKVAGFNLLMTLRLWSSKRGRKKLLYIFKQPFMRPVQTTQEEDGCSCRFPEEEEGGCELRVKFSRSADAPAYQQGQNQLYNELNLGRREEYDVLDKRRGRDPEMGGKPQRRKNPQEGLYNELQKDKMAEAYSEIGMKGERRRGKGHDGLYQGLSTATKDTYDALHMQALPPR

SEQ ID NO: 30974 - protein, 217 aa, synthetic construct
SIIPEDTFFPSPESSCDVKLVEKSFETDTNLNFQNLSVIGFRILLLKVAGFNLLMTLRLWSSKRGRKKLLYIFKQPFMRPVQTTQEEDGCSCRFPEEEEGGCELRVKFSRSADAPAYQQGQNQLYNELNLGRREEYDVLDKRRGRDPEMGGKPQRRKNPQEGLYNELQKDKMAEAYSEIGMKGERRRGKGHDGLYQGLSTATKDTYDALHMQALPPR

SEQ ID NO: 30975 - protein, 216 aa, synthetic construct
IIPEDTFFPSPESSCDVKLVEKSFETDTNLNFQNLSVIGFRILLLKVAGFNLLMTLRLWSSKRGRKKLLYIFKQPFMRPVQTTQEEDGCSCRFPEEEEGGCELRVKFSRSADAPAYQQGQNQLYNELNLGRREEYDVLDKRRGRDPEMGGKPQRRKNPQEGLYNELQKDKMAEAYSEIGMKGERRRGKGHDGLYQGLSTATKDTYDALHMQALPPR

SEQ ID NO: 30976 - protein, 215 aa, synthetic construct; identical to SEQ ID NO: 30662

SEQ ID NO: 30977 - protein, 214 aa, synthetic construct
PEDTFFPSPESSCDVKLVEKSFETDTNLNFQNLSVIGFRILLLKVAGFNLLMTLRLWSSKRGRKKLLYIFKQPFMRPVQTTQEEDGCSCRFPEEEEGGCELRVKFSRSADAPAYQQGQNQLYNELNLGRREEYDVLDKRRGRDPEMGGKPQRRKNPQEGLYNELQKDKMAEAYSEIGMKGERRRGKGHDGLYQGLSTATKDTYDALHMQALPPR

SEQ ID NO: 30978 - protein, 213 aa, synthetic construct
EDTFFPSPESSCDVKLVEKSFETDTNLNFQNLSVIGFRILLLKVAGFNLLMTLRLWSSKRGRKKLLYIFKQPFMRPVQTTQEEDGCSCRFPEEEEGGCELRVKFSRSADAPAYQQGQNQLYNELNLGRREEYDVLDKRRGRDPEMGGKPQRRKNPQEGLYNELQKDKMAEAYSEIGMKGERRRGKGHDGLYQGLSTATKDTYDALHMQALPPR

SEQ ID NO: 30979 - protein, 212 aa, synthetic construct
DTFFPSPESSCDVKLVEKSFETDTNLNFQNLSVIGFRILLLKVAGFNLLMTLRLWSSKRGRKKLLYIFKQPFMRPVQTTQEEDGCSCRFPEEEEGGCELRVKFSRSADAPAYQQGQNQLYNELNLGRREEYDVLDKRRGRDPEMGGKPQRRKNPQEGLYNELQKDKMAEAYSEIGMKGERRRGKGHDGLYQGLSTATKDTYDALHMQALPPR

SEQ ID NO: 30980 - protein, 211 aa, synthetic construct
TFFPSPESSCDVKLVEKSFETDTNLNFQNLSVIGFRILLLKVAGFNLLMTLRLWSSKRGRKKLLYIFKQPFMRPVQTTQEEDGCSCRFPEEEEGGCELRVKFSRSADAPAYQQGQNQLYNELNLGRREEYDVLDKRRGRDPEMGGKPQRRKNPQEGLYNELQKDKMAEAYSEIGMKGERRRGKGHDGLYQGLSTATKDTYDALHMQALPPR

SEQ ID NO: 30981 - protein, 210 aa, synthetic construct
FFPSPESSCDVKLVEKSFETDTNLNFQNLSVIGFRILLLKVAGFNLLMTLRLWSSKRGRKKLLYIFKQPFMRPVQTTQEEDGCSCRFPEEEEGGCELRVKFSRSADAPAYQQGQNQLYNELNLGRREEYDVLDKRRGRDPEMGGKPQRRKNPQEGLYNELQKDKMAEAYSEIGMKGERRRGKGHDGLYQGLSTATKDTYDALHMQALPPR

SEQ ID NO: 30982 - protein, 209 aa, synthetic construct
FPSPESSCDVKLVEKSFETDTNLNFQNLSVIGFRILLLKVAGFNLLMTLRLWSSKRGRKKLLYIFKQPFMRPVQTTQEEDGCSCRFPEEEEGGCELRVKFSRSADAPAYQQGQNQLYNELNLGRREEYDVLDKRRGRDPEMGGKPQRRKNPQEGLYNELQKDKMAEAYSEIGMKGERRRGKGHDGLYQGLSTATKDTYDALHMQALPPR

SEQ ID NO: 30983 - protein, 208 aa, synthetic construct
PSPESSCDVKLVEKSFETDTNLNFQNLSVIGFRILLLKVAGFNLLMTLRLWSSKRGRKKLLYIFKQPFMRPVQTTQEEDGCSCRFPEEEEGGCELRVKFSRSADAPAYQQGQNQLYNELNLGRREEYDVLDKRRGRDPEMGGKPQRRKNPQEGLYNELQKDKMAEAYSEIGMKGERRRGKGHDGLYQGLSTATKDTYDALHMQALPPR

SEQ ID NO: 30984 - protein, 207 aa, synthetic construct
SPESSCDVKLVEKSFETDTNLNFQNLSVIGFRILLLKVAGFNLLMTLRLWSSKRGRKKLLYIFKQPFMRPVQTTQEEDGCSCRFPEEEEGGCELRVKFSRSADAPAYQQGQNQLYNELNLGRREEYDVLDKRRGRDPEMGGKPQRRKNPQEGLYNELQKDKMAEAYSEIGMKGERRRGKGHDGLYQGLSTATKDTYDALHMQALPPR

SEQ ID NO: 30985 - protein, 206 aa, synthetic construct
PESSCDVKLVEKSFETDTNLNFQNLSVIGFRILLLKVAGFNLLMTLRLWSSKRGRKKLLYIFKQPFMRPVQTTQEEDGCSCRFPEEEEGGCELRVKFSRSADAPAYQQGQNQLYNELNLGRREEYDVLDKRRGRDPEMGGKPQRRKNPQEGLYNELQKDKMAEAYSEIGMKGERRRGKGHDGLYQGLSTATKDTYDALHMQALPPR

SEQ ID NO: 30986 - protein, 205 aa, synthetic construct; identical to SEQ ID NO: 30663

SEQ ID NO: 30987 - protein, 204 aa, synthetic construct
SSCDVKLVEKSFETDTNLNFQNLSVIGFRILLLKVAGFNLLMTLRLWSSKRGRKKLLYIFKQPFMRPVQTTQEEDGCSCRFPEEEEGGCELRVKFSRSADAPAYQQGQNQLYNELNLGRREEYDVLDKRRGRDPEMGGKPQRRKNPQEGLYNELQKDKMAEAYSEIGMKGERRRGKGHDGLYQGLSTATKDTYDALHMQALPPR

SEQ ID NO: 30988 - protein, 203 aa, synthetic construct
SCDVKLVEKSFETDTNLNFQNLSVIGFRILLLKVAGFNLLMTLRLWSSKRGRKKLLYIFKQPFMRPVQTTQEEDGCSCRFPEEEEGGCELRVKFSRSADAPAYQQGQNQLYNELNLGRREEYDVLDKRRGRDPEMGGKPQRRKNPQEGLYNELQKDKMAEAYSEIGMKGERRRGKGHDGLYQGLSTATKDTYDALHMQALPPR

SEQ ID NO: 30989 - protein, 202 aa, synthetic construct
CDVKLVEKSFETDTNLNFQNLSVIGFRILLLKVAGFNLLMTLRLWSSKRGRKKLLYIFKQPFMRPVQTTQEEDGCSCRFPEEEEGGCELRVKFSRSADAPAYQQGQNQLYNELNLGRREEYDVLDKRRGRDPEMGGKPQRRKNPQEGLYNELQKDKMAEAYSEIGMKGERRRGKGHDGLYQGLSTATKDTYDALHMQALPPR

SEQ ID NO: 30990 - protein, 201 aa, synthetic construct
DVKLVEKSFETDTNLNFQNLSVIGFRILLLKVAGFNLLMTLRLWSSKRGRKKLLYIFKQPFMRPVQTTQEEDGCSCRFPEEEEGGCELRVKFSRSADAPAYQQGQNQLYNELNLGRREEYDVLDKRRGRDPEMGGKPQRRKNPQEGLYNELQKDKMAEAYSEIGMKGERRRGKGHDGLYQGLSTATKDTYDALHMQALPPR

SEQ ID NO: 30991 - protein, 200 aa, synthetic construct
VKLVEKSFETDTNLNFQNLSVIGFRILLLKVAGFNLLMTLRLWSSKRGRKKLLYIFKQPFMRPVQTTQEEDGCSCRFPEEEEGGCELRVKFSRSADAPAYQQGQNQLYNELNLGRREEYDVLDKRRGRDPEMGGKPQRRKNPQEGLYNELQKDKMAEAYSEIGMKGERRRGKGHDGLYQGLSTATKDTYDALHMQALPPR

SEQ ID NO: 30992 - protein, 199 aa, synthetic construct
KLVEKSFETDTNLNFQNLSVIGFRILLLKVAGFNLLMTLRLWSSKRGRKKLLYIFKQPFMRPVQTTQEEDGCSCRFPEEEEGGCELRVKFSRSADAPAYQQGQNQLYNELNLGRREEYDVLDKRRGRDPEMGGKPQRRKNPQEGLYNELQKDKMAEAYSEIGMKGERRRGKGHDGLYQGLSTATKDTYDALHMQALPPR

SEQ ID NO: 30993 - protein, 198 aa, synthetic construct
LVEKSFETDTNLNFQNLSVIGFRILLLKVAGFNLLMTLRLWSSKRGRKKLLYIFKQPFMRPVQTTQEEDGCSCRFPEEEEGGCELRVKFSRSADAPAYQQGQNQLYNELNLGRREEYDVLDKRRGRDPEMGGKPQRRKNPQEGLYNELQKDKMAEAYSEIGMKGERRRGKGHDGLYQGLSTATKDTYDALHMQALPPR

SEQ ID NO: 30994 - protein, 197 aa, synthetic construct
VEKSFETDTNLNFQNLSVIGFRILLLKVAGFNLLMTLRLWSSKRGRKKLLYIFKQPFMRPVQTTQEEDGCSCRFPEEEEGGCELRVKFSRSADAPAYQQGQNQLYNELNLGRREEYDVLDKRRGRDPEMGGKPQRRKNPQEGLYNELQKDKMAEAYSEIGMKGERRRGKGHDGLYQGLSTATKDTYDALHMQALPPR

SEQ ID NO: 30995 - protein, 196 aa, synthetic construct
EKSFETDTNLNFQNLSVIGFRILLLKVAGFNLLMTLRLWSSKRGRKKLLYIFKQPFMRPVQTTQEEDGCSCRFPEEEEGGCELRVKFSRSADAPAYQQGQNQLYNELNLGRREEYDVLDKRRGRDPEMGGKPQRRKNPQEGLYNELQKDKMAEAYSEIGMKGERRRGKGHDGLYQGLSTATKDTYDALHMQALPPR

SEQ ID NO: 30996 - protein, 195 aa, synthetic construct
KSFETDTNLNFQNLSVIGFRILLLKVAGFNLLMTLRLWSSKRGRKKLLYIFKQPFMRPVQTTQEEDGCSCRFPEEEEGGCELRVKFSRSADAPAYQQGQNQLYNELNLGRREEYDVLDKRRGRDPEMGGKPQRRKNPQEGLYNELQKDKMAEAYSEIGMKGERRRGKGHDGLYQGLSTATKDTYDALHMQALPPR

SEQ ID NO: 30997 - protein, 194 aa, synthetic construct
SFETDTNLNFQNLSVIGFRILLLKVAGFNLLMTLRLWSSKRGRKKLLYIFKQPFMRPVQTTQEEDGCSCRFPEEEEGGCELRVKFSRSADAPAYQQGQNQLYNELNLGRREEYDVLDKRRGRDPEMGGKPQRRKNPQEGLYNELQKDKMAEAYSEIGMKGERRRGKGHDGLYQGLSTATKDTYDALHMQALPPR

SEQ ID NO: 30998 - protein, 334 aa, synthetic construct; identical to SEQ ID NO: 30633

SEQ ID NO: 30999 - protein, 333 aa, synthetic construct
DLKNVFPPEVAVFEPSEAEISHTQKATLVCLATGFYPDHVELSWWVNGKEVHSGVCTDPQPLKEQPALNDSRYCLSSRLRVSATFWQNPRNHFRCQVQFYGLSENDEWTQDRAKPVTQIVSAEAWGRADCGFTSESYQQGVLSATILYEILLGKATLYAVLVSALVLMAMVKRKDSRGKRGRKKLLYIFKQPFMRPVQTTQEEDGCSCRFPEEEEGGCELRVKFSRSADAPAYQQGQNQLYNELNLGRREEYDVLDKRRGRDPEMGGKPQRRKNPQEGLYNELQKDKMAEAYSEIGMKGERRRGKGHDGLYQGLSTATKDTYDALHMQALPPR

SEQ ID NO: 31000 - protein, 332 aa, synthetic construct
LKNVFPPEVAVFEPSEAEISHTQKATLVCLATGFYPDHVELSWWVNGKEVHSGVCTDPQPLKEQPALNDSRYCLSSRLRVSATFWQNPRNHFRCQVQFYGLSENDEWTQDRAKPVTQIVSAEAWGRADCGFTSESYQQGVLSATILYEILLGKATLYAVLVSALVLMAMVKRKDSRGKRGRKKLLYIFKQPFMRPVQTTQEEDGCSCRFPEEEEGGCELRVKFSRSADAPAYQQGQNQLYNELNLGRREEYDVLDKRRGRDPEMGGKPQRRKNPQEGLYNELQKDKMAEAYSEIGMKGERRRGKGHDGLYQGLSTATKDTYDALHMQALPPR

SEQ ID NO: 31001 - protein, 331 aa, synthetic construct
KNVFPPEVAVFEPSEAEISHTQKATLVCLATGFYPDHVELSWWVNGKEVHSGVCTDPQPLKEQPALNDSRYCLSSRLRVSATFWQNPRNHFRCQVQFYGLSENDEWTQDRAKPVTQIVSAEAWGRADCGFTSESYQQGVLSATILYEILLGKATLYAVLVSALVLMAMVKRKDSRGKRGRKKLLYIFKQPFMRPVQTTQEEDGCSCRFPEEEEGGCELRVKFSRSADAPAYQQGQNQLYNELNLGRREEYDVLDKRRGRDPEMGGKPQRRKNPQEGLYNELQKDKMAEAYSEIGMKGERRRGKGHDGLYQGLSTATKDTYDALHMQALPPR

SEQ ID NO: 31002 - protein, 330 aa, synthetic construct
NVFPPEVAVFEPSEAEISHTQKATLVCLATGFYPDHVELSWWVNGKEVHSGVCTDPQPLKEQPALNDSRYCLSSRLRVSATFWQNPRNHFRCQVQFYGLSENDEWTQDRAKPVTQIVSAEAWGRADCGFTSESYQQGVLSATILYEILLGKATLYAVLVSALVLMAMVKRKDSRGKRGRKKLLYIFKQPFMRPVQTTQEEDGCSCRFPEEEEGGCELRVKFSRSADAPAYQQGQNQLYNELNLGRREEYDVLDKRRGRDPEMGGKPQRRKNPQEGLYNELQKDKMAEAYSEIGMKGERRRGKGHDGLYQGLSTATKDTYDALHMQALPPR

SEQ ID NO: 31003 - protein, 329 aa, synthetic construct
VFPPEVAVFEPSEAEISHTQKATLVCLATGFYPDHVELSWWVNGKEVHSGVCTDPQPLKEQPALNDSRYCLSSRLRVSATFWQNPRNHFRCQVQFYGLSENDEWTQDRAKPVTQIVSAEAWGRADCGFTSESYQQGVLSATILYEILLGKATLYAVLVSALVLMAMVKRKDSRGKRGRKKLLYIFKQPFMRPVQTTQEEDGCSCRFPEEEEGGCELRVKFSRSADAPAYQQGQNQLYNELNLGRREEYDVLDKRRGRDPEMGGKPQRRKNPQEGLYNELQKDKMAEAYSEIGMKGERRRGKGHDGLYQGLSTATKDTYDALHMQALPPR

SEQ ID NO: 31004 - protein, 328 aa, synthetic construct
FPPEVAVFEPSEAEISHTQKATLVCLATGFYPDHVELSWWVNGKEVHSGVCTDPQPLKEQPALNDSRYCLSSRLRVSATFWQNPRNHFRCQVQFYGLSENDEWTQDRAKPVTQIVSAEAWGRADCGFTSESYQQGVLSATILYEILLGKATLYAVLVSALVLMAMVKRKDSRGKRGRKKLLYIFKQPFMRPVQTTQEEDGCSCRFPEEEEGGCELRVKFSRSADAPAYQQGQNQLYNELNLGRREEYDVLDKRRGRDPEMGGKPQRRKNPQEGLYNELQKDKMAEAYSEIGMKGERRRGKGHDGLYQGLSTATKDTYDALHMQALPPR

SEQ ID NO: 31005 - protein, 327 aa, synthetic construct
PPEVAVFEPSEAEISHTQKATLVCLATGFYPDHVELSWWVNGKEVHSGVCTDPQPLKEQPALNDSRYCLSSRLRVSATFWQNPRNHFRCQVQFYGLSENDEWTQDRAKPVTQIVSAEAWGRADCGFTSESYQQGVLSATILYEILLGKATLYAVLVSALVLMAMVKRKDSRGKRGRKKLLYIFKQPFMRPVQTTQEEDGCSCRFPEEEEGGCELRVKFSRSADAPAYQQGQNQLYNELNLGRREEYDVLDKRRGRDPEMGGKPQRRKNPQEGLYNELQKDKMAEAYSEIGMKGERRRGKGHDGLYQGLSTATKDTYDALHMQALPPR

SEQ ID NO: 31006 - protein, 326 aa, synthetic construct
PEVAVFEPSEAEISHTQKATLVCLATGFYPDHVELSWWVNGKEVHSGVCTDPQPLKEQPALNDSRYCLSSRLRVSATFWQNPRNHFRCQVQFYGLSENDEWTQDRAKPVTQIVSAEAWGRADCGFTSESYQQGVLSATILYEILLGKATLYAVLVSALVLMAMVKRKDSRGKRGRKKLLYIFKQPFMRPVQTTQEEDGCSCRFPEEEEGGCELRVKFSRSADAPAYQQGQNQLYNELNLGRREEYDVLDKRRGRDPEMGGKPQRRKNPQEGLYNELQKDKMAEAYSEIGMKGERRRGKGHDGLYQGLSTATKDTYDALHMQALPPR

SEQ ID NO: 31007 - protein, 325 aa, synthetic construct
EVAVFEPSEAEISHTQKATLVCLATGFYPDHVELSWWVNGKEVHSGVCTDPQPLKEQPALNDSRYCLSSRLRVSATFWQNPRNHFRCQVQFYGLSENDEWTQDRAKPVTQIVSAEAWGRADCGFTSESYQQGVLSATILYEILLGKATLYAVLVSALVLMAMVKRKDSRGKRGRKKLLYIFKQPFMRPVQTTQEEDGCSCRFPEEEEGGCELRVKFSRSADAPAYQQGQNQLYNELNLGRREEYDVLDKRRGRDPEMGGKPQRRKNPQEGLYNELQKDKMAEAYSEIGMKGERRRGKGHDGLYQGLSTATKDTYDALHMQALPPR

SEQ ID NO: 31008 - protein, 324 aa, synthetic construct
VAVFEPSEAEISHTQKATLVCLATGFYPDHVELSWWVNGKEVHSGVCTDPQPLKEQPALNDSRYCLSSRLRVSATFWQNPRNHFRCQVQFYGLSENDEWTQDRAKPVTQIVSAEAWGRADCGFTSESYQQGVLSATILYEILLGKATLYAVLVSALVLMAMVKRKDSRGKRGRKKLLYIFKQPFMRPVQTTQEEDGCSCRFPEEEEGGCELRVKFSRSADAPAYQQGQNQLYNELNLGRREEYDVLDKRRGRDPEMGGKPQRRKNPQEGLYNELQKDKMAEAYSEIGMKGERRRGKGHDGLYQGLSTATKDTYDALHMQALPPR

SEQ ID NO: 31009 - protein, 323 aa, synthetic construct
AVFEPSEAEISHTQKATLVCLATGFYPDHVELSWWVNGKEVHSGVCTDPQPLKEQPALNDSRYCLSSRLRVSATFWQNPRNHFRCQVQFYGLSENDEWTQDRAKPVTQIVSAEAWGRADCGFTSESYQQGVLSATILYEILLGKATLYAVLVSALVLMAMVKRKDSRGKRGRKKLLYIFKQPFMRPVQTTQEEDGCSCRFPEEEEGGCELRVKFSRSADAPAYQQGQNQLYNELNLGRREEYDVLDKRRGRDPEMGGKPQRRKNPQEGLYNELQKDKMAEAYSEIGMKGERRRGKGHDGLYQGLSTATKDTYDALHMQALPPR

SEQ ID NO: 31010 - protein, 322 aa, synthetic construct
VFEPSEAEISHTQKATLVCLATGFYPDHVELSWWVNGKEVHSGVCTDPQPLKEQPALNDSRYCLSSRLRVSATFWQNPRNHFRCQVQFYGLSENDEWTQDRAKPVTQIVSAEAWGRADCGFTSESYQQGVLSATILYEILLGKATLYAVLVSALVLMAMVKRKDSRGKRGRKKLLYIFKQPFMRPVQTTQEEDGCSCRFPEEEEGGCELRVKFSRSADAPAYQQGQNQLYNELNLGRREEYDVLDKRRGRDPEMGGKPQRRKNPQEGLYNELQKDKMAEAYSEIGMKGERRRGKGHDGLYQGLSTATKDTYDALHMQALPPR

SEQ ID NO: 31011 - protein, 321 aa, synthetic construct
FEPSEAEISHTQKATLVCLATGFYPDHVELSWWVNGKEVHSGVCTDPQPLKEQPALNDSRYCLSSRLRVSATFWQNPRNHFRCQVQFYGLSENDEWTQDRAKPVTQIVSAEAWGRADCGFTSESYQQGVLSATILYEILLGKATLYAVLVSALVLMAMVKRKDSRGKRGRKKLLYIFKQPFMRPVQTTQEEDGCSCRFPEEEEGGCELRVKFSRSADAPAYQQGQNQLYNELNLGRREEYDVLDKRRGRDPEMGGKPQRRKNPQEGLYNELQKDKMAEAYSEIGMKGERRRGKGHDGLYQGLSTATKDTYDALHMQALPPR

SEQ ID NO: 31012 - protein, 320 aa, synthetic construct
EPSEAEISHTQKATLVCLATGFYPDHVELSWWVNGKEVHSGVCTDPQPLKEQPALNDSRYCLSSRLRVSATFWQNPRNHFRCQVQFYGLSENDEWTQDRAKPVTQIVSAEAWGRADCGFTSESYQQGVLSATILYEILLGKATLYAVLVSALVLMAMVKRKDSRGKRGRKKLLYIFKQPFMRPVQTTQEEDGCSCRFPEEEEGGCELRVKFSRSADAPAYQQGQNQLYNELNLGRREEYDVLDKRRGRDPEMGGKPQRRKNPQEGLYNELQKDKMAEAYSEIGMKGERRRGKGHDGLYQGLSTATKDTYDALHMQALPPR

SEQ ID NO: 31013 - protein, 319 aa, synthetic construct
PSEAEISHTQKATLVCLATGFYPDHVELSWWVNGKEVHSGVCTDPQPLKEQPALNDSRYCLSSRLRVSATFWQNPRNHFRCQVQFYGLSENDEWTQDRAKPVTQIVSAEAWGRADCGFTSESYQQGVLSATILYEILLGKATLYAVLVSALVLMAMVKRKDSRGKRGRKKLLYIFKQPFMRPVQTTQEEDGCSCRFPEEEEGGCELRVKFSRSADAPAYQQGQNQLYNELNLGRREEYDVLDKRRGRDPEMGGKPQRRKNPQEGLYNELQKDKMAEAYSEIGMKGERRRGKGHDGLYQGLSTATKDTYDALHMQALPPR

SEQ ID NO: 31014 - protein, 318 aa, synthetic construct
SEAEISHTQKATLVCLATGFYPDHVELSWWVNGKEVHSGVCTDPQPLKEQPALNDSRYCLSSRLRVSATFWQNPRNHFRCQVQFYGLSENDEWTQDRAKPVTQIVSAEAWGRADCGFTSESYQQGVLSATILYEILLGKATLYAVLVSALVLMAMVKRKDSRGKRGRKKLLYIFKQPFMRPVQTTQEEDGCSCRFPEEEEGGCELRVKFSRSADAPAYQQGQNQLYNELNLGRREEYDVLDKRRGRDPEMGGKPQRRKNPQEGLYNELQKDKMAEAYSEIGMKGERRRGKGHDGLYQGLSTATKDTYDALHMQALPPR

SEQ ID NO: 31015 - protein, 317 aa, synthetic construct
EAEISHTQKATLVCLATGFYPDHVELSWWVNGKEVHSGVCTDPQPLKEQPALNDSRYCLSSRLRVSATFWQNPRNHFRCQVQFYGLSENDEWTQDRAKPVTQIVSAEAWGRADCGFTSESYQQGVLSATILYEILLGKATLYAVLVSALVLMAMVKRKDSRGKRGRKKLLYIFKQPFMRPVQTTQEEDGCSCRFPEEEEGGCELRVKFSRSADAPAYQQGQNQLYNELNLGRREEYDVLDKRRGRDPEMGGKPQRRKNPQEGLYNELQKDKMAEAYSEIGMKGERRRGKGHDGLYQGLSTATKDTYDALHMQALPPR

SEQ ID NO: 31016 - protein, 316 aa, synthetic construct
AEISHTQKATLVCLATGFYPDHVELSWWVNGKEVHSGVCTDPQPLKEQPALNDSRYCLSSRLRVSATFWQNPRNHFRCQVQFYGLSENDEWTQDRAKPVTQIVSAEAWGRADCGFTSESYQQGVLSATILYEILLGKATLYAVLVSALVLMAMVKRKDSRGKRGRKKLLYIFKQPFMRPVQTTQEEDGCSCRFPEEEEGGCELRVKFSRSADAPAYQQGQNQLYNELNLGRREEYDVLDKRRGRDPEMGGKPQRRKNPQEGLYNELQKDKMAEAYSEIGMKGERRRGKGHDGLYQGLSTATKDTYDALHMQALPPR

SEQ ID NO: 31017 - protein, 315 aa, synthetic construct
EISHTQKATLVCLATGFYPDHVELSWWVNGKEVHSGVCTDPQPLKEQPALNDSRYCLSSRLRVSATFWQNPRNHFRCQVQFYGLSENDEWTQDRAKPVTQIVSAEAWGRADCGFTSESYQQGVLSATILYEILLGKATLYAVLVSALVLMAMVKRKDSRGKRGRKKLLYIFKQPFMRPVQTTQEEDGCSCRFPEEEEGGCELRVKFSRSADAPAYQQGQNQLYNELNLGRREEYDVLDKRRGRDPEMGGKPQRRKNPQEGLYNELQKDKMAEAYSEIGMKGERRRGKGHDGLYQGLSTATKDTYDALHMQALPPR

SEQ ID NO: 31018 - protein, 314 aa, synthetic construct
ISHTQKATLVCLATGFYPDHVELSWWVNGKEVHSGVCTDPQPLKEQPALNDSRYCLSSRLRVSATFWQNPRNHFRCQVQFYGLSENDEWTQDRAKPVTQIVSAEAWGRADCGFTSESYQQGVLSATILYEILLGKATLYAVLVSALVLMAMVKRKDSRGKRGRKKLLYIFKQPFMRPVQTTQEEDGCSCRFPEEEEGGCELRVKFSRSADAPAYQQGQNQLYNELNLGRREEYDVLDKRRGRDPEMGGKPQRRKNPQEGLYNELQKDKMAEAYSEIGMKGERRRGKGHDGLYQGLSTATKDTYDALHMQALPPR

SEQ ID NO: 31019 - protein, 313 aa, synthetic construct
SHTQKATLVCLATGFYPDHVELSWWVNGKEVHSGVCTDPQPLKEQPALNDSRYCLSSRLRVSATFWQNPRNHFRCQVQFYGLSENDEWTQDRAKPVTQIVSAEAWGRADCGFTSESYQQGVLSATILYEILLGKATLYAVLVSALVLMAMVKRKDSRGKRGRKKLLYIFKQPFMRPVQTTQEEDGCSCRFPEEEEGGCELRVKFSRSADAPAYQQGQNQLYNELNLGRREEYDVLDKRRGRDPEMGGKPQRRKNPQEGLYNELQKDKMAEAYSEIGMKGERRRGKGHDGLYQGLSTATKDTYDALHMQALPPR

SEQ ID NO: 31020 - protein, 312 aa, synthetic construct
HTQKATLVCLATGFYPDHVELSWWVNGKEVHSGVCTDPQPLKEQPALNDSRYCLSSRLRVSATFWQNPRNHFRCQVQFYGLSENDEWTQDRAKPVTQIVSAEAWGRADCGFTSESYQQGVLSATILYEILLGKATLYAVLVSALVLMAMVKRKDSRGKRGRKKLLYIFKQPFMRPVQTTQEEDGCSCRFPEEEEGGCELRVKFSRSADAPAYQQGQNQLYNELNLGRREEYDVLDKRRGRDPEMGGKPQRRKNPQEGLYNELQKDKMAEAYSEIGMKGERRRGKGHDGLYQGLSTATKDTYDALHMQALPPR

SEQ ID NO: 31021 - protein, 311 aa, synthetic construct
TQKATLVCLATGFYPDHVELSWWVNGKEVHSGVCTDPQPLKEQPALNDSRYCLSSRLRVSATFWQNPRNHFRCQVQFYGLSENDEWTQDRAKPVTQIVSAEAWGRADCGFTSESYQQGVLSATILYEILLGKATLYAVLVSALVLMAMVKRKDSRGKRGRKKLLYIFKQPFMRPVQTTQEEDGCSCRFPEEEEGGCELRVKFSRSADAPAYQQGQNQLYNELNLGRREEYDVLDKRRGRDPEMGGKPQRRKNPQEGLYNELQKDKMAEAYSEIGMKGERRRGKGHDGLYQGLSTATKDTYDALHMQALPPR

SEQ ID NO: 31022 - protein, 310 aa, synthetic construct
QKATLVCLATGFYPDHVELSWWVNGKEVHSGVCTDPQPLKEQPALNDSRYCLSSRLRVSATFWQNPRNHFRCQVQFYGLSENDEWTQDRAKPVTQIVSAEAWGRADCGFTSESYQQGVLSATILYEILLGKATLYAVLVSALVLMAMVKRKDSRGKRGRKKLLYIFKQPFMRPVQTTQEEDGCSCRFPEEEEGGCELRVKFSRSADAPAYQQGQNQLYNELNLGRREEYDVLDKRRGRDPEMGGKPQRRKNPQEGLYNELQKDKMAEAYSEIGMKGERRRGKGHDGLYQGLSTATKDTYDALHMQALPPR

SEQ ID NO: 31023 - protein, 309 aa, synthetic construct
KATLVCLATGFYPDHVELSWWVNGKEVHSGVCTDPQPLKEQPALNDSRYCLSSRLRVSATFWQNPRNHFRCQVQFYGLSENDEWTQDRAKPVTQIVSAEAWGRADCGFTSESYQQGVLSATILYEILLGKATLYAVLVSALVLMAMVKRKDSRGKRGRKKLLYIFKQPFMRPVQTTQEEDGCSCRFPEEEEGGCELRVKFSRSADAPAYQQGQNQLYNELNLGRREEYDVLDKRRGRDPEMGGKPQRRKNPQEGLYNELQKDKMAEAYSEIGMKGERRRGKGHDGLYQGLSTATKDTYDALHMQALPPR

SEQ ID NO: 31024 - protein, 308 aa, synthetic construct
ATLVCLATGFYPDHVELSWWVNGKEVHSGVCTDPQPLKEQPALNDSRYCLSSRLRVSATFWQNPRNHFRCQVQFYGLSENDEWTQDRAKPVTQIVSAEAWGRADCGFTSESYQQGVLSATILYEILLGKATLYAVLVSALVLMAMVKRKDSRGKRGRKKLLYIFKQPFMRPVQTTQEEDGCSCRFPEEEEGGCELRVKFSRSADAPAYQQGQNQLYNELNLGRREEYDVLDKRRGRDPEMGGKPQRRKNPQEGLYNELQKDKMAEAYSEIGMKGERRRGKGHDGLYQGLSTATKDTYDALHMQALPPR

SEQ ID NO: 31025 - protein, 307 aa, synthetic construct
TLVCLATGFYPDHVELSWWVNGKEVHSGVCTDPQPLKEQPALNDSRYCLSSRLRVSATFWQNPRNHFRCQVQFYGLSENDEWTQDRAKPVTQIVSAEAWGRADCGFTSESYQQGVLSATILYEILLGKATLYAVLVSALVLMAMVKRKDSRGKRGRKKLLYIFKQPFMRPVQTTQEEDGCSCRFPEEEEGGCELRVKFSRSADAPAYQQGQNQLYNELNLGRREEYDVLDKRRGRDPEMGGKPQRRKNPQEGLYNELQKDKMAEAYSEIGMKGERRRGKGHDGLYQGLSTATKDTYDALHMQALPPR

SEQ ID NO: 31026 - protein, 306 aa, synthetic construct
LVCLATGFYPDHVELSWWVNGKEVHSGVCTDPQPLKEQPALNDSRYCLSSRLRVSATFWQNPRNHFRCQVQFYGLSENDEWTQDRAKPVTQIVSAEAWGRADCGFTSESYQQGVLSATILYEILLGKATLYAVLVSALVLMAMVKRKDSRGKRGRKKLLYIFKQPFMRPVQTTQEEDGCSCRFPEEEEGGCELRVKFSRSADAPAYQQGQNQLYNELNLGRREEYDVLDKRRGRDPEMGGKPQRRKNPQEGLYNELQKDKMAEAYSEIGMKGERRRGKGHDGLYQGLSTATKDTYDALHMQALPPR

SEQ ID NO: 31027 - protein, 305 aa, synthetic construct
VCLATGFYPDHVELSWWVNGKEVHSGVCTDPQPLKEQPALNDSRYCLSSRLRVSATFWQNPRNHFRCQVQFYGLSENDEWTQDRAKPVTQIVSAEAWGRADCGFTSESYQQGVLSATILYEILLGKATLYAVLVSALVLMAMVKRKDSRGKRGRKKLLYIFKQPFMRPVQTTQEEDGCSCRFPEEEEGGCELRVKFSRSADAPAYQQGQNQLYNELNLGRREEYDVLDKRRGRDPEMGGKPQRRKNPQEGLYNELQKDKMAEAYSEIGMKGERRRGKGHDGLYQGLSTATKDTYDALHMQALPPR

SEQ ID NO: 31028 - protein, 304 aa, synthetic construct
CLATGFYPDHVELSWWVNGKEVHSGVCTDPQPLKEQPALNDSRYCLSSRLRVSATFWQNPRNHFRCQVQFYGLSENDEWTQDRAKPVTQIVSAEAWGRADCGFTSESYQQGVLSATILYEILLGKATLYAVLVSALVLMAMVKRKDSRGKRGRKKLLYIFKQPFMRPVQTTQEEDGCSCRFPEEEEGGCELRVKFSRSADAPAYQQGQNQLYNELNLGRREEYDVLDKRRGRDPEMGGKPQRRKNPQEGLYNELQKDKMAEAYSEIGMKGERRRGKGHDGLYQGLSTATKDTYDALHMQALPPR

SEQ ID NO: 31029 - protein, 303 aa, synthetic construct
LATGFYPDHVELSWWVNGKEVHSGVCTDPQPLKEQPALNDSRYCLSSRLRVSATFWQNPRNHFRCQVQFYGLSENDEWTQDRAKPVTQIVSAEAWGRADCGFTSESYQQGVLSATILYEILLGKATLYAVLVSALVLMAMVKRKDSRGKRGRKKLLYIFKQPFMRPVQTTQEEDGCSCRFPEEEEGGCELRVKFSRSADAPAYQQGQNQLYNELNLGRREEYDVLDKRRGRDPEMGGKPQRRKNPQEGLYNELQKDKMAEAYSEIGMKGERRRGKGHDGLYQGLSTATKDTYDALHMQALPPR

SEQ ID NO: 31030 - protein, 302 aa, synthetic construct
ATGFYPDHVELSWWVNGKEVHSGVCTDPQPLKEQPALNDSRYCLSSRLRVSATFWQNPRNHFRCQVQFYGLSENDEWTQDRAKPVTQIVSAEAWGRADCGFTSESYQQGVLSATILYEILLGKATLYAVLVSALVLMAMVKRKDSRGKRGRKKLLYIFKQPFMRPVQTTQEEDGCSCRFPEEEEGGCELRVKFSRSADAPAYQQGQNQLYNELNLGRREEYDVLDKRRGRDPEMGGKPQRRKNPQEGLYNELQKDKMAEAYSEIGMKGERRRGKGHDGLYQGLSTATKDTYDALHMQALPPR

SEQ ID NO: 31031 - protein, 301 aa, synthetic construct
TGFYPDHVELSWWVNGKEVHSGVCTDPQPLKEQPALNDSRYCLSSRLRVSATFWQNPRNHFRCQVQFYGLSENDEWTQDRAKPVTQIVSAEAWGRADCGFTSESYQQGVLSATILYEILLGKATLYAVLVSALVLMAMVKRKDSRGKRGRKKLLYIFKQPFMRPVQTTQEEDGCSCRFPEEEEGGCELRVKFSRSADAPAYQQGQNQLYNELNLGRREEYDVLDKRRGRDPEMGGKPQRRKNPQEGLYNELQKDKMAEAYSEIGMKGERRRGKGHDGLYQGLSTATKDTYDALHMQALPPR

SEQ ID NO: 31032 - protein, 300 aa, synthetic construct
GFYPDHVELSWWVNGKEVHSGVCTDPQPLKEQPALNDSRYCLSSRLRVSATFWQNPRNHFRCQVQFYGLSENDEWTQDRAKPVTQIVSAEAWGRADCGFTSESYQQGVLSATILYEILLGKATLYAVLVSALVLMAMVKRKDSRGKRGRKKLLYIFKQPFMRPVQTTQEEDGCSCRFPEEEEGGCELRVKFSRSADAPAYQQGQNQLYNELNLGRREEYDVLDKRRGRDPEMGGKPQRRKNPQEGLYNELQKDKMAEAYSEIGMKGERRRGKGHDGLYQGLSTATKDTYDALHMQALPPR

SEQ ID NO: 31033 - protein, 299 aa, synthetic construct
FYPDHVELSWWVNGKEVHSGVCTDPQPLKEQPALNDSRYCLSSRLRVSATFWQNPRNHFRCQVQFYGLSENDEWTQDRAKPVTQIVSAEAWGRADCGFTSESYQQGVLSATILYEILLGKATLYAVLVSALVLMAMVKRKDSRGKRGRKKLLYIFKQPFMRPVQTTQEEDGCSCRFPEEEEGGCELRVKFSRSADAPAYQQGQNQLYNELNLGRREEYDVLDKRRGRDPEMGGKPQRRKNPQEGLYNELQKDKMAEAYSEIGMKGERRRGKGHDGLYQGLSTATKDTYDALHMQALPPR

SEQ ID NO: 31034 - protein, 298 aa, synthetic construct
YPDHVELSWWVNGKEVHSGVCTDPQPLKEQPALNDSRYCLSSRLRVSATFWQNPRNHFRCQVQFYGLSENDEWTQDRAKPVTQIVSAEAWGRADCGFTSESYQQGVLSATILYEILLGKATLYAVLVSALVLMAMVKRKDSRGKRGRKKLLYIFKQPFMRPVQTTQEEDGCSCRFPEEEEGGCELRVKFSRSADAPAYQQGQNQLYNELNLGRREEYDVLDKRRGRDPEMGGKPQRRKNPQEGLYNELQKDKMAEAYSEIGMKGERRRGKGHDGLYQGLSTATKDTYDALHMQALPPR

SEQ ID NO: 31035 - protein, 297 aa, synthetic construct
PDHVELSWWVNGKEVHSGVCTDPQPLKEQPALNDSRYCLSSRLRVSATFWQNPRNHFRCQVQFYGLSENDEWTQDRAKPVTQIVSAEAWGRADCGFTSESYQQGVLSATILYEILLGKATLYAVLVSALVLMAMVKRKDSRGKRGRKKLLYIFKQPFMRPVQTTQEEDGCSCRFPEEEEGGCELRVKFSRSADAPAYQQGQNQLYNELNLGRREEYDVLDKRRGRDPEMGGKPQRRKNPQEGLYNELQKDKMAEAYSEIGMKGERRRGKGHDGLYQGLSTATKDTYDALHMQALPPR

SEQ ID NO: 31036 - protein, 296 aa, synthetic construct
DHVELSWWVNGKEVHSGVCTDPQPLKEQPALNDSRYCLSSRLRVSATFWQNPRNHFRCQVQFYGLSENDEWTQDRAKPVTQIVSAEAWGRADCGFTSESYQQGVLSATILYEILLGKATLYAVLVSALVLMAMVKRKDSRGKRGRKKLLYIFKQPFMRPVQTTQEEDGCSCRFPEEEEGGCELRVKFSRSADAPAYQQGQNQLYNELNLGRREEYDVLDKRRGRDPEMGGKPQRRKNPQEGLYNELQKDKMAEAYSEIGMKGERRRGKGHDGLYQGLSTATKDTYDALHMQALPPR

SEQ ID NO: 31037 - protein, 295 aa, synthetic construct
HVELSWWVNGKEVHSGVCTDPQPLKEQPALNDSRYCLSSRLRVSATFWQNPRNHFRCQVQFYGLSENDEWTQDRAKPVTQIVSAEAWGRADCGFTSESYQQGVLSATILYEILLGKATLYAVLVSALVLMAMVKRKDSRGKRGRKKLLYIFKQPFMRPVQTTQEEDGCSCRFPEEEEGGCELRVKFSRSADAPAYQQGQNQLYNELNLGRREEYDVLDKRRGRDPEMGGKPQRRKNPQEGLYNELQKDKMAEAYSEIGMKGERRRGKGHDGLYQGLSTATKDTYDALHMQALPPR

SEQ ID NO: 31038 - protein, 294 aa, synthetic construct
VELSWWVNGKEVHSGVCTDPQPLKEQPALNDSRYCLSSRLRVSATFWQNPRNHFRCQVQFYGLSENDEWTQDRAKPVTQIVSAEAWGRADCGFTSESYQQGVLSATILYEILLGKATLYAVLVSALVLMAMVKRKDSRGKRGRKKLLYIFKQPFMRPVQTTQEEDGCSCRFPEEEEGGCELRVKFSRSADAPAYQQGQNQLYNELNLGRREEYDVLDKRRGRDPEMGGKPQRRKNPQEGLYNELQKDKMAEAYSEIGMKGERRRGKGHDGLYQGLSTATKDTYDALHMQALPPR

SEQ ID NO: 31039 - protein, 293 aa, synthetic construct
ELSWWVNGKEVHSGVCTDPQPLKEQPALNDSRYCLSSRLRVSATFWQNPRNHFRCQVQFYGLSENDEWTQDRAKPVTQIVSAEAWGRADCGFTSESYQQGVLSATILYEILLGKATLYAVLVSALVLMAMVKRKDSRGKRGRKKLLYIFKQPFMRPVQTTQEEDGCSCRFPEEEEGGCELRVKFSRSADAPAYQQGQNQLYNELNLGRREEYDVLDKRRGRDPEMGGKPQRRKNPQEGLYNELQKDKMAEAYSEIGMKGERRRGKGHDGLYQGLSTATKDTYDALHMQALPPR

SEQ ID NO: 31040 - protein, 292 aa, synthetic construct
LSWWVNGKEVHSGVCTDPQPLKEQPALNDSRYCLSSRLRVSATFWQNPRNHFRCQVQFYGLSENDEWTQDRAKPVTQIVSAEAWGRADCGFTSESYQQGVLSATILYEILLGKATLYAVLVSALVLMAMVKRKDSRGKRGRKKLLYIFKQPFMRPVQTTQEEDGCSCRFPEEEEGGCELRVKFSRSADAPAYQQGQNQLYNELNLGRREEYDVLDKRRGRDPEMGGKPQRRKNPQEGLYNELQKDKMAEAYSEIGMKGERRRGKGHDGLYQGLSTATKDTYDALHMQALPPR

SEQ ID NO: 31041 - protein, 291 aa, synthetic construct
SWWVNGKEVHSGVCTDPQPLKEQPALNDSRYCLSSRLRVSATFWQNPRNHFRCQVQFYGLSENDEWTQDRAKPVTQIVSAEAWGRADCGFTSESYQQGVLSATILYEILLGKATLYAVLVSALVLMAMVKRKDSRGKRGRKKLLYIFKQPFMRPVQTTQEEDGCSCRFPEEEEGGCELRVKFSRSADAPAYQQGQNQLYNELNLGRREEYDVLDKRRGRDPEMGGKPQRRKNPQEGLYNELQKDKMAEAYSEIGMKGERRRGKGHDGLYQGLSTATKDTYDALHMQALPPR

SEQ ID NO: 31042 - protein, 290 aa, synthetic construct
WWVNGKEVHSGVCTDPQPLKEQPALNDSRYCLSSRLRVSATFWQNPRNHFRCQVQFYGLSENDEWTQDRAKPVTQIVSAEAWGRADCGFTSESYQQGVLSATILYEILLGKATLYAVLVSALVLMAMVKRKDSRGKRGRKKLLYIFKQPFMRPVQTTQEEDGCSCRFPEEEEGGCELRVKFSRSADAPAYQQGQNQLYNELNLGRREEYDVLDKRRGRDPEMGGKPQRRKNPQEGLYNELQKDKMAEAYSEIGMKGERRRGKGHDGLYQGLSTATKDTYDALHMQALPPR

SEQ ID NO: 31043 - protein, 289 aa, synthetic construct
WVNGKEVHSGVCTDPQPLKEQPALNDSRYCLSSRLRVSATFWQNPRNHFRCQVQFYGLSENDEWTQDRAKPVTQIVSAEAWGRADCGFTSESYQQGVLSATILYEILLGKATLYAVLVSALVLMAMVKRKDSRGKRGRKKLLYIFKQPFMRPVQTTQEEDGCSCRFPEEEEGGCELRVKFSRSADAPAYQQGQNQLYNELNLGRREEYDVLDKRRGRDPEMGGKPQRRKNPQEGLYNELQKDKMAEAYSEIGMKGERRRGKGHDGLYQGLSTATKDTYDALHMQALPPR

SEQ ID NO: 31044 - protein, 288 aa, synthetic construct
VNGKEVHSGVCTDPQPLKEQPALNDSRYCLSSRLRVSATFWQNPRNHFRCQVQFYGLSENDEWTQDRAKPVTQIVSAEAWGRADCGFTSESYQQGVLSATILYEILLGKATLYAVLVSALVLMAMVKRKDSRGKRGRKKLLYIFKQPFMRPVQTTQEEDGCSCRFPEEEEGGCELRVKFSRSADAPAYQQGQNQLYNELNLGRREEYDVLDKRRGRDPEMGGKPQRRKNPQEGLYNELQKDKMAEAYSEIGMKGERRRGKGHDGLYQGLSTATKDTYDALHMQALPPR

SEQ ID NO: 31045 - protein, 287 aa, synthetic construct
NGKEVHSGVCTDPQPLKEQPALNDSRYCLSSRLRVSATFWQNPRNHFRCQVQFYGLSENDEWTQDRAKPVTQIVSAEAWGRADCGFTSESYQQGVLSATILYEILLGKATLYAVLVSALVLMAMVKRKDSRGKRGRKKLLYIFKQPFMRPVQTTQEEDGCSCRFPEEEEGGCELRVKFSRSADAPAYQQGQNQLYNELNLGRREEYDVLDKRRGRDPEMGGKPQRRKNPQEGLYNELQKDKMAEAYSEIGMKGERRRGKGHDGLYQGLSTATKDTYDALHMQALPPR

SEQ ID NO: 31046 - protein, 286 aa, synthetic construct
GKEVHSGVCTDPQPLKEQPALNDSRYCLSSRLRVSATFWQNPRNHFRCQVQFYGLSENDEWTQDRAKPVTQIVSAEAWGRADCGFTSESYQQGVLSATILYEILLGKATLYAVLVSALVLMAMVKRKDSRGKRGRKKLLYIFKQPFMRPVQTTQEEDGCSCRFPEEEEGGCELRVKFSRSADAPAYQQGQNQLYNELNLGRREEYDVLDKRRGRDPEMGGKPQRRKNPQEGLYNELQKDKMAEAYSEIGMKGERRRGKGHDGLYQGLSTATKDTYDALHMQALPPR

SEQ ID NO: 31047 - protein, 285 aa, synthetic construct
KEVHSGVCTDPQPLKEQPALNDSRYCLSSRLRVSATFWQNPRNHFRCQVQFYGLSENDEWTQDRAKPVTQIVSAEAWGRADCGFTSESYQQGVLSATILYEILLGKATLYAVLVSALVLMAMVKRKDSRGKRGRKKLLYIFKQPFMRPVQTTQEEDGCSCRFPEEEEGGCELRVKFSRSADAPAYQQGQNQLYNELNLGRREEYDVLDKRRGRDPEMGGKPQRRKNPQEGLYNELQKDKMAEAYSEIGMKGERRRGKGHDGLYQGLSTATKDTYDALHMQALPPR

SEQ ID NO: 31048 - protein, 284 aa, synthetic construct
EVHSGVCTDPQPLKEQPALNDSRYCLSSRLRVSATFWQNPRNHFRCQVQFYGLSENDEWTQDRAKPVTQIVSAEAWGRADCGFTSESYQQGVLSATILYEILLGKATLYAVLVSALVLMAMVKRKDSRGKRGRKKLLYIFKQPFMRPVQTTQEEDGCSCRFPEEEEGGCELRVKFSRSADAPAYQQGQNQLYNELNLGRREEYDVLDKRRGRDPEMGGKPQRRKNPQEGLYNELQKDKMAEAYSEIGMKGERRRGKGHDGLYQGLSTATKDTYDALHMQALPPR

SEQ ID NO: 31049 - protein, 283 aa, synthetic construct
VHSGVCTDPQPLKEQPALNDSRYCLSSRLRVSATFWQNPRNHFRCQVQFYGLSENDEWTQDRAKPVTQIVSAEAWGRADCGFTSESYQQGVLSATILYEILLGKATLYAVLVSALVLMAMVKRKDSRGKRGRKKLLYIFKQPFMRPVQTTQEEDGCSCRFPEEEEGGCELRVKFSRSADAPAYQQGQNQLYNELNLGRREEYDVLDKRRGRDPEMGGKPQRRKNPQEGLYNELQKDKMAEAYSEIGMKGERRRGKGHDGLYQGLSTATKDTYDALHMQALPPR

SEQ ID NO: 31050 - protein, 282 aa, synthetic construct
HSGVCTDPQPLKEQPALNDSRYCLSSRLRVSATFWQNPRNHFRCQVQFYGLSENDEWTQDRAKPVTQIVSAEAWGRADCGFTSESYQQGVLSATILYEILLGKATLYAVLVSALVLMAMVKRKDSRGKRGRKKLLYIFKQPFMRPVQTTQEEDGCSCRFPEEEEGGCELRVKFSRSADAPAYQQGQNQLYNELNLGRREEYDVLDKRRGRDPEMGGKPQRRKNPQEGLYNELQKDKMAEAYSEIGMKGERRRGKGHDGLYQGLSTATKDTYDALHMQALPPR

SEQ ID NO: 31051 - protein, 281 aa, synthetic construct
SGVCTDPQPLKEQPALNDSRYCLSSRLRVSATFWQNPRNHFRCQVQFYGLSENDEWTQDRAKPVTQIVSAEAWGRADCGFTSESYQQGVLSATILYEILLGKATLYAVLVSALVLMAMVKRKDSRGKRGRKKLLYIFKQPFMRPVQTTQEEDGCSCRFPEEEEGGCELRVKFSRSADAPAYQQGQNQLYNELNLGRREEYDVLDKRRGRDPEMGGKPQRRKNPQEGLYNELQKDKMAEAYSEIGMKGERRRGKGHDGLYQGLSTATKDTYDALHMQALPPR

SEQ ID NO: 31052 - protein, 280 aa, synthetic construct
GVCTDPQPLKEQPALNDSRYCLSSRLRVSATFWQNPRNHFRCQVQFYGLSENDEWTQDRAKPVTQIVSAEAWGRADCGFTSESYQQGVLSATILYEILLGKATLYAVLVSALVLMAMVKRKDSRGKRGRKKLLYIFKQPFMRPVQTTQEEDGCSCRFPEEEEGGCELRVKFSRSADAPAYQQGQNQLYNELNLGRREEYDVLDKRRGRDPEMGGKPQRRKNPQEGLYNELQKDKMAEAYSEIGMKGERRRGKGHDGLYQGLSTATKDTYDALHMQALPPR

SEQ ID NO: 31053 - protein, 279 aa, synthetic construct
VCTDPQPLKEQPALNDSRYCLSSRLRVSATFWQNPRNHFRCQVQFYGLSENDEWTQDRAKPVTQIVSAEAWGRADCGFTSESYQQGVLSATILYEILLGKATLYAVLVSALVLMAMVKRKDSRGKRGRKKLLYIFKQPFMRPVQTTQEEDGCSCRFPEEEEGGCELRVKFSRSADAPAYQQGQNQLYNELNLGRREEYDVLDKRRGRDPEMGGKPQRRKNPQEGLYNELQKDKMAEAYSEIGMKGERRRGKGHDGLYQGLSTATKDTYDALHMQALPPR

SEQ ID NO: 31054 - protein, 278 aa, synthetic construct
CTDPQPLKEQPALNDSRYCLSSRLRVSATFWQNPRNHFRCQVQFYGLSENDEWTQDRAKPVTQIVSAEAWGRADCGFTSESYQQGVLSATILYEILLGKATLYAVLVSALVLMAMVKRKDSRGKRGRKKLLYIFKQPFMRPVQTTQEEDGCSCRFPEEEEGGCELRVKFSRSADAPAYQQGQNQLYNELNLGRREEYDVLDKRRGRDPEMGGKPQRRKNPQEGLYNELQKDKMAEAYSEIGMKGERRRGKGHDGLYQGLSTATKDTYDALHMQALPPR

SEQ ID NO: 31055 - protein, 277 aa, synthetic construct
TDPQPLKEQPALNDSRYCLSSRLRVSATFWQNPRNHFRCQVQFYGLSENDEWTQDRAKPVTQIVSAEAWGRADCGFTSESYQQGVLSATILYEILLGKATLYAVLVSALVLMAMVKRKDSRGKRGRKKLLYIFKQPFMRPVQTTQEEDGCSCRFPEEEEGGCELRVKFSRSADAPAYQQGQNQLYNELNLGRREEYDVLDKRRGRDPEMGGKPQRRKNPQEGLYNELQKDKMAEAYSEIGMKGERRRGKGHDGLYQGLSTATKDTYDALHMQALPPR

SEQ ID NO: 31056 - protein, 276 aa, synthetic construct
DPQPLKEQPALNDSRYCLSSRLRVSATFWQNPRNHFRCQVQFYGLSENDEWTQDRAKPVTQIVSAEAWGRADCGFTSESYQQGVLSATILYEILLGKATLYAVLVSALVLMAMVKRKDSRGKRGRKKLLYIFKQPFMRPVQTTQEEDGCSCRFPEEEEGGCELRVKFSRSADAPAYQQGQNQLYNELNLGRREEYDVLDKRRGRDPEMGGKPQRRKNPQEGLYNELQKDKMAEAYSEIGMKGERRRGKGHDGLYQGLSTATKDTYDALHMQALPPR

SEQ ID NO: 31057 - protein, 275 aa, synthetic construct
PQPLKEQPALNDSRYCLSSRLRVSATFWQNPRNHFRCQVQFYGLSENDEWTQDRAKPVTQIVSAEAWGRADCGFTSESYQQGVLSATILYEILLGKATLYAVLVSALVLMAMVKRKDSRGKRGRKKLLYIFKQPFMRPVQTTQEEDGCSCRFPEEEEGGCELRVKFSRSADAPAYQQGQNQLYNELNLGRREEYDVLDKRRGRDPEMGGKPQRRKNPQEGLYNELQKDKMAEAYSEIGMKGERRRGKGHDGLYQGLSTATKDTYDALHMQALPPR

SEQ ID NO: 31058 - protein, 274 aa, synthetic construct
QPLKEQPALNDSRYCLSSRLRVSATFWQNPRNHFRCQVQFYGLSENDEWTQDRAKPVTQIVSAEAWGRADCGFTSESYQQGVLSATILYEILLGKATLYAVLVSALVLMAMVKRKDSRGKRGRKKLLYIFKQPFMRPVQTTQEEDGCSCRFPEEEEGGCELRVKFSRSADAPAYQQGQNQLYNELNLGRREEYDVLDKRRGRDPEMGGKPQRRKNPQEGLYNELQKDKMAEAYSEIGMKGERRRGKGHDGLYQGLSTATKDTYDALHMQALPPR

SEQ ID NO: 31059 - protein, 273 aa, synthetic construct
PLKEQPALNDSRYCLSSRLRVSATFWQNPRNHFRCQVQFYGLSENDEWTQDRAKPVTQIVSAEAWGRADCGFTSESYQQGVLSATILYEILLGKATLYAVLVSALVLMAMVKRKDSRGKRGRKKLLYIFKQPFMRPVQTTQEEDGCSCRFPEEEEGGCELRVKFSRSADAPAYQQGQNQLYNELNLGRREEYDVLDKRRGRDPEMGGKPQRRKNPQEGLYNELQKDKMAEAYSEIGMKGERRRGKGHDGLYQGLSTATKDTYDALHMQALPPR

SEQ ID NO: 31060 - protein, 272 aa, synthetic construct
LKEQPALNDSRYCLSSRLRVSATFWQNPRNHFRCQVQFYGLSENDEWTQDRAKPVTQIVSAEAWGRADCGFTSESYQQGVLSATILYEILLGKATLYAVLVSALVLMAMVKRKDSRGKRGRKKLLYIFKQPFMRPVQTTQEEDGCSCRFPEEEEGGCELRVKFSRSADAPAYQQGQNQLYNELNLGRREEYDVLDKRRGRDPEMGGKPQRRKNPQEGLYNELQKDKMAEAYSEIGMKGERRRGKGHDGLYQGLSTATKDTYDALHMQALPPR

SEQ ID NO: 31061 - protein, 271 aa, synthetic construct
KEQPALNDSRYCLSSRLRVSATFWQNPRNHFRCQVQFYGLSENDEWTQDRAKPVTQIVSAEAWGRADCGFTSESYQQGVLSATILYEILLGKATLYAVLVSALVLMAMVKRKDSRGKRGRKKLLYIFKQPFMRPVQTTQEEDGCSCRFPEEEEGGCELRVKFSRSADAPAYQQGQNQLYNELNLGRREEYDVLDKRRGRDPEMGGKPQRRKNPQEGLYNELQKDKMAEAYSEIGMKGERRRGKGHDGLYQGLSTATKDTYDALHMQALPPR

SEQ ID NO: 31062 - protein, 270 aa, synthetic construct; identical to SEQ ID NO: 30665

SEQ ID NO: 31063 - protein, 269 aa, synthetic construct
QPALNDSRYCLSSRLRVSATFWQNPRNHFRCQVQFYGLSENDEWTQDRAKPVTQIVSAEAWGRADCGFTSESYQQGVLSATILYEILLGKATLYAVLVSALVLMAMVKRKDSRGKRGRKKLLYIFKQPFMRPVQTTQEEDGCSCRFPEEEEGGCELRVKFSRSADAPAYQQGQNQLYNELNLGRREEYDVLDKRRGRDPEMGGKPQRRKNPQEGLYNELQKDKMAEAYSEIGMKGERRRGKGHDGLYQGLSTATKDTYDALHMQALPPR

SEQ ID NO: 31064 - protein, 268 aa, synthetic construct
PALNDSRYCLSSRLRVSATFWQNPRNHFRCQVQFYGLSENDEWTQDRAKPVTQIVSAEAWGRADCGFTSESYQQGVLSATILYEILLGKATLYAVLVSALVLMAMVKRKDSRGKRGRKKLLYIFKQPFMRPVQTTQEEDGCSCRFPEEEEGGCELRVKFSRSADAPAYQQGQNQLYNELNLGRREEYDVLDKRRGRDPEMGGKPQRRKNPQEGLYNELQKDKMAEAYSEIGMKGERRRGKGHDGLYQGLSTATKDTYDALHMQALPPR

SEQ ID NO: 31065 - protein, 267 aa, synthetic construct
ALNDSRYCLSSRLRVSATFWQNPRNHFRCQVQFYGLSENDEWTQDRAKPVTQIVSAEAWGRADCGFTSESYQQGVLSATILYEILLGKATLYAVLVSALVLMAMVKRKDSRGKRGRKKLLYIFKQPFMRPVQTTQEEDGCSCRFPEEEEGGCELRVKFSRSADAPAYQQGQNQLYNELNLGRREEYDVLDKRRGRDPEMGGKPQRRKNPQEGLYNELQKDKMAEAYSEIGMKGERRRGKGHDGLYQGLSTATKDTYDALHMQALPPR

SEQ ID NO: 31066 - protein, 266 aa, synthetic construct
LNDSRYCLSSRLRVSATFWQNPRNHFRCQVQFYGLSENDEWTQDRAKPVTQIVSAEAWGRADCGFTSESYQQGVLSATILYEILLGKATLYAVLVSALVLMAMVKRKDSRGKRGRKKLLYIFKQPFMRPVQTTQEEDGCSCRFPEEEEGGCELRVKFSRSADAPAYQQGQNQLYNELNLGRREEYDVLDKRRGRDPEMGGKPQRRKNPQEGLYNELQKDKMAEAYSEIGMKGERRRGKGHDGLYQGLSTATKDTYDALHMQALPPR

SEQ ID NO: 31067 - protein, 265 aa, synthetic construct
NDSRYCLSSRLRVSATFWQNPRNHFRCQVQFYGLSENDEWTQDRAKPVTQIVSAEAWGRADCGFTSESYQQGVLSATILYEILLGKATLYAVLVSALVLMAMVKRKDSRGKRGRKKLLYIFKQPFMRPVQTTQEEDGCSCRFPEEEEGGCELRVKFSRSADAPAYQQGQNQLYNELNLGRREEYDVLDKRRGRDPEMGGKPQRRKNPQEGLYNELQKDKMAEAYSEIGMKGERRRGKGHDGLYQGLSTATKDTYDALHMQALPPR

SEQ ID NO: 31068 - protein, 264 aa, synthetic construct
DSRYCLSSRLRVSATFWQNPRNHFRCQVQFYGLSENDEWTQDRAKPVTQIVSAEAWGRADCGFTSESYQQGVLSATILYEILLGKATLYAVLVSALVLMAMVKRKDSRGKRGRKKLLYIFKQPFMRPVQTTQEEDGCSCRFPEEEEGGCELRVKFSRSADAPAYQQGQNQLYNELNLGRREEYDVLDKRRGRDPEMGGKPQRRKNPQEGLYNELQKDKMAEAYSEIGMKGERRRGKGHDGLYQGLSTATKDTYDALHMQALPPR

SEQ ID NO: 31069 - protein, 263 aa, synthetic construct
SRYCLSSRLRVSATFWQNPRNHFRCQVQFYGLSENDEWTQDRAKPVTQIVSAEAWGRADCGFTSESYQQGVLSATILYEILLGKATLYAVLVSALVLMAMVKRKDSRGKRGRKKLLYIFKQPFMRPVQTTQEEDGCSCRFPEEEEGGCELRVKFSRSADAPAYQQGQNQLYNELNLGRREEYDVLDKRRGRDPEMGGKPQRRKNPQEGLYNELQKDKMAEAYSEIGMKGERRRGKGHDGLYQGLSTATKDTYDALHMQALPPR

SEQ ID NO: 31070 - protein, 262 aa, synthetic construct
RYCLSSRLRVSATFWQNPRNHFRCQVQFYGLSENDEWTQDRAKPVTQIVSAEAWGRADCGFTSESYQQGVLSATILYEILLGKATLYAVLVSALVLMAMVKRKDSRGKRGRKKLLYIFKQPFMRPVQTTQEEDGCSCRFPEEEEGGCELRVKFSRSADAPAYQQGQNQLYNELNLGRREEYDVLDKRRGRDPEMGGKPQRRKNPQEGLYNELQKDKMAEAYSEIGMKGERRRGKGHDGLYQGLSTATKDTYDALHMQALPPR

SEQ ID NO: 31071 - protein, 261 aa, synthetic construct
YCLSSRLRVSATFWQNPRNHFRCQVQFYGLSENDEWTQDRAKPVTQIVSAEAWGRADCGFTSESYQQGVLSATILYEILLGKATLYAVLVSALVLMAMVKRKDSRGKRGRKKLLYIFKQPFMRPVQTTQEEDGCSCRFPEEEEGGCELRVKFSRSADAPAYQQGQNQLYNELNLGRREEYDVLDKRRGRDPEMGGKPQRRKNPQEGLYNELQKDKMAEAYSEIGMKGERRRGKGHDGLYQGLSTATKDTYDALHMQALPPR

SEQ ID NO: 31072 - protein, 260 aa, synthetic construct
CLSSRLRVSATFWQNPRNHFRCQVQFYGLSENDEWTQDRAKPVTQIVSAEAWGRADCGFTSESYQQGVLSATILYEILLGKATLYAVLVSALVLMAMVKRKDSRGKRGRKKLLYIFKQPFMRPVQTTQEEDGCSCRFPEEEEGGCELRVKFSRSADAPAYQQGQNQLYNELNLGRREEYDVLDKRRGRDPEMGGKPQRRKNPQEGLYNELQKDKMAEAYSEIGMKGERRRGKGHDGLYQGLSTATKDTYDALHMQALPPR

SEQ ID NO: 31073 - protein, 259 aa, synthetic construct
LSSRLRVSATFWQNPRNHFRCQVQFYGLSENDEWTQDRAKPVTQIVSAEAWGRADCGFTSESYQQGVLSATILYEILLGKATLYAVLVSALVLMAMVKRKDSRGKRGRKKLLYIFKQPFMRPVQTTQEEDGCSCRFPEEEEGGCELRVKFSRSADAPAYQQGQNQLYNELNLGRREEYDVLDKRRGRDPEMGGKPQRRKNPQEGLYNELQKDKMAEAYSEIGMKGERRRGKGHDGLYQGLSTATKDTYDALHMQALPPR

SEQ ID NO: 31074 - protein, 258 aa, synthetic construct
SSRLRVSATFWQNPRNHFRCQVQFYGLSENDEWTQDRAKPVTQIVSAEAWGRADCGFTSESYQQGVLSATILYEILLGKATLYAVLVSALVLMAMVKRKDSRGKRGRKKLLYIFKQPFMRPVQTTQEEDGCSCRFPEEEEGGCELRVKFSRSADAPAYQQGQNQLYNELNLGRREEYDVLDKRRGRDPEMGGKPQRRKNPQEGLYNELQKDKMAEAYSEIGMKGERRRGKGHDGLYQGLSTATKDTYDALHMQALPPR

SEQ ID NO: 31075 - protein, 257 aa, synthetic construct
SRLRVSATFWQNPRNHFRCQVQFYGLSENDEWTQDRAKPVTQIVSAEAWGRADCGFTSESYQQGVLSATILYEILLGKATLYAVLVSALVLMAMVKRKDSRGKRGRKKLLYIFKQPFMRPVQTTQEEDGCSCRFPEEEEGGCELRVKFSRSADAPAYQQGQNQLYNELNLGRREEYDVLDKRRGRDPEMGGKPQRRKNPQEGLYNELQKDKMAEAYSEIGMKGERRRGKGHDGLYQGLSTATKDTYDALHMQALPPR

SEQ ID NO: 31076 - protein, 256 aa, synthetic construct
RLRVSATFWQNPRNHFRCQVQFYGLSENDEWTQDRAKPVTQIVSAEAWGRADCGFTSESYQQGVLSATILYEILLGKATLYAVLVSALVLMAMVKRKDSRGKRGRKKLLYIFKQPFMRPVQTTQEEDGCSCRFPEEEEGGCELRVKFSRSADAPAYQQGQNQLYNELNLGRREEYDVLDKRRGRDPEMGGKPQRRKNPQEGLYNELQKDKMAEAYSEIGMKGERRRGKGHDGLYQGLSTATKDTYDALHMQALPPR

SEQ ID NO: 31077 - protein, 255 aa, synthetic construct
LRVSATFWQNPRNHFRCQVQFYGLSENDEWTQDRAKPVTQIVSAEAWGRADCGFTSESYQQGVLSATILYEILLGKATLYAVLVSALVLMAMVKRKDSRGKRGRKKLLYIFKQPFMRPVQTTQEEDGCSCRFPEEEEGGCELRVKFSRSADAPAYQQGQNQLYNELNLGRREEYDVLDKRRGRDPEMGGKPQRRKNPQEGLYNELQKDKMAEAYSEIGMKGERRRGKGHDGLYQGLSTATKDTYDALHMQALPPR

SEQ ID NO: 31078 - protein, 254 aa, synthetic construct
RVSATFWQNPRNHFRCQVQFYGLSENDEWTQDRAKPVTQIVSAEAWGRADCGFTSESYQQGVLSATILYEILLGKATLYAVLVSALVLMAMVKRKDSRGKRGRKKLLYIFKQPFMRPVQTTQEEDGCSCRFPEEEEGGCELRVKFSRSADAPAYQQGQNQLYNELNLGRREEYDVLDKRRGRDPEMGGKPQRRKNPQEGLYNELQKDKMAEAYSEIGMKGERRRGKGHDGLYQGLSTATKDTYDALHMQALPPR

SEQ ID NO: 31079 - protein, 253 aa, synthetic construct
VSATFWQNPRNHFRCQVQFYGLSENDEWTQDRAKPVTQIVSAEAWGRADCGFTSESYQQGVLSATILYEILLGKATLYAVLVSALVLMAMVKRKDSRGKRGRKKLLYIFKQPFMRPVQTTQEEDGCSCRFPEEEEGGCELRVKFSRSADAPAYQQGQNQLYNELNLGRREEYDVLDKRRGRDPEMGGKPQRRKNPQEGLYNELQKDKMAEAYSEIGMKGERRRGKGHDGLYQGLSTATKDTYDALHMQALPPR

SEQ ID NO: 31080 - protein, 252 aa, synthetic construct
SATFWQNPRNHFRCQVQFYGLSENDEWTQDRAKPVTQIVSAEAWGRADCGFTSESYQQGVLSATILYEILLGKATLYAVLVSALVLMAMVKRKDSRGKRGRKKLLYIFKQPFMRPVQTTQEEDGCSCRFPEEEEGGCELRVKFSRSADAPAYQQGQNQLYNELNLGRREEYDVLDKRRGRDPEMGGKPQRRKNPQEGLYNELQKDKMAEAYSEIGMKGERRRGKGHDGLYQGLSTATKDTYDALHMQALPPR

SEQ ID NO: 31081 - protein, 251 aa, synthetic construct
ATFWQNPRNHFRCQVQFYGLSENDEWTQDRAKPVTQIVSAEAWGRADCGFTSESYQQGVLSATILYEILLGKATLYAVLVSALVLMAMVKRKDSRGKRGRKKLLYIFKQPFMRPVQTTQEEDGCSCRFPEEEEGGCELRVKFSRSADAPAYQQGQNQLYNELNLGRREEYDVLDKRRGRDPEMGGKPQRRKNPQEGLYNELQKDKMAEAYSEIGMKGERRRGKGHDGLYQGLSTATKDTYDALHMQALPPR

SEQ ID NO: 31082 - protein, 250 aa, synthetic construct
TFWQNPRNHFRCQVQFYGLSENDEWTQDRAKPVTQIVSAEAWGRADCGFTSESYQQGVLSATILYEILLGKATLYAVLVSALVLMAMVKRKDSRGKRGRKKLLYIFKQPFMRPVQTTQEEDGCSCRFPEEEEGGCELRVKFSRSADAPAYQQGQNQLYNELNLGRREEYDVLDKRRGRDPEMGGKPQRRKNPQEGLYNELQKDKMAEAYSEIGMKGERRRGKGHDGLYQGLSTATKDTYDALHMQALPPR

SEQ ID NO: 31083 - protein, 249 aa, synthetic construct
FWQNPRNHFRCQVQFYGLSENDEWTQDRAKPVTQIVSAEAWGRADCGFTSESYQQGVLSATILYEILLGKATLYAVLVSALVLMAMVKRKDSRGKRGRKKLLYIFKQPFMRPVQTTQEEDGCSCRFPEEEEGGCELRVKFSRSADAPAYQQGQNQLYNELNLGRREEYDVLDKRRGRDPEMGGKPQRRKNPQEGLYNELQKDKMAEAYSEIGMKGERRRGKGHDGLYQGLSTATKDTYDALHMQALPPR

SEQ ID NO: 31084 - protein, 248 aa, synthetic construct
WQNPRNHFRCQVQFYGLSENDEWTQDRAKPVTQIVSAEAWGRADCGFTSESYQQGVLSATILYEILLGKATLYAVLVSALVLMAMVKRKDSRGKRGRKKLLYIFKQPFMRPVQTTQEEDGCSCRFPEEEEGGCELRVKFSRSADAPAYQQGQNQLYNELNLGRREEYDVLDKRRGRDPEMGGKPQRRKNPQEGLYNELQKDKMAEAYSEIGMKGERRRGKGHDGLYQGLSTATKDTYDALHMQALPPR

SEQ ID NO: 31085 - protein, 247 aa, synthetic construct
QNPRNHFRCQVQFYGLSENDEWTQDRAKPVTQIVSAEAWGRADCGFTSESYQQGVLSATILYEILLGKATLYAVLVSALVLMAMVKRKDSRGKRGRKKLLYIFKQPFMRPVQTTQEEDGCSCRFPEEEEGGCELRVKFSRSADAPAYQQGQNQLYNELNLGRREEYDVLDKRRGRDPEMGGKPQRRKNPQEGLYNELQKDKMAEAYSEIGMKGERRRGKGHDGLYQGLSTATKDTYDALHMQALPPR

SEQ ID NO: 31086 - protein, 246 aa, synthetic construct
NPRNHFRCQVQFYGLSENDEWTQDRAKPVTQIVSAEAWGRADCGFTSESYQQGVLSATILYEILLGKATLYAVLVSALVLMAMVKRKDSRGKRGRKKLLYIFKQPFMRPVQTTQEEDGCSCRFPEEEEGGCELRVKFSRSADAPAYQQGQNQLYNELNLGRREEYDVLDKRRGRDPEMGGKPQRRKNPQEGLYNELQKDKMAEAYSEIGMKGERRRGKGHDGLYQGLSTATKDTYDALHMQALPPR

SEQ ID NO: 31087 - protein, 245 aa, synthetic construct
PRNHFRCQVQFYGLSENDEWTQDRAKPVTQIVSAEAWGRADCGFTSESYQQGVLSATILYEILLGKATLYAVLVSALVLMAMVKRKDSRGKRGRKKLLYIFKQPFMRPVQTTQEEDGCSCRFPEEEEGGCELRVKFSRSADAPAYQQGQNQLYNELNLGRREEYDVLDKRRGRDPEMGGKPQRRKNPQEGLYNELQKDKMAEAYSEIGMKGERRRGKGHDGLYQGLSTATKDTYDALHMQALPPR

SEQ ID NO: 31088 - protein, 244 aa, synthetic construct
RNHFRCQVQFYGLSENDEWTQDRAKPVTQIVSAEAWGRADCGFTSESYQQGVLSATILYEILLGKATLYAVLVSALVLMAMVKRKDSRGKRGRKKLLYIFKQPFMRPVQTTQEEDGCSCRFPEEEEGGCELRVKFSRSADAPAYQQGQNQLYNELNLGRREEYDVLDKRRGRDPEMGGKPQRRKNPQEGLYNELQKDKMAEAYSEIGMKGERRRGKGHDGLYQGLSTATKDTYDALHMQALPPR

SEQ ID NO: 31089 - protein, 243 aa, synthetic construct
NHFRCQVQFYGLSENDEWTQDRAKPVTQIVSAEAWGRADCGFTSESYQQGVLSATILYEILLGKATLYAVLVSALVLMAMVKRKDSRGKRGRKKLLYIFKQPFMRPVQTTQEEDGCSCRFPEEEEGGCELRVKFSRSADAPAYQQGQNQLYNELNLGRREEYDVLDKRRGRDPEMGGKPQRRKNPQEGLYNELQKDKMAEAYSEIGMKGERRRGKGHDGLYQGLSTATKDTYDALHMQALPPR

SEQ ID NO: 31090 - protein, 242 aa, synthetic construct
HFRCQVQFYGLSENDEWTQDRAKPVTQIVSAEAWGRADCGFTSESYQQGVLSATILYEILLGKATLYAVLVSALVLMAMVKRKDSRGKRGRKKLLYIFKQPFMRPVQTTQEEDGCSCRFPEEEEGGCELRVKFSRSADAPAYQQGQNQLYNELNLGRREEYDVLDKRRGRDPEMGGKPQRRKNPQEGLYNELQKDKMAEAYSEIGMKGERRRGKGHDGLYQGLSTATKDTYDALHMQALPPR

SEQ ID NO: 31091 - protein, 241 aa, synthetic construct
FRCQVQFYGLSENDEWTQDRAKPVTQIVSAEAWGRADCGFTSESYQQGVLSATILYEILLGKATLYAVLVSALVLMAMVKRKDSRGKRGRKKLLYIFKQPFMRPVQTTQEEDGCSCRFPEEEEGGCELRVKFSRSADAPAYQQGQNQLYNELNLGRREEYDVLDKRRGRDPEMGGKPQRRKNPQEGLYNELQKDKMAEAYSEIGMKGERRRGKGHDGLYQGLSTATKDTYDALHMQALPPR

SEQ ID NO: 31092 - protein, 240 aa, synthetic construct
RCQVQFYGLSENDEWTQDRAKPVTQIVSAEAWGRADCGFTSESYQQGVLSATILYEILLGKATLYAVLVSALVLMAMVKRKDSRGKRGRKKLLYIFKQPFMRPVQTTQEEDGCSCRFPEEEEGGCELRVKFSRSADAPAYQQGQNQLYNELNLGRREEYDVLDKRRGRDPEMGGKPQRRKNPQEGLYNELQKDKMAEAYSEIGMKGERRRGKGHDGLYQGLSTATKDTYDALHMQALPPR

SEQ ID NO: 31093 - protein, 239 aa, synthetic construct
CQVQFYGLSENDEWTQDRAKPVTQIVSAEAWGRADCGFTSESYQQGVLSATILYEILLGKATLYAVLVSALVLMAMVKRKDSRGKRGRKKLLYIFKQPFMRPVQTTQEEDGCSCRFPEEEEGGCELRVKFSRSADAPAYQQGQNQLYNELNLGRREEYDVLDKRRGRDPEMGGKPQRRKNPQEGLYNELQKDKMAEAYSEIGMKGERRRGKGHDGLYQGLSTATKDTYDALHMQALPPR

SEQ ID NO: 31094 - protein, 238 aa, synthetic construct
QVQFYGLSENDEWTQDRAKPVTQIVSAEAWGRADCGFTSESYQQGVLSATILYEILLGKATLYAVLVSALVLMAMVKRKDSRGKRGRKKLLYIFKQPFMRPVQTTQEEDGCSCRFPEEEEGGCELRVKFSRSADAPAYQQGQNQLYNELNLGRREEYDVLDKRRGRDPEMGGKPQRRKNPQEGLYNELQKDKMAEAYSEIGMKGERRRGKGHDGLYQGLSTATKDTYDALHMQALPPR

SEQ ID NO: 31095 - protein, 237 aa, synthetic construct
VQFYGLSENDEWTQDRAKPVTQIVSAEAWGRADCGFTSESYQQGVLSATILYEILLGKATLYAVLVSALVLMAMVKRKDSRGKRGRKKLLYIFKQPFMRPVQTTQEEDGCSCRFPEEEEGGCELRVKFSRSADAPAYQQGQNQLYNELNLGRREEYDVLDKRRGRDPEMGGKPQRRKNPQEGLYNELQKDKMAEAYSEIGMKGERRRGKGHDGLYQGLSTATKDTYDALHMQALPPR

SEQ ID NO: 31096 - protein, 236 aa, synthetic construct
QFYGLSENDEWTQDRAKPVTQIVSAEAWGRADCGFTSESYQQGVLSATILYEILLGKATLYAVLVSALVLMAMVKRKDSRGKRGRKKLLYIFKQPFMRPVQTTQEEDGCSCRFPEEEEGGCELRVKFSRSADAPAYQQGQNQLYNELNLGRREEYDVLDKRRGRDPEMGGKPQRRKNPQEGLYNELQKDKMAEAYSEIGMKGERRRGKGHDGLYQGLSTATKDTYDALHMQALPPR

SEQ ID NO: 31097 - protein, 235 aa, synthetic construct
FYGLSENDEWTQDRAKPVTQIVSAEAWGRADCGFTSESYQQGVLSATILYEILLGKATLYAVLVSALVLMAMVKRKDSRGKRGRKKLLYIFKQPFMRPVQTTQEEDGCSCRFPEEEEGGCELRVKFSRSADAPAYQQGQNQLYNELNLGRREEYDVLDKRRGRDPEMGGKPQRRKNPQEGLYNELQKDKMAEAYSEIGMKGERRRGKGHDGLYQGLSTATKDTYDALHMQALPPR

SEQ ID NO: 31098 - protein, 234 aa, synthetic construct
YGLSENDEWTQDRAKPVTQIVSAEAWGRADCGFTSESYQQGVLSATILYEILLGKATLYAVLVSALVLMAMVKRKDSRGKRGRKKLLYIFKQPFMRPVQTTQEEDGCSCRFPEEEEGGCELRVKFSRSADAPAYQQGQNQLYNELNLGRREEYDVLDKRRGRDPEMGGKPQRRKNPQEGLYNELQKDKMAEAYSEIGMKGERRRGKGHDGLYQGLSTATKDTYDALHMQALPPR

SEQ ID NO: 31099 - protein, 233 aa, synthetic construct
GLSENDEWTQDRAKPVTQIVSAEAWGRADCGFTSESYQQGVLSATILYEILLGKATLYAVLVSALVLMAMVKRKDSRGKRGRKKLLYIFKQPFMRPVQTTQEEDGCSCRFPEEEEGGCELRVKFSRSADAPAYQQGQNQLYNELNLGRREEYDVLDKRRGRDPEMGGKPQRRKNPQEGLYNELQKDKMAEAYSEIGMKGERRRGKGHDGLYQGLSTATKDTYDALHMQALPPR

SEQ ID NO: 31100 - protein, 232 aa, synthetic construct
LSENDEWTQDRAKPVTQIVSAEAWGRADCGFTSESYQQGVLSATILYEILLGKATLYAVLVSALVLMAMVKRKDSRGKRGRKKLLYIFKQPFMRPVQTTQEEDGCSCRFPEEEEGGCELRVKFSRSADAPAYQQGQNQLYNELNLGRREEYDVLDKRRGRDPEMGGKPQRRKNPQEGLYNELQKDKMAEAYSEIGMKGERRRGKGHDGLYQGLSTATKDTYDALHMQALPPR

SEQ ID NO: 31101 - protein, 231 aa, synthetic construct
SENDEWTQDRAKPVTQIVSAEAWGRADCGFTSESYQQGVLSATILYEILLGKATLYAVLVSALVLMAMVKRKDSRGKRGRKKLLYIFKQPFMRPVQTTQEEDGCSCRFPEEEEGGCELRVKFSRSADAPAYQQGQNQLYNELNLGRREEYDVLDKRRGRDPEMGGKPQRRKNPQEGLYNELQKDKMAEAYSEIGMKGERRRGKGHDGLYQGLSTATKDTYDALHMQALPPR

SEQ ID NO: 31102 - protein, 230 aa, synthetic construct
ENDEWTQDRAKPVTQIVSAEAWGRADCGFTSESYQQGVLSATILYEILLGKATLYAVLVSALVLMAMVKRKDSRGKRGRKKLLYIFKQPFMRPVQTTQEEDGCSCRFPEEEEGGCELRVKFSRSADAPAYQQGQNQLYNELNLGRREEYDVLDKRRGRDPEMGGKPQRRKNPQEGLYNELQKDKMAEAYSEIGMKGERRRGKGHDGLYQGLSTATKDTYDALHMQALPPR

SEQ ID NO: 31103 - protein, 229 aa, synthetic construct
NDEWTQDRAKPVTQIVSAEAWGRADCGFTSESYQQGVLSATILYEILLGKATLYAVLVSALVLMAMVKRKDSRGKRGRKKLLYIFKQPFMRPVQTTQEEDGCSCRFPEEEEGGCELRVKFSRSADAPAYQQGQNQLYNELNLGRREEYDVLDKRRGRDPEMGGKPQRRKNPQEGLYNELQKDKMAEAYSEIGMKGERRRGKGHDGLYQGLSTATKDTYDALHMQALPPR

SEQ ID NO: 31104 - protein, 228 aa, synthetic construct
DEWTQDRAKPVTQIVSAEAWGRADCGFTSESYQQGVLSATILYEILLGKATLYAVLVSALVLMAMVKRKDSRGKRGRKKLLYIFKQPFMRPVQTTQEEDGCSCRFPEEEEGGCELRVKFSRSADAPAYQQGQNQLYNELNLGRREEYDVLDKRRGRDPEMGGKPQRRKNPQEGLYNELQKDKMAEAYSEIGMKGERRRGKGHDGLYQGLSTATKDTYDALHMQALPPR

SEQ ID NO: 31105 - protein, 227 aa, synthetic construct
EWTQDRAKPVTQIVSAEAWGRADCGFTSESYQQGVLSATILYEILLGKATLYAVLVSALVLMAMVKRKDSRGKRGRKKLLYIFKQPFMRPVQTTQEEDGCSCRFPEEEEGGCELRVKFSRSADAPAYQQGQNQLYNELNLGRREEYDVLDKRRGRDPEMGGKPQRRKNPQEGLYNELQKDKMAEAYSEIGMKGERRRGKGHDGLYQGLSTATKDTYDALHMQALPPR

SEQ ID NO: 31106 - protein, 226 aa, synthetic construct
WTQDRAKPVTQIVSAEAWGRADCGFTSESYQQGVLSATILYEILLGKATLYAVLVSALVLMAMVKRKDSRGKRGRKKLLYIFKQPFMRPVQTTQEEDGCSCRFPEEEEGGCELRVKFSRSADAPAYQQGQNQLYNELNLGRREEYDVLDKRRGRDPEMGGKPQRRKNPQEGLYNELQKDKMAEAYSEIGMKGERRRGKGHDGLYQGLSTATKDTYDALHMQALPPR

SEQ ID NO: 31107 - protein, 225 aa, synthetic construct
TQDRAKPVTQIVSAEAWGRADCGFTSESYQQGVLSATILYEILLGKATLYAVLVSALVLMAMVKRKDSRGKRGRKKLLYIFKQPFMRPVQTTQEEDGCSCRFPEEEEGGCELRVKFSRSADAPAYQQGQNQLYNELNLGRREEYDVLDKRRGRDPEMGGKPQRRKNPQEGLYNELQKDKMAEAYSEIGMKGERRRGKGHDGLYQGLSTATKDTYDALHMQALPPR

SEQ ID NO: 31108 - protein, 224 aa, synthetic construct
QDRAKPVTQIVSAEAWGRADCGFTSESYQQGVLSATILYEILLGKATLYAVLVSALVLMAMVKRKDSRGKRGRKKLLYIFKQPFMRPVQTTQEEDGCSCRFPEEEEGGCELRVKFSRSADAPAYQQGQNQLYNELNLGRREEYDVLDKRRGRDPEMGGKPQRRKNPQEGLYNELQKDKMAEAYSEIGMKGERRRGKGHDGLYQGLSTATKDTYDALHMQALPPR

SEQ ID NO: 31109 - protein, 223 aa, synthetic construct
DRAKPVTQIVSAEAWGRADCGFTSESYQQGVLSATILYEILLGKATLYAVLVSALVLMAMVKRKDSRGKRGRKKLLYIFKQPFMRPVQTTQEEDGCSCRFPEEEEGGCELRVKFSRSADAPAYQQGQNQLYNELNLGRREEYDVLDKRRGRDPEMGGKPQRRKNPQEGLYNELQKDKMAEAYSEIGMKGERRRGKGHDGLYQGLSTATKDTYDALHMQALPPR

SEQ ID NO: 31110 - protein, 222 aa, synthetic construct
RAKPVTQIVSAEAWGRADCGFTSESYQQGVLSATILYEILLGKATLYAVLVSALVLMAMVKRKDSRGKRGRKKLLYIFKQPFMRPVQTTQEEDGCSCRFPEEEEGGCELRVKFSRSADAPAYQQGQNQLYNELNLGRREEYDVLDKRRGRDPEMGGKPQRRKNPQEGLYNELQKDKMAEAYSEIGMKGERRRGKGHDGLYQGLSTATKDTYDALHMQALPPR

SEQ ID NO: 31111 - protein, 221 aa, synthetic construct
AKPVTQIVSAEAWGRADCGFTSESYQQGVLSATILYEILLGKATLYAVLVSALVLMAMVKRKDSRGKRGRKKLLYIFKQPFMRPVQTTQEEDGCSCRFPEEEEGGCELRVKFSRSADAPAYQQGQNQLYNELNLGRREEYDVLDKRRGRDPEMGGKPQRRKNPQEGLYNELQKDKMAEAYSEIGMKGERRRGKGHDGLYQGLSTATKDTYDALHMQALPPR

SEQ ID NO: 31112 - protein, 220 aa, synthetic construct
KPVTQIVSAEAWGRADCGFTSESYQQGVLSATILYEILLGKATLYAVLVSALVLMAMVKRKDSRGKRGRKKLLYIFKQPFMRPVQTTQEEDGCSCRFPEEEEGGCELRVKFSRSADAPAYQQGQNQLYNELNLGRREEYDVLDKRRGRDPEMGGKPQRRKNPQEGLYNELQKDKMAEAYSEIGMKGERRRGKGHDGLYQGLSTATKDTYDALHMQALPPR

SEQ ID NO: 31113 - protein, 219 aa, synthetic construct
PVTQIVSAEAWGRADCGFTSESYQQGVLSATILYEILLGKATLYAVLVSALVLMAMVKRKDSRGKRGRKKLLYIFKQPFMRPVQTTQEEDGCSCRFPEEEEGGCELRVKFSRSADAPAYQQGQNQLYNELNLGRREEYDVLDKRRGRDPEMGGKPQRRKNPQEGLYNELQKDKMAEAYSEIGMKGERRRGKGHDGLYQGLSTATKDTYDALHMQALPPR

SEQ ID NO: 31114 - protein, 218 aa, synthetic construct
VTQIVSAEAWGRADCGFTSESYQQGVLSATILYEILLGKATLYAVLVSALVLMAMVKRKDSRGKRGRKKLLYIFKQPFMRPVQTTQEEDGCSCRFPEEEEGGCELRVKFSRSADAPAYQQGQNQLYNELNLGRREEYDVLDKRRGRDPEMGGKPQRRKNPQEGLYNELQKDKMAEAYSEIGMKGERRRGKGHDGLYQGLSTATKDTYDALHMQALPPR

SEQ ID NO: 31115 - protein, 217 aa, synthetic construct
TQIVSAEAWGRADCGFTSESYQQGVLSATILYEILLGKATLYAVLVSALVLMAMVKRKDSRGKRGRKKLLYIFKQPFMRPVQTTQEEDGCSCRFPEEEEGGCELRVKFSRSADAPAYQQGQNQLYNELNLGRREEYDVLDKRRGRDPEMGGKPQRRKNPQEGLYNELQKDKMAEAYSEIGMKGERRRGKGHDGLYQGLSTATKDTYDALHMQALPPR

SEQ ID NO: 31116 - protein, 216 aa, synthetic construct
QIVSAEAWGRADCGFTSESYQQGVLSATILYEILLGKATLYAVLVSALVLMAMVKRKDSRGKRGRKKLLYIFKQPFMRPVQTTQEEDGCSCRFPEEEEGGCELRVKFSRSADAPAYQQGQNQLYNELNLGRREEYDVLDKRRGRDPEMGGKPQRRKNPQEGLYNELQKDKMAEAYSEIGMKGERRRGKGHDGLYQGLSTATKDTYDALHMQALPPR

SEQ ID NO: 31117 - protein, 215 aa, synthetic construct
IVSAEAWGRADCGFTSESYQQGVLSATILYEILLGKATLYAVLVSALVLMAMVKRKDSRGKRGRKKLLYIFKQPFMRPVQTTQEEDGCSCRFPEEEEGGCELRVKFSRSADAPAYQQGQNQLYNELNLGRREEYDVLDKRRGRDPEMGGKPQRRKNPQEGLYNELQKDKMAEAYSEIGMKGERRRGKGHDGLYQGLSTATKDTYDALHMQALPPR

SEQ ID NO: 31118 - protein, 214 aa, synthetic construct
VSAEAWGRADCGFTSESYQQGVLSATILYEILLGKATLYAVLVSALVLMAMVKRKDSRGKRGRKKLLYIFKQPFMRPVQTTQEEDGCSCRFPEEEEGGCELRVKFSRSADAPAYQQGQNQLYNELNLGRREEYDVLDKRRGRDPEMGGKPQRRKNPQEGLYNELQKDKMAEAYSEIGMKGERRRGKGHDGLYQGLSTATKDTYDALHMQALPPR

SEQ ID NO: 31119 - protein, 213 aa, synthetic construct
SAEAWGRADCGFTSESYQQGVLSATILYEILLGKATLYAVLVSALVLMAMVKRKDSRGKRGRKKLLYIFKQPFMRPVQTTQEEDGCSCRFPEEEEGGCELRVKFSRSADAPAYQQGQNQLYNELNLGRREEYDVLDKRRGRDPEMGGKPQRRKNPQEGLYNELQKDKMAEAYSEIGMKGERRRGKGHDGLYQGLSTATKDTYDALHMQALPPR

SEQ ID NO: 31120 - protein, 212 aa, synthetic construct
AEAWGRADCGFTSESYQQGVLSATILYEILLGKATLYAVLVSALVLMAMVKRKDSRGKRGRKKLLYIFKQPFMRPVQTTQEEDGCSCRFPEEEEGGCELRVKFSRSADAPAYQQGQNQLYNELNLGRREEYDVLDKRRGRDPEMGGKPQRRKNPQEGLYNELQKDKMAEAYSEIGMKGERRRGKGHDGLYQGLSTATKDTYDALHMQALPPR

SEQ ID NO: 31121 - protein, 211 aa, synthetic construct
EAWGRADCGFTSESYQQGVLSATILYEILLGKATLYAVLVSALVLMAMVKRKDSRGKRGRKKLLYIFKQPFMRPVQTTQEEDGCSCRFPEEEEGGCELRVKFSRSADAPAYQQGQNQLYNELNLGRREEYDVLDKRRGRDPEMGGKPQRRKNPQEGLYNELQKDKMAEAYSEIGMKGERRRGKGHDGLYQGLSTATKDTYDALHMQALPPR

SEQ ID NO: 31122 - protein, 210 aa, synthetic construct
AWGRADCGFTSESYQQGVLSATILYEILLGKATLYAVLVSALVLMAMVKRKDSRGKRGRKKLLYIFKQPFMRPVQTTQEEDGCSCRFPEEEEGGCELRVKFSRSADAPAYQQGQNQLYNELNLGRREEYDVLDKRRGRDPEMGGKPQRRKNPQEGLYNELQKDKMAEAYSEIGMKGERRRGKGHDGLYQGLSTATKDTYDALHMQALPPR

SEQ ID NO: 31123 - protein, 209 aa, synthetic construct
WGRADCGFTSESYQQGVLSATILYEILLGKATLYAVLVSALVLMAMVKRKDSRGKRGRKKLLYIFKQPFMRPVQTTQEEDGCSCRFPEEEEGGCELRVKFSRSADAPAYQQGQNQLYNELNLGRREEYDVLDKRRGRDPEMGGKPQRRKNPQEGLYNELQKDKMAEAYSEIGMKGERRRGKGHDGLYQGLSTATKDTYDALHMQALPPR

SEQ ID NO: 31124 - protein, 208 aa, synthetic construct; identical to SEQ ID NO: 30666

SEQ ID NO: 31125 - protein, 328 aa, synthetic construct; identical to SEQ ID NO: 30656

SEQ ID NO: 31126 - protein, 327 aa, synthetic construct
KQLDADVSPKPTIFLPSIAETKLQKAGTYLCLLEKFFPDVIKIHWQEKKSNTILGSQEGNTMKTNDTYMKFSWLTVPEKSLDKEHRCIVRHENNKNGVDQEIIFPPIKTDVITMDPKDNCSKDANDTLLLQLTNTSAYYMYLLLLLKSVVYFAIITCCLLRRTAFCCNGEKSKRGRKKLLYIFKQPFMRPVQTTQEEDGCSCRFPEEEEGGCELRVKFSRSADAPAYQQGQNQLYNELNLGRREEYDVLDKRRGRDPEMGGKPQRRKNPQEGLYNELQKDKMAEAYSEIGMKGERRRGKGHDGLYQGLSTATKDTYDALHMQALPPR

SEQ ID NO: 31127 - protein, 326 aa, synthetic construct
QLDADVSPKPTIFLPSIAETKLQKAGTYLCLLEKFFPDVIKIHWQEKKSNTILGSQEGNTMKTNDTYMKFSWLTVPEKSLDKEHRCIVRHENNKNGVDQEIIFPPIKTDVITMDPKDNCSKDANDTLLLQLTNTSAYYMYLLLLLKSVVYFAIITCCLLRRTAFCCNGEKSKRGRKKLLYIFKQPFMRPVQTTQEEDGCSCRFPEEEEGGCELRVKFSRSADAPAYQQGQNQLYNELNLGRREEYDVLDKRRGRDPEMGGKPQRRKNPQEGLYNELQKDKMAEAYSEIGMKGERRRGKGHDGLYQGLSTATKDTYDALHMQALPPR

SEQ ID NO: 31128 - protein, 325 aa, synthetic construct
LDADVSPKPTIFLPSIAETKLQKAGTYLCLLEKFFPDVIKIHWQEKKSNTILGSQEGNTMKTNDTYMKFSWLTVPEKSLDKEHRCIVRHENNKNGVDQEIIFPPIKTDVITMDPKDNCSKDANDTLLLQLTNTSAYYMYLLLLLKSVVYFAIITCCLLRRTAFCCNGEKSKRGRKKLLYIFKQPFMRPVQTTQEEDGCSCRFPEEEEGGCELRVKFSRSADAPAYQQGQNQLYNELNLGRREEYDVLDKRRGRDPEMGGKPQRRKNPQEGLYNELQKDKMAEAYSEIGMKGERRRGKGHDGLYQGLSTATKDTYDALHMQALPPR

SEQ ID NO: 31129 - protein, 324 aa, synthetic construct
DADVSPKPTIFLPSIAETKLQKAGTYLCLLEKFFPDVIKIHWQEKKSNTILGSQEGNTMKTNDTYMKFSWLTVPEKSLDKEHRCIVRHENNKNGVDQEIIFPPIKTDVITMDPKDNCSKDANDTLLLQLTNTSAYYMYLLLLLKSVVYFAIITCCLLRRTAFCCNGEKSKRGRKKLLYIFKQPFMRPVQTTQEEDGCSCRFPEEEEGGCELRVKFSRSADAPAYQQGQNQLYNELNLGRREEYDVLDKRRGRDPEMGGKPQRRKNPQEGLYNELQKDKMAEAYSEIGMKGERRRGKGHDGLYQGLSTATKDTYDALHMQALPPR

SEQ ID NO: 31130 - protein, 323 aa, synthetic construct; identical to SEQ ID NO: 30669

SEQ ID NO: 31131 - protein, 322 aa, synthetic construct
DVSPKPTIFLPSIAETKLQKAGTYLCLLEKFFPDVIKIHWQEKKSNTILGSQEGNTMKTNDTYMKFSWLTVPEKSLDKEHRCIVRHENNKNGVDQEIIFPPIKTDVITMDPKDNCSKDANDTLLLQLTNTSAYYMYLLLLLKSVVYFAIITCCLLRRTAFCCNGEKSKRGRKKLLYIFKQPFMRPVQTTQEEDGCSCRFPEEEEGGCELRVKFSRSADAPAYQQGQNQLYNELNLGRREEYDVLDKRRGRDPEMGGKPQRRKNPQEGLYNELQKDKMAEAYSEIGMKGERRRGKGHDGLYQGLSTATKDTYDALHMQALPPR

SEQ ID NO: 31132 - protein, 321 aa, synthetic construct; identical to SEQ ID NO: 30670

SEQ ID NO: 31133 - protein, 320 aa, synthetic construct
SPKPTIFLPSIAETKLQKAGTYLCLLEKFFPDVIKIHWQEKKSNTILGSQEGNTMKTNDTYMKFSWLTVPEKSLDKEHRCIVRHENNKNGVDQEIIFPPIKTDVITMDPKDNCSKDANDTLLLQLTNTSAYYMYLLLLLKSVVYFAIITCCLLRRTAFCCNGEKSKRGRKKLLYIFKQPFMRPVQTTQEEDGCSCRFPEEEEGGCELRVKFSRSADAPAYQQGQNQLYNELNLGRREEYDVLDKRRGRDPEMGGKPQRRKNPQEGLYNELQKDKMAEAYSEIGMKGERRRGKGHDGLYQGLSTATKDTYDALHMQALPPR

SEQ ID NO: 31134 - protein, 319 aa, synthetic construct
PKPTIFLPSIAETKLQKAGTYLCLLEKFFPDVIKIHWQEKKSNTILGSQEGNTMKTNDTYMKFSWLTVPEKSLDKEHRCIVRHENNKNGVDQEIIFPPIKTDVITMDPKDNCSKDANDTLLLQLTNTSAYYMYLLLLLKSVVYFAIITCCLLRRTAFCCNGEKSKRGRKKLLYIFKQPFMRPVQTTQEEDGCSCRFPEEEEGGCELRVKFSRSADAPAYQQGQNQLYNELNLGRREEYDVLDKRRGRDPEMGGKPQRRKNPQEGLYNELQKDKMAEAYSEIGMKGERRRGKGHDGLYQGLSTATKDTYDALHMQALPPR

SEQ ID NO: 31135 - protein, 318 aa, synthetic construct
KPTIFLPSIAETKLQKAGTYLCLLEKFFPDVIKIHWQEKKSNTILGSQEGNTMKTNDTYMKFSWLTVPEKSLDKEHRCIVRHENNKNGVDQEIIFPPIKTDVITMDPKDNCSKDANDTLLLQLTNTSAYYMYLLLLLKSVVYFAIITCCLLRRTAFCCNGEKSKRGRKKLLYIFKQPFMRPVQTTQEEDGCSCRFPEEEEGGCELRVKFSRSADAPAYQQGQNQLYNELNLGRREEYDVLDKRRGRDPEMGGKPQRRKNPQEGLYNELQKDKMAEAYSEIGMKGERRRGKGHDGLYQGLSTATKDTYDALHMQALPPR

SEQ ID NO: 31136 - protein, 317 aa, synthetic construct
PTIFLPSIAETKLQKAGTYLCLLEKFFPDVIKIHWQEKKSNTILGSQEGNTMKTNDTYMKFSWLTVPEKSLDKEHRCIVRHENNKNGVDQEIIFPPIKTDVITMDPKDNCSKDANDTLLLQLTNTSAYYMYLLLLLKSVVYFAIITCCLLRRTAFCCNGEKSKRGRKKLLYIFKQPFMRPVQTTQEEDGCSCRFPEEEEGGCELRVKFSRSADAPAYQQGQNQLYNELNLGRREEYDVLDKRRGRDPEMGGKPQRRKNPQEGLYNELQKDKMAEAYSEIGMKGERRRGKGHDGLYQGLSTATKDTYDALHMQALPPR

SEQ ID NO: 31137 - protein, 316 aa, synthetic construct; identical to SEQ ID NO: 30671

SEQ ID NO: 31138 - protein, 315 aa, synthetic construct
IFLPSIAETKLQKAGTYLCLLEKFFPDVIKIHWQEKKSNTILGSQEGNTMKTNDTYMKFSWLTVPEKSLDKEHRCIVRHENNKNGVDQEIIFPPIKTDVITMDPKDNCSKDANDTLLLQLTNTSAYYMYLLLLLKSVVYFAIITCCLLRRTAFCCNGEKSKRGRKKLLYIFKQPFMRPVQTTQEEDGCSCRFPEEEEGGCELRVKFSRSADAPAYQQGQNQLYNELNLGRREEYDVLDKRRGRDPEMGGKPQRRKNPQEGLYNELQKDKMAEAYSEIGMKGERRRGKGHDGLYQGLSTATKDTYDALHMQALPPR

SEQ ID NO: 31139 - protein, 314 aa, synthetic construct
FLPSIAETKLQKAGTYLCLLEKFFPDVIKIHWQEKKSNTILGSQEGNTMKTNDTYMKFSWLTVPEKSLDKEHRCIVRHENNKNGVDQEIIFPPIKTDVITMDPKDNCSKDANDTLLLQLTNTSAYYMYLLLLLKSVVYFAIITCCLLRRTAFCCNGEKSKRGRKKLLYIFKQPFMRPVQTTQEEDGCSCRFPEEEEGGCELRVKFSRSADAPAYQQGQNQLYNELNLGRREEYDVLDKRRGRDPEMGGKPQRRKNPQEGLYNELQKDKMAEAYSEIGMKGERRRGKGHDGLYQGLSTATKDTYDALHMQALPPR

SEQ ID NO: 31140 - protein, 313 aa, synthetic construct
LPSIAETKLQKAGTYLCLLEKFFPDVIKIHWQEKKSNTILGSQEGNTMKTNDTYMKFSWLTVPEKSLDKEHRCIVRHENNKNGVDQEIIFPPIKTDVITMDPKDNCSKDANDTLLLQLTNTSAYYMYLLLLLKSVVYFAIITCCLLRRTAFCCNGEKSKRGRKKLLYIFKQPFMRPVQTTQEEDGCSCRFPEEEEGGCELRVKFSRSADAPAYQQGQNQLYNELNLGRREEYDVLDKRRGRDPEMGGKPQRRKNPQEGLYNELQKDKMAEAYSEIGMKGERRRGKGHDGLYQGLSTATKDTYDALHMQALPPR

SEQ ID NO: 31141 - protein, 312 aa, synthetic construct
PSIAETKLQKAGTYLCLLEKFFPDVIKIHWQEKKSNTILGSQEGNTMKTNDTYMKFSWLTVPEKSLDKEHRCIVRHENNKNGVDQEIIFPPIKTDVITMDPKDNCSKDANDTLLLQLTNTSAYYMYLLLLLKSVVYFAIITCCLLRRTAFCCNGEKSKRGRKKLLYIFKQPFMRPVQTTQEEDGCSCRFPEEEEGGCELRVKFSRSADAPAYQQGQNQLYNELNLGRREEYDVLDKRRGRDPEMGGKPQRRKNPQEGLYNELQKDKMAEAYSEIGMKGERRRGKGHDGLYQGLSTATKDTYDALHMQALPPR

SEQ ID NO: 31142 - protein, 311 aa, synthetic construct
SIAETKLQKAGTYLCLLEKFFPDVIKIHWQEKKSNTILGSQEGNTMKTNDTYMKFSWLTVPEKSLDKEHRCIVRHENNKNGVDQEIIFPPIKTDVITMDPKDNCSKDANDTLLLQLTNTSAYYMYLLLLLKSVVYFAIITCCLLRRTAFCCNGEKSKRGRKKLLYIFKQPFMRPVQTTQEEDGCSCRFPEEEEGGCELRVKFSRSADAPAYQQGQNQLYNELNLGRREEYDVLDKRRGRDPEMGGKPQRRKNPQEGLYNELQKDKMAEAYSEIGMKGERRRGKGHDGLYQGLSTATKDTYDALHMQALPPR

SEQ ID NO: 31143 - protein, 310 aa, synthetic construct
IAETKLQKAGTYLCLLEKFFPDVIKIHWQEKKSNTILGSQEGNTMKTNDTYMKFSWLTVPEKSLDKEHRCIVRHENNKNGVDQEIIFPPIKTDVITMDPKDNCSKDANDTLLLQLTNTSAYYMYLLLLLKSVVYFAIITCCLLRRTAFCCNGEKSKRGRKKLLYIFKQPFMRPVQTTQEEDGCSCRFPEEEEGGCELRVKFSRSADAPAYQQGQNQLYNELNLGRREEYDVLDKRRGRDPEMGGKPQRRKNPQEGLYNELQKDKMAEAYSEIGMKGERRRGKGHDGLYQGLSTATKDTYDALHMQALPPR

SEQ ID NO: 31144 - protein, 309 aa, synthetic construct
AETKLQKAGTYLCLLEKFFPDVIKIHWQEKKSNTILGSQEGNTMKTNDTYMKFSWLTVPEKSLDKEHRCIVRHENNKNGVDQEIIFPPIKTDVITMDPKDNCSKDANDTLLLQLTNTSAYYMYLLLLLKSVVYFAIITCCLLRRTAFCCNGEKSKRGRKKLLYIFKQPFMRPVQTTQEEDGCSCRFPEEEEGGCELRVKFSRSADAPAYQQGQNQLYNELNLGRREEYDVLDKRRGRDPEMGGKPQRRKNPQEGLYNELQKDKMAEAYSEIGMKGERRRGKGHDGLYQGLSTATKDTYDALHMQALPPR

SEQ ID NO: 31145 - protein, 308 aa, synthetic construct
ETKLQKAGTYLCLLEKFFPDVIKIHWQEKKSNTILGSQEGNTMKTNDTYMKFSWLTVPEKSLDKEHRCIVRHENNKNGVDQEIIFPPIKTDVITMDPKDNCSKDANDTLLLQLTNTSAYYMYLLLLLKSVVYFAIITCCLLRRTAFCCNGEKSKRGRKKLLYIFKQPFMRPVQTTQEEDGCSCRFPEEEEGGCELRVKFSRSADAPAYQQGQNQLYNELNLGRREEYDVLDKRRGRDPEMGGKPQRRKNPQEGLYNELQKDKMAEAYSEIGMKGERRRGKGHDGLYQGLSTATKDTYDALHMQALPPR

SEQ ID NO: 31146 - protein, 307 aa, synthetic construct
TKLQKAGTYLCLLEKFFPDVIKIHWQEKKSNTILGSQEGNTMKTNDTYMKFSWLTVPEKSLDKEHRCIVRHENNKNGVDQEIIFPPIKTDVITMDPKDNCSKDANDTLLLQLTNTSAYYMYLLLLLKSVVYFAIITCCLLRRTAFCCNGEKSKRGRKKLLYIFKQPFMRPVQTTQEEDGCSCRFPEEEEGGCELRVKFSRSADAPAYQQGQNQLYNELNLGRREEYDVLDKRRGRDPEMGGKPQRRKNPQEGLYNELQKDKMAEAYSEIGMKGERRRGKGHDGLYQGLSTATKDTYDALHMQALPPR

SEQ ID NO: 31147 - protein, 306 aa, synthetic construct
KLQKAGTYLCLLEKFFPDVIKIHWQEKKSNTILGSQEGNTMKTNDTYMKFSWLTVPEKSLDKEHRCIVRHENNKNGVDQEIIFPPIKTDVITMDPKDNCSKDANDTLLLQLTNTSAYYMYLLLLLKSVVYFAIITCCLLRRTAFCCNGEKSKRGRKKLLYIFKQPFMRPVQTTQEEDGCSCRFPEEEEGGCELRVKFSRSADAPAYQQGQNQLYNELNLGRREEYDVLDKRRGRDPEMGGKPQRRKNPQEGLYNELQKDKMAEAYSEIGMKGERRRGKGHDGLYQGLSTATKDTYDALHMQALPPR

SEQ ID NO: 31148 - protein, 305 aa, synthetic construct
LQKAGTYLCLLEKFFPDVIKIHWQEKKSNTILGSQEGNTMKTNDTYMKFSWLTVPEKSLDKEHRCIVRHENNKNGVDQEIIFPPIKTDVITMDPKDNCSKDANDTLLLQLTNTSAYYMYLLLLLKSVVYFAIITCCLLRRTAFCCNGEKSKRGRKKLLYIFKQPFMRPVQTTQEEDGCSCRFPEEEEGGCELRVKFSRSADAPAYQQGQNQLYNELNLGRREEYDVLDKRRGRDPEMGGKPQRRKNPQEGLYNELQKDKMAEAYSEIGMKGERRRGKGHDGLYQGLSTATKDTYDALHMQALPPR

SEQ ID NO: 31149 - protein, 304 aa, synthetic construct
QKAGTYLCLLEKFFPDVIKIHWQEKKSNTILGSQEGNTMKTNDTYMKFSWLTVPEKSLDKEHRCIVRHENNKNGVDQEIIFPPIKTDVITMDPKDNCSKDANDTLLLQLTNTSAYYMYLLLLLKSVVYFAIITCCLLRRTAFCCNGEKSKRGRKKLLYIFKQPFMRPVQTTQEEDGCSCRFPEEEEGGCELRVKFSRSADAPAYQQGQNQLYNELNLGRREEYDVLDKRRGRDPEMGGKPQRRKNPQEGLYNELQKDKMAEAYSEIGMKGERRRGKGHDGLYQGLSTATKDTYDALHMQALPPR

SEQ ID NO: 31150 - protein, 303 aa, synthetic construct
KAGTYLCLLEKFFPDVIKIHWQEKKSNTILGSQEGNTMKTNDTYMKFSWLTVPEKSLDKEHRCIVRHENNKNGVDQEIIFPPIKTDVITMDPKDNCSKDANDTLLLQLTNTSAYYMYLLLLLKSVVYFAIITCCLLRRTAFCCNGEKSKRGRKKLLYIFKQPFMRPVQTTQEEDGCSCRFPEEEEGGCELRVKFSRSADAPAYQQGQNQLYNELNLGRREEYDVLDKRRGRDPEMGGKPQRRKNPQEGLYNELQKDKMAEAYSEIGMKGERRRGKGHDGLYQGLSTATKDTYDALHMQALPPR

SEQ ID NO: 31151 - protein, 302 aa, synthetic construct
AGTYLCLLEKFFPDVIKIHWQEKKSNTILGSQEGNTMKTNDTYMKFSWLTVPEKSLDKEHRCIVRHENNKNGVDQEIIFPPIKTDVITMDPKDNCSKDANDTLLLQLTNTSAYYMYLLLLLKSVVYFAIITCCLLRRTAFCCNGEKSKRGRKKLLYIFKQPFMRPVQTTQEEDGCSCRFPEEEEGGCELRVKFSRSADAPAYQQGQNQLYNELNLGRREEYDVLDKRRGRDPEMGGKPQRRKNPQEGLYNELQKDKMAEAYSEIGMKGERRRGKGHDGLYQGLSTATKDTYDALHMQALPPR

SEQ ID NO: 31152 - protein, 301 aa, synthetic construct
GTYLCLLEKFFPDVIKIHWQEKKSNTILGSQEGNTMKTNDTYMKFSWLTVPEKSLDKEHRCIVRHENNKNGVDQEIIFPPIKTDVITMDPKDNCSKDANDTLLLQLTNTSAYYMYLLLLLKSVVYFAIITCCLLRRTAFCCNGEKSKRGRKKLLYIFKQPFMRPVQTTQEEDGCSCRFPEEEEGGCELRVKFSRSADAPAYQQGQNQLYNELNLGRREEYDVLDKRRGRDPEMGGKPQRRKNPQEGLYNELQKDKMAEAYSEIGMKGERRRGKGHDGLYQGLSTATKDTYDALHMQALPPR

SEQ ID NO: 31153 - protein, 300 aa, synthetic construct
TYLCLLEKFFPDVIKIHWQEKKSNTILGSQEGNTMKTNDTYMKFSWLTVPEKSLDKEHRCIVRHENNKNGVDQEIIFPPIKTDVITMDPKDNCSKDANDTLLLQLTNTSAYYMYLLLLLKSVVYFAIITCCLLRRTAFCCNGEKSKRGRKKLLYIFKQPFMRPVQTTQEEDGCSCRFPEEEEGGCELRVKFSRSADAPAYQQGQNQLYNELNLGRREEYDVLDKRRGRDPEMGGKPQRRKNPQEGLYNELQKDKMAEAYSEIGMKGERRRGKGHDGLYQGLSTATKDTYDALHMQALPPR

SEQ ID NO: 31154 - protein, 299 aa, synthetic construct
YLCLLEKFFPDVIKIHWQEKKSNTILGSQEGNTMKTNDTYMKFSWLTVPEKSLDKEHRCIVRHENNKNGVDQEIIFPPIKTDVITMDPKDNCSKDANDTLLLQLTNTSAYYMYLLLLLKSVVYFAIITCCLLRRTAFCCNGEKSKRGRKKLLYIFKQPFMRPVQTTQEEDGCSCRFPEEEEGGCELRVKFSRSADAPAYQQGQNQLYNELNLGRREEYDVLDKRRGRDPEMGGKPQRRKNPQEGLYNELQKDKMAEAYSEIGMKGERRRGKGHDGLYQGLSTATKDTYDALHMQALPPR

SEQ ID NO: 31155 - protein, 298 aa, synthetic construct
LCLLEKFFPDVIKIHWQEKKSNTILGSQEGNTMKTNDTYMKFSWLTVPEKSLDKEHRCIVRHENNKNGVDQEIIFPPIKTDVITMDPKDNCSKDANDTLLLQLTNTSAYYMYLLLLLKSVVYFAIITCCLLRRTAFCCNGEKSKRGRKKLLYIFKQPFMRPVQTTQEEDGCSCRFPEEEEGGCELRVKFSRSADAPAYQQGQNQLYNELNLGRREEYDVLDKRRGRDPEMGGKPQRRKNPQEGLYNELQKDKMAEAYSEIGMKGERRRGKGHDGLYQGLSTATKDTYDALHMQALPPR

SEQ ID NO: 31156 - protein, 297 aa, synthetic construct
CLLEKFFPDVIKIHWQEKKSNTILGSQEGNTMKTNDTYMKFSWLTVPEKSLDKEHRCIVRHENNKNGVDQEIIFPPIKTDVITMDPKDNCSKDANDTLLLQLTNTSAYYMYLLLLLKSVVYFAIITCCLLRRTAFCCNGEKSKRGRKKLLYIFKQPFMRPVQTTQEEDGCSCRFPEEEEGGCELRVKFSRSADAPAYQQGQNQLYNELNLGRREEYDVLDKRRGRDPEMGGKPQRRKNPQEGLYNELQKDKMAEAYSEIGMKGERRRGKGHDGLYQGLSTATKDTYDALHMQALPPR

SEQ ID NO: 31157 - protein, 296 aa, synthetic construct
LLEKFFPDVIKIHWQEKKSNTILGSQEGNTMKTNDTYMKFSWLTVPEKSLDKEHRCIVRHENNKNGVDQEIIFPPIKTDVITMDPKDNCSKDANDTLLLQLTNTSAYYMYLLLLLKSVVYFAIITCCLLRRTAFCCNGEKSKRGRKKLLYIFKQPFMRPVQTTQEEDGCSCRFPEEEEGGCELRVKFSRSADAPAYQQGQNQLYNELNLGRREEYDVLDKRRGRDPEMGGKPQRRKNPQEGLYNELQKDKMAEAYSEIGMKGERRRGKGHDGLYQGLSTATKDTYDALHMQALPPR

SEQ ID NO: 31158 - protein, 295 aa, synthetic construct
LEKFFPDVIKIHWQEKKSNTILGSQEGNTMKTNDTYMKFSWLTVPEKSLDKEHRCIVRHENNKNGVDQEIIFPPIKTDVITMDPKDNCSKDANDTLLLQLTNTSAYYMYLLLLLKSVVYFAIITCCLLRRTAFCCNGEKSKRGRKKLLYIFKQPFMRPVQTTQEEDGCSCRFPEEEEGGCELRVKFSRSADAPAYQQGQNQLYNELNLGRREEYDVLDKRRGRDPEMGGKPQRRKNPQEGLYNELQKDKMAEAYSEIGMKGERRRGKGHDGLYQGLSTATKDTYDALHMQALPPR

SEQ ID NO: 31159 - protein, 294 aa, synthetic construct
EKFFPDVIKIHWQEKKSNTILGSQEGNTMKTNDTYMKFSWLTVPEKSLDKEHRCIVRHENNKNGVDQEIIFPPIKTDVITMDPKDNCSKDANDTLLLQLTNTSAYYMYLLLLLKSVVYFAIITCCLLRRTAFCCNGEKSKRGRKKLLYIFKQPFMRPVQTTQEEDGCSCRFPEEEEGGCELRVKFSRSADAPAYQQGQNQLYNELNLGRREEYDVLDKRRGRDPEMGGKPQRRKNPQEGLYNELQKDKMAEAYSEIGMKGERRRGKGHDGLYQGLSTATKDTYDALHMQALPPR

SEQ ID NO: 31160 - protein, 293 aa, synthetic construct
KFFPDVIKIHWQEKKSNTILGSQEGNTMKTNDTYMKFSWLTVPEKSLDKEHRCIVRHENNKNGVDQEIIFPPIKTDVITMDPKDNCSKDANDTLLLQLTNTSAYYMYLLLLLKSVVYFAIITCCLLRRTAFCCNGEKSKRGRKKLLYIFKQPFMRPVQTTQEEDGCSCRFPEEEEGGCELRVKFSRSADAPAYQQGQNQLYNELNLGRREEYDVLDKRRGRDPEMGGKPQRRKNPQEGLYNELQKDKMAEAYSEIGMKGERRRGKGHDGLYQGLSTATKDTYDALHMQALPPR

SEQ ID NO: 31161 - protein, 292 aa, synthetic construct
FFPDVIKIHWQEKKSNTILGSQEGNTMKTNDTYMKFSWLTVPEKSLDKEHRCIVRHENNKNGVDQEIIFPPIKTDVITMDPKDNCSKDANDTLLLQLTNTSAYYMYLLLLLKSVVYFAIITCCLLRRTAFCCNGEKSKRGRKKLLYIFKQPFMRPVQTTQEEDGCSCRFPEEEEGGCELRVKFSRSADAPAYQQGQNQLYNELNLGRREEYDVLDKRRGRDPEMGGKPQRRKNPQEGLYNELQKDKMAEAYSEIGMKGERRRGKGHDGLYQGLSTATKDTYDALHMQALPPR

SEQ ID NO: 31162 - protein, 291 aa, synthetic construct
FPDVIKIHWQEKKSNTILGSQEGNTMKTNDTYMKFSWLTVPEKSLDKEHRCIVRHENNKNGVDQEIIFPPIKTDVITMDPKDNCSKDANDTLLLQLTNTSAYYMYLLLLLKSVVYFAIITCCLLRRTAFCCNGEKSKRGRKKLLYIFKQPFMRPVQTTQEEDGCSCRFPEEEEGGCELRVKFSRSADAPAYQQGQNQLYNELNLGRREEYDVLDKRRGRDPEMGGKPQRRKNPQEGLYNELQKDKMAEAYSEIGMKGERRRGKGHDGLYQGLSTATKDTYDALHMQALPPR

SEQ ID NO: 31163 - protein, 290 aa, synthetic construct
PDVIKIHWQEKKSNTILGSQEGNTMKTNDTYMKFSWLTVPEKSLDKEHRCIVRHENNKNGVDQEIIFPPIKTDVITMDPKDNCSKDANDTLLLQLTNTSAYYMYLLLLLKSVVYFAIITCCLLRRTAFCCNGEKSKRGRKKLLYIFKQPFMRPVQTTQEEDGCSCRFPEEEEGGCELRVKFSRSADAPAYQQGQNQLYNELNLGRREEYDVLDKRRGRDPEMGGKPQRRKNPQEGLYNELQKDKMAEAYSEIGMKGERRRGKGHDGLYQGLSTATKDTYDALHMQALPPR

SEQ ID NO: 31164 - protein, 289 aa, synthetic construct
DVIKIHWQEKKSNTILGSQEGNTMKTNDTYMKFSWLTVPEKSLDKEHRCIVRHENNKNGVDQEIIFPPIKTDVITMDPKDNCSKDANDTLLLQLTNTSAYYMYLLLLLKSVVYFAIITCCLLRRTAFCCNGEKSKRGRKKLLYIFKQPFMRPVQTTQEEDGCSCRFPEEEEGGCELRVKFSRSADAPAYQQGQNQLYNELNLGRREEYDVLDKRRGRDPEMGGKPQRRKNPQEGLYNELQKDKMAEAYSEIGMKGERRRGKGHDGLYQGLSTATKDTYDALHMQALPPR

SEQ ID NO: 31165 - protein, 288 aa, synthetic construct
VIKIHWQEKKSNTILGSQEGNTMKTNDTYMKFSWLTVPEKSLDKEHRCIVRHENNKNGVDQEIIFPPIKTDVITMDPKDNCSKDANDTLLLQLTNTSAYYMYLLLLLKSVVYFAIITCCLLRRTAFCCNGEKSKRGRKKLLYIFKQPFMRPVQTTQEEDGCSCRFPEEEEGGCELRVKFSRSADAPAYQQGQNQLYNELNLGRREEYDVLDKRRGRDPEMGGKPQRRKNPQEGLYNELQKDKMAEAYSEIGMKGERRRGKGHDGLYQGLSTATKDTYDALHMQALPPR

SEQ ID NO: 31166 - protein, 287 aa, synthetic construct
IKIHWQEKKSNTILGSQEGNTMKTNDTYMKFSWLTVPEKSLDKEHRCIVRHENNKNGVDQEIIFPPIKTDVITMDPKDNCSKDANDTLLLQLTNTSAYYMYLLLLLKSVVYFAIITCCLLRRTAFCCNGEKSKRGRKKLLYIFKQPFMRPVQTTQEEDGCSCRFPEEEEGGCELRVKFSRSADAPAYQQGQNQLYNELNLGRREEYDVLDKRRGRDPEMGGKPQRRKNPQEGLYNELQKDKMAEAYSEIGMKGERRRGKGHDGLYQGLSTATKDTYDALHMQALPPR

SEQ ID NO: 31167 - protein, 286 aa, synthetic construct
KIHWQEKKSNTILGSQEGNTMKTNDTYMKFSWLTVPEKSLDKEHRCIVRHENNKNGVDQEIIFPPIKTDVITMDPKDNCSKDANDTLLLQLTNTSAYYMYLLLLLKSVVYFAIITCCLLRRTAFCCNGEKSKRGRKKLLYIFKQPFMRPVQTTQEEDGCSCRFPEEEEGGCELRVKFSRSADAPAYQQGQNQLYNELNLGRREEYDVLDKRRGRDPEMGGKPQRRKNPQEGLYNELQKDKMAEAYSEIGMKGERRRGKGHDGLYQGLSTATKDTYDALHMQALPPR

SEQ ID NO: 31168 - protein, 285 aa, synthetic construct
IHWQEKKSNTILGSQEGNTMKTNDTYMKFSWLTVPEKSLDKEHRCIVRHENNKNGVDQEIIFPPIKTDVITMDPKDNCSKDANDTLLLQLTNTSAYYMYLLLLLKSVVYFAIITCCLLRRTAFCCNGEKSKRGRKKLLYIFKQPFMRPVQTTQEEDGCSCRFPEEEEGGCELRVKFSRSADAPAYQQGQNQLYNELNLGRREEYDVLDKRRGRDPEMGGKPQRRKNPQEGLYNELQKDKMAEAYSEIGMKGERRRGKGHDGLYQGLSTATKDTYDALHMQALPPR

SEQ ID NO: 31169 - protein, 284 aa, synthetic construct
HWQEKKSNTILGSQEGNTMKTNDTYMKFSWLTVPEKSLDKEHRCIVRHENNKNGVDQEIIFPPIKTDVITMDPKDNCSKDANDTLLLQLTNTSAYYMYLLLLLKSVVYFAIITCCLLRRTAFCCNGEKSKRGRKKLLYIFKQPFMRPVQTTQEEDGCSCRFPEEEEGGCELRVKFSRSADAPAYQQGQNQLYNELNLGRREEYDVLDKRRGRDPEMGGKPQRRKNPQEGLYNELQKDKMAEAYSEIGMKGERRRGKGHDGLYQGLSTATKDTYDALHMQALPPR

SEQ ID NO: 31170 - protein, 283 aa, synthetic construct
WQEKKSNTILGSQEGNTMKTNDTYMKFSWLTVPEKSLDKEHRCIVRHENNKNGVDQEIIFPPIKTDVITMDPKDNCSKDANDTLLLQLTNTSAYYMYLLLLLKSVVYFAIITCCLLRRTAFCCNGEKSKRGRKKLLYIFKQPFMRPVQTTQEEDGCSCRFPEEEEGGCELRVKFSRSADAPAYQQGQNQLYNELNLGRREEYDVLDKRRGRDPEMGGKPQRRKNPQEGLYNELQKDKMAEAYSEIGMKGERRRGKGHDGLYQGLSTATKDTYDALHMQALPPR

SEQ ID NO: 31171 - protein, 282 aa, synthetic construct
QEKKSNTILGSQEGNTMKTNDTYMKFSWLTVPEKSLDKEHRCIVRHENNKNGVDQEIIFPPIKTDVITMDPKDNCSKDANDTLLLQLTNTSAYYMYLLLLLKSVVYFAIITCCLLRRTAFCCNGEKSKRGRKKLLYIFKQPFMRPVQTTQEEDGCSCRFPEEEEGGCELRVKFSRSADAPAYQQGQNQLYNELNLGRREEYDVLDKRRGRDPEMGGKPQRRKNPQEGLYNELQKDKMAEAYSEIGMKGERRRGKGHDGLYQGLSTATKDTYDALHMQALPPR

SEQ ID NO: 31172 - protein, 281 aa, synthetic construct
EKKSNTILGSQEGNTMKTNDTYMKFSWLTVPEKSLDKEHRCIVRHENNKNGVDQEIIFPPIKTDVITMDPKDNCSKDANDTLLLQLTNTSAYYMYLLLLLKSVVYFAIITCCLLRRTAFCCNGEKSKRGRKKLLYIFKQPFMRPVQTTQEEDGCSCRFPEEEEGGCELRVKFSRSADAPAYQQGQNQLYNELNLGRREEYDVLDKRRGRDPEMGGKPQRRKNPQEGLYNELQKDKMAEAYSEIGMKGERRRGKGHDGLYQGLSTATKDTYDALHMQALPPR

SEQ ID NO: 31173 - protein, 280 aa, synthetic construct
KKSNTILGSQEGNTMKTNDTYMKFSWLTVPEKSLDKEHRCIVRHENNKNGVDQEIIFPPIKTDVITMDPKDNCSKDANDTLLLQLTNTSAYYMYLLLLLKSVVYFAIITCCLLRRTAFCCNGEKSKRGRKKLLYIFKQPFMRPVQTTQEEDGCSCRFPEEEEGGCELRVKFSRSADAPAYQQGQNQLYNELNLGRREEYDVLDKRRGRDPEMGGKPQRRKNPQEGLYNELQKDKMAEAYSEIGMKGERRRGKGHDGLYQGLSTATKDTYDALHMQALPPR

SEQ ID NO: 31174 - protein, 279 aa, synthetic construct
KSNTILGSQEGNTMKTNDTYMKFSWLTVPEKSLDKEHRCIVRHENNKNGVDQEIIFPPIKTDVITMDPKDNCSKDANDTLLLQLTNTSAYYMYLLLLLKSVVYFAIITCCLLRRTAFCCNGEKSKRGRKKLLYIFKQPFMRPVQTTQEEDGCSCRFPEEEEGGCELRVKFSRSADAPAYQQGQNQLYNELNLGRREEYDVLDKRRGRDPEMGGKPQRRKNPQEGLYNELQKDKMAEAYSEIGMKGERRRGKGHDGLYQGLSTATKDTYDALHMQALPPR

SEQ ID NO: 31175 - protein, 278 aa, synthetic construct
SNTILGSQEGNTMKTNDTYMKFSWLTVPEKSLDKEHRCIVRHENNKNGVDQEIIFPPIKTDVITMDPKDNCSKDANDTLLLQLTNTSAYYMYLLLLLKSVVYFAIITCCLLRRTAFCCNGEKSKRGRKKLLYIFKQPFMRPVQTTQEEDGCSCRFPEEEEGGCELRVKFSRSADAPAYQQGQNQLYNELNLGRREEYDVLDKRRGRDPEMGGKPQRRKNPQEGLYNELQKDKMAEAYSEIGMKGERRRGKGHDGLYQGLSTATKDTYDALHMQALPPR

SEQ ID NO: 31176 - protein, 277 aa, synthetic construct
NTILGSQEGNTMKTNDTYMKFSWLTVPEKSLDKEHRCIVRHENNKNGVDQEIIFPPIKTDVITMDPKDNCSKDANDTLLLQLTNTSAYYMYLLLLLKSVVYFAIITCCLLRRTAFCCNGEKSKRGRKKLLYIFKQPFMRPVQTTQEEDGCSCRFPEEEEGGCELRVKFSRSADAPAYQQGQNQLYNELNLGRREEYDVLDKRRGRDPEMGGKPQRRKNPQEGLYNELQKDKMAEAYSEIGMKGERRRGKGHDGLYQGLSTATKDTYDALHMQALPPR

SEQ ID NO: 31177 - protein, 276 aa, synthetic construct
TILGSQEGNTMKTNDTYMKFSWLTVPEKSLDKEHRCIVRHENNKNGVDQEIIFPPIKTDVITMDPKDNCSKDANDTLLLQLTNTSAYYMYLLLLLKSVVYFAIITCCLLRRTAFCCNGEKSKRGRKKLLYIFKQPFMRPVQTTQEEDGCSCRFPEEEEGGCELRVKFSRSADAPAYQQGQNQLYNELNLGRREEYDVLDKRRGRDPEMGGKPQRRKNPQEGLYNELQKDKMAEAYSEIGMKGERRRGKGHDGLYQGLSTATKDTYDALHMQALPPR

SEQ ID NO: 31178 - protein, 275 aa, synthetic construct
ILGSQEGNTMKTNDTYMKFSWLTVPEKSLDKEHRCIVRHENNKNGVDQEIIFPPIKTDVITMDPKDNCSKDANDTLLLQLTNTSAYYMYLLLLLKSVVYFAIITCCLLRRTAFCCNGEKSKRGRKKLLYIFKQPFMRPVQTTQEEDGCSCRFPEEEEGGCELRVKFSRSADAPAYQQGQNQLYNELNLGRREEYDVLDKRRGRDPEMGGKPQRRKNPQEGLYNELQKDKMAEAYSEIGMKGERRRGKGHDGLYQGLSTATKDTYDALHMQALPPR

SEQ ID NO: 31179 - protein, 274 aa, synthetic construct
LGSQEGNTMKTNDTYMKFSWLTVPEKSLDKEHRCIVRHENNKNGVDQEIIFPPIKTDVITMDPKDNCSKDANDTLLLQLTNTSAYYMYLLLLLKSVVYFAIITCCLLRRTAFCCNGEKSKRGRKKLLYIFKQPFMRPVQTTQEEDGCSCRFPEEEEGGCELRVKFSRSADAPAYQQGQNQLYNELNLGRREEYDVLDKRRGRDPEMGGKPQRRKNPQEGLYNELQKDKMAEAYSEIGMKGERRRGKGHDGLYQGLSTATKDTYDALHMQALPPR

SEQ ID NO: 31180 - protein, 273 aa, synthetic construct
GSQEGNTMKTNDTYMKFSWLTVPEKSLDKEHRCIVRHENNKNGVDQEIIFPPIKTDVITMDPKDNCSKDANDTLLLQLTNTSAYYMYLLLLLKSVVYFAIITCCLLRRTAFCCNGEKSKRGRKKLLYIFKQPFMRPVQTTQEEDGCSCRFPEEEEGGCELRVKFSRSADAPAYQQGQNQLYNELNLGRREEYDVLDKRRGRDPEMGGKPQRRKNPQEGLYNELQKDKMAEAYSEIGMKGERRRGKGHDGLYQGLSTATKDTYDALHMQALPPR

SEQ ID NO: 31181 - protein, 272 aa, synthetic construct
SQEGNTMKTNDTYMKFSWLTVPEKSLDKEHRCIVRHENNKNGVDQEIIFPPIKTDVITMDPKDNCSKDANDTLLLQLTNTSAYYMYLLLLLKSVVYFAIITCCLLRRTAFCCNGEKSKRGRKKLLYIFKQPFMRPVQTTQEEDGCSCRFPEEEEGGCELRVKFSRSADAPAYQQGQNQLYNELNLGRREEYDVLDKRRGRDPEMGGKPQRRKNPQEGLYNELQKDKMAEAYSEIGMKGERRRGKGHDGLYQGLSTATKDTYDALHMQALPPR

SEQ ID NO: 31182 - protein, 271 aa, synthetic construct
QEGNTMKTNDTYMKFSWLTVPEKSLDKEHRCIVRHENNKNGVDQEIIFPPIKTDVITMDPKDNCSKDANDTLLLQLTNTSAYYMYLLLLLKSVVYFAIITCCLLRRTAFCCNGEKSKRGRKKLLYIFKQPFMRPVQTTQEEDGCSCRFPEEEEGGCELRVKFSRSADAPAYQQGQNQLYNELNLGRREEYDVLDKRRGRDPEMGGKPQRRKNPQEGLYNELQKDKMAEAYSEIGMKGERRRGKGHDGLYQGLSTATKDTYDALHMQALPPR

SEQ ID NO: 31183 - protein, 270 aa, synthetic construct
EGNTMKTNDTYMKFSWLTVPEKSLDKEHRCIVRHENNKNGVDQEIIFPPIKTDVITMDPKDNCSKDANDTLLLQLTNTSAYYMYLLLLLKSVVYFAIITCCLLRRTAFCCNGEKSKRGRKKLLYIFKQPFMRPVQTTQEEDGCSCRFPEEEEGGCELRVKFSRSADAPAYQQGQNQLYNELNLGRREEYDVLDKRRGRDPEMGGKPQRRKNPQEGLYNELQKDKMAEAYSEIGMKGERRRGKGHDGLYQGLSTATKDTYDALHMQALPPR

SEQ ID NO: 31184 - protein, 269 aa, synthetic construct
GNTMKTNDTYMKFSWLTVPEKSLDKEHRCIVRHENNKNGVDQEIIFPPIKTDVITMDPKDNCSKDANDTLLLQLTNTSAYYMYLLLLLKSVVYFAIITCCLLRRTAFCCNGEKSKRGRKKLLYIFKQPFMRPVQTTQEEDGCSCRFPEEEEGGCELRVKFSRSADAPAYQQGQNQLYNELNLGRREEYDVLDKRRGRDPEMGGKPQRRKNPQEGLYNELQKDKMAEAYSEIGMKGERRRGKGHDGLYQGLSTATKDTYDALHMQALPPR

SEQ ID NO: 31185 - protein, 268 aa, synthetic construct
NTMKTNDTYMKFSWLTVPEKSLDKEHRCIVRHENNKNGVDQEIIFPPIKTDVITMDPKDNCSKDANDTLLLQLTNTSAYYMYLLLLLKSVVYFAIITCCLLRRTAFCCNGEKSKRGRKKLLYIFKQPFMRPVQTTQEEDGCSCRFPEEEEGGCELRVKFSRSADAPAYQQGQNQLYNELNLGRREEYDVLDKRRGRDPEMGGKPQRRKNPQEGLYNELQKDKMAEAYSEIGMKGERRRGKGHDGLYQGLSTATKDTYDALHMQALPPR

SEQ ID NO: 31186 - protein, 267 aa, synthetic construct
TMKTNDTYMKFSWLTVPEKSLDKEHRCIVRHENNKNGVDQEIIFPPIKTDVITMDPKDNCSKDANDTLLLQLTNTSAYYMYLLLLLKSVVYFAIITCCLLRRTAFCCNGEKSKRGRKKLLYIFKQPFMRPVQTTQEEDGCSCRFPEEEEGGCELRVKFSRSADAPAYQQGQNQLYNELNLGRREEYDVLDKRRGRDPEMGGKPQRRKNPQEGLYNELQKDKMAEAYSEIGMKGERRRGKGHDGLYQGLSTATKDTYDALHMQALPPR

SEQ ID NO: 31187 - protein, 266 aa, synthetic construct
MKTNDTYMKFSWLTVPEKSLDKEHRCIVRHENNKNGVDQEIIFPPIKTDVITMDPKDNCSKDANDTLLLQLTNTSAYYMYLLLLLKSVVYFAIITCCLLRRTAFCCNGEKSKRGRKKLLYIFKQPFMRPVQTTQEEDGCSCRFPEEEEGGCELRVKFSRSADAPAYQQGQNQLYNELNLGRREEYDVLDKRRGRDPEMGGKPQRRKNPQEGLYNELQKDKMAEAYSEIGMKGERRRGKGHDGLYQGLSTATKDTYDALHMQALPPR

SEQ ID NO: 31188 - protein, 265 aa, synthetic construct
KTNDTYMKFSWLTVPEKSLDKEHRCIVRHENNKNGVDQEIIFPPIKTDVITMDPKDNCSKDANDTLLLQLTNTSAYYMYLLLLLKSVVYFAIITCCLLRRTAFCCNGEKSKRGRKKLLYIFKQPFMRPVQTTQEEDGCSCRFPEEEEGGCELRVKFSRSADAPAYQQGQNQLYNELNLGRREEYDVLDKRRGRDPEMGGKPQRRKNPQEGLYNELQKDKMAEAYSEIGMKGERRRGKGHDGLYQGLSTATKDTYDALHMQALPPR

SEQ ID NO: 31189 - protein, 264 aa, synthetic construct
TNDTYMKFSWLTVPEKSLDKEHRCIVRHENNKNGVDQEIIFPPIKTDVITMDPKDNCSKDANDTLLLQLTNTSAYYMYLLLLLKSVVYFAIITCCLLRRTAFCCNGEKSKRGRKKLLYIFKQPFMRPVQTTQEEDGCSCRFPEEEEGGCELRVKFSRSADAPAYQQGQNQLYNELNLGRREEYDVLDKRRGRDPEMGGKPQRRKNPQEGLYNELQKDKMAEAYSEIGMKGERRRGKGHDGLYQGLSTATKDTYDALHMQALPPR

SEQ ID NO: 31190 - protein, 263 aa, synthetic construct
NDTYMKFSWLTVPEKSLDKEHRCIVRHENNKNGVDQEIIFPPIKTDVITMDPKDNCSKDANDTLLLQLTNTSAYYMYLLLLLKSVVYFAIITCCLLRRTAFCCNGEKSKRGRKKLLYIFKQPFMRPVQTTQEEDGCSCRFPEEEEGGCELRVKFSRSADAPAYQQGQNQLYNELNLGRREEYDVLDKRRGRDPEMGGKPQRRKNPQEGLYNELQKDKMAEAYSEIGMKGERRRGKGHDGLYQGLSTATKDTYDALHMQALPPR
